United States Patent Application Publication US 2015/0141320 A1 - sequence listing, part 6

SEQ ID NO: 19002 - DNA, 15 bp, Homo sapiens
catcaccatccctca

SEQ ID NO: 19003 - DNA, 15 bp, Homo sapiens
tcatcaccatccctc

SEQ ID NO: 19004 - DNA, 15 bp, Homo sapiens
ctcatcaccatccct

SEQ ID NO: 19005 - DNA, 15 bp, Homo sapiens
cctcatcaccatccc

SEQ ID NO: 19006 - DNA, 15 bp, Homo sapiens
tcctcatcaccatcc

SEQ ID NO: 19007 - DNA, 15 bp, Homo sapiens
ttcctcatcaccatc

SEQ ID NO: 19008 - DNA, 15 bp, Homo sapiens
cttcctcatcaccat

SEQ ID NO: 19009 - DNA, 15 bp, Homo sapiens
gcttcctcatcacca

SEQ ID NO: 19010 - DNA, 15 bp, Homo sapiens
cgcttcctcatcacc

SEQ ID NO: 19011 - DNA, 15 bp, Homo sapiens
acgcttcctcatcac

SEQ ID NO: 19012 - DNA, 15 bp, Homo sapiens
cacgcttcctcatca

SEQ ID NO: 19013 - DNA, 15 bp, Homo sapiens
ccacgcttcctcatc

SEQ ID NO: 19014 - DNA, 15 bp, Homo sapiens
tccacgcttcctcat

SEQ ID NO: 19015 - DNA, 15 bp, Homo sapiens
gtccacgcttcctca

SEQ ID NO: 19016 - DNA, 15 bp, Homo sapiens
agtccacgcttcctc

SEQ ID NO: 19017 - DNA, 15 bp, Homo sapiens
cagtccacgcttcct

SEQ ID NO: 19018 - DNA, 15 bp, Homo sapiens
gcagtccacgcttcc

SEQ ID NO: 19019 - DNA, 15 bp, Homo sapiens
ggcagtccacgcttc

SEQ ID NO: 19020 - DNA, 15 bp, Homo sapiens
gggcagtccacgctt

SEQ ID NO: 19021 - DNA, 15 bp, Homo sapiens
agggcagtccacgct

SEQ ID NO: 19022 - DNA, 15 bp, Homo sapiens
tagggcagtccacgc

SEQ ID NO: 19023 - DNA, 15 bp, Homo sapiens
gtagggcagtccacg

SEQ ID NO: 19024 - DNA, 15 bp, Homo sapiens
ggtagggcagtccac

SEQ ID NO: 19025 - DNA, 15 bp, Homo sapiens
gggtagggcagtcca

SEQ ID NO: 19026 - DNA, 15 bp, Homo sapiens
tgggtagggcagtcc

SEQ ID NO: 19027 - DNA, 15 bp, Homo sapiens
gtgggtagggcagtc

SEQ ID NO: 19028 - DNA, 15 bp, Homo sapiens
ggtgggtagggcagt

SEQ ID NO: 19029 - DNA, 15 bp, Homo sapiens
aggtgggtagggcag

SEQ ID NO: 19030 - DNA, 15 bp, Homo sapiens
taggtgggtagggca

SEQ ID NO: 19031 - DNA, 15 bp, Homo sapiens
ataggtgggtagggc

SEQ ID NO: 19032 - DNA, 15 bp, Homo sapiens
aataggtgggtaggg

SEQ ID NO: 19033 - DNA, 15 bp, Homo sapiens
caataggtgggtagg

SEQ ID NO: 19034 - DNA, 15 bp, Homo sapiens
ccaataggtgggtag

SEQ ID NO: 19035 - DNA, 15 bp, Homo sapiens
tccaataggtgggta

SEQ ID NO: 19036 - DNA, 15 bp, Homo sapiens
ttccaataggtgggt

SEQ ID NO: 19037 - DNA, 15 bp, Homo sapiens
tttccaataggtggg

SEQ ID NO: 19038 - DNA, 15 bp, Homo sapiens
ttttccaataggtgg

SEQ ID NO: 19039 - DNA, 15 bp, Homo sapiens
gttttccaataggtg

SEQ ID NO: 19040 - DNA, 15 bp, Homo sapiens
ggttttccaataggt

SEQ ID NO: 19041 - DNA, 15 bp, Homo sapiens
aggttttccaatagg

SEQ ID NO: 19042 - DNA, 15 bp, Homo sapiens
caggttttccaatag

SEQ ID NO: 19043 - DNA, 15 bp, Homo sapiens
ccaggttttccaata

SEQ ID NO: 19044 - DNA, 15 bp, Homo sapiens
cccaggttttccaat

SEQ ID NO: 19045 - DNA, 15 bp, Homo sapiens
tcccaggttttccaa

SEQ ID NO: 19046 - DNA, 15 bp, Homo sapiens
ctcccaggttttcca

SEQ ID NO: 19047 - DNA, 15 bp, Homo sapiens
actcccaggttttcc

SEQ ID NO: 19048 - DNA, 15 bp, Homo sapiens
aactcccaggttttc

SEQ ID NO: 19049 - DNA, 15 bp, Homo sapiens
gaactcccaggtttt

SEQ ID NO: 19050 - DNA, 15 bp, Homo sapiens
agaactcccaggttt

SEQ ID NO: 19051 - DNA, 15 bp, Homo sapiens
cagaactcccaggtt

SEQ ID NO: 19052 - DNA, 15 bp, Homo sapiens
tcagaactcccaggt

SEQ ID NO: 19053 - DNA, 15 bp, Homo sapiens
ctcagaactcccagg

SEQ ID NO: 19054 - DNA, 15 bp, Homo sapiens
cctcagaactcccag

SEQ ID NO: 19055 - DNA, 15 bp, Homo sapiens
tcctcagaactccca

SEQ ID NO: 19056 - DNA, 15 bp, Homo sapiens
ctcctcagaactccc

SEQ ID NO: 19057 - DNA, 15 bp, Homo sapiens
gctcctcagaactcc

SEQ ID NO: 19058 - DNA, 15 bp, Homo sapiens
tgctcctcagaactc

SEQ ID NO: 19059 - DNA, 15 bp, Homo sapiens
ttgctcctcagaact

SEQ ID NO: 19060 - DNA, 15 bp, Homo sapiens
cttgctcctcagaac

SEQ ID NO: 19061 - DNA, 15 bp, Homo sapiens
tcttgctcctcagaa

SEQ ID NO: 19062 - DNA, 15 bp, Homo sapiens
ttcttgctcctcaga

SEQ ID NO: 19063 - DNA, 15 bp, Homo sapiens
cttcttgctcctcag

SEQ ID NO: 19064 - DNA, 15 bp, Homo sapiens
gcttcttgctcctca

SEQ ID NO: 19065 - DNA, 15 bp, Homo sapiens
ggcttcttgctcctc

SEQ ID NO: 19066 - DNA, 15 bp, Homo sapiens
aggcttcttgctcct

SEQ ID NO: 19067 - DNA, 15 bp, Homo sapiens
aaggcttcttgctcc

SEQ ID NO: 19068 - DNA, 15 bp, Homo sapiens
taaggcttcttgctc

SEQ ID NO: 19069 - DNA, 15 bp, Homo sapiens
ctaaggcttcttgct

SEQ ID NO: 19070 - DNA, 15 bp, Homo sapiens
actaaggcttcttgc

SEQ ID NO: 19071 - DNA, 15 bp, Homo sapiens
gactaaggcttcttg

SEQ ID NO: 19072 - DNA, 15 bp, Homo sapiens
tgactaaggcttctt

SEQ ID NO: 19073 - DNA, 15 bp, Homo sapiens
ttgactaaggcttct

SEQ ID NO: 19074 - DNA, 15 bp, Homo sapiens
tttgactaaggcttc

SEQ ID NO: 19075 - DNA, 15 bp, Homo sapiens
ctttgactaaggctt

SEQ ID NO: 19076 - DNA, 15 bp, Homo sapiens
actttgactaaggct

SEQ ID NO: 19077 - DNA, 15 bp, Homo sapiens
gactttgactaaggc

SEQ ID NO: 19078 - DNA, 15 bp, Homo sapiens
tgactttgactaagg

SEQ ID NO: 19079 - DNA, 15 bp, Homo sapiens
ttgactttgactaag

SEQ ID NO: 19080 - DNA, 15 bp, Homo sapiens
gttgactttgactaa

SEQ ID NO: 19081 - DNA, 15 bp, Homo sapiens
agttgactttgacta

SEQ ID NO: 19082 - DNA, 15 bp, Homo sapiens
gagttgactttgact

SEQ ID NO: 19083 - DNA, 15 bp, Homo sapiens
tgagttgactttgac

SEQ ID NO: 19084 - DNA, 15 bp, Homo sapiens
ttgagttgactttga

SEQ ID NO: 19085 - DNA, 15 bp, Homo sapiens
tttgagttgactttg

SEQ ID NO: 19086 - DNA, 15 bp, Homo sapiens
ctttgagttgacttt

SEQ ID NO: 19087 - DNA, 15 bp, Homo sapiens
tctttgagttgactt

SEQ ID NO: 19088 - DNA, 15 bp, Homo sapiens
atctttgagttgact

SEQ ID NO: 19089 - DNA, 15 bp, Homo sapiens
aatctttgagttgac

SEQ ID NO: 19090 - DNA, 15 bp, Homo sapiens
gaatctttgagttga

SEQ ID NO: 19091 - DNA, 15 bp, Homo sapiens
tgaatctttgagttg

SEQ ID NO: 19092 - DNA, 15 bp, Homo sapiens
ttgaatctttgagtt

SEQ ID NO: 19093 - DNA, 15 bp, Homo sapiens
cttgaatctttgagt

SEQ ID NO: 19094 - DNA, 15 bp, Homo sapiens
gcttgaatctttgag

SEQ ID NO: 19095 - DNA, 15 bp, Homo sapiens
ggcttgaatctttga

SEQ ID NO: 19096 - DNA, 15 bp, Homo sapiens
tggcttgaatctttg

SEQ ID NO: 19097 - DNA, 15 bp, Homo sapiens
ttggcttgaatcttt

SEQ ID NO: 19098 - DNA, 15 bp, Homo sapiens
cttggcttgaatctt

SEQ ID NO: 19099 - DNA, 15 bp, Homo sapiens
ccttggcttgaatct

SEQ ID NO: 19100 - DNA, 15 bp, Homo sapiens
accttggcttgaatc

SEQ ID NO: 19101 - DNA, 15 bp, Homo sapiens
caccttggcttgaat

SEQ ID NO: 19102 - DNA, 15 bp, Homo sapiens
tcaccttggcttgaa

SEQ ID NO: 19103 - DNA, 15 bp, Homo sapiens
gtcaccttggcttga

SEQ ID NO: 19104 - DNA, 15 bp, Homo sapiens
agtcaccttggcttg

SEQ ID NO: 19105 - DNA, 15 bp, Homo sapiens
tagtcaccttggctt

SEQ ID NO: 19106 - DNA, 15 bp, Homo sapiens
ttagtcaccttggct

SEQ ID NO: 19107 - DNA, 15 bp, Homo sapiens
cttagtcaccttggc

SEQ ID NO: 19108 - DNA, 15 bp, Homo sapiens
tcttagtcaccttgg

SEQ ID NO: 19109 - DNA, 15 bp, Homo sapiens
ctcttagtcaccttg

SEQ ID NO: 19110 - DNA, 15 bp, Homo sapiens
tctcttagtcacctt

SEQ ID NO: 19111 - DNA, 15 bp, Homo sapiens
ttctcttagtcacct

SEQ ID NO: 19112 - DNA, 15 bp, Homo sapiens
attctcttagtcacc

SEQ ID NO: 19113 - DNA, 15 bp, Homo sapiens
cattctcttagtcac

SEQ ID NO: 19114 - DNA, 15 bp, Homo sapiens
ccattctcttagtca

SEQ ID NO: 19115 - DNA, 15 bp, Homo sapiens
gccattctcttagtc

SEQ ID NO: 19116 - DNA, 15 bp, Homo sapiens
cgccattctcttagt

SEQ ID NO: 19117 - DNA, 15 bp, Homo sapiens
ccgccattctcttag

SEQ ID NO: 19118 - DNA, 15 bp, Homo sapiens
accgccattctctta

SEQ ID NO: 19119 - DNA, 15 bp, Homo sapiens
gaccgccattctctt

SEQ ID NO: 19120 - DNA, 15 bp, Homo sapiens
ggaccgccattctct

SEQ ID NO: 19121 - DNA, 15 bp, Homo sapiens
tggaccgccattctc

SEQ ID NO: 19122 - DNA, 15 bp, Homo sapiens
ctggaccgccattct

SEQ ID NO: 19123 - DNA, 15 bp, Homo sapiens
tctggaccgccattc

SEQ ID NO: 19124 - DNA, 15 bp, Homo sapiens
ttctggaccgccatt

SEQ ID NO: 19125 - DNA, 15 bp, Homo sapiens
tttctggaccgccat

SEQ ID NO: 19126 - DNA, 15 bp, Homo sapiens
ttttctggaccgcca

SEQ ID NO: 19127 - DNA, 15 bp, Homo sapiens
cttttctggaccgcc

SEQ ID NO: 19128 - DNA, 15 bp, Homo sapiens
ccttttctggaccgc

SEQ ID NO: 19129 - DNA, 15 bp, Homo sapiens
accttttctggaccg

SEQ ID NO: 19130 - DNA, 15 bp, Homo sapiens
gaccttttctggacc

SEQ ID NO: 19131 - DNA, 15 bp, Homo sapiens
tgaccttttctggac

SEQ ID NO: 19132 - DNA, 15 bp, Homo sapiens
atgaccttttctgga

SEQ ID NO: 19133 - DNA, 15 bp, Homo sapiens
catgaccttttctgg

SEQ ID NO: 19134 - DNA, 15 bp, Homo sapiens
ccatgaccttttctg

SEQ ID NO: 19135 - DNA, 15 bp, Homo sapiens
cccatgaccttttct

SEQ ID NO: 19136 - DNA, 15 bp, Homo sapiens
tcccatgaccttttc

SEQ ID NO: 19137 - DNA, 15 bp, Homo sapiens
ctcccatgacctttt

SEQ ID NO: 19138 - DNA, 15 bp, Homo sapiens
tctcccatgaccttt

SEQ ID NO: 19139 - DNA, 15 bp, Homo sapiens
ttctcccatgacctt

SEQ ID NO: 19140 - DNA, 15 bp, Homo sapiens
attctcccatgacct

SEQ ID NO: 19141 - DNA, 15 bp, Homo sapiens
gattctcccatgacc

SEQ ID NO: 19142 - DNA, 15 bp, Homo sapiens
agattctcccatgac

SEQ ID NO: 19143 - DNA, 15 bp, Homo sapiens
cagattctcccatga

SEQ ID NO: 19144 - DNA, 15 bp, Homo sapiens
tcagattctcccatg

SEQ ID NO: 19145 - DNA, 15 bp, Homo sapiens
ttcagattctcccat

SEQ ID NO: 19146 - DNA, 15 bp, Homo sapiens
cttcagattctccca

SEQ ID NO: 19147 - DNA, 15 bp, Homo sapiens
ccttcagattctccc

SEQ ID NO: 19148 - DNA, 15 bp, Homo sapiens
gccttcagattctcc

SEQ ID NO: 19149 - DNA, 15 bp, Homo sapiens
tgccttcagattctc

SEQ ID NO: 19150 - DNA, 15 bp, Homo sapiens
ctgccttcagattct

SEQ ID NO: 19151 - DNA, 15 bp, Homo sapiens
tctgccttcagattc

SEQ ID NO: 19152 - DNA, 15 bp, Homo sapiens
atctgccttcagatt

SEQ ID NO: 19153 - DNA, 15 bp, Homo sapiens
catctgccttcagat

SEQ ID NO: 19154 - DNA, 15 bp, Homo sapiens
acatctgccttcaga

SEQ ID NO: 19155 - DNA, 15 bp, Homo sapiens
aacatctgccttcag

SEQ ID NO: 19156 - DNA, 15 bp, Homo sapiens
caacatctgccttca

SEQ ID NO: 19157 - DNA, 15 bp, Homo sapiens
acaacatctgccttc

SEQ ID NO: 19158 - DNA, 15 bp, Homo sapiens
aacaacatctgcctt

SEQ ID NO: 19159 - DNA, 15 bp, Homo sapiens
aaacaacatctgcct

SEQ ID NO: 19160 - DNA, 15 bp, Homo sapiens
aaaacaacatctgcc

SEQ ID NO: 19161 - DNA, 15 bp, Homo sapiens
caaaacaacatctgc

SEQ ID NO: 19162 - DNA, 15 bp, Homo sapiens
ccaaaacaacatctg

SEQ ID NO: 19163 - DNA, 15 bp, Homo sapiens
cccaaaacaacatct

SEQ ID NO: 19164 - DNA, 15 bp, Homo sapiens
tcccaaaacaacatc

SEQ ID NO: 19165 - DNA, 15 bp, Homo sapiens
ttcccaaaacaacat

SEQ ID NO: 19166 - DNA, 15 bp, Homo sapiens
cttcccaaaacaaca

SEQ ID NO: 19167 - DNA, 15 bp, Homo sapiens
tcttcccaaaacaac

SEQ ID NO: 19168 - DNA, 15 bp, Homo sapiens
atcttcccaaaacaa

SEQ ID NO: 19169 - DNA, 15 bp, Homo sapiens
catcttcccaaaaca

SEQ ID NO: 19170 - DNA, 15 bp, Homo sapiens
tcatcttcccaaaac

SEQ ID NO: 19171 - DNA, 15 bp, Homo sapiens
ttcatcttcccaaaa

SEQ ID NO: 19172 - DNA, 15 bp, Homo sapiens
cttcatcttcccaaa

SEQ ID NO: 19173 - DNA, 15 bp, Homo sapiens
tcttcatcttcccaa

SEQ ID NO: 19174 - DNA, 15 bp, Homo sapiens
ttcttcatcttccca

SEQ ID NO: 19175 - DNA, 15 bp, Homo sapiens
gttcttcatcttccc

SEQ ID NO: 19176 - DNA, 15 bp, Homo sapiens
ggttcttcatcttcc

SEQ ID NO: 19177 - DNA, 15 bp, Homo sapiens
aggttcttcatcttc

SEQ ID NO: 19178 - DNA, 15 bp, Homo sapiens
taggttcttcatctt

SEQ ID NO: 19179 - DNA, 15 bp, Homo sapiens
ttaggttcttcatct

SEQ ID NO: 19180 - DNA, 15 bp, Homo sapiens
cttaggttcttcatc

SEQ ID NO: 19181 - DNA, 15 bp, Homo sapiens
gcttaggttcttcat

SEQ ID NO: 19182 - DNA, 15 bp, Homo sapiens
ggcttaggttcttca

SEQ ID NO: 19183 - DNA, 15 bp, Homo sapiens
cggcttaggttcttc

SEQ ID NO: 19184 - DNA, 15 bp, Homo sapiens
gcggcttaggttctt

SEQ ID NO: 19185 - DNA, 15 bp, Homo sapiens
agcggcttaggttct

SEQ ID NO: 19186 - DNA, 15 bp, Homo sapiens
aagcggcttaggttc

SEQ ID NO: 19187 - DNA, 15 bp, Homo sapiens
gaagcggcttaggtt

SEQ ID NO: 19188 - DNA, 15 bp, Homo sapiens
ggaagcggcttaggt

SEQ ID NO: 19189 - DNA, 15 bp, Homo sapiens
tggaagcggcttagg

SEQ ID NO: 19190 - DNA, 15 bp, Homo sapiens
ctggaagcggcttag

SEQ ID NO: 19191 - DNA, 15 bp, Homo sapiens
tctggaagcggctta

SEQ ID NO: 19192 - DNA, 15 bp, Homo sapiens
ttctggaagcggctt

SEQ ID NO: 19193 - DNA, 15 bp, Homo sapiens
tttctggaagcggct

SEQ ID NO: 19194 - DNA, 15 bp, Homo sapiens
atttctggaagcggc

SEQ ID NO: 19195 - DNA, 15 bp, Homo sapiens
aatttctggaagcgg

SEQ ID NO: 19196 - DNA, 15 bp, Homo sapiens
gaatttctggaagcg

SEQ ID NO: 19197 - DNA, 15 bp, Homo sapiens
tgaatttctggaagc

SEQ ID NO: 19198 - DNA, 15 bp, Homo sapiens
atgaatttctggaag

SEQ ID NO: 19199 - DNA, 15 bp, Homo sapiens
catgaatttctggaa

SEQ ID NO: 19200 - DNA, 15 bp, Homo sapiens
tcatgaatttctgga

SEQ ID NO: 19201 - DNA, 15 bp, Homo sapiens
ctcatgaatttctgg

SEQ ID NO: 19202 - DNA, 15 bp, Homo sapiens
cctcatgaatttctg

SEQ ID NO: 19203 - DNA, 15 bp, Homo sapiens
tcctcatgaatttct

SEQ ID NO: 19204 - DNA, 15 bp, Homo sapiens
ttcctcatgaatttc

SEQ ID NO: 19205 - DNA, 15 bp, Homo sapiens
tttcctcatgaattt

SEQ ID NO: 19206 - DNA, 15 bp, Homo sapiens
atttcctcatgaatt

SEQ ID NO: 19207 - DNA, 15 bp, Homo sapiens
catttcctcatgaat

SEQ ID NO: 19208 - DNA, 15 bp, Homo sapiens
gcatttcctcatgaa

SEQ ID NO: 19209 - DNA, 15 bp, Homo sapiens
ggcatttcctcatga

SEQ ID NO: 19210 - DNA, 15 bp, Homo sapiens
gggcatttcctcatg

SEQ ID NO: 19211 - DNA, 15 bp, Homo sapiens
ggggcatttcctcat

SEQ ID NO: 19212 - DNA, 15 bp, Homo sapiens
cggggcatttcctca

SEQ ID NO: 19213 - DNA, 15 bp, Homo sapiens
acggggcatttcctc

SEQ ID NO: 19214 - DNA, 15 bp, Homo sapiens
cacggggcatttcct

SEQ ID NO: 19215 - DNA, 15 bp, Homo sapiens
ccacggggcatttcc

SEQ ID NO: 19216 - DNA, 15 bp, Homo sapiens
tccacggggcatttc

SEQ ID NO: 19217 - DNA, 15 bp, Homo sapiens
gtccacggggcattt

SEQ ID NO: 19218 - DNA, 15 bp, Homo sapiens
agtccacggggcatt

SEQ ID NO: 19219 - DNA, 15 bp, Homo sapiens
cagtccacggggcat

SEQ ID NO: 19220 - DNA, 15 bp, Homo sapiens
acagtccacggggca

SEQ ID NO: 19221 - DNA, 15 bp, Homo sapiens
aacagtccacggggc

SEQ ID NO: 19222 - DNA, 15 bp, Homo sapiens
caacagtccacgggg

SEQ ID NO: 19223 - DNA, 15 bp, Homo sapiens
ccaacagtccacggg

SEQ ID NO: 19224 - DNA, 15 bp, Homo sapiens
gccaacagtccacgg

SEQ ID NO: 19225 - DNA, 15 bp, Homo sapiens
tgccaacagtccacg

SEQ ID NO: 19226 - DNA, 15 bp, Homo sapiens
ttgccaacagtccac

SEQ ID NO: 19227 - DNA, 15 bp, Homo sapiens
attgccaacagtcca

SEQ ID NO: 19228 - DNA, 15 bp, Homo sapiens
cattgccaacagtcc

SEQ ID NO: 19229 - DNA, 15 bp, Homo sapiens
tcattgccaacagtc

SEQ ID NO: 19230 - DNA, 15 bp, Homo sapiens
ctcattgccaacagt

SEQ ID NO: 19231 - DNA, 15 bp, Homo sapiens
cctcattgccaacag

SEQ ID NO: 19232 - DNA, 15 bp, Homo sapiens
ccctcattgccaaca

SEQ ID NO: 19233 - DNA, 15 bp, Homo sapiens
gccctcattgccaac

SEQ ID NO: 19234 - DNA, 15 bp, Homo sapiens
ggccctcattgccaa

SEQ ID NO: 19235 - DNA, 15 bp, Homo sapiens
aggccctcattgcca

SEQ ID NO: 19236 - DNA, 15 bp, Homo sapiens
taggccctcattgcc

SEQ ID NO: 19237 - DNA, 15 bp, Homo sapiens
ctaggccctcattgc

SEQ ID NO: 19238 - DNA, 15 bp, Homo sapiens
cctaggccctcattg

SEQ ID NO: 19239 - DNA, 15 bp, Homo sapiens
tcctaggccctcatt

SEQ ID NO: 19240 - DNA, 15 bp, Homo sapiens
gtcctaggccctcat

SEQ ID NO: 19241 - DNA, 15 bp, Homo sapiens
ggtcctaggccctca

SEQ ID NO: 19242 - DNA, 15 bp, Homo sapiens
tggtcctaggccctc

SEQ ID NO: 19243 - DNA, 15 bp, Homo sapiens
ttggtcctaggccct

SEQ ID NO: 19244 - DNA, 15 bp, Homo sapiens
cttggtcctaggccc

SEQ ID NO: 19245 - DNA, 15 bp, Homo sapiens
ccttggtcctaggcc

SEQ ID NO: 19246 - DNA, 15 bp, Homo sapiens
accttggtcctaggc

SEQ ID NO: 19247 - DNA, 15 bp, Homo sapiens
aaccttggtcctagg

SEQ ID NO: 19248 - DNA, 15 bp, Homo sapiens
caaccttggtcctag

SEQ ID NO: 19249 - DNA, 15 bp, Homo sapiens
tcaaccttggtccta

SEQ ID NO: 19250 - DNA, 15 bp, Homo sapiens
ctcaaccttggtcct

SEQ ID NO: 19251 - DNA, 15 bp, Homo sapiens
gctcaaccttggtcc

SEQ ID NO: 19252 - DNA, 15 bp, Homo sapiens
agctcaaccttggtc

SEQ ID NO: 19253 - DNA, 15 bp, Homo sapiens
aagctcaaccttggt

SEQ ID NO: 19254 - DNA, 15 bp, Homo sapiens
caagctcaaccttgg

SEQ ID NO: 19255 - DNA, 15 bp, Homo sapiens
ccaagctcaaccttg

SEQ ID NO: 19256 - DNA, 15 bp, Homo sapiens
cccaagctcaacctt

SEQ ID NO: 19257 - DNA, 15 bp, Homo sapiens
ccccaagctcaacct

SEQ ID NO: 19258 - DNA, 15 bp, Homo sapiens
gccccaagctcaacc

SEQ ID NO: 19259 - DNA, 15 bp, Homo sapiens
ggccccaagctcaac

SEQ ID NO: 19260 - DNA, 15 bp, Homo sapiens
tggccccaagctcaa

SEQ ID NO: 19261 - DNA, 15 bp, Homo sapiens
ttggccccaagctca

SEQ ID NO: 19262 - DNA, 15 bp, Homo sapiens
gttggccccaagctc

SEQ ID NO: 19263 - DNA, 15 bp, Homo sapiens
agttggccccaagct

SEQ ID NO: 19264 - DNA, 15 bp, Homo sapiens
gagttggccccaagc

SEQ ID NO: 19265 - DNA, 15 bp, Homo sapiens
agagttggccccaag

SEQ ID NO: 19266 - DNA, 15 bp, Homo sapiens
gagagttggccccaa

SEQ ID NO: 19267 - DNA, 15 bp, Homo sapiens
ggagagttggcccca

SEQ ID NO: 19268 - DNA, 15 bp, Homo sapiens
gggagagttggcccc

SEQ ID NO: 19269 - DNA, 15 bp, Homo sapiens
agggagagttggccc

SEQ ID NO: 19270 - DNA, 15 bp, Homo sapiens
tagggagagttggcc

SEQ ID NO: 19271 - DNA, 15 bp, Homo sapiens
atagggagagttggc

SEQ ID NO: 19272 - DNA, 15 bp, Homo sapiens
tatagggagagttgg

SEQ ID NO: 19273 - DNA, 15 bp, Homo sapiens
ctatagggagagttg

SEQ ID NO: 19274 - DNA, 15 bp, Homo sapiens
tctatagggagagtt

SEQ ID NO: 19275 - DNA, 15 bp, Homo sapiens
gtctatagggagagt

SEQ ID NO: 19276 - DNA, 15 bp, Homo sapiens
tgtctatagggagag

SEQ ID NO: 19277 - DNA, 15 bp, Homo sapiens
ctgtctatagggaga

SEQ ID NO: 19278 - DNA, 15 bp, Homo sapiens
actgtctatagggag

SEQ ID NO: 19279 - DNA, 15 bp, Homo sapiens
cactgtctataggga

SEQ ID NO: 19280 - DNA, 15 bp, Homo sapiens
tcactgtctataggg

SEQ ID NO: 19281 - DNA, 15 bp, Homo sapiens
ctcactgtctatagg

SEQ ID NO: 19282 - DNA, 15 bp, Homo sapiens
actcactgtctatag

SEQ ID NO: 19283 - DNA, 15 bp, Homo sapiens
cactcactgtctata

SEQ ID NO: 19284 - DNA, 15 bp, Homo sapiens
gcactcactgtctat

SEQ ID NO: 19285 - DNA, 15 bp, Homo sapiens
tgcactcactgtcta

SEQ ID NO: 19286 - DNA, 15 bp, Homo sapiens
atgcactcactgtct

SEQ ID NO: 19287 - DNA, 15 bp, Homo sapiens
aatgcactcactgtc

SEQ ID NO: 19288 - DNA, 15 bp, Homo sapiens
gaatgcactcactgt

SEQ ID NO: 19289 - DNA, 15 bp, Homo sapiens
agaatgcactcactg

SEQ ID NO: 19290 - DNA, 15 bp, Homo sapiens
cagaatgcactcact

SEQ ID NO: 19291 - DNA, 15 bp, Homo sapiens
tcagaatgcactcac

SEQ ID NO: 19292 - DNA, 15 bp, Homo sapiens
gtcagaatgcactca

SEQ ID NO: 19293 - DNA, 15 bp, Homo sapiens
tgtcagaatgcactc

SEQ ID NO: 19294 - DNA, 15 bp, Homo sapiens
ttgtcagaatgcact

SEQ ID NO: 19295 - DNA, 15 bp, Homo sapiens
cttgtcagaatgcac

SEQ ID NO: 19296 - DNA, 15 bp, Homo sapiens
gcttgtcagaatgca

SEQ ID NO: 19297 - DNA, 15 bp, Homo sapiens
tgcttgtcagaatgc

SEQ ID NO: 19298 - DNA, 15 bp, Homo sapiens
atgcttgtcagaatg

SEQ ID NO: 19299 - DNA, 15 bp, Homo sapiens
catgcttgtcagaat

SEQ ID NO: 19300 - DNA, 15 bp, Homo sapiens
ccatgcttgtcagaa

SEQ ID NO: 19301 - DNA, 15 bp, Homo sapiens
cccatgcttgtcaga

SEQ ID NO: 19302 - DNA, 15 bp, Homo sapiens
gcccatgcttgtcag

SEQ ID NO: 19303 - DNA, 15 bp, Homo sapiens
agcccatgcttgtca

SEQ ID NO: 19304 - DNA, 15 bp, Homo sapiens
gagcccatgcttgtc

SEQ ID NO: 19305 - DNA, 15 bp, Homo sapiens
agagcccatgcttgt

SEQ ID NO: 19306 - DNA, 15 bp, Homo sapiens
cagagcccatgcttg

SEQ ID NO: 19307 - DNA, 15 bp, Homo sapiens
ccagagcccatgctt

SEQ ID NO: 19308 - DNA, 15 bp, Homo sapiens
cccagagcccatgct

SEQ ID NO: 19309 - DNA, 15 bp, Homo sapiens
acccagagcccatgc

SEQ ID NO: 19310 - DNA, 15 bp, Homo sapiens
aacccagagcccatg

SEQ ID NO: 19311 - DNA, 15 bp, Homo sapiens
gaacccagagcccat

SEQ ID NO: 19312 - DNA, 15 bp, Homo sapiens
tgaacccagagccca

SEQ ID NO: 19313 - DNA, 15 bp, Homo sapiens
ttgaacccagagccc

SEQ ID NO: 19314 - DNA, 15 bp, Homo sapiens
tttgaacccagagcc

SEQ ID NO: 19315 - DNA, 15 bp, Homo sapiens
ggatttgaacccaga

SEQ ID NO: 19316 - DNA, 15 bp, Homo sapiens
gggatttgaacccag

SEQ ID NO: 19317 - DNA, 15 bp, Homo sapiens
tgggatttgaaccca

SEQ ID NO: 19318 - DNA, 15 bp, Homo sapiens
ttgggatttgaaccc

SEQ ID NO: 19319 - DNA, 15 bp, Homo sapiens
gttgggatttgaacc

SEQ ID NO: 19320 - DNA, 15 bp, Homo sapiens
agttgggatttgaac

SEQ ID NO: 19321 - DNA, 15 bp, Homo sapiens
gagttgggatttgaa

SEQ ID NO: 19322 - DNA, 15 bp, Homo sapiens
agagttgggatttga

SEQ ID NO: 19323 - DNA, 15 bp, Homo sapiens
cagagttgggatttg

SEQ ID NO: 19324 - DNA, 15 bp, Homo sapiens
gcagagttgggattt

SEQ ID NO: 19325 - DNA, 15 bp, Homo sapiens
ggcagagttgggatt

SEQ ID NO: 19326 - DNA, 15 bp, Homo sapiens
tggcagagttgggat

SEQ ID NO: 19327 - DNA, 15 bp, Homo sapiens
gtggcagagttggga

SEQ ID NO: 19328 - DNA, 15 bp, Homo sapiens
agtggcagagttggg

SEQ ID NO: 19329 - DNA, 15 bp, Homo sapiens
gagtggcagagttgg

SEQ ID NO: 19330 - DNA, 15 bp, Homo sapiens
tgagtggcagagttg

SEQ ID NO: 19331 - DNA, 15 bp, Homo sapiens
atgagtggcagagtt

SEQ ID NO: 19332 - DNA, 15 bp, Homo sapiens
catgagtggcagagt

SEQ ID NO: 19333 - DNA, 15 bp, Homo sapiens
gcatgagtggcagag

SEQ ID NO: 19334 - DNA, 15 bp, Homo sapiens
ggcatgagtggcaga

SEQ ID NO: 19335 - DNA, 15 bp, Homo sapiens
aggcatgagtggcag

SEQ ID NO: 19336 - DNA, 15 bp, Homo sapiens
taggcatgagtggca

SEQ ID NO: 19337 - DNA, 15 bp, Homo sapiens
ataggcatgagtggc

SEQ ID NO: 19338 - DNA, 15 bp, Homo sapiens
cataggcatgagtgg

SEQ ID NO: 19339 - DNA, 15 bp, Homo sapiens
acataggcatgagtg

SEQ ID NO: 19340 - DNA, 15 bp, Homo sapiens
cacataggcatgagt

SEQ ID NO: 19341 - DNA, 15 bp, Homo sapiens
acacataggcatgag

SEQ ID NO: 19342 - DNA, 15 bp, Homo sapiens
gacacataggcatga

SEQ ID NO: 19343 - DNA, 15 bp, Homo sapiens
ggacacataggcatg

SEQ ID NO: 19344 - DNA, 15 bp, Homo sapiens
aggacacataggcat

SEQ ID NO: 19345 - DNA, 15 bp, Homo sapiens
aaggacacataggca

SEQ ID NO: 19346 - DNA, 15 bp, Homo sapiens
taaggacacataggc

SEQ ID NO: 19347 - DNA, 15 bp, Homo sapiens
ttaaggacacatagg

SEQ ID NO: 19348 - DNA, 15 bp, Homo sapiens
attaaggacacatag

SEQ ID NO: 19349 - DNA, 15 bp, Homo sapiens
tattaaggacacata

SEQ ID NO: 19350 - DNA, 15 bp, Homo sapiens
ctattaaggacacat

SEQ ID NO: 19351 - DNA, 15 bp, Homo sapiens
cctattaaggacaca

SEQ ID NO: 19352 - DNA, 15 bp, Homo sapiens
tcctattaaggacac

SEQ ID NO: 19353 - DNA, 15 bp, Homo sapiens
gtcctattaaggaca

SEQ ID NO: 19354 - DNA, 15 bp, Homo sapiens
cgtcctattaaggac

SEQ ID NO: 19355 - DNA, 15 bp, Homo sapiens
gcgtcctattaagga

SEQ ID NO: 19356 - DNA, 15 bp, Homo sapiens
agcgtcctattaagg

SEQ ID NO: 19357 - DNA, 15 bp, Homo sapiens
aagcgtcctattaag

SEQ ID NO: 19358 - DNA, 15 bp, Homo sapiens
caagcgtcctattaa

SEQ ID NO: 19359 - DNA, 15 bp, Homo sapiens
tcaagcgtcctatta

SEQ ID NO: 19360 - DNA, 15 bp, Homo sapiens
atcaagcgtcctatt

SEQ ID NO: 19361 - DNA, 15 bp, Homo sapiens
catcaagcgtcctat

SEQ ID NO: 19362 - DNA, 15 bp, Homo sapiens
acatcaagcgtccta

SEQ ID NO: 19363 - DNA, 15 bp, Homo sapiens
gacatcaagcgtcct

SEQ ID NO: 19364 - DNA, 15 bp, Homo sapiens
agacatcaagcgtcc

SEQ ID NO: 19365 - DNA, 15 bp, Homo sapiens
gagacatcaagcgtc

SEQ ID NO: 19366 - DNA, 15 bp, Homo sapiens
agagacatcaagcgt

SEQ ID NO: 19367 - DNA, 15 bp, Homo sapiens
cagagacatcaagcg

SEQ ID NO: 19368 - DNA, 15 bp, Homo sapiens
acagagacatcaagc

SEQ ID NO: 19369 - DNA, 15 bp, Homo sapiens
cacagagacatcaag

SEQ ID NO: 19370 - DNA, 15 bp, Homo sapiens
acacagagacatcaa

SEQ ID NO: 19371 - DNA, 15 bp, Homo sapiens
gacacagagacatca

SEQ ID NO: 19372 - DNA, 15 bp, Homo sapiens
agacacagagacatc

SEQ ID NO: 19373 - DNA, 15 bp, Homo sapiens
tagacacagagacat

SEQ ID NO: 19374 - DNA, 15 bp, Homo sapiens
ttagacacagagaca

SEQ ID NO: 19375 - DNA, 15 bp, Homo sapiens
cttagacacagagac

SEQ ID NO: 19376 - DNA, 15 bp, Homo sapiens
ccttagacacagaga

SEQ ID NO: 19377 - DNA, 15 bp, Homo sapiens
accttagacacagag

SEQ ID NO: 19378 - DNA, 15 bp, Homo sapiens
aaccttagacacaga

SEQ ID NO: 19379 - DNA, 15 bp, Homo sapiens
aaaccttagacacag

SEQ ID NO: 19380 - DNA, 15 bp, Homo sapiens
gaaaccttagacaca

SEQ ID NO: 19381 - DNA, 15 bp, Homo sapiens
ggaaaccttagacac

SEQ ID NO: 19382 - DNA, 15 bp, Homo sapiens
aggaaaccttagaca

SEQ ID NO: 19383 - DNA, 15 bp, Homo sapiens
caggaaaccttagac

SEQ ID NO: 19384 - DNA, 15 bp, Homo sapiens
ccaggaaaccttaga

SEQ ID NO: 19385 - DNA, 15 bp, Homo sapiens
tccaggaaaccttag

SEQ ID NO: 19386 - DNA, 15 bp, Homo sapiens
gtccaggaaacctta

SEQ ID NO: 19387 - DNA, 15 bp, Homo sapiens
agtccaggaaacctt

SEQ ID NO: 19388 - DNA, 15 bp, Homo sapiens
tagtccaggaaacct

SEQ ID NO: 19389 - DNA, 15 bp, Homo sapiens
atagtccaggaaacc

SEQ ID NO: 19390 - DNA, 15 bp, Homo sapiens
catagtccaggaaac

SEQ ID NO: 19391 - DNA, 15 bp, Homo sapiens
ccatagtccaggaaa

SEQ ID NO: 19392 - DNA, 15 bp, Homo sapiens
tccatagtccaggaa

SEQ ID NO: 19393 - DNA, 15 bp, Homo sapiens
ttccatagtccagga

SEQ ID NO: 19394 - DNA, 15 bp, Homo sapiens
tttccatagtccagg

SEQ ID NO: 19395 - DNA, 15 bp, Homo sapiens
atttccatagtccag

SEQ ID NO: 19396 - DNA, 15 bp, Homo sapiens
catttccatagtcca

SEQ ID NO: 19397 - DNA, 15 bp, Homo sapiens
tcatttccatagtcc

SEQ ID NO: 19398 - DNA, 15 bp, Homo sapiens
ctcatttccatagtc

SEQ ID NO: 19399 - DNA, 15 bp, Homo sapiens
gctcatttccatagt

SEQ ID NO: 19400 - DNA, 15 bp, Homo sapiens
ggctcatttccatag

SEQ ID NO: 19401 - DNA, 15 bp, Homo sapiens
aggctcatttccata

SEQ ID NO: 19402 - DNA, 15 bp, Homo sapiens
taggctcatttccat

SEQ ID NO: 19403 - DNA, 15 bp, Homo sapiens
ttaggctcatttcca

SEQ ID NO: 19404 - DNA, 15 bp, Homo sapiens
attaggctcatttcc

SEQ ID NO: 19405 - DNA, 15 bp, Homo sapiens
tattaggctcatttc

SEQ ID NO: 19406 - DNA, 15 bp, Homo sapiens
ttattaggctcattt

SEQ ID NO: 19407 - DNA, 15 bp, Homo sapiens
tttattaggctcatt

SEQ ID NO: 19408 - DNA, 15 bp, Homo sapiens
atttattaggctcat

SEQ ID NO: 19409 - DNA, 15 bp, Homo sapiens
catttattaggctca

SEQ ID NO: 19410 - DNA, 15 bp, Homo sapiens
acatttattaggctc

SEQ ID NO: 19411 - DNA, 15 bp, Homo sapiens
gacatttattaggct

SEQ ID NO: 19412 - DNA, 15 bp, Homo sapiens
agacatttattaggc

SEQ ID NO: 19413 - DNA, 15 bp, Homo sapiens
tagacatttattagg

SEQ ID NO: 19414 - DNA, 15 bp, Homo sapiens
gtagacatttattag

SEQ ID NO: 19415 - DNA, 15 bp, Homo sapiens
ggtagacatttatta

SEQ ID NO: 19416 - DNA, 15 bp, Homo sapiens
gggtagacatttatt

SEQ ID NO: 19417 - DNA, 15 bp, Homo sapiens
ggggtagacatttat

SEQ ID NO: 19418 - DNA, 15 bp, Homo sapiens
aggggtagacattta

SEQ ID NO: 19419 - DNA, 15 bp, Homo sapiens
aaggggtagacattt

SEQ ID NO: 19420 - DNA, 15 bp, Homo sapiens
taaggggtagacatt

SEQ ID NO: 19421 - DNA, 15 bp, Homo sapiens
ctaaggggtagacat

SEQ ID NO: 19422 - DNA, 15 bp, Homo sapiens
cctaaggggtagaca

SEQ ID NO: 19423 - DNA, 15 bp, Homo sapiens
tcctaaggggtagac

SEQ ID NO: 19424 - DNA, 15 bp, Homo sapiens
gtcctaaggggtaga

SEQ ID NO: 19425 - DNA, 15 bp, Homo sapiens
ggtcctaaggggtag

SEQ ID NO: 19426 - DNA, 15 bp, Homo sapiens
tggtcctaaggggta

SEQ ID NO: 19427 - DNA, 15 bp, Homo sapiens
atggtcctaaggggt

SEQ ID NO: 19428 - DNA, 15 bp, Homo sapiens
aatggtcctaagggg

SEQ ID NO: 19429 - DNA, 15 bp, Homo sapiens
caatggtcctaaggg

SEQ ID NO: 19430 - DNA, 15 bp, Homo sapiens
acaatggtcctaagg

SEQ ID NO: 19431 - DNA, 15 bp, Homo sapiens
tacaatggtcctaag

SEQ ID NO: 19432 - DNA, 15 bp, Homo sapiens
ttacaatggtcctaa

SEQ ID NO: 19433 - DNA, 15 bp, Homo sapiens
cttacaatggtccta

SEQ ID NO: 19434 - DNA, 15 bp, Homo sapiens
tcttacaatggtcct

SEQ ID NO: 19435 - DNA, 15 bp, Homo sapiens
ctcttacaatggtcc

SEQ ID NO: 19436 - DNA, 15 bp, Homo sapiens
actcttacaatggtc

SEQ ID NO: 19437 - DNA, 15 bp, Homo sapiens
tactcttacaatggt

SEQ ID NO: 19438 - DNA, 15 bp, Homo sapiens
gtactcttacaatgg

SEQ ID NO: 19439 - DNA, 15 bp, Homo sapiens
tgtactcttacaatg

SEQ ID NO: 19440 - DNA, 15 bp, Homo sapiens
atgtactcttacaat

SEQ ID NO: 19441 - DNA, 15 bp, Homo sapiens
aatgtactcttacaa

SEQ ID NO: 19442 - DNA, 15 bp, Homo sapiens
caatgtactcttaca

SEQ ID NO: 19443 - DNA, 15 bp, Homo sapiens
tcaatgtactcttac

SEQ ID NO: 19444 - DNA, 15 bp, Homo sapiens
ctcaatgtactctta

SEQ ID NO: 19445 - DNA, 15 bp, Homo sapiens
cctcaatgtactctt

SEQ ID NO: 19446 - DNA, 15 bp, Homo sapiens
acctcaatgtactct

SEQ ID NO: 19447 - DNA, 15 bp, Homo sapiens
tacctcaatgtactc

SEQ ID NO: 19448 - DNA, 15 bp, Homo sapiens
ttacctcaatgtact

SEQ ID NO: 19449 - DNA, 15 bp, Homo sapiens
attacctcaatgtac

SEQ ID NO: 19450 - DNA, 15 bp, Homo sapiens
aattacctcaatgta

SEQ ID NO: 19451 - DNA, 15 bp, Homo sapiens
aaattacctcaatgt

SEQ ID NO: 19452 - DNA, 15 bp, Homo sapiens
caaattacctcaatg

SEQ ID NO: 19453 - DNA, 15 bp, Homo sapiens
acaaattacctcaat

SEQ ID NO: 19454 - DNA, 15 bp, Homo sapiens
cacaaattacctcaa

SEQ ID NO: 19455 - DNA, 15 bp, Homo sapiens
acacaaattacctca

SEQ ID NO: 19456 - DNA, 15 bp, Homo sapiens
tacacaaattacctc

SEQ ID NO: 19457 - DNA, 15 bp, Homo sapiens
ttacacaaattacct

SEQ ID NO: 19458 - DNA, 15 bp, Homo sapiens
tttacacaaattacc

SEQ ID NO: 19459 - DNA, 15 bp, Homo sapiens
ctttacacaaattac

SEQ ID NO: 19460 - DNA, 15 bp, Homo sapiens
gctttacacaaatta

SEQ ID NO: 19461 - DNA, 15 bp, Homo sapiens
tgctttacacaaatt

SEQ ID NO: 19462 - DNA, 15 bp, Homo sapiens
ctgctttacacaaat

SEQ ID NO: 19463 - DNA, 15 bp, Homo sapiens
actgctttacacaaa

SEQ ID NO: 19464 - DNA, 15 bp, Homo sapiens
gactgctttacacaa

SEQ ID NO: 19465 - DNA, 15 bp, Homo sapiens
cgactgctttacaca

SEQ ID NO: 19466 - DNA, 15 bp, Homo sapiens
tcgactgctttacac

SEQ ID NO: 19467 - DNA, 15 bp, Homo sapiens
ttcgactgctttaca

SEQ ID NO: 19468 - DNA, 15 bp, Homo sapiens
cttcgactgctttac

SEQ ID NO: 19469 - DNA, 15 bp, Homo sapiens
gcttcgactgcttta

SEQ ID NO: 19470 - DNA, 15 bp, Homo sapiens
tgcttcgactgcttt

SEQ ID NO: 19471 - DNA, 15 bp, Homo sapiens
ctgcttcgactgctt

SEQ ID NO: 19472 - DNA, 15 bp, Homo sapiens
actgcttcgactgct

SEQ ID NO: 19473 - DNA, 15 bp, Homo sapiens
cactgcttcgactgc

SEQ ID NO: 19474 - DNA, 15 bp, Homo sapiens
gcactgcttcgactg

SEQ ID NO: 19475 - DNA, 15 bp, Homo sapiens
ggcactgcttcgact

SEQ ID NO: 19476 - DNA, 15 bp, Homo sapiens
aggcactgcttcgac

SEQ ID NO: 19477 - DNA, 15 bp, Homo sapiens
caggcactgcttcga

SEQ ID NO: 19478 - DNA, 15 bp, Homo sapiens
ccaggcactgcttcg

SEQ ID NO: 19479 - DNA, 15 bp, Homo sapiens
gccaggcactgcttc

SEQ ID NO: 19480 - DNA, 15 bp, Homo sapiens
tgccaggcactgctt

SEQ ID NO: 19481 - DNA, 15 bp, Homo sapiens
atgccaggcactgct

SEQ ID NO: 19482 - DNA, 15 bp, Homo sapiens
tatgccaggcactgc

SEQ ID NO: 19483 - DNA, 15 bp, Homo sapiens
atatgccaggcactg

SEQ ID NO: 19484 - DNA, 15 bp, Homo sapiens
tatatgccaggcact

SEQ ID NO: 19485 - DNA, 15 bp, Homo sapiens
ctatatgccaggcac

SEQ ID NO: 19486 - DNA, 15 bp, Homo sapiens
cctatatgccaggca

SEQ ID NO: 19487 - DNA, 15 bp, Homo sapiens
tcctatatgccaggc

SEQ ID NO: 19488 - DNA, 15 bp, Homo sapiens
ctcctatatgccagg

SEQ ID NO: 19489 - DNA, 15 bp, Homo sapiens
cctcctatatgccag

SEQ ID NO: 19490 - DNA, 15 bp, Homo sapiens
acctcctatatgcca

SEQ ID NO: 19491 - DNA, 15 bp, Homo sapiens
cacctcctatatgcc

SEQ ID NO: 19492 - DNA, 15 bp, Homo sapiens
gcacctcctatatgc

SEQ ID NO: 19493 - DNA, 15 bp, Homo sapiens
agcacctcctatatg

SEQ ID NO: 19494 - DNA, 15 bp, Homo sapiens
cagcacctcctatat

SEQ ID NO: 19495 - DNA, 15 bp, Homo sapiens
acagcacctcctata

SEQ ID NO: 19496 - DNA, 15 bp, Homo sapiens
tacagcacctcctat

SEQ ID NO: 19497 - DNA, 15 bp, Homo sapiens
atacagcacctccta

SEQ ID NO: 19498 - DNA, 15 bp, Homo sapiens
tatacagcacctcct

SEQ ID NO: 19499 - DNA, 15 bp, Homo sapiens
ttatacagcacctcc

SEQ ID NO: 19500 - DNA, 15 bp, Homo sapiens
tttatacagcacctc

SEQ ID NO: 19501 - DNA, 15 bp, Homo sapiens
gtttatacagcacct

SEQ ID NO: 19502 - DNA, 15 bp, Homo sapiens
cgtttatacagcacc

SEQ ID NO: 19503 - DNA, 15 bp, Homo sapiens
acgtttatacagcac

SEQ ID NO: 19504 - DNA, 15 bp, Homo sapiens
aacgtttatacagca

SEQ ID NO: 19505 - DNA, 15 bp, Homo sapiens
aaacgtttatacagc

SEQ ID NO: 19506 - DNA, 15 bp, Homo sapiens
caaacgtttatacag

SEQ ID NO: 19507 - DNA, 15 bp, Homo sapiens
tcaaacgtttataca

SEQ ID NO: 19508 - DNA, 15 bp, Homo sapiens
atcaaacgtttatac

SEQ ID NO: 19509 - DNA, 15 bp, Homo sapiens
catcaaacgtttata

SEQ ID NO: 19510 - DNA, 15 bp, Homo sapiens
gcatcaaacgtttat

SEQ ID NO: 19511 - DNA, 15 bp, Homo sapiens
agcatcaaacgttta

SEQ ID NO: 19512 - DNA, 15 bp, Homo sapiens
tagcatcaaacgttt

SEQ ID NO: 19513 - DNA, 15 bp, Homo sapiens
ctagcatcaaacgtt

SEQ ID NO: 19514 - DNA, 15 bp, Homo sapiens
actagcatcaaacgt

SEQ ID NO: 19515 - DNA, 15 bp, Homo sapiens
tactagcatcaaacg

SEQ ID NO: 19516 - DNA, 15 bp, Homo sapiens
atactagcatcaaac

SEQ ID NO: 19517 - DNA, 15 bp, Homo sapiens
aatactagcatcaaa

SEQ ID NO: 19518 - DNA, 15 bp, Homo sapiens
taatactagcatcaa

SEQ ID NO: 19519 - DNA, 15 bp, Homo sapiens
gtaatactagcatca

SEQ ID NO: 19520 - DNA, 15 bp, Homo sapiens
agtaatactagcatc

SEQ ID NO: 19521 - DNA, 15 bp, Homo sapiens
tagtaatactagcat

SEQ ID NO: 19522 - DNA, 15 bp, Homo sapiens
atagtaatactagca

SEQ ID NO: 19523 - DNA, 15 bp, Homo sapiens
aatagtaatactagc

SEQ ID NO: 19524 - DNA, 15 bp, Homo sapiens
taatagtaatactag

SEQ ID NO: 19525 - DNA, 15 bp, Homo sapiens
ataatagtaatacta

SEQ ID NO: 19526 - DNA, 15 bp, Homo sapiens
aataatagtaatact

SEQ ID NO: 19527 - DNA, 15 bp, Homo sapiens
taataatagtaatac

SEQ ID NO: 19528 - DNA, 15 bp, Homo sapiens
ataataatagtaata

SEQ ID NO: 19529 - DNA, 15 bp, Homo sapiens
aataataatagtaat

SEQ ID NO: 19530 - DNA, 15 bp, Homo sapiens
gaataataatagtaa

SEQ ID NO: 19531 - DNA, 15 bp, Homo sapiens
agaataataatagta

SEQ ID NO: 19532 - DNA, 15 bp, Homo sapiens
cagaataataatagt

SEQ ID NO: 19533 - DNA, 15 bp, Homo sapiens
ccagaataataatag

SEQ ID NO: 19534 - DNA, 15 bp, Homo sapiens
tccagaataataata

SEQ ID NO: 19535 - DNA, 15 bp, Homo sapiens
ctccagaataataat

SEQ ID NO: 19536 - DNA, 15 bp, Homo sapiens
actccagaataataa

SEQ ID NO: 19537 - DNA, 15 bp, Homo sapiens
gactccagaataata

SEQ ID NO: 19538 - DNA, 15 bp, Homo sapiens
agactccagaataat

SEQ ID NO: 19539 - DNA, 15 bp, Homo sapiens
aagactccagaataa

SEQ ID NO: 19540 - DNA, 15 bp, Homo sapiens
gaagactccagaata

SEQ ID NO: 19541 - DNA, 15 bp, Homo sapiens
ggaagactccagaat

SEQ ID NO: 19542 - DNA, 15 bp, Homo sapiens
aggaagactccagaa

SEQ ID NO: 19543 - DNA, 15 bp, Homo sapiens
aaggaagactccaga

SEQ ID NO: 19544 - DNA, 15 bp, Homo sapiens
caaggaagactccag

SEQ ID NO: 19545 - DNA, 15 bp, Homo sapiens
gcaaggaagactcca

SEQ ID NO: 19546 - DNA, 15 bp, Homo sapiens
tgcaaggaagactcc

SEQ ID NO: 19547 - DNA, 15 bp, Homo sapiens
ttgcaaggaagactc

SEQ ID NO: 19548 - DNA, 15 bp, Homo sapiens
gttgcaaggaagact

SEQ ID NO: 19549 - DNA, 15 bp, Homo sapiens
cgttgcaaggaagac

SEQ ID NO: 19550 - DNA, 15 bp, Homo sapiens
ccgttgcaaggaaga

SEQ ID NO: 19551 - DNA, 15 bp, Homo sapiens
accgttgcaaggaag

SEQ ID NO: 19552 - DNA, 15 bp, Homo sapiens
caccgttgcaaggaa

SEQ ID NO: 19553 - DNA, 15 bp, Homo sapiens
tcaccgttgcaagga

SEQ ID NO: 19554 - DNA, 15 bp, Homo sapiens
atcaccgttgcaagg

SEQ ID NO: 19555 - DNA, 15 bp, Homo sapiens
tatcaccgttgcaag

SEQ ID NO: 19556 - DNA, 15 bp, Homo sapiens
ctatcaccgttgcaa

SEQ ID NO: 19557 - DNA, 15 bp, Homo sapiens
gctatcaccgttgca

SEQ ID NO: 19558 - DNA, 15 bp, Homo sapiens
ggctatcaccgttgc

SEQ ID NO: 19559 - DNA, 15 bp, Homo sapiens
cggctatcaccgttg

SEQ ID NO: 19560 - DNA, 15 bp, Homo sapiens
tcggctatcaccgtt

SEQ ID NO: 19561 - DNA, 15 bp, Homo sapiens
ttcggctatcaccgt

SEQ ID NO: 19562 - DNA, 15 bp, Homo sapiens
cttcggctatcaccg

SEQ ID NO: 19563 - DNA, 15 bp, Homo sapiens
gcttcggctatcacc

SEQ ID NO: 19564 - DNA, 15 bp, Homo sapiens
ggcttcggctatcac

SEQ ID NO: 19565 - DNA, 15 bp, Homo sapiens
tggcttcggctatca

SEQ ID NO: 19566 - DNA, 15 bp, Homo sapiens
gtggcttcggctatc

SEQ ID NO: 19567 - DNA, 15 bp, Homo sapiens
tgtggcttcggctat

SEQ ID NO: 19568 - DNA, 15 bp, Homo sapiens
ctgtggcttcggcta

SEQ ID NO: 19569 - DNA, 15 bp, Homo sapiens
cctgtggcttcggct

SEQ ID NO: 19570 - DNA, 15 bp, Homo sapiens
ccctgtggcttcggc

SEQ ID NO: 19571 - DNA, 15 bp, Homo sapiens
cccctgtggcttcgg

SEQ ID NO: 19572 - DNA, 15 bp, Homo sapiens
gcccctgtggcttcg

SEQ ID NO: 19573 - DNA, 15 bp, Homo sapiens
tgcccctgtggcttc

SEQ ID NO: 19574 - DNA, 15 bp, Homo sapiens
ctgcccctgtggctt

SEQ ID NO: 19575 - DNA, 15 bp, Homo sapiens
cctgcccctgtggct

SEQ ID NO: 19576 - DNA, 15 bp, Homo sapiens
acctgcccctgtggc

SEQ ID NO: 19577 - DNA, 15 bp, Homo sapiens
cacctgcccctgtgg

SEQ ID NO: 19578 - DNA, 15 bp, Homo sapiens
tcacctgcccctgtg

SEQ ID NO: 19579 - DNA, 15 bp, Homo sapiens
gtcacctgcccctgt

SEQ ID NO: 19580 - DNA, 15 bp, Homo sapiens
cgtcacctgcccctg

SEQ ID NO: 19581 - DNA, 15 bp, Homo sapiens
acgtcacctgcccct

SEQ ID NO: 19582 - DNA, 15 bp, Homo sapiens
aacgtcacctgcccc

SEQ ID NO: 19583 - DNA, 15 bp, Homo sapiens
taacgtcacctgccc

SEQ ID NO: 19584 - DNA, 15 bp, Homo sapiens
ataacgtcacctgcc

SEQ ID NO: 19585 - DNA, 15 bp, Homo sapiens
tataacgtcacctgc

SEQ ID NO: 19586 - DNA, 15 bp, Homo sapiens
ctataacgtcacctg

SEQ ID NO: 19587 - DNA, 15 bp, Homo sapiens
cctataacgtcacct

SEQ ID NO: 19588 - DNA, 15 bp, Homo sapiens
gcctataacgtcacc

SEQ ID NO: 19589 - DNA, 15 bp, Homo sapiens
tgcctataacgtcac

SEQ ID NO: 19590 - DNA, 15 bp, Homo sapiens
ctgcctataacgtca

SEQ ID NO: 19591 - DNA, 15 bp, Homo sapiens
tctgcctataacgtc

SEQ ID NO: 19592 - DNA, 15 bp, Homo sapiens
ttctgcctataacgt

SEQ ID NO: 19593 - DNA, 15 bp, Homo sapiens
attctgcctataacg

SEQ ID NO: 19594 - DNA, 15 bp, Homo sapiens
tattctgcctataac

SEQ ID NO: 19595 - DNA, 15 bp, Homo sapiens
gtattctgcctataa

SEQ ID NO: 19596 - DNA, 15 bp, Homo sapiens
tgtattctgcctata

SEQ ID NO: 19597 - DNA, 15 bp, Homo sapiens
ttgtattctgcctat

SEQ ID NO: 19598 - DNA, 15 bp, Homo sapiens
cttgtattctgccta

SEQ ID NO: 19599 - DNA, 15 bp, Homo sapiens
ccttgtattctgcct

SEQ ID NO: 19600 - DNA, 15 bp, Homo sapiens
cccttgtattctgcc

SEQ ID NO: 19601 - DNA, 15 bp, Homo sapiens
gcccttgtattctgc

SEQ ID NO: 19602 - DNA, 15 bp, Homo sapiens
ggcccttgtattctg

SEQ ID NO: 19603 - DNA, 15 bp, Homo sapiens
aggcccttgtattct

SEQ ID NO: 19604 - DNA, 15 bp, Homo sapiens
caggcccttgtattc

SEQ ID NO: 19605 - DNA, 15 bp, Homo sapiens
ccaggcccttgtatt

SEQ ID NO: 19606 - DNA, 15 bp, Homo sapiens
tccaggcccttgtat

SEQ ID NO: 19607 - DNA, 15 bp, Homo sapiens
ctccaggcccttgta

SEQ ID NO: 19608 - DNA, 15 bp, Homo sapiens
tctccaggcccttgt

SEQ ID NO: 19609 - DNA, 15 bp, Homo sapiens
gtctccaggcccttg

SEQ ID NO: 19610 - DNA, 15 bp, Homo sapiens
tgtctccaggccctt

SEQ ID NO: 19611 - DNA, 15 bp, Homo sapiens
ctgtctccaggccct

SEQ ID NO: 19612 - DNA, 15 bp, Homo sapiens
tctgtctccaggccc

SEQ ID NO: 19613 - DNA, 15 bp, Homo sapiens
ctctgtctccaggcc

SEQ ID NO: 19614 - DNA, 15 bp, Homo sapiens
gctctgtctccaggc

SEQ ID NO: 19615 - DNA, 15 bp, Homo sapiens
ggctctgtctccagg

SEQ ID NO: 19616 - DNA, 15 bp, Homo sapiens
gggctctgtctccag

SEQ ID NO: 19617 - DNA, 15 bp, Homo sapiens
agggctctgtctcca

SEQ ID NO: 19618 - DNA, 15 bp, Homo sapiens
cagggctctgtctcc

SEQ ID NO: 19619 - DNA, 15 bp, Homo sapiens
ccagggctctgtctc

SEQ ID NO: 19620 - DNA, 15 bp, Homo sapiens
cccagggctctgtct

SEQ ID NO: 19621 - DNA, 15 bp, Homo sapiens
ccccagggctctgtc

SEQ ID NO: 19622 - DNA, 15 bp, Homo sapiens
gccccagggctctgt

SEQ ID NO: 19623 - DNA, 15 bp, Homo sapiens
ggccccagggctctg

SEQ ID NO: 19624 - DNA, 15 bp, Homo sapiens
tggccccagggctct

SEQ ID NO: 19625 - DNA, 15 bp, Homo sapiens
atggccccagggctc

SEQ ID NO: 19626 - DNA, 15 bp, Homo sapiens
catggccccagggct

SEQ ID NO: 19627 - DNA, 15 bp, Homo sapiens
acatggccccagggc

SEQ ID NO: 19628 - DNA, 15 bp, Homo sapiens
tacatggccccaggg

SEQ ID NO: 19629 - DNA, 15 bp, Homo sapiens
ttacatggccccagg

SEQ ID NO: 19630 - DNA, 15 bp, Homo sapiens
attacatggccccag

SEQ ID NO: 19631 - DNA, 15 bp, Homo sapiens
aattacatggcccca

SEQ ID NO: 19632 - DNA, 15 bp, Homo sapiens
taattacatggcccc

SEQ ID NO: 19633 - DNA, 15 bp, Homo sapiens
ctaattacatggccc

SEQ ID NO: 19634 - DNA, 15 bp, Homo sapiens
cctaattacatggcc

SEQ ID NO: 19635 - DNA, 15 bp, Homo sapiens
gcctaattacatggc

SEQ ID NO: 19636 - DNA, 15 bp, Homo sapiens
tgcctaattacatgg

SEQ ID NO: 19637 - DNA, 15 bp, Homo sapiens
atgcctaattacatg

SEQ ID NO: 19638 - DNA, 15 bp, Homo sapiens
aatgcctaattacat

SEQ ID NO: 19639 - DNA, 15 bp, Homo sapiens
taatgcctaattaca

SEQ ID NO: 19640 - DNA, 15 bp, Homo sapiens
ataatgcctaattac

SEQ ID NO: 19641 - DNA, 15 bp, Homo sapiens
cataatgcctaatta

SEQ ID NO: 19642 - DNA, 15 bp, Homo sapiens
acataatgcctaatt

SEQ ID NO: 19643 - DNA, 15 bp, Homo sapiens
aacataatgcctaat

SEQ ID NO: 19644 - DNA, 15 bp, Homo sapiens
aaacataatgcctaa

SEQ ID NO: 19645 - DNA, 15 bp, Homo sapiens
taaacataatgccta

SEQ ID NO: 19646 - DNA, 15 bp, Homo sapiens
gtaaacataatgcct

SEQ ID NO: 19647 - DNA, 15 bp, Homo sapiens
tgtaaacataatgcc

SEQ ID NO: 19648 - DNA, 15 bp, Homo sapiens
atgtaaacataatgc

SEQ ID NO: 19649 - DNA, 15 bp, Homo sapiens
gatgtaaacataatg

SEQ ID NO: 19650 - DNA, 15 bp, Homo sapiens
tgatgtaaacataat

SEQ ID NO: 19651 - DNA, 15 bp, Homo sapiens
atgatgtaaacataa

SEQ ID NO: 19652 - DNA, 15 bp, Homo sapiens
catgatgtaaacata

SEQ ID NO: 19653 - DNA, 15 bp, Homo sapiens
acatgatgtaaacat

SEQ ID NO: 19654 - DNA, 15 bp, Homo sapiens
aacatgatgtaaaca

SEQ ID NO: 19655 - DNA, 15 bp, Homo sapiens
gaacatgatgtaaac

SEQ ID NO: 19656 - DNA, 15 bp, Homo sapiens
tgaacatgatgtaaa

SEQ ID NO: 19657 - DNA, 15 bp, Homo sapiens
atgaacatgatgtaa

SEQ ID NO: 19658 - DNA, 15 bp, Homo sapiens
aatgaacatgatgta

SEQ ID NO: 19659 - DNA, 15 bp, Homo sapiens
aaatgaacatgatgt

SEQ ID NO: 19660 - DNA, 15 bp, Homo sapiens
aaaatgaacatgatg

SEQ ID NO: 19661 - DNA, 15 bp, Homo sapiens
aaaaatgaacatgat

SEQ ID NO: 19662 - DNA, 15 bp, Homo sapiens
aaaaaatgaacatga

SEQ ID NO: 19663 - DNA, 15 bp, Homo sapiens
aaaaaaatgaacatg

SEQ ID NO: 19664 - DNA, 15 bp, Homo sapiens
aaaaaaaatgaacat

SEQ ID NO: 19665 - DNA, 15 bp, Homo sapiens
gaaaaaaaatgaaca

SEQ ID NO: 19666 - DNA, 15 bp, Homo sapiens
ggaaaaaaaatgaac

SEQ ID NO: 19667 - DNA, 15 bp, Homo sapiens
aggaaaaaaaatgaa

SEQ ID NO: 19668 - DNA, 15 bp, Homo sapiens
gaggaaaaaaaatga

SEQ ID NO: 19669 - DNA, 15 bp, Homo sapiens
ggaggaaaaaaaatg

SEQ ID NO: 19670 - DNA, 15 bp, Homo sapiens
tggaggaaaaaaaat

SEQ ID NO: 19671 - DNA, 15 bp, Homo sapiens
ttggaggaaaaaaaa

SEQ ID NO: 19672 - DNA, 15 bp, Homo sapiens
cttggaggaaaaaaa

SEQ ID NO: 19673 - DNA, 15 bp, Homo sapiens
tcttggaggaaaaaa

SEQ ID NO: 19674 - DNA, 15 bp, Homo sapiens
gtcttggaggaaaaa

SEQ ID NO: 19675 - DNA, 15 bp, Homo sapiens
agtcttggaggaaaa

SEQ ID NO: 19676 - DNA, 15 bp, Homo sapiens
gagtcttggaggaaa

SEQ ID NO: 19677 - DNA, 15 bp, Homo sapiens
ggagtcttggaggaa

SEQ ID NO: 19678 - DNA, 15 bp, Homo sapiens
aggagtcttggagga

SEQ ID NO: 19679 - DNA, 15 bp, Homo sapiens
aaggagtcttggagg

SEQ ID NO: 19680 - DNA, 15 bp, Homo sapiens
gaaggagtcttggag

SEQ ID NO: 19681 - DNA, 15 bp, Homo sapiens
agaaggagtcttgga

SEQ ID NO: 19682 - DNA, 15 bp, Homo sapiens
aagaaggagtcttgg

SEQ ID NO: 19683 - DNA, 15 bp, Homo sapiens
aaagaaggagtcttg

SEQ ID NO: 19684 - DNA, 15 bp, Homo sapiens
caaagaaggagtctt

SEQ ID NO: 19685 - DNA, 15 bp, Homo sapiens
tcaaagaaggagtct

SEQ ID NO: 19686 - DNA, 15 bp, Homo sapiens
ttcaaagaaggagtc

SEQ ID NO: 19687 - DNA, 15 bp, Homo sapiens
gttcaaagaaggagt

SEQ ID NO: 19688 - DNA, 15 bp, Homo sapiens
cgttcaaagaaggag

SEQ ID NO: 19689 - DNA, 15 bp, Homo sapiens
acgttcaaagaagga

SEQ ID NO: 19690 - DNA, 15 bp, Homo sapiens
cacgttcaaagaagg

SEQ ID NO: 19691 - DNA, 15 bp, Homo sapiens
tcacgttcaaagaag

SEQ ID NO: 19692 - DNA, 15 bp, Homo sapiens
ctcacgttcaaagaa

SEQ ID NO: 19693 - DNA, 15 bp, Homo sapiens
gctcacgttcaaaga

SEQ ID NO: 19694 - DNA, 15 bp, Homo sapiens
tgctcacgttcaaag

SEQ ID NO: 19695 - DNA, 15 bp, Homo sapiens
atgctcacgttcaaa

SEQ ID NO: 19696 - DNA, 15 bp, Homo sapiens
gatgctcacgttcaa

SEQ ID NO: 19697 - DNA, 15 bp, Homo sapiens
ggatgctcacgttca

SEQ ID NO: 19698 - DNA, 15 bp, Homo sapiens
tggatgctcacgttc

SEQ ID NO: 19699 - DNA, 15 bp, Homo sapiens
ctggatgctcacgtt

SEQ ID NO: 19700 - DNA, 15 bp, Homo sapiens
cctggatgctcacgt

SEQ ID NO: 19701 - DNA, 15 bp, Homo sapiens
ccctggatgctcacg

SEQ ID NO: 19702 - DNA, 15 bp, Homo sapiens
accctggatgctcac

SEQ ID NO: 19703 - DNA, 15 bp, Homo sapiens
caccctggatgctca

SEQ ID NO: 19704 - DNA, 15 bp, Homo sapiens
ccaccctggatgctc

SEQ ID NO: 19705 - DNA, 15 bp, Homo sapiens
cccaccctggatgct

SEQ ID NO: 19706 - DNA, 15 bp, Homo sapiens
acccaccctggatgc

SEQ ID NO: 19707 - DNA, 15 bp, Homo sapiens
aacccaccctggatg

SEQ ID NO: 19708 - DNA, 15 bp, Homo sapiens
gaacccaccctggat

SEQ ID NO: 19709 - DNA, 15 bp, Homo sapiens
ggaacccaccctgga

SEQ ID NO: 19710 - DNA, 15 bp, Homo sapiens
aggaacccaccctgg

SEQ ID NO: 19711 - DNA, 15 bp, Homo sapiens
caggaacccaccctg

SEQ ID NO: 19712 - DNA, 15 bp, Homo sapiens
ccaggaacccaccct

SEQ ID NO: 19713 - DNA, 15 bp, Homo sapiens
cccaggaacccaccc

SEQ ID NO: 19714 - DNA, 15 bp, Homo sapiens
ccccaggaacccacc

SEQ ID NO: 19715 - DNA, 15 bp, Homo sapiens
accccaggaacccac

SEQ ID NO: 19716 - DNA, 15 bp, Homo sapiens
taccccaggaaccca

SEQ ID NO: 19717 - DNA, 15 bp, Homo sapiens
ataccccaggaaccc

SEQ ID NO: 19718 - DNA, 15 bp, Homo sapiens
cataccccaggaacc

SEQ ID NO: 19719 - DNA, 15 bp, Homo sapiens
gcataccccaggaac

SEQ ID NO: 19720 - DNA, 15 bp, Homo sapiens
cgcataccccaggaa

SEQ ID NO: 19721 - DNA, 15 bp, Homo sapiens
acgcataccccagga

SEQ ID NO: 19722 - DNA, 15 bp, Homo sapiens
cacgcataccccagg

SEQ ID NO: 19723 - DNA, 15 bp, Homo sapiens
tcacgcataccccag

SEQ ID NO: 19724 - DNA, 15 bp, Homo sapiens
ttcacgcatacccca

SEQ ID NO: 19725 - DNA, 15 bp, Homo sapiens
cttcacgcatacccc

SEQ ID NO: 19726 - DNA, 15 bp, Homo sapiens
tcttcacgcataccc

SEQ ID NO: 19727 - DNA, 15 bp, Homo sapiens
ttcttcacgcatacc

SEQ ID NO: 19728 - DNA, 15 bp, Homo sapiens
attcttcacgcatac

SEQ ID NO: 19729 - DNA, 15 bp, Homo sapiens
gattcttcacgcata

SEQ ID NO: 19730 - DNA, 15 bp, Homo sapiens
agattcttcacgcat

SEQ ID NO: 19731 - DNA, 15 bp, Homo sapiens
cagattcttcacgca

SEQ ID NO: 19732 - DNA, 15 bp, Homo sapiens
ccagattcttcacgc

SEQ ID NO: 19733 - DNA, 15 bp, Homo sapiens
accagattcttcacg

SEQ ID NO: 19734 - DNA, 15 bp, Homo sapiens
taccagattcttcac

SEQ ID NO: 19735 - DNA, 15 bp, Homo sapiens
ttaccagattcttca

SEQ ID NO: 19736 - DNA, 15 bp, Homo sapiens
tttaccagattcttc

SEQ ID NO: 19737 - DNA, 15 bp, Homo sapiens
ctttaccagattctt

SEQ ID NO: 19738 - DNA, 15 bp, Homo sapiens
tctttaccagattct

SEQ ID NO: 19739 - DNA, 15 bp, Homo sapiens
atctttaccagattc

SEQ ID NO: 19740 - DNA, 15 bp, Homo sapiens
aatctttaccagatt

SEQ ID NO: 19741 - DNA, 15 bp, Homo sapiens
aaatctttaccagat

SEQ ID NO: 19742 - DNA, 15 bp, Homo sapiens
aaaatctttaccaga

SEQ ID NO: 19743 - DNA, 15 bp, Homo sapiens
aaaaatctttaccag

SEQ ID NO: 19744 - DNA, 15 bp, Homo sapiens
caaaaatctttacca

SEQ ID NO: 19745 - DNA, 15 bp, Homo sapiens
tcaaaaatctttacc

SEQ ID NO: 19746 - DNA, 15 bp, Homo sapiens
ctcaaaaatctttac

SEQ ID NO: 19747 - DNA, 15 bp, Homo sapiens
gctcaaaaatcttta

SEQ ID NO: 19748 - DNA, 15 bp, Homo sapiens
ggctcaaaaatcttt

SEQ ID NO: 19749 - DNA, 15 bp, Homo sapiens
gggctcaaaaatctt

SEQ ID NO: 19750 - DNA, 15 bp, Homo sapiens
agggctcaaaaatct

SEQ ID NO: 19751 - DNA, 15 bp, Homo sapiens
cagggctcaaaaatc

SEQ ID NO: 19752 - DNA, 15 bp, Homo sapiens
acagggctcaaaaat

SEQ ID NO: 19753 - DNA, 15 bp, Homo sapiens
cacagggctcaaaaa

SEQ ID NO: 19754 - DNA, 15 bp, Homo sapiens
ccacagggctcaaaa

SEQ ID NO: 19755 - DNA, 15 bp, Homo sapiens
gccacagggctcaaa

SEQ ID NO: 19756 - DNA, 15 bp, Homo sapiens
ggccacagggctcaa

SEQ ID NO: 19757 - DNA, 15 bp, Homo sapiens
cggccacagggctca

SEQ ID NO: 19758 - DNA, 15 bp, Homo sapiens
ccggccacagggctc

SEQ ID NO: 19759 - DNA, 15 bp, Homo sapiens
gccggccacagggct

SEQ ID NO: 19760 - DNA, 15 bp, Homo sapiens
ggccggccacagggc

SEQ ID NO: 19761 - DNA, 15 bp, Homo sapiens
tggccggccacaggg

SEQ ID NO: 19762 - DNA, 15 bp, Homo sapiens
ctggccggccacagg

SEQ ID NO: 19763 - DNA, 15 bp, Homo sapiens
gctggccggccacag

SEQ ID NO: 19764 - DNA, 15 bp, Homo sapiens
agctggccggccaca

SEQ ID NO: 19765 - DNA, 15 bp, Homo sapiens
cagctggccggccac

SEQ ID NO: 19766 - DNA, 15 bp, Homo sapiens
acagctggccggcca

SEQ ID NO: 19767 - DNA, 15 bp, Homo sapiens
cacagctggccggcc

SEQ ID NO: 19768 - DNA, 15 bp, Homo sapiens
ccacagctggccggc

SEQ ID NO: 19769 - DNA, 15 bp, Homo sapiens
tccacagctggccgg

SEQ ID NO: 19770 - DNA, 15 bp, Homo sapiens
gtccacagctggccg

SEQ ID NO: 19771 - DNA, 15 bp, Homo sapiens
ggtccacagctggcc

SEQ ID NO: 19772 - DNA, 15 bp, Homo sapiens
cggtccacagctggc

SEQ ID NO: 19773 - DNA, 15 bp, Homo sapiens
acggtccacagctgg

SEQ ID NO: 19774 - DNA, 15 bp, Homo sapiens
gacggtccacagctg

SEQ ID NO: 19775 - DNA, 15 bp, Homo sapiens
agacggtccacagct

SEQ ID NO: 19776 - DNA, 15 bp, Homo sapiens
cagacggtccacagc

SEQ ID NO: 19777 - DNA, 15 bp, Homo sapiens
tcagacggtccacag

SEQ ID NO: 19778 - DNA, 15 bp, Homo sapiens
ttcagacggtccaca

SEQ ID NO: 19779 - DNA, 15 bp, Homo sapiens
gttcagacggtccac

SEQ ID NO: 19780 - DNA, 15 bp, Homo sapiens
tgttcagacggtcca

SEQ ID NO: 19781 - DNA, 15 bp, Homo sapiens
atgttcagacggtcc

SEQ ID NO: 19782 - DNA, 15 bp, Homo sapiens
gatgttcagacggtc

SEQ ID NO: 19783 - DNA, 15 bp, Homo sapiens
tgatgttcagacggt

SEQ ID NO: 19784 - DNA, 15 bp, Homo sapiens
gtgatgttcagacgg

SEQ ID NO: 19785 - DNA, 15 bp, Homo sapiens
ggtgatgttcagacg

SEQ ID NO: 19786 - DNA, 15 bp, Homo sapiens
aggtgatgttcagac

SEQ ID NO: 19787 - DNA, 15 bp, Homo sapiens
aaggtgatgttcaga

SEQ ID NO: 19788 - DNA, 15 bp, Homo sapiens
gaaggtgatgttcag

SEQ ID NO: 19789 - DNA, 15 bp, Homo sapiens
agaaggtgatgttca

SEQ ID NO: 19790 - DNA, 15 bp, Homo sapiens
tagaaggtgatgttc

SEQ ID NO: 19791 - DNA, 15 bp, Homo sapiens
gtagaaggtgatgtt

SEQ ID NO: 19792 - DNA, 15 bp, Homo sapiens
cgtagaaggtgatgt

SEQ ID NO: 19793 - DNA, 15 bp, Homo sapiens
tcgtagaaggtgatg

SEQ ID NO: 19794 - DNA, 15 bp, Homo sapiens
ctcgtagaaggtgat

SEQ ID NO: 19795 - DNA, 15 bp, Homo sapiens
tctcgtagaaggtga

SEQ ID NO: 19796 - DNA, 15 bp, Homo sapiens
ttctcgtagaaggtg

SEQ ID NO: 19797 - DNA, 15 bp, Homo sapiens
gttctcgtagaaggt

SEQ ID NO: 19798 - DNA, 15 bp, Homo sapiens
ggttctcgtagaagg

SEQ ID NO: 19799 - DNA, 15 bp, Homo sapiens
tggttctcgtagaag

SEQ ID NO: 19800 - DNA, 15 bp, Homo sapiens
ctggttctcgtagaa

SEQ ID NO: 19801 - DNA, 15 bp, Homo sapiens
tctggttctcgtaga

SEQ ID NO: 19802 - DNA, 15 bp, Homo sapiens
atctggttctcgtag

SEQ ID NO: 19803 - DNA, 15 bp, Homo sapiens
gatctggttctcgta

SEQ ID NO: 19804 - DNA, 15 bp, Homo sapiens
tgatctggttctcgt

SEQ ID NO: 19805 - DNA, 15 bp, Homo sapiens
gtgatctggttctcg

SEQ ID NO: 19806 - DNA, 15 bp, Homo sapiens
ggtgatctggttctc

SEQ ID NO: 19807 - DNA, 15 bp, Homo sapiens
cggtgatctggttct

SEQ ID NO: 19808 - DNA, 15 bp, Homo sapiens
gcggtgatctggttc

SEQ ID NO: 19809 - DNA, 15 bp, Homo sapiens
tgcggtgatctggtt

SEQ ID NO: 19810 - DNA, 15 bp, Homo sapiens
atgcggtgatctggt

SEQ ID NO: 19811 - DNA, 15 bp, Homo sapiens
aatgcggtgatctgg

SEQ ID NO: 19812 - DNA, 15 bp, Homo sapiens
gaatgcggtgatctg

SEQ ID NO: 19813 - DNA, 15 bp, Homo sapiens
ggaatgcggtgatct

SEQ ID NO: 19814 - DNA, 15 bp, Homo sapiens
aggaatgcggtgatc

SEQ ID NO: 19815 - DNA, 15 bp, Homo sapiens
caggaatgcggtgat

SEQ ID NO: 19816 - DNA, 15 bp, Homo sapiens
ccaggaatgcggtga

SEQ ID NO: 19817 - DNA, 15 bp, Homo sapiens
cccaggaatgcggtg

SEQ ID NO: 19818 - DNA, 15 bp, Homo sapiens
gcccaggaatgcggt

SEQ ID NO: 19819 - DNA, 15 bp, Homo sapiens
ggcccaggaatgcgg

SEQ ID NO: 19820 - DNA, 15 bp, Homo sapiens
tggcccaggaatgcg

SEQ ID NO: 19821 - DNA, 15 bp, Homo sapiens
gtggcccaggaatgc

SEQ ID NO: 19822 - DNA, 15 bp, Homo sapiens
tgtggcccaggaatg

SEQ ID NO: 19823 - DNA, 15 bp, Homo sapiens
ttgtggcccaggaat

SEQ ID NO: 19824 - DNA, 15 bp, Homo sapiens
attgtggcccaggaa

SEQ ID NO: 19825 - DNA, 15 bp, Homo sapiens
cattgtggcccagga

SEQ ID NO: 19826 - DNA, 15 bp, Homo sapiens
ccattgtggcccagg

SEQ ID NO: 19827 - DNA, 15 bp, Homo sapiens
tccattgtggcccag

SEQ ID NO: 19828 - DNA, 15 bp, Homo sapiens
ctccattgtggccca

SEQ ID NO: 19829 - DNA, 15 bp, Homo sapiens
gctccattgtggccc

SEQ ID NO: 19830 - DNA, 15 bp, Homo sapiens
agctccattgtggcc

SEQ ID NO: 19831 - DNA, 15 bp, Homo sapiens
cagctccattgtggc

SEQ ID NO: 19832 - DNA, 15 bp, Homo sapiens
ccagctccattgtgg

SEQ ID NO: 19833 - DNA, 15 bp, Homo sapiens
cccagctccattgtg

SEQ ID NO: 19834 - DNA, 15 bp, Homo sapiens
tcccagctccattgt

SEQ ID NO: 19835 - DNA, 15 bp, Homo sapiens
ttcccagctccattg

SEQ ID NO: 19836 - DNA, 15 bp, Homo sapiens
tttcccagctccatt

SEQ ID NO: 19837 - DNA, 15 bp, Homo sapiens
ttttcccagctccat

SEQ ID NO: 19838 - DNA, 15 bp, Homo sapiens
gttttcccagctcca

SEQ ID NO: 19839 - DNA, 15 bp, Homo sapiens
ggttttcccagctcc

SEQ ID NO: 19840 - DNA, 15 bp, Homo sapiens
tggttttcccagctc

SEQ ID NO: 19841 - DNA, 15 bp, Homo sapiens
gtggttttcccagct

SEQ ID NO: 19842 - DNA, 15 bp, Homo sapiens
ggtggttttcccagc

SEQ ID NO: 19843 - DNA, 15 bp, Homo sapiens
tggtggttttcccag

SEQ ID NO: 19844 - DNA, 15 bp, Homo sapiens
gtggtggttttccca

SEQ ID NO: 19845 - DNA, 15 bp, Homo sapiens
ggtggtggttttccc

SEQ ID NO: 19846 - DNA, 15 bp, Homo sapiens
aggtggtggttttcc

SEQ ID NO: 19847 - DNA, 15 bp, Homo sapiens
aaggtggtggttttc

SEQ ID NO: 19848 - DNA, 15 bp, Homo sapiens
caaggtggtggtttt

SEQ ID NO: 19849 - DNA, 15 bp, Homo sapiens
acaaggtggtggttt

SEQ ID NO: 19850 - DNA, 15 bp, Homo sapiens
cacaaggtggtggtt

SEQ ID NO: 19851 - DNA, 15 bp, Homo sapiens
tcacaaggtggtggt

SEQ ID NO: 19852 - DNA, 15 bp, Homo sapiens
ctcacaaggtggtgg

SEQ ID NO: 19853 - DNA, 15 bp, Homo sapiens
actcacaaggtggtg

SEQ ID NO: 19854 - DNA, 15 bp, Homo sapiens
gactcacaaggtggt

SEQ ID NO: 19855 - DNA, 15 bp, Homo sapiens
agactcacaaggtgg

SEQ ID NO: 19856 - DNA, 15 bp, Homo sapiens
aagactcacaaggtg

SEQ ID NO: 19857 - DNA, 15 bp, Homo sapiens
gaagactcacaaggt

SEQ ID NO: 19858 - DNA, 15 bp, Homo sapiens
ggaagactcacaagg

SEQ ID NO: 19859 - DNA, 15 bp, Homo sapiens
tggaagactcacaag

SEQ ID NO: 19860 - DNA, 15 bp, Homo sapiens
ctggaagactcacaa

SEQ ID NO: 19861 - DNA, 15 bp, Homo sapiens
gctggaagactcaca

SEQ ID NO: 19862 - DNA, 15 bp, Homo sapiens
tgctggaagactcac

SEQ ID NO: 19863 - DNA, 15 bp, Homo sapiens
ctgctggaagactca

SEQ ID NO: 19864 - DNA, 15 bp, Homo sapiens
tctgctggaagactc

SEQ ID NO: 19865 - DNA, 15 bp, Homo sapiens
ctctgctggaagact

SEQ ID NO: 19866 - DNA, 15 bp, Homo sapiens
tctctgctggaagac

SEQ ID NO: 19867 - DNA, 15 bp, Homo sapiens
ttctctgctggaaga

SEQ ID NO: 19868 - DNA, 15 bp, Homo sapiens
cttctctgctggaag

SEQ ID NO: 19869 - DNA, 15 bp, Homo sapiens
gcttctctgctggaa

SEQ ID NO: 19870 - DNA, 15 bp, Homo sapiens
agcttctctgctgga

SEQ ID NO: 19871 - DNA, 15 bp, Homo sapiens
cagcttctctgctgg

SEQ ID NO: 19872 - DNA, 15 bp, Homo sapiens
ccagcttctctgctg

SEQ ID NO: 19873 - DNA, 15 bp, Homo sapiens
gccagcttctctgct

SEQ ID NO: 19874 - DNA, 15 bp, Homo sapiens
agccagcttctctgc

SEQ ID NO: 19875 - DNA, 15 bp, Homo sapiens
cagccagcttctctg

SEQ ID NO: 19876 - DNA, 15 bp, Homo sapiens
gcagccagcttctct

SEQ ID NO: 19877 - DNA, 15 bp, Homo sapiens
ggcagccagcttctc

SEQ ID NO: 19878 - DNA, 15 bp, Homo sapiens
tggcagccagcttct

SEQ ID NO: 19879 - DNA, 15 bp, Homo sapiens
atggcagccagcttc

SEQ ID NO: 19880 - DNA, 15 bp, Homo sapiens
catggcagccagctt

SEQ ID NO: 19881 - DNA, 15 bp, Homo sapiens
gcatggcagccagct

SEQ ID NO: 19882 - DNA, 15 bp, Homo sapiens
agcatggcagccagc

SEQ ID NO: 19883 - DNA, 15 bp, Homo sapiens
tagcatggcagccag

SEQ ID NO: 19884 - DNA, 15 bp, Homo sapiens
ctagcatggcagcca

SEQ ID NO: 19885 - DNA, 15 bp, Homo sapiens
gctagcatggcagcc

SEQ ID NO: 19886 - DNA, 15 bp, Homo sapiens
ggctagcatggcagc

SEQ ID NO: 19887 - DNA, 15 bp, Homo sapiens
aggctagcatggcag

SEQ ID NO: 19888 - DNA, 15 bp, Homo sapiens
caggctagcatggca

SEQ ID NO: 19889 - DNA, 15 bp, Homo sapiens
acaggctagcatggc

SEQ ID NO: 19890 - DNA, 15 bp, Homo sapiens
gacaggctagcatgg

SEQ ID NO: 19891 - DNA, 15 bp, Homo sapiens
tgacaggctagcatg

SEQ ID NO: 19892 - DNA, 15 bp, Homo sapiens
atgacaggctagcat

SEQ ID NO: 19893 - DNA, 15 bp, Homo sapiens
aatgacaggctagca

SEQ ID NO: 19894 - DNA, 15 bp, Homo sapiens
aaatgacaggctagc

SEQ ID NO: 19895 - DNA, 15 bp, Homo sapiens
gaaatgacaggctag

SEQ ID NO: 19896 - DNA, 15 bp, Homo sapiens
ggaaatgacaggcta

SEQ ID NO: 19897 - DNA, 15 bp, Homo sapiens
aggaaatgacaggct

SEQ ID NO: 19898 - DNA, 15 bp, Homo sapiens
caggaaatgacaggc

SEQ ID NO: 19899 - DNA, 15 bp, Homo sapiens
ccaggaaatgacagg

SEQ ID NO: 19900 - DNA, 15 bp, Homo sapiens
gccaggaaatgacag

SEQ ID NO: 19901 - DNA, 15 bp, Homo sapiens
agccaggaaatgaca

SEQ ID NO: 19902 - DNA, 15 bp, Homo sapiens
aagccaggaaatgac

SEQ ID NO: 19903 - DNA, 15 bp, Homo sapiens
taagccaggaaatga

SEQ ID NO: 19904 - DNA, 15 bp, Homo sapiens
ctaagccaggaaatg

SEQ ID NO: 19905 - DNA, 15 bp, Homo sapiens
actaagccaggaaat

SEQ ID NO: 19906 - DNA, 15 bp, Homo sapiens
gactaagccaggaaa

SEQ ID NO: 19907 - DNA, 15 bp, Homo sapiens
agactaagccaggaa

SEQ ID NO: 19908 - DNA, 15 bp, Homo sapiens
aagactaagccagga

SEQ ID NO: 19909 - DNA, 15 bp, Homo sapiens
aaagactaagccagg

SEQ ID NO: 19910 - DNA, 15 bp, Homo sapiens
gaaagactaagccag

SEQ ID NO: 19911 - DNA, 15 bp, Homo sapiens
ggaaagactaagcca

SEQ ID NO: 19912 - DNA, 15 bp, Homo sapiens
gggaaagactaagcc

SEQ ID NO: 19913 - DNA, 15 bp, Homo sapiens
agggaaagactaagc

SEQ ID NO: 19914 - DNA, 15 bp, Homo sapiens
tagggaaagactaag

SEQ ID NO: 19915 - DNA, 15 bp, Homo sapiens
atagggaaagactaa

SEQ ID NO: 19916 - DNA, 15 bp, Homo sapiens
gatagggaaagacta

SEQ ID NO: 19917 - DNA, 15 bp, Homo sapiens
tgatagggaaagact

SEQ ID NO: 19918 - DNA, 15 bp, Homo sapiens
ctgatagggaaagac

SEQ ID NO: 19919 - DNA, 15 bp, Homo sapiens
gctgatagggaaaga

SEQ ID NO: 19920 - DNA, 15 bp, Homo sapiens
cgctgatagggaaag

SEQ ID NO: 19921 - DNA, 15 bp, Homo sapiens
ccgctgatagggaaa

SEQ ID NO: 19922 - DNA, 15 bp, Homo sapiens
gccgctgatagggaa

SEQ ID NO: 19923 - DNA, 15 bp, Homo sapiens
agccgctgataggga

SEQ ID NO: 19924 - DNA, 15 bp, Homo sapiens
cagccgctgataggg

SEQ ID NO: 19925 - DNA, 15 bp, Homo sapiens
acagccgctgatagg

SEQ ID NO: 19926 - DNA, 15 bp, Homo sapiens
gacagccgctgatag

SEQ ID NO: 19927 - DNA, 15 bp, Homo sapiens
agacagccgctgata

SEQ ID NO: 19928 - DNA, 15 bp, Homo sapiens
tagacagccgctgat

SEQ ID NO: 19929 - DNA, 15 bp, Homo sapiens
gtagacagccgctga

SEQ ID NO: 19930 - DNA, 15 bp, Homo sapiens
agtagacagccgctg

SEQ ID NO: 19931 - DNA, 15 bp, Homo sapiens
gagtagacagccgct

SEQ ID NO: 19932 - DNA, 15 bp, Homo sapiens
agagtagacagccgc

SEQ ID NO: 19933 - DNA, 15 bp, Homo sapiens
aagagtagacagccg

SEQ ID NO: 19934 - DNA, 15 bp, Homo sapiens
aaagagtagacagcc

SEQ ID NO: 19935 - DNA, 15 bp, Homo sapiens
gaaagagtagacagc

SEQ ID NO: 19936 - DNA, 15 bp, Homo sapiens
ggaaagagtagacag

SEQ ID NO: 19937 - DNA, 15 bp, Homo sapiens
gggaaagagtagaca

SEQ ID NO: 19938 - DNA, 15 bp, Homo sapiens
tgggaaagagtagac

SEQ ID NO: 19939 - DNA, 15 bp, Homo sapiens
gtgggaaagagtaga

SEQ ID NO: 19940 - DNA, 15 bp, Homo sapiens
tgtgggaaagagtag

SEQ ID NO: 19941 - DNA, 15 bp, Homo sapiens
ttgtgggaaagagta

SEQ ID NO: 19942 - DNA, 15 bp, Homo sapiens
tttgtgggaaagagt

SEQ ID NO: 19943 - DNA, 15 bp, Homo sapiens
atttgtgggaaagag

SEQ ID NO: 19944 - DNA, 15 bp, Homo sapiens
aatttgtgggaaaga

SEQ ID NO: 19945 - DNA, 15 bp, Homo sapiens
aaatttgtgggaaag

SEQ ID NO: 19946 - DNA, 15 bp, Homo sapiens
aaaatttgtgggaaa

SEQ ID NO: 19947 - DNA, 15 bp, Homo sapiens
taaaatttgtgggaa

SEQ ID NO: 19948 - DNA, 15 bp, Homo sapiens
ctaaaatttgtggga

SEQ ID NO: 19949 - DNA, 15 bp, Homo sapiens
actaaaatttgtggg

SEQ ID NO: 19950 - DNA, 15 bp, Homo sapiens
cactaaaatttgtgg

SEQ ID NO: 19951 - DNA, 15 bp, Homo sapiens
tcactaaaatttgtg

SEQ ID NO: 19952 - DNA, 15 bp, Homo sapiens
gtcactaaaatttgt

SEQ ID NO: 19953 - DNA, 15 bp, Homo sapiens
tgtcactaaaatttg

SEQ ID NO: 19954 - DNA, 15 bp, Homo sapiens
ttgtcactaaaattt

SEQ ID NO: 19955 - DNA, 15 bp, Homo sapiens
tttgtcactaaaatt

SEQ ID NO: 19956 - DNA, 15 bp, Homo sapiens
atttgtcactaaaat

SEQ ID NO: 19957 - DNA, 15 bp, Homo sapiens
tatttgtcactaaaa

SEQ ID NO: 19958 - DNA, 15 bp, Homo sapiens
atatttgtcactaaa

SEQ ID NO: 19959 - DNA, 15 bp, Homo sapiens
aatatttgtcactaa

SEQ ID NO: 19960 - DNA, 15 bp, Homo sapiens
aaatatttgtcacta

SEQ ID NO: 19961 - DNA, 15 bp, Homo sapiens
caaatatttgtcact

SEQ ID NO: 19962 - DNA, 15 bp, Homo sapiens
gcaaatatttgtcac

SEQ ID NO: 19963 - DNA, 15 bp, Homo sapiens
cgcaaatatttgtca

SEQ ID NO: 19964 - DNA, 15 bp, Homo sapiens
ccgcaaatatttgtc

SEQ ID NO: 19965 - DNA, 15 bp, Homo sapiens
gccgcaaatatttgt

SEQ ID NO: 19966 - DNA, 15 bp, Homo sapiens
ggccgcaaatatttg

SEQ ID NO: 19967 - DNA, 15 bp, Homo sapiens
gggccgcaaatattt

SEQ ID NO: 19968 - DNA, 15 bp, Homo sapiens
ggggccgcaaatatt

SEQ ID NO: 19969 - DNA, 15 bp, Homo sapiens
tggggccgcaaatat

SEQ ID NO: 19970 - DNA, 15 bp, Homo sapiens
ttggggccgcaaata

SEQ ID NO: 19971 - DNA, 15 bp, Homo sapiens
tttggggccgcaaat

SEQ ID NO: 19972 - DNA, 15 bp, Homo sapiens
ttttggggccgcaaa

SEQ ID NO: 19973 - DNA, 15 bp, Homo sapiens
tttttggggccgcaa

SEQ ID NO: 19974 - DNA, 15 bp, Homo sapiens
atttttggggccgca

SEQ ID NO: 19975 - DNA, 15 bp, Homo sapiens
catttttggggccgc

SEQ ID NO: 19976 - DNA, 15 bp, Homo sapiens
acatttttggggccg

SEQ ID NO: 19977 - DNA, 15 bp, Homo sapiens
cacatttttggggcc

SEQ ID NO: 19978 - DNA, 15 bp, Homo sapiens
acacatttttggggc

SEQ ID NO: 19979 - DNA, 15 bp, Homo sapiens
tacacatttttgggg

SEQ ID NO: 19980 - DNA, 15 bp, Homo sapiens
ttacacatttttggg

SEQ ID NO: 19981 - DNA, 15 bp, Homo sapiens
tttacacatttttgg

SEQ ID NO: 19982 - DNA, 15 bp, Homo sapiens
ttttacacatttttg

SEQ ID NO: 19983 - DNA, 15 bp, Homo sapiens
cttttacacattttt

SEQ ID NO: 19984 - DNA, 15 bp, Homo sapiens
gcttttacacatttt

SEQ ID NO: 19985 - DNA, 15 bp, Homo sapiens
agcttttacacattt

SEQ ID NO: 19986 - DNA, 15 bp, Homo sapiens
aagcttttacacatt

SEQ ID NO: 19987 - DNA, 15 bp, Homo sapiens
aaagcttttacacat

SEQ ID NO: 19988 - DNA, 15 bp, Homo sapiens
gaaagcttttacaca

SEQ ID NO: 19989 - DNA, 15 bp, Homo sapiens
agaaagcttttacac

SEQ ID NO: 19990 - DNA, 15 bp, Homo sapiens
cagaaagcttttaca

SEQ ID NO: 19991 - DNA, 15 bp, Homo sapiens
gcagaaagcttttac

SEQ ID NO: 19992 - DNA, 15 bp, Homo sapiens
tgcagaaagctttta

SEQ ID NO: 19993 - DNA, 15 bp, Homo sapiens
ctgcagaaagctttt

SEQ ID NO: 19994 - DNA, 15 bp, Homo sapiens
actgcagaaagcttt

SEQ ID NO: 19995 - DNA, 15 bp, Homo sapiens
tactgcagaaagctt

SEQ ID NO: 19996 - DNA, 15 bp, Homo sapiens
atactgcagaaagct

SEQ ID NO: 19997 - DNA, 15 bp, Homo sapiens
aatactgcagaaagc

SEQ ID NO: 19998 - DNA, 15 bp, Homo sapiens
gaatactgcagaaag

SEQ ID NO: 19999 - DNA, 15 bp, Homo sapiens
tgaatactgcagaaa

SEQ ID NO: 20000 - DNA, 15 bp, Homo sapiens
ttgaatactgcagaa

SEQ ID NO: 20001 - DNA, 15 bp, Homo sapiens
tttgaatactgcaga

SEQ ID NO: 20002 - DNA, 15 bp, Homo sapiens
ctttgaatactgcag

SEQ ID NO: 20003 - DNA, 15 bp, Homo sapiens
tctttgaatactgca

SEQ ID NO: 20004 - DNA, 15 bp, Homo sapiens
atctttgaatactgc

SEQ ID NO: 20005 - DNA, 15 bp, Homo sapiens
gatctttgaatactg

SEQ ID NO: 20006 - DNA, 15 bp, Homo sapiens
tgatctttgaatact

SEQ ID NO: 20007 - DNA, 15 bp, Homo sapiens
gtgatctttgaatac

SEQ ID NO: 20008 - DNA, 15 bp, Homo sapiens
agtgatctttgaata

SEQ ID NO: 20009 - DNA, 15 bp, Homo sapiens
tagtgatctttgaat

SEQ ID NO: 20010 - DNA, 15 bp, Homo sapiens
ttagtgatctttgaa

SEQ ID NO: 20011 - DNA, 15 bp, Homo sapiens
attagtgatctttga

SEQ ID NO: 20012 - DNA, 15 bp, Homo sapiens
tattagtgatctttg

SEQ ID NO: 20013 - DNA, 15 bp, Homo sapiens
atattagtgatcttt

SEQ ID NO: 20014 - DNA, 15 bp, Homo sapiens
catattagtgatctt

SEQ ID NO: 20015 - DNA, 15 bp, Homo sapiens
acatattagtgatct

SEQ ID NO: 20016 - DNA, 15 bp, Homo sapiens
tacatattagtgatc

SEQ ID NO: 20017 - DNA, 15 bp, Homo sapiens
atacatattagtgat

SEQ ID NO: 20018 - DNA, 15 bp, Homo sapiens
aatacatattagtga

SEQ ID NO: 20019 - DNA, 15 bp, Homo sapiens
gaatacatattagtg

SEQ ID NO: 20020 - DNA, 15 bp, Homo sapiens
agaatacatattagt

SEQ ID NO: 20021 - DNA, 15 bp, Homo sapiens
gagaatacatattag

SEQ ID NO: 20022 - DNA, 15 bp, Homo sapiens
agagaatacatatta

SEQ ID NO: 20023 - DNA, 15 bp, Homo sapiens
aagagaatacatatt

SEQ ID NO: 20024 - DNA, 15 bp, Homo sapiens
caagagaatacatat

SEQ ID NO: 20025 - DNA, 15 bp, Homo sapiens
tcaagagaatacata

SEQ ID NO: 20026 - DNA, 15 bp, Homo sapiens
atcaagagaatacat

SEQ ID NO: 20027 - DNA, 15 bp, Homo sapiens
catcaagagaataca

SEQ ID NO: 20028 - DNA, 15 bp, Homo sapiens
ccatcaagagaatac

SEQ ID NO: 20029 - DNA, 15 bp, Homo sapiens
cccatcaagagaata

SEQ ID NO: 20030 - DNA, 15 bp, Homo sapiens
ccccatcaagagaat

SEQ ID NO: 20031 - DNA, 15 bp, Homo sapiens
tccccatcaagagaa

SEQ ID NO: 20032 - DNA, 15 bp, Homo sapiens
ctccccatcaagaga

SEQ ID NO: 20033 - DNA, 15 bp, Homo sapiens
cctccccatcaagag

SEQ ID NO: 20034 - DNA, 15 bp, Homo sapiens
acctccccatcaaga

SEQ ID NO: 20035 - DNA, 15 bp, Homo sapiens
tacctccccatcaag

SEQ ID NO: 20036 - DNA, 15 bp, Homo sapiens
ctacctccccatcaa

SEQ ID NO: 20037 - DNA, 15 bp, Homo sapiens
tctacctccccatca

SEQ ID NO: 20038 - DNA, 15 bp, Homo sapiens
ttctacctccccatc

SEQ ID NO: 20039 - DNA, 15 bp, Homo sapiens
attctacctccccat

SEQ ID NO: 20040 - DNA, 15 bp, Homo sapiens
tattctacctcccca

SEQ ID NO: 20041 - DNA, 15 bp, Homo sapiens
gtattctacctcccc

SEQ ID NO: 20042 - DNA, 15 bp, Homo sapiens
cgtattctacctccc

SEQ ID NO: 20043 - DNA, 15 bp, Homo sapiens
acgtattctacctcc

SEQ ID NO: 20044 - DNA, 15 bp, Homo sapiens
aacgtattctacctc

SEQ ID NO: 20045 - DNA, 15 bp, Homo sapiens
aaacgtattctacct

SEQ ID NO: 20046 - DNA, 15 bp, Homo sapiens
taaacgtattctacc

SEQ ID NO: 20047 - DNA, 15 bp, Homo sapiens
ataaacgtattctac

SEQ ID NO: 20048 - DNA, 15 bp, Homo sapiens
aataaacgtattcta

SEQ ID NO: 20049 - DNA, 15 bp, Homo sapiens
caataaacgtattct

SEQ ID NO: 20050 - DNA, 15 bp, Homo sapiens
gcaataaacgtattc

SEQ ID NO: 20051 - DNA, 15 bp, Homo sapiens
ggcaataaacgtatt

SEQ ID NO: 20052 - DNA, 15 bp, Homo sapiens
gggcaataaacgtat

SEQ ID NO: 20053 - DNA, 15 bp, Homo sapiens
ggggcaataaacgta

SEQ ID NO: 20054 - DNA, 15 bp, Homo sapiens
aggggcaataaacgt

SEQ ID NO: 20055 - DNA, 15 bp, Homo sapiens
aaggggcaataaacg

SEQ ID NO: 20056 - DNA, 15 bp, Homo sapiens
aaaggggcaataaac

SEQ ID NO: 20057 - DNA, 15 bp, Homo sapiens
aaaaggggcaataaa

SEQ ID NO: 20058 - DNA, 15 bp, Homo sapiens
caaaaggggcaataa

SEQ ID NO: 20059 - DNA, 15 bp, Homo sapiens
acaaaaggggcaata

SEQ ID NO: 20060 - DNA, 15 bp, Homo sapiens
cacaaaaggggcaat

SEQ ID NO: 20061 - DNA, 15 bp, Homo sapiens
acacaaaaggggcaa

SEQ ID NO: 20062 - DNA, 15 bp, Homo sapiens
cacacaaaaggggca

SEQ ID NO: 20063 - DNA, 15 bp, Homo sapiens
gcacacaaaaggggc

SEQ ID NO: 20064 - DNA, 15 bp, Homo sapiens
ggcacacaaaagggg

SEQ ID NO: 20065 - DNA, 15 bp, Homo sapiens
cggcacacaaaaggg

SEQ ID NO: 20066 - DNA, 15 bp, Homo sapiens
ccggcacacaaaagg

SEQ ID NO: 20067 - DNA, 15 bp, Homo sapiens
cccggcacacaaaag

SEQ ID NO: 20068 - DNA, 15 bp, Homo sapiens
ccccggcacacaaaa

SEQ ID NO: 20069 - DNA, 15 bp, Homo sapiens
tccccggcacacaaa

SEQ ID NO: 20070 - DNA, 15 bp, Homo sapiens
ttccccggcacacaa

SEQ ID NO: 20071 - DNA, 15 bp, Homo sapiens
cttccccggcacaca

SEQ ID NO: 20072 - DNA, 15 bp, Homo sapiens
acttccccggcacac

SEQ ID NO: 20073 - DNA, 15 bp, Homo sapiens
cacttccccggcaca

SEQ ID NO: 20074 - DNA, 15 bp, Homo sapiens
ccacttccccggcac

SEQ ID NO: 20075 - DNA, 15 bp, Homo sapiens
tccacttccccggca

SEQ ID NO: 20076 - DNA, 15 bp, Homo sapiens
gtccacttccccggc

SEQ ID NO: 20077 - DNA, 15 bp, Homo sapiens
tgtccacttccccgg

SEQ ID NO: 20078 - DNA, 15 bp, Homo sapiens
atgtccacttccccg

SEQ ID NO: 20079 - DNA, 15 bp, Homo sapiens
aatgtccacttcccc

SEQ ID NO: 20080 - DNA, 15 bp, Homo sapiens
gaatgtccacttccc

SEQ ID NO: 20081 - DNA, 15 bp, Homo sapiens
tgaatgtccacttcc

SEQ ID NO: 20082 - DNA, 15 bp, Homo sapiens
atgaatgtccacttc

SEQ ID NO: 20083 - DNA, 15 bp, Homo sapiens
aatgaatgtccactt

SEQ ID NO: 20084 - DNA, 15 bp, Homo sapiens
gaatgaatgtccact

SEQ ID NO: 20085 - DNA, 15 bp, Homo sapiens
tgaatgaatgtccac

SEQ ID NO: 20086 - DNA, 15 bp, Homo sapiens
ctgaatgaatgtcca

SEQ ID NO: 20087 - DNA, 15 bp, Homo sapiens
tctgaatgaatgtcc

SEQ ID NO: 20088 - DNA, 15 bp, Homo sapiens
ctctgaatgaatgtc

SEQ ID NO: 20089 - DNA, 15 bp, Homo sapiens
tctctgaatgaatgt

SEQ ID NO: 20090 - DNA, 15 bp, Homo sapiens
ctctctgaatgaatg

SEQ ID NO: 20091 - DNA, 15 bp, Homo sapiens
actctctgaatgaat

SEQ ID NO: 20092 - DNA, 15 bp, Homo sapiens
aactctctgaatgaa

SEQ ID NO: 20093 - DNA, 15 bp, Homo sapiens
caactctctgaatga

SEQ ID NO: 20094 - DNA, 15 bp, Homo sapiens
tcaactctctgaatg

SEQ ID NO: 20095 - DNA, 15 bp, Homo sapiens
ttcaactctctgaat

SEQ ID NO: 20096 - DNA, 15 bp, Homo sapiens
cttcaactctctgaa

SEQ ID NO: 20097 - DNA, 15 bp, Homo sapiens
acttcaactctctga

SEQ ID NO: 20098 - DNA, 15 bp, Homo sapiens
cacttcaactctctg

SEQ ID NO: 20099 - DNA, 15 bp, Homo sapiens
tcacttcaactctct

SEQ ID NO: 20100 - DNA, 15 bp, Homo sapiens
gtcacttcaactctc

SEQ ID NO: 20101 - DNA, 15 bp, Homo sapiens
agtcacttcaactct

SEQ ID NO: 20102 - DNA, 15 bp, Homo sapiens
aagtcacttcaactc

SEQ ID NO: 20103 - DNA, 15 bp, Homo sapiens
aaagtcacttcaact

SEQ ID NO: 20104 - DNA, 15 bp, Homo sapiens
gaaagtcacttcaac

SEQ ID NO: 20105 - DNA, 15 bp, Homo sapiens
ggaaagtcacttcaa

SEQ ID NO: 20106 - DNA, 15 bp, Homo sapiens
aggaaagtcacttca

SEQ ID NO: 20107 - DNA, 15 bp, Homo sapiens
caggaaagtcacttc

SEQ ID NO: 20108 - DNA, 15 bp, Homo sapiens
tcaggaaagtcactt

SEQ ID NO: 20109 - DNA, 15 bp, Homo sapiens
ttcaggaaagtcact

SEQ ID NO: 20110 - DNA, 15 bp, Homo sapiens
cttcaggaaagtcac

SEQ ID NO: 20111 - DNA, 15 bp, Homo sapiens
gcttcaggaaagtca

SEQ ID NO: 20112 - DNA, 15 bp, Homo sapiens
ggcttcaggaaagtc

SEQ ID NO: 20113 - DNA, 15 bp, Homo sapiens
tggcttcaggaaagt

SEQ ID NO: 20114 - DNA, 15 bp, Homo sapiens
gtggcttcaggaaag

SEQ ID NO: 20115 - DNA, 15 bp, Homo sapiens
ggtggcttcaggaaa

SEQ ID NO: 20116 - DNA, 15 bp, Homo sapiens
tggtggcttcaggaa

SEQ ID NO: 20117 - DNA, 15 bp, Homo sapiens
ttggtggcttcagga

SEQ ID NO: 20118 - DNA, 15 bp, Homo sapiens
cttggtggcttcagg

SEQ ID NO: 20119 - DNA, 15 bp, Homo sapiens
acttggtggcttcag

SEQ ID NO: 20120 - DNA, 15 bp, Homo sapiens
aacttggtggcttca

SEQ ID NO: 20121 - DNA, 15 bp, Homo sapiens
caacttggtggcttc

SEQ ID NO: 20122 - DNA, 15 bp, Homo sapiens
acaacttggtggctt

SEQ ID NO: 20123 - DNA, 15 bp, Homo sapiens
gacaacttggtggct

SEQ ID NO: 20124 - DNA, 15 bp, Homo sapiens
tgacaacttggtggc

SEQ ID NO: 20125 - DNA, 15 bp, Homo sapiens
atgacaacttggtgg

SEQ ID NO: 20126 - DNA, 15 bp, Homo sapiens
catgacaacttggtg

SEQ ID NO: 20127 - DNA, 15 bp, Homo sapiens
ccatgacaacttggt

SEQ ID NO: 20128 - DNA, 15 bp, Homo sapiens
gccatgacaacttgg

SEQ ID NO: 20129 - DNA, 15 bp, Homo sapiens
agccatgacaacttg

SEQ ID NO: 20130 - DNA, 15 bp, Homo sapiens
gagccatgacaactt

SEQ ID NO: 20131 - DNA, 15 bp, Homo sapiens
tgagccatgacaact

SEQ ID NO: 20132 - DNA, 15 bp, Homo sapiens
ctgagccatgacaac

SEQ ID NO: 20133 - DNA, 15 bp, Homo sapiens
gctgagccatgacaa

SEQ ID NO: 20134 - DNA, 15 bp, Homo sapiens
cgctgagccatgaca

SEQ ID NO: 20135 - DNA, 15 bp, Homo sapiens
ccgctgagccatgac

SEQ ID NO: 20136 - DNA, 15 bp, Homo sapiens
cccgctgagccatga

SEQ ID NO: 20137 - DNA, 15 bp, Homo sapiens
ccccgctgagccatg

SEQ ID NO: 20138 - DNA, 15 bp, Homo sapiens
cccccgctgagccat

SEQ ID NO: 20139 - DNA, 15 bp, Homo sapiens
gcccccgctgagcca

SEQ ID NO: 20140 - DNA, 15 bp, Homo sapiens
tgcccccgctgagcc

SEQ ID NO: 20141 - DNA, 15 bp, Homo sapiens
ttgcccccgctgagc

SEQ ID NO: 20142 - DNA, 15 bp, Homo sapiens
tttgcccccgctgag

SEQ ID NO: 20143 - DNA, 15 bp, Homo sapiens
ttttgcccccgctga

SEQ ID NO: 20144 - DNA, 15 bp, Homo sapiens
cttttgcccccgctg

SEQ ID NO: 20145 - DNA, 15 bp, Homo sapiens
gcttttgcccccgct

SEQ ID NO: 20146 - DNA, 15 bp, Homo sapiens
ggcttttgcccccgc

SEQ ID NO: 20147 - DNA, 15 bp, Homo sapiens
tggcttttgcccccg

SEQ ID NO: 20148 - DNA, 15 bp, Homo sapiens
ctggcttttgccccc

SEQ ID NO: 20149 - DNA, 15 bp, Homo sapiens
cctggcttttgcccc

SEQ ID NO: 20150 - DNA, 15 bp, Homo sapiens
gcctggcttttgccc

SEQ ID NO: 20151 - DNA, 15 bp, Homo sapiens
tgcctggcttttgcc

SEQ ID NO: 20152 - DNA, 15 bp, Homo sapiens
gtgcctggcttttgc

SEQ ID NO: 20153 - DNA, 15 bp, Homo sapiens
ggtgcctggcttttg

SEQ ID NO: 20154 - DNA, 15 bp, Homo sapiens
tggtgcctggctttt

SEQ ID NO: 20155 - DNA, 15 bp, Homo sapiens
gtggtgcctggcttt

SEQ ID NO: 20156 - DNA, 15 bp, Homo sapiens
tgtggtgcctggctt

SEQ ID NO: 20157 - DNA, 15 bp, Homo sapiens
ctgtggtgcctggct

SEQ ID NO: 20158 - DNA, 15 bp, Homo sapiens
actgtggtgcctggc

SEQ ID NO: 20159 - DNA, 15 bp, Homo sapiens
aactgtggtgcctgg

SEQ ID NO: 20160 - DNA, 15 bp, Homo sapiens
caactgtggtgcctg

SEQ ID NO: 20161 - DNA, 15 bp, Homo sapiens
gcaactgtggtgcct

SEQ ID NO: 20162 - DNA, 15 bp, Homo sapiens
ggcaactgtggtgcc

SEQ ID NO: 20163 - DNA, 15 bp, Homo sapiens
aggcaactgtggtgc

SEQ ID NO: 20164 - DNA, 15 bp, Homo sapiens
gaggcaactgtggtg

SEQ ID NO: 20165 - DNA, 15 bp, Homo sapiens
agaggcaactgtggt

SEQ ID NO: 20166 - DNA, 15 bp, Homo sapiens
aagaggcaactgtgg

SEQ ID NO: 20167 - DNA, 15 bp, Homo sapiens
caagaggcaactgtg

SEQ ID NO: 20168 - DNA, 15 bp, Homo sapiens
acaagaggcaactgt

SEQ ID NO: 20169 - DNA, 15 bp, Homo sapiens
aacaagaggcaactg

SEQ ID NO: 20170 - DNA, 15 bp, Homo sapiens
aaacaagaggcaact

SEQ ID NO: 20171 - DNA, 15 bp, Homo sapiens
gaaacaagaggcaac

SEQ ID NO: 20172 - DNA, 15 bp, Homo sapiens
agaaacaagaggcaa

SEQ ID NO: 20173 - DNA, 15 bp, Homo sapiens
gagaaacaagaggca

SEQ ID NO: 20174 - DNA, 15 bp, Homo sapiens
tgagaaacaagaggc

SEQ ID NO: 20175 - DNA, 15 bp, Homo sapiens
gtgagaaacaagagg

SEQ ID NO: 20176 - DNA, 15 bp, Homo sapiens
tgtgagaaacaagag

SEQ ID NO: 20177 - DNA, 15 bp, Homo sapiens
gtgtgagaaacaaga

SEQ ID NO: 20178 - DNA, 15 bp, Homo sapiens
ggtgtgagaaacaag

SEQ ID NO: 20179 - DNA, 15 bp, Homo sapiens
aggtgtgagaaacaa

SEQ ID NO: 20180 - DNA, 15 bp, Homo sapiens
aaggtgtgagaaaca

SEQ ID NO: 20181 - DNA, 15 bp, Homo sapiens
caaggtgtgagaaac

SEQ ID NO: 20182 - DNA, 15 bp, Homo sapiens
tcaaggtgtgagaaa

SEQ ID NO: 20183 - DNA, 15 bp, Homo sapiens
ctcaaggtgtgagaa

SEQ ID NO: 20184 - DNA, 15 bp, Homo sapiens
actcaaggtgtgaga

SEQ ID NO: 20185 - DNA, 15 bp, Homo sapiens
gactcaaggtgtgag

SEQ ID NO: 20186 - DNA, 15 bp, Homo sapiens
agactcaaggtgtga

SEQ ID NO: 20187 - DNA, 15 bp, Homo sapiens
aagactcaaggtgtg

SEQ ID NO: 20188 - DNA, 15 bp, Homo sapiens
aaagactcaaggtgt

SEQ ID NO: 20189 - DNA, 15 bp, Homo sapiens
gaaagactcaaggtg

SEQ ID NO: 20190 - DNA, 15 bp, Homo sapiens
ggaaagactcaaggt

SEQ ID NO: 20191 - DNA, 15 bp, Homo sapiens
gggaaagactcaagg

SEQ ID NO: 20192 - DNA, 15 bp, Homo sapiens
ggggaaagactcaag

SEQ ID NO: 20193 - DNA, 15 bp, Homo sapiens
gggggaaagactcaa

SEQ ID NO: 20194 - DNA, 15 bp, Homo sapiens
ggggggaaagactca

SEQ ID NO: 20195 - DNA, 15 bp, Homo sapiens
tggggggaaagactc

SEQ ID NO: 20196 - DNA, 15 bp, Homo sapiens
atggggggaaagact

SEQ ID NO: 20197 - DNA, 15 bp, Homo sapiens
gatggggggaaagac

SEQ ID NO: 20198 - DNA, 15 bp, Homo sapiens
agatggggggaaaga

SEQ ID NO: 20199 - DNA, 15 bp, Homo sapiens
gagatggggggaaag

SEQ ID NO: 20200 - DNA, 15 bp, Homo sapiens
tgagatggggggaaa

SEQ ID NO: 20201 - DNA, 15 bp, Homo sapiens
ttgagatggggggaa

SEQ ID NO: 20202 - DNA, 15 bp, Homo sapiens
gttgagatgggggga

SEQ ID NO: 20203 - DNA, 15 bp, Homo sapiens
tgttgagatgggggg

SEQ ID NO: 20204 - DNA, 15 bp, Homo sapiens
ctgttgagatggggg

SEQ ID NO: 20205 - DNA, 15 bp, Homo sapiens
actgttgagatgggg

SEQ ID NO: 20206 - DNA, 15 bp, Homo sapiens
gactgttgagatggg

SEQ ID NO: 20207 - DNA, 15 bp, Homo sapiens
ggactgttgagatgg

SEQ ID NO: 20208 - DNA, 15 bp, Homo sapiens
tggactgttgagatg

SEQ ID NO: 20209 - DNA, 15 bp, Homo sapiens
atggactgttgagat

SEQ ID NO: 20210 - DNA, 15 bp, Homo sapiens
catggactgttgaga

SEQ ID NO: 20211 - DNA, 15 bp, Homo sapiens
ccatggactgttgag

SEQ ID NO: 20212 - DNA, 15 bp, Homo sapiens
accatggactgttga

SEQ ID NO: 20213 - DNA, 15 bp, Homo sapiens
caccatggactgttg

SEQ ID NO: 20214 - DNA, 15 bp, Homo sapiens
ccaccatggactgtt

SEQ ID NO: 20215 - DNA, 15 bp, Homo sapiens
accaccatggactgt

SEQ ID NO: 20216 - DNA, 15 bp, Homo sapiens
caccaccatggactg

SEQ ID NO: 20217 - DNA, 15 bp, Homo sapiens
tcaccaccatggact

SEQ ID NO: 20218 - DNA, 15 bp, Homo sapiens
atcaccaccatggac

SEQ ID NO: 20219 - DNA, 15 bp, Homo sapiens
gatcaccaccatgga

SEQ ID NO: 20220 - DNA, 15 bp, Homo sapiens
tgatcaccaccatgg

SEQ ID NO: 20221 - DNA, 15 bp, Homo sapiens
ttgatcaccaccatg

SEQ ID NO: 20222 - DNA, 15 bp, Homo sapiens
cttgatcaccaccat

SEQ ID NO: 20223 - DNA, 15 bp, Homo sapiens
acttgatcaccacca

SEQ ID NO: 20224 - DNA, 15 bp, Homo sapiens
gacttgatcaccacc

SEQ ID NO: 20225 - DNA, 15 bp, Homo sapiens
tgacttgatcaccac

SEQ ID NO: 20226 - DNA, 15 bp, Homo sapiens
atgacttgatcacca

SEQ ID NO: 20227 - DNA, 15 bp, Homo sapiens
catgacttgatcacc

SEQ ID NO: 20228 - DNA, 15 bp, Homo sapiens
ccatgacttgatcac

SEQ ID NO: 20229 - DNA, 15 bp, Homo sapiens
gccatgacttgatca

SEQ ID NO: 20230 - DNA, 15 bp, Homo sapiens
ggccatgacttgatc

SEQ ID NO: 20231 - DNA, 15 bp, Homo sapiens
tggccatgacttgat

SEQ ID NO: 20232 - DNA, 15 bp, Homo sapiens
gtggccatgacttga

SEQ ID NO: 20233 - DNA, 15 bp, Homo sapiens
agtggccatgacttg

SEQ ID NO: 20234 - DNA, 15 bp, Homo sapiens
cagtggccatgactt

SEQ ID NO: 20235 - DNA, 15 bp, Homo sapiens
acagtggccatgact

SEQ ID NO: 20236 - DNA, 15 bp, Homo sapiens
gacagtggccatgac

SEQ ID NO: 20237 - DNA, 15 bp, Homo sapiens
tgacagtggccatga

SEQ ID NO: 20238 - DNA, 15 bp, Homo sapiens
atgacagtggccatg

SEQ ID NO: 20239 - DNA, 15 bp, Homo sapiens
gatgacagtggccat

SEQ ID NO: 20240 - DNA, 15 bp, Homo sapiens
tgatgacagtggcca

SEQ ID NO: 20241 - DNA, 15 bp, Homo sapiens
atgatgacagtggcc

SEQ ID NO: 20242 - DNA, 15 bp, Homo sapiens
catgatgacagtggc

SEQ ID NO: 20243 - DNA, 15 bp, Homo sapiens
acatgatgacagtgg

SEQ ID NO: 20244 - DNA, 15 bp, Homo sapiens
cacatgatgacagtg

SEQ ID NO: 20245 - DNA, 15 bp, Homo sapiens
gcacatgatgacagt

SEQ ID NO: 20246 - DNA, 15 bp, Homo sapiens
tgcacatgatgacag

SEQ ID NO: 20247 - DNA, 15 bp, Homo sapiens
atgcacatgatgaca

SEQ ID NO: 20248 - DNA, 15 bp, Homo sapiens
catgcacatgatgac

SEQ ID NO: 20249 - DNA, 15 bp, Homo sapiens
ccatgcacatgatga

SEQ ID NO: 20250 - DNA, 15 bp, Homo sapiens
tccatgcacatgatg

SEQ ID NO: 20251 - DNA, 15 bp, Homo sapiens
ttccatgcacatgat

SEQ ID NO: 20252 - DNA, 15 bp, Homo sapiens
cttccatgcacatga

SEQ ID NO: 20253 - DNA, 15 bp, Homo sapiens
gcttccatgcacatg

SEQ ID NO: 20254 - DNA, 15 bp, Homo sapiens
agcttccatgcacat

SEQ ID NO: 20255 - DNA, 15 bp, Homo sapiens
tagcttccatgcaca

SEQ ID NO: 20256 - DNA, 15 bp, Homo sapiens
atagcttccatgcac

SEQ ID NO: 20257 - DNA, 15 bp, Homo sapiens
tatagcttccatgca

SEQ ID NO: 20258 - DNA, 15 bp, Homo sapiens
ctatagcttccatgc

SEQ ID NO: 20259 - DNA, 15 bp, Homo sapiens
tctatagcttccatg

SEQ ID NO: 20260 - DNA, 15 bp, Homo sapiens
ctctatagcttccat

SEQ ID NO: 20261 - DNA, 15 bp, Homo sapiens
actctatagcttcca

SEQ ID NO: 20262 - DNA, 15 bp, Homo sapiens
gactctatagcttcc

SEQ ID NO: 20263 - DNA, 15 bp, Homo sapiens
ggactctatagcttc

SEQ ID NO: 20264 - DNA, 15 bp, Homo sapiens
aggactctatagctt

SEQ ID NO: 20265 - DNA, 15 bp, Homo sapiens
gaggactctatagct

SEQ ID NO: 20266 - DNA, 15 bp, Homo sapiens
ggaggactctatagc

SEQ ID NO: 20267 - DNA, 15 bp, Homo sapiens
aggaggactctatag

SEQ ID NO: 20268 - DNA, 15 bp, Homo sapiens
taggaggactctata

SEQ ID NO: 20269 - DNA, 15 bp, Homo sapiens
ataggaggactctat

SEQ ID NO: 20270 - DNA, 15 bp, Homo sapiens
aataggaggactcta

SEQ ID NO: 20271 - DNA, 15 bp, Homo sapiens
aaataggaggactct

SEQ ID NO: 20272 - DNA, 15 bp, Homo sapiens
gaaataggaggactc

SEQ ID NO: 20273 - DNA, 15 bp, Homo sapiens
ggaaataggaggact

SEQ ID NO: 20274 - DNA, 15 bp, Homo sapiens
aggaaataggaggac

SEQ ID NO: 20275 - DNA, 15 bp, Homo sapiens
aaggaaataggagga

SEQ ID NO: 20276 - DNA, 15 bp, Homo sapiens
aaaggaaataggagg

SEQ ID NO: 20277 - DNA, 15 bp, Homo sapiens
gaaaggaaataggag

SEQ ID NO: 20278 - DNA, 15 bp, Homo sapiens
agaaaggaaatagga

SEQ ID NO: 20279 - DNA, 15 bp, Homo sapiens
gagaaaggaaatagg

SEQ ID NO: 20280 - DNA, 15 bp, Homo sapiens
agagaaaggaaatag

SEQ ID NO: 20281 - DNA, 15 bp, Homo sapiens
aagagaaaggaaata

SEQ ID NO: 20282 - DNA, 15 bp, Homo sapiens
aaagagaaaggaaat

SEQ ID NO: 20283 - DNA, 15 bp, Homo sapiens
aaaagagaaaggaaa

SEQ ID NO: 20284 - DNA, 15 bp, Homo sapiens
gaaaagagaaaggaa

SEQ ID NO: 20285 - DNA, 15 bp, Homo sapiens
agaaaagagaaagga

SEQ ID NO: 20286 - DNA, 15 bp, Homo sapiens
aagaaaagagaaagg

SEQ ID NO: 20287 - DNA, 15 bp, Homo sapiens
aaagaaaagagaaag

SEQ ID NO: 20288 - DNA, 15 bp, Homo sapiens
aaaagaaaagagaaa

SEQ ID NO: 20289 - DNA, 15 bp, Homo sapiens
gaaaagaaaagagaa

SEQ ID NO: 20290 - DNA, 15 bp, Homo sapiens
agaaaagaaaagaga

SEQ ID NO: 20291 - DNA, 15 bp, Homo sapiens
aagaaaagaaaagag

SEQ ID NO: 20292 - DNA, 15 bp, Homo sapiens
aaagaaaagaaaaga

SEQ ID NO: 20293 - DNA, 15 bp, Homo sapiens
aaaagaaaagaaaag

SEQ ID NO: 20294 - DNA, 15 bp, Homo sapiens
aaaaagaaaagaaaa

SEQ ID NO: 20295 - DNA, 15 bp, Homo sapiens
aaaaaagaaaagaaa

SEQ ID NO: 20296 - DNA, 15 bp, Homo sapiens
aaaaaaagaaaagaa

SEQ ID NO: 20297 - DNA, 15 bp, Homo sapiens
aaaaaaaagaaaaga

SEQ ID NO: 20298 - DNA, 15 bp, Homo sapiens
aaaaaaaaagaaaag

SEQ ID NO: 20299 - DNA, 15 bp, Homo sapiens
aaaaaaaaaagaaaa

SEQ ID NO: 20300 - DNA, 15 bp, Homo sapiens
aaaaaaaaaaagaaa

SEQ ID NO: 20301 - DNA, 15 bp, Homo sapiens
aaaaaaaaaaaagaa

SEQ ID NO: 20302 - DNA, 15 bp, Homo sapiens
aaaaaaaaaaaaaga

SEQ ID NO: 20303 - DNA, 15 bp, Homo sapiens
atctcaaaaaaaaaa

SEQ ID NO: 20304 - DNA, 15 bp, Homo sapiens
tatctcaaaaaaaaa

SEQ ID NO: 20305 - DNA, 15 bp, Homo sapiens
ctatctcaaaaaaaa

SEQ ID NO: 20306 - DNA, 15 bp, Homo sapiens
actatctcaaaaaaa

SEQ ID NO: 20307 - DNA, 15 bp, Homo sapiens
tactatctcaaaaaa

SEQ ID NO: 20308 - DNA, 15 bp, Homo sapiens
ttactatctcaaaaa

SEQ ID NO: 20309 - DNA, 15 bp, Homo sapiens
gttactatctcaaaa

SEQ ID NO: 20310 - DNA, 15 bp, Homo sapiens
ggttactatctcaaa

SEQ ID NO: 20311 - DNA, 15 bp, Homo sapiens
tggttactatctcaa

SEQ ID NO: 20312 - DNA, 15 bp, Homo sapiens
atggttactatctca

SEQ ID NO: 20313 - DNA, 15 bp, Homo sapiens
aatggttactatctc

SEQ ID NO: 20314 - DNA, 15 bp, Homo sapiens
taatggttactatct

SEQ ID NO: 20315 - DNA, 15 bp, Homo sapiens
gtaatggttactatc

SEQ ID NO: 20316 - DNA, 15 bp, Homo sapiens
ggtaatggttactat

SEQ ID NO: 20317 - DNA, 15 bp, Homo sapiens
gggtaatggttacta

SEQ ID NO: 20318 - DNA, 15 bp, Homo sapiens
tgggtaatggttact

SEQ ID NO: 20319 - DNA, 15 bp, Homo sapiens
atgggtaatggttac

SEQ ID NO: 20320 - DNA, 15 bp, Homo sapiens
catgggtaatggtta

SEQ ID NO: 20321 - DNA, 15 bp, Homo sapiens
gcatgggtaatggtt

SEQ ID NO: 20322 - DNA, 15 bp, Homo sapiens
agcatgggtaatggt

SEQ ID NO: 20323 - DNA, 15 bp, Homo sapiens
cagcatgggtaatgg

SEQ ID NO: 20324 - DNA, 15 bp, Homo sapiens
ccagcatgggtaatg

SEQ ID NO: 20325 - DNA, 15 bp, Homo sapiens
tccagcatgggtaat

SEQ ID NO: 20326 - DNA, 15 bp, Homo sapiens
ctccagcatgggtaa

SEQ ID NO: 20327 - DNA, 15 bp, Homo sapiens
cctccagcatgggta

SEQ ID NO: 20328 - DNA, 15 bp, Homo sapiens
ccctccagcatgggt

SEQ ID NO: 20329 - DNA, 15 bp, Homo sapiens
gccctccagcatggg

SEQ ID NO: 20330 - DNA, 15 bp, Homo sapiens
tgccctccagcatgg

SEQ ID NO: 20331 - DNA, 15 bp, Homo sapiens
ctgccctccagcatg

SEQ ID NO: 20332 - DNA, 15 bp, Homo sapiens
actgccctccagcat

SEQ ID NO: 20333 - DNA, 15 bp, Homo sapiens
cactgccctccagca

SEQ ID NO: 20334 - DNA, 15 bp, Homo sapiens
ccactgccctccagc

SEQ ID NO: 20335 - DNA, 15 bp, Homo sapiens
accactgccctccag

SEQ ID NO: 20336 - DNA, 15 bp, Homo sapiens
caccactgccctcca

SEQ ID NO: 20337 - DNA, 15 bp, Homo sapiens
gcaccactgccctcc

SEQ ID NO: 20338 - DNA, 15 bp, Homo sapiens
cgcaccactgccctc

SEQ ID NO: 20339 - DNA, 15 bp, Homo sapiens
tcgcaccactgccct

SEQ ID NO: 20340 - DNA, 15 bp, Homo sapiens
atcgcaccactgccc

SEQ ID NO: 20341 - DNA, 15 bp, Homo sapiens
gatcgcaccactgcc

SEQ ID NO: 20342 - DNA, 15 bp, Homo sapiens
agatcgcaccactgc

SEQ ID NO: 20343 - DNA, 15 bp, Homo sapiens
aagatcgcaccactg

SEQ ID NO: 20344 - DNA, 15 bp, Homo sapiens
caagatcgcaccact

SEQ ID NO: 20345 - DNA, 15 bp, Homo sapiens
ccaagatcgcaccac

SEQ ID NO: 20346 - DNA, 15 bp, Homo sapiens
gccaagatcgcacca

SEQ ID NO: 20347 - DNA, 15 bp, Homo sapiens
agccaagatcgcacc

SEQ ID NO: 20348 - DNA, 15 bp, Homo sapiens
gagccaagatcgcac

SEQ ID NO: 20349 - DNA, 15 bp, Homo sapiens
tgagccaagatcgca

SEQ ID NO: 20350 - DNA, 15 bp, Homo sapiens
gtgagccaagatcgc

SEQ ID NO: 20351 - DNA, 15 bp, Homo sapiens
gttgcagtgagccaa

SEQ ID NO: 20352 - DNA, 15 bp, Homo sapiens
ggttgcagtgagcca

SEQ ID NO: 20353 - DNA, 15 bp, Homo sapiens
tgggaggcggaggtt

SEQ ID NO: 20354 - DNA, 15 bp, Homo sapiens
ctgggaggcggaggt

SEQ ID NO: 20355 - DNA, 15 bp, Homo sapiens
cctgggaggcggagg

SEQ ID NO: 20356 - DNA, 15 bp, Homo sapiens
tcctgggaggcggag

SEQ ID NO: 20357 - DNA, 15 bp, Homo sapiens
atcctgggaggcgga

SEQ ID NO: 20358 - DNA, 15 bp, Homo sapiens
gatcctgggaggcgg

SEQ ID NO: 20359 - DNA, 15 bp, Homo sapiens
tgatcctgggaggcg

SEQ ID NO: 20360 - DNA, 15 bp, Homo sapiens
ttgatcctgggaggc

SEQ ID NO: 20361 - DNA, 15 bp, Homo sapiens
cttgatcctgggagg

SEQ ID NO: 20362 - DNA, 15 bp, Homo sapiens
gcttgatcctgggag

SEQ ID NO: 20363 - DNA, 15 bp, Homo sapiens
cgcttgatcctggga

SEQ ID NO: 20364 - DNA, 15 bp, Homo sapiens
tcgcttgatcctggg

SEQ ID NO: 20365 - DNA, 15 bp, Homo sapiens
atcgcttgatcctgg

SEQ ID NO: 20366 - DNA, 15 bp, Homo sapiens
aatcgcttgatcctg

SEQ ID NO: 20367 - DNA, 15 bp, Homo sapiens
gaatcgcttgatcct

SEQ ID NO: 20368 - DNA, 15 bp, Homo sapiens
agaatcgcttgatcc

SEQ ID NO: 20369 - DNA, 15 bp, Homo sapiens
gagaatcgcttgatc

SEQ ID NO: 20370 - DNA, 15 bp, Homo sapiens
ggagaatcgcttgat

SEQ ID NO: 20371 - DNA, 15 bp, Homo sapiens
gggagaatcgcttga

SEQ ID NO: 20372 - DNA, 15 bp, Homo sapiens
tgggagaatcgcttg

SEQ ID NO: 20373 - DNA, 15 bp, Homo sapiens
gtgggagaatcgctt

SEQ ID NO: 20374 - DNA, 15 bp, Homo sapiens
ggtgggagaatcgct

SEQ ID NO: 20375 - DNA, 15 bp, Homo sapiens
aggtgggagaatcgc

SEQ ID NO: 20376 - DNA, 15 bp, Homo sapiens
gaggtgggagaatcg

SEQ ID NO: 20377 - DNA, 15 bp, Homo sapiens
tgaggtgggagaatc

SEQ ID NO: 20378 - DNA, 15 bp, Homo sapiens
ctgaggtgggagaat

SEQ ID NO: 20379 - DNA, 15 bp, Homo sapiens
gctgaggtgggagaa

SEQ ID NO: 20380 - DNA, 15 bp, Homo sapiens
ggctgaggtgggaga

SEQ ID NO: 20381 - DNA, 15 bp, Homo sapiens
aggctgaggtgggag

SEQ ID NO: 20382 - DNA, 15 bp, Homo sapiens
gaggctgaggtggga

SEQ ID NO: 20383 - DNA, 15 bp, Homo sapiens
ggaggctgaggtggg

SEQ ID NO: 20384 - DNA, 15 bp, Homo sapiens
gggaggctgaggtgg

SEQ ID NO: 20385 - DNA, 15 bp, Homo sapiens
tgggaggctgaggtg

SEQ ID NO: 20386 - DNA, 15 bp, Homo sapiens
ttgggaggctgaggt

SEQ ID NO: 20387 - DNA, 15 bp, Homo sapiens
cctacttgggaggct

SEQ ID NO: 20388 - DNA, 15 bp, Homo sapiens
acctacttgggaggc

SEQ ID NO: 20389 - DNA, 15 bp, Homo sapiens
cacctacttgggagg

SEQ ID NO: 20390 - DNA, 15 bp, Homo sapiens
ccacctacttgggag

SEQ ID NO: 20391 - DNA, 15 bp, Homo sapiens
cccacctacttggga

SEQ ID NO: 20392 - DNA, 15 bp, Homo sapiens
tcccacctacttggg

SEQ ID NO: 20393 - DNA, 15 bp, Homo sapiens
gtcccacctacttgg

SEQ ID NO: 20394 - DNA, 15 bp, Homo sapiens
agtcccacctacttg

SEQ ID NO: 20395 - DNA, 15 bp, Homo sapiens
tagtcccacctactt

SEQ ID NO: 20396 - DNA, 15 bp, Homo sapiens
gtagtcccacctact

SEQ ID NO: 20397 - DNA, 15 bp, Homo sapiens
tgtagtcccacctac

SEQ ID NO: 20398 - DNA, 15 bp, Homo sapiens
ctgtagtcccaccta

SEQ ID NO: 20399 - DNA, 15 bp, Homo sapiens
cctgtagtcccacct

SEQ ID NO: 20400 - DNA, 15 bp, Homo sapiens
acctgtagtcccacc

SEQ ID NO: 20401 - DNA, 15 bp, Homo sapiens
cacctgtagtcccac

SEQ ID NO: 20402 - DNA, 15 bp, Homo sapiens
tgcacctgtagtccc

SEQ ID NO: 20403 - DNA, 15 bp, Homo sapiens
atgcacctgtagtcc

SEQ ID NO: 20404 - DNA, 15 bp, Homo sapiens
tatgcacctgtagtc

SEQ ID NO: 20405 - DNA, 15 bp, Homo sapiens
gtatgcacctgtagt

SEQ ID NO: 20406 - DNA, 15 bp, Homo sapiens
ggtatgcacctgtag

SEQ ID NO: 20407 - DNA, 15 bp, Homo sapiens
tggtatgcacctgta

SEQ ID NO: 20408 - DNA, 15 bp, Homo sapiens
gtggtatgcacctgt

SEQ ID NO: 20409 - DNA, 15 bp, Homo sapiens
ggtggtatgcacctg

SEQ ID NO: 20410 - DNA, 15 bp, Homo sapiens
tggtggtatgcacct

SEQ ID NO: 20411 - DNA, 15 bp, Homo sapiens
atggtggtatgcacc

SEQ ID NO: 20412 - DNA, 15 bp, Homo sapiens
catggtggtatgcac

SEQ ID NO: 20413 - DNA, 15 bp, Homo sapiens
gcatggtggtatgca

SEQ ID NO: 20414 - DNA, 15 bp, Homo sapiens
ggcatggtggtatgc

SEQ ID NO: 20415 - DNA, 15 bp, Homo sapiens
gggcatggtggtatg

SEQ ID NO: 20416 - DNA, 15 bp, Homo sapiens
tgggcatggtggtat

SEQ ID NO: 20417 - DNA, 15 bp, Homo sapiens
ctgggcatggtggta

SEQ ID NO: 20418 - DNA, 15 bp, Homo sapiens
gctgggcatggtggt

SEQ ID NO: 20419 - DNA, 15 bp, Homo sapiens
agctgggcatggtgg

SEQ ID NO: 20420 - DNA, 15 bp, Homo sapiens
tagctgggcatggtg

SEQ ID NO: 20421 - DNA, 15 bp, Homo sapiens
ttagctgggcatggt

SEQ ID NO: 20422 - DNA, 15 bp, Homo sapiens
attagctgggcatgg

SEQ ID NO: 20423 - DNA, 15 bp, Homo sapiens
aattagctgggcatg

SEQ ID NO: 20424 - DNA, 15 bp, Homo sapiens
aaattagctgggcat

SEQ ID NO: 20425 - DNA, 15 bp, Homo sapiens
aaaattagctgggca

SEQ ID NO: 20426 - DNA, 15 bp, Homo sapiens
aaaaattagctgggc

SEQ ID NO: 20427 - DNA, 15 bp, Homo sapiens
caaaaattagctggg

SEQ ID NO: 20428 - DNA, 15 bp, Homo sapiens
acaaaaattagctgg

SEQ ID NO: 20429 - DNA, 15 bp, Homo sapiens
tacaaaaattagctg

SEQ ID NO: 20430 - DNA, 15 bp, Homo sapiens
atacaaaaattagct

SEQ ID NO: 20431 - DNA, 15 bp, Homo sapiens
aaaaaatacaaaaat

SEQ ID NO: 20432 - DNA, 15 bp, Homo sapiens
aaaaaaatacaaaaa

SEQ ID NO: 20433 - DNA, 15 bp, Homo sapiens
aaaaaaaatacaaaa

SEQ ID NO: 20434 - DNA, 15 bp, Homo sapiens
aaaaaaaaatacaaa

SEQ ID NO: 20435 - DNA, 15 bp, Homo sapiens
aaaaaaaaaatacaa

SEQ ID NO: 20436 - DNA, 15 bp, Homo sapiens
aaaaaaaaaaataca

SEQ ID NO: 20437 - DNA, 15 bp, Homo sapiens
aaaaaaaaaaaatac

SEQ ID NO: 20438 - DNA, 15 bp, Homo sapiens
aaaaaaaaaaaaaat

SEQ ID NO: 20439 - DNA, 15 bp, Homo sapiens
ctaaaaaaaaaaaaa

SEQ ID NO: 20440 - DNA, 15 bp, Homo sapiens
actaaaaaaaaaaaa

SEQ ID NO: 20441 - DNA, 15 bp, Homo sapiens
tactaaaaaaaaaaa

SEQ ID NO: 20442 - DNA, 15 bp, Homo sapiens
gtactaaaaaaaaaa

SEQ ID NO: 20443 - DNA, 15 bp, Homo sapiens
tgtactaaaaaaaaa

SEQ ID NO: 20444 - DNA, 15 bp, Homo sapiens
ctgtactaaaaaaaa

SEQ ID NO: 20445 - DNA, 15 bp, Homo sapiens
tctgtactaaaaaaa

SEQ ID NO: 20446 - DNA, 15 bp, Homo sapiens
gtctgtactaaaaaa

SEQ ID NO: 20447 - DNA, 15 bp, Homo sapiens
tgtctgtactaaaaa

SEQ ID NO: 20448 - DNA, 15 bp, Homo sapiens
ctgtctgtactaaaa

SEQ ID NO: 20449 - DNA, 15 bp, Homo sapiens
cctgtctgtactaaa

SEQ ID NO: 20450 - DNA, 15 bp, Homo sapiens
ccctgtctgtactaa

SEQ ID NO: 20451 - DNA, 15 bp, Homo sapiens
accctgtctgtacta

SEQ ID NO: 20452 - DNA, 15 bp, Homo sapiens
aaccctgtctgtact

SEQ ID NO: 20453 - DNA, 15 bp, Homo sapiens
aaaccctgtctgtac

SEQ ID NO: 20454 - DNA, 15 bp, Homo sapiens
gaaaccctgtctgta

SEQ ID NO: 20455 - DNA, 15 bp, Homo sapiens
tgaaaccctgtctgt

SEQ ID NO: 20456 - DNA, 15 bp, Homo sapiens
gtgaaaccctgtctg

SEQ ID NO: 20457 - DNA, 15 bp, Homo sapiens
ggtgaaaccctgtct

SEQ ID NO: 20458 - DNA, 15 bp, Homo sapiens
tggtgaaaccctgtc

SEQ ID NO: 20459 - DNA, 15 bp, Homo sapiens
atggtgaaaccctgt

SEQ ID NO: 20460 - DNA, 15 bp, Homo sapiens
catggtgaaaccctg

SEQ ID NO: 20461 - DNA, 15 bp, Homo sapiens
acatggtgaaaccct

SEQ ID NO: 20462 - DNA, 15 bp, Homo sapiens
gccaacatggtgaaa

SEQ ID NO: 20463 - DNA, 15 bp, Homo sapiens
ggccaacatggtgaa

SEQ ID NO: 20464 - DNA, 15 bp, Homo sapiens
tggccaacatggtga

SEQ ID NO: 20465 - DNA, 15 bp, Homo sapiens
ctggccaacatggtg

SEQ ID NO: 20466 - DNA, 15 bp, Homo sapiens
cctggccaacatggt

SEQ ID NO: 20467 - DNA, 15 bp, Homo sapiens
gcctggccaacatgg

SEQ ID NO: 20468 - DNA, 15 bp, Homo sapiens
agcctggccaacatg

SEQ ID NO: 20469 - DNA, 15 bp, Homo sapiens
cagcctggccaacat

SEQ ID NO: 20470 - DNA, 15 bp, Homo sapiens
accagcctggccaac

SEQ ID NO: 20471 - DNA, 15 bp, Homo sapiens
gaccagcctggccaa

SEQ ID NO: 20472 - DNA, 15 bp, Homo sapiens
agaccagcctggcca

SEQ ID NO: 20473 - DNA, 15 bp, Homo sapiens
gagaccagcctggcc

SEQ ID NO: 20474 - DNA, 15 bp, Homo sapiens
cgagaccagcctggc

SEQ ID NO: 20475 - DNA, 15 bp, Homo sapiens
tcgagaccagcctgg

SEQ ID NO: 20476 - DNA, 15 bp, Homo sapiens
ttcgagaccagcctg

SEQ ID NO: 20477 - DNA, 15 bp, Homo sapiens
gttcgagaccagcct

SEQ ID NO: 20478 - DNA, 15 bp, Homo sapiens
agttcgagaccagcc

SEQ ID NO: 20479 - DNA, 15 bp, Homo sapiens
gagttcgagaccagc

SEQ ID NO: 20480 - DNA, 15 bp, Homo sapiens
ctgaggtcaggagtt

SEQ ID NO: 20481 - DNA, 15 bp, Homo sapiens
cctgaggtcaggagt

SEQ ID NO: 20482 - DNA, 15 bp, Homo sapiens
acctgaggtcaggag

SEQ ID NO: 20483 - DNA, 15 bp, Homo sapiens
cacctgaggtcagga

SEQ ID NO: 20484 - DNA, 15 bp, Homo sapiens
tcacctgaggtcagg

SEQ ID NO: 20485 - DNA, 15 bp, Homo sapiens
atcacctgaggtcag

SEQ ID NO: 20486 - DNA, 15 bp, Homo sapiens
gatcacctgaggtca

SEQ ID NO: 20487 - DNA, 15 bp, Homo sapiens
agatcacctgaggtc

SEQ ID NO: 20488 - DNA, 15 bp, Homo sapiens
cagatcacctgaggt

SEQ ID NO: 20489 - DNA, 15 bp, Homo sapiens
gcagatcacctgagg

SEQ ID NO: 20490 - DNA, 15 bp, Homo sapiens
ggcagatcacctgag

SEQ ID NO: 20491 - DNA, 15 bp, Homo sapiens
gggcagatcacctga

SEQ ID NO: 20492 - DNA, 15 bp, Homo sapiens
cgggcagatcacctg

SEQ ID NO: 20493 - DNA, 15 bp, Homo sapiens
gcgggcagatcacct

SEQ ID NO: 20494 - DNA, 15 bp, Homo sapiens
ggcgggcagatcacc

SEQ ID NO: 20495 - DNA, 15 bp, Homo sapiens
aggcgggcagatcac

SEQ ID NO: 20496 - DNA, 15 bp, Homo sapiens
tgaggcgggcagatc

SEQ ID NO: 20497 - DNA, 15 bp, Homo sapiens
ctgaggcgggcagat

SEQ ID NO: 20498 - DNA, 15 bp, Homo sapiens
gctgaggcgggcaga

SEQ ID NO: 20499 - DNA, 15 bp, Homo sapiens
agctgaggcgggcag

SEQ ID NO: 20500 - DNA, 15 bp, Homo sapiens
aagctgaggcgggca

SEQ ID NO: 20501 - DNA, 15 bp, Homo sapiens
gaagctgaggcgggc

SEQ ID NO: 20502 - DNA, 15 bp, Homo sapiens
ggaagctgaggcggg

SEQ ID NO: 20503 - DNA, 15 bp, Homo sapiens
gggaagctgaggcgg

SEQ ID NO: 20504 - DNA, 15 bp, Homo sapiens
tgggaagctgaggcg

SEQ ID NO: 20505 - DNA, 15 bp, Homo sapiens
ttgggaagctgaggc

SEQ ID NO: 20506 - DNA, 15 bp, Homo sapiens
tttgggaagctgagg

SEQ ID NO: 20507 - DNA, 15 bp, Homo sapiens
ctttgggaagctgag

SEQ ID NO: 20508 - DNA, 15 bp, Homo sapiens
actttgggaagctga

SEQ ID NO: 20509 - DNA, 15 bp, Homo sapiens
cactttgggaagctg

SEQ ID NO: 20510 - DNA, 15 bp, Homo sapiens
gcactttgggaagct

SEQ ID NO: 20511 - DNA, 15 bp, Homo sapiens
agcactttgggaagc

SEQ ID NO: 20512 - DNA, 15 bp, Homo sapiens
cagcactttgggaag

SEQ ID NO: 20513 - DNA, 15 bp, Homo sapiens
ccagcactttgggaa

SEQ ID NO: 20514 - DNA, 15 bp, Homo sapiens
cgctcacgcctgtaa

SEQ ID NO: 20515 - DNA, 15 bp, Homo sapiens
tcgctcacgcctgta

SEQ ID NO: 20516 - DNA, 15 bp, Homo sapiens
gtcgctcacgcctgt

SEQ ID NO: 20517 - DNA, 15 bp, Homo sapiens
ggtcgctcacgcctg

SEQ ID NO: 20518 - DNA, 15 bp, Homo sapiens
cggtcgctcacgcct

SEQ ID NO: 20519 - DNA, 15 bp, Homo sapiens
gcggtcgctcacgcc

SEQ ID NO: 20520 - DNA, 15 bp, Homo sapiens
tgcggtcgctcacgc

SEQ ID NO: 20521 - DNA, 15 bp, Homo sapiens
gtgcggtcgctcacg

SEQ ID NO: 20522 - DNA, 15 bp, Homo sapiens
ggtgcggtcgctcac

SEQ ID NO: 20523 - DNA, 15 bp, Homo sapiens
tggtgcggtcgctca

SEQ ID NO: 20524 - DNA, 15 bp, Homo sapiens
ctggtgcggtcgctc

SEQ ID NO: 20525 - DNA, 15 bp, Homo sapiens
cctggtgcggtcgct

SEQ ID NO: 20526 - DNA, 15 bp, Homo sapiens
gcctggtgcggtcgc

SEQ ID NO: 20527 - DNA, 15 bp, Homo sapiens
ggcctggtgcggtcg

SEQ ID NO: 20528 - DNA, 15 bp, Homo sapiens
cggcctggtgcggtc

SEQ ID NO: 20529 - DNA, 15 bp, Homo sapiens
tcggcctggtgcggt

SEQ ID NO: 20530 - DNA, 15 bp, Homo sapiens
ctcggcctggtgcgg

SEQ ID NO: 20531 - DNA, 15 bp, Homo sapiens
actcggcctggtgcg

SEQ ID NO: 20532 - DNA, 15 bp, Homo sapiens
gactcggcctggtgc

SEQ ID NO: 20533 - DNA, 15 bp, Homo sapiens
ggactcggcctggtg

SEQ ID NO: 20534 - DNA, 15 bp, Homo sapiens
aggactcggcctggt

SEQ ID NO: 20535 - DNA, 15 bp, Homo sapiens
caggactcggcctgg

SEQ ID NO: 20536 - DNA, 15 bp, Homo sapiens
gcaggactcggcctg

SEQ ID NO: 20537 - DNA, 15 bp, Homo sapiens
agcaggactcggcct

SEQ ID NO: 20538 - DNA, 15 bp, Homo sapiens
tagcaggactcggcc

SEQ ID NO: 20539 - DNA, 15 bp, Homo sapiens
atagcaggactcggc

SEQ ID NO: 20540 - DNA, 15 bp, Homo sapiens
aatagcaggactcgg

SEQ ID NO: 20541 - DNA, 15 bp, Homo sapiens
aaatagcaggactcg

SEQ ID NO: 20542 - DNA, 15 bp, Homo sapiens
aaaatagcaggactc

SEQ ID NO: 20543 - DNA, 15 bp, Homo sapiens
gaaaatagcaggact

SEQ ID NO: 20544 - DNA, 15 bp, Homo sapiens
tgaaaatagcaggac

SEQ ID NO: 20545 - DNA, 15 bp, Homo sapiens
ttgaaaatagcagga

SEQ ID NO: 20546 - DNA, 15 bp, Homo sapiens
cttgaaaatagcagg

SEQ ID NO: 20547 - DNA, 15 bp, Homo sapiens
ccttgaaaatagcag

SEQ ID NO: 20548 - DNA, 15 bp, Homo sapiens
tccttgaaaatagca

SEQ ID NO: 20549 - DNA, 15 bp, Homo sapiens
ttccttgaaaatagc

SEQ ID NO: 20550 - DNA, 15 bp, Homo sapiens
gttccttgaaaatag

SEQ ID NO: 20551 - DNA, 15 bp, Homo sapiens
tgttccttgaaaata

SEQ ID NO: 20552 - DNA, 15 bp, Homo sapiens
atgttccttgaaaat

SEQ ID NO: 20553 - DNA, 15 bp, Homo sapiens
aatgttccttgaaaa

SEQ ID NO: 20554 - DNA, 15 bp, Homo sapiens
gaatgttccttgaaa

SEQ ID NO: 20555 - DNA, 15 bp, Homo sapiens
ggaatgttccttgaa

SEQ ID NO: 20556 - DNA, 15 bp, Homo sapiens
aggaatgttccttga

SEQ ID NO: 20557 - DNA, 15 bp, Homo sapiens
aaggaatgttccttg

SEQ ID NO: 20558 - DNA, 15 bp, Homo sapiens
aaaggaatgttcctt

SEQ ID NO: 20559 - DNA, 15 bp, Homo sapiens
aaaaggaatgttcct

SEQ ID NO: 20560 - DNA, 15 bp, Homo sapiens
gaaaaggaatgttcc

SEQ ID NO: 20561 - DNA, 15 bp, Homo sapiens
ggaaaaggaatgttc

SEQ ID NO: 20562 - DNA, 15 bp, Homo sapiens
aggaaaaggaatgtt

SEQ ID NO: 20563 - DNA, 15 bp, Homo sapiens
taggaaaaggaatgt

SEQ ID NO: 20564 - DNA, 15 bp, Homo sapiens
gtaggaaaaggaatg

SEQ ID NO: 20565 - DNA, 15 bp, Homo sapiens
ggtaggaaaaggaat

SEQ ID NO: 20566 - DNA, 15 bp, Homo sapiens
tggtaggaaaaggaa

SEQ ID NO: 20567 - DNA, 15 bp, Homo sapiens
ttggtaggaaaagga

SEQ ID NO: 20568 - DNA, 15 bp, Homo sapiens
attggtaggaaaagg

SEQ ID NO: 20569 - DNA, 15 bp, Homo sapiens
gattggtaggaaaag

SEQ ID NO: 20570 - DNA, 15 bp, Homo sapiens
tgattggtaggaaaa

SEQ ID NO: 20571 - DNA, 15 bp, Homo sapiens
atgattggtaggaaa

SEQ ID NO: 20572 - DNA, 15 bp, Homo sapiens
aatgattggtaggaa

SEQ ID NO: 20573 - DNA, 15 bp, Homo sapiens
taatgattggtagga

SEQ ID NO: 20574 - DNA, 15 bp, Homo sapiens
ctaatgattggtagg

SEQ ID NO: 20575 - DNA, 15 bp, Homo sapiens
cctaatgattggtag

SEQ ID NO: 20576 - DNA, 15 bp, Homo sapiens
gcctaatgattggta

SEQ ID NO: 20577 - DNA, 15 bp, Homo sapiens
tgcctaatgattggt

SEQ ID NO: 20578 - DNA, 15 bp, Homo sapiens
ctgcctaatgattgg

SEQ ID NO: 20579 - DNA, 15 bp, Homo sapiens
cctgcctaatgattg

SEQ ID NO: 20580 - DNA, 15 bp, Homo sapiens
gcctgcctaatgatt

SEQ ID NO: 20581 - DNA, 15 bp, Homo sapiens
agcctgcctaatgat

SEQ ID NO: 20582 - DNA, 15 bp, Homo sapiens
aagcctgcctaatga

SEQ ID NO: 20583 - DNA, 15 bp, Homo sapiens
gaagcctgcctaatg

SEQ ID NO: 20584 - DNA, 15 bp, Homo sapiens
tgaagcctgcctaat

SEQ ID NO: 20585 - DNA, 15 bp, Homo sapiens
ttgaagcctgcctaa

SEQ ID NO: 20586 - DNA, 15 bp, Homo sapiens
gttgaagcctgccta

SEQ ID NO: 20587 - DNA, 15 bp, Homo sapiens
tgttgaagcctgcct

SEQ ID NO: 20588 - DNA, 15 bp, Homo sapiens
atgttgaagcctgcc

SEQ ID NO: 20589 - DNA, 15 bp, Homo sapiens
gatgttgaagcctgc

SEQ ID NO: 20590 - DNA, 15 bp, Homo sapiens
tgatgttgaagcctg

SEQ ID NO: 20591 - DNA, 15 bp, Homo sapiens
ctgatgttgaagcct

SEQ ID NO: 20592 - DNA, 15 bp, Homo sapiens
gctgatgttgaagcc

SEQ ID NO: 20593 - DNA, 15 bp, Homo sapiens
agctgatgttgaagc

SEQ ID NO: 20594 - DNA, 15 bp, Homo sapiens
cagctgatgttgaag

SEQ ID NO: 20595 - DNA, 15 bp, Homo sapiens
tcagctgatgttgaa

SEQ ID NO: 20596 - DNA, 15 bp, Homo sapiens
atcagctgatgttga

SEQ ID NO: 20597 - DNA, 15 bp, Homo sapiens
catcagctgatgttg

SEQ ID NO: 20598 - DNA, 15 bp, Homo sapiens
tcatcagctgatgtt

SEQ ID NO: 20599 - DNA, 15 bp, Homo sapiens
ctcatcagctgatgt

SEQ ID NO: 20600 - DNA, 15 bp, Homo sapiens
cctcatcagctgatg

SEQ ID NO: 20601 - DNA, 15 bp, Homo sapiens
ccctcatcagctgat

SEQ ID NO: 20602 - DNA, 15 bp, Homo sapiens
accctcatcagctga

SEQ ID NO: 20603 - DNA, 15 bp, Homo sapiens
aaccctcatcagctg

SEQ ID NO: 20604 - DNA, 15 bp, Homo sapiens
taaccctcatcagct

SEQ ID NO: 20605 - DNA, 15 bp, Homo sapiens
ctaaccctcatcagc

SEQ ID NO: 20606 - DNA, 15 bp, Homo sapiens
actaaccctcatcag

SEQ ID NO: 20607 - DNA, 15 bp, Homo sapiens
cactaaccctcatca

SEQ ID NO: 20608 - DNA, 15 bp, Homo sapiens
ccactaaccctcatc

SEQ ID NO: 20609 - DNA, 15 bp, Homo sapiens
accactaaccctcat

SEQ ID NO: 20610 - DNA, 15 bp, Homo sapiens
gaccactaaccctca

SEQ ID NO: 20611 - DNA, 15 bp, Homo sapiens
cgaccactaaccctc

SEQ ID NO: 20612 - DNA, 15 bp, Homo sapiens
acgaccactaaccct

SEQ ID NO: 20613 - DNA, 15 bp, Homo sapiens
aacgaccactaaccc

SEQ ID NO: 20614 - DNA, 15 bp, Homo sapiens
gaacgaccactaacc

SEQ ID NO: 20615 - DNA, 15 bp, Homo sapiens
agaacgaccactaac

SEQ ID NO: 20616 - DNA, 15 bp, Homo sapiens
cagaacgaccactaa

SEQ ID NO: 20617 - DNA, 15 bp, Homo sapiens
ccagaacgaccacta

SEQ ID NO: 20618 - DNA, 15 bp, Homo sapiens
tccagaacgaccact

SEQ ID NO: 20619 - DNA, 15 bp, Homo sapiens
ctccagaacgaccac

SEQ ID NO: 20620 - DNA, 15 bp, Homo sapiens
tctccagaacgacca

SEQ ID NO: 20621 - DNA, 15 bp, Homo sapiens
ttctccagaacgacc

SEQ ID NO: 20622 - DNA, 15 bp, Homo sapiens
tttctccagaacgac

SEQ ID NO: 20623 - DNA, 15 bp, Homo sapiens
ctttctccagaacga

SEQ ID NO: 20624 - DNA, 15 bp, Homo sapiens
actttctccagaacg

SEQ ID NO: 20625 - DNA, 15 bp, Homo sapiens
cactttctccagaac

SEQ ID NO: 20626 - DNA, 15 bp, Homo sapiens
tcactttctccagaa

SEQ ID NO: 20627 - DNA, 15 bp, Homo sapiens
ttcactttctccaga

SEQ ID NO: 20628 - DNA, 15 bp, Homo sapiens
tttcactttctccag

SEQ ID NO: 20629 - DNA, 15 bp, Homo sapiens
ttttcactttctcca

SEQ ID NO: 20630 - DNA, 15 bp, Homo sapiens
tttttcactttctcc

SEQ ID NO: 20631 - DNA, 15 bp, Homo sapiens
ttttttcactttctc

SEQ ID NO: 20632 - DNA, 15 bp, Homo sapiens
cttttttcactttct

SEQ ID NO: 20633 - DNA, 15 bp, Homo sapiens
tcttttttcactttc

SEQ ID NO: 20634 - DNA, 15 bp, Homo sapiens
ttcttttttcacttt

SEQ ID NO: 20635 - DNA, 15 bp, Homo sapiens
attcttttttcactt

SEQ ID NO: 20636 - DNA, 15 bp, Homo sapiens
gattcttttttcact

SEQ ID NO: 20637 - DNA, 15 bp, Homo sapiens
tgattcttttttcac

SEQ ID NO: 20638 - DNA, 15 bp, Homo sapiens
ctgattcttttttca

SEQ ID NO: 20639 - DNA, 15 bp, Homo sapiens
actgattcttttttc

SEQ ID NO: 20640 - DNA, 15 bp, Homo sapiens
gactgattctttttt

SEQ ID NO: 20641 - DNA, 15 bp, Homo sapiens
agactgattcttttt

SEQ ID NO: 20642 - DNA, 15 bp, Homo sapiens
gagactgattctttt

SEQ ID NO: 20643 - DNA, 15 bp, Homo sapiens
agagactgattcttt

SEQ ID NO: 20644 - DNA, 15 bp, Homo sapiens
tagagactgattctt

SEQ ID NO: 20645 - DNA, 15 bp, Homo sapiens
ctagagactgattct

SEQ ID NO: 20646 - DNA, 15 bp, Homo sapiens
tctagagactgattc

SEQ ID NO: 20647 - DNA, 15 bp, Homo sapiens
ctctagagactgatt

SEQ ID NO: 20648 - DNA, 15 bp, Homo sapiens
cctctagagactgat

SEQ ID NO: 20649 - DNA, 15 bp, Homo sapiens
ccctctagagactga

SEQ ID NO: 20650 - DNA, 15 bp, Homo sapiens
cccctctagagactg

SEQ ID NO: 20651 - DNA, 15 bp, Homo sapiens
gcccctctagagact

SEQ ID NO: 20652 - DNA, 15 bp, Homo sapiens
agcccctctagagac

SEQ ID NO: 20653 - DNA, 15 bp, Homo sapiens
aagcccctctagaga

SEQ ID NO: 20654 - DNA, 15 bp, Homo sapiens
caagcccctctagag

SEQ ID NO: 20655 - DNA, 15 bp, Homo sapiens
acaagcccctctaga

SEQ ID NO: 20656 - DNA, 15 bp, Homo sapiens
cacaagcccctctag

SEQ ID NO: 20657 - DNA, 15 bp, Homo sapiens
ccacaagcccctcta

SEQ ID NO: 20658 - DNA, 15 bp, Homo sapiens
tccacaagcccctct

SEQ ID NO: 20659 - DNA, 15 bp, Homo sapiens
ctccacaagcccctc

SEQ ID NO: 20660 - DNA, 15 bp, Homo sapiens
actccacaagcccct

SEQ ID NO: 20661 - DNA, 15 bp, Homo sapiens
tactccacaagcccc

SEQ ID NO: 20662 - DNA, 15 bp, Homo sapiens
ttactccacaagccc

SEQ ID NO: 20663 - DNA, 15 bp, Homo sapiens
gttactccacaagcc

SEQ ID NO: 20664 - DNA, 15 bp, Homo sapiens
ggttactccacaagc

SEQ ID NO: 20665 - DNA, 15 bp, Homo sapiens
cggttactccacaag

SEQ ID NO: 20666 - DNA, 15 bp, Homo sapiens
gcggttactccacaa

SEQ ID NO: 20667 - DNA, 15 bp, Homo sapiens
ggcggttactccaca

SEQ ID NO: 20668 - DNA, 15 bp, Homo sapiens
aggcggttactccac

SEQ ID NO: 20669 - DNA, 15 bp, Homo sapiens
caggcggttactcca

SEQ ID NO: 20670 - DNA, 15 bp, Homo sapiens
ccaggcggttactcc

SEQ ID NO: 20671 - DNA, 15 bp, Homo sapiens
accaggcggttactc

SEQ ID NO: 20672 - DNA, 15 bp, Homo sapiens
taccaggcggttact

SEQ ID NO: 20673 - DNA, 15 bp, Homo sapiens
ttaccaggcggttac

SEQ ID NO: 20674 - DNA, 15 bp, Homo sapiens
gttaccaggcggtta

SEQ ID NO: 20675 - DNA, 15 bp, Homo sapiens
tgttaccaggcggtt

SEQ ID NO: 20676 - DNA, 15 bp, Homo sapiens
ctgttaccaggcggt

SEQ ID NO: 20677 - DNA, 15 bp, Homo sapiens
tctgttaccaggcgg

SEQ ID NO: 20678 - DNA, 15 bp, Homo sapiens
ttctgttaccaggcg

SEQ ID NO: 20679 - DNA, 15 bp, Homo sapiens
cttctgttaccaggc

SEQ ID NO: 20680 - DNA, 15 bp, Homo sapiens
ccttctgttaccagg

SEQ ID NO: 20681 - DNA, 15 bp, Homo sapiens
accttctgttaccag

SEQ ID NO: 20682 - DNA, 15 bp, Homo sapiens
gaccttctgttacca

SEQ ID NO: 20683 - DNA, 15 bp, Homo sapiens
tgaccttctgttacc

SEQ ID NO: 20684 - DNA, 15 bp, Homo sapiens
ctgaccttctgttac

SEQ ID NO: 20685 - DNA, 15 bp, Homo sapiens
cctgaccttctgtta

SEQ ID NO: 20686 - DNA, 15 bp, Homo sapiens
ccctgaccttctgtt

SEQ ID NO: 20687 - DNA, 15 bp, Homo sapiens
gccctgaccttctgt

SEQ ID NO: 20688 - DNA, 15 bp, Homo sapiens
tgccctgaccttctg

SEQ ID NO: 20689 - DNA, 15 bp, Homo sapiens
ctgccctgaccttct

SEQ ID NO: 20690 - DNA, 15 bp, Homo sapiens
cctgccctgaccttc

SEQ ID NO: 20691 - DNA, 15 bp, Homo sapiens
ccctgccctgacctt

SEQ ID NO: 20692 - DNA, 15 bp, Homo sapiens
tccctgccctgacct

SEQ ID NO: 20693 - DNA, 15 bp, Homo sapiens
ttccctgccctgacc

SEQ ID NO: 20694 - DNA, 15 bp, Homo sapiens
cttccctgccctgac

SEQ ID NO: 20695 - DNA, 15 bp, Homo sapiens
ccttccctgccctga

SEQ ID NO: 20696 - DNA, 15 bp, Homo sapiens
gccttccctgccctg

SEQ ID NO: 20697 - DNA, 15 bp, Homo sapiens
tgccttccctgccct

SEQ ID NO: 20698 - DNA, 15 bp, Homo sapiens
ttgccttccctgccc

SEQ ID NO: 20699 - DNA, 15 bp, Homo sapiens
tttgccttccctgcc

SEQ ID NO: 20700 - DNA, 15 bp, Homo sapiens
ctttgccttccctgc

SEQ ID NO: 20701 - DNA, 15 bp, Homo sapiens
cctttgccttccctg

SEQ ID NO: 20702 - DNA, 15 bp, Homo sapiens
ccctttgccttccct

SEQ ID NO: 20703 - DNA, 15 bp, Homo sapiens
cccctttgccttccc

SEQ ID NO: 20704 - DNA, 15 bp, Homo sapiens
gcccctttgccttcc

SEQ ID NO: 20705 - DNA, 15 bp, Homo sapiens
agcccctttgccttc

SEQ ID NO: 20706 - DNA, 15 bp, Homo sapiens
gagcccctttgcctt

SEQ ID NO: 20707 - DNA, 15 bp, Homo sapiens
agagcccctttgcct

SEQ ID NO: 20708 - DNA, 15 bp, Homo sapiens
cagagcccctttgcc

SEQ ID NO: 20709 - DNA, 15 bp, Homo sapiens
gcagagcccctttgc

SEQ ID NO: 20710 - DNA, 15 bp, Homo sapiens
cgcagagcccctttg

SEQ ID NO: 20711 - DNA, 15 bp, Homo sapiens
gcgcagagccccttt

SEQ ID NO: 20712 - DNA, 15 bp, Homo sapiens
cgcgcagagcccctt

SEQ ID NO: 20713 - DNA, 15 bp, Homo sapiens
ccgcgcagagcccct

SEQ ID NO: 20714 - DNA, 15 bp, Homo sapiens
tccgcgcagagcccc

SEQ ID NO: 20715 - DNA, 15 bp, Homo sapiens
atccgcgcagagccc

SEQ ID NO: 20716 - DNA, 15 bp, Homo sapiens
gatccgcgcagagcc

SEQ ID NO: 20717 - DNA, 15 bp, Homo sapiens
agatccgcgcagagc

SEQ ID NO: 20718 - DNA, 15 bp, Homo sapiens
gagatccgcgcagag

SEQ ID NO: 20719 - DNA, 15 bp, Homo sapiens
agagatccgcgcaga

SEQ ID NO: 20720 - DNA, 15 bp, Homo sapiens
gagagatccgcgcag

SEQ ID NO: 20721 - DNA, 15 bp, Homo sapiens
tgagagatccgcgca

SEQ ID NO: 20722 - DNA, 15 bp, Homo sapiens
ctgagagatccgcgc

SEQ ID NO: 20723 - DNA, 15 bp, Homo sapiens
gctgagagatccgcg

SEQ ID NO: 20724 - DNA, 15 bp, Homo sapiens
agctgagagatccgc

SEQ ID NO: 20725 - DNA, 15 bp, Homo sapiens
gagctgagagatccg

SEQ ID NO: 20726 - DNA, 15 bp, Homo sapiens
ggagctgagagatcc

SEQ ID NO: 20727 - DNA, 15 bp, Homo sapiens
cggagctgagagatc

SEQ ID NO: 20728 - DNA, 15 bp, Homo sapiens
gcggagctgagagat

SEQ ID NO: 20729 - DNA, 15 bp, Homo sapiens
tgcggagctgagaga

SEQ ID NO: 20730 - DNA, 15 bp, Homo sapiens
ctgcggagctgagag

SEQ ID NO: 20731 - DNA, 15 bp, Homo sapiens
cctgcggagctgaga

SEQ ID NO: 20732 - DNA, 15 bp, Homo sapiens
gcctgcggagctgag

SEQ ID NO: 20733 - DNA, 15 bp, Homo sapiens
cgcctgcggagctga

SEQ ID NO: 20734 - DNA, 15 bp, Homo sapiens
gcgcctgcggagctg

SEQ ID NO: 20735 - DNA, 15 bp, Homo sapiens
ggcgcctgcggagct

SEQ ID NO: 20736 - DNA, 15 bp, Homo sapiens
gggcgcctgcggagc

SEQ ID NO: 20737 - DNA, 15 bp, Homo sapiens
ggggcgcctgcggag

SEQ ID NO: 20738 - DNA, 15 bp, Homo sapiens
tggggcgcctgcgga

SEQ ID NO: 20739 - DNA, 15 bp, Homo sapiens
gtggggcgcctgcgg

SEQ ID NO: 20740 - DNA, 15 bp, Homo sapiens
agtggggcgcctgcg

SEQ ID NO: 20741 - DNA, 15 bp, Homo sapiens
gagtggggcgcctgc

SEQ ID NO: 20742 - DNA, 15 bp, Homo sapiens
agagtggggcgcctg

SEQ ID NO: 20743 - DNA, 15 bp, Homo sapiens
gagagtggggcgcct

SEQ ID NO: 20744 - DNA, 15 bp, Homo sapiens
ggagagtggggcgcc

SEQ ID NO: 20745 - DNA, 15 bp, Homo sapiens
aggagagtggggcgc

SEQ ID NO: 20746 - DNA, 15 bp, Homo sapiens
gaggagagtggggcg

SEQ ID NO: 20747 - DNA, 15 bp, Homo sapiens
ggaggagagtggggc

SEQ ID NO: 20748 - DNA, 15 bp, Homo sapiens
tggaggagagtgggg

SEQ ID NO: 20749 - DNA, 15 bp, Homo sapiens
ttggaggagagtggg

SEQ ID NO: 20750 - DNA, 15 bp, Homo sapiens
cttggaggagagtgg

SEQ ID NO: 20751 - DNA, 15 bp, Homo sapiens
ccttggaggagagtg

SEQ ID NO: 20752 - DNA, 15 bp, Homo sapiens
cccttggaggagagt

SEQ ID NO: 20753 - DNA, 15 bp, Homo sapiens
tcccttggaggagag

SEQ ID NO: 20754 - DNA, 15 bp, Homo sapiens
gtcccttggaggaga

SEQ ID NO: 20755 - DNA, 15 bp, Homo sapiens
ggtcccttggaggag

SEQ ID NO: 20756 - DNA, 15 bp, Homo sapiens
gggtcccttggagga

SEQ ID NO: 20757 - DNA, 15 bp, Homo sapiens
cgggtcccttggagg

SEQ ID NO: 20758 - DNA, 15 bp, Homo sapiens
tcgggtcccttggag

SEQ ID NO: 20759 - DNA, 15 bp, Homo sapiens
ctcgggtcccttgga

SEQ ID NO: 20760 - DNA, 15 bp, Homo sapiens
gctcgggtcccttgg

SEQ ID NO: 20761 - DNA, 15 bp, Homo sapiens
cgctcgggtcccttg

SEQ ID NO: 20762 - DNA, 15 bp, Homo sapiens
gcgctcgggtccctt

SEQ ID NO: 20763 - DNA, 15 bp, Homo sapiens
ggcgctcgggtccct

SEQ ID NO: 20764 - DNA, 15 bp, Homo sapiens
tggcgctcgggtccc

SEQ ID NO: 20765 - DNA, 15 bp, Homo sapiens
atggcgctcgggtcc

SEQ ID NO: 20766 - DNA, 15 bp, Homo sapiens
gatggcgctcgggtc

SEQ ID NO: 20767 - DNA, 15 bp, Homo sapiens
agatggcgctcgggt

SEQ ID NO: 20768 - DNA, 15 bp, Homo sapiens
cagatggcgctcggg

SEQ ID NO: 20769 - DNA, 15 bp, Homo sapiens
gcagatggcgctcgg

SEQ ID NO: 20770 - DNA, 15 bp, Homo sapiens
agcagatggcgctcg

SEQ ID NO: 20771 - DNA, 15 bp, Homo sapiens
cagcagatggcgctc

SEQ ID NO: 20772 - DNA, 15 bp, Homo sapiens
tcagcagatggcgct

SEQ ID NO: 20773 - DNA, 15 bp, Homo sapiens
ctcagcagatggcgc

SEQ ID NO: 20774 - DNA, 15 bp, Homo sapiens
tctcagcagatggcg

SEQ ID NO: 20775 - DNA, 15 bp, Homo sapiens
ctctcagcagatggc

SEQ ID NO: 20776 - DNA, 15 bp, Homo sapiens
cctctcagcagatgg

SEQ ID NO: 20777 - DNA, 15 bp, Homo sapiens
tcctctcagcagatg

SEQ ID NO: 20778 - DNA, 15 bp, Homo sapiens
ctcctctcagcagat

SEQ ID NO: 20779 - DNA, 15 bp, Homo sapiens
tctcctctcagcaga

SEQ ID NO: 20780 - DNA, 15 bp, Homo sapiens
ttctcctctcagcag

SEQ ID NO: 20781 - DNA, 15 bp, Homo sapiens
gttctcctctcagca

SEQ ID NO: 20782 - DNA, 15 bp, Homo sapiens
tgttctcctctcagc

SEQ ID NO: 20783 - DNA, 15 bp, Homo sapiens
gtgttctcctctcag

SEQ ID NO: 20784 - DNA, 15 bp, Homo sapiens
cgtgttctcctctca

SEQ ID NO: 20785 - DNA, 15 bp, Homo sapiens
ccgtgttctcctctc

SEQ ID NO: 20786 - DNA, 15 bp, Homo sapiens
gccgtgttctcctct

SEQ ID NO: 20787 - DNA, 15 bp, Homo sapiens
ggccgtgttctcctc

SEQ ID NO: 20788 - DNA, 15 bp, Homo sapiens
gggccgtgttctcct

SEQ ID NO: 20789 - DNA, 15 bp, Homo sapiens
cgggccgtgttctcc

SEQ ID NO: 20790 - DNA, 15 bp, Homo sapiens
gcgggccgtgttctc

SEQ ID NO: 20791 - DNA, 15 bp, Homo sapiens
ggcgggccgtgttct

SEQ ID NO: 20792 - DNA, 15 bp, Homo sapiens
tggcgggccgtgttc

SEQ ID NO: 20793 - DNA, 15 bp, Homo sapiens
atggcgggccgtgtt

SEQ ID NO: 20794 - DNA, 15 bp, Homo sapiens
catggcgggccgtgt

SEQ ID NO: 20795 - DNA, 15 bp, Homo sapiens
ccatggcgggccgtg

SEQ ID NO: 20796 - DNA, 15 bp, Homo sapiens
accatggcgggccgt

SEQ ID NO: 20797 - DNA, 15 bp, Homo sapiens
aaccatggcgggccg

SEQ ID NO: 20798 - DNA, 15 bp, Homo sapiens
aaaccatggcgggcc

SEQ ID NO: 20799 - DNA, 15 bp, Homo sapiens
gaaaccatggcgggc

SEQ ID NO: 20800 - DNA, 15 bp, Homo sapiens
ggaaaccatggcggg

SEQ ID NO: 20801 - DNA, 15 bp, Homo sapiens
gggaaaccatggcgg

SEQ ID NO: 20802 - DNA, 15 bp, Homo sapiens
tgggaaaccatggcg

SEQ ID NO: 20803 - DNA, 15 bp, Homo sapiens
ttgggaaaccatggc

SEQ ID NO: 20804 - DNA, 15 bp, Homo sapiens
cttgggaaaccatgg

SEQ ID NO: 20805 - DNA, 15 bp, Homo sapiens
ccttgggaaaccatg

SEQ ID NO: 20806 - DNA, 15 bp, Homo sapiens
tccttgggaaaccat

SEQ ID NO: 20807 - DNA, 15 bp, Homo sapiens
ctccttgggaaacca

SEQ ID NO: 20808 - DNA, 15 bp, Homo sapiens
gctccttgggaaacc

SEQ ID NO: 20809 - DNA, 15 bp, Homo sapiens
tgctccttgggaaac

SEQ ID NO: 20810 - DNA, 15 bp, Homo sapiens
ctgctccttgggaaa

SEQ ID NO: 20811 - DNA, 15 bp, Homo sapiens
gctgctccttgggaa

SEQ ID NO: 20812 - DNA, 15 bp, Homo sapiens
tgctgctccttggga

SEQ ID NO: 20813 - DNA, 15 bp, Homo sapiens
ctgctgctccttggg

SEQ ID NO: 20814 - DNA, 15 bp, Homo sapiens
tctgctgctccttgg

SEQ ID NO: 20815 - DNA, 15 bp, Homo sapiens
gtctgctgctccttg

SEQ ID NO: 20816 - DNA, 15 bp, Homo sapiens
tgtctgctgctcctt

SEQ ID NO: 20817 - DNA, 15 bp, Homo sapiens
gtgtctgctgctcct

SEQ ID NO: 20818 - DNA, 15 bp, Homo sapiens
cgtgtctgctgctcc

SEQ ID NO: 20819 - DNA, 15 bp, Homo sapiens
ccgtgtctgctgctc

SEQ ID NO: 20820 - DNA, 15 bp, Homo sapiens
tccgtgtctgctgct

SEQ ID NO: 20821 - DNA, 15 bp, Homo sapiens
gtccgtgtctgctgc

SEQ ID NO: 20822 - DNA, 15 bp, Homo sapiens
ggtccgtgtctgctg

SEQ ID NO: 20823 - DNA, 15 bp, Homo sapiens
aggtccgtgtctgct

SEQ ID NO: 20824 - DNA, 15 bp, Homo sapiens
gaggtccgtgtctgc

SEQ ID NO: 20825 - DNA, 15 bp, Homo sapiens
cgaggtccgtgtctg

SEQ ID NO: 20826 - DNA, 15 bp, Homo sapiens
gcgaggtccgtgtct

SEQ ID NO: 20827 - DNA, 15 bp, Homo sapiens
tgcgaggtccgtgtc

SEQ ID NO: 20828 - DNA, 15 bp, Homo sapiens
ctgcgaggtccgtgt

SEQ ID NO: 20829 - DNA, 15 bp, Homo sapiens
cctgcgaggtccgtg

SEQ ID NO: 20830 - DNA, 15 bp, Homo sapiens
ccctgcgaggtccgt

SEQ ID NO: 20831 - DNA, 15 bp, Homo sapiens
cccctgcgaggtccg

SEQ ID NO: 20832 - DNA, 15 bp, Homo sapiens
ccccctgcgaggtcc

SEQ ID NO: 20833 - DNA, 15 bp, Homo sapiens
gccccctgcgaggtc

SEQ ID NO: 20834 - DNA, 15 bp, Homo sapiens
tgccccctgcgaggt

SEQ ID NO: 20835 - DNA, 15 bp, Homo sapiens
ctgccccctgcgagg

SEQ ID NO: 20836 - DNA, 15 bp, Homo sapiens
gctgccccctgcgag

SEQ ID NO: 20837 - DNA, 15 bp, Homo sapiens
cgctgccccctgcga

SEQ ID NO: 20838 - DNA, 15 bp, Homo sapiens
tcgctgccccctgcg

SEQ ID NO: 20839 - DNA, 15 bp, Homo sapiens
ttcgctgccccctgc

SEQ ID NO: 20840 - DNA, 15 bp, Homo sapiens
gttcgctgccccctg

SEQ ID NO: 20841 - DNA, 15 bp, Homo sapiens
ggttcgctgccccct

SEQ ID NO: 20842 - DNA, 15 bp, Homo sapiens
gggttcgctgccccc

SEQ ID NO: 20843 - DNA, 15 bp, Homo sapiens
tgggttcgctgcccc

SEQ ID NO: 20844 - DNA, 15 bp, Homo sapiens
gtgggttcgctgccc

SEQ ID NO: 20845 - DNA, 15 bp, Homo sapiens
cgtgggttcgctgcc

SEQ ID NO: 20846 - DNA, 15 bp, Homo sapiens
acgtgggttcgctgc

SEQ ID NO: 20847 - DNA, 15 bp, Homo sapiens
cacgtgggttcgctg

SEQ ID NO: 20848 - DNA, 15 bp, Homo sapiens
tcacgtgggttcgct

SEQ ID NO: 20849 - DNA, 15 bp, Homo sapiens
gtcacgtgggttcgc

SEQ ID NO: 20850 - DNA, 15 bp, Homo sapiens
tgtcacgtgggttcg

SEQ ID NO: 20851 - DNA, 15 bp, Homo sapiens
gtgtcacgtgggttc

SEQ ID NO: 20852 - DNA, 15 bp, Homo sapiens
tgtgtcacgtgggtt

SEQ ID NO: 20853 - DNA, 15 bp, Homo sapiens
ctgtgtcacgtgggt

SEQ ID NO: 20854 - DNA, 15 bp, Homo sapiens
actgtgtcacgtggg

SEQ ID NO: 20855 - DNA, 15 bp, Homo sapiens
gactgtgtcacgtgg

SEQ ID NO: 20856 - DNA, 15 bp, Homo sapiens
agactgtgtcacgtg

SEQ ID NO: 20857 - DNA, 15 bp, Homo sapiens
aagactgtgtcacgt

SEQ ID NO: 20858 - DNA, 15 bp, Homo sapiens
gaagactgtgtcacg

SEQ ID NO: 20859 - DNA, 15 bp, Homo sapiens
tgaagactgtgtcac

SEQ ID NO: 20860 - DNA, 15 bp, Homo sapiens
ttgaagactgtgtca

SEQ ID NO: 20861 - DNA, 15 bp, Homo sapiens
cttgaagactgtgtc

SEQ ID NO: 20862 - DNA, 15 bp, Homo sapiens
acttgaagactgtgt

SEQ ID NO: 20863 - DNA, 15 bp, Homo sapiens
gacttgaagactgtg

SEQ ID NO: 20864 - DNA, 15 bp, Homo sapiens
ggacttgaagactgt

SEQ ID NO: 20865 - DNA, 15 bp, Homo sapiens
aggacttgaagactg

SEQ ID NO: 20866 - DNA, 15 bp, Homo sapiens
aaggacttgaagact

SEQ ID NO: 20867 - DNA, 15 bp, Homo sapiens
aaaggacttgaagac

SEQ ID NO: 20868 - DNA, 15 bp, Homo sapiens
caaaggacttgaaga

SEQ ID NO: 20869 - DNA, 15 bp, Homo sapiens
ccaaaggacttgaag

SEQ ID NO: 20870 - DNA, 15 bp, Homo sapiens
tccaaaggacttgaa

SEQ ID NO: 20871 - DNA, 15 bp, Homo sapiens
ctccaaaggacttga

SEQ ID NO: 20872 - DNA, 15 bp, Homo sapiens
tctccaaaggacttg

SEQ ID NO: 20873 - DNA, 15 bp, Homo sapiens
ctctccaaaggactt

SEQ ID NO: 20874 - DNA, 15 bp, Homo sapiens
gctctccaaaggact

SEQ ID NO: 20875 - DNA, 15 bp, Homo sapiens
ggctctccaaaggac

SEQ ID NO: 20876 - DNA, 15 bp, Homo sapiens
gggctctccaaagga

SEQ ID NO: 20877 - DNA, 15 bp, Homo sapiens
ggggctctccaaagg

SEQ ID NO: 20878 - DNA, 15 bp, Homo sapiens
tggggctctccaaag

SEQ ID NO: 20879 - DNA, 15 bp, Homo sapiens
ctggggctctccaaa

SEQ ID NO: 20880 - DNA, 15 bp, Homo sapiens
cctggggctctccaa

SEQ ID NO: 20881 - DNA, 15 bp, Homo sapiens
tcctggggctctcca

SEQ ID NO: 20882 - DNA, 15 bp, Homo sapiens
ttcctggggctctcc

SEQ ID NO: 20883 - DNA, 15 bp, Homo sapiens
cttcctggggctctc

SEQ ID NO: 20884 - DNA, 15 bp, Homo sapiens
ccttcctggggctct

SEQ ID NO: 20885 - DNA, 15 bp, Homo sapiens
tccttcctggggctc

SEQ ID NO: 20886 - DNA, 15 bp, Homo sapiens
ttccttcctggggct

SEQ ID NO: 20887 - DNA, 15 bp, Homo sapiens
gttccttcctggggc

SEQ ID NO: 20888 - DNA, 15 bp, Homo sapiens
tgttccttcctgggg

SEQ ID NO: 20889 - DNA, 15 bp, Homo sapiens
ttgttccttcctggg

SEQ ID NO: 20890 - DNA, 15 bp, Homo sapiens
gttgttccttcctgg

SEQ ID NO: 20891 - DNA, 15 bp, Homo sapiens
tgttgttccttcctg

SEQ ID NO: 20892 - DNA, 15 bp, Homo sapiens
ctgttgttccttcct

SEQ ID NO: 20893 - DNA, 15 bp, Homo sapiens
gctgttgttccttcc

SEQ ID NO: 20894 - DNA, 15 bp, Homo sapiens
cgctgttgttccttc

SEQ ID NO: 20895 - DNA, 15 bp, Homo sapiens
acgctgttgttcctt

SEQ ID NO: 20896 - DNA, 15 bp, Homo sapiens
cacgctgttgttcct

SEQ ID NO: 20897 - DNA, 15 bp, Homo sapiens
acacgctgttgttcc

SEQ ID NO: 20898 - DNA, 15 bp, Homo sapiens
tacacgctgttgttc

SEQ ID NO: 20899 - DNA, 15 bp, Homo sapiens
gtacacgctgttgtt

SEQ ID NO: 20900 - DNA, 15 bp, Homo sapiens
tgtacacgctgttgt

SEQ ID NO: 20901 - DNA, 15 bp, Homo sapiens
gtgtacacgctgttg

SEQ ID NO: 20902 - DNA, 15 bp, Homo sapiens
ggtgtacacgctgtt

SEQ ID NO: 20903 - DNA, 15 bp, Homo sapiens
gggtgtacacgctgt

SEQ ID NO: 20904 - DNA, 15 bp, Homo sapiens
agggtgtacacgctg

SEQ ID NO: 20905 - DNA, 15 bp, Homo sapiens
cagggtgtacacgct

SEQ ID NO: 20906 - DNA, 15 bp, Homo sapiens
acagggtgtacacgc

SEQ ID NO: 20907 - DNA, 15 bp, Homo sapiens
cacagggtgtacacg

SEQ ID NO: 20908 - DNA, 15 bp, Homo sapiens
tcacagggtgtacac

SEQ ID NO: 20909 - DNA, 15 bp, Homo sapiens
atcacagggtgtaca

SEQ ID NO: 20910 - DNA, 15 bp, Homo sapiens
catcacagggtgtac

SEQ ID NO: 20911 - DNA, 15 bp, Homo sapiens
ccatcacagggtgta

SEQ ID NO: 20912 - DNA, 15 bp, Homo sapiens
tccatcacagggtgt

SEQ ID NO: 20913 - DNA, 15 bp, Homo sapiens
ttccatcacagggtg

SEQ ID NO: 20914 - DNA, 15 bp, Homo sapiens
attccatcacagggt

SEQ ID NO: 20915 - DNA, 15 bp, Homo sapiens
cattccatcacaggg

SEQ ID NO: 20916 - DNA, 15 bp, Homo sapiens
acattccatcacagg

SEQ ID NO: 20917 - DNA, 15 bp, Homo sapiens
aacattccatcacag

SEQ ID NO: 20918 - DNA, 15 bp, Homo sapiens
gaacattccatcaca

SEQ ID NO: 20919 - DNA, 15 bp, Homo sapiens
agaacattccatcac

SEQ ID NO: 20920 - DNA, 15 bp, Homo sapiens
gagaacattccatca

SEQ ID NO: 20921 - DNA, 15 bp, Homo sapiens
agagaacattccatc

SEQ ID NO: 20922 - DNA, 15 bp, Homo sapiens
tagagaacattccat

SEQ ID NO: 20923 - DNA, 15 bp, Homo sapiens
ctagagaacattcca

SEQ ID NO: 20924 - DNA, 15 bp, Homo sapiens
cctagagaacattcc

SEQ ID NO: 20925 - DNA, 15 bp, Homo sapiens
ccctagagaacattc

SEQ ID NO: 20926 - DNA, 15 bp, Homo sapiens
gccctagagaacatt

SEQ ID NO: 20927 - DNA, 15 bp, Homo sapiens
cgccctagagaacat

SEQ ID NO: 20928 - DNA, 15 bp, Homo sapiens
ccgccctagagaaca

SEQ ID NO: 20929 - DNA, 15 bp, Homo sapiens
accgccctagagaac

SEQ ID NO: 20930 - DNA, 15 bp, Homo sapiens
aaccgccctagagaa

SEQ ID NO: 20931 - DNA, 15 bp, Homo sapiens
gaaccgccctagaga

SEQ ID NO: 20932 - DNA, 15 bp, Homo sapiens
tgaaccgccctagag

SEQ ID NO: 20933 - DNA, 15 bp, Homo sapiens
ctgaaccgccctaga

SEQ ID NO: 20934 - DNA, 15 bp, Homo sapiens
actgaaccgccctag

SEQ ID NO: 20935 - DNA, 15 bp, Homo sapiens
cactgaaccgcccta

SEQ ID NO: 20936 - DNA, 15 bp, Homo sapiens
acactgaaccgccct

SEQ ID NO: 20937 - DNA, 15 bp, Homo sapiens
cacactgaaccgccc

SEQ ID NO: 20938 - DNA, 15 bp, Homo sapiens
tcacactgaaccgcc

SEQ ID NO: 20939 - DNA, 15 bp, Homo sapiens
ttcacactgaaccgc

SEQ ID NO: 20940 - DNA, 15 bp, Homo sapiens
attcacactgaaccg

SEQ ID NO: 20941 - DNA, 15 bp, Homo sapiens
cattcacactgaacc

SEQ ID NO: 20942 - DNA, 15 bp, Homo sapiens
ccattcacactgaac

SEQ ID NO: 20943 - DNA, 15 bp, Homo sapiens
tccattcacactgaa

SEQ ID NO: 20944 - DNA, 15 bp, Homo sapiens
ttccattcacactga

SEQ ID NO: 20945 - DNA, 15 bp, Homo sapiens
attccattcacactg

SEQ ID NO: 20946 - DNA, 15 bp, Homo sapiens
cattccattcacact

SEQ ID NO: 20947 - DNA, 15 bp, Homo sapiens
acattccattcacac

SEQ ID NO: 20948 - DNA, 15 bp, Homo sapiens
cacattccattcaca

SEQ ID NO: 20949 - DNA, 15 bp, Homo sapiens
ccacattccattcac

SEQ ID NO: 20950 - DNA, 15 bp, Homo sapiens
cccacattccattca

SEQ ID NO: 20951 - DNA, 15 bp, Homo sapiens
ccccacattccattc

SEQ ID NO: 20952 - DNA, 15 bp, Homo sapiens
gccccacattccatt

SEQ ID NO: 20953 - DNA, 15 bp, Homo sapiens
ggccccacattccat

SEQ ID NO: 20954 - DNA, 15 bp, Homo sapiens
cggccccacattcca

SEQ ID NO: 20955 - DNA, 15 bp, Homo sapiens
ccggccccacattcc

SEQ ID NO: 20956 - DNA, 15 bp, Homo sapiens
accggccccacattc

SEQ ID NO: 20957 - DNA, 15 bp, Homo sapiens
caccggccccacatt

SEQ ID NO: 20958 - DNA, 15 bp, Homo sapiens
gcaccggccccacat

SEQ ID NO: 20959 - DNA, 15 bp, Homo sapiens
ggcaccggccccaca

SEQ ID NO: 20960 - DNA, 15 bp, Homo sapiens
tggcaccggccccac

SEQ ID NO: 20961 - DNA, 15 bp, Homo sapiens
atggcaccggcccca

SEQ ID NO: 20962 - DNA, 15 bp, Homo sapiens
aatggcaccggcccc

SEQ ID NO: 20963 - DNA, 15 bp, Homo sapiens
gaatggcaccggccc

SEQ ID NO: 20964 - DNA, 15 bp, Homo sapiens
agaatggcaccggcc

SEQ ID NO: 20965 - DNA, 15 bp, Homo sapiens
tagaatggcaccggc

SEQ ID NO: 20966 - DNA, 15 bp, Homo sapiens
ttagaatggcaccgg

SEQ ID NO: 20967 - DNA, 15 bp, Homo sapiens
attagaatggcaccg

SEQ ID NO: 20968 - DNA, 15 bp, Homo sapiens
aattagaatggcacc

SEQ ID NO: 20969 - DNA, 15 bp, Homo sapiens
caattagaatggcac

SEQ ID NO: 20970 - DNA, 15 bp, Homo sapiens
ccaattagaatggca

SEQ ID NO: 20971 - DNA, 15 bp, Homo sapiens
accaattagaatggc

SEQ ID NO: 20972 - DNA, 15 bp, Homo sapiens
aaccaattagaatgg

SEQ ID NO: 20973 - DNA, 15 bp, Homo sapiens
gaaccaattagaatg

SEQ ID NO: 20974 - DNA, 15 bp, Homo sapiens
agaaccaattagaat

SEQ ID NO: 20975 - DNA, 15 bp, Homo sapiens
cagaaccaattagaa

SEQ ID NO: 20976 - DNA, 15 bp, Homo sapiens
acagaaccaattaga

SEQ ID NO: 20977 - DNA, 15 bp, Homo sapiens
aacagaaccaattag

SEQ ID NO: 20978 - DNA, 15 bp, Homo sapiens
aaacagaaccaatta

SEQ ID NO: 20979 - DNA, 15 bp, Homo sapiens
gaaacagaaccaatt

SEQ ID NO: 20980 - DNA, 15 bp, Homo sapiens
ggaaacagaaccaat

SEQ ID NO: 20981 - DNA, 15 bp, Homo sapiens
gggaaacagaaccaa

SEQ ID NO: 20982 - DNA, 15 bp, Homo sapiens
agggaaacagaacca

SEQ ID NO: 20983 - DNA, 15 bp, Homo sapiens
gagggaaacagaacc

SEQ ID NO: 20984 - DNA, 15 bp, Homo sapiens
agagggaaacagaac

SEQ ID NO: 20985 - DNA, 15 bp, Homo sapiens
tagagggaaacagaa

SEQ ID NO: 20986 - DNA, 15 bp, Homo sapiens
ctagagggaaacaga

SEQ ID NO: 20987 - DNA, 15 bp, Homo sapiens
actagagggaaacag

SEQ ID NO: 20988 - DNA, 15 bp, Homo sapiens
cactagagggaaaca

SEQ ID NO: 20989 - DNA, 15 bp, Homo sapiens
ccactagagggaaac

SEQ ID NO: 20990 - DNA, 15 bp, Homo sapiens
accactagagggaaa

SEQ ID NO: 20991 - DNA, 15 bp, Homo sapiens
aaccactagagggaa

SEQ ID NO: 20992 - DNA, 15 bp, Homo sapiens
caaccactagaggga

SEQ ID NO: 20993 - DNA, 15 bp, Homo sapiens
tcaaccactagaggg

SEQ ID NO: 20994 - DNA, 15 bp, Homo sapiens
atcaaccactagagg

SEQ ID NO: 20995 - DNA, 15 bp, Homo sapiens
gatcaaccactagag

SEQ ID NO: 20996 - DNA, 15 bp, Homo sapiens
cgatcaaccactaga

SEQ ID NO: 20997 - DNA, 15 bp, Homo sapiens
gcgatcaaccactag

SEQ ID NO: 20998 - DNA, 15 bp, Homo sapiens
cgcgatcaaccacta

SEQ ID NO: 20999 - DNA, 15 bp, Homo sapiens
ccgcgatcaaccact

SEQ ID NO: 21000 - DNA, 15 bp, Homo sapiens
tccgcgatcaaccac

SEQ ID NO: 21001 - DNA, 15 bp, Homo sapiens
ctccgcgatcaacca

SEQ ID NO: 21002 - DNA, 15 bp, Homo sapiens
tctccgcgatcaacc

SEQ ID NO: 21003 - DNA, 15 bp, Homo sapiens
atctccgcgatcaac

SEQ ID NO: 21004 - DNA, 15 bp, Homo sapiens
aatctccgcgatcaa

SEQ ID NO: 21005 - DNA, 15 bp, Homo sapiens
aaatctccgcgatca

SEQ ID NO: 21006 - DNA, 15 bp, Homo sapiens
gaaatctccgcgatc

SEQ ID NO: 21007 - DNA, 15 bp, Homo sapiens
cgaaatctccgcgat

SEQ ID NO: 21008 - DNA, 15 bp, Homo sapiens
ccgaaatctccgcga

SEQ ID NO: 21009 - DNA, 15 bp, Homo sapiens
gccgaaatctccgcg

SEQ ID NO: 21010 - DNA, 15 bp, Homo sapiens
agccgaaatctccgc

SEQ ID NO: 21011 - DNA, 15 bp, Homo sapiens
aagccgaaatctccg

SEQ ID NO: 21012 - DNA, 15 bp, Homo sapiens
gaagccgaaatctcc

SEQ ID NO: 21013 - DNA, 15 bp, Homo sapiens
agaagccgaaatctc

SEQ ID NO: 21014 - DNA, 15 bp, Homo sapiens
gagaagccgaaatct

SEQ ID NO: 21015 - DNA, 15 bp, Homo sapiens
ggagaagccgaaatc

SEQ ID NO: 21016 - DNA, 15 bp, Homo sapiens
tggagaagccgaaat

SEQ ID NO: 21017 - DNA, 15 bp, Homo sapiens
atggagaagccgaaa

SEQ ID NO: 21018 - DNA, 15 bp, Homo sapiens
gatggagaagccgaa

SEQ ID NO: 21019 - DNA, 15 bp, Homo sapiens
tgatggagaagccga

SEQ ID NO: 21020 - DNA, 15 bp, Homo sapiens
ctgatggagaagccg

SEQ ID NO: 21021 - DNA, 15 bp, Homo sapiens
cctgatggagaagcc

SEQ ID NO: 21022 - DNA, 15 bp, Homo sapiens
tcctgatggagaagc

SEQ ID NO: 21023 - DNA, 15 bp, Homo sapiens
gtcctgatggagaag

SEQ ID NO: 21024 - DNA, 15 bp, Homo sapiens
tgtcctgatggagaa

SEQ ID NO: 21025 - DNA, 15 bp, Homo sapiens
ttgtcctgatggaga

SEQ ID NO: 21026 - DNA, 15 bp, Homo sapiens
cttgtcctgatggag

SEQ ID NO: 21027 - DNA, 15 bp, Homo sapiens
acttgtcctgatgga

SEQ ID NO: 21028 - DNA, 15 bp, Homo sapiens
aacttgtcctgatgg

SEQ ID NO: 21029 - DNA, 15 bp, Homo sapiens
gaacttgtcctgatg

SEQ ID NO: 21030 - DNA, 15 bp, Homo sapiens
tgaacttgtcctgat

SEQ ID NO: 21031 - DNA, 15 bp, Homo sapiens
ctgaacttgtcctga

SEQ ID NO: 21032 - DNA, 15 bp, Homo sapiens
tctgaacttgtcctg

SEQ ID NO: 21033 - DNA, 15 bp, Homo sapiens
atctgaacttgtcct

SEQ ID NO: 21034 - DNA, 15 bp, Homo sapiens
tatctgaacttgtcc

SEQ ID NO: 21035 - DNA, 15 bp, Homo sapiens
ctatctgaacttgtc

SEQ ID NO: 21036 - DNA, 15 bp, Homo sapiens
gctatctgaacttgt

SEQ ID NO: 21037 - DNA, 15 bp, Homo sapiens
ggctatctgaacttg

SEQ ID NO: 21038 - DNA, 15 bp, Homo sapiens
aggctatctgaactt

SEQ ID NO: 21039 - DNA, 15 bp, Homo sapiens
caggctatctgaact

SEQ ID NO: 21040 - DNA, 15 bp, Homo sapiens
tcaggctatctgaac

SEQ ID NO: 21041 - DNA, 15 bp, Homo sapiens
ctcaggctatctgaa

SEQ ID NO: 21042 - DNA, 15 bp, Homo sapiens
tctcaggctatctga

SEQ ID NO: 21043 - DNA, 15 bp, Homo sapiens
atctcaggctatctg

SEQ ID NO: 21044 - DNA, 15 bp, Homo sapiens
catctcaggctatct

SEQ ID NO: 21045 - DNA, 15 bp, Homo sapiens
ccatctcaggctatc

SEQ ID NO: 21046 - DNA, 15 bp, Homo sapiens
accatctcaggctat

SEQ ID NO: 21047 - DNA, 15 bp, Homo sapiens
taccatctcaggcta

SEQ ID NO: 21048 - DNA, 15 bp, Homo sapiens
ataccatctcaggct

SEQ ID NO: 21049 - DNA, 15 bp, Homo sapiens
gataccatctcaggc

SEQ ID NO: 21050 - DNA, 15 bp, Homo sapiens
tgataccatctcagg

SEQ ID NO: 21051 - DNA, 15 bp, Homo sapiens
ctgataccatctcag

SEQ ID NO: 21052 - DNA, 15 bp, Homo sapiens
tctgataccatctca

SEQ ID NO: 21053 - DNA, 15 bp, Homo sapiens
ttctgataccatctc

SEQ ID NO: 21054 - DNA, 15 bp, Homo sapiens
gttctgataccatct

SEQ ID NO: 21055 - DNA, 15 bp, Homo sapiens
agttctgataccatc

SEQ ID NO: 21056 - DNA, 15 bp, Homo sapiens
gagttctgataccat

SEQ ID NO: 21057 - DNA, 15 bp, Homo sapiens
tgagttctgatacca

SEQ ID NO: 21058 - DNA, 15 bp, Homo sapiens
ctgagttctgatacc

SEQ ID NO: 21059 - DNA, 15 bp, Homo sapiens
cctgagttctgatac

SEQ ID NO: 21060 - DNA, 15 bp, Homo sapiens
ccctgagttctgata

SEQ ID NO: 21061 - DNA, 15 bp, Homo sapiens
tccctgagttctgat

SEQ ID NO: 21062 - DNA, 15 bp, Homo sapiens
gtccctgagttctga

SEQ ID NO: 21063 - DNA, 15 bp, Homo sapiens
tgtccctgagttctg

SEQ ID NO: 21064 - DNA, 15 bp, Homo sapiens
ctgtccctgagttct

SEQ ID NO: 21065 - DNA, 15 bp, Homo sapiens
tctgtccctgagttc

SEQ ID NO: 21066 - DNA, 15 bp, Homo sapiens
ctctgtccctgagtt

SEQ ID NO: 21067 - DNA, 15 bp, Homo sapiens
gctctgtccctgagt

SEQ ID NO: 21068 - DNA, 15 bp, Homo sapiens
agctctgtccctgag

SEQ ID NO: 21069 - DNA, 15 bp, Homo sapiens
cagctctgtccctga

SEQ ID NO: 21070 - DNA, 15 bp, Homo sapiens
ccagctctgtccctg

SEQ ID NO: 21071 - DNA, 15 bp, Homo sapiens
cccagctctgtccct

SEQ ID NO: 21072 - DNA, 15 bp, Homo sapiens
acccagctctgtccc

SEQ ID NO: 21073 - DNA, 15 bp, Homo sapiens
cacccagctctgtcc

SEQ ID NO: 21074 - DNA, 15 bp, Homo sapiens
acacccagctctgtc

SEQ ID NO: 21075 - DNA, 15 bp, Homo sapiens
cacacccagctctgt

SEQ ID NO: 21076 - DNA, 15 bp, Homo sapiens
ccacacccagctctg

SEQ ID NO: 21077 - DNA, 15 bp, Homo sapiens
gccacacccagctct

SEQ ID NO: 21078 - DNA, 15 bp, Homo sapiens
cgccacacccagctc

SEQ ID NO: 21079 - DNA, 15 bp, Homo sapiens
ccgccacacccagct

SEQ ID NO: 21080 - DNA, 15 bp, Homo sapiens
gccgccacacccagc

SEQ ID NO: 21081 - DNA, 15 bp, Homo sapiens
ggccgccacacccag

SEQ ID NO: 21082 - DNA, 15 bp, Homo sapiens
gggccgccacaccca

SEQ ID NO: 21083 - DNA, 15 bp, Homo sapiens
agggccgccacaccc

SEQ ID NO: 21084 - DNA, 15 bp, Homo sapiens
cagggccgccacacc

SEQ ID NO: 21085 - DNA, 15 bp, Homo sapiens
gcagggccgccacac

SEQ ID NO: 21086 - DNA, 15 bp, Homo sapiens
tgcagggccgccaca

SEQ ID NO: 21087 - DNA, 15 bp, Homo sapiens
atgcagggccgccac

SEQ ID NO: 21088 - DNA, 15 bp, Homo sapiens
gatgcagggccgcca

SEQ ID NO: 21089 - DNA, 15 bp, Homo sapiens
ggatgcagggccgcc

SEQ ID NO: 21090 - DNA, 15 bp, Homo sapiens
tggatgcagggccgc

SEQ ID NO: 21091 - DNA, 15 bp, Homo sapiens
atggatgcagggccg

SEQ ID NO: 21092 - DNA, 15 bp, Homo sapiens
gatggatgcagggcc

SEQ ID NO: 21093 - DNA, 15 bp, Homo sapiens
agatggatgcagggc

SEQ ID NO: 21094 - DNA, 15 bp, Homo sapiens
cagatggatgcaggg

SEQ ID NO: 21095 - DNA, 15 bp, Homo sapiens
gcagatggatgcagg

SEQ ID NO: 21096 - DNA, 15 bp, Homo sapiens
agcagatggatgcag

SEQ ID NO: 21097 - DNA, 15 bp, Homo sapiens
aagcagatggatgca

SEQ ID NO: 21098 - DNA, 15 bp, Homo sapiens
aaagcagatggatgc

SEQ ID NO: 21099 - DNA, 15 bp, Homo sapiens
gaaagcagatggatg

SEQ ID NO: 21100 - DNA, 15 bp, Homo sapiens
agaaagcagatggat

SEQ ID NO: 21101 - DNA, 15 bp, Homo sapiens
gagaaagcagatgga

SEQ ID NO: 21102 - DNA, 15 bp, Homo sapiens
agagaaagcagatgg

SEQ ID NO: 21103 - DNA, 15 bp, Homo sapiens
gagagaaagcagatg

SEQ ID NO: 21104 - DNA, 15 bp, Homo sapiens
ggagagaaagcagat

SEQ ID NO: 21105 - DNA, 15 bp, Homo sapiens
tggagagaaagcaga

SEQ ID NO: 21106 - DNA, 15 bp, Homo sapiens
atggagagaaagcag

SEQ ID NO: 21107 - DNA, 15 bp, Homo sapiens
catggagagaaagca

SEQ ID NO: 21108 - DNA, 15 bp, Homo sapiens
gcatggagagaaagc

SEQ ID NO: 21109 - DNA, 15 bp, Homo sapiens
agcatggagagaaag

SEQ ID NO: 21110 - DNA, 15 bp, Homo sapiens
tagcatggagagaaa

SEQ ID NO: 21111 - DNA, 15 bp, Homo sapiens
ttagcatggagagaa

SEQ ID NO: 21112 - DNA, 15 bp, Homo sapiens
gttagcatggagaga

SEQ ID NO: 21113 - DNA, 15 bp, Homo sapiens
agttagcatggagag

SEQ ID NO: 21114 - DNA, 15 bp, Homo sapiens
cagttagcatggaga

SEQ ID NO: 21115 - DNA, 15 bp, Homo sapiens
tcagttagcatggag

SEQ ID NO: 21116 - DNA, 15 bp, Homo sapiens
atcagttagcatgga

SEQ ID NO: 21117 - DNA, 15 bp, Homo sapiens
tatcagttagcatgg

SEQ ID NO: 21118 - DNA, 15 bp, Homo sapiens
atatcagttagcatg

SEQ ID NO: 21119 - DNA, 15 bp, Homo sapiens
catatcagttagcat

SEQ ID NO: 21120 - DNA, 15 bp, Homo sapiens
ccatatcagttagca

SEQ ID NO: 21121 - DNA, 15 bp, Homo sapiens
accatatcagttagc

SEQ ID NO: 21122 - DNA, 15 bp, Homo sapiens
gaccatatcagttag

SEQ ID NO: 21123 - DNA, 15 bp, Homo sapiens
tgaccatatcagtta

SEQ ID NO: 21124 - DNA, 15 bp, Homo sapiens
ctgaccatatcagtt

SEQ ID NO: 21125 - DNA, 15 bp, Homo sapiens
tctgaccatatcagt

SEQ ID NO: 21126 - DNA, 15 bp, Homo sapiens
ctctgaccatatcag

SEQ ID NO: 21127 - DNA, 15 bp, Homo sapiens
tctctgaccatatca

SEQ ID NO: 21128 - DNA, 15 bp, Homo sapiens
ctctctgaccatatc

SEQ ID NO: 21129 - DNA, 15 bp, Homo sapiens
gctctctgaccatat

SEQ ID NO: 21130 - DNA, 15 bp, Homo sapiens
agctctctgaccata

SEQ ID NO: 21131 - DNA, 15 bp, Homo sapiens
cagctctctgaccat

SEQ ID NO: 21132 - DNA, 15 bp, Homo sapiens
ccagctctctgacca

SEQ ID NO: 21133 - DNA, 15 bp, Homo sapiens
tccagctctctgacc

SEQ ID NO: 21134 - DNA, 15 bp, Homo sapiens
ttccagctctctgac

SEQ ID NO: 21135 - DNA, 15 bp, Homo sapiens
cttccagctctctga

SEQ ID NO: 21136 - DNA, 15 bp, Homo sapiens
gcttccagctctctg

SEQ ID NO: 21137 - DNA, 15 bp, Homo sapiens
tgcttccagctctct

SEQ ID NO: 21138 - DNA, 15 bp, Homo sapiens
ttgcttccagctctc

SEQ ID NO: 21139 - DNA, 15 bp, Homo sapiens
tttgcttccagctct

SEQ ID NO: 21140 - DNA, 15 bp, Homo sapiens
atttgcttccagctc

SEQ ID NO: 21141 - DNA, 15 bp, Homo sapiens
aatttgcttccagct

SEQ ID NO: 21142 - DNA, 15 bp, Homo sapiens
gaatttgcttccagc

SEQ ID NO: 21143 - DNA, 15 bp, Homo sapiens
ggaatttgcttccag

SEQ ID NO: 21144 - DNA, 15 bp, Homo sapiens
tggaatttgcttcca

SEQ ID NO: 21145 - DNA, 15 bp, Homo sapiens
ctggaatttgcttcc

SEQ ID NO: 21146 - DNA, 15 bp, Homo sapiens
cctggaatttgcttc

SEQ ID NO: 21147 - DNA, 15 bp, Homo sapiens
tcctggaatttgctt

SEQ ID NO: 21148 - DNA, 15 bp, Homo sapiens
gtcctggaatttgct

SEQ ID NO: 21149 - DNA, 15 bp, Homo sapiens
ggtcctggaatttgc

SEQ ID NO: 21150 - DNA, 15 bp, Homo sapiens
gggtcctggaatttg

SEQ ID NO: 21151 - DNA, 15 bp, Homo sapiens
ggggtcctggaattt

SEQ ID NO: 21152 - DNA, 15 bp, Homo sapiens
tggggtcctggaatt

SEQ ID NO: 21153 - DNA, 15 bp, Homo sapiens
ctggggtcctggaat

SEQ ID NO: 21154 - DNA, 15 bp, Homo sapiens
cctggggtcctggaa

SEQ ID NO: 21155 - DNA, 15 bp, Homo sapiens
ccctggggtcctgga

SEQ ID NO: 21156 - DNA, 15 bp, Homo sapiens
gccctggggtcctgg

SEQ ID NO: 21157 - DNA, 15 bp, Homo sapiens
agccctggggtcctg

SEQ ID NO: 21158 - DNA, 15 bp, Homo sapiens
gagccctggggtcct

SEQ ID NO: 21159 - DNA, 15 bp, Homo sapiens
ggagccctggggtcc

SEQ ID NO: 21160 - DNA, 15 bp, Homo sapiens
cggagccctggggtc

SEQ ID NO: 21161 - DNA, 15 bp, Homo sapiens
gcggagccctggggt

SEQ ID NO: 21162 - DNA, 15 bp, Homo sapiens
tgcggagccctgggg

SEQ ID NO: 21163 - DNA, 15 bp, Homo sapiens
ttgcggagccctggg

SEQ ID NO: 21164 - DNA, 15 bp, Homo sapiens
tttgcggagccctgg

SEQ ID NO: 21165 - DNA, 15 bp, Homo sapiens
ctttgcggagccctg

SEQ ID NO: 21166 - DNA, 15 bp, Homo sapiens
cctttgcggagccct

SEQ ID NO: 21167 - DNA, 15 bp, Homo sapiens
gcctttgcggagccc

SEQ ID NO: 21168 - DNA, 15 bp, Homo sapiens
tgcctttgcggagcc

SEQ ID NO: 21169 - DNA, 15 bp, Homo sapiens
ttgcctttgcggagc

SEQ ID NO: 21170 - DNA, 15 bp, Homo sapiens
tttgcctttgcggag

SEQ ID NO: 21171 - DNA, 15 bp, Homo sapiens
gtttgcctttgcgga

SEQ ID NO: 21172 - DNA, 15 bp, Homo sapiens
tgtttgcctttgcgg

SEQ ID NO: 21173 - DNA, 15 bp, Homo sapiens
gtgtttgcctttgcg

SEQ ID NO: 21174 - DNA, 15 bp, Homo sapiens
tgtgtttgcctttgc

SEQ ID NO: 21175 - DNA, 15 bp, Homo sapiens
atgtgtttgcctttg

SEQ ID NO: 21176 - DNA, 15 bp, Homo sapiens
aatgtgtttgccttt

SEQ ID NO: 21177 - DNA, 15 bp, Homo sapiens
taatgtgtttgcctt

SEQ ID NO: 21178 - DNA, 15 bp, Homo sapiens
gtaatgtgtttgcct

SEQ ID NO: 21179 - DNA, 15 bp, Homo sapiens
agtaatgtgtttgcc

SEQ ID NO: 21180 - DNA, 15 bp, Homo sapiens
aagtaatgtgtttgc

SEQ ID NO: 21181 - DNA, 15 bp, Homo sapiens
gaagtaatgtgtttg

SEQ ID NO: 21182 - DNA, 15 bp, Homo sapiens
tgaagtaatgtgttt

SEQ ID NO: 21183 - DNA, 15 bp, Homo sapiens
atgaagtaatgtgtt

SEQ ID NO: 21184 - DNA, 15 bp, Homo sapiens
gatgaagtaatgtgt

SEQ ID NO: 21185 - DNA, 15 bp, Homo sapiens
cgatgaagtaatgtg

SEQ ID NO: 21186 - DNA, 15 bp, Homo sapiens
ccgatgaagtaatgt

SEQ ID NO: 21187 - DNA, 15 bp, Homo sapiens
gccgatgaagtaatg

SEQ ID NO: 21188 - DNA, 15 bp, Homo sapiens
agccgatgaagtaat

SEQ ID NO: 21189 - DNA, 15 bp, Homo sapiens
cagccgatgaagtaa

SEQ ID NO: 21190 - DNA, 15 bp, Homo sapiens
gcagccgatgaagta

SEQ ID NO: 21191 - DNA, 15 bp, Homo sapiens
agcagccgatgaagt

SEQ ID NO: 21192 - DNA, 15 bp, Homo sapiens
cagcagccgatgaag

SEQ ID NO: 21193 - DNA, 15 bp, Homo sapiens
tcagcagccgatgaa

SEQ ID NO: 21194 - DNA, 15 bp, Homo sapiens
gtcagcagccgatga

SEQ ID NO: 21195 - DNA, 15 bp, Homo sapiens
tgtcagcagccgatg

SEQ ID NO: 21196 - DNA, 15 bp, Homo sapiens
atgtcagcagccgat

SEQ ID NO: 21197 - DNA, 15 bp, Homo sapiens
catgtcagcagccga

SEQ ID NO: 21198 - DNA, 15 bp, Homo sapiens
gcatgtcagcagccg

SEQ ID NO: 21199 - DNA, 15 bp, Homo sapiens
tgcatgtcagcagcc

SEQ ID NO: 21200 - DNA, 15 bp, Homo sapiens
ttgcatgtcagcagc

SEQ ID NO: 21201 - DNA, 15 bp, Homo sapiens
gttgcatgtcagcag

SEQ ID NO: 21202 - DNA, 15 bp, Homo sapiens
agttgcatgtcagca

SEQ ID NO: 21203 - DNA, 15 bp, Homo sapiens
aagttgcatgtcagc

SEQ ID NO: 21204 - DNA, 15 bp, Homo sapiens
gaagttgcatgtcag

SEQ ID NO: 21205 - DNA, 15 bp, Homo sapiens
ggaagttgcatgtca

SEQ ID NO: 21206 - DNA, 15 bp, Homo sapiens
gggaagttgcatgtc

SEQ ID NO: 21207 - DNA, 15 bp, Homo sapiens
ggggaagttgcatgt

SEQ ID NO: 21208 - DNA, 15 bp, Homo sapiens
gggggaagttgcatg

SEQ ID NO: 21209 - DNA, 15 bp, Homo sapiens
tgggggaagttgcat

SEQ ID NO: 21210 - DNA, 15 bp, Homo sapiens
ctgggggaagttgca

SEQ ID NO: 21211 - DNA, 15 bp, Homo sapiens
cctgggggaagttgc

SEQ ID NO: 21212 - DNA, 15 bp, Homo sapiens
ccctgggggaagttg

SEQ ID NO: 21213 - DNA, 15 bp, Homo sapiens
cccctgggggaagtt

SEQ ID NO: 21214 - DNA, 15 bp, Homo sapiens
acccctgggggaagt

SEQ ID NO: 21215 - DNA, 15 bp, Homo sapiens
aacccctgggggaag

SEQ ID NO: 21216 - DNA, 15 bp, Homo sapiens
taacccctgggggaa

SEQ ID NO: 21217 - DNA, 15 bp, Homo sapiens
ttaacccctggggga

SEQ ID NO: 21218 - DNA, 15 bp, Homo sapiens
tttaacccctggggg

SEQ ID NO: 21219 - DNA, 15 bp, Homo sapiens
ttttaacccctgggg

SEQ ID NO: 21220 - DNA, 15 bp, Homo sapiens
gttttaacccctggg

SEQ ID NO: 21221 - DNA, 15 bp, Homo sapiens
tgttttaacccctgg

SEQ ID NO: 21222 - DNA, 15 bp, Homo sapiens
ttgttttaacccctg

SEQ ID NO: 21223 - DNA, 15 bp, Homo sapiens
attgttttaacccct

SEQ ID NO: 21224 - DNA, 15 bp, Homo sapiens
cattgttttaacccc

SEQ ID NO: 21225 - DNA, 15 bp, Homo sapiens
acattgttttaaccc

SEQ ID NO: 21226 - DNA, 15 bp, Homo sapiens
aacattgttttaacc

SEQ ID NO: 21227 - DNA, 15 bp, Homo sapiens
aaacattgttttaac

SEQ ID NO: 21228 - DNA, 15 bp, Homo sapiens
taaacattgttttaa

SEQ ID NO: 21229 - DNA, 15 bp, Homo sapiens
ttaaacattgtttta

SEQ ID NO: 21230 - DNA, 15 bp, Homo sapiens
attaaacattgtttt

SEQ ID NO: 21231 - DNA, 15 bp, Homo sapiens
tattaaacattgttt

SEQ ID NO: 21232 - DNA, 15 bp, Homo sapiens
gtattaaacattgtt

SEQ ID NO: 21233 - DNA, 15 bp, Homo sapiens
agtattaaacattgt

SEQ ID NO: 21234 - DNA, 15 bp, Homo sapiens
tagtattaaacattg

SEQ ID NO: 21235 - DNA, 15 bp, Homo sapiens
ttagtattaaacatt

SEQ ID NO: 21236 - DNA, 15 bp, Homo sapiens
gttagtattaaacat

SEQ ID NO: 21237 - DNA, 15 bp, Homo sapiens
tgttagtattaaaca

SEQ ID NO: 21238 - DNA, 15 bp, Homo sapiens
ctgttagtattaaac

SEQ ID NO: 21239 - DNA, 15 bp, Homo sapiens
actgttagtattaaa

SEQ ID NO: 21240 - DNA, 15 bp, Homo sapiens
tactgttagtattaa

SEQ ID NO: 21241 - DNA, 15 bp, Homo sapiens
ttactgttagtatta

SEQ ID NO: 21242 - DNA, 15 bp, Homo sapiens
attactgttagtatt

SEQ ID NO: 21243 - DNA, 15 bp, Homo sapiens
tattactgttagtat

SEQ ID NO: 21244 - DNA, 15 bp, Homo sapiens
ttattactgttagta

SEQ ID NO: 21245 - DNA, 15 bp, Homo sapiens
attattactgttagt

SEQ ID NO: 21246 - DNA, 15 bp, Homo sapiens
tattattactgttag

SEQ ID NO: 21247 - DNA, 15 bp, Homo sapiens
atattattactgtta

SEQ ID NO: 21248 - DNA, 15 bp, Homo sapiens
aatattattactgtt

SEQ ID NO: 21249 - DNA, 15 bp, Homo sapiens
aaatattattactgt

SEQ ID NO: 21250 - DNA, 15 bp, Homo sapiens
aaaatattattactg

SEQ ID NO: 21251 - DNA, 15 bp, Homo sapiens
aaaaatattattact

SEQ ID NO: 21252 - DNA, 15 bp, Homo sapiens
caaaaatattattac

SEQ ID NO: 21253 - DNA, 15 bp, Homo sapiens
tcaaaaatattatta

SEQ ID NO: 21254 - DNA, 15 bp, Homo sapiens
ctcaaaaatattatt

SEQ ID NO: 21255 - DNA, 15 bp, Homo sapiens
actcaaaaatattat

SEQ ID NO: 21256 - DNA, 15 bp, Homo sapiens
aactcaaaaatatta

SEQ ID NO: 21257 - DNA, 15 bp, Homo sapiens
aaactcaaaaatatt

SEQ ID NO: 21258 - DNA, 15 bp, Homo sapiens
aaaactcaaaaatat

SEQ ID NO: 21259 - DNA, 15 bp, Homo sapiens
taaaactcaaaaata

SEQ ID NO: 21260 - DNA, 15 bp, Homo sapiens
gtaaaactcaaaaat

SEQ ID NO: 21261 - DNA, 15 bp, Homo sapiens
agtaaaactcaaaaa

SEQ ID NO: 21262 - DNA, 15 bp, Homo sapiens
aagtaaaactcaaaa

SEQ ID NO: 21263 - DNA, 15 bp, Homo sapiens
aaagtaaaactcaaa

SEQ ID NO: 21264 - DNA, 15 bp, Homo sapiens
taaagtaaaactcaa

SEQ ID NO: 21265 - DNA, 15 bp, Homo sapiens
ataaagtaaaactca

SEQ ID NO: 21266 - DNA, 15 bp, Homo sapiens
cataaagtaaaactc

SEQ ID NO: 21267 - DNA, 15 bp, Homo sapiens
gcataaagtaaaact

SEQ ID NO: 21268 - DNA, 15 bp, Homo sapiens
agcataaagtaaaac

SEQ ID NO: 21269 - DNA, 15 bp, Homo sapiens
cagcataaagtaaaa

SEQ ID NO: 21270 - DNA, 15 bp, Homo sapiens
ccagcataaagtaaa

SEQ ID NO: 21271 - DNA, 15 bp, Homo sapiens
gccagcataaagtaa

SEQ ID NO: 21272 - DNA, 15 bp, Homo sapiens
cgccagcataaagta

SEQ ID NO: 21273 - DNA, 15 bp, Homo sapiens
gcgccagcataaagt

SEQ ID NO: 21274 - DNA, 15 bp, Homo sapiens
agcgccagcataaag

SEQ ID NO: 21275 - DNA, 15 bp, Homo sapiens
cagcgccagcataaa

SEQ ID NO: 21276 - DNA, 15 bp, Homo sapiens
acagcgccagcataa

SEQ ID NO: 21277 - DNA, 15 bp, Homo sapiens
aacagcgccagcata

SEQ ID NO: 21278 - DNA, 15 bp, Homo sapiens
gaacagcgccagcat

SEQ ID NO: 21279 - DNA, 15 bp, Homo sapiens
agaacagcgccagca

SEQ ID NO: 21280 - DNA, 15 bp, Homo sapiens
tagaacagcgccagc

SEQ ID NO: 21281 - DNA, 15 bp, Homo sapiens
ttagaacagcgccag

SEQ ID NO: 21282 - DNA, 15 bp, Homo sapiens
attagaacagcgcca

SEQ ID NO: 21283 - DNA, 15 bp, Homo sapiens
cattagaacagcgcc

SEQ ID NO: 21284 - DNA, 15 bp, Homo sapiens
acattagaacagcgc

SEQ ID NO: 21285 - DNA, 15 bp, Homo sapiens
aacattagaacagcg

SEQ ID NO: 21286 - DNA, 15 bp, Homo sapiens
caacattagaacagc

SEQ ID NO: 21287 - DNA, 15 bp, Homo sapiens
acaacattagaacag

SEQ ID NO: 21288 - DNA, 15 bp, Homo sapiens
tacaacattagaaca

SEQ ID NO: 21289 - DNA, 15 bp, Homo sapiens
ttacaacattagaac

SEQ ID NO: 21290 - DNA, 15 bp, Homo sapiens
cttacaacattagaa

SEQ ID NO: 21291 - DNA, 15 bp, Homo sapiens
acttacaacattaga

SEQ ID NO: 21292 - DNA, 15 bp, Homo sapiens
cacttacaacattag

SEQ ID NO: 21293 - DNA, 15 bp, Homo sapiens
acacttacaacatta

SEQ ID NO: 21294 - DNA, 15 bp, Homo sapiens
tacacttacaacatt

SEQ ID NO: 21295 - DNA, 15 bp, Homo sapiens
atacacttacaacat

SEQ ID NO: 21296 - DNA, 15 bp, Homo sapiens
aatacacttacaaca

SEQ ID NO: 21297 - DNA, 15 bp, Homo sapiens
taatacacttacaac

SEQ ID NO: 21298 - DNA, 15 bp, Homo sapiens
ttaatacacttacaa

SEQ ID NO: 21299 - DNA, 15 bp, Homo sapiens
gttaatacacttaca

SEQ ID NO: 21300 - DNA, 15 bp, Homo sapiens
agttaatacacttac

SEQ ID NO: 21301 - DNA, 15 bp, Homo sapiens
gagttaatacactta

SEQ ID NO: 21302 - DNA, 15 bp, Homo sapiens
tgagttaatacactt

SEQ ID NO: 21303 - DNA, 15 bp, Homo sapiens
atgagttaatacact

SEQ ID NO: 21304 - DNA, 15 bp, Homo sapiens
aatgagttaatacac

SEQ ID NO: 21305 - DNA, 15 bp, Homo sapiens
aaatgagttaataca

SEQ ID NO: 21306 - DNA, 15 bp, Homo sapiens
taaatgagttaatac

SEQ ID NO: 21307 - DNA, 15 bp, Homo sapiens
ttaaatgagttaata

SEQ ID NO: 21308 - DNA, 15 bp, Homo sapiens
cttaaatgagttaat

SEQ ID NO: 21309 - DNA, 15 bp, Homo sapiens
gcttaaatgagttaa

SEQ ID NO: 21310 - DNA, 15 bp, Homo sapiens
ggcttaaatgagtta

SEQ ID NO: 21311 - DNA, 15 bp, Homo sapiens
aggcttaaatgagtt

SEQ ID NO: 21312 - DNA, 15 bp, Homo sapiens
aaggcttaaatgagt

SEQ ID NO: 21313 - DNA, 15 bp, Homo sapiens
taaggcttaaatgag

SEQ ID NO: 21314 - DNA, 15 bp, Homo sapiens
gtaaggcttaaatga

SEQ ID NO: 21315 - DNA, 15 bp, Homo sapiens
tgtaaggcttaaatg

SEQ ID NO: 21316 - DNA, 15 bp, Homo sapiens
ttgtaaggcttaaat

SEQ ID NO: 21317 - DNA, 15 bp, Homo sapiens
gttgtaaggcttaaa

SEQ ID NO: 21318 - DNA, 15 bp, Homo sapiens
tgttgtaaggcttaa

SEQ ID NO: 21319 - DNA, 15 bp, Homo sapiens
ttgttgtaaggctta

SEQ ID NO: 21320 - DNA, 15 bp, Homo sapiens
gttgttgtaaggctt

SEQ ID NO: 21321 - DNA, 15 bp, Homo sapiens
ggttgttgtaaggct

SEQ ID NO: 21322 - DNA, 15 bp, Homo sapiens
aggttgttgtaaggc

SEQ ID NO: 21323 - DNA, 15 bp, Homo sapiens
taggttgttgtaagg

SEQ ID NO: 21324 - DNA, 15 bp, Homo sapiens
ttaggttgttgtaag

SEQ ID NO: 21325 - DNA, 15 bp, Homo sapiens
cttaggttgttgtaa

SEQ ID NO: 21326 - DNA, 15 bp, Homo sapiens
ccttaggttgttgta

SEQ ID NO: 21327 - DNA, 15 bp, Homo sapiens
tccttaggttgttgt

SEQ ID NO: 21328 - DNA, 15 bp, Homo sapiens
gtccttaggttgttg

SEQ ID NO: 21329 - DNA, 15 bp, Homo sapiens
tgtccttaggttgtt

SEQ ID NO: 21330 - DNA, 15 bp, Homo sapiens
atgtccttaggttgt

SEQ ID NO: 21331 - DNA, 15 bp, Homo sapiens
catgtccttaggttg

SEQ ID NO: 21332 - DNA, 15 bp, Homo sapiens
ccatgtccttaggtt

SEQ ID NO: 21333 - DNA, 15 bp, Homo sapiens
cccatgtccttaggt

SEQ ID NO: 21334 - DNA, 15 bp, Homo sapiens
tcccatgtccttagg

SEQ ID NO: 21335 - DNA, 15 bp, Homo sapiens
ctcccatgtccttag

SEQ ID NO: 21336 - DNA, 15 bp, Homo sapiens
actcccatgtcctta

SEQ ID NO: 21337 - DNA, 15 bp, Homo sapiens
gactcccatgtcctt

SEQ ID NO: 21338 - DNA, 15 bp, Homo sapiens
tgactcccatgtcct

SEQ ID NO: 21339 - DNA, 15 bp, Homo sapiens
atgactcccatgtcc

SEQ ID NO: 21340 - DNA, 15 bp, Homo sapiens
tatgactcccatgtc

SEQ ID NO: 21341 - DNA, 15 bp, Homo sapiens
ctatgactcccatgt

SEQ ID NO: 21342 - DNA, 15 bp, Homo sapiens
actatgactcccatg

SEQ ID NO: 21343 - DNA, 15 bp, Homo sapiens
aactatgactcccat

SEQ ID NO: 21344 - DNA, 15 bp, Homo sapiens
gaactatgactccca

SEQ ID NO: 21345 - DNA, 15 bp, Homo sapiens
ggaactatgactccc

SEQ ID NO: 21346 - DNA, 15 bp, Homo sapiens
gggaactatgactcc

SEQ ID NO: 21347 - DNA, 15 bp, Homo sapiens
tgggaactatgactc

SEQ ID NO: 21348 - DNA, 15 bp, Homo sapiens
atgggaactatgact

SEQ ID NO: 21349 - DNA, 15 bp, Homo sapiens
aatgggaactatgac

SEQ ID NO: 21350 - DNA, 15 bp, Homo sapiens
aaatgggaactatga

SEQ ID NO: 21351 - DNA, 15 bp, Homo sapiens
taaatgggaactatg

SEQ ID NO: 21352 - DNA, 15 bp, Homo sapiens
ttaaatgggaactat

SEQ ID NO: 21353 - DNA, 15 bp, Homo sapiens
tttaaatgggaacta

SEQ ID NO: 21354 - DNA, 15 bp, Homo sapiens
ttttaaatgggaact

SEQ ID NO: 21355 - DNA, 15 bp, Homo sapiens
tttttaaatgggaac

SEQ ID NO: 21356 - DNA, 15 bp, Homo sapiens
ttttttaaatgggaa

SEQ ID NO: 21357 - DNA, 15 bp, Homo sapiens
tttttttaaatggga

SEQ ID NO: 21358 - DNA, 15 bp, Homo sapiens
ttttttttaaatggg

SEQ ID NO: 21359 - DNA, 15 bp, Homo sapiens
tttttttttaaatgg

SEQ ID NO: 21360 - DNA, 15 bp, Homo sapiens
ttttttttttaaatg

SEQ ID NO: 21361 - DNA, 15 bp, Homo sapiens
tttttttttttaaat

SEQ ID NO: 21362 - DNA, 15 bp, Homo sapiens
ttttttttttttaaa

SEQ ID NO: 21363 - DNA, 15 bp, Homo sapiens
tttttttttttttaa

SEQ ID NO: 21364 - DNA, 15 bp, Homo sapiens
tttttttttttttta

SEQ ID NO: 21365 - DNA, 15 bp, Homo sapiens
ctttttttttttttt

SEQ ID NO: 21366 - DNA, 15 bp, Homo sapiens
gcttttttttttttt

SEQ ID NO: 21367 - DNA, 15 bp, Homo sapiens
ggctttttttttttt

SEQ ID NO: 21368 - DNA, 15 bp, Homo sapiens
gggcttttttttttt

SEQ ID NO: 21369 - DNA, 15 bp, Homo sapiens
tgggctttttttttt

SEQ ID NO: 21370 - DNA, 15 bp, Homo sapiens
gtgggcttttttttt

SEQ ID NO: 21371 - DNA, 15 bp, Homo sapiens
ggtgggctttttttt

SEQ ID NO: 21372 - DNA, 15 bp, Homo sapiens
tggtgggcttttttt

SEQ ID NO: 21373 - DNA, 15 bp, Homo sapiens
atggtgggctttttt

SEQ ID NO: 21374 - DNA, 15 bp, Homo sapiens
aatggtgggcttttt

SEQ ID NO: 21375 - DNA, 15 bp, Homo sapiens
caatggtgggctttt

SEQ ID NO: 21376 - DNA, 15 bp, Homo sapiens
gcaatggtgggcttt

SEQ ID NO: 21377 - DNA, 15 bp, Homo sapiens
agcaatggtgggctt

SEQ ID NO: 21378 - DNA, 15 bp, Homo sapiens
gagcaatggtgggct

SEQ ID NO: 21379 - DNA, 15 bp, Homo sapiens
agagcaatggtgggc

SEQ ID NO: 21380 - DNA, 15 bp, Homo sapiens
cagagcaatggtggg

SEQ ID NO: 21381 - DNA, 15 bp, Homo sapiens
tcagagcaatggtgg

SEQ ID NO: 21382 - DNA, 15 bp, Homo sapiens
ctcagagcaatggtg

SEQ ID NO: 21383 - DNA, 15 bp, Homo sapiens
cctcagagcaatggt

SEQ ID NO: 21384 - DNA, 15 bp, Homo sapiens
gcctcagagcaatgg

SEQ ID NO: 21385 - DNA, 15 bp, Homo sapiens
agcctcagagcaatg

SEQ ID NO: 21386 - DNA, 15 bp, Homo sapiens
aagcctcagagcaat

SEQ ID NO: 21387 - DNA, 15 bp, Homo sapiens
aaagcctcagagcaa

SEQ ID NO: 21388 - DNA, 15 bp, Homo sapiens
aaaagcctcagagca

SEQ ID NO: 21389 - DNA, 15 bp, Homo sapiens
aaaaagcctcagagc

SEQ ID NO: 21390 - DNA, 15 bp, Homo sapiens
taaaaagcctcagag

SEQ ID NO: 21391 - DNA, 15 bp, Homo sapiens
ataaaaagcctcaga

SEQ ID NO: 21392 - DNA, 15 bp, Homo sapiens
cataaaaagcctcag

SEQ ID NO: 21393 - DNA, 15 bp, Homo sapiens
acataaaaagcctca

SEQ ID NO: 21394 - DNA, 15 bp, Homo sapiens
aacataaaaagcctc

SEQ ID NO: 21395 - DNA, 15 bp, Homo sapiens
aaacataaaaagcct

SEQ ID NO: 21396 - DNA, 15 bp, Homo sapiens
aaaacataaaaagcc

SEQ ID NO: 21397 - DNA, 15 bp, Homo sapiens
caaaacataaaaagc

SEQ ID NO: 21398 - DNA, 15 bp, Homo sapiens
ccaaaacataaaaag

SEQ ID NO: 21399 - DNA, 15 bp, Homo sapiens
tccaaaacataaaaa

SEQ ID NO: 21400 - DNA, 15 bp, Homo sapiens
atccaaaacataaaa

SEQ ID NO: 21401 - DNA, 15 bp, Homo sapiens
gatccaaaacataaa

SEQ ID NO: 21402 - DNA, 15 bp, Homo sapiens
ggatccaaaacataa

SEQ ID NO: 21403 - DNA, 15 bp, Homo sapiens
tggatccaaaacata

SEQ ID NO: 21404 - DNA, 15 bp, Homo sapiens
ttggatccaaaacat

SEQ ID NO: 21405 - DNA, 15 bp, Homo sapiens
tttggatccaaaaca

SEQ ID NO: 21406 - DNA, 15 bp, Homo sapiens
ctttggatccaaaac

SEQ ID NO: 21407 - DNA, 15 bp, Homo sapiens
gctttggatccaaaa

SEQ ID NO: 21408 - DNA, 15 bp, Homo sapiens
agctttggatccaaa

SEQ ID NO: 21409 - DNA, 15 bp, Homo sapiens
tagctttggatccaa

SEQ ID NO: 21410 - DNA, 15 bp, Homo sapiens
ttagctttggatcca

SEQ ID NO: 21411 - DNA, 15 bp, Homo sapiens
attagctttggatcc

SEQ ID NO: 21412 - DNA, 15 bp, Homo sapiens
tattagctttggatc

SEQ ID NO: 21413 - DNA, 15 bp, Homo sapiens
atattagctttggat

SEQ ID NO: 21414 - DNA, 15 bp, Homo sapiens
aatattagctttgga

SEQ ID NO: 21415 - DNA, 15 bp, Homo sapiens
caatattagctttgg

SEQ ID NO: 21416 - DNA, 15 bp, Homo sapiens
ccaatattagctttg

SEQ ID NO: 21417 - DNA, 15 bp, Homo sapiens
accaatattagcttt

SEQ ID NO: 21418 - DNA, 15 bp, Homo sapiens
caccaatattagctt

SEQ ID NO: 21419 - DNA, 15 bp, Homo sapiens
ccaccaatattagct

SEQ ID NO: 21420 - DNA, 15 bp, Homo sapiens
accaccaatattagc

SEQ ID NO: 21421 - DNA, 15 bp, Homo sapiens
caccaccaatattag

SEQ ID NO: 21422 - DNA, 15 bp, Homo sapiens
ccaccaccaatatta

SEQ ID NO: 21423 - DNA, 15 bp, Homo sapiens
accaccaccaatatt

SEQ ID NO: 21424 - DNA, 15 bp, Homo sapiens
taccaccaccaatat

SEQ ID NO: 21425 - DNA, 15 bp, Homo sapiens
ttaccaccaccaata

SEQ ID NO: 21426 - DNA, 15 bp, Homo sapiens
attaccaccaccaat

SEQ ID NO: 21427 - DNA, 15 bp, Homo sapiens
aattaccaccaccaa

SEQ ID NO: 21428 - DNA, 15 bp, Homo sapiens
gaattaccaccacca

SEQ ID NO: 21429 - DNA, 15 bp, Homo sapiens
ggaattaccaccacc

SEQ ID NO: 21430 - DNA, 15 bp, Homo sapiens
gggaattaccaccac

SEQ ID NO: 21431 - DNA, 15 bp, Homo sapiens
tgggaattaccacca

SEQ ID NO: 21432 - DNA, 15 bp, Homo sapiens
atgggaattaccacc

SEQ ID NO: 21433 - DNA, 15 bp, Homo sapiens
catgggaattaccac

SEQ ID NO: 21434 - DNA, 15 bp, Homo sapiens
gcatgggaattacca

SEQ ID NO: 21435 - DNA, 15 bp, Homo sapiens
ggcatgggaattacc

SEQ ID NO: 21436 - DNA, 15 bp, Homo sapiens
aggcatgggaattac

SEQ ID NO: 21437 - DNA, 15 bp, Homo sapiens
caggcatgggaatta

SEQ ID NO: 21438 - DNA, 15 bp, Homo sapiens
ccaggcatgggaatt

SEQ ID NO: 21439 - DNA, 15 bp, Homo sapiens
gccaggcatgggaat

SEQ ID NO: 21440 - DNA, 15 bp, Homo sapiens
agccaggcatgggaa

SEQ ID NO: 21441 - DNA, 15 bp, Homo sapiens
aagccaggcatggga

SEQ ID NO: 21442 - DNA, 15 bp, Homo sapiens
gaagccaggcatggg

SEQ ID NO: 21443 - DNA, 15 bp, Homo sapiens
cgaagccaggcatgg

SEQ ID NO: 21444 - DNA, 15 bp, Homo sapiens
tcgaagccaggcatg

SEQ ID NO: 21445 - DNA, 15 bp, Homo sapiens
atcgaagccaggcat

SEQ ID NO: 21446 - DNA, 15 bp, Homo sapiens
gatcgaagccaggca

SEQ ID NO: 21447 - DNA, 15 bp, Homo sapiens
tgatcgaagccaggc

SEQ ID NO: 21448 - DNA, 15 bp, Homo sapiens
ttgatcgaagccagg

SEQ ID NO: 21449 - DNA, 15 bp, Homo sapiens
attgatcgaagccag

SEQ ID NO: 21450 - DNA, 15 bp, Homo sapiens
aattgatcgaagcca

SEQ ID NO: 21451 - DNA, 15 bp, Homo sapiens
taattgatcgaagcc

SEQ ID NO: 21452 - DNA, 15 bp, Homo sapiens
ttaattgatcgaagc

SEQ ID NO: 21453 - DNA, 15 bp, Homo sapiens
attaattgatcgaag

SEQ ID NO: 21454 - DNA, 15 bp, Homo sapiens
gattaattgatcgaa

SEQ ID NO: 21455 - DNA, 15 bp, Homo sapiens
tgattaattgatcga

SEQ ID NO: 21456 - DNA, 15 bp, Homo sapiens
ctgattaattgatcg

SEQ ID NO: 21457 - DNA, 15 bp, Homo sapiens
gctgattaattgatc

SEQ ID NO: 21458 - DNA, 15 bp, Homo sapiens
tgctgattaattgat

SEQ ID NO: 21459 - DNA, 15 bp, Homo sapiens
ttgctgattaattga

SEQ ID NO: 21460 - DNA, 15 bp, Homo sapiens
tttgctgattaattg

SEQ ID NO: 21461 - DNA, 15 bp, Homo sapiens
atttgctgattaatt

SEQ ID NO: 21462 - DNA, 15 bp, Homo sapiens
catttgctgattaat

SEQ ID NO: 21463 - DNA, 15 bp, Homo sapiens
gcatttgctgattaa

SEQ ID NO: 21464 - DNA, 15 bp, Homo sapiens
ggcatttgctgatta

SEQ ID NO: 21465 - DNA, 15 bp, Homo sapiens
aggcatttgctgatt

SEQ ID NO: 21466 - DNA, 15 bp, Homo sapiens
taggcatttgctgat

SEQ ID NO: 21467 - DNA, 15 bp, Homo sapiens
ctaggcatttgctga

SEQ ID NO: 21468 - DNA, 15 bp, Homo sapiens
cctaggcatttgctg

SEQ ID NO: 21469 - DNA, 15 bp, Homo sapiens
tcctaggcatttgct

SEQ ID NO: 21470 - DNA, 15 bp, Homo sapiens
gtcctaggcatttgc

SEQ ID NO: 21471 - DNA, 15 bp, Homo sapiens
agtcctaggcatttg

SEQ ID NO: 21472 - DNA, 15 bp, Homo sapiens
cagtcctaggcattt

SEQ ID NO: 21473 - DNA, 15 bp, Homo sapiens
gcagtcctaggcatt

SEQ ID NO: 21474 - DNA, 15 bp, Homo sapiens
agcagtcctaggcat

SEQ ID NO: 21475 - DNA, 15 bp, Homo sapiens
aagcagtcctaggca

SEQ ID NO: 21476 - DNA, 15 bp, Homo sapiens
taagcagtcctaggc

SEQ ID NO: 21477 - DNA, 15 bp, Homo sapiens
ctaagcagtcctagg

SEQ ID NO: 21478 - DNA, 15 bp, Homo sapiens
cctaagcagtcctag

SEQ ID NO: 21479 - DNA, 15 bp, Homo sapiens
ccctaagcagtccta

SEQ ID NO: 21480 - DNA, 15 bp, Homo sapiens
accctaagcagtcct

SEQ ID NO: 21481 - DNA, 15 bp, Homo sapiens
aaccctaagcagtcc

SEQ ID NO: 21482 - DNA, 15 bp, Homo sapiens
gaaccctaagcagtc

SEQ ID NO: 21483 - DNA, 15 bp, Homo sapiens
agaaccctaagcagt

SEQ ID NO: 21484 - DNA, 15 bp, Homo sapiens
cagaaccctaagcag

SEQ ID NO: 21485 - DNA, 15 bp, Homo sapiens
ccagaaccctaagca

SEQ ID NO: 21486 - DNA, 15 bp, Homo sapiens
gccagaaccctaagc

SEQ ID NO: 21487 - DNA, 15 bp, Homo sapiens
ggccagaaccctaag

SEQ ID NO: 21488 - DNA, 15 bp, Homo sapiens
aggccagaaccctaa

SEQ ID NO: 21489 - DNA, 15 bp, Homo sapiens
aaggccagaacccta

SEQ ID NO: 21490 - DNA, 15 bp, Homo sapiens
gaaggccagaaccct

SEQ ID NO: 21491 - DNA, 15 bp, Homo sapiens
tgaaggccagaaccc

SEQ ID NO: 21492 - DNA, 15 bp, Homo sapiens
atgaaggccagaacc

SEQ ID NO: 21493 - DNA, 15 bp, Homo sapiens
gatgaaggccagaac

SEQ ID NO: 21494 - DNA, 15 bp, Homo sapiens
tgatgaaggccagaa

SEQ ID NO: 21495 - DNA, 15 bp, Homo sapiens
ttgatgaaggccaga

SEQ ID NO: 21496 - DNA, 15 bp, Homo sapiens
cttgatgaaggccag

SEQ ID NO: 21497 - DNA, 15 bp, Homo sapiens
tcttgatgaaggcca

SEQ ID NO: 21498 - DNA, 15 bp, Homo sapiens
gtcttgatgaaggcc

SEQ ID NO: 21499 - DNA, 15 bp, Homo sapiens
ggtcttgatgaaggc

SEQ ID NO: 21500 - DNA, 15 bp, Homo sapiens
aggtcttgatgaagg

SEQ ID NO: 21501 - DNA, 15 bp, Homo sapiens
aaggtcttgatgaag

SEQ ID NO: 21502 - DNA, 15 bp, Homo sapiens
taaggtcttgatgaa

SEQ ID NO: 21503 - DNA, 15 bp, Homo sapiens
gtaaggtcttgatga

SEQ ID NO: 21504 - DNA, 15 bp, Homo sapiens
ggtaaggtcttgatg

SEQ ID NO: 21505 - DNA, 15 bp, Homo sapiens
gggtaaggtcttgat

SEQ ID NO: 21506 - DNA, 15 bp, Homo sapiens
cgggtaaggtcttga

SEQ ID NO: 21507 - DNA, 15 bp, Homo sapiens
ccgggtaaggtcttg

SEQ ID NO: 21508 - DNA, 15 bp, Homo sapiens
cccgggtaaggtctt

SEQ ID NO: 21509 - DNA, 15 bp, Homo sapiens
gcccgggtaaggtct

SEQ ID NO: 21510 - DNA, 15 bp, Homo sapiens
agcccgggtaaggtc

SEQ ID NO: 21511 - DNA, 15 bp, Homo sapiens
aagcccgggtaaggt

SEQ ID NO: 21512 - DNA, 15 bp, Homo sapiens
aaagcccgggtaagg

SEQ ID NO: 21513 - DNA, 15 bp, Homo sapiens
taaagcccgggtaag

SEQ ID NO: 21514 - DNA, 15 bp, Homo sapiens
ataaagcccgggtaa

SEQ ID NO: 21515 - DNA, 15 bp, Homo sapiens
cataaagcccgggta

SEQ ID NO: 21516 - DNA, 15 bp, Homo sapiens
tcataaagcccgggt

SEQ ID NO: 21517 - DNA, 15 bp, Homo sapiens
atcataaagcccggg

SEQ ID NO: 21518 - DNA, 15 bp, Homo sapiens
catcataaagcccgg

SEQ ID NO: 21519 - DNA, 15 bp, Homo sapiens
tcatcataaagcccg

SEQ ID NO: 21520 - DNA, 15 bp, Homo sapiens
atcatcataaagccc

SEQ ID NO: 21521 - DNA, 15 bp, Homo sapiens
catcatcataaagcc

SEQ ID NO: 21522 - DNA, 15 bp, Homo sapiens
tcatcatcataaagc

SEQ ID NO: 21523 - DNA, 15 bp, Homo sapiens
gtcatcatcataaag

SEQ ID NO: 21524 - DNA, 15 bp, Homo sapiens
tgtcatcatcataaa

SEQ ID NO: 21525 - DNA, 15 bp, Homo sapiens
gtgtcatcatcataa

SEQ ID NO: 21526 - DNA, 15 bp, Homo sapiens
ggtgtcatcatcata

SEQ ID NO: 21527 - DNA, 15 bp, Homo sapiens
aggtgtcatcatcat

SEQ ID NO: 21528 - DNA, 15 bp, Homo sapiens
caggtgtcatcatca

SEQ ID NO: 21529 - DNA, 15 bp, Homo sapiens
ccaggtgtcatcatc

SEQ ID NO: 21530 - DNA, 15 bp, Homo sapiens
gccaggtgtcatcat

SEQ ID NO: 21531 - DNA, 15 bp, Homo sapiens
agccaggtgtcatca

SEQ ID NO: 21532 - DNA, 15 bp, Homo sapiens
aagccaggtgtcatc

SEQ ID NO: 21533 - DNA, 15 bp, Homo sapiens
aaagccaggtgtcat

SEQ ID NO: 21534 - DNA, 15 bp, Homo sapiens
aaaagccaggtgtca

SEQ ID NO: 21535 - DNA, 15 bp, Homo sapiens
gaaaagccaggtgtc

SEQ ID NO: 21536 - DNA, 15 bp, Homo sapiens
tgaaaagccaggtgt

SEQ ID NO: 21537 - DNA, 15 bp, Homo sapiens
ttgaaaagccaggtg

SEQ ID NO: 21538 - DNA, 15 bp, Homo sapiens
attgaaaagccaggt

SEQ ID NO: 21539 - DNA, 15 bp, Homo sapiens
tattgaaaagccagg

SEQ ID NO: 21540 - DNA, 15 bp, Homo sapiens
ctattgaaaagccag

SEQ ID NO: 21541 - DNA, 15 bp, Homo sapiens
gctattgaaaagcca

SEQ ID NO: 21542 - DNA, 15 bp, Homo sapiens
ggctattgaaaagcc

SEQ ID NO: 21543 - DNA, 15 bp, Homo sapiens
tggctattgaaaagc

SEQ ID NO: 21544 - DNA, 15 bp, Homo sapiens
atggctattgaaaag

SEQ ID NO: 21545 - DNA, 15 bp, Homo sapiens
catggctattgaaaa

SEQ ID NO: 21546 - DNA, 15 bp, Homo sapiens
tcatggctattgaaa

SEQ ID NO: 21547 - DNA, 15 bp, Homo sapiens
gtcatggctattgaa

SEQ ID NO: 21548 - DNA, 15 bp, Homo sapiens
agtcatggctattga

SEQ ID NO: 21549 - DNA, 15 bp, Homo sapiens
cagtcatggctattg

SEQ ID NO: 21550 - DNA, 15 bp, Homo sapiens
gcagtcatggctatt

SEQ ID NO: 21551 - DNA, 15 bp, Homo sapiens
agcagtcatggctat

SEQ ID NO: 21552 - DNA, 15 bp, Homo sapiens
gagcagtcatggcta

SEQ ID NO: 21553 - DNA, 15 bp, Homo sapiens
tgagcagtcatggct

SEQ ID NO: 21554 - DNA, 15 bp, Homo sapiens
gtgagcagtcatggc

SEQ ID NO: 21555 - DNA, 15 bp, Homo sapiens
ggtgagcagtcatgg

SEQ ID NO: 21556 - DNA, 15 bp, Homo sapiens
gggtgagcagtcatg

SEQ ID NO: 21557 - DNA, 15 bp, Homo sapiens
tgggtgagcagtcat

SEQ ID NO: 21558 - DNA, 15 bp, Homo sapiens
ctgggtgagcagtca

SEQ ID NO: 21559 - DNA, 15 bp, Homo sapiens
cctgggtgagcagtc

SEQ ID NO: 21560 - DNA, 15 bp, Homo sapiens
tcctgggtgagcagt

SEQ ID NO: 21561 - DNA, 15 bp, Homo sapiens
ctcctgggtgagcag

SEQ ID NO: 21562 - DNA, 15 bp, Homo sapiens
cctcctgggtgagca

SEQ ID NO: 21563 - DNA, 15 bp, Homo sapiens
gcctcctgggtgagc

SEQ ID NO: 21564 - DNA, 15 bp, Homo sapiens
tgcctcctgggtgag

SEQ ID NO: 21565 - DNA, 15 bp, Homo sapiens
ttgcctcctgggtga

SEQ ID NO: 21566 - DNA, 15 bp, Homo sapiens
gttgcctcctgggtg

SEQ ID NO: 21567 - DNA, 15 bp, Homo sapiens
cgttgcctcctgggt

SEQ ID NO: 21568 - DNA, 15 bp, Homo sapiens
gcgttgcctcctggg

SEQ ID NO: 21569 - DNA, 15 bp, Homo sapiens
ggcgttgcctcctgg

SEQ ID NO: 21570 - DNA, 15 bp, Homo sapiens
aggcgttgcctcctg

SEQ ID NO: 21571 - DNA, 15 bp, Homo sapiens
gaggcgttgcctcct

SEQ ID NO: 21572 - DNA, 15 bp, Homo sapiens
cgaggcgttgcctcc

SEQ ID NO: 21573 - DNA, 15 bp, Homo sapiens
tcgaggcgttgcctc

SEQ ID NO: 21574 - DNA, 15 bp, Homo sapiens
ctcgaggcgttgcct

SEQ ID NO: 21575 - DNA, 15 bp, Homo sapiens
actcgaggcgttgcc

SEQ ID NO: 21576 - DNA, 15 bp, Homo sapiens
gactcgaggcgttgc

SEQ ID NO: 21577 - DNA, 15 bp, Homo sapiens
tgactcgaggcgttg

SEQ ID NO: 21578 - DNA, 15 bp, Homo sapiens
atgactcgaggcgtt

SEQ ID NO: 21579 - DNA, 15 bp, Homo sapiens
catgactcgaggcgt

SEQ ID NO: 21580 - DNA, 15 bp, Homo sapiens
gcatgactcgaggcg

SEQ ID NO: 21581 - DNA, 15 bp, Homo sapiens
tgcatgactcgaggc

SEQ ID NO: 21582 - DNA, 15 bp, Homo sapiens
gtgcatgactcgagg

SEQ ID NO: 21583 - DNA, 15 bp, Homo sapiens
ggtgcatgactcgag

SEQ ID NO: 21584 - DNA, 15 bp, Homo sapiens
cggtgcatgactcga

SEQ ID NO: 21585 - DNA, 15 bp, Homo sapiens
tcggtgcatgactcg

SEQ ID NO: 21586 - DNA, 15 bp, Homo sapiens
ttcggtgcatgactc

SEQ ID NO: 21587 - DNA, 15 bp, Homo sapiens
gttcggtgcatgact

SEQ ID NO: 21588 - DNA, 15 bp, Homo sapiens
tgttcggtgcatgac

SEQ ID NO: 21589 - DNA, 15 bp, Homo sapiens
gtgttcggtgcatga

SEQ ID NO: 21590 - DNA, 15 bp, Homo sapiens
ggtgttcggtgcatg

SEQ ID NO: 21591 - DNA, 15 bp, Homo sapiens
aggtgttcggtgcat

SEQ ID NO: 21592 - DNA, 15 bp, Homo sapiens
aaggtgttcggtgca

SEQ ID NO: 21593 - DNA, 15 bp, Homo sapiens
aaaggtgttcggtgc

SEQ ID NO: 21594 - DNA, 15 bp, Homo sapiens
aaaaggtgttcggtg

SEQ ID NO: 21595 - DNA, 15 bp, Homo sapiens
taaaaggtgttcggt

SEQ ID NO: 21596 - DNA, 15 bp, Homo sapiens
ataaaaggtgttcgg

SEQ ID NO: 21597 - DNA, 15 bp, Homo sapiens
aataaaaggtgttcg

SEQ ID NO: 21598 - DNA, 15 bp, Homo sapiens
caataaaaggtgttc

SEQ ID NO: 21599 - DNA, 15 bp, Homo sapiens
tcaataaaaggtgtt

SEQ ID NO: 21600 - DNA, 15 bp, Homo sapiens
atcaataaaaggtgt

SEQ ID NO: 21601 - DNA, 15 bp, Homo sapiens
gatcaataaaaggtg

SEQ ID NO: 21602 - DNA, 15 bp, Homo sapiens
ggatcaataaaaggt

SEQ ID NO: 21603 - DNA, 15 bp, Homo sapiens
aggatcaataaaagg

SEQ ID NO: 21604 - DNA, 15 bp, Homo sapiens
gaggatcaataaaag

SEQ ID NO: 21605 - DNA, 15 bp, Homo sapiens
agaggatcaataaaa

SEQ ID NO: 21606 - DNA, 15 bp, Homo sapiens
gagaggatcaataaa

SEQ ID NO: 21607 - DNA, 15 bp, Homo sapiens
ggagaggatcaataa

SEQ ID NO: 21608 - DNA, 15 bp, Homo sapiens
tggagaggatcaata

SEQ ID NO: 21609 - DNA, 15 bp, Homo sapiens
ttggagaggatcaat

SEQ ID NO: 21610 - DNA, 15 bp, Homo sapiens
gttggagaggatcaa

SEQ ID NO: 21611 - DNA, 15 bp, Homo sapiens
tgttggagaggatca

SEQ ID NO: 21612 - DNA, 15 bp, Homo sapiens
gtgttggagaggatc

SEQ ID NO: 21613 - DNA, 15 bp, Homo sapiens
ggtgttggagaggat

SEQ ID NO: 21614 - DNA, 15 bp, Homo sapiens
tggtgttggagagga

SEQ ID NO: 21615 - DNA, 15 bp, Homo sapiens
ctggtgttggagagg

SEQ ID NO: 21616 - DNA, 15 bp, Homo sapiens
cctggtgttggagag

SEQ ID NO: 21617 - DNA, 15 bp, Homo sapiens
gcctggtgttggaga

SEQ ID NO: 21618 - DNA, 15 bp, Homo sapiens
agcctggtgttggag

SEQ ID NO: 21619 - DNA, 15 bp, Homo sapiens
gagcctggtgttgga

SEQ ID NO: 21620 - DNA, 15 bp, Homo sapiens
ggagcctggtgttgg

SEQ ID NO: 21621 - DNA, 15 bp, Homo sapiens
cggagcctggtgttg

SEQ ID NO: 21622 - DNA, 15 bp, Homo sapiens
acggagcctggtgtt

SEQ ID NO: 21623 - DNA, 15 bp, Homo sapiens
cacggagcctggtgt

SEQ ID NO: 21624 - DNA, 15 bp, Homo sapiens
tcacggagcctggtg

SEQ ID NO: 21625 - DNA, 15 bp, Homo sapiens
atcacggagcctggt

SEQ ID NO: 21626 - DNA, 15 bp, Homo sapiens
catcacggagcctgg

SEQ ID NO: 21627 - DNA, 15 bp, Homo sapiens
ccatcacggagcctg

SEQ ID NO: 21628 - DNA, 15 bp, Homo sapiens
gccatcacggagcct

SEQ ID NO: 21629 - DNA, 15 bp, Homo sapiens
agccatcacggagcc

SEQ ID NO: 21630 - DNA, 15 bp, Homo sapiens
cagccatcacggagc

SEQ ID NO: 21631 - DNA, 15 bp, Homo sapiens
tcagccatcacggag

SEQ ID NO: 21632 - DNA, 15 bp, Homo sapiens
ctcagccatcacgga

SEQ ID NO: 21633 - DNA, 15 bp, Homo sapiens
gctcagccatcacgg

SEQ ID NO: 21634 - DNA, 15 bp, Homo sapiens
agctcagccatcacg

SEQ ID NO: 21635 - DNA, 15 bp, Homo sapiens
cagctcagccatcac

SEQ ID NO: 21636 - DNA, 15 bp, Homo sapiens
ccagctcagccatca

SEQ ID NO: 21637 - DNA, 15 bp, Homo sapiens
cccagctcagccatc

SEQ ID NO: 21638 - DNA, 15 bp, Homo sapiens
ccccagctcagccat

SEQ ID NO: 21639 - DNA, 15 bp, Homo sapiens
tccccagctcagcca

SEQ ID NO: 21640 - DNA, 15 bp, Homo sapiens
gtccccagctcagcc

SEQ ID NO: 21641 - DNA, 15 bp, Homo sapiens
tgtccccagctcagc

SEQ ID NO: 21642 - DNA, 15 bp, Homo sapiens
gtgtccccagctcag

SEQ ID NO: 21643 - DNA, 15 bp, Homo sapiens
ggtgtccccagctca

SEQ ID NO: 21644 - DNA, 15 bp, Homo sapiens
aggtgtccccagctc

SEQ ID NO: 21645 - DNA, 15 bp, Homo sapiens
caggtgtccccagct

SEQ ID NO: 21646 - DNA, 15 bp, Homo sapiens
acaggtgtccccagc

SEQ ID NO: 21647 - DNA, 15 bp, Homo sapiens
cacaggtgtccccag

SEQ ID NO: 21648 - DNA, 15 bp, Homo sapiens
tcacaggtgtcccca

SEQ ID NO: 21649 - DNA, 15 bp, Homo sapiens
gtcacaggtgtcccc

SEQ ID NO: 21650 - DNA, 15 bp, Homo sapiens
agtcacaggtgtccc

SEQ ID NO: 21651 - DNA, 15 bp, Homo sapiens
cagtcacaggtgtcc

SEQ ID NO: 21652 - DNA, 15 bp, Homo sapiens
gcagtcacaggtgtc

SEQ ID NO: 21653 - DNA, 15 bp, Homo sapiens
tgcagtcacaggtgt

SEQ ID NO: 21654 - DNA, 15 bp, Homo sapiens
gtgcagtcacaggtg

SEQ ID NO: 21655 - DNA, 15 bp, Homo sapiens
cgtgcagtcacaggt

SEQ ID NO: 21656 - DNA, 15 bp, Homo sapiens
acgtgcagtcacagg

SEQ ID NO: 21657 - DNA, 15 bp, Homo sapiens
cacgtgcagtcacag

SEQ ID NO: 21658 - DNA, 15 bp, Homo sapiens
tcacgtgcagtcaca

SEQ ID NO: 21659 - DNA, 15 bp, Homo sapiens
ttcacgtgcagtcac

SEQ ID NO: 21660 - DNA, 15 bp, Homo sapiens
gttcacgtgcagtca

SEQ ID NO: 21661 - DNA, 15 bp, Homo sapiens
tgttcacgtgcagtc

SEQ ID NO: 21662 - DNA, 15 bp, Homo sapiens
atgttcacgtgcagt

SEQ ID NO: 21663 - DNA, 15 bp, Homo sapiens
aatgttcacgtgcag

SEQ ID NO: 21664 - DNA, 15 bp, Homo sapiens
aaatgttcacgtgca

SEQ ID NO: 21665 - DNA, 15 bp, Homo sapiens
aaaatgttcacgtgc

SEQ ID NO: 21666 - DNA, 15 bp, Homo sapiens
caaaatgttcacgtg

SEQ ID NO: 21667 - DNA, 15 bp, Homo sapiens
tcaaaatgttcacgt

SEQ ID NO: 21668 - DNA, 15 bp, Homo sapiens
ctcaaaatgttcacg

SEQ ID NO: 21669 - DNA, 15 bp, Homo sapiens
cctcaaaatgttcac

SEQ ID NO: 21670 - DNA, 15 bp, Homo sapiens
gcctcaaaatgttca

SEQ ID NO: 21671 - DNA, 15 bp, Homo sapiens
agcctcaaaatgttc

SEQ ID NO: 21672 - DNA, 15 bp, Homo sapiens
cagcctcaaaatgtt

SEQ ID NO: 21673 - DNA, 15 bp, Homo sapiens
ccagcctcaaaatgt

SEQ ID NO: 21674 - DNA, 15 bp, Homo sapiens
cccagcctcaaaatg

SEQ ID NO: 21675 - DNA, 15 bp, Homo sapiens
tcccagcctcaaaat

SEQ ID NO: 21676 - DNA, 15 bp, Homo sapiens
ttcccagcctcaaaa

SEQ ID NO: 21677 - DNA, 15 bp, Homo sapiens
attcccagcctcaaa

SEQ ID NO: 21678 - DNA, 15 bp, Homo sapiens
gattcccagcctcaa

SEQ ID NO: 21679 - DNA, 15 bp, Homo sapiens
ggattcccagcctca

SEQ ID NO: 21680 - DNA, 15 bp, Homo sapiens
gggattcccagcctc

SEQ ID NO: 21681 - DNA, 15 bp, Homo sapiens
tgggattcccagcct

SEQ ID NO: 21682 - DNA, 15 bp, Homo sapiens
ttgggattcccagcc

SEQ ID NO: 21683 - DNA, 15 bp, Homo sapiens
tttgggattcccagc

SEQ ID NO: 21684 - DNA, 15 bp, Homo sapiens
ctttgggattcccag

SEQ ID NO: 21685 - DNA, 15 bp, Homo sapiens
cctttgggattccca

SEQ ID NO: 21686 - DNA, 15 bp, Homo sapiens
gcctttgggattccc

SEQ ID NO: 21687 - DNA, 15 bp, Homo sapiens
ggcctttgggattcc

SEQ ID NO: 21688 - DNA, 15 bp, Homo sapiens
gggcctttgggattc

SEQ ID NO: 21689 - DNA, 15 bp, Homo sapiens
agggcctttgggatt

SEQ ID NO: 21690 - DNA, 15 bp, Homo sapiens
gagggcctttgggat

SEQ ID NO: 21691 - DNA, 15 bp, Homo sapiens
cgagggcctttggga

SEQ ID NO: 21692 - DNA, 15 bp, Homo sapiens
ccgagggcctttggg

SEQ ID NO: 21693 - DNA, 15 bp, Homo sapiens
gccgagggcctttgg

SEQ ID NO: 21694 - DNA, 15 bp, Homo sapiens
cgccgagggcctttg

SEQ ID NO: 21695 - DNA, 15 bp, Homo sapiens
acgccgagggccttt

SEQ ID NO: 21696 - DNA, 15 bp, Homo sapiens
aacgccgagggcctt

SEQ ID NO: 21697 - DNA, 15 bp, Homo sapiens
caacgccgagggcct

SEQ ID NO: 21698 - DNA, 15 bp, Homo sapiens
ccaacgccgagggcc

SEQ ID NO: 21699 - DNA, 15 bp, Homo sapiens
gccaacgccgagggc

SEQ ID NO: 21700 - DNA, 15 bp, Homo sapiens
ggccaacgccgaggg

SEQ ID NO: 21701 - DNA, 15 bp, Homo sapiens
aggccaacgccgagg

SEQ ID NO: 21702 - DNA, 15 bp, Homo sapiens
caggccaacgccgag

SEQ ID NO: 21703 - DNA, 15 bp, Homo sapiens
ccaggccaacgccga

SEQ ID NO: 21704 - DNA, 15 bp, Homo sapiens
cccaggccaacgccg

SEQ ID NO: 21705 - DNA, 15 bp, Homo sapiens
tcccaggccaacgcc

SEQ ID NO: 21706 - DNA, 15 bp, Homo sapiens
ctcccaggccaacgc

SEQ ID NO: 21707 - DNA, 15 bp, Homo sapiens
gctcccaggccaacg

SEQ ID NO: 21708 - DNA, 15 bp, Homo sapiens
tgctcccaggccaac

SEQ ID NO: 21709 - DNA, 15 bp, Homo sapiens
gtgctcccaggccaa

SEQ ID NO: 21710 - DNA, 15 bp, Homo sapiens
ggtgctcccaggcca

SEQ ID NO: 21711 - DNA, 15 bp, Homo sapiens
tggtgctcccaggcc

SEQ ID NO: 21712 - DNA, 15 bp, Homo sapiens
atggtgctcccaggc

SEQ ID NO: 21713 - DNA, 15 bp, Homo sapiens
catggtgctcccagg

SEQ ID NO: 21714 - DNA, 15 bp, Homo sapiens
tcatggtgctcccag

SEQ ID NO: 21715 - DNA, 15 bp, Homo sapiens
ttcatggtgctccca

SEQ ID NO: 21716 - DNA, 15 bp, Homo sapiens
tttcatggtgctccc

SEQ ID NO: 21717 - DNA, 15 bp, Homo sapiens
gtttcatggtgctcc

SEQ ID NO: 21718 - DNA, 15 bp, Homo sapiens
tgtttcatggtgctc

SEQ ID NO: 21719 - DNA, 15 bp, Homo sapiens
ttgtttcatggtgct

SEQ ID NO: 21720 - DNA, 15 bp, Homo sapiens
cttgtttcatggtgc

SEQ ID NO: 21721 - DNA, 15 bp, Homo sapiens
acttgtttcatggtg

SEQ ID NO: 21722 - DNA, 15 bp, Homo sapiens
tacttgtttcatggt

SEQ ID NO: 21723 - DNA, 15 bp, Homo sapiens
ctacttgtttcatgg

SEQ ID NO: 21724 - DNA, 15 bp, Homo sapiens
tctacttgtttcatg

SEQ ID NO: 21725 - DNA, 15 bp, Homo sapiens
ttctacttgtttcat

SEQ ID NO: 21726 - DNA, 15 bp, Homo sapiens
cttctacttgtttca

SEQ ID NO: 21727 - DNA, 15 bp, Homo sapiens
gcttctacttgtttc

SEQ ID NO: 21728 - DNA, 15 bp, Homo sapiens
tgcttctacttgttt

SEQ ID NO: 21729 - DNA, 15 bp, Homo sapiens
ctgcttctacttgtt

SEQ ID NO: 21730 - DNA, 15 bp, Homo sapiens
tctgcttctacttgt

SEQ ID NO: 21731 - DNA, 15 bp, Homo sapiens
ctctgcttctacttg

SEQ ID NO: 21732 - DNA, 15 bp, Homo sapiens
tctctgcttctactt

SEQ ID NO: 21733 - DNA, 15 bp, Homo sapiens
ttctctgcttctact

SEQ ID NO: 21734 - DNA, 15 bp, Homo sapiens
cttctctgcttctac

SEQ ID NO: 21735 - DNA, 15 bp, Homo sapiens
ccttctctgcttcta

SEQ ID NO: 21736 - DNA, 15 bp, Homo sapiens
tccttctctgcttct

SEQ ID NO: 21737 - DNA, 15 bp, Homo sapiens
atccttctctgcttc

SEQ ID NO: 21738 - DNA, 15 bp, Homo sapiens
catccttctctgctt

SEQ ID NO: 21739 - DNA, 15 bp, Homo sapiens
ccatccttctctgct

SEQ ID NO: 21740 - DNA, 15 bp, Homo sapiens
gccatccttctctgc

SEQ ID NO: 21741 - DNA, 15 bp, Homo sapiens
tgccatccttctctg

SEQ ID NO: 21742 - DNA, 15 bp, Homo sapiens
ctgccatccttctct

SEQ ID NO: 21743 - DNA, 15 bp, Homo sapiens
tctgccatccttctc

SEQ ID NO: 21744 - DNA, 15 bp, Homo sapiens
ctctgccatccttct

SEQ ID NO: 21745 - DNA, 15 bp, Homo sapiens
cctctgccatccttc

SEQ ID NO: 21746 - DNA, 15 bp, Homo sapiens
acctctgccatcctt

SEQ ID NO: 21747 - DNA, 15 bp, Homo sapiens
cacctctgccatcct

SEQ ID NO: 21748 - DNA, 15 bp, Homo sapiens
ccacctctgccatcc

SEQ ID NO: 21749 - DNA, 15 bp, Homo sapiens
gccacctctgccatc

SEQ ID NO: 21750 - DNA, 15 bp, Homo sapiens
ggccacctctgccat

SEQ ID NO: 21751 - DNA, 15 bp, Homo sapiens
gggccacctctgcca

SEQ ID NO: 21752 - DNA, 15 bp, Homo sapiens
agggccacctctgcc

SEQ ID NO: 21753 - DNA, 15 bp, Homo sapiens
gagggccacctctgc

SEQ ID NO: 21754 - DNA, 15 bp, Homo sapiens
cagagggccacctct

SEQ ID NO: 21755 - DNA, 15 bp, Homo sapiens
gcagagggccacctc

SEQ ID NO: 21756 - DNA, 15 bp, Homo sapiens
tgcagagggccacct

SEQ ID NO: 21757 - DNA, 15 bp, Homo sapiens
atgcagagggccacc

SEQ ID NO: 21758 - DNA, 15 bp, Homo sapiens
aatgcagagggccac

SEQ ID NO: 21759 - DNA, 15 bp, Homo sapiens
taatgcagagggcca

SEQ ID NO: 21760 - DNA, 15 bp, Homo sapiens
ctaatgcagagggcc

SEQ ID NO: 21761 - DNA, 15 bp, Homo sapiens
cctaatgcagagggc

SEQ ID NO: 21762 - DNA, 15 bp, Homo sapiens
ccctaatgcagaggg

SEQ ID NO: 21763 - DNA, 15 bp, Homo sapiens
gccctaatgcagagg

SEQ ID NO: 21764 - DNA, 15 bp, Homo sapiens
ggccctaatgcagag

SEQ ID NO: 21765 - DNA, 15 bp, Homo sapiens
aggccctaatgcaga

SEQ ID NO: 21766 - DNA, 15 bp, Homo sapiens
caggccctaatgcag

SEQ ID NO: 21767 - DNA, 15 bp, Homo sapiens
ccaggccctaatgca

SEQ ID NO: 21768 - DNA, 15 bp, Homo sapiens
tccaggccctaatgc

SEQ ID NO: 21769 - DNA, 15 bp, Homo sapiens
atccaggccctaatg

SEQ ID NO: 21770 - DNA, 15 bp, Homo sapiens
catccaggccctaat

SEQ ID NO: 21771 - DNA, 15 bp, Homo sapiens
acatccaggccctaa

SEQ ID NO: 21772 - DNA, 15 bp, Homo sapiens
tacatccaggcccta

SEQ ID NO: 21773 - DNA, 15 bp, Homo sapiens
atacatccaggccct

SEQ ID NO: 21774 - DNA, 15 bp, Homo sapiens
tatacatccaggccc

SEQ ID NO: 21775 - DNA, 15 bp, Homo sapiens
gtatacatccaggcc

SEQ ID NO: 21776 - DNA, 15 bp, Homo sapiens
tgtatacatccaggc

SEQ ID NO: 21777 - DNA, 15 bp, Homo sapiens
gtgtatacatccagg

SEQ ID NO: 21778 - DNA, 15 bp, Homo sapiens
agtgtatacatccag

SEQ ID NO: 21779 - DNA, 15 bp, Homo sapiens
cagtgtatacatcca

SEQ ID NO: 21780 - DNA, 15 bp, Homo sapiens
ccagtgtatacatcc

SEQ ID NO: 21781 - DNA, 15 bp, Homo sapiens
accagtgtatacatc

SEQ ID NO: 21782 - DNA, 15 bp, Homo sapiens
caccagtgtatacat

SEQ ID NO: 21783 - DNA, 15 bp, Homo sapiens
gcaccagtgtataca

SEQ ID NO: 21784 - DNA, 15 bp, Homo sapiens
agcaccagtgtatac

SEQ ID NO: 21785 - DNA, 15 bp, Homo sapiens
tagcaccagtgtata

SEQ ID NO: 21786 - DNA, 15 bp, Homo sapiens
ttagcaccagtgtat

SEQ ID NO: 21787 - DNA, 15 bp, Homo sapiens
cttagcaccagtgta

SEQ ID NO: 21788 - DNA, 15 bp, Homo sapiens
ccttagcaccagtgt

SEQ ID NO: 21789 - DNA, 15 bp, Homo sapiens
cccttagcaccagtg

SEQ ID NO: 21790 - DNA, 15 bp, Homo sapiens
ccccttagcaccagt

SEQ ID NO: 21791 - DNA, 15 bp, Homo sapiens
cccccttagcaccag

SEQ ID NO: 21792 - DNA, 15 bp, Homo sapiens
gcccccttagcacca

SEQ ID NO: 21793 - DNA, 15 bp, Homo sapiens
ggcccccttagcacc

SEQ ID NO: 21794 - DNA, 15 bp, Homo sapiens
gggcccccttagcac

SEQ ID NO: 21795 - DNA, 15 bp, Homo sapiens
ggggcccccttagca

SEQ ID NO: 21796 - DNA, 15 bp, Homo sapiens
tggggcccccttagc

SEQ ID NO: 21797 - DNA, 15 bp, Homo sapiens
gtggggcccccttag

SEQ ID NO: 21798 - DNA, 15 bp, Homo sapiens
tgtggggccccctta

SEQ ID NO: 21799 - DNA, 15 bp, Homo sapiens
ctgtggggccccctt

SEQ ID NO: 21800 - DNA, 15 bp, Homo sapiens
gctgtggggccccct

SEQ ID NO: 21801 - DNA, 15 bp, Homo sapiens
agctgtggggccccc

SEQ ID NO: 21802 - DNA, 15 bp, Homo sapiens
tagctgtggggcccc

SEQ ID NO: 21803 - DNA, 15 bp, Homo sapiens
ttagctgtggggccc

SEQ ID NO: 21804 - DNA, 15 bp, Homo sapiens
attagctgtggggcc

SEQ ID NO: 21805 - DNA, 15 bp, Homo sapiens
tattagctgtggggc

SEQ ID NO: 21806 - DNA, 15 bp, Homo sapiens
ctattagctgtgggg

SEQ ID NO: 21807 - DNA, 15 bp, Homo sapiens
cctattagctgtggg

SEQ ID NO: 21808 - DNA, 15 bp, Homo sapiens
ccctattagctgtgg

SEQ ID NO: 21809 - DNA, 15 bp, Homo sapiens
cccctattagctgtg

SEQ ID NO: 21810 - DNA, 15 bp, Homo sapiens
acccctattagctgt

SEQ ID NO: 21811 - DNA, 15 bp, Homo sapiens
aacccctattagctg

SEQ ID NO: 21812 - DNA, 15 bp, Homo sapiens
aaacccctattagct

SEQ ID NO: 21813 - DNA, 15 bp, Homo sapiens
caaacccctattagc

SEQ ID NO: 21814 - DNA, 15 bp, Homo sapiens
tcaaacccctattag

SEQ ID NO: 21815 - DNA, 15 bp, Homo sapiens
ctcaaacccctatta

SEQ ID NO: 21816 - DNA, 15 bp, Homo sapiens
actcaaacccctatt

SEQ ID NO: 21817 - DNA, 15 bp, Homo sapiens
aactcaaacccctat

SEQ ID NO: 21818 - DNA, 15 bp, Homo sapiens
aaactcaaaccccta

SEQ ID NO: 21819 - DNA, 15 bp, Homo sapiens
caaactcaaacccct

SEQ ID NO: 21820 - DNA, 15 bp, Homo sapiens
tcaaactcaaacccc

SEQ ID NO: 21821 - DNA, 15 bp, Homo sapiens
gtcaaactcaaaccc

SEQ ID NO: 21822 - DNA, 15 bp, Homo sapiens
agtcaaactcaaacc

SEQ ID NO: 21823 - DNA, 15 bp, Homo sapiens
cagtcaaactcaaac

SEQ ID NO: 21824 - DNA, 15 bp, Homo sapiens
tcagtcaaactcaaa

SEQ ID NO: 21825 - DNA, 15 bp, Homo sapiens
gtcagtcaaactcaa

SEQ ID NO: 21826 - DNA, 15 bp, Homo sapiens
tgtcagtcaaactca

SEQ ID NO: 21827 - DNA, 15 bp, Homo sapiens
ctgtcagtcaaactc

SEQ ID NO: 21828 - DNA, 15 bp, Homo sapiens
gctgtcagtcaaact

SEQ ID NO: 21829 - DNA, 15 bp, Homo sapiens
ggctgtcagtcaaac

SEQ ID NO: 21830 - DNA, 15 bp, Homo sapiens
gggctgtcagtcaaa

SEQ ID NO: 21831 - DNA, 15 bp, Homo sapiens
ggggctgtcagtcaa

SEQ ID NO: 21832 - DNA, 15 bp, Homo sapiens
tggggctgtcagtca

SEQ ID NO: 21833 - DNA, 15 bp, Homo sapiens
ctggggctgtcagtc

SEQ ID NO: 21834 - DNA, 15 bp, Homo sapiens
cctggggctgtcagt

SEQ ID NO: 21835 - DNA, 15 bp, Homo sapiens
gcctggggctgtcag

SEQ ID NO: 21836 - DNA, 15 bp, Homo sapiens
tgcctggggctgtca

SEQ ID NO: 21837 - DNA, 15 bp, Homo sapiens
ctgcctggggctgtc

SEQ ID NO: 21838 - DNA, 15 bp, Homo sapiens
cctgcctggggctgt

SEQ ID NO: 21839 - DNA, 15 bp, Homo sapiens
tcctgcctggggctg

SEQ ID NO: 21840 - DNA, 15 bp, Homo sapiens
ttcctgcctggggct

SEQ ID NO: 21841 - DNA, 15 bp, Homo sapiens
attcctgcctggggc

SEQ ID NO: 21842 - DNA, 15 bp, Homo sapiens
gattcctgcctgggg

SEQ ID NO: 21843 - DNA, 15 bp, Homo sapiens
agattcctgcctggg

SEQ ID NO: 21844 - DNA, 15 bp, Homo sapiens
cagattcctgcctgg

SEQ ID NO: 21845 - DNA, 15 bp, Homo sapiens
acagattcctgcctg

SEQ ID NO: 21846 - DNA, 15 bp, Homo sapiens
cacagattcctgcct

SEQ ID NO: 21847 - DNA, 15 bp, Homo sapiens
tcacagattcctgcc

SEQ ID NO: 21848 - DNA, 15 bp, Homo sapiens
ctcacagattcctgc

SEQ ID NO: 21849 - DNA, 15 bp, Homo sapiens
tctcacagattcctg

SEQ ID NO: 21850 - DNA, 15 bp, Homo sapiens
ctctcacagattcct

SEQ ID NO: 21851 - DNA, 15 bp, Homo sapiens
actctcacagattcc

SEQ ID NO: 21852 - DNA, 15 bp, Homo sapiens
aactctcacagattc

SEQ ID NO: 21853 - DNA, 15 bp, Homo sapiens
gaactctcacagatt

SEQ ID NO: 21854 - DNA, 15 bp, Homo sapiens
agaactctcacagat

SEQ ID NO: 21855 - DNA, 15 bp, Homo sapiens
gagaactctcacaga

SEQ ID NO: 21856 - DNA, 15 bp, Homo sapiens
tgagaactctcacag

SEQ ID NO: 21857 - DNA, 15 bp, Homo sapiens
gtgagaactctcaca

SEQ ID NO: 21858 - DNA, 15 bp, Homo sapiens
agtgagaactctcac

SEQ ID NO: 21859 - DNA, 15 bp, Homo sapiens
cagtgagaactctca

SEQ ID NO: 21860 - DNA, 15 bp, Homo sapiens
tcagtgagaactctc

SEQ ID NO: 21861 - DNA, 15 bp, Homo sapiens
ttcagtgagaactct

SEQ ID NO: 21862 - DNA, 15 bp, Homo sapiens
gttcagtgagaactc

SEQ ID NO: 21863 - DNA, 15 bp, Homo sapiens
ggttcagtgagaact

SEQ ID NO: 21864 - DNA, 15 bp, Homo sapiens
aggttcagtgagaac

SEQ ID NO: 21865 - DNA, 15 bp, Homo sapiens
caggttcagtgagaa

SEQ ID NO: 21866 - DNA, 15 bp, Homo sapiens
ccaggttcagtgaga

SEQ ID NO: 21867 - DNA, 15 bp, Homo sapiens
accaggttcagtgag

SEQ ID NO: 21868 - DNA, 15 bp, Homo sapiens
caccaggttcagtga

SEQ ID NO: 21869 - DNA, 15 bp, Homo sapiens
acaccaggttcagtg

SEQ ID NO: 21870 - DNA, 15 bp, Homo sapiens
cacaccaggttcagt

SEQ ID NO: 21871 - DNA, 15 bp, Homo sapiens
ccacaccaggttcag

SEQ ID NO: 21872 - DNA, 15 bp, Homo sapiens
cccacaccaggttca

SEQ ID NO: 21873 - DNA, 15 bp, Homo sapiens
ccccacaccaggttc

SEQ ID NO: 21874 - DNA, 15 bp, Homo sapiens
cccccacaccaggtt

SEQ ID NO: 21875 - DNA, 15 bp, Homo sapiens
acccccacaccaggt

SEQ ID NO: 21876 - DNA, 15 bp, Homo sapiens
cacccccacaccagg

SEQ ID NO: 21877 - DNA, 15 bp, Homo sapiens
ccacccccacaccag

SEQ ID NO: 21878 - DNA, 15 bp, Homo sapiens
gccacccccacacca

SEQ ID NO: 21879 - DNA, 15 bp, Homo sapiens
ggccacccccacacc

SEQ ID NO: 21880 - DNA, 15 bp, Homo sapiens
gggccacccccacac

SEQ ID NO: 21881 - DNA, 15 bp, Homo sapiens
agggccacccccaca

SEQ ID NO: 21882 - DNA, 15 bp, Homo sapiens
gagggccacccccac

SEQ ID NO: 21883 - DNA, 15 bp, Homo sapiens
ggagggccaccccca

SEQ ID NO: 21884 - DNA, 15 bp, Homo sapiens
aggagggccaccccc

SEQ ID NO: 21885 - DNA, 15 bp, Homo sapiens
taggagggccacccc

SEQ ID NO: 21886 - DNA, 15 bp, Homo sapiens
ttaggagggccaccc

SEQ ID NO: 21887 - DNA, 15 bp, Homo sapiens
cttaggagggccacc

SEQ ID NO: 21888 - DNA, 15 bp, Homo sapiens
ccttaggagggccac

SEQ ID NO: 21889 - DNA, 15 bp, Homo sapiens
gccttaggagggcca

SEQ ID NO: 21890 - DNA, 15 bp, Homo sapiens
tgccttaggagggcc

SEQ ID NO: 21891 - DNA, 15 bp, Homo sapiens
atgccttaggagggc

SEQ ID NO: 21892 - DNA, 15 bp, Homo sapiens
catgccttaggaggg

SEQ ID NO: 21893 - DNA, 15 bp, Homo sapiens
acatgccttaggagg

SEQ ID NO: 21894 - DNA, 15 bp, Homo sapiens
aacatgccttaggag

SEQ ID NO: 21895 - DNA, 15 bp, Homo sapiens
caacatgccttagga

SEQ ID NO: 21896 - DNA, 15 bp, Homo sapiens
gcaacatgccttagg

SEQ ID NO: 21897 - DNA, 15 bp, Homo sapiens
agcaacatgccttag

SEQ ID NO: 21898 - DNA, 15 bp, Homo sapiens
tagcaacatgcctta

SEQ ID NO: 21899 - DNA, 15 bp, Homo sapiens
ttagcaacatgcctt

SEQ ID NO: 21900 - DNA, 15 bp, Homo sapiens
tttagcaacatgcct

SEQ ID NO: 21901 - DNA, 15 bp, Homo sapiens
ctttagcaacatgcc

SEQ ID NO: 21902 - DNA, 15 bp, Homo sapiens
cctttagcaacatgc

SEQ ID NO: 21903 - DNA, 15 bp, Homo sapiens
gcctttagcaacatg

SEQ ID NO: 21904 - DNA, 15 bp, Homo sapiens
ggcctttagcaacat

SEQ ID NO: 21905 - DNA, 15 bp, Homo sapiens
tggcctttagcaaca

SEQ ID NO: 21906 - DNA, 15 bp, Homo sapiens
atggcctttagcaac

SEQ ID NO: 21907 - DNA, 15 bp, Homo sapiens
gatggcctttagcaa

SEQ ID NO: 21908 - DNA, 15 bp, Homo sapiens
agatggcctttagca

SEQ ID NO: 21909 - DNA, 15 bp, Homo sapiens
gagatggcctttagc

SEQ ID NO: 21910 - DNA, 15 bp, Homo sapiens
agagatggcctttag

SEQ ID NO: 21911 - DNA, 15 bp, Homo sapiens
aagagatggccttta

SEQ ID NO: 21912 - DNA, 15 bp, Homo sapiens
gaagagatggccttt

SEQ ID NO: 21913 - DNA, 15 bp, Homo sapiens
agaagagatggcctt

SEQ ID NO: 21914 - DNA, 15 bp, Homo sapiens
cagaagagatggcct

SEQ ID NO: 21915 - DNA, 15 bp, Homo sapiens
gcagaagagatggcc

SEQ ID NO: 21916 - DNA, 15 bp, Homo sapiens
ggcagaagagatggc

SEQ ID NO: 21917 - DNA, 15 bp, Homo sapiens
tggcagaagagatgg

SEQ ID NO: 21918 - DNA, 15 bp, Homo sapiens
gtggcagaagagatg

SEQ ID NO: 21919 - DNA, 15 bp, Homo sapiens
agtggcagaagagat

SEQ ID NO: 21920 - DNA, 15 bp, Homo sapiens
cagtggcagaagaga

SEQ ID NO: 21921 - DNA, 15 bp, Homo sapiens
tcagtggcagaagag

SEQ ID NO: 21922 - DNA, 15 bp, Homo sapiens
gtcagtggcagaaga

SEQ ID NO: 21923 - DNA, 15 bp, Homo sapiens
cgtcagtggcagaag

SEQ ID NO: 21924 - DNA, 15 bp, Homo sapiens
gcgtcagtggcagaa

SEQ ID NO: 21925 - DNA, 15 bp, Homo sapiens
ggcgtcagtggcaga

SEQ ID NO: 21926 - DNA, 15 bp, Homo sapiens
aggcgtcagtggcag

SEQ ID NO: 21927 - DNA, 15 bp, Homo sapiens
caggcgtcagtggca

SEQ ID NO: 21928 - DNA, 15 bp, Homo sapiens
acaggcgtcagtggc

SEQ ID NO: 21929 - DNA, 15 bp, Homo sapiens
cacaggcgtcagtgg

SEQ ID NO: 21930 - DNA, 15 bp, Homo sapiens
acacaggcgtcagtg

SEQ ID NO: 21931 - DNA, 15 bp, Homo sapiens
aacacaggcgtcagt

SEQ ID NO: 21932 - DNA, 15 bp, Homo sapiens
gaacacaggcgtcag

SEQ ID NO: 21933 - DNA, 15 bp, Homo sapiens
agaacacaggcgtca

SEQ ID NO: 21934 - DNA, 15 bp, Homo sapiens
cagaacacaggcgtc

SEQ ID NO: 21935 - DNA, 15 bp, Homo sapiens
gcagaacacaggcgt

SEQ ID NO: 21936 - DNA, 15 bp, Homo sapiens
tgcagaacacaggcg

SEQ ID NO: 21937 - DNA, 15 bp, Homo sapiens
ctgcagaacacaggc

SEQ ID NO: 21938 - DNA, 15 bp, Homo sapiens
cctgcagaacacagg

SEQ ID NO: 21939 - DNA, 15 bp, Homo sapiens
acctgcagaacacag

SEQ ID NO: 21940 - DNA, 15 bp, Homo sapiens
gacctgcagaacaca

SEQ ID NO: 21941 - DNA, 15 bp, Homo sapiens
ggacctgcagaacac

SEQ ID NO: 21942 - DNA, 15 bp, Homo sapiens
tggacctgcagaaca

SEQ ID NO: 21943 - DNA, 15 bp, Homo sapiens
atggacctgcagaac

SEQ ID NO: 21944 - DNA, 15 bp, Homo sapiens
gatggacctgcagaa

SEQ ID NO: 21945 - DNA, 15 bp, Homo sapiens
ggatggacctgcaga

SEQ ID NO: 21946 - DNA, 15 bp, Homo sapiens
aggatggacctgcag

SEQ ID NO: 21947 - DNA, 15 bp, Homo sapiens
caggatggacctgca

SEQ ID NO: 21948 - DNA, 15 bp, Homo sapiens
tcaggatggacctgc

SEQ ID NO: 21949 - DNA, 15 bp, Homo sapiens
gtcaggatggacctg

SEQ ID NO: 21950 - DNA, 15 bp, Homo sapiens
cgtcaggatggacct

SEQ ID NO: 21951 - DNA, 15 bp, Homo sapiens
ccgtcaggatggacc

SEQ ID NO: 21952 - DNA, 15 bp, Homo sapiens
cccgtcaggatggac

SEQ ID NO: 21953 - DNA, 15 bp, Homo sapiens
acccgtcaggatgga

SEQ ID NO: 21954 - DNA, 15 bp, Homo sapiens
gacccgtcaggatgg

SEQ ID NO: 21955 - DNA, 15 bp, Homo sapiens
agacccgtcaggatg

SEQ ID NO: 21956 - DNA, 15 bp, Homo sapiens
cagacccgtcaggat

SEQ ID NO: 21957 - DNA, 15 bp, Homo sapiens
acagacccgtcagga

SEQ ID NO: 21958 - DNA, 15 bp, Homo sapiens
aacagacccgtcagg

SEQ ID NO: 21959 - DNA, 15 bp, Homo sapiens
caacagacccgtcag

SEQ ID NO: 21960 - DNA, 15 bp, Homo sapiens
gcaacagacccgtca

SEQ ID NO: 21961 - DNA, 15 bp, Homo sapiens
ggcaacagacccgtc

SEQ ID NO: 21962 - DNA, 15 bp, Homo sapiens
tggcaacagacccgt

SEQ ID NO: 21963 - DNA, 15 bp, Homo sapiens
gtggcaacagacccg

SEQ ID NO: 21964 - DNA, 15 bp, Homo sapiens
ggtggcaacagaccc

SEQ ID NO: 21965 - DNA, 15 bp, Homo sapiens
tggtggcaacagacc

SEQ ID NO: 21966 - DNA, 15 bp, Homo sapiens
ttggtggcaacagac

SEQ ID NO: 21967 - DNA, 15 bp, Homo sapiens
gttggtggcaacaga

SEQ ID NO: 21968 - DNA, 15 bp, Homo sapiens
ggttggtggcaacag

SEQ ID NO: 21969 - DNA, 15 bp, Homo sapiens
aggttggtggcaaca

SEQ ID NO: 21970 - DNA, 15 bp, Homo sapiens
gaggttggtggcaac

SEQ ID NO: 21971 - DNA, 15 bp, Homo sapiens
agaggttggtggcaa

SEQ ID NO: 21972 - DNA, 15 bp, Homo sapiens
cagaggttggtggca

SEQ ID NO: 21973 - DNA, 15 bp, Homo sapiens
ccagaggttggtggc

SEQ ID NO: 21974 - DNA, 15 bp, Homo sapiens
cccagaggttggtgg

SEQ ID NO: 21975 - DNA, 15 bp, Homo sapiens
tcccagaggttggtg

SEQ ID NO: 21976 - DNA, 15 bp, Homo sapiens
gtcccagaggttggt

SEQ ID NO: 21977 - DNA, 15 bp, Homo sapiens
agtcccagaggttgg

SEQ ID NO: 21978 - DNA, 15 bp, Homo sapiens
cagtcccagaggttg

SEQ ID NO: 21979 - DNA, 15 bp, Homo sapiens
acagtcccagaggtt

SEQ ID NO: 21980 - DNA, 15 bp, Homo sapiens
cacagtcccagaggt

SEQ ID NO: 21981 - DNA, 15 bp, Homo sapiens
gcacagtcccagagg

SEQ ID NO: 21982 - DNA, 15 bp, Homo sapiens
agcacagtcccagag

SEQ ID NO: 21983 - DNA, 15 bp, Homo sapiens
gagcacagtcccaga

SEQ ID NO: 21984 - DNA, 15 bp, Homo sapiens
cgagcacagtcccag

SEQ ID NO: 21985 - DNA, 15 bp, Homo sapiens
acgagcacagtccca

SEQ ID NO: 21986 - DNA, 15 bp, Homo sapiens
aacgagcacagtccc

SEQ ID NO: 21987 - DNA, 15 bp, Homo sapiens
caacgagcacagtcc

SEQ ID NO: 21988 - DNA, 15 bp, Homo sapiens
ccaacgagcacagtc

SEQ ID NO: 21989 - DNA, 15 bp, Homo sapiens
cccaacgagcacagt

SEQ ID NO: 21990 - DNA, 15 bp, Homo sapiens
ccccaacgagcacag

SEQ ID NO: 21991 - DNA, 15 bp, Homo sapiens
cccccaacgagcaca

SEQ ID NO: 21992 - DNA, 15 bp, Homo sapiens
tcccccaacgagcac

SEQ ID NO: 21993 - DNA, 15 bp, Homo sapiens
ttcccccaacgagca

SEQ ID NO: 21994 - DNA, 15 bp, Homo sapiens
cttcccccaacgagc

SEQ ID NO: 21995 - DNA, 15 bp, Homo sapiens
ccttcccccaacgag

SEQ ID NO: 21996 - DNA, 15 bp, Homo sapiens
cccttcccccaacga

SEQ ID NO: 21997 - DNA, 15 bp, Homo sapiens
tcccttcccccaacg

SEQ ID NO: 21998 - DNA, 15 bp, Homo sapiens
gtcccttcccccaac

SEQ ID NO: 21999 - DNA, 15 bp, Homo sapiens
tgtcccttcccccaa

SEQ ID NO: 22000 - DNA, 15 bp, Homo sapiens
atgtcccttccccca

SEQ ID NO: 22001 - DNA, 15 bp, Homo sapiens
aatgtcccttccccc

SEQ ID NO: 22002 - DNA, 15 bp, Homo sapiens
caatgtcccttcccc

SEQ ID NO: 22003 - DNA, 15 bp, Homo sapiens
tcaatgtcccttccc

SEQ ID NO: 22004 - DNA, 15 bp, Homo sapiens
ttcaatgtcccttcc

SEQ ID NO: 22005 - DNA, 15 bp, Homo sapiens
tttcaatgtcccttc

SEQ ID NO: 22006 - DNA, 15 bp, Homo sapiens
gtttcaatgtccctt

SEQ ID NO: 22007 - DNA, 15 bp, Homo sapiens
ggtttcaatgtccct

SEQ ID NO: 22008 - DNA, 15 bp, Homo sapiens
tggtttcaatgtccc

SEQ ID NO: 22009 - DNA, 15 bp, Homo sapiens
ctggtttcaatgtcc

SEQ ID NO: 22010 - DNA, 15 bp, Homo sapiens
gctggtttcaatgtc

SEQ ID NO: 22011 - DNA, 15 bp, Homo sapiens
ggctggtttcaatgt

SEQ ID NO: 22012 - DNA, 15 bp, Homo sapiens
aggctggtttcaatg

SEQ ID NO: 22013 - DNA, 15 bp, Homo sapiens
caggctggtttcaat

SEQ ID NO: 22014 - DNA, 15 bp, Homo sapiens
ccaggctggtttcaa

SEQ ID NO: 22015 - DNA, 15 bp, Homo sapiens
tccaggctggtttca

SEQ ID NO: 22016 - DNA, 15 bp, Homo sapiens
atccaggctggtttc

SEQ ID NO: 22017 - DNA, 15 bp, Homo sapiens
catccaggctggttt

SEQ ID NO: 22018 - DNA, 15 bp, Homo sapiens
gcatccaggctggtt

SEQ ID NO: 22019 - DNA, 15 bp, Homo sapiens
tgcatccaggctggt

SEQ ID NO: 22020 - DNA, 15 bp, Homo sapiens
ctgcatccaggctgg

SEQ ID NO: 22021 - DNA, 15 bp, Homo sapiens
actgcatccaggctg

SEQ ID NO: 22022 - DNA, 15 bp, Homo sapiens
gactgcatccaggct

SEQ ID NO: 22023 - DNA, 15 bp, Homo sapiens
ggactgcatccaggc

SEQ ID NO: 22024 - DNA, 15 bp, Homo sapiens
cggactgcatccagg

SEQ ID NO: 22025 - DNA, 15 bp, Homo sapiens
ccggactgcatccag

SEQ ID NO: 22026 - DNA, 15 bp, Homo sapiens
gccggactgcatcca

SEQ ID NO: 22027 - DNA, 15 bp, Homo sapiens
tgccggactgcatcc

SEQ ID NO: 22028 - DNA, 15 bp, Homo sapiens
ctgccggactgcatc

SEQ ID NO: 22029 - DNA, 15 bp, Homo sapiens
tctgccggactgcat

SEQ ID NO: 22030 - DNA, 15 bp, Homo sapiens
ctctgccggactgca

SEQ ID NO: 22031 - DNA, 15 bp, Homo sapiens
gctctgccggactgc

SEQ ID NO: 22032 - DNA, 15 bp, Homo sapiens
ggctctgccggactg

SEQ ID NO: 22033 - DNA, 15 bp, Homo sapiens
aggctctgccggact

SEQ ID NO: 22034 - DNA, 15 bp, Homo sapiens
aaggctctgccggac

SEQ ID NO: 22035 - DNA, 15 bp, Homo sapiens
caaggctctgccgga

SEQ ID NO: 22036 - DNA, 15 bp, Homo sapiens
ccaaggctctgccgg

SEQ ID NO: 22037 - DNA, 15 bp, Homo sapiens
gccaaggctctgccg

SEQ ID NO: 22038 - DNA, 15 bp, Homo sapiens
tgccaaggctctgcc

SEQ ID NO: 22039 - DNA, 15 bp, Homo sapiens
atgccaaggctctgc

SEQ ID NO: 22040 - DNA, 15 bp, Homo sapiens
catgccaaggctctg

SEQ ID NO: 22041 - DNA, 15 bp, Homo sapiens
acatgccaaggctct

SEQ ID NO: 22042 - DNA, 15 bp, Homo sapiens
cacatgccaaggctc

SEQ ID NO: 22043 - DNA, 15 bp, Homo sapiens
acacatgccaaggct

SEQ ID NO: 22044 - DNA, 15 bp, Homo sapiens
gacacatgccaaggc

SEQ ID NO: 22045 - DNA, 15 bp, Homo sapiens
ggacacatgccaagg

SEQ ID NO: 22046 - DNA, 15 bp, Homo sapiens
tggacacatgccaag

SEQ ID NO: 22047 - DNA, 15 bp, Homo sapiens
gtggacacatgccaa

SEQ ID NO: 22048 - DNA, 15 bp, Homo sapiens
tgtggacacatgcca

SEQ ID NO: 22049 - DNA, 15 bp, Homo sapiens
ctgtggacacatgcc

SEQ ID NO: 22050 - DNA, 15 bp, Homo sapiens
gctgtggacacatgc

SEQ ID NO: 22051 - DNA, 15 bp, Homo sapiens
tgctgtggacacatg

SEQ ID NO: 22052 - DNA, 15 bp, Homo sapiens
gtgctgtggacacat

SEQ ID NO: 22053 - DNA, 15 bp, Homo sapiens
tgtgctgtggacaca

SEQ ID NO: 22054 - DNA, 15 bp, Homo sapiens
ttgtgctgtggacac

SEQ ID NO: 22055 - DNA, 15 bp, Homo sapiens
gttgtgctgtggaca

SEQ ID NO: 22056 - DNA, 15 bp, Homo sapiens
tgttgtgctgtggac

SEQ ID NO: 22057 - DNA, 15 bp, Homo sapiens
atgttgtgctgtgga

SEQ ID NO: 22058 - DNA, 15 bp, Homo sapiens
gatgttgtgctgtgg

SEQ ID NO: 22059 - DNA, 15 bp, Homo sapiens
ggatgttgtgctgtg

SEQ ID NO: 22060 - DNA, 15 bp, Homo sapiens
aggatgttgtgctgt

SEQ ID NO: 22061 - DNA, 15 bp, Homo sapiens
caggatgttgtgctg

SEQ ID NO: 22062 - DNA, 15 bp, Homo sapiens
acaggatgttgtgct

SEQ ID NO: 22063 - DNA, 15 bp, Homo sapiens
aacaggatgttgtgc

SEQ ID NO: 22064 - DNA, 15 bp, Homo sapiens
gaacaggatgttgtg

SEQ ID NO: 22065 - DNA, 15 bp, Homo sapiens
ggaacaggatgttgt

SEQ ID NO: 22066 - DNA, 15 bp, Homo sapiens
tggaacaggatgttg

SEQ ID NO: 22067 - DNA, 15 bp, Homo sapiens
gtggaacaggatgtt

SEQ ID NO: 22068 - DNA, 15 bp, Homo sapiens
ggtggaacaggatgt

SEQ ID NO: 22069 - DNA, 15 bp, Homo sapiens
tggtggaacaggatg

SEQ ID NO: 22070 - DNA, 15 bp, Homo sapiens
ctggtggaacaggat

SEQ ID NO: 22071 - DNA, 15 bp, Homo sapiens
actggtggaacagga

SEQ ID NO: 22072 - DNA, 15 bp, Homo sapiens
tactggtggaacagg

SEQ ID NO: 22073 - DNA, 15 bp, Homo sapiens
ttactggtggaacag

SEQ ID NO: 22074 - DNA, 15 bp, Homo sapiens
cttactggtggaaca

SEQ ID NO: 22075 - DNA, 15 bp, Homo sapiens
gcttactggtggaac

SEQ ID NO: 22076 - DNA, 15 bp, Homo sapiens
cgcttactggtggaa

SEQ ID NO: 22077 - DNA, 15 bp, Homo sapiens
tcgcttactggtgga

SEQ ID NO: 22078 - DNA, 15 bp, Homo sapiens
gtcgcttactggtgg

SEQ ID NO: 22079 - DNA, 15 bp, Homo sapiens
tgtcgcttactggtg

SEQ ID NO: 22080 - DNA, 15 bp, Homo sapiens
gtgtcgcttactggt

SEQ ID NO: 22081 - DNA, 15 bp, Homo sapiens
tgtgtcgcttactgg

SEQ ID NO: 22082 - DNA, 15 bp, Homo sapiens
ctgtgtcgcttactg

SEQ ID NO: 22083 - DNA, 15 bp, Homo sapiens
cctgtgtcgcttact

SEQ ID NO: 22084 - DNA, 15 bp, Homo sapiens
tcctgtgtcgcttac

SEQ ID NO: 22085 - DNA, 15 bp, Homo sapiens
ttcctgtgtcgctta

SEQ ID NO: 22086 - DNA, 15 bp, Homo sapiens
gttcctgtgtcgctt

SEQ ID NO: 22087 - DNA, 15 bp, Homo sapiens
agttcctgtgtcgct

SEQ ID NO: 22088 - DNA, 15 bp, Homo sapiens
cagttcctgtgtcgc

SEQ ID NO: 22089 - DNA, 15 bp, Homo sapiens
tcagttcctgtgtcg

SEQ ID NO: 22090 - DNA, 15 bp, Homo sapiens
ctcagttcctgtgtc

SEQ ID NO: 22091 - DNA, 15 bp, Homo sapiens
tctcagttcctgtgt

SEQ ID NO: 22092 - DNA, 15 bp, Homo sapiens
gtctcagttcctgtg

SEQ ID NO: 22093 - DNA, 15 bp, Homo sapiens
ggtctcagttcctgt

SEQ ID NO: 22094 - DNA, 15 bp, Homo sapiens
cggtctcagttcctg

SEQ ID NO: 22095 - DNA, 15 bp, Homo sapiens
gcggtctcagttcct

SEQ ID NO: 22096 - DNA, 15 bp, Homo sapiens
ggcggtctcagttcc

SEQ ID NO: 22097 - DNA, 15 bp, Homo sapiens
gggcggtctcagttc

SEQ ID NO: 22098 - DNA, 15 bp, Homo sapiens
ggggcggtctcagtt

SEQ ID NO: 22099 - DNA, 15 bp, Homo sapiens
tggggcggtctcagt

SEQ ID NO: 22100 - DNA, 15 bp, Homo sapiens
atggggcggtctcag

SEQ ID NO: 22101 - DNA, 15 bp, Homo sapiens
gatggggcggtctca

SEQ ID NO: 22102 - DNA, 15 bp, Homo sapiens
ggatggggcggtctc

SEQ ID NO: 22103 - DNA, 15 bp, Homo sapiens
gggatggggcggtct

SEQ ID NO: 22104 - DNA, 15 bp, Homo sapiens
ggggatggggcggtc

SEQ ID NO: 22105 - DNA, 15 bp, Homo sapiens
aggggatggggcggt

SEQ ID NO: 22106 - DNA, 15 bp, Homo sapiens
gaggggatggggcgg

SEQ ID NO: 22107 - DNA, 15 bp, Homo sapiens
agaggggatggggcg

SEQ ID NO: 22108 - DNA, 15 bp, Homo sapiens
gagaggggatggggc

SEQ ID NO: 22109 - DNA, 15 bp, Homo sapiens
ggagaggggatgggg

SEQ ID NO: 22110 - DNA, 15 bp, Homo sapiens
aggagaggggatggg

SEQ ID NO: 22111 - DNA, 15 bp, Homo sapiens
gaggagaggggatgg

SEQ ID NO: 22112 - DNA, 15 bp, Homo sapiens
tgaggagaggggatg

SEQ ID NO: 22113 - DNA, 15 bp, Homo sapiens
gtgaggagaggggat

SEQ ID NO: 22114 - DNA, 15 bp, Homo sapiens
ggtgaggagagggga

SEQ ID NO: 22115 - DNA, 15 bp, Homo sapiens
aggtgaggagagggg

SEQ ID NO: 22116 - DNA, 15 bp, Homo sapiens
gaggtgaggagaggg

SEQ ID NO: 22117 - DNA, 15 bp, Homo sapiens
agaggtgaggagagg

SEQ ID NO: 22118 - DNA, 15 bp, Homo sapiens
cagaggtgaggagag

SEQ ID NO: 22119 - DNA, 15 bp, Homo sapiens
gcagaggtgaggaga

SEQ ID NO: 22120 - DNA, 15 bp, Homo sapiens
ggcagaggtgaggag

SEQ ID NO: 22121 - DNA, 15 bp, Homo sapiens
gggcagaggtgagga

SEQ ID NO: 22122 - DNA, 15 bp, Homo sapiens
ggggcagaggtgagg

SEQ ID NO: 22123 - DNA, 15 bp, Homo sapiens
gggggcagaggtgag

SEQ ID NO: 22124 - DNA, 15 bp, Homo sapiens
tgggggcagaggtga

SEQ ID NO: 22125 - DNA, 15 bp, Homo sapiens
ctgggggcagaggtg

SEQ ID NO: 22126 - DNA, 15 bp, Homo sapiens
gctgggggcagaggt

SEQ ID NO: 22127 - DNA, 15 bp, Homo sapiens
tgctgggggcagagg

SEQ ID NO: 22128 - DNA, 15 bp, Homo sapiens
gtgctgggggcagag

SEQ ID NO: 22129 - DNA, 15 bp, Homo sapiens
tgtgctgggggcaga

SEQ ID NO: 22130 - DNA, 15 bp, Homo sapiens
gtgtgctgggggcag

SEQ ID NO: 22131 - DNA, 15 bp, Homo sapiens
agtgtgctgggggca

SEQ ID NO: 22132 - DNA, 15 bp, Homo sapiens
aagtgtgctgggggc

SEQ ID NO: 22133 - DNA, 15 bp, Homo sapiens
gaagtgtgctggggg

SEQ ID NO: 22134 - DNA, 15 bp, Homo sapiens
agaagtgtgctgggg

SEQ ID NO: 22135 - DNA, 15 bp, Homo sapiens
gagaagtgtgctggg

SEQ ID NO: 22136 - DNA, 15 bp, Homo sapiens
agagaagtgtgctgg

SEQ ID NO: 22137 - DNA, 15 bp, Homo sapiens
tagagaagtgtgctg

SEQ ID NO: 22138 - DNA, 15 bp, Homo sapiens
ctagagaagtgtgct

SEQ ID NO: 22139 - DNA, 15 bp, Homo sapiens
tctagagaagtgtgc

SEQ ID NO: 22140 - DNA, 15 bp, Homo sapiens
ctctagagaagtgtg

SEQ ID NO: 22141 - DNA, 15 bp, Homo sapiens
gctctagagaagtgt

SEQ ID NO: 22142 - DNA, 15 bp, Homo sapiens
ggctctagagaagtg

SEQ ID NO: 22143 - DNA, 15 bp, Homo sapiens
gggctctagagaagt

SEQ ID NO: 22144 - DNA, 15 bp, Homo sapiens
tgggctctagagaag

SEQ ID NO: 22145 - DNA, 15 bp, Homo sapiens
ctgggctctagagaa

SEQ ID NO: 22146 - DNA, 15 bp, Homo sapiens
gctgggctctagaga

SEQ ID NO: 22147 - DNA, 15 bp, Homo sapiens
agctgggctctagag

SEQ ID NO: 22148 - DNA, 15 bp, Homo sapiens
gagctgggctctaga

SEQ ID NO: 22149 - DNA, 15 bp, Homo sapiens
tgagctgggctctag

SEQ ID NO: 22150 - DNA, 15 bp, Homo sapiens
ctgagctgggctcta

SEQ ID NO: 22151 - DNA, 15 bp, Homo sapiens
cctgagctgggctct

SEQ ID NO: 22152 - DNA, 15 bp, Homo sapiens
ccctgagctgggctc

SEQ ID NO: 22153 - DNA, 15 bp, Homo sapiens
cccctgagctgggct

SEQ ID NO: 22154 - DNA, 15 bp, Homo sapiens
acccctgagctgggc

SEQ ID NO: 22155 - DNA, 15 bp, Homo sapiens
cacccctgagctggg

SEQ ID NO: 22156 - DNA, 15 bp, Homo sapiens
gcacccctgagctgg

SEQ ID NO: 22157 - DNA, 15 bp, Homo sapiens
ggcacccctgagctg

SEQ ID NO: 22158 - DNA, 15 bp, Homo sapiens
tggcacccctgagct

SEQ ID NO: 22159 - DNA, 15 bp, Homo sapiens
ctggcacccctgagc

SEQ ID NO: 22160 - DNA, 15 bp, Homo sapiens
cctggcacccctgag

SEQ ID NO: 22161 - DNA, 15 bp, Homo sapiens
gcctggcacccctga

SEQ ID NO: 22162 - DNA, 15 bp, Homo sapiens
ggcctggcacccctg

SEQ ID NO: 22163 - DNA, 15 bp, Homo sapiens
aggcctggcacccct

SEQ ID NO: 22164 - DNA, 15 bp, Homo sapiens
caggcctggcacccc

SEQ ID NO: 22165 - DNA, 15 bp, Homo sapiens
ccaggcctggcaccc

SEQ ID NO: 22166 - DNA, 15 bp, Homo sapiens
cccaggcctggcacc

SEQ ID NO: 22167 - DNA, 15 bp, Homo sapiens
gcccaggcctggcac

SEQ ID NO: 22168 - DNA, 15 bp, Homo sapiens
tgcccaggcctggca

SEQ ID NO: 22169 - DNA, 15 bp, Homo sapiens
gtgcccaggcctggc

SEQ ID NO: 22170 - DNA, 15 bp, Homo sapiens
tgtgcccaggcctgg

SEQ ID NO: 22171 - DNA, 15 bp, Homo sapiens
ctgtgcccaggcctg

SEQ ID NO: 22172 - DNA, 15 bp, Homo sapiens
cctgtgcccaggcct

SEQ ID NO: 22173 - DNA, 15 bp, Homo sapiens
gcctgtgcccaggcc

SEQ ID NO: 22174 - DNA, 15 bp, Homo sapiens
tgcctgtgcccaggc

SEQ ID NO: 22175 - DNA, 15 bp, Homo sapiens
ctgcctgtgcccagg

SEQ ID NO: 22176 - DNA, 15 bp, Homo sapiens
tctgcctgtgcccag

SEQ ID NO: 22177 - DNA, 15 bp, Homo sapiens
ctctgcctgtgccca

SEQ ID NO: 22178 - DNA, 15 bp, Homo sapiens
tctctgcctgtgccc

SEQ ID NO: 22179 - DNA, 15 bp, Homo sapiens
atctctgcctgtgcc

SEQ ID NO: 22180 - DNA, 15 bp, Homo sapiens
tatctctgcctgtgc

SEQ ID NO: 22181 - DNA, 15 bp, Homo sapiens
gtatctctgcctgtg

SEQ ID NO: 22182 - DNA, 15 bp, Homo sapiens
tgtatctctgcctgt

SEQ ID NO: 22183 - DNA, 15 bp, Homo sapiens
ctgtatctctgcctg

SEQ ID NO: 22184 - DNA, 15 bp, Homo sapiens
tctgtatctctgcct

SEQ ID NO: 22185 - DNA, 15 bp, Homo sapiens
gtctgtatctctgcc

SEQ ID NO: 22186 - DNA, 15 bp, Homo sapiens
agtctgtatctctgc

SEQ ID NO: 22187 - DNA, 15 bp, Homo sapiens
gagtctgtatctctg

SEQ ID NO: 22188 - DNA, 15 bp, Homo sapiens
agagtctgtatctct

SEQ ID NO: 22189 - DNA, 15 bp, Homo sapiens
aagagtctgtatctc

SEQ ID NO: 22190 - DNA, 15 bp, Homo sapiens
taagagtctgtatct

SEQ ID NO: 22191 - DNA, 15 bp, Homo sapiens
ataagagtctgtatc

SEQ ID NO: 22192 - DNA, 15 bp, Homo sapiens
aataagagtctgtat

SEQ ID NO: 22193 - DNA, 15 bp, Homo sapiens
aaataagagtctgta

SEQ ID NO: 22194 - DNA, 15 bp, Homo sapiens
caaataagagtctgt

SEQ ID NO: 22195 - DNA, 15 bp, Homo sapiens
ccaaataagagtctg

SEQ ID NO: 22196 - DNA, 15 bp, Homo sapiens
accaaataagagtct

SEQ ID NO: 22197 - DNA, 15 bp, Homo sapiens
aaccaaataagagtc

SEQ ID NO: 22198 - DNA, 15 bp, Homo sapiens
aaaccaaataagagt

SEQ ID NO: 22199 - DNA, 15 bp, Homo sapiens
gaaaccaaataagag

SEQ ID NO: 22200 - DNA, 15 bp, Homo sapiens
ggaaaccaaataaga

SEQ ID NO: 22201 - DNA, 15 bp, Homo sapiens
gggaaaccaaataag

SEQ ID NO: 22202 - DNA, 15 bp, Homo sapiens
ggggaaaccaaataa

SEQ ID NO: 22203 - DNA, 15 bp, Homo sapiens
aggggaaaccaaata

SEQ ID NO: 22204 - DNA, 15 bp, Homo sapiens
taggggaaaccaaat

SEQ ID NO: 22205 - DNA, 15 bp, Homo sapiens
ataggggaaaccaaa

SEQ ID NO: 22206 - DNA, 15 bp, Homo sapiens
cataggggaaaccaa

SEQ ID NO: 22207 - DNA, 15 bp, Homo sapiens
acataggggaaacca

SEQ ID NO: 22208 - DNA, 15 bp, Homo sapiens
aacataggggaaacc

SEQ ID NO: 22209 - DNA, 15 bp, Homo sapiens
aaacataggggaaac

SEQ ID NO: 22210 - DNA, 15 bp, Homo sapiens
taaacataggggaaa

SEQ ID NO: 22211 - DNA, 15 bp, Homo sapiens
ttaaacataggggaa

SEQ ID NO: 22212 - DNA, 15 bp, Homo sapiens
tttaaacatagggga

SEQ ID NO: 22213 - DNA, 15 bp, Homo sapiens
ctttaaacatagggg

SEQ ID NO: 22214 - DNA, 15 bp, Homo sapiens
actttaaacataggg

SEQ ID NO: 22215 - DNA, 15 bp, Homo sapiens
gactttaaacatagg

SEQ ID NO: 22216 - DNA, 15 bp, Homo sapiens
ggactttaaacatag

SEQ ID NO: 22217 - DNA, 15 bp, Homo sapiens
aggactttaaacata

SEQ ID NO: 22218 - DNA, 15 bp, Homo sapiens
aaggactttaaacat

SEQ ID NO: 22219 - DNA, 15 bp, Homo sapiens
aaaggactttaaaca

SEQ ID NO: 22220 - DNA, 15 bp, Homo sapiens
caaaggactttaaac

SEQ ID NO: 22221 - DNA, 15 bp, Homo sapiens
acaaaggactttaaa

SEQ ID NO: 22222 - DNA, 15 bp, Homo sapiens
gacaaaggactttaa

SEQ ID NO: 22223 - DNA, 15 bp, Homo sapiens
ggacaaaggacttta

SEQ ID NO: 22224 - DNA, 15 bp, Homo sapiens
aggacaaaggacttt

SEQ ID NO: 22225 - DNA, 15 bp, Homo sapiens
taggacaaaggactt

SEQ ID NO: 22226 - DNA, 15 bp, Homo sapiens
gtaggacaaaggact

SEQ ID NO: 22227 - DNA, 15 bp, Homo sapiens
agtaggacaaaggac

SEQ ID NO: 22228 - DNA, 15 bp, Homo sapiens
aagtaggacaaagga

SEQ ID NO: 22229 - DNA, 15 bp, Homo sapiens
caagtaggacaaagg

SEQ ID NO: 22230 - DNA, 15 bp, Homo sapiens
gcaagtaggacaaag

SEQ ID NO: 22231 - DNA, 15 bp, Homo sapiens
tgcaagtaggacaaa

SEQ ID NO: 22232 - DNA, 15 bp, Homo sapiens
ctgcaagtaggacaa

SEQ ID NO: 22233 - DNA, 15 bp, Homo sapiens
actgcaagtaggaca

SEQ ID NO: 22234 - DNA, 15 bp, Homo sapiens
cactgcaagtaggac

SEQ ID NO: 22235 - DNA, 15 bp, Homo sapiens
tcactgcaagtagga

SEQ ID NO: 22236 - DNA, 15 bp, Homo sapiens
ctcactgcaagtagg

SEQ ID NO: 22237 - DNA, 15 bp, Homo sapiens
tctcactgcaagtag

SEQ ID NO: 22238 - DNA, 15 bp, Homo sapiens
ttctcactgcaagta

SEQ ID NO: 22239 - DNA, 15 bp, Homo sapiens
attctcactgcaagt

SEQ ID NO: 22240 - DNA, 15 bp, Homo sapiens
aattctcactgcaag

SEQ ID NO: 22241 - DNA, 15 bp, Homo sapiens
caattctcactgcaa

SEQ ID NO: 22242 - DNA, 15 bp, Homo sapiens
acaattctcactgca

SEQ ID NO: 22243 - DNA, 15 bp, Homo sapiens
gacaattctcactgc

SEQ ID NO: 22244 - DNA, 15 bp, Homo sapiens
ggacaattctcactg

SEQ ID NO: 22245 - DNA, 15 bp, Homo sapiens
gggacaattctcact

SEQ ID NO: 22246 - DNA, 15 bp, Homo sapiens
agggacaattctcac

SEQ ID NO: 22247 - DNA, 15 bp, Homo sapiens
cagggacaattctca

SEQ ID NO: 22248 - DNA, 15 bp, Homo sapiens
tcagggacaattctc

SEQ ID NO: 22249 - DNA, 15 bp, Homo sapiens
ctcagggacaattct

SEQ ID NO: 22250 - DNA, 15 bp, Homo sapiens
tctcagggacaattc

SEQ ID NO: 22251 - DNA, 15 bp, Homo sapiens
ttctcagggacaatt

SEQ ID NO: 22252 - DNA, 15 bp, Homo sapiens
attctcagggacaat

SEQ ID NO: 22253 - DNA, 15 bp, Homo sapiens
tattctcagggacaa

SEQ ID NO: 22254 - DNA, 15 bp, Homo sapiens
atattctcagggaca

SEQ ID NO: 22255 - DNA, 15 bp, Homo sapiens
catattctcagggac

SEQ ID NO: 22256 - DNA, 15 bp, Homo sapiens
ccatattctcaggga

SEQ ID NO: 22257 - DNA, 15 bp, Homo sapiens
cccatattctcaggg

SEQ ID NO: 22258 - DNA, 15 bp, Homo sapiens
tcccatattctcagg

SEQ ID NO: 22259 - DNA, 15 bp, Homo sapiens
gtcccatattctcag

SEQ ID NO: 22260 - DNA, 15 bp, Homo sapiens
agtcccatattctca

SEQ ID NO: 22261 - DNA, 15 bp, Homo sapiens
gagtcccatattctc

SEQ ID NO: 22262 - DNA, 15 bp, Homo sapiens
agagtcccatattct

SEQ ID NO: 22263 - DNA, 15 bp, Homo sapiens
cagagtcccatattc

SEQ ID NO: 22264 - DNA, 15 bp, Homo sapiens
gcagagtcccatatt

SEQ ID NO: 22265 - DNA, 15 bp, Homo sapiens
ggcagagtcccatat

SEQ ID NO: 22266 - DNA, 15 bp, Homo sapiens
aggcagagtcccata

SEQ ID NO: 22267 - DNA, 15 bp, Homo sapiens
gaggcagagtcccat

SEQ ID NO: 22268 - DNA, 15 bp, Homo sapiens
agaggcagagtccca

SEQ ID NO: 22269 - DNA, 15 bp, Homo sapiens
cagaggcagagtccc

SEQ ID NO: 22270 - DNA, 15 bp, Homo sapiens
gcagaggcagagtcc

SEQ ID NO: 22271 - DNA, 15 bp, Homo sapiens
agcagaggcagagtc

SEQ ID NO: 22272 - DNA, 15 bp, Homo sapiens
cagcagaggcagagt

SEQ ID NO: 22273 - DNA, 15 bp, Homo sapiens
gcagcagaggcagag

SEQ ID NO: 22274 - DNA, 15 bp, Homo sapiens
agcagcagaggcaga

SEQ ID NO: 22275 - DNA, 15 bp, Homo sapiens
gagcagcagaggcag

SEQ ID NO: 22276 - DNA, 15 bp, Homo sapiens
tgagcagcagaggca

SEQ ID NO: 22277 - DNA, 15 bp, Homo sapiens
ctgagcagcagaggc

SEQ ID NO: 22278 - DNA, 15 bp, Homo sapiens
tctgagcagcagagg

SEQ ID NO: 22279 - DNA, 15 bp, Homo sapiens
ctctgagcagcagag

SEQ ID NO: 22280 - DNA, 15 bp, Homo sapiens
gctctgagcagcaga

SEQ ID NO: 22281 - DNA, 15 bp, Homo sapiens
agctctgagcagcag

SEQ ID NO: 22282 - DNA, 15 bp, Homo sapiens
cagctctgagcagca

SEQ ID NO: 22283 - DNA, 15 bp, Homo sapiens
tcagctctgagcagc

SEQ ID NO: 22284 - DNA, 15 bp, Homo sapiens
ctcagctctgagcag

SEQ ID NO: 22285 - DNA, 15 bp, Homo sapiens
cctcagctctgagca

SEQ ID NO: 22286 - DNA, 15 bp, Homo sapiens
ccctcagctctgagc

SEQ ID NO: 22287 - DNA, 15 bp, Homo sapiens
gccctcagctctgag

SEQ ID NO: 22288 - DNA, 15 bp, Homo sapiens
agccctcagctctga

SEQ ID NO: 22289 - DNA, 15 bp, Homo sapiens
gagccctcagctctg

SEQ ID NO: 22290 - DNA, 15 bp, Homo sapiens
ggagccctcagctct

SEQ ID NO: 22291 - DNA, 15 bp, Homo sapiens
aggagccctcagctc

SEQ ID NO: 22292 - DNA, 15 bp, Homo sapiens
gaggagccctcagct

SEQ ID NO: 22293 - DNA, 15 bp, Homo sapiens
ggaggagccctcagc

SEQ ID NO: 22294 - DNA, 15 bp, Homo sapiens
gggaggagccctcag

SEQ ID NO: 22295 - DNA, 15 bp, Homo sapiens
agggaggagccctca

SEQ ID NO: 22296 - DNA, 15 bp, Homo sapiens
gagggaggagccctc

SEQ ID NO: 22297 - DNA, 15 bp, Homo sapiens
tgagggaggagccct

SEQ ID NO: 22298 - DNA, 15 bp, Homo sapiens
ctgagggaggagccc

SEQ ID NO: 22299 - DNA, 15 bp, Homo sapiens
tctgagggaggagcc

SEQ ID NO: 22300 - DNA, 15 bp, Homo sapiens
ttctgagggaggagc

SEQ ID NO: 22301 - DNA, 15 bp, Homo sapiens
cttctgagggaggag

SEQ ID NO: 22302 - DNA, 15 bp, Homo sapiens
ccttctgagggagga

SEQ ID NO: 22303 - DNA, 15 bp, Homo sapiens
cccttctgagggagg

SEQ ID NO: 22304 - DNA, 15 bp, Homo sapiens
acccttctgagggag

SEQ ID NO: 22305 - DNA, 15 bp, Homo sapiens
cacccttctgaggga

SEQ ID NO: 22306 - DNA, 15 bp, Homo sapiens
tcacccttctgaggg

SEQ ID NO: 22307 - DNA, 15 bp, Homo sapiens
ctcacccttctgagg

SEQ ID NO: 22308 - DNA, 15 bp, Homo sapiens
cctcacccttctgag

SEQ ID NO: 22309 - DNA, 15 bp, Homo sapiens
gcctcacccttctga

SEQ ID NO: 22310 - DNA, 15 bp, Homo sapiens
agcctcacccttctg

SEQ ID NO: 22311 - DNA, 15 bp, Homo sapiens
cagcctcacccttct

SEQ ID NO: 22312 - DNA, 15 bp, Homo sapiens
gcagcctcacccttc

SEQ ID NO: 22313 - DNA, 15 bp, Homo sapiens
ggcagcctcaccctt

SEQ ID NO: 22314 - DNA, 15 bp, Homo sapiens
aggcagcctcaccct

SEQ ID NO: 22315 - DNA, 15 bp, Homo sapiens
aaggcagcctcaccc

SEQ ID NO: 22316 - DNA, 15 bp, Homo sapiens
gaaggcagcctcacc

SEQ ID NO: 22317 - DNA, 15 bp, Homo sapiens
cgaaggcagcctcac

SEQ ID NO: 22318 - DNA, 15 bp, Homo sapiens
gcgaaggcagcctca

SEQ ID NO: 22319 - DNA, 15 bp, Homo sapiens
agcgaaggcagcctc

SEQ ID NO: 22320 - DNA, 15 bp, Homo sapiens
gagcgaaggcagcct

SEQ ID NO: 22321 - DNA, 15 bp, Homo sapiens
agagcgaaggcagcc

SEQ ID NO: 22322 - DNA, 15 bp, Homo sapiens
cagagcgaaggcagc

SEQ ID NO: 22323 - DNA, 15 bp, Homo sapiens
tcagagcgaaggcag

SEQ ID NO: 22324 - DNA, 15 bp, Homo sapiens
gtcagagcgaaggca

SEQ ID NO: 22325 - DNA, 15 bp, Homo sapiens
tgtcagagcgaaggc

SEQ ID NO: 22326 - DNA, 15 bp, Homo sapiens
ctgtcagagcgaagg

SEQ ID NO: 22327 - DNA, 15 bp, Homo sapiens
tctgtcagagcgaag

SEQ ID NO: 22328 - DNA, 15 bp, Homo sapiens
ctctgtcagagcgaa

SEQ ID NO: 22329 - DNA, 15 bp, Homo sapiens
gctctgtcagagcga

SEQ ID NO: 22330 - DNA, 15 bp, Homo sapiens
tgctctgtcagagcg

SEQ ID NO: 22331 - DNA, 15 bp, Homo sapiens
ctgctctgtcagagc

SEQ ID NO: 22332 - DNA, 15 bp, Homo sapiens
gctgctctgtcagag

SEQ ID NO: 22333 - DNA, 15 bp, Homo sapiens
agctgctctgtcaga

SEQ ID NO: 22334 - DNA, 15 bp, Homo sapiens
cagctgctctgtcag

SEQ ID NO: 22335 - DNA, 15 bp, Homo sapiens
tcagctgctctgtca

SEQ ID NO: 22336 - DNA, 15 bp, Homo sapiens
atcagctgctctgtc

SEQ ID NO: 22337 - DNA, 15 bp, Homo sapiens
gatcagctgctctgt

SEQ ID NO: 22338 - DNA, 15 bp, Homo sapiens
cgatcagctgctctg

SEQ ID NO: 22339 - DNA, 15 bp, Homo sapiens
tcgatcagctgctct

SEQ ID NO: 22340 - DNA, 15 bp, Homo sapiens
atcgatcagctgctc

SEQ ID NO: 22341 - DNA, 15 bp, Homo sapiens
gatcgatcagctgct

SEQ ID NO: 22342 - DNA, 15 bp, Homo sapiens
ggatcgatcagctgc

SEQ ID NO: 22343 - DNA, 15 bp, Homo sapiens
gggatcgatcagctg

SEQ ID NO: 22344 - DNA, 15 bp, Homo sapiens
ggggatcgatcagct

SEQ ID NO: 22345 - DNA, 15 bp, Homo sapiens
cggggatcgatcagc

SEQ ID NO: 22346 - DNA, 15 bp, Homo sapiens
tcggggatcgatcag

SEQ ID NO: 22347 - DNA, 15 bp, Homo sapiens
ctcggggatcgatca

SEQ ID NO: 22348 - DNA, 15 bp, Homo sapiens
gctcggggatcgatc

SEQ ID NO: 22349 - DNA, 15 bp, Homo sapiens
ggctcggggatcgat

SEQ ID NO: 22350 - DNA, 15 bp, Homo sapiens
gggctcggggatcga

SEQ ID NO: 22351 - DNA, 15 bp, Homo sapiens
ggggctcggggatcg

SEQ ID NO: 22352 - DNA, 15 bp, Homo sapiens
aggggctcggggatc

SEQ ID NO: 22353 - DNA, 15 bp, Homo sapiens
aaggggctcggggat

SEQ ID NO: 22354 - DNA, 15 bp, Homo sapiens
caaggggctcgggga

SEQ ID NO: 22355 - DNA, 15 bp, Homo sapiens
acaaggggctcgggg

SEQ ID NO: 22356 - DNA, 15 bp, Homo sapiens
cacaaggggctcggg

SEQ ID NO: 22357 - DNA, 15 bp, Homo sapiens
gcacaaggggctcgg

SEQ ID NO: 22358 - DNA, 15 bp, Homo sapiens
tgcacaaggggctcg

SEQ ID NO: 22359 - DNA, 15 bp, Homo sapiens
ctgcacaaggggctc

SEQ ID NO: 22360 - DNA, 15 bp, Homo sapiens
gctgcacaaggggct

SEQ ID NO: 22361 - DNA, 15 bp, Homo sapiens
ggctgcacaaggggc

SEQ ID NO: 22362 - DNA, 15 bp, Homo sapiens
gggctgcacaagggg

SEQ ID NO: 22363 - DNA, 15 bp, Homo sapiens
agggctgcacaaggg

SEQ ID NO: 22364 - DNA, 15 bp, Homo sapiens
cagggctgcacaagg

SEQ ID NO: 22365 - DNA, 15 bp, Homo sapiens
tcagggctgcacaag

SEQ ID NO: 22366 - DNA, 15 bp, Homo sapiens
ttcagggctgcacaa

SEQ ID NO: 22367 - DNA, 15 bp, Homo sapiens
cttcagggctgcaca

SEQ ID NO: 22368 - DNA, 15 bp, Homo sapiens
acttcagggctgcac

SEQ ID NO: 22369 - DNA, 15 bp, Homo sapiens
tacttcagggctgca

SEQ ID NO: 22370 - DNA, 15 bp, Homo sapiens
gtacttcagggctgc

SEQ ID NO: 22371 - DNA, 15 bp, Homo sapiens
agtacttcagggctg

SEQ ID NO: 22372 - DNA, 15 bp, Homo sapiens
aagtacttcagggct

SEQ ID NO: 22373 - DNA, 15 bp, Homo sapiens
gaagtacttcagggc

SEQ ID NO: 22374 - DNA, 15 bp, Homo sapiens
ggaagtacttcaggg

SEQ ID NO: 22375 - DNA, 15 bp, Homo sapiens
aggaagtacttcagg

SEQ ID NO: 22376 - DNA, 15 bp, Homo sapiens
gaggaagtacttcag

SEQ ID NO: 22377 - DNA, 15 bp, Homo sapiens
agaggaagtacttca

SEQ ID NO: 22378 - DNA, 15 bp, Homo sapiens
gagaggaagtacttc

SEQ ID NO: 22379 - DNA, 15 bp, Homo sapiens
agagaggaagtactt

SEQ ID NO: 22380 - DNA, 15 bp, Homo sapiens
cagagaggaagtact

SEQ ID NO: 22381 - DNA, 15 bp, Homo sapiens
ccagagaggaagtac

SEQ ID NO: 22382 - DNA, 15 bp, Homo sapiens
cccagagaggaagta

SEQ ID NO: 22383 - DNA, 15 bp, Homo sapiens
tcccagagaggaagt

SEQ ID NO: 22384 - DNA, 15 bp, Homo sapiens
gtcccagagaggaag

SEQ ID NO: 22385 - DNA, 15 bp, Homo sapiens
ggtcccagagaggaa

SEQ ID NO: 22386 - DNA, 15 bp, Homo sapiens
tggtcccagagagga

SEQ ID NO: 22387 - DNA, 15 bp, Homo sapiens
ttggtcccagagagg

SEQ ID NO: 22388 - DNA, 15 bp, Homo sapiens
tttggtcccagagag

SEQ ID NO: 22389 - DNA, 15 bp, Homo sapiens
ctttggtcccagaga

SEQ ID NO: 22390 - DNA, 15 bp, Homo sapiens
tctttggtcccagag

SEQ ID NO: 22391 - DNA, 15 bp, Homo sapiens
gtctttggtcccaga

SEQ ID NO: 22392 - DNA, 15 bp, Homo sapiens
tgtctttggtcccag

SEQ ID NO: 22393 - DNA, 15 bp, Homo sapiens
ctgtctttggtccca

SEQ ID NO: 22394 - DNA, 15 bp, Homo sapiens
cctgtctttggtccc

SEQ ID NO: 22395 - DNA, 15 bp, Homo sapiens
tcctgtctttggtcc

SEQ ID NO: 22396 - DNA, 15 bp, Homo sapiens
ctcctgtctttggtc

SEQ ID NO: 22397 - DNA, 15 bp, Homo sapiens
tctcctgtctttggt

SEQ ID NO: 22398 - DNA, 15 bp, Homo sapiens
ttctcctgtctttgg

SEQ ID NO: 22399 - DNA, 15 bp, Homo sapiens
gttctcctgtctttg

SEQ ID NO: 22400 - DNA, 15 bp, Homo sapiens
ggttctcctgtcttt

SEQ ID NO: 22401 - DNA, 15 bp, Homo sapiens
tggttctcctgtctt

SEQ ID NO: 22402 - DNA, 15 bp, Homo sapiens
atggttctcctgtct

SEQ ID NO: 22403 - DNA, 15 bp, Homo sapiens
aatggttctcctgtc

SEQ ID NO: 22404 - DNA, 15 bp, Homo sapiens
caatggttctcctgt

SEQ ID NO: 22405 - DNA, 15 bp, Homo sapiens
acaatggttctcctg

SEQ ID NO: 22406 - DNA, 15 bp, Homo sapiens
aacaatggttctcct

SEQ ID NO: 22407 - DNA, 15 bp, Homo sapiens
gaacaatggttctcc

SEQ ID NO: 22408 - DNA, 15 bp, Homo sapiens
ggaacaatggttctc

SEQ ID NO: 22409 - DNA, 15 bp, Homo sapiens
aggaacaatggttct

SEQ ID NO: 22410 - DNA, 15 bp, Homo sapiens
aaggaacaatggttc

SEQ ID NO: 22411 - DNA, 15 bp, Homo sapiens
aaaggaacaatggtt

SEQ ID NO: 22412 - DNA, 15 bp, Homo sapiens
aaaaggaacaatggt

SEQ ID NO: 22413 - DNA, 15 bp, Homo sapiens
aaaaaggaacaatgg

SEQ ID NO: 22414 - DNA, 15 bp, Homo sapiens
gaaaaaggaacaatg

SEQ ID NO: 22415 - DNA, 15 bp, Homo sapiens
ggaaaaaggaacaat

SEQ ID NO: 22416 - DNA, 15 bp, Homo sapiens
aggaaaaaggaacaa

SEQ ID NO: 22417 - DNA, 15 bp, Homo sapiens
caggaaaaaggaaca

SEQ ID NO: 22418 - DNA, 15 bp, Homo sapiens
acaggaaaaaggaac

SEQ ID NO: 22419 - DNA, 15 bp, Homo sapiens
aacaggaaaaaggaa

SEQ ID NO: 22420 - DNA, 15 bp, Homo sapiens
caacaggaaaaagga

SEQ ID NO: 22421 - DNA, 15 bp, Homo sapiens
tcaacaggaaaaagg

SEQ ID NO: 22422 - DNA, 15 bp, Homo sapiens
ttcaacaggaaaaag

SEQ ID NO: 22423 - DNA, 15 bp, Homo sapiens
cttcaacaggaaaaa

SEQ ID NO: 22424 - DNA, 15 bp, Homo sapiens
gcttcaacaggaaaa

SEQ ID NO: 22425 - DNA, 15 bp, Homo sapiens
ggcttcaacaggaaa

SEQ ID NO: 22426 - DNA, 15 bp, Homo sapiens
tggcttcaacaggaa

SEQ ID NO: 22427 - DNA, 15 bp, Homo sapiens
gtggcttcaacagga

SEQ ID NO: 22428 - DNA, 15 bp, Homo sapiens
cgtggcttcaacagg

SEQ ID NO: 22429 - DNA, 15 bp, Homo sapiens
ccgtggcttcaacag

SEQ ID NO: 22430 - DNA, 15 bp, Homo sapiens
gccgtggcttcaaca

SEQ ID NO: 22431 - DNA, 15 bp, Homo sapiens
ggccgtggcttcaac

SEQ ID NO: 22432 - DNA, 15 bp, Homo sapiens
aggccgtggcttcaa

SEQ ID NO: 22433 - DNA, 15 bp, Homo sapiens
caggccgtggcttca

SEQ ID NO: 22434 - DNA, 15 bp, Homo sapiens
tcaggccgtggcttc

SEQ ID NO: 22435 - DNA, 15 bp, Homo sapiens
ttcaggccgtggctt

SEQ ID NO: 22436 - DNA, 15 bp, Homo sapiens
tttcaggccgtggct

SEQ ID NO: 22437 - DNA, 15 bp, Homo sapiens
ctttcaggccgtggc

SEQ ID NO: 22438 - DNA, 15 bp, Homo sapiens
cctttcaggccgtgg

SEQ ID NO: 22439 - DNA, 15 bp, Homo sapiens
gcctttcaggccgtg

SEQ ID NO: 22440 - DNA, 15 bp, Homo sapiens
tgcctttcaggccgt

SEQ ID NO: 22441 - DNA, 15 bp, Homo sapiens
ttgcctttcaggccg

SEQ ID NO: 22442 - DNA, 15 bp, Homo sapiens
tttgcctttcaggcc

SEQ ID NO: 22443 - DNA, 15 bp, Homo sapiens
gtttgcctttcaggc

SEQ ID NO: 22444 - DNA, 15 bp, Homo sapiens
agtttgcctttcagg

SEQ ID NO: 22445 - DNA, 15 bp, Homo sapiens
aagtttgcctttcag

SEQ ID NO: 22446 - DNA, 15 bp, Homo sapiens
aaagtttgcctttca

SEQ ID NO: 22447 - DNA, 15 bp, Homo sapiens
aaaagtttgcctttc

SEQ ID NO: 22448 - DNA, 15 bp, Homo sapiens
gaaaagtttgccttt

SEQ ID NO: 22449 - DNA, 15 bp, Homo sapiens
tgaaaagtttgcctt

SEQ ID NO: 22450 - DNA, 15 bp, Homo sapiens
ctgaaaagtttgcct

SEQ ID NO: 22451 - DNA, 15 bp, Homo sapiens
cctgaaaagtttgcc

SEQ ID NO: 22452 - DNA, 15 bp, Homo sapiens
ccctgaaaagtttgc

SEQ ID NO: 22453 - DNA, 15 bp, Homo sapiens
cccctgaaaagtttg

SEQ ID NO: 22454 - DNA, 15 bp, Homo sapiens
ccccctgaaaagttt

SEQ ID NO: 22455 - DNA, 15 bp, Homo sapiens
gccccctgaaaagtt

SEQ ID NO: 22456 - DNA, 15 bp, Homo sapiens
agccccctgaaaagt

SEQ ID NO: 22457 - DNA, 15 bp, Homo sapiens
aagccccctgaaaag

SEQ ID NO: 22458 - DNA, 15 bp, Homo sapiens
aaagccccctgaaaa

SEQ ID NO: 22459 - DNA, 15 bp, Homo sapiens
aaaagccccctgaaa

SEQ ID NO: 22460 - DNA, 15 bp, Homo sapiens
gaaaagccccctgaa

SEQ ID NO: 22461 - DNA, 15 bp, Homo sapiens
tgaaaagccccctga

SEQ ID NO: 22462 - DNA, 15 bp, Homo sapiens
ctgaaaagccccctg

SEQ ID NO: 22463 - DNA, 15 bp, Homo sapiens
actgaaaagccccct

SEQ ID NO: 22464 - DNA, 15 bp, Homo sapiens
aactgaaaagccccc

SEQ ID NO: 22465 - DNA, 15 bp, Homo sapiens
taactgaaaagcccc

SEQ ID NO: 22466 - DNA, 15 bp, Homo sapiens
gtaactgaaaagccc

SEQ ID NO: 22467 - DNA, 15 bp, Homo sapiens
agtaactgaaaagcc

SEQ ID NO: 22468 - DNA, 15 bp, Homo sapiens
aagtaactgaaaagc

SEQ ID NO: 22469 - DNA, 15 bp, Homo sapiens
aaagtaactgaaaag

SEQ ID NO: 22470 - DNA, 15 bp, Homo sapiens
aaaagtaactgaaaa

SEQ ID NO: 22471 - DNA, 15 bp, Homo sapiens
aaaaagtaactgaaa

SEQ ID NO: 22472 - DNA, 15 bp, Homo sapiens
aaaaaagtaactgaa

SEQ ID NO: 22473 - DNA, 15 bp, Homo sapiens
aaaaaaagtaactga

SEQ ID NO: 22474 - DNA, 15 bp, Homo sapiens
gaaaaaaagtaactg

SEQ ID NO: 22475 - DNA, 15 bp, Homo sapiens
ggaaaaaaagtaact

SEQ ID NO: 22476 - DNA, 15 bp, Homo sapiens
gggaaaaaaagtaac

SEQ ID NO: 22477 - DNA, 15 bp, Homo sapiens
ggggaaaaaaagtaa

SEQ ID NO: 22478 - DNA, 15 bp, Homo sapiens
tggggaaaaaaagta

SEQ ID NO: 22479 - DNA, 15 bp, Homo sapiens
ttggggaaaaaaagt

SEQ ID NO: 22480 - DNA, 15 bp, Homo sapiens
attggggaaaaaaag

SEQ ID NO: 22481 - DNA, 15 bp, Homo sapiens
tattggggaaaaaaa

SEQ ID NO: 22482 - DNA, 15 bp, Homo sapiens
ttattggggaaaaaa

SEQ ID NO: 22483 - DNA, 15 bp, Homo sapiens
cttattggggaaaaa

SEQ ID NO: 22484 - DNA, 15 bp, Homo sapiens
tcttattggggaaaa

SEQ ID NO: 22485 - DNA, 15 bp, Homo sapiens
atcttattggggaaa

SEQ ID NO: 22486 - DNA, 15 bp, Homo sapiens
tatcttattggggaa

SEQ ID NO: 22487 - DNA, 15 bp, Homo sapiens
atatcttattgggga

SEQ ID NO: 22488 - DNA, 15 bp, Homo sapiens
gatatcttattgggg

SEQ ID NO: 22489 - DNA, 15 bp, Homo sapiens
agatatcttattggg

SEQ ID NO: 22490 - DNA, 15 bp, Homo sapiens
aagatatcttattgg

SEQ ID NO: 22491 - DNA, 15 bp, Homo sapiens
aaagatatcttattg

SEQ ID NO: 22492 - DNA, 15 bp, Homo sapiens
aaaagatatcttatt

SEQ ID NO: 22493 - DNA, 15 bp, Homo sapiens
taaaagatatcttat

SEQ ID NO: 22494 - DNA, 15 bp, Homo sapiens
ataaaagatatctta

SEQ ID NO: 22495 - DNA, 15 bp, Homo sapiens
aataaaagatatctt

SEQ ID NO: 22496 - DNA, 15 bp, Homo sapiens
aaataaaagatatct

SEQ ID NO: 22497 - DNA, 15 bp, Homo sapiens
gaaataaaagatatc

SEQ ID NO: 22498 - DNA, 15 bp, Homo sapiens
agaaataaaagatat

SEQ ID NO: 22499 - DNA, 15 bp, Homo sapiens
aagaaataaaagata

SEQ ID NO: 22500 - DNA, 15 bp, Homo sapiens
taagaaataaaagat

SEQ ID NO: 22501 - DNA, 15 bp, Homo sapiens
ataagaaataaaaga

SEQ ID NO: 22502 - DNA, 15 bp, Homo sapiens
gataagaaataaaag

SEQ ID NO: 22503 - DNA, 15 bp, Homo sapiens
agataagaaataaaa

SEQ ID NO: 22504 - DNA, 15 bp, Homo sapiens
tagataagaaataaa

SEQ ID NO: 22505 - DNA, 15 bp, Homo sapiens
ttagataagaaataa

SEQ ID NO: 22506 - DNA, 15 bp, Homo sapiens
cttagataagaaata

SEQ ID NO: 22507 - DNA, 15 bp, Homo sapiens
tcttagataagaaat

SEQ ID NO: 22508 - DNA, 15 bp, Homo sapiens
ttcttagataagaaa

SEQ ID NO: 22509 - DNA, 15 bp, Homo sapiens
cttcttagataagaa

SEQ ID NO: 22510 - DNA, 15 bp, Homo sapiens
gcttcttagataaga

SEQ ID NO: 22511 - DNA, 15 bp, Homo sapiens
agcttcttagataag

SEQ ID NO: 22512 - DNA, 15 bp, Homo sapiens
tagcttcttagataa

SEQ ID NO: 22513 - DNA, 15 bp, Homo sapiens
gtagcttcttagata

SEQ ID NO: 22514 - DNA, 15 bp, Homo sapiens
cgtagcttcttagat

SEQ ID NO: 22515 - DNA, 15 bp, Homo sapiens
gcgtagcttcttaga

SEQ ID NO: 22516 - DNA, 15 bp, Homo sapiens
tgcgtagcttcttag

SEQ ID NO: 22517 - DNA, 15 bp, Homo sapiens
atgcgtagcttctta

SEQ ID NO: 22518 - DNA, 15 bp, Homo sapiens
tatgcgtagcttctt

SEQ ID NO: 22519 - DNA, 15 bp, Homo sapiens
ctatgcgtagcttct

SEQ ID NO: 22520 - DNA, 15 bp, Homo sapiens
actatgcgtagcttc

SEQ ID NO: 22521 - DNA, 15 bp, Homo sapiens
gactatgcgtagctt

SEQ ID NO: 22522 - DNA, 15 bp, Homo sapiens
tgactatgcgtagct

SEQ ID NO: 22523 - DNA, 15 bp, Homo sapiens
atgactatgcgtagc

SEQ ID NO: 22524 - DNA, 15 bp, Homo sapiens
aatgactatgcgtag

SEQ ID NO: 22525 - DNA, 15 bp, Homo sapiens
caatgactatgcgta

SEQ ID NO: 22526 - DNA, 15 bp, Homo sapiens
acaatgactatgcgt

SEQ ID NO: 22527 - DNA, 15 bp, Homo sapiens
cacaatgactatgcg

SEQ ID NO: 22528 - DNA, 15 bp, Homo sapiens
tcacaatgactatgc

SEQ ID NO: 22529 - DNA, 15 bp, Homo sapiens
ttcacaatgactatg

SEQ ID NO: 22530 - DNA, 15 bp, Homo sapiens
tttcacaatgactat

SEQ ID NO: 22531 - DNA, 15 bp, Homo sapiens
ctttcacaatgacta

SEQ ID NO: 22532 - DNA, 15 bp, Homo sapiens
tctttcacaatgact

SEQ ID NO: 22533 - DNA, 15 bp, Homo sapiens
ttctttcacaatgac

SEQ ID NO: 22534 - DNA, 15 bp, Homo sapiens
tttctttcacaatga

SEQ ID NO: 22535 - DNA, 15 bp, Homo sapiens
ttttctttcacaatg

SEQ ID NO: 22536 - DNA, 15 bp, Homo sapiens
tttttctttcacaat

SEQ ID NO: 22537 - DNA, 15 bp, Homo sapiens
ttttttctttcacaa

SEQ ID NO: 22538 - DNA, 15 bp, Homo sapiens
tttttttctttcaca

SEQ ID NO: 22539 - DNA, 15 bp, Homo sapiens
ttttttttctttcac

SEQ ID NO: 22540 - DNA, 15 bp, Homo sapiens
cttttttttctttca

SEQ ID NO: 22541 - DNA, 15 bp, Homo sapiens
ccttttttttctttc

SEQ ID NO: 22542 - DNA, 15 bp, Homo sapiens
tccttttttttcttt

SEQ ID NO: 22543 - DNA, 15 bp, Homo sapiens
ttccttttttttctt

SEQ ID NO: 22544 - DNA, 15 bp, Homo sapiens
cttccttttttttct

SEQ ID NO: 22545 - DNA, 15 bp, Homo sapiens
ccttccttttttttc

SEQ ID NO: 22546 - DNA, 15 bp, Homo sapiens
cccttcctttttttt

SEQ ID NO: 22547 - DNA, 15 bp, Homo sapiens
tcccttccttttttt

SEQ ID NO: 22548 - DNA, 15 bp, Homo sapiens
ctcccttcctttttt

SEQ ID NO: 22549 - DNA, 15 bp, Homo sapiens
cctcccttccttttt

SEQ ID NO: 22550 - DNA, 15 bp, Homo sapiens
tcctcccttcctttt

SEQ ID NO: 22551 - DNA, 15 bp, Homo sapiens
ttcctcccttccttt

SEQ ID NO: 22552 - DNA, 15 bp, Homo sapiens
cttcctcccttcctt

SEQ ID NO: 22553 - DNA, 15 bp, Homo sapiens
tccttcctcccttcc

SEQ ID NO: 22554 - DNA, 15 bp, Homo sapiens
ttccttcctcccttc

SEQ ID NO: 22555 - DNA, 15 bp, Homo sapiens
cttccttcctccctt

SEQ ID NO: 22556 - DNA, 15 bp, Homo sapiens
ccttccttcctccct

SEQ ID NO: 22557 - DNA, 15 bp, Homo sapiens
cccttccttcctccc

SEQ ID NO: 22558 - DNA, 15 bp, Homo sapiens
tcccttccttcctcc

SEQ ID NO: 22559 - DNA, 15 bp, Homo sapiens
ctcccttccttcctc

SEQ ID NO: 22560 - DNA, 15 bp, Homo sapiens
cctcccttccttcct

SEQ ID NO: 22561 - DNA, 15 bp, Homo sapiens
tcctcccttccttcc

SEQ ID NO: 22562 - DNA, 15 bp, Homo sapiens
ttcctcccttccttc

SEQ ID NO: 22563 - DNA, 15 bp, Homo sapiens
tccttccttcctccc

SEQ ID NO: 22564 - DNA, 15 bp, Homo sapiens
ttccttccttcctcc

SEQ ID NO: 22565 - DNA, 15 bp, Homo sapiens
cttccttccttcctc

SEQ ID NO: 22566 - DNA, 15 bp, Homo sapiens
ccttccttccttcct

SEQ ID NO: 22567 - DNA, 15 bp, Homo sapiens
tccttccttccttcc

SEQ ID NO: 22568 - DNA, 15 bp, Homo sapiens
ttccttccttccttc

SEQ ID NO: 22569 - DNA, 15 bp, Homo sapiens
cttccttccttcctt

SEQ ID NO: 22570 - DNA, 15 bp, Homo sapiens
tttccttccttcctt

SEQ ID NO: 22571 - DNA, 15 bp, Homo sapiens
ctttccttccttcct

SEQ ID NO: 22572 - DNA, 15 bp, Homo sapiens
tctttccttccttcc

SEQ ID NO: 22573 - DNA, 15 bp, Homo sapiens
ttctttccttccttc

SEQ ID NO: 22574 - DNA, 15 bp, Homo sapiens
cttctttccttcctt

SEQ ID NO: 22575 - DNA, 15 bp, Homo sapiens
ccttctttccttcct

SEQ ID NO: 22576 - DNA, 15 bp, Homo sapiens
cccttctttccttcc

SEQ ID NO: 22577 - DNA, 15 bp, Homo sapiens
tcccttctttccttc

SEQ ID NO: 22578 - DNA, 15 bp, Homo sapiens
ctcccttctttcctt

SEQ ID NO: 22579 - DNA, 15 bp, Homo sapiens
cctcccttctttcct

SEQ ID NO: 22580 - DNA, 15 bp, Homo sapiens
ccctcccttctttcc

SEQ ID NO: 22581 - DNA, 15 bp, Homo sapiens
tccctcccttctttc

SEQ ID NO: 22582 - DNA, 15 bp, Homo sapiens
ctccctcccttcttt

SEQ ID NO: 22583 - DNA, 15 bp, Homo sapiens
cctccctcccttctt

SEQ ID NO: 22584 - DNA, 15 bp, Homo sapiens
ccctccctcccttct

SEQ ID NO: 22585 - DNA, 15 bp, Homo sapiens
tccctccctcccttc

SEQ ID NO: 22586 - DNA, 15 bp, Homo sapiens
ctccctccctccctt

SEQ ID NO: 22587 - DNA, 15 bp, Homo sapiens
cctccctccctccct

SEQ ID NO: 22588 - DNA, 15 bp, Homo sapiens
ccctccctccctccc

SEQ ID NO: 22589 - DNA, 15 bp, Homo sapiens
cccctccctccctcc

SEQ ID NO: 22590 - DNA, 15 bp, Homo sapiens
tcccctccctccctc

SEQ ID NO: 22591 - DNA, 15 bp, Homo sapiens
ctcccctccctccct

SEQ ID NO: 22592 - DNA, 15 bp, Homo sapiens
tctcccctccctccc

SEQ ID NO: 22593 - DNA, 15 bp, Homo sapiens
ttctcccctccctcc

SEQ ID NO: 22594 - DNA, 15 bp, Homo sapiens
cttctcccctccctc

SEQ ID NO: 22595 - DNA, 15 bp, Homo sapiens
ccttctcccctccct

SEQ ID NO: 22596 - DNA, 15 bp, Homo sapiens
tccttctcccctccc

SEQ ID NO: 22597 - DNA, 15 bp, Homo sapiens
ttccttctcccctcc

SEQ ID NO: 22598 - DNA, 15 bp, Homo sapiens
cttccttctcccctc

SEQ ID NO: 22599 - DNA, 15 bp, Homo sapiens
gcttccttctcccct

SEQ ID NO: 22600 - DNA, 15 bp, Homo sapiens
cgcttccttctcccc

SEQ ID NO: 22601 - DNA, 15 bp, Homo sapiens
tcgcttccttctccc

SEQ ID NO: 22602 - DNA, 15 bp, Homo sapiens
ctcgcttccttctcc

SEQ ID NO: 22603 - DNA, 15 bp, Homo sapiens
cctcgcttccttctc

SEQ ID NO: 22604 - DNA, 15 bp, Homo sapiens
ccctcgcttccttct

SEQ ID NO: 22605 - DNA, 15 bp, Homo sapiens
tccctcgcttccttc

SEQ ID NO: 22606 - DNA, 15 bp, Homo sapiens
ctccctcgcttcctt

SEQ ID NO: 22607 - DNA, 15 bp, Homo sapiens
cctccctcgcttcct

SEQ ID NO: 22608 - DNA, 15 bp, Homo sapiens
ccctccctcgcttcc

SEQ ID NO: 22609 - DNA, 15 bp, Homo sapiens
tccctccctcgcttc

SEQ ID NO: 22610 - DNA, 15 bp, Homo sapiens
ctccctccctcgctt

SEQ ID NO: 22611 - DNA, 15 bp, Homo sapiens
cctccctccctcgct

SEQ ID NO: 22612 - DNA, 15 bp, Homo sapiens
ccctccctccctcgc

SEQ ID NO: 22613 - DNA, 15 bp, Homo sapiens
tccctccctccctcg

SEQ ID NO: 22614 - DNA, 15 bp, Homo sapiens
ctccctccctccctc

SEQ ID NO: 22615 - DNA, 15 bp, Homo sapiens
ccttccttctcccct

SEQ ID NO: 22616 - DNA, 15 bp, Homo sapiens
cccttccttctcccc

SEQ ID NO: 22617 - DNA, 15 bp, Homo sapiens
tcccttccttctccc

SEQ ID NO: 22618 - DNA, 15 bp, Homo sapiens
ttcccttccttctcc

SEQ ID NO: 22619 - DNA, 15 bp, Homo sapiens
gttcccttccttctc

SEQ ID NO: 22620 - DNA, 15 bp, Homo sapiens
tgttcccttccttct

SEQ ID NO: 22621 - DNA, 15 bp, Homo sapiens
ctgttcccttccttc

SEQ ID NO: 22622 - DNA, 15 bp, Homo sapiens
cctgttcccttcctt

SEQ ID NO: 22623 - DNA, 15 bp, Homo sapiens
tcctgttcccttcct

SEQ ID NO: 22624 - DNA, 15 bp, Homo sapiens
ctcctgttcccttcc

SEQ ID NO: 22625 - DNA, 15 bp, Homo sapiens
cctcctgttcccttc

SEQ ID NO: 22626 - DNA, 15 bp, Homo sapiens
ccctcctgttccctt

SEQ ID NO: 22627 - DNA, 15 bp, Homo sapiens
tccctcctgttccct

SEQ ID NO: 22628 - DNA, 15 bp, Homo sapiens
ctccctcctgttccc

SEQ ID NO: 22629 - DNA, 15 bp, Homo sapiens
cctccctcctgttcc

SEQ ID NO: 22630 - DNA, 15 bp, Homo sapiens
tcctccctcctgttc

SEQ ID NO: 22631 - DNA, 15 bp, Homo sapiens
ttcctccctcctgtt

SEQ ID NO: 22632 - DNA, 15 bp, Homo sapiens
tttcctccctcctgt

SEQ ID NO: 22633 - DNA, 15 bp, Homo sapiens
ttttcctccctcctg

SEQ ID NO: 22634 - DNA, 15 bp, Homo sapiens
cttttcctccctcct

SEQ ID NO: 22635 - DNA, 15 bp, Homo sapiens
ccttttcctccctcc

SEQ ID NO: 22636 - DNA, 15 bp, Homo sapiens
cccttttcctccctc

SEQ ID NO: 22637 - DNA, 15 bp, Homo sapiens
tcccttttcctccct

SEQ ID NO: 22638 - DNA, 15 bp, Homo sapiens
ttcccttttcctccc

SEQ ID NO: 22639 - DNA, 15 bp, Homo sapiens
cttcccttttcctcc

SEQ ID NO: 22640 - DNA, 15 bp, Homo sapiens
ccttcccttttcctc

SEQ ID NO: 22641 - DNA, 15 bp, Homo sapiens
cccttcccttttcct

SEQ ID NO: 22642 - DNA, 15 bp, Homo sapiens
cttccccttcccttt

SEQ ID NO: 22643 - DNA, 15 bp, Homo sapiens
ccttccccttccctt

SEQ ID NO: 22644 - DNA, 15 bp, Homo sapiens
tccttccccttccct

SEQ ID NO: 22645 - DNA, 15 bp, Homo sapiens
ctccttccccttccc

SEQ ID NO: 22646 - DNA, 15 bp, Homo sapiens
cctccttccccttcc

SEQ ID NO: 22647 - DNA, 15 bp, Homo sapiens
tcctccttccccttc

SEQ ID NO: 22648 - DNA, 15 bp, Homo sapiens
ttcctccttcccctt

SEQ ID NO: 22649 - DNA, 15 bp, Homo sapiens
cttcctccttcccct

SEQ ID NO: 22650 - DNA, 15 bp, Homo sapiens
ccttcctccttcccc

SEQ ID NO: 22651 - DNA, 15 bp, Homo sapiens
tccttcctccttccc

SEQ ID NO: 22652 - DNA, 15 bp, Homo sapiens
ttccttcctccttcc

SEQ ID NO: 22653 - DNA, 15 bp, Homo sapiens
tttccttcctccttc

SEQ ID NO: 22654 - DNA, 15 bp, Homo sapiens
ctttccttcctcctt

SEQ ID NO: 22655 - DNA, 15 bp, Homo sapiens
cctttccttcctcct

SEQ ID NO: 22656 - DNA, 15 bp, Homo sapiens
ccctttccttcctcc

SEQ ID NO: 22657 - DNA, 15 bp, Homo sapiens
tccctttccttcctc

SEQ ID NO: 22658 - DNA, 15 bp, Homo sapiens
ttccctttccttcct

SEQ ID NO: 22659 - DNA, 15 bp, Homo sapiens
cttccctttccttcc

SEQ ID NO: 22660 - DNA, 15 bp, Homo sapiens
ccttccctttccttc

SEQ ID NO: 22661 - DNA, 15 bp, Homo sapiens
tccttccctttcctt

SEQ ID NO: 22662 - DNA, 15 bp, Homo sapiens
ctccttccctttcct

SEQ ID NO: 22663 - DNA, 15 bp, Homo sapiens
cctccttccctttcc

SEQ ID NO: 22664 - DNA, 15 bp, Homo sapiens
ccctccttccctttc

SEQ ID NO: 22665 - DNA, 15 bp, Homo sapiens
tccctccttcccttt

SEQ ID NO: 22666 - DNA, 15 bp, Homo sapiens
ctccctccttccctt

SEQ ID NO: 22667 - DNA, 15 bp, Homo sapiens
cctccctccttccct

SEQ ID NO: 22668 - DNA, 15 bp, Homo sapiens
tcctccctccttccc

SEQ ID NO: 22669 - DNA, 15 bp, Homo sapiens
ttcctccctccttcc

SEQ ID NO: 22670 - DNA, 15 bp, Homo sapiens
cttcctccctccttc

SEQ ID NO: 22671 - DNA, 15 bp, Homo sapiens
acttcctccctcctt

SEQ ID NO: 22672 - DNA, 15 bp, Homo sapiens
tacttcctccctcct

SEQ ID NO: 22673 - DNA, 15 bp, Homo sapiens
ttacttcctccctcc

SEQ ID NO: 22674 - DNA, 15 bp, Homo sapiens
tttacttcctccctc

SEQ ID NO: 22675 - DNA, 15 bp, Homo sapiens
atttacttcctccct

SEQ ID NO: 22676 - DNA, 15 bp, Homo sapiens
tatttacttcctccc

SEQ ID NO: 22677 - DNA, 15 bp, Homo sapiens
atatttacttcctcc

SEQ ID NO: 22678 - DNA, 15 bp, Homo sapiens
tatatttacttcctc

SEQ ID NO: 22679 - DNA, 15 bp, Homo sapiens
ctatatttacttcct

SEQ ID NO: 22680 - DNA, 15 bp, Homo sapiens
cctatatttacttcc

SEQ ID NO: 22681 - DNA, 15 bp, Homo sapiens
acctatatttacttc

SEQ ID NO: 22682 - DNA, 15 bp, Homo sapiens
tacctatatttactt

SEQ ID NO: 22683 - DNA, 15 bp, Homo sapiens
ttacctatatttact

SEQ ID NO: 22684 - DNA, 15 bp, Homo sapiens
tttacctatatttac

SEQ ID NO: 22685 - DNA, 15 bp, Homo sapiens
gtttacctatattta

SEQ ID NO: 22686 - DNA, 15 bp, Homo sapiens
tgtttacctatattt

SEQ ID NO: 22687 - DNA, 15 bp, Homo sapiens
ttgtttacctatatt

SEQ ID NO: 22688 - DNA, 15 bp, Homo sapiens
tttgtttacctatat

SEQ ID NO: 22689 - DNA, 15 bp, Homo sapiens
ttttgtttacctata

SEQ ID NO: 22690 - DNA, 15 bp, Homo sapiens
tttttgtttacctat

SEQ ID NO: 22691 - DNA, 15 bp, Homo sapiens
ttttttgtttaccta

SEQ ID NO: 22692 - DNA, 15 bp, Homo sapiens
attttttgtttacct

SEQ ID NO: 22693 - DNA, 15 bp, Homo sapiens
aattttttgtttacc

SEQ ID NO: 22694 - DNA, 15 bp, Homo sapiens
caattttttgtttac

SEQ ID NO: 22695 - DNA, 15 bp, Homo sapiens
tcaattttttgttta

SEQ ID NO: 22696 - DNA, 15 bp, Homo sapiens
ttcaattttttgttt

SEQ ID NO: 22697 - DNA, 15 bp, Homo sapiens
tttcaattttttgtt

SEQ ID NO: 22698 - DNA, 15 bp, Homo sapiens
ttttcaattttttgt

SEQ ID NO: 22699 - DNA, 15 bp, Homo sapiens
attttcaattttttg

SEQ ID NO: 22700 - DNA, 15 bp, Homo sapiens
tattttcaatttttt

SEQ ID NO: 22701 - DNA, 15 bp, Homo sapiens
ttattttcaattttt

SEQ ID NO: 22702 - DNA, 15 bp, Homo sapiens
tttattttcaatttt

SEQ ID NO: 22703 - DNA, 15 bp, Homo sapiens
ttttattttcaattt

SEQ ID NO: 22704 - DNA, 15 bp, Homo sapiens
cttttattttcaatt

SEQ ID NO: 22705 - DNA, 15 bp, Homo sapiens
acttttattttcaat

SEQ ID NO: 22706 - DNA, 15 bp, Homo sapiens
gacttttattttcaa

SEQ ID NO: 22707 - DNA, 15 bp, Homo sapiens
tgacttttattttca

SEQ ID NO: 22708 - DNA, 15 bp, Homo sapiens
gtgacttttattttc

SEQ ID NO: 22709 - DNA, 15 bp, Homo sapiens
ggtgacttttatttt

SEQ ID NO: 22710 - DNA, 15 bp, Homo sapiens
aggtgacttttattt

SEQ ID NO: 22711 - DNA, 15 bp, Homo sapiens
caggtgacttttatt

SEQ ID NO: 22712 - DNA, 15 bp, Homo sapiens
acaggtgacttttat

SEQ ID NO: 22713 - DNA, 15 bp, Homo sapiens
tacaggtgactttta

SEQ ID NO: 22714 - DNA, 15 bp, Homo sapiens
ttacaggtgactttt

SEQ ID NO: 22715 - DNA, 15 bp, Homo sapiens
attacaggtgacttt

SEQ ID NO: 22716 - DNA, 15 bp, Homo sapiens
aattacaggtgactt

SEQ ID NO: 22717 - DNA, 15 bp, Homo sapiens
aaattacaggtgact

SEQ ID NO: 22718 - DNA, 15 bp, Homo sapiens
gaaattacaggtgac

SEQ ID NO: 22719 - DNA, 15 bp, Homo sapiens
tgaaattacaggtga

SEQ ID NO: 22720 - DNA, 15 bp, Homo sapiens
gtgaaattacaggtg

SEQ ID NO: 22721 - DNA, 15 bp, Homo sapiens
agtgaaattacaggt

SEQ ID NO: 22722 - DNA, 15 bp, Homo sapiens
tagtgaaattacagg

SEQ ID NO: 22723 - DNA, 15 bp, Homo sapiens
gtagtgaaattacag

SEQ ID NO: 22724 - DNA, 15 bp, Homo sapiens
agtagtgaaattaca

SEQ ID NO: 22725 - DNA, 15 bp, Homo sapiens
gagtagtgaaattac

SEQ ID NO: 22726 - DNA, 15 bp, Homo sapiens
tgagtagtgaaatta

SEQ ID NO: 22727 - DNA, 15 bp, Homo sapiens
ctgagtagtgaaatt

SEQ ID NO: 22728 - DNA, 15 bp, Homo sapiens
tctgagtagtgaaat

SEQ ID NO: 22729 - DNA, 15 bp, Homo sapiens
ctctgagtagtgaaa

SEQ ID NO: 22730 - DNA, 15 bp, Homo sapiens
tctctgagtagtgaa

SEQ ID NO: 22731 - DNA, 15 bp, Homo sapiens
atctctgagtagtga

SEQ ID NO: 22732 - DNA, 15 bp, Homo sapiens
tatctctgagtagtg

SEQ ID NO: 22733 - DNA, 15 bp, Homo sapiens
ttatctctgagtagt

SEQ ID NO: 22734 - DNA, 15 bp, Homo sapiens
gttatctctgagtag

SEQ ID NO: 22735 - DNA, 15 bp, Homo sapiens
ggttatctctgagta

SEQ ID NO: 22736 - DNA, 15 bp, Homo sapiens
cggttatctctgagt

SEQ ID NO: 22737 - DNA, 15 bp, Homo sapiens
gcggttatctctgag

SEQ ID NO: 22738 - DNA, 15 bp, Homo sapiens
agcggttatctctga

SEQ ID NO: 22739 - DNA, 15 bp, Homo sapiens
cagcggttatctctg

SEQ ID NO: 22740 - DNA, 15 bp, Homo sapiens
tcagcggttatctct

SEQ ID NO: 22741 - DNA, 15 bp, Homo sapiens
ctcagcggttatctc

SEQ ID NO: 22742 - DNA, 15 bp, Homo sapiens
actcagcggttatct

SEQ ID NO: 22743 - DNA, 15 bp, Homo sapiens
aactcagcggttatc

SEQ ID NO: 22744 - DNA, 15 bp, Homo sapiens
taactcagcggttat

SEQ ID NO: 22745 - DNA, 15 bp, Homo sapiens
ataactcagcggtta

SEQ ID NO: 22746 - DNA, 15 bp, Homo sapiens
tataactcagcggtt

SEQ ID NO: 22747 - DNA, 15 bp, Homo sapiens
ttataactcagcggt

SEQ ID NO: 22748 - DNA, 15 bp, Homo sapiens
gttataactcagcgg

SEQ ID NO: 22749 - DNA, 15 bp, Homo sapiens
tgttataactcagcg

SEQ ID NO: 22750 - DNA, 15 bp, Homo sapiens
atgttataactcagc

SEQ ID NO: 22751 - DNA, 15 bp, Homo sapiens
aatgttataactcag

SEQ ID NO: 22752 - DNA, 15 bp, Homo sapiens
caatgttataactca

SEQ ID NO: 22753 - DNA, 15 bp, Homo sapiens
ccaatgttataactc

SEQ ID NO: 22754 - DNA, 15 bp, Homo sapiens
accaatgttataact

SEQ ID NO: 22755 - DNA, 15 bp, Homo sapiens
taccaatgttataac

SEQ ID NO: 22756 - DNA, 15 bp, Homo sapiens
ataccaatgttataa

SEQ ID NO: 22757 - DNA, 15 bp, Homo sapiens
tataccaatgttata

SEQ ID NO: 22758 - DNA, 15 bp, Homo sapiens
atataccaatgttat

SEQ ID NO: 22759 - DNA, 15 bp, Homo sapiens
tatataccaatgtta

SEQ ID NO: 22760 - DNA, 15 bp, Homo sapiens
ttatataccaatgtt

SEQ ID NO: 22761 - DNA, 15 bp, Homo sapiens
attatataccaatgt

SEQ ID NO: 22762 - DNA, 15 bp, Homo sapiens
aattatataccaatg

SEQ ID NO: 22763 - DNA, 15 bp, Homo sapiens
aaattatataccaat

SEQ ID NO: 22764 - DNA, 15 bp, Homo sapiens
aaaattatataccaa

SEQ ID NO: 22765 - DNA, 15 bp, Homo sapiens
aaaaattatatacca

SEQ ID NO: 22766 - DNA, 15 bp, Homo sapiens
aaaaaattatatacc

SEQ ID NO: 22767 - DNA, 15 bp, Homo sapiens
taaaaaattatatac

SEQ ID NO: 22768 - DNA, 15 bp, Homo sapiens
ctaaaaaattatata

SEQ ID NO: 22769 - DNA, 15 bp, Homo sapiens
tctaaaaaattatat

SEQ ID NO: 22770 - DNA, 15 bp, Homo sapiens
ttctaaaaaattata

SEQ ID NO: 22771 - DNA, 15 bp, Homo sapiens
gttctaaaaaattat

SEQ ID NO: 22772 - DNA, 15 bp, Homo sapiens
agttctaaaaaatta

SEQ ID NO: 22773 - DNA, 15 bp, Homo sapiens
aagttctaaaaaatt

SEQ ID NO: 22774 - DNA, 15 bp, Homo sapiens
aaagttctaaaaaat

SEQ ID NO: 22775 - DNA, 15 bp, Homo sapiens
gaaagttctaaaaaa

SEQ ID NO: 22776 - DNA, 15 bp, Homo sapiens
agaaagttctaaaaa

SEQ ID NO: 22777 - DNA, 15 bp, Homo sapiens
gagaaagttctaaaa

SEQ ID NO: 22778 - DNA, 15 bp, Homo sapiens
ggagaaagttctaaa

SEQ ID NO: 22779 - DNA, 15 bp, Homo sapiens
aggagaaagttctaa

SEQ ID NO: 22780 - DNA, 15 bp, Homo sapiens
taggagaaagttcta

SEQ ID NO: 22781 - DNA, 15 bp, Homo sapiens
ataggagaaagttct

SEQ ID NO: 22782 - DNA, 15 bp, Homo sapiens
tataggagaaagttc

SEQ ID NO: 22783 - DNA, 15 bp, Homo sapiens
gtataggagaaagtt

SEQ ID NO: 22784 - DNA, 15 bp, Homo sapiens
tgtataggagaaagt

SEQ ID NO: 22785 - DNA, 15 bp, Homo sapiens
atgtataggagaaag

SEQ ID NO: 22786 - DNA, 15 bp, Homo sapiens
catgtataggagaaa

SEQ ID NO: 22787 - DNA, 15 bp, Homo sapiens
acatgtataggagaa

SEQ ID NO: 22788 - DNA, 15 bp, Homo sapiens
tacatgtataggaga

SEQ ID NO: 22789 - DNA, 15 bp, Homo sapiens
atacatgtataggag

SEQ ID NO: 22790 - DNA, 15 bp, Homo sapiens
tatacatgtatagga

SEQ ID NO: 22791 - DNA, 15 bp, Homo sapiens
ctatacatgtatagg

SEQ ID NO: 22792 - DNA, 15 bp, Homo sapiens
tctatacatgtatag

SEQ ID NO: 22793 - DNA, 15 bp, Homo sapiens
atctatacatgtata

SEQ ID NO: 22794 - DNA, 15 bp, Homo sapiens
tatctatacatgtat

SEQ ID NO: 22795 - DNA, 15 bp, Homo sapiens
ctatctatacatgta

SEQ ID NO: 22796 - DNA, 15 bp, Homo sapiens
tctatctatacatgt

SEQ ID NO: 22797 - DNA, 15 bp, Homo sapiens
atctatctatacatg

SEQ ID NO: 22798 - DNA, 15 bp, Homo sapiens
tatctatctatacat

SEQ ID NO: 22799 - DNA, 15 bp, Homo sapiens
ttatctatctataca

SEQ ID NO: 22800 - DNA, 15 bp, Homo sapiens
tttatctatctatac

SEQ ID NO: 22801 - DNA, 15 bp, Homo sapiens
gtttatctatctata

SEQ ID NO: 22802 - DNA, 15 bp, Homo sapiens
tgtttatctatctat

SEQ ID NO: 22803 - DNA, 15 bp, Homo sapiens
gtgtttatctatcta

SEQ ID NO: 22804 - DNA, 15 bp, Homo sapiens
tgtgtttatctatct

SEQ ID NO: 22805 - DNA, 15 bp, Homo sapiens
atgtgtttatctatc

SEQ ID NO: 22806 - DNA, 15 bp, Homo sapiens
tatgtgtttatctat

SEQ ID NO: 22807 - DNA, 15 bp, Homo sapiens
atatgtgtttatcta

SEQ ID NO: 22808 - DNA, 15 bp, Homo sapiens
tatatgtgtttatct

SEQ ID NO: 22809 - DNA, 15 bp, Homo sapiens
gtatatgtgtttatc

SEQ ID NO: 22810 - DNA, 15 bp, Homo sapiens
agtatatgtgtttat

SEQ ID NO: 22811 - DNA, 15 bp, Homo sapiens
aagtatatgtgttta

SEQ ID NO: 22812 - DNA, 15 bp, Homo sapiens
gaagtatatgtgttt

SEQ ID NO: 22813 - DNA, 15 bp, Homo sapiens
tgaagtatatgtgtt

SEQ ID NO: 22814 - DNA, 15 bp, Homo sapiens
ttgaagtatatgtgt

SEQ ID NO: 22815 - DNA, 15 bp, Homo sapiens
tttgaagtatatgtg

SEQ ID NO: 22816 - DNA, 15 bp, Homo sapiens
ttttgaagtatatgt

SEQ ID NO: 22817 - DNA, 15 bp, Homo sapiens
attttgaagtatatg

SEQ ID NO: 22818 - DNA, 15 bp, Homo sapiens
cattttgaagtatat

SEQ ID NO: 22819 - DNA, 15 bp, Homo sapiens
tcattttgaagtata

SEQ ID NO: 22820 - DNA, 15 bp, Homo sapiens
atcattttgaagtat

SEQ ID NO: 22821 - DNA, 15 bp, Homo sapiens
tatcattttgaagta

SEQ ID NO: 22822 - DNA, 15 bp, Homo sapiens
ttatcattttgaagt

SEQ ID NO: 22823 - DNA, 15 bp, Homo sapiens
tttatcattttgaag

SEQ ID NO: 22824 - DNA, 15 bp, Homo sapiens
ctttatcattttgaa

SEQ ID NO: 22825 - DNA, 15 bp, Homo sapiens
tctttatcattttga

SEQ ID NO: 22826 - DNA, 15 bp, Homo sapiens
ttctttatcattttg

SEQ ID NO: 22827 - DNA, 15 bp, Homo sapiens
attctttatcatttt

SEQ ID NO: 22828 - DNA, 15 bp, Homo sapiens
tattctttatcattt

SEQ ID NO: 22829 - DNA, 15 bp, Homo sapiens
ctattctttatcatt

SEQ ID NO: 22830 - DNA, 15 bp, Homo sapiens
actattctttatcat

SEQ ID NO: 22831 - DNA, 15 bp, Homo sapiens
tactattctttatca

SEQ ID NO: 22832 - DNA, 15 bp, Homo sapiens
ttactattctttatc

SEQ ID NO: 22833 - DNA, 15 bp, Homo sapiens
tttactattctttat

SEQ ID NO: 22834 - DNA, 15 bp, Homo sapiens
ttttactattcttta

SEQ ID NO: 22835 - DNA, 15 bp, Homo sapiens
gttttactattcttt

SEQ ID NO: 22836 - DNA, 15 bp, Homo sapiens
agttttactattctt

SEQ ID NO: 22837 - DNA, 15 bp, Homo sapiens
tagttttactattct

SEQ ID NO: 22838 - DNA, 15 bp, Homo sapiens
atagttttactattc

SEQ ID NO: 22839 - DNA, 15 bp, Homo sapiens
catagttttactatt

SEQ ID NO: 22840 - DNA, 15 bp, Homo sapiens
gcatagttttactat

SEQ ID NO: 22841 - DNA, 15 bp, Homo sapiens
tgcatagttttacta

SEQ ID NO: 22842 - DNA, 15 bp, Homo sapiens
atgcatagttttact

SEQ ID NO: 22843 - DNA, 15 bp, Homo sapiens
tatgcatagttttac

SEQ ID NO: 22844 - DNA, 15 bp, Homo sapiens
gtatgcatagtttta

SEQ ID NO: 22845 - DNA, 15 bp, Homo sapiens
tgtatgcatagtttt

SEQ ID NO: 22846 - DNA, 15 bp, Homo sapiens
ttgtatgcatagttt

SEQ ID NO: 22847 - DNA, 15 bp, Homo sapiens
attgtatgcatagtt

SEQ ID NO: 22848 - DNA, 15 bp, Homo sapiens
aattgtatgcatagt

SEQ ID NO: 22849 - DNA, 15 bp, Homo sapiens
aaattgtatgcatag

SEQ ID NO: 22850 - DNA, 15 bp, Homo sapiens
aaaattgtatgcata

SEQ ID NO: 22851 - DNA, 15 bp, Homo sapiens
taaaattgtatgcat

SEQ ID NO: 22852 - DNA, 15 bp, Homo sapiens
ataaaattgtatgca

SEQ ID NO: 22853 - DNA, 15 bp, Homo sapiens
tataaaattgtatgc

SEQ ID NO: 22854 - DNA, 15 bp, Homo sapiens
ttataaaattgtatg

SEQ ID NO: 22855 - DNA, 15 bp, Homo sapiens
gttataaaattgtat

SEQ ID NO: 22856 - DNA, 15 bp, Homo sapiens
ggttataaaattgta

SEQ ID NO: 22857 - DNA, 15 bp, Homo sapiens
aggttataaaattgt

SEQ ID NO: 22858 - DNA, 15 bp, Homo sapiens
caggttataaaattg

SEQ ID NO: 22859 - DNA, 15 bp, Homo sapiens
tcaggttataaaatt

SEQ ID NO: 22860 - DNA, 15 bp, Homo sapiens
gtcaggttataaaat

SEQ ID NO: 22861 - DNA, 15 bp, Homo sapiens
agtcaggttataaaa

SEQ ID NO: 22862 - DNA, 15 bp, Homo sapiens
aagtcaggttataaa

SEQ ID NO: 22863 - DNA, 15 bp, Homo sapiens
aaagtcaggttataa

SEQ ID NO: 22864 - DNA, 15 bp, Homo sapiens
aaaagtcaggttata

SEQ ID NO: 22865 - DNA, 15 bp, Homo sapiens
aaaaagtcaggttat

SEQ ID NO: 22866 - DNA, 15 bp, Homo sapiens
aaaaaagtcaggtta

SEQ ID NO: 22867 - DNA, 15 bp, Homo sapiens
aaaaaaagtcaggtt

SEQ ID NO: 22868 - DNA, 15 bp, Homo sapiens
aaaaaaaagtcaggt

SEQ ID NO: 22869 - DNA, 15 bp, Homo sapiens
gaaaaaaaagtcagg

SEQ ID NO: 22870 - DNA, 15 bp, Homo sapiens
tgaaaaaaaagtcag

SEQ ID NO: 22871 - DNA, 15 bp, Homo sapiens
ttgaaaaaaaagtca

SEQ ID NO: 22872 - DNA, 15 bp, Homo sapiens
tttgaaaaaaaagtc

SEQ ID NO: 22873 - DNA, 15 bp, Homo sapiens
ttttgaaaaaaaagt

SEQ ID NO: 22874 - DNA, 15 bp, Homo sapiens
tttttgaaaaaaaag

SEQ ID NO: 22875 - DNA, 15 bp, Homo sapiens
ttttttgaaaaaaaa

SEQ ID NO: 22876 - DNA, 15 bp, Homo sapiens
tttttttgaaaaaaa

SEQ ID NO: 22877 - DNA, 15 bp, Homo sapiens
ttttttttgaaaaaa

SEQ ID NO: 22878 - DNA, 15 bp, Homo sapiens
cttttttttgaaaaa

SEQ ID NO: 22879 - DNA, 15 bp, Homo sapiens
ccttttttttgaaaa

SEQ ID NO: 22880 - DNA, 15 bp, Homo sapiens
tccttttttttgaaa

SEQ ID NO: 22881 - DNA, 15 bp, Homo sapiens
atccttttttttgaa

SEQ ID NO: 22882 - DNA, 15 bp, Homo sapiens
aatccttttttttga

SEQ ID NO: 22883 - DNA, 15 bp, Homo sapiens
caatccttttttttg

SEQ ID NO: 22884 - DNA, 15 bp, Homo sapiens
gcaatcctttttttt

SEQ ID NO: 22885 - DNA, 15 bp, Homo sapiens
agcaatccttttttt

SEQ ID NO: 22886 - DNA, 15 bp, Homo sapiens
aagcaatcctttttt

SEQ ID NO: 22887 - DNA, 15 bp, Homo sapiens
aaagcaatccttttt

SEQ ID NO: 22888 - DNA, 15 bp, Homo sapiens
aaaagcaatcctttt

SEQ ID NO: 22889 - DNA, 15 bp, Homo sapiens
aaaaagcaatccttt

SEQ ID NO: 22890 - DNA, 15 bp, Homo sapiens
aaaaaagcaatcctt

SEQ ID NO: 22891 - DNA, 15 bp, Homo sapiens
taaaaaagcaatcct

SEQ ID NO: 22892 - DNA, 15 bp, Homo sapiens
ttaaaaaagcaatcc

SEQ ID NO: 22893 - DNA, 15 bp, Homo sapiens
tttaaaaaagcaatc

SEQ ID NO: 22894 - DNA, 15 bp, Homo sapiens
gtttaaaaaagcaat

SEQ ID NO: 22895 - DNA, 15 bp, Homo sapiens
tgtttaaaaaagcaa

SEQ ID NO: 22896 - DNA, 15 bp, Homo sapiens
atgtttaaaaaagca

SEQ ID NO: 22897 - DNA, 15 bp, Homo sapiens
tatgtttaaaaaagc

SEQ ID NO: 22898 - DNA, 15 bp, Homo sapiens
ttatgtttaaaaaag

SEQ ID NO: 22899 - DNA, 15 bp, Homo sapiens
cttatgtttaaaaaa

SEQ ID NO: 22900 - DNA, 15 bp, Homo sapiens
tcttatgtttaaaaa

SEQ ID NO: 22901 - DNA, 15 bp, Homo sapiens
atcttatgtttaaaa

SEQ ID NO: 22902 - DNA, 15 bp, Homo sapiens
tatcttatgtttaaa

SEQ ID NO: 22903 - DNA, 15 bp, Homo sapiens
atatcttatgtttaa

SEQ ID NO: 22904 - DNA, 15 bp, Homo sapiens
gatatcttatgttta

SEQ ID NO: 22905 - DNA, 15 bp, Homo sapiens
tgatatcttatgttt

SEQ ID NO: 22906 - DNA, 15 bp, Homo sapiens
ctgatatcttatgtt

SEQ ID NO: 22907 - DNA, 15 bp, Homo sapiens
cctgatatcttatgt

SEQ ID NO: 22908 - DNA, 15 bp, Homo sapiens
tcctgatatcttatg

SEQ ID NO: 22909 - DNA, 15 bp, Homo sapiens
ttcctgatatcttat

SEQ ID NO: 22910 - DNA, 15 bp, Homo sapiens
gttcctgatatctta

SEQ ID NO: 22911 - DNA, 15 bp, Homo sapiens
tgttcctgatatctt

SEQ ID NO: 22912 - DNA, 15 bp, Homo sapiens
atgttcctgatatct

SEQ ID NO: 22913 - DNA, 15 bp, Homo sapiens
gatgttcctgatatc

SEQ ID NO: 22914 - DNA, 15 bp, Homo sapiens
agatgttcctgatat

SEQ ID NO: 22915 - DNA, 15 bp, Homo sapiens
aagatgttcctgata

SEQ ID NO: 22916 - DNA, 15 bp, Homo sapiens
aaagatgttcctgat

SEQ ID NO: 22917 - DNA, 15 bp, Homo sapiens
gaaagatgttcctga

SEQ ID NO: 22918 - DNA, 15 bp, Homo sapiens
tgaaagatgttcctg

SEQ ID NO: 22919 - DNA, 15 bp, Homo sapiens
atgaaagatgttcct

SEQ ID NO: 22920 - DNA, 15 bp, Homo sapiens
catgaaagatgttcc

SEQ ID NO: 22921 - DNA, 15 bp, Homo sapiens
acatgaaagatgttc

SEQ ID NO: 22922 - DNA, 15 bp, Homo sapiens
gacatgaaagatgtt

SEQ ID NO: 22923 - DNA, 15 bp, Homo sapiens
tgacatgaaagatgt

SEQ ID NO: 22924 - DNA, 15 bp, Homo sapiens
atgacatgaaagatg

SEQ ID NO: 22925 - DNA, 15 bp, Homo sapiens
aatgacatgaaagat

SEQ ID NO: 22926 - DNA, 15 bp, Homo sapiens
taatgacatgaaaga

SEQ ID NO: 22927 - DNA, 15 bp, Homo sapiens
gtaatgacatgaaag

SEQ ID NO: 22928 - DNA, 15 bp, Homo sapiens
tgtaatgacatgaaa

SEQ ID NO: 22929 - DNA, 15 bp, Homo sapiens
atgtaatgacatgaa

SEQ ID NO: 22930 - DNA, 15 bp, Homo sapiens
tatgtaatgacatga

SEQ ID NO: 22931 - DNA, 15 bp, Homo sapiens
atatgtaatgacatg

SEQ ID NO: 22932 - DNA, 15 bp, Homo sapiens
aatatgtaatgacat

SEQ ID NO: 22933 - DNA, 15 bp, Homo sapiens
gaatatgtaatgaca

SEQ ID NO: 22934 - DNA, 15 bp, Homo sapiens
agaatatgtaatgac

SEQ ID NO: 22935 - DNA, 15 bp, Homo sapiens
aagaatatgtaatga

SEQ ID NO: 22936 - DNA, 15 bp, Homo sapiens
gaagaatatgtaatg

SEQ ID NO: 22937 - DNA, 15 bp, Homo sapiens
agaagaatatgtaat

SEQ ID NO: 22938 - DNA, 15 bp, Homo sapiens
tagaagaatatgtaa

SEQ ID NO: 22939 - DNA, 15 bp, Homo sapiens
atagaagaatatgta

SEQ ID NO: 22940 - DNA, 15 bp, Homo sapiens
tatagaagaatatgt

SEQ ID NO: 22941 - DNA, 15 bp, Homo sapiens
ttatagaagaatatg

SEQ ID NO: 22942 - DNA, 15 bp, Homo sapiens
tttatagaagaatat

SEQ ID NO: 22943 - DNA, 15 bp, Homo sapiens
ttttatagaagaata

SEQ ID NO: 22944 - DNA, 15 bp, Homo sapiens
attttatagaagaat

SEQ ID NO: 22945 - DNA, 15 bp, Homo sapiens
tattttatagaagaa

SEQ ID NO: 22946 - DNA, 15 bp, Homo sapiens
ttattttatagaaga

SEQ ID NO: 22947 - DNA, 15 bp, Homo sapiens
attattttatagaag

SEQ ID NO: 22948 - DNA, 15 bp, Homo sapiens
tattattttatagaa

SEQ ID NO: 22949 - DNA, 15 bp, Homo sapiens
atattattttataga

SEQ ID NO: 22950 - DNA, 15 bp, Homo sapiens
aatattattttatag

SEQ ID NO: 22951 - DNA, 15 bp, Homo sapiens
aaatattattttata

SEQ ID NO: 22952 - DNA, 15 bp, Homo sapiens
taaatattattttat

SEQ ID NO: 22953 - DNA, 15 bp, Homo sapiens
ttaaatattatttta

SEQ ID NO: 22954 - DNA, 15 bp, Homo sapiens
attaaatattatttt

SEQ ID NO: 22955 - DNA, 15 bp, Homo sapiens
cattaaatattattt

SEQ ID NO: 22956 - DNA, 15 bp, Homo sapiens
acattaaatattatt

SEQ ID NO: 22957 - DNA, 15 bp, Homo sapiens
aacattaaatattat

SEQ ID NO: 22958 - DNA, 15 bp, Homo sapiens
aaacattaaatatta

SEQ ID NO: 22959 - DNA, 15 bp, Homo sapiens
taaacattaaatatt

SEQ ID NO: 22960 - DNA, 15 bp, Homo sapiens
gtaaacattaaatat

SEQ ID NO: 22961 - DNA, 15 bp, Homo sapiens
tgtaaacattaaata

SEQ ID NO: 22962 - DNA, 15 bp, Homo sapiens
ctgtaaacattaaat

SEQ ID NO: 22963 - DNA, 15 bp, Homo sapiens
tctgtaaacattaaa

SEQ ID NO: 22964 - DNA, 15 bp, Homo sapiens
atctgtaaacattaa

SEQ ID NO: 22965 - DNA, 15 bp, Homo sapiens
aatctgtaaacatta

SEQ ID NO: 22966 - DNA, 15 bp, Homo sapiens
taatctgtaaacatt

SEQ ID NO: 22967 - DNA, 15 bp, Homo sapiens
ataatctgtaaacat

SEQ ID NO: 22968 - DNA, 15 bp, Homo sapiens
aataatctgtaaaca

SEQ ID NO: 22969 - DNA, 15 bp, Homo sapiens
gaataatctgtaaac

SEQ ID NO: 22970 - DNA, 15 bp, Homo sapiens
ggaataatctgtaaa

SEQ ID NO: 22971 - DNA, 15 bp, Homo sapiens
tggaataatctgtaa

SEQ ID NO: 22972 - DNA, 15 bp, Homo sapiens
atggaataatctgta

SEQ ID NO: 22973 - DNA, 15 bp, Homo sapiens
aatggaataatctgt

SEQ ID NO: 22974 - DNA, 15 bp, Homo sapiens
caatggaataatctg

SEQ ID NO: 22975 - DNA, 15 bp, Homo sapiens
acaatggaataatct

SEQ ID NO: 22976 - DNA, 15 bp, Homo sapiens
tacaatggaataatc

SEQ ID NO: 22977 - DNA, 15 bp, Homo sapiens
atacaatggaataat

SEQ ID NO: 22978 - DNA, 15 bp, Homo sapiens
catacaatggaataa

SEQ ID NO: 22979 - DNA, 15 bp, Homo sapiens
gcatacaatggaata

SEQ ID NO: 22980 - DNA, 15 bp, Homo sapiens
tgcatacaatggaat

SEQ ID NO: 22981 - DNA, 15 bp, Homo sapiens
atgcatacaatggaa

SEQ ID NO: 22982 - DNA, 15 bp, Homo sapiens
catgcatacaatgga

SEQ ID NO: 22983 - DNA, 15 bp, Homo sapiens
tcatgcatacaatgg

SEQ ID NO: 22984 - DNA, 15 bp, Homo sapiens
ttcatgcatacaatg

SEQ ID NO: 22985 - DNA, 15 bp, Homo sapiens
gttcatgcatacaat

SEQ ID NO: 22986 - DNA, 15 bp, Homo sapiens
agttcatgcatacaa

SEQ ID NO: 22987 - DNA, 15 bp, Homo sapiens
tagttcatgcataca

SEQ ID NO: 22988 - DNA, 15 bp, Homo sapiens
atagttcatgcatac

SEQ ID NO: 22989 - DNA, 15 bp, Homo sapiens
catagttcatgcata

SEQ ID NO: 22990 - DNA, 15 bp, Homo sapiens
acatagttcatgcat

SEQ ID NO: 22991 - DNA, 15 bp, Homo sapiens
tacatagttcatgca

SEQ ID NO: 22992 - DNA, 15 bp, Homo sapiens
ttacatagttcatgc

SEQ ID NO: 22993 - DNA, 15 bp, Homo sapiens
cttacatagttcatg

SEQ ID NO: 22994 - DNA, 15 bp, Homo sapiens
gcttacatagttcat

SEQ ID NO: 22995 - DNA, 15 bp, Homo sapiens
ggcttacatagttca

SEQ ID NO: 22996 - DNA, 15 bp, Homo sapiens
tggcttacatagttc

SEQ ID NO: 22997 - DNA, 15 bp, Homo sapiens
atggcttacatagtt

SEQ ID NO: 22998 - DNA, 15 bp, Homo sapiens
gatggcttacatagt

SEQ ID NO: 22999 - DNA, 15 bp, Homo sapiens
ggatggcttacatag

SEQ ID NO: 23000 - DNA, 15 bp, Homo sapiens
aggatggcttacata

SEQ ID NO: 23001 - DNA, 15 bp, Homo sapiens
gaggatggcttacat

SEQ ID NO: 23002 - DNA, 15 bp, Homo sapiens
agaggatggcttaca

SEQ ID NO: 23003 - DNA, 15 bp, Homo sapiens
aagaggatggcttac

SEQ ID NO: 23004 - DNA, 15 bp, Homo sapiens
taagaggatggctta

SEQ ID NO: 23005 - DNA, 15 bp, Homo sapiens
ataagaggatggctt

SEQ ID NO: 23006 - DNA, 15 bp, Homo sapiens
aataagaggatggct

SEQ ID NO: 23007 - DNA, 15 bp, Homo sapiens
taataagaggatggc

SEQ ID NO: 23008 - DNA, 15 bp, Homo sapiens
ctaataagaggatgg

SEQ ID NO: 23009 - DNA, 15 bp, Homo sapiens
tctaataagaggatg

SEQ ID NO: 23010 - DNA, 15 bp, Homo sapiens
atctaataagaggat

SEQ ID NO: 23011 - DNA, 15 bp, Homo sapiens
tatctaataagagga

SEQ ID NO: 23012 - DNA, 15 bp, Homo sapiens
atatctaataagagg

SEQ ID NO: 23013 - DNA, 15 bp, Homo sapiens
aatatctaataagag

SEQ ID NO: 23014 - DNA, 15 bp, Homo sapiens
aaatatctaataaga

SEQ ID NO: 23015 - DNA, 15 bp, Homo sapiens
taaatatctaataag

SEQ ID NO: 23016 - DNA, 15 bp, Homo sapiens
ttaaatatctaataa

SEQ ID NO: 23017 - DNA, 15 bp, Homo sapiens
cttaaatatctaata

SEQ ID NO: 23018 - DNA, 15 bp, Homo sapiens
gcttaaatatctaat

SEQ ID NO: 23019 - DNA, 15 bp, Homo sapiens
tgcttaaatatctaa

SEQ ID NO: 23020 - DNA, 15 bp, Homo sapiens
ctgcttaaatatcta

SEQ ID NO: 23021 - DNA, 15 bp, Homo sapiens
cctgcttaaatatct

SEQ ID NO: 23022 - DNA, 15 bp, Homo sapiens
ccctgcttaaatatc

SEQ ID NO: 23023 - DNA, 15 bp, Homo sapiens
accctgcttaaatat

SEQ ID NO: 23024 - DNA, 15 bp, Homo sapiens
gaccctgcttaaata

SEQ ID NO: 23025 - DNA, 15 bp, Homo sapiens
agaccctgcttaaat

SEQ ID NO: 23026 - DNA, 15 bp, Homo sapiens
cagaccctgcttaaa

SEQ ID NO: 23027 - DNA, 15 bp, Homo sapiens
gcagaccctgcttaa

SEQ ID NO: 23028 - DNA, 15 bp, Homo sapiens
agcagaccctgctta

SEQ ID NO: 23029 - DNA, 15 bp, Homo sapiens
tagcagaccctgctt

SEQ ID NO: 23030 - DNA, 15 bp, Homo sapiens
atagcagaccctgct

SEQ ID NO: 23031 - DNA, 15 bp, Homo sapiens
aatagcagaccctgc

SEQ ID NO: 23032 - DNA, 15 bp, Homo sapiens
aaatagcagaccctg

SEQ ID NO: 23033 - DNA, 15 bp, Homo sapiens
aaaatagcagaccct

SEQ ID NO: 23034 - DNA, 15 bp, Homo sapiens
aaaaatagcagaccc

SEQ ID NO: 23035 - DNA, 15 bp, Homo sapiens
caaaaatagcagacc

SEQ ID NO: 23036 - DNA, 15 bp, Homo sapiens
acaaaaatagcagac

SEQ ID NO: 23037 - DNA, 15 bp, Homo sapiens
tacaaaaatagcaga

SEQ ID NO: 23038 - DNA, 15 bp, Homo sapiens
atacaaaaatagcag

SEQ ID NO: 23039 - DNA, 15 bp, Homo sapiens
aatacaaaaatagca

SEQ ID NO: 23040 - DNA, 15 bp, Homo sapiens
caatacaaaaatagc

SEQ ID NO: 23041 - DNA, 15 bp, Homo sapiens
acaatacaaaaatag

SEQ ID NO: 23042 - DNA, 15 bp, Homo sapiens
tacaatacaaaaata

SEQ ID NO: 23043 - DNA, 15 bp, Homo sapiens
atacaatacaaaaat

SEQ ID NO: 23044 - DNA, 15 bp, Homo sapiens
gatacaatacaaaaa

SEQ ID NO: 23045 - DNA, 15 bp, Homo sapiens
tgatacaatacaaaa

SEQ ID NO: 23046 - DNA, 15 bp, Homo sapiens
atgatacaatacaaa

SEQ ID NO: 23047 - DNA, 15 bp, Homo sapiens
tatgatacaatacaa

SEQ ID NO: 23048 - DNA, 15 bp, Homo sapiens
ttatgatacaataca

SEQ ID NO: 23049 - DNA, 15 bp, Homo sapiens
tttatgatacaatac

SEQ ID NO: 23050 - DNA, 15 bp, Homo sapiens
gtttatgatacaata

SEQ ID NO: 23051 - DNA, 15 bp, Homo sapiens
tgtttatgatacaat

SEQ ID NO: 23052 - DNA, 15 bp, Homo sapiens
gtgtttatgatacaa

SEQ ID NO: 23053 - DNA, 15 bp, Homo sapiens
ggtgtttatgataca

SEQ ID NO: 23054 - DNA, 15 bp, Homo sapiens
tggtgtttatgatac

SEQ ID NO: 23055 - DNA, 15 bp, Homo sapiens
gtggtgtttatgata

SEQ ID NO: 23056 - DNA, 15 bp, Homo sapiens
ggtggtgtttatgat

SEQ ID NO: 23057 - DNA, 15 bp, Homo sapiens
tggtggtgtttatga

SEQ ID NO: 23058 - DNA, 15 bp, Homo sapiens
gtggtggtgtttatg

SEQ ID NO: 23059 - DNA, 15 bp, Homo sapiens
tgtggtggtgtttat

SEQ ID NO: 23060 - DNA, 15 bp, Homo sapiens
ctgtggtggtgttta

SEQ ID NO: 23061 - DNA, 15 bp, Homo sapiens
actgtggtggtgttt

SEQ ID NO: 23062 - DNA, 15 bp, Homo sapiens
cactgtggtggtgtt

SEQ ID NO: 23063 - DNA, 15 bp, Homo sapiens
tcactgtggtggtgt

SEQ ID NO: 23064 - DNA, 15 bp, Homo sapiens
ctcactgtggtggtg

SEQ ID NO: 23065 - DNA, 15 bp, Homo sapiens
gctcactgtggtggt

SEQ ID NO: 23066 - DNA, 15 bp, Homo sapiens
tgctcactgtggtgg

SEQ ID NO: 23067 - DNA, 15 bp, Homo sapiens
atgctcactgtggtg

SEQ ID NO: 23068 - DNA, 15 bp, Homo sapiens
gatgctcactgtggt

SEQ ID NO: 23069 - DNA, 15 bp, Homo sapiens
agatgctcactgtgg

SEQ ID NO: 23070 - DNA, 15 bp, Homo sapiens
aagatgctcactgtg

SEQ ID NO: 23071 - DNA, 15 bp, Homo sapiens
caagatgctcactgt

SEQ ID NO: 23072 - DNA, 15 bp, Homo sapiens
tcaagatgctcactg

SEQ ID NO: 23073 - DNA, 15 bp, Homo sapiens
atcaagatgctcact

SEQ ID NO: 23074 - DNA, 15 bp, Homo sapiens
aatcaagatgctcac

SEQ ID NO: 23075 - DNA, 15 bp, Homo sapiens
caatcaagatgctca

SEQ ID NO: 23076 - DNA, 15 bp, Homo sapiens
gcaatcaagatgctc

SEQ ID NO: 23077 - DNA, 15 bp, Homo sapiens
ggcaatcaagatgct

SEQ ID NO: 23078 - DNA, 15 bp, Homo sapiens
tggcaatcaagatgc

SEQ ID NO: 23079 - DNA, 15 bp, Homo sapiens
ttggcaatcaagatg

SEQ ID NO: 23080 - DNA, 15 bp, Homo sapiens
tttggcaatcaagat

SEQ ID NO: 23081 - DNA, 15 bp, Homo sapiens
atttggcaatcaaga

SEQ ID NO: 23082 - DNA, 15 bp, Homo sapiens
gatttggcaatcaag

SEQ ID NO: 23083 - DNA, 15 bp, Homo sapiens
tgatttggcaatcaa

SEQ ID NO: 23084 - DNA, 15 bp, Homo sapiens
ttgatttggcaatca

SEQ ID NO: 23085 - DNA, 15 bp, Homo sapiens
cttgatttggcaatc

SEQ ID NO: 23086 - DNA, 15 bp, Homo sapiens
tcttgatttggcaat

SEQ ID NO: 23087 - DNA, 15 bp, Homo sapiens
ttcttgatttggcaa

SEQ ID NO: 23088 - DNA, 15 bp, Homo sapiens
attcttgatttggca

SEQ ID NO: 23089 - DNA, 15 bp, Homo sapiens
tattcttgatttggc

SEQ ID NO: 23090 - DNA, 15 bp, Homo sapiens
gtattcttgatttgg

SEQ ID NO: 23091 - DNA, 15 bp, Homo sapiens
agtattcttgatttg

SEQ ID NO: 23092 - DNA, 15 bp, Homo sapiens
aagtattcttgattt

SEQ ID NO: 23093 - DNA, 15 bp, Homo sapiens
caagtattcttgatt

SEQ ID NO: 23094 - DNA, 15 bp, Homo sapiens
acaagtattcttgat

SEQ ID NO: 23095 - DNA, 15 bp, Homo sapiens
gacaagtattcttga

SEQ ID NO: 23096 - DNA, 15 bp, Homo sapiens
ggacaagtattcttg

SEQ ID NO: 23097 - DNA, 15 bp, Homo sapiens
aggacaagtattctt

SEQ ID NO: 23098 - DNA, 15 bp, Homo sapiens
gaggacaagtattct

SEQ ID NO: 23099 - DNA, 15 bp, Homo sapiens
tgaggacaagtattc

SEQ ID NO: 23100 - DNA, 15 bp, Homo sapiens
ttgaggacaagtatt

SEQ ID NO: 23101 - DNA, 15 bp, Homo sapiens
attgaggacaagtat

SEQ ID NO: 23102 - DNA, 15 bp, Homo sapiens
aattgaggacaagta

SEQ ID NO: 23103 - DNA, 15 bp, Homo sapiens
taattgaggacaagt

SEQ ID NO: 23104 - DNA, 15 bp, Homo sapiens
ataattgaggacaag

SEQ ID NO: 23105 - DNA, 15 bp, Homo sapiens
aataattgaggacaa

SEQ ID NO: 23106 - DNA, 15 bp, Homo sapiens
aaataattgaggaca

SEQ ID NO: 23107 - DNA, 15 bp, Homo sapiens
gaaataattgaggac

SEQ ID NO: 23108 - DNA, 15 bp, Homo sapiens
agaaataattgagga

SEQ ID NO: 23109 - DNA, 15 bp, Homo sapiens
cagaaataattgagg

SEQ ID NO: 23110 - DNA, 15 bp, Homo sapiens
acagaaataattgag

SEQ ID NO: 23111 - DNA, 15 bp, Homo sapiens
tacagaaataattga

SEQ ID NO: 23112 - DNA, 15 bp, Homo sapiens
ttacagaaataattg

SEQ ID NO: 23113 - DNA, 15 bp, Homo sapiens
cttacagaaataatt

SEQ ID NO: 23114 - DNA, 15 bp, Homo sapiens
tcttacagaaataat

SEQ ID NO: 23115 - DNA, 15 bp, Homo sapiens
atcttacagaaataa

SEQ ID NO: 23116 - DNA, 15 bp, Homo sapiens
gatcttacagaaata

SEQ ID NO: 23117 - DNA, 15 bp, Homo sapiens
tgatcttacagaaat

SEQ ID NO: 23118 - DNA, 15 bp, Homo sapiens
ctgatcttacagaaa

SEQ ID NO: 23119 - DNA, 15 bp, Homo sapiens
gctgatcttacagaa

SEQ ID NO: 23120 - DNA, 15 bp, Homo sapiens
agctgatcttacaga

SEQ ID NO: 23121 - DNA, 15 bp, Homo sapiens
cagctgatcttacag

SEQ ID NO: 23122 - DNA, 15 bp, Homo sapiens
gcagctgatcttaca

SEQ ID NO: 23123 - DNA, 15 bp, Homo sapiens
agcagctgatcttac

SEQ ID NO: 23124 - DNA, 15 bp, Homo sapiens
cagcagctgatctta

SEQ ID NO: 23125 - DNA, 15 bp, Homo sapiens
ccagcagctgatctt

SEQ ID NO: 23126 - DNA, 15 bp, Homo sapiens
tccagcagctgatct

SEQ ID NO: 23127 - DNA, 15 bp, Homo sapiens
ttccagcagctgatc

SEQ ID NO: 23128 - DNA, 15 bp, Homo sapiens
cttccagcagctgat

SEQ ID NO: 23129 - DNA, 15 bp, Homo sapiens
acttccagcagctga

SEQ ID NO: 23130 - DNA, 15 bp, Homo sapiens
cacttccagcagctg

SEQ ID NO: 23131 - DNA, 15 bp, Homo sapiens
ccacttccagcagct

SEQ ID NO: 23132 - DNA, 15 bp, Homo sapiens
tccacttccagcagc

SEQ ID NO: 23133 - DNA, 15 bp, Homo sapiens
ttccacttccagcag

SEQ ID NO: 23134 - DNA, 15 bp, Homo sapiens
cttccacttccagca

SEQ ID NO: 23135 - DNA, 15 bp, Homo sapiens
acttccacttccagc

SEQ ID NO: 23136 - DNA, 15 bp, Homo sapiens
cacttccacttccag

SEQ ID NO: 23137 - DNA, 15 bp, Homo sapiens
gcacttccacttcca

SEQ ID NO: 23138 - DNA, 15 bp, Homo sapiens
agcacttccacttcc

SEQ ID NO: 23139 - DNA, 15 bp, Homo sapiens
tagcacttccacttc

SEQ ID NO: 23140 - DNA, 15 bp, Homo sapiens
ttagcacttccactt

SEQ ID NO: 23141 - DNA, 15 bp, Homo sapiens
cttagcacttccact

SEQ ID NO: 23142 - DNA, 15 bp, Homo sapiens
gcttagcacttccac

SEQ ID NO: 23143 - DNA, 15 bp, Homo sapiens
ggcttagcacttcca

SEQ ID NO: 23144 - DNA, 15 bp, Homo sapiens
tggcttagcacttcc

SEQ ID NO: 23145 - DNA, 15 bp, Homo sapiens
gtggcttagcacttc

SEQ ID NO: 23146 - DNA, 15 bp, Homo sapiens
agtggcttagcactt

SEQ ID NO: 23147 - DNA, 15 bp, Homo sapiens
cagtggcttagcact

SEQ ID NO: 23148 - DNA, 15 bp, Homo sapiens
gcagtggcttagcac

SEQ ID NO: 23149 - DNA, 15 bp, Homo sapiens
agcagtggcttagca

SEQ ID NO: 23150 - DNA, 15 bp, Homo sapiens
aagcagtggcttagc

SEQ ID NO: 23151 - DNA, 15 bp, Homo sapiens
aaagcagtggcttag

SEQ ID NO: 23152 - DNA, 15 bp, Homo sapiens
aaaagcagtggctta

SEQ ID NO: 23153 - DNA, 15 bp, Homo sapiens
gaaaagcagtggctt

SEQ ID NO: 23154 - DNA, 15 bp, Homo sapiens
agaaaagcagtggct

SEQ ID NO: 23155 - DNA, 15 bp, Homo sapiens
gagaaaagcagtggc

SEQ ID NO: 23156 - DNA, 15 bp, Homo sapiens
cgagaaaagcagtgg

SEQ ID NO: 23157 - DNA, 15 bp, Homo sapiens
acgagaaaagcagtg

SEQ ID NO: 23158 - DNA, 15 bp, Homo sapiens
aacgagaaaagcagt

SEQ ID NO: 23159 - DNA, 15 bp, Homo sapiens
caacgagaaaagcag

SEQ ID NO: 23160 - DNA, 15 bp, Homo sapiens
acaacgagaaaagca

SEQ ID NO: 23161 - DNA, 15 bp, Homo sapiens
gacaacgagaaaagc

SEQ ID NO: 23162 - DNA, 15 bp, Homo sapiens
ggacaacgagaaaag

SEQ ID NO: 23163 - DNA, 15 bp, Homo sapiens
gggacaacgagaaaa

SEQ ID NO: 23164 - DNA, 15 bp, Homo sapiens
tgggacaacgagaaa

SEQ ID NO: 23165 - DNA, 15 bp, Homo sapiens
atgggacaacgagaa

SEQ ID NO: 23166 - DNA, 15 bp, Homo sapiens
gatgggacaacgaga

SEQ ID NO: 23167 - DNA, 15 bp, Homo sapiens
ggatgggacaacgag

SEQ ID NO: 23168 - DNA, 15 bp, Homo sapiens
aggatgggacaacga

SEQ ID NO: 23169 - DNA, 15 bp, Homo sapiens
gaggatgggacaacg

SEQ ID NO: 23170 - DNA, 15 bp, Homo sapiens
ggaggatgggacaac

SEQ ID NO: 23171 - DNA, 15 bp, Homo sapiens
aggaggatgggacaa

SEQ ID NO: 23172 - DNA, 15 bp, Homo sapiens
taggaggatgggaca

SEQ ID NO: 23173 - DNA, 15 bp, Homo sapiens
ctaggaggatgggac

SEQ ID NO: 23174 - DNA, 15 bp, Homo sapiens
gctaggaggatggga

SEQ ID NO: 23175 - DNA, 15 bp, Homo sapiens
ggctaggaggatggg

SEQ ID NO: 23176 - DNA, 15 bp, Homo sapiens
aggctaggaggatgg

SEQ ID NO: 23177 - DNA, 15 bp, Homo sapiens
gaggctaggaggatg

SEQ ID NO: 23178 - DNA, 15 bp, Homo sapiens
tgaggctaggaggat

SEQ ID NO: 23179 - DNA, 15 bp, Homo sapiens
gtgaggctaggagga

SEQ ID NO: 23180 - DNA, 15 bp, Homo sapiens
cgtgaggctaggagg

SEQ ID NO: 23181 - DNA, 15 bp, Homo sapiens
ccgtgaggctaggag

SEQ ID NO: 23182 - DNA, 15 bp, Homo sapiens
accgtgaggctagga

SEQ ID NO: 23183 - DNA, 15 bp, Homo sapiens
caccgtgaggctagg

SEQ ID NO: 23184 - DNA, 15 bp, Homo sapiens
ccaccgtgaggctag

SEQ ID NO: 23185 - DNA, 15 bp, Homo sapiens
gccaccgtgaggcta

SEQ ID NO: 23186 - DNA, 15 bp, Homo sapiens
agccaccgtgaggct

SEQ ID NO: 23187 - DNA, 15 bp, Homo sapiens
cagccaccgtgaggc

SEQ ID NO: 23188 - DNA, 15 bp, Homo sapiens
tcagccaccgtgagg

SEQ ID NO: 23189 - DNA, 15 bp, Homo sapiens
ctcagccaccgtgag

SEQ ID NO: 23190 - DNA, 15 bp, Homo sapiens
gctcagccaccgtga

SEQ ID NO: 23191 - DNA, 15 bp, Homo sapiens
tgctcagccaccgtg

SEQ ID NO: 23192 - DNA, 15 bp, Homo sapiens
gtgctcagccaccgt

SEQ ID NO: 23193 - DNA, 15 bp, Homo sapiens
tgtgctcagccaccg

SEQ ID NO: 23194 - DNA, 15 bp, Homo sapiens
atgtgctcagccacc

SEQ ID NO: 23195 - DNA, 15 bp, Homo sapiens
catgtgctcagccac

SEQ ID NO: 23196 - DNA, 15 bp, Homo sapiens
gcatgtgctcagcca

SEQ ID NO: 23197 - DNA, 15 bp, Homo sapiens
agcatgtgctcagcc

SEQ ID NO: 23198 - DNA, 15 bp, Homo sapiens
cagcatgtgctcagc

SEQ ID NO: 23199 - DNA, 15 bp, Homo sapiens
acagcatgtgctcag

SEQ ID NO: 23200 - DNA, 15 bp, Homo sapiens
aacagcatgtgctca

SEQ ID NO: 23201 - DNA, 15 bp, Homo sapiens
gaacagcatgtgctc

SEQ ID NO: 23202 - DNA, 15 bp, Homo sapiens
agaacagcatgtgct

SEQ ID NO: 23203 - DNA, 15 bp, Homo sapiens
tagaacagcatgtgc

SEQ ID NO: 23204 - DNA, 15 bp, Homo sapiens
atagaacagcatgtg

SEQ ID NO: 23205 - DNA, 15 bp, Homo sapiens
catagaacagcatgt

SEQ ID NO: 23206 - DNA, 15 bp, Homo sapiens
gcatagaacagcatg

SEQ ID NO: 23207 - DNA, 15 bp, Homo sapiens
ggcatagaacagcat

SEQ ID NO: 23208 - DNA, 15 bp, Homo sapiens
gggcatagaacagca

SEQ ID NO: 23209 - DNA, 15 bp, Homo sapiens
tgggcatagaacagc

SEQ ID NO: 23210 - DNA, 15 bp, Homo sapiens
ctgggcatagaacag

SEQ ID NO: 23211 - DNA, 15 bp, Homo sapiens
gctgggcatagaaca

SEQ ID NO: 23212 - DNA, 15 bp, Homo sapiens
agctgggcatagaac

SEQ ID NO: 23213 - DNA, 15 bp, Homo sapiens
cagctgggcatagaa

SEQ ID NO: 23214 - DNA, 15 bp, Homo sapiens
tcagctgggcataga

SEQ ID NO: 23215 - DNA, 15 bp, Homo sapiens
ttcagctgggcatag

SEQ ID NO: 23216 - DNA, 15 bp, Homo sapiens
tttcagctgggcata

SEQ ID NO: 23217 - DNA, 15 bp, Homo sapiens
ctttcagctgggcat

SEQ ID NO: 23218 - DNA, 15 bp, Homo sapiens
cctttcagctgggca

SEQ ID NO: 23219 - DNA, 15 bp, Homo sapiens
tcctttcagctgggc

SEQ ID NO: 23220 - DNA, 15 bp, Homo sapiens
ttcctttcagctggg

SEQ ID NO: 23221 - DNA, 15 bp, Homo sapiens
tttcctttcagctgg

SEQ ID NO: 23222 - DNA, 15 bp, Homo sapiens
ctttcctttcagctg

SEQ ID NO: 23223 - DNA, 15 bp, Homo sapiens
actttcctttcagct

SEQ ID NO: 23224 - DNA, 15 bp, Homo sapiens
gactttcctttcagc

SEQ ID NO: 23225 - DNA, 15 bp, Homo sapiens
ggactttcctttcag

SEQ ID NO: 23226 - DNA, 15 bp, Homo sapiens
gggactttcctttca

SEQ ID NO: 23227 - DNA, 15 bp, Homo sapiens
tgggactttcctttc

SEQ ID NO: 23228 - DNA, 15 bp, Homo sapiens
ctgggactttccttt

SEQ ID NO: 23229 - DNA, 15 bp, Homo sapiens
cctgggactttcctt

SEQ ID NO: 23230 - DNA, 15 bp, Homo sapiens
tcctgggactttcct

SEQ ID NO: 23231 - DNA, 15 bp, Homo sapiens
ctcctgggactttcc

SEQ ID NO: 23232 - DNA, 15 bp, Homo sapiens
cctcctgggactttc

SEQ ID NO: 23233 - DNA, 15 bp, Homo sapiens
tcctcctgggacttt

SEQ ID NO: 23234 - DNA, 15 bp, Homo sapiens
ctcctcctgggactt

SEQ ID NO: 23235 - DNA, 15 bp, Homo sapiens
cctcctcctgggact

SEQ ID NO: 23236 - DNA, 15 bp, Homo sapiens
gcctcctcctgggac

SEQ ID NO: 23237 - DNA, 15 bp, Homo sapiens
ggcctcctcctggga

SEQ ID NO: 23238 - DNA, 15 bp, Homo sapiens
gggcctcctcctggg

SEQ ID NO: 23239 - DNA, 15 bp, Homo sapiens
tgggcctcctcctgg

SEQ ID NO: 23240 - DNA, 15 bp, Homo sapiens
ctgggcctcctcctg

SEQ ID NO: 23241 - DNA, 15 bp, Homo sapiens
gctgggcctcctcct

SEQ ID NO: 23242 - DNA, 15 bp, Homo sapiens
agctgggcctcctcc

SEQ ID NO: 23243 - DNA, 15 bp, Homo sapiens
cagctgggcctcctc

SEQ ID NO: 23244 - DNA, 15 bp, Homo sapiens
ccagctgggcctcct

SEQ ID NO: 23245 - DNA, 15 bp, Homo sapiens
tccagctgggcctcc

SEQ ID NO: 23246 - DNA, 15 bp, Homo sapiens
ctccagctgggcctc

SEQ ID NO: 23247 - DNA, 15 bp, Homo sapiens
tctccagctgggcct

SEQ ID NO: 23248 - DNA, 15 bp, Homo sapiens
atctccagctgggcc

SEQ ID NO: 23249 - DNA, 15 bp, Homo sapiens
catctccagctgggc

SEQ ID NO: 23250 - DNA, 15 bp, Homo sapiens
ccatctccagctggg

SEQ ID NO: 23251 - DNA, 15 bp, Homo sapiens
tccatctccagctgg

SEQ ID NO: 23252 - DNA, 15 bp, Homo sapiens
ttccatctccagctg

SEQ ID NO: 23253 - DNA, 15 bp, Homo sapiens
cttccatctccagct

SEQ ID NO: 23254 - DNA, 15 bp, Homo sapiens
gcttccatctccagc

SEQ ID NO: 23255 - DNA, 15 bp, Homo sapiens
ggcttccatctccag

SEQ ID NO: 23256 - DNA, 15 bp, Homo sapiens
tggcttccatctcca

SEQ ID NO: 23257 - DNA, 15 bp, Homo sapiens
atggcttccatctcc

SEQ ID NO: 23258 - DNA, 15 bp, Homo sapiens
catggcttccatctc

SEQ ID NO: 23259 - DNA, 15 bp, Homo sapiens
acatggcttccatct

SEQ ID NO: 23260 - DNA, 15 bp, Homo sapiens
aacatggcttccatc

SEQ ID NO: 23261 - DNA, 15 bp, Homo sapiens
caacatggcttccat

SEQ ID NO: 23262 - DNA, 15 bp, Homo sapiens
ccaacatggcttcca

SEQ ID NO: 23263 - DNA, 15 bp, Homo sapiens
tccaacatggcttcc

SEQ ID NO: 23264 - DNA, 15 bp, Homo sapiens
ctccaacatggcttc

SEQ ID NO: 23265 - DNA, 15 bp, Homo sapiens
cctccaacatggctt

SEQ ID NO: 23266 - DNA, 15 bp, Homo sapiens
tcctccaacatggct

SEQ ID NO: 23267 - DNA, 15 bp, Homo sapiens
gtcctccaacatggc

SEQ ID NO: 23268 - DNA, 15 bp, Homo sapiens
tgtcctccaacatgg

SEQ ID NO: 23269 - DNA, 15 bp, Homo sapiens
gtgtcctccaacatg

SEQ ID NO: 23270 - DNA, 15 bp, Homo sapiens
tgtgtcctccaacat

SEQ ID NO: 23271 - DNA, 15 bp, Homo sapiens
ctgtgtcctccaaca

SEQ ID NO: 23272 - DNA, 15 bp, Homo sapiens
cctgtgtcctccaac

SEQ ID NO: 23273 - DNA, 15 bp, Homo sapiens
gcctgtgtcctccaa

SEQ ID NO: 23274 - DNA, 15 bp, Homo sapiens
ggcctgtgtcctcca

SEQ ID NO: 23275 - DNA, 15 bp, Homo sapiens
aggcctgtgtcctcc

SEQ ID NO: 23276 - DNA, 15 bp, Homo sapiens
gaggcctgtgtcctc

SEQ ID NO: 23277 - DNA, 15 bp, Homo sapiens
ggaggcctgtgtcct

SEQ ID NO: 23278 - DNA, 15 bp, Homo sapiens
tggaggcctgtgtcc

SEQ ID NO: 23279 - DNA, 15 bp, Homo sapiens
gtggaggcctgtgtc

SEQ ID NO: 23280 - DNA, 15 bp, Homo sapiens
ggtggaggcctgtgt

SEQ ID NO: 23281 - DNA, 15 bp, Homo sapiens
tggtggaggcctgtg

SEQ ID NO: 23282 - DNA, 15 bp, Homo sapiens
gtggtggaggcctgt

SEQ ID NO: 23283 - DNA, 15 bp, Homo sapiens
tgtggtggaggcctg

SEQ ID NO: 23284 - DNA, 15 bp, Homo sapiens
ttgtggtggaggcct

SEQ ID NO: 23285 - DNA, 15 bp, Homo sapiens
cttgtggtggaggcc

SEQ ID NO: 23286 - DNA, 15 bp, Homo sapiens
gcttgtggtggaggc

SEQ ID NO: 23287 - DNA, 15 bp, Homo sapiens
cgcttgtggtggagg

SEQ ID NO: 23288 - DNA, 15 bp, Homo sapiens
ccgcttgtggtggag

SEQ ID NO: 23289 - DNA, 15 bp, Homo sapiens
tccgcttgtggtgga

SEQ ID NO: 23290 - DNA, 15 bp, Homo sapiens
ttccgcttgtggtgg

SEQ ID NO: 23291 - DNA, 15 bp, Homo sapiens
attccgcttgtggtg

SEQ ID NO: 23292 - DNA, 15 bp, Homo sapiens
cattccgcttgtggt

SEQ ID NO: 23293 - DNA, 15 bp, Homo sapiens
tcattccgcttgtgg

SEQ ID NO: 23294 - DNA, 15 bp, Homo sapiens
ttcattccgcttgtg

SEQ ID NO: 23295 - DNA, 15 bp, Homo sapiens
cttcattccgcttgt

SEQ ID NO: 23296 - DNA, 15 bp, Homo sapiens
tcttcattccgcttg

SEQ ID NO: 23297 - DNA, 15 bp, Homo sapiens
ctcttcattccgctt

SEQ ID NO: 23298 - DNA, 15 bp, Homo sapiens
cctcttcattccgct

SEQ ID NO: 23299 - DNA, 15 bp, Homo sapiens
gcctcttcattccgc

SEQ ID NO: 23300 - DNA, 15 bp, Homo sapiens
agcctcttcattccg

SEQ ID NO: 23301 - DNA, 15 bp, Homo sapiens
gagcctcttcattcc

SEQ ID NO: 23302 - DNA, 15 bp, Homo sapiens
tgagcctcttcattc

SEQ ID NO: 23303 - DNA, 15 bp, Homo sapiens
ctgagcctcttcatt

SEQ ID NO: 23304 - DNA, 15 bp, Homo sapiens
cctgagcctcttcat

SEQ ID NO: 23305 - DNA, 15 bp, Homo sapiens
tcctgagcctcttca

SEQ ID NO: 23306 - DNA, 15 bp, Homo sapiens
gtcctgagcctcttc

SEQ ID NO: 23307 - DNA, 15 bp, Homo sapiens
ggtcctgagcctctt

SEQ ID NO: 23308 - DNA, 15 bp, Homo sapiens
aggtcctgagcctct

SEQ ID NO: 23309 - DNA, 15 bp, Homo sapiens
taggtcctgagcctc

SEQ ID NO: 23310 - DNA, 15 bp, Homo sapiens
ataggtcctgagcct

SEQ ID NO: 23311 - DNA, 15 bp, Homo sapiens
gataggtcctgagcc

SEQ ID NO: 23312 - DNA, 15 bp, Homo sapiens
tgataggtcctgagc

SEQ ID NO: 23313 - DNA, 15 bp, Homo sapiens
ctgataggtcctgag

SEQ ID NO: 23314 - DNA, 15 bp, Homo sapiens
cctgataggtcctga

SEQ ID NO: 23315 - DNA, 15 bp, Homo sapiens
acctgataggtcctg

SEQ ID NO: 23316 - DNA, 15 bp, Homo sapiens
cacctgataggtcct

SEQ ID NO: 23317 - DNA, 15 bp, Homo sapiens
gcacctgataggtcc

SEQ ID NO: 23318 - DNA, 15 bp, Homo sapiens
agcacctgataggtc

SEQ ID NO: 23319 - DNA, 15 bp, Homo sapiens
gagcacctgataggt

SEQ ID NO: 23320 - DNA, 15 bp, Homo sapiens
tgagcacctgatagg

SEQ ID NO: 23321 - DNA, 15 bp, Homo sapiens
ctgagcacctgatag

SEQ ID NO: 23322 - DNA, 15 bp, Homo sapiens
tctgagcacctgata

SEQ ID NO: 23323 - DNA, 15 bp, Homo sapiens
ctctgagcacctgat

SEQ ID NO: 23324 - DNA, 15 bp, Homo sapiens
gctctgagcacctga

SEQ ID NO: 23325 - DNA, 15 bp, Homo sapiens
agctctgagcacctg

SEQ ID NO: 23326 - DNA, 15 bp, Homo sapiens
cagctctgagcacct

SEQ ID NO: 23327 - DNA, 15 bp, Homo sapiens
ccagctctgagcacc

SEQ ID NO: 23328 - DNA, 15 bp, Homo sapiens
tccagctctgagcac

SEQ ID NO: 23329 - DNA, 15 bp, Homo sapiens
atccagctctgagca

SEQ ID NO: 23330 - DNA, 15 bp, Homo sapiens
catccagctctgagc

SEQ ID NO: 23331 - DNA, 15 bp, Homo sapiens
ccatccagctctgag

SEQ ID NO: 23332 - DNA, 15 bp, Homo sapiens
tccatccagctctga

SEQ ID NO: 23333 - DNA, 15 bp, Homo sapiens
ctccatccagctctg

SEQ ID NO: 23334 - DNA, 15 bp, Homo sapiens
tctccatccagctct

SEQ ID NO: 23335 - DNA, 15 bp, Homo sapiens
gtctccatccagctc

SEQ ID NO: 23336 - DNA, 15 bp, Homo sapiens
tgtctccatccagct

SEQ ID NO: 23337 - DNA, 15 bp, Homo sapiens
ctgtctccatccagc

SEQ ID NO: 23338 - DNA, 15 bp, Homo sapiens
cctgtctccatccag

SEQ ID NO: 23339 - DNA, 15 bp, Homo sapiens
ccctgtctccatcca

SEQ ID NO: 23340 - DNA, 15 bp, Homo sapiens
gccctgtctccatcc

SEQ ID NO: 23341 - DNA, 15 bp, Homo sapiens
ggccctgtctccatc

SEQ ID NO: 23342 - DNA, 15 bp, Homo sapiens
tggccctgtctccat

SEQ ID NO: 23343 - DNA, 15 bp, Homo sapiens
gtggccctgtctcca

SEQ ID NO: 23344 - DNA, 15 bp, Homo sapiens
tgtggccctgtctcc

SEQ ID NO: 23345 - DNA, 15 bp, Homo sapiens
ctgtggccctgtctc

SEQ ID NO: 23346 - DNA, 15 bp, Homo sapiens
tctgtggccctgtct

SEQ ID NO: 23347 - DNA, 15 bp, Homo sapiens
atctgtggccctgtc

SEQ ID NO: 23348 - DNA, 15 bp, Homo sapiens
catctgtggccctgt

SEQ ID NO: 23349 - DNA, 15 bp, Homo sapiens
ccatctgtggccctg

SEQ ID NO: 23350 - DNA, 15 bp, Homo sapiens
gccatctgtggccct

SEQ ID NO: 23351 - DNA, 15 bp, Homo sapiens
tgccatctgtggccc

SEQ ID NO: 23352 - DNA, 15 bp, Homo sapiens
ttgccatctgtggcc

SEQ ID NO: 23353 - DNA, 15 bp, Homo sapiens
tttgccatctgtggc

SEQ ID NO: 23354 - DNA, 15 bp, Homo sapiens
atttgccatctgtgg

SEQ ID NO: 23355 - DNA, 15 bp, Homo sapiens
gatttgccatctgtg

SEQ ID NO: 23356 - DNA, 15 bp, Homo sapiens
ggatttgccatctgt

SEQ ID NO: 23357 - DNA, 15 bp, Homo sapiens
tggatttgccatctg

SEQ ID NO: 23358 - DNA, 15 bp, Homo sapiens
atggatttgccatct

SEQ ID NO: 23359 - DNA, 15 bp, Homo sapiens
catggatttgccatc

SEQ ID NO: 23360 - DNA, 15 bp, Homo sapiens
ccatggatttgccat

SEQ ID NO: 23361 - DNA, 15 bp, Homo sapiens
gccatggatttgcca

SEQ ID NO: 23362 - DNA, 15 bp, Homo sapiens
agccatggatttgcc

SEQ ID NO: 23363 - DNA, 15 bp, Homo sapiens
gagccatggatttgc

SEQ ID NO: 23364 - DNA, 15 bp, Homo sapiens
ggagccatggatttg

SEQ ID NO: 23365 - DNA, 15 bp, Homo sapiens
gggagccatggattt

SEQ ID NO: 23366 - DNA, 15 bp, Homo sapiens
ggggagccatggatt

SEQ ID NO: 23367 - DNA, 15 bp, Homo sapiens
tggggagccatggat

SEQ ID NO: 23368 - DNA, 15 bp, Homo sapiens
ctggggagccatgga

SEQ ID NO: 23369 - DNA, 15 bp, Homo sapiens
actggggagccatgg

SEQ ID NO: 23370 - DNA, 15 bp, Homo sapiens
cactggggagccatg

SEQ ID NO: 23371 - DNA, 15 bp, Homo sapiens
gcactggggagccat

SEQ ID NO: 23372 - DNA, 15 bp, Homo sapiens
tgcactggggagcca

SEQ ID NO: 23373 - DNA, 15 bp, Homo sapiens
gtgcactggggagcc

SEQ ID NO: 23374 - DNA, 15 bp, Homo sapiens
ggtgcactggggagc

SEQ ID NO: 23375 - DNA, 15 bp, Homo sapiens
gggtgcactggggag

SEQ ID NO: 23376 - DNA, 15 bp, Homo sapiens
tgggtgcactgggga

SEQ ID NO: 23377 - DNA, 15 bp, Homo sapiens
ctgggtgcactgggg

SEQ ID NO: 23378 - DNA, 15 bp, Homo sapiens
cctgggtgcactggg

SEQ ID NO: 23379 - DNA, 15 bp, Homo sapiens
tcctgggtgcactgg

SEQ ID NO: 23380 - DNA, 15 bp, Homo sapiens
ctcctgggtgcactg

SEQ ID NO: 23381 - DNA, 15 bp, Homo sapiens
cctcctgggtgcact

SEQ ID NO: 23382 - DNA, 15 bp, Homo sapiens
gcctcctgggtgcac

SEQ ID NO: 23383 - DNA, 15 bp, Homo sapiens
tgcctcctgggtgca

SEQ ID NO: 23384 - DNA, 15 bp, Homo sapiens
ctgcctcctgggtgc

SEQ ID NO: 23385 - DNA, 15 bp, Homo sapiens
cctgcctcctgggtg

SEQ ID NO: 23386 - DNA, 15 bp, Homo sapiens
ccctgcctcctgggt

SEQ ID NO: 23387 - DNA, 15 bp, Homo sapiens
cccctgcctcctggg

SEQ ID NO: 23388 - DNA, 15 bp, Homo sapiens
tcccctgcctcctgg

SEQ ID NO: 23389 - DNA, 15 bp, Homo sapiens
ctcccctgcctcctg

SEQ ID NO: 23390 - DNA, 15 bp, Homo sapiens
cctcccctgcctcct

SEQ ID NO: 23391 - DNA, 15 bp, Homo sapiens
gcctcccctgcctcc

SEQ ID NO: 23392 - DNA, 15 bp, Homo sapiens
agcctcccctgcctc

SEQ ID NO: 23393 - DNA, 15 bp, Homo sapiens
aagcctcccctgcct

SEQ ID NO: 23394 - DNA, 15 bp, Homo sapiens
caagcctcccctgcc

SEQ ID NO: 23395 - DNA, 15 bp, Homo sapiens
ccaagcctcccctgc

SEQ ID NO: 23396 - DNA, 15 bp, Homo sapiens
tccaagcctcccctg

SEQ ID NO: 23397 - DNA, 15 bp, Homo sapiens
ctccaagcctcccct

SEQ ID NO: 23398 - DNA, 15 bp, Homo sapiens
gctccaagcctcccc

SEQ ID NO: 23399 - DNA, 15 bp, Homo sapiens
tgctccaagcctccc

SEQ ID NO: 23400 - DNA, 15 bp, Homo sapiens
ctgctccaagcctcc

SEQ ID NO: 23401 - DNA, 15 bp, Homo sapiens
cctgctccaagcctc

SEQ ID NO: 23402 - DNA, 15 bp, Homo sapiens
tcctgctccaagcct

SEQ ID NO: 23403 - DNA, 15 bp, Homo sapiens
ctcctgctccaagcc

SEQ ID NO: 23404 - DNA, 15 bp, Homo sapiens
tctcctgctccaagc

SEQ ID NO: 23405 - DNA, 15 bp, Homo sapiens
ctctcctgctccaag

SEQ ID NO: 23406 - DNA, 15 bp, Homo sapiens
gctctcctgctccaa

SEQ ID NO: 23407 - DNA, 15 bp, Homo sapiens
agctctcctgctcca

SEQ ID NO: 23408 - DNA, 15 bp, Homo sapiens
aagctctcctgctcc

SEQ ID NO: 23409 - DNA, 15 bp, Homo sapiens
gaagctctcctgctc

SEQ ID NO: 23410 - DNA, 15 bp, Homo sapiens
agaagctctcctgct

SEQ ID NO: 23411 - DNA, 15 bp, Homo sapiens
tagaagctctcctgc

SEQ ID NO: 23412 - DNA, 15 bp, Homo sapiens
ttagaagctctcctg

SEQ ID NO: 23413 - DNA, 15 bp, Homo sapiens
cttagaagctctcct

SEQ ID NO: 23414 - DNA, 15 bp, Homo sapiens
ccttagaagctctcc

SEQ ID NO: 23415 - DNA, 15 bp, Homo sapiens
cccttagaagctctc

SEQ ID NO: 23416 - DNA, 15 bp, Homo sapiens
acccttagaagctct

SEQ ID NO: 23417 - DNA, 15 bp, Homo sapiens
cacccttagaagctc

SEQ ID NO: 23418 - DNA, 15 bp, Homo sapiens
ccacccttagaagct

SEQ ID NO: 23419 - DNA, 15 bp, Homo sapiens
cccacccttagaagc

SEQ ID NO: 23420 - DNA, 15 bp, Homo sapiens
tcccacccttagaag

SEQ ID NO: 23421 - DNA, 15 bp, Homo sapiens
ttcccacccttagaa

SEQ ID NO: 23422 - DNA, 15 bp, Homo sapiens
gttcccacccttaga

SEQ ID NO: 23423 - DNA, 15 bp, Homo sapiens
tgttcccacccttag

SEQ ID NO: 23424 - DNA, 15 bp, Homo sapiens
gtgttcccaccctta

SEQ ID NO: 23425 - DNA, 15 bp, Homo sapiens
ggtgttcccaccctt

SEQ ID NO: 23426 - DNA, 15 bp, Homo sapiens
aggtgttcccaccct

SEQ ID NO: 23427 - DNA, 15 bp, Homo sapiens
gaggtgttcccaccc

SEQ ID NO: 23428 - DNA, 15 bp, Homo sapiens
agaggtgttcccacc

SEQ ID NO: 23429 - DNA, 15 bp, Homo sapiens
cagaggtgttcccac

SEQ ID NO: 23430 - DNA, 15 bp, Homo sapiens
acagaggtgttccca

SEQ ID NO: 23431 - DNA, 15 bp, Homo sapiens
cacagaggtgttccc

SEQ ID NO: 23432 - DNA, 15 bp, Homo sapiens
tcacagaggtgttcc

SEQ ID NO: 23433 - DNA, 15 bp, Homo sapiens
ttcacagaggtgttc

SEQ ID NO: 23434 - DNA, 15 bp, Homo sapiens
cttcacagaggtgtt

SEQ ID NO: 23435 - DNA, 15 bp, Homo sapiens
acttcacagaggtgt

SEQ ID NO: 23436 - DNA, 15 bp, Homo sapiens
aacttcacagaggtg

SEQ ID NO: 23437 - DNA, 15 bp, Homo sapiens
taacttcacagaggt

SEQ ID NO: 23438 - DNA, 15 bp, Homo sapiens
gtaacttcacagagg

SEQ ID NO: 23439 - DNA, 15 bp, Homo sapiens
tgtaacttcacagag

SEQ ID NO: 23440 - DNA, 15 bp, Homo sapiens
gtgtaacttcacaga

SEQ ID NO: 23441 - DNA, 15 bp, Homo sapiens
ggtgtaacttcacag

SEQ ID NO: 23442 - DNA, 15 bp, Homo sapiens
tggtgtaacttcaca

SEQ ID NO: 23443 - DNA, 15 bp, Homo sapiens
ttggtgtaacttcac

SEQ ID NO: 23444 - DNA, 15 bp, Homo sapiens
tttggtgtaacttca

SEQ ID NO: 23445 - DNA, 15 bp, Homo sapiens
ttttggtgtaacttc

SEQ ID NO: 23446 - DNA, 15 bp, Homo sapiens
tttttggtgtaactt

SEQ ID NO: 23447 - DNA, 15 bp, Homo sapiens
atttttggtgtaact

SEQ ID NO: 23448 - DNA, 15 bp, Homo sapiens
gatttttggtgtaac

SEQ ID NO: 23449 - DNA, 15 bp, Homo sapiens
agatttttggtgtaa

SEQ ID NO: 23450 - DNA, 15 bp, Homo sapiens
tagatttttggtgta

SEQ ID NO: 23451 - DNA, 15 bp, Homo sapiens
ttagatttttggtgt

SEQ ID NO: 23452 - DNA, 15 bp, Homo sapiens
cttagatttttggtg

SEQ ID NO: 23453 - DNA, 15 bp, Homo sapiens
tcttagatttttggt

SEQ ID NO: 23454 - DNA, 15 bp, Homo sapiens
ctcttagatttttgg

SEQ ID NO: 23455 - DNA, 15 bp, Homo sapiens
gctcttagatttttg

SEQ ID NO: 23456 - DNA, 15 bp, Homo sapiens
tgctcttagattttt

SEQ ID NO: 23457 - DNA, 15 bp, Homo sapiens
ctgctcttagatttt

SEQ ID NO: 23458 - DNA, 15 bp, Homo sapiens
gctgctcttagattt

SEQ ID NO: 23459 - DNA, 15 bp, Homo sapiens
ggctgctcttagatt

SEQ ID NO: 23460 - DNA, 15 bp, Homo sapiens
gggctgctcttagat

SEQ ID NO: 23461 - DNA, 15 bp, Homo sapiens
ggggctgctcttaga

SEQ ID NO: 23462 - DNA, 15 bp, Homo sapiens
gggggctgctcttag

SEQ ID NO: 23463 - DNA, 15 bp, Homo sapiens
tgggggctgctctta

SEQ ID NO: 23464 - DNA, 15 bp, Homo sapiens
ctgggggctgctctt

SEQ ID NO: 23465 - DNA, 15 bp, Homo sapiens
tctgggggctgctct

SEQ ID NO: 23466 - DNA, 15 bp, Homo sapiens
atctgggggctgctc

SEQ ID NO: 23467 - DNA, 15 bp, Homo sapiens
gatctgggggctgct

SEQ ID NO: 23468 - DNA, 15 bp, Homo sapiens
tgatctgggggctgc

SEQ ID NO: 23469 - DNA, 15 bp, Homo sapiens
atgatctgggggctg

SEQ ID NO: 23470 - DNA, 15 bp, Homo sapiens
aatgatctgggggct

SEQ ID NO: 23471 - DNA, 15 bp, Homo sapiens
aaatgatctgggggc

SEQ ID NO: 23472 - DNA, 15 bp, Homo sapiens
aaaatgatctggggg

SEQ ID NO: 23473 - DNA, 15 bp, Homo sapiens
gaaaatgatctgggg

SEQ ID NO: 23474 - DNA, 15 bp, Homo sapiens
ggaaaatgatctggg

SEQ ID NO: 23475 - DNA, 15 bp, Homo sapiens
gggaaaatgatctgg

SEQ ID NO: 23476 - DNA, 15 bp, Homo sapiens
agggaaaatgatctg

SEQ ID NO: 23477 - DNA, 15 bp, Homo sapiens
cagggaaaatgatct

SEQ ID NO: 23478 - DNA, 15 bp, Homo sapiens
gcagggaaaatgatc

SEQ ID NO: 23479 - DNA, 15 bp, Homo sapiens
tgcagggaaaatgat

SEQ ID NO: 23480 - DNA, 15 bp, Homo sapiens
ctgcagggaaaatga

SEQ ID NO: 23481 - DNA, 15 bp, Homo sapiens
tctgcagggaaaatg

SEQ ID NO: 23482 - DNA, 15 bp, Homo sapiens
ctctgcagggaaaat

SEQ ID NO: 23483 - DNA, 15 bp, Homo sapiens
gctctgcagggaaaa

SEQ ID NO: 23484 - DNA, 15 bp, Homo sapiens
tgctctgcagggaaa

SEQ ID NO: 23485 - DNA, 15 bp, Homo sapiens
gtgctctgcagggaa

SEQ ID NO: 23486 - DNA, 15 bp, Homo sapiens
agtgctctgcaggga

SEQ ID NO: 23487 - DNA, 15 bp, Homo sapiens
cagtgctctgcaggg

SEQ ID NO: 23488 - DNA, 15 bp, Homo sapiens
acagtgctctgcagg

SEQ ID NO: 23489 - DNA, 15 bp, Homo sapiens
gacagtgctctgcag

SEQ ID NO: 23490 - DNA, 15 bp, Homo sapiens
agacagtgctctgca

SEQ ID NO: 23491 - DNA, 15 bp, Homo sapiens
gagacagtgctctgc

SEQ ID NO: 23492 - DNA, 15 bp, Homo sapiens
tgagacagtgctctg

SEQ ID NO: 23493 - DNA, 15 bp, Homo sapiens
gtgagacagtgctct

SEQ ID NO: 23494 - DNA, 15 bp, Homo sapiens
tgtgagacagtgctc

SEQ ID NO: 23495 - DNA, 15 bp, Homo sapiens
ctgtgagacagtgct

SEQ ID NO: 23496 - DNA, 15 bp, Homo sapiens
gctgtgagacagtgc

SEQ ID NO: 23497 - DNA, 15 bp, Homo sapiens
tgctgtgagacagtg

SEQ ID NO: 23498 - DNA, 15 bp, Homo sapiens
ctgctgtgagacagt

SEQ ID NO: 23499 - DNA, 15 bp, Homo sapiens
gctgctgtgagacag

SEQ ID NO: 23500 - DNA, 15 bp, Homo sapiens
ggctgctgtgagaca

SEQ ID NO: 23501 - DNA, 15 bp, Homo sapiens
aggctgctgtgagac

SEQ ID NO: 23502 - DNA, 15 bp, Homo sapiens
caggctgctgtgaga

SEQ ID NO: 23503 - DNA, 15 bp, Homo sapiens
ccaggctgctgtgag

SEQ ID NO: 23504 - DNA, 15 bp, Homo sapiens
cccaggctgctgtga

SEQ ID NO: 23505 - DNA, 15 bp, Homo sapiens
acccaggctgctgtg

SEQ ID NO: 23506 - DNA, 15 bp, Homo sapiens
aacccaggctgctgt

SEQ ID NO: 23507 - DNA, 15 bp, Homo sapiens
aaacccaggctgctg

SEQ ID NO: 23508 - DNA, 15 bp, Homo sapiens
aaaacccaggctgct

SEQ ID NO: 23509 - DNA, 15 bp, Homo sapiens
taaaacccaggctgc

SEQ ID NO: 23510 - DNA, 15 bp, Homo sapiens
ataaaacccaggctg

SEQ ID NO: 23511 - DNA, 15 bp, Homo sapiens
aataaaacccaggct

SEQ ID NO: 23512 - DNA, 15 bp, Homo sapiens
aaataaaacccaggc

SEQ ID NO: 23513 - DNA, 15 bp, Homo sapiens
caaataaaacccagg

SEQ ID NO: 23514 - DNA, 15 bp, Homo sapiens
acaaataaaacccag

SEQ ID NO: 23515 - DNA, 15 bp, Homo sapiens
gacaaataaaaccca

SEQ ID NO: 23516 - DNA, 15 bp, Homo sapiens
ggacaaataaaaccc

SEQ ID NO: 23517 - DNA, 15 bp, Homo sapiens
aggacaaataaaacc

SEQ ID NO: 23518 - DNA, 15 bp, Homo sapiens
caggacaaataaaac

SEQ ID NO: 23519 - DNA, 15 bp, Homo sapiens
tcaggacaaataaaa

SEQ ID NO: 23520 - DNA, 15 bp, Homo sapiens
ctcaggacaaataaa

SEQ ID NO: 23521 - DNA, 15 bp, Homo sapiens
tctcaggacaaataa

SEQ ID NO: 23522 - DNA, 15 bp, Homo sapiens
atctcaggacaaata

SEQ ID NO: 23523 - DNA, 15 bp, Homo sapiens
aatctcaggacaaat

SEQ ID NO: 23524 - DNA, 15 bp, Homo sapiens
caatctcaggacaaa

SEQ ID NO: 23525 - DNA, 15 bp, Homo sapiens
tcaatctcaggacaa

SEQ ID NO: 23526 - DNA, 15 bp, Homo sapiens
atcaatctcaggaca

SEQ ID NO: 23527 - DNA, 15 bp, Homo sapiens
catcaatctcaggac

SEQ ID NO: 23528 - DNA, 15 bp, Homo sapiens
acatcaatctcagga

SEQ ID NO: 23529 - DNA, 15 bp, Homo sapiens
cacatcaatctcagg

SEQ ID NO: 23530 - DNA, 15 bp, Homo sapiens
gcacatcaatctcag

SEQ ID NO: 23531 - DNA, 15 bp, Homo sapiens
agcacatcaatctca

SEQ ID NO: 23532 - DNA, 15 bp, Homo sapiens
aagcacatcaatctc

SEQ ID NO: 23533 - DNA, 15 bp, Homo sapiens
caagcacatcaatct

SEQ ID NO: 23534 - DNA, 15 bp, Homo sapiens
tcaagcacatcaatc

SEQ ID NO: 23535 - DNA, 15 bp, Homo sapiens
ttcaagcacatcaat

SEQ ID NO: 23536 - DNA, 15 bp, Homo sapiens
gttcaagcacatcaa

SEQ ID NO: 23537 - DNA, 15 bp, Homo sapiens
tgttcaagcacatca

SEQ ID NO: 23538 - DNA, 15 bp, Homo sapiens
ctgttcaagcacatc

SEQ ID NO: 23539 - DNA, 15 bp, Homo sapiens
actgttcaagcacat

SEQ ID NO: 23540 - DNA, 15 bp, Homo sapiens
gactgttcaagcaca

SEQ ID NO: 23541 - DNA, 15 bp, Homo sapiens
agactgttcaagcac

SEQ ID NO: 23542 - DNA, 15 bp, Homo sapiens
aagactgttcaagca

SEQ ID NO: 23543 - DNA, 15 bp, Homo sapiens
gaagactgttcaagc

SEQ ID NO: 23544 - DNA, 15 bp, Homo sapiens
tgaagactgttcaag

SEQ ID NO: 23545 - DNA, 15 bp, Homo sapiens
ttgaagactgttcaa

SEQ ID NO: 23546 - DNA, 15 bp, Homo sapiens
tttgaagactgttca

SEQ ID NO: 23547 - DNA, 15 bp, Homo sapiens
ctttgaagactgttc

SEQ ID NO: 23548 - DNA, 15 bp, Homo sapiens
cctttgaagactgtt

SEQ ID NO: 23549 - DNA, 15 bp, Homo sapiens
ccctttgaagactgt

SEQ ID NO: 23550 - DNA, 15 bp, Homo sapiens
accctttgaagactg

SEQ ID NO: 23551 - DNA, 15 bp, Homo sapiens
gaccctttgaagact

SEQ ID NO: 23552 - DNA, 15 bp, Homo sapiens
agaccctttgaagac

SEQ ID NO: 23553 - DNA, 15 bp, Homo sapiens
cagaccctttgaaga

SEQ ID NO: 23554 - DNA, 15 bp, Homo sapiens
tcagaccctttgaag

SEQ ID NO: 23555 - DNA, 15 bp, Homo sapiens
atcagaccctttgaa

SEQ ID NO: 23556 - DNA, 15 bp, Homo sapiens
gatcagaccctttga

SEQ ID NO: 23557 - DNA, 15 bp, Homo sapiens
ggatcagaccctttg

SEQ ID NO: 23558 - DNA, 15 bp, Homo sapiens
cggatcagacccttt

SEQ ID NO: 23559 - DNA, 15 bp, Homo sapiens
tcggatcagaccctt

SEQ ID NO: 23560 - DNA, 15 bp, Homo sapiens
ctcggatcagaccct

SEQ ID NO: 23561 - DNA, 15 bp, Homo sapiens
cctcggatcagaccc

SEQ ID NO: 23562 - DNA, 15 bp, Homo sapiens
tcctcggatcagacc

SEQ ID NO: 23563 - DNA, 15 bp, Homo sapiens
ctcctcggatcagac

SEQ ID NO: 23564 - DNA, 15 bp, Homo sapiens
cctcctcggatcaga

SEQ ID NO: 23565 - DNA, 15 bp, Homo sapiens
acctcctcggatcag

SEQ ID NO: 23566 - DNA, 15 bp, Homo sapiens
cacctcctcggatca

SEQ ID NO: 23567 - DNA, 15 bp, Homo sapiens
tcacctcctcggatc

SEQ ID NO: 23568 - DNA, 15 bp, Homo sapiens
ctcacctcctcggat

SEQ ID NO: 23569 - DNA, 15 bp, Homo sapiens
cctcacctcctcgga

SEQ ID NO: 23570 - DNA, 15 bp, Homo sapiens
ccctcacctcctcgg

SEQ ID NO: 23571 - DNA, 15 bp, Homo sapiens
accctcacctcctcg

SEQ ID NO: 23572 - DNA, 15 bp, Homo sapiens
aaccctcacctcctc

SEQ ID NO: 23573 - DNA, 15 bp, Homo sapiens
caaccctcacctcct

SEQ ID NO: 23574 - DNA, 15 bp, Homo sapiens
gcaaccctcacctcc

SEQ ID NO: 23575 - DNA, 15 bp, Homo sapiens
ggcaaccctcacctc

SEQ ID NO: 23576 - DNA, 15 bp, Homo sapiens
gggcaaccctcacct

SEQ ID NO: 23577 - DNA, 15 bp, Homo sapiens
agggcaaccctcacc

SEQ ID NO: 23578 - DNA, 15 bp, Homo sapiens
aagggcaaccctcac

SEQ ID NO: 23579 - DNA, 15 bp, Homo sapiens
aaagggcaaccctca

SEQ ID NO: 23580 - DNA, 15 bp, Homo sapiens
gaaagggcaaccctc

SEQ ID NO: 23581 - DNA, 15 bp, Homo sapiens
agaaagggcaaccct

SEQ ID NO: 23582 - DNA, 15 bp, Homo sapiens
cagaaagggcaaccc

SEQ ID NO: 23583 - DNA, 15 bp, Homo sapiens
gcagaaagggcaacc

SEQ ID NO: 23584 - DNA, 15 bp, Homo sapiens
tgcagaaagggcaac

SEQ ID NO: 23585 - DNA, 15 bp, Homo sapiens
atgcagaaagggcaa

SEQ ID NO: 23586 - DNA, 15 bp, Homo sapiens
aatgcagaaagggca

SEQ ID NO: 23587 - DNA, 15 bp, Homo sapiens
aaatgcagaaagggc

SEQ ID NO: 23588 - DNA, 15 bp, Homo sapiens
taaatgcagaaaggg

SEQ ID NO: 23589 - DNA, 15 bp, Homo sapiens
gtaaatgcagaaagg

SEQ ID NO: 23590 - DNA, 15 bp, Homo sapiens
tgtaaatgcagaaag

SEQ ID NO: 23591 - DNA, 15 bp, Homo sapiens
ttgtaaatgcagaaa

SEQ ID NO: 23592 - DNA, 15 bp, Homo sapiens
tttgtaaatgcagaa

SEQ ID NO: 23593 - DNA, 15 bp, Homo sapiens
ctttgtaaatgcaga

SEQ ID NO: 23594 - DNA, 15 bp, Homo sapiens
gctttgtaaatgcag

SEQ ID NO: 23595 - DNA, 15 bp, Homo sapiens
ggctttgtaaatgca

SEQ ID NO: 23596 - DNA, 15 bp, Homo sapiens
aggctttgtaaatgc

SEQ ID NO: 23597 - DNA, 15 bp, Homo sapiens
caggctttgtaaatg

SEQ ID NO: 23598 - DNA, 15 bp, Homo sapiens
tcaggctttgtaaat

SEQ ID NO: 23599 - DNA, 15 bp, Homo sapiens
ttcaggctttgtaaa

SEQ ID NO: 23600 - DNA, 15 bp, Homo sapiens
gttcaggctttgtaa

SEQ ID NO: 23601 - DNA, 15 bp, Homo sapiens
tgttcaggctttgta

SEQ ID NO: 23602 - DNA, 15 bp, Homo sapiens
ctgttcaggctttgt

SEQ ID NO: 23603 - DNA, 15 bp, Homo sapiens
actgttcaggctttg

SEQ ID NO: 23604 - DNA, 15 bp, Homo sapiens
tactgttcaggcttt

SEQ ID NO: 23605 - DNA, 15 bp, Homo sapiens
atactgttcaggctt

SEQ ID NO: 23606 - DNA, 15 bp, Homo sapiens
aatactgttcaggct

SEQ ID NO: 23607 - DNA, 15 bp, Homo sapiens
taatactgttcaggc

SEQ ID NO: 23608 - DNA, 15 bp, Homo sapiens
ctaatactgttcagg

SEQ ID NO: 23609 - DNA, 15 bp, Homo sapiens
cctaatactgttcag

SEQ ID NO: 23610 - DNA, 15 bp, Homo sapiens
ccctaatactgttca

SEQ ID NO: 23611 - DNA, 15 bp, Homo sapiens
gccctaatactgttc

SEQ ID NO: 23612 - DNA, 15 bp, Homo sapiens
agccctaatactgtt

SEQ ID NO: 23613 - DNA, 15 bp, Homo sapiens
aagccctaatactgt

SEQ ID NO: 23614 - DNA, 15 bp, Homo sapiens
aaagccctaatactg

SEQ ID NO: 23615 - DNA, 15 bp, Homo sapiens
caaagccctaatact

SEQ ID NO: 23616 - DNA, 15 bp, Homo sapiens
tcaaagccctaatac

SEQ ID NO: 23617 - DNA, 15 bp, Homo sapiens
ttcaaagccctaata

SEQ ID NO: 23618 - DNA, 15 bp, Homo sapiens
gttcaaagccctaat

SEQ ID NO: 23619 - DNA, 15 bp, Homo sapiens
cgttcaaagccctaa

SEQ ID NO: 23620 - DNA, 15 bp, Homo sapiens
gcgttcaaagcccta

SEQ ID NO: 23621 - DNA, 15 bp, Homo sapiens
agcgttcaaagccct

SEQ ID NO: 23622 - DNA, 15 bp, Homo sapiens
tagcgttcaaagccc

SEQ ID NO: 23623 - DNA, 15 bp, Homo sapiens
atagcgttcaaagcc

SEQ ID NO: 23624 - DNA, 15 bp, Homo sapiens
tatagcgttcaaagc

SEQ ID NO: 23625 - DNA, 15 bp, Homo sapiens
ttatagcgttcaaag

SEQ ID NO: 23626 - DNA, 15 bp, Homo sapiens
tttatagcgttcaaa

SEQ ID NO: 23627 - DNA, 15 bp, Homo sapiens
gtttatagcgttcaa

SEQ ID NO: 23628 - DNA, 15 bp, Homo sapiens
tgtttatagcgttca

SEQ ID NO: 23629 - DNA, 15 bp, Homo sapiens
atgtttatagcgttc

SEQ ID NO: 23630 - DNA, 15 bp, Homo sapiens
gatgtttatagcgtt

SEQ ID NO: 23631 - DNA, 15 bp, Homo sapiens
agatgtttatagcgt

SEQ ID NO: 23632 - DNA, 15 bp, Homo sapiens
tagatgtttatagcg

SEQ ID NO: 23633 - DNA, 15 bp, Homo sapiens
ttagatgtttatagc

SEQ ID NO: 23634 - DNA, 15 bp, Homo sapiens
cttagatgtttatag

SEQ ID NO: 23635 - DNA, 15 bp, Homo sapiens
tcttagatgtttata

SEQ ID NO: 23636 - DNA, 15 bp, Homo sapiens
ctcttagatgtttat

SEQ ID NO: 23637 - DNA, 15 bp, Homo sapiens
cctcttagatgttta

SEQ ID NO: 23638 - DNA, 15 bp, Homo sapiens
gcctcttagatgttt

SEQ ID NO: 23639 - DNA, 15 bp, Homo sapiens
tgcctcttagatgtt

SEQ ID NO: 23640 - DNA, 15 bp, Homo sapiens
ctgcctcttagatgt

SEQ ID NO: 23641 - DNA, 15 bp, Homo sapiens
gctgcctcttagatg

SEQ ID NO: 23642 - DNA, 15 bp, Homo sapiens
tgctgcctcttagat

SEQ ID NO: 23643 - DNA, 15 bp, Homo sapiens
gtgctgcctcttaga

SEQ ID NO: 23644 - DNA, 15 bp, Homo sapiens
ggtgctgcctcttag

SEQ ID NO: 23645 - DNA, 15 bp, Homo sapiens
tggtgctgcctctta

SEQ ID NO: 23646 - DNA, 15 bp, Homo sapiens
ttggtgctgcctctt

SEQ ID NO: 23647 - DNA, 15 bp, Homo sapiens
tttggtgctgcctct

SEQ ID NO: 23648 - DNA, 15 bp, Homo sapiens
gtttggtgctgcctc

SEQ ID NO: 23649 - DNA, 15 bp, Homo sapiens
ggtttggtgctgcct

SEQ ID NO: 23650 - DNA, 15 bp, Homo sapiens
tggtttggtgctgcc

SEQ ID NO: 23651 - DNA, 15 bp, Homo sapiens
gtggtttggtgctgc

SEQ ID NO: 23652 - DNA, 15 bp, Homo sapiens
agtggtttggtgctg

SEQ ID NO: 23653 - DNA, 15 bp, Homo sapiens
cagtggtttggtgct

SEQ ID NO: 23654 - DNA, 15 bp, Homo sapiens
gcagtggtttggtgc

SEQ ID NO: 23655 - DNA, 15 bp, Homo sapiens
agcagtggtttggtg

SEQ ID NO: 23656 - DNA, 15 bp, Homo sapiens
cagcagtggtttggt

SEQ ID NO: 23657 - DNA, 15 bp, Homo sapiens
ccagcagtggtttgg

SEQ ID NO: 23658 - DNA, 15 bp, Homo sapiens
cccagcagtggtttg

SEQ ID NO: 23659 - DNA, 15 bp, Homo sapiens
acccagcagtggttt

SEQ ID NO: 23660 - DNA, 15 bp, Homo sapiens
aacccagcagtggtt

SEQ ID NO: 23661 - DNA, 15 bp, Homo sapiens
taacccagcagtggt

SEQ ID NO: 23662 - DNA, 15 bp, Homo sapiens
ttaacccagcagtgg

SEQ ID NO: 23663 - DNA, 15 bp, Homo sapiens
cttaacccagcagtg

SEQ ID NO: 23664 - DNA, 15 bp, Homo sapiens
ccttaacccagcagt

SEQ ID NO: 23665 - DNA, 15 bp, Homo sapiens
accttaacccagcag

SEQ ID NO: 23666 - DNA, 15 bp, Homo sapiens
taccttaacccagca

SEQ ID NO: 23667 - DNA, 15 bp, Homo sapiens
gtaccttaacccagc

SEQ ID NO: 23668 - DNA, 15 bp, Homo sapiens
ggtaccttaacccag

SEQ ID NO: 23669 - DNA, 15 bp, Homo sapiens
gggtaccttaaccca

SEQ ID NO: 23670 - DNA, 15 bp, Homo sapiens
ggggtaccttaaccc

SEQ ID NO: 23671 - DNA, 15 bp, Homo sapiens
gggggtaccttaacc

SEQ ID NO: 23672 - DNA, 15 bp, Homo sapiens
tgggggtaccttaac

SEQ ID NO: 23673 - DNA, 15 bp, Homo sapiens
gtgggggtaccttaa

SEQ ID NO: 23674 - DNA, 15 bp, Homo sapiens
tgtgggggtacctta

SEQ ID NO: 23675 - DNA, 15 bp, Homo sapiens
ttgtgggggtacctt

SEQ ID NO: 23676 - DNA, 15 bp, Homo sapiens
attgtgggggtacct

SEQ ID NO: 23677 - DNA, 15 bp, Homo sapiens
cattgtgggggtacc

SEQ ID NO: 23678 - DNA, 15 bp, Homo sapiens
gcattgtgggggtac

SEQ ID NO: 23679 - DNA, 15 bp, Homo sapiens
ggcattgtgggggta

SEQ ID NO: 23680 - DNA, 15 bp, Homo sapiens
tggcattgtgggggt

SEQ ID NO: 23681 - DNA, 15 bp, Homo sapiens
gtggcattgtggggg

SEQ ID NO: 23682 - DNA, 15 bp, Homo sapiens
agtggcattgtgggg

SEQ ID NO: 23683 - DNA, 15 bp, Homo sapiens
aagtggcattgtggg

SEQ ID NO: 23684 - DNA, 15 bp, Homo sapiens
caagtggcattgtgg

SEQ ID NO: 23685 - DNA, 15 bp, Homo sapiens
gcaagtggcattgtg

SEQ ID NO: 23686 - DNA, 15 bp, Homo sapiens
ggcaagtggcattgt

SEQ ID NO: 23687 - DNA, 15 bp, Homo sapiens
gggcaagtggcattg

SEQ ID NO: 23688 - DNA, 15 bp, Homo sapiens
agggcaagtggcatt

SEQ ID NO: 23689 - DNA, 15 bp, Homo sapiens
cagggcaagtggcat

SEQ ID NO: 23690 - DNA, 15 bp, Homo sapiens
ccagggcaagtggca

SEQ ID NO: 23691 - DNA, 15 bp, Homo sapiens
cccagggcaagtggc

SEQ ID NO: 23692 - DNA, 15 bp, Homo sapiens
gcccagggcaagtgg

SEQ ID NO: 23693 - DNA, 15 bp, Homo sapiens
ggcccagggcaagtg

SEQ ID NO: 23694 - DNA, 15 bp, Homo sapiens
aggcccagggcaagt

SEQ ID NO: 23695 - DNA, 15 bp, Homo sapiens
aaggcccagggcaag

SEQ ID NO: 23696 - DNA, 15 bp, Homo sapiens
aaaggcccagggcaa

SEQ ID NO: 23697 - DNA, 15 bp, Homo sapiens
gaaaggcccagggca

SEQ ID NO: 23698 - DNA, 15 bp, Homo sapiens
agaaaggcccagggc

SEQ ID NO: 23699 - DNA, 15 bp, Homo sapiens
gagaaaggcccaggg

SEQ ID NO: 23700 - DNA, 15 bp, Homo sapiens
agagaaaggcccagg

SEQ ID NO: 23701 - DNA, 15 bp, Homo sapiens
aagagaaaggcccag

SEQ ID NO: 23702 - DNA, 15 bp, Homo sapiens
gaagagaaaggccca

SEQ ID NO: 23703 - DNA, 15 bp, Homo sapiens
ggaagagaaaggccc

SEQ ID NO: 23704 - DNA, 15 bp, Homo sapiens
aggaagagaaaggcc

SEQ ID NO: 23705 - DNA, 15 bp, Homo sapiens
gaggaagagaaaggc

SEQ ID NO: 23706 - DNA, 15 bp, Homo sapiens
tgaggaagagaaagg

SEQ ID NO: 23707 - DNA, 15 bp, Homo sapiens
gtgaggaagagaaag

SEQ ID NO: 23708 - DNA, 15 bp, Homo sapiens
ggtgaggaagagaaa

SEQ ID NO: 23709 - DNA, 15 bp, Homo sapiens
gggtgaggaagagaa

SEQ ID NO: 23710 - DNA, 15 bp, Homo sapiens
agggtgaggaagaga

SEQ ID NO: 23711 - DNA, 15 bp, Homo sapiens
gagggtgaggaagag

SEQ ID NO: 23712 - DNA, 15 bp, Homo sapiens
ggagggtgaggaaga

SEQ ID NO: 23713 - DNA, 15 bp, Homo sapiens
tggagggtgaggaag

SEQ ID NO: 23714 - DNA, 15 bp, Homo sapiens
gtggagggtgaggaa

SEQ ID NO: 23715 - DNA, 15 bp, Homo sapiens
tgtggagggtgagga

SEQ ID NO: 23716 - DNA, 15 bp, Homo sapiens
ctgtggagggtgagg

SEQ ID NO: 23717 - DNA, 15 bp, Homo sapiens
gctgtggagggtgag

SEQ ID NO: 23718 - DNA, 15 bp, Homo sapiens
ggctgtggagggtga

SEQ ID NO: 23719 - DNA, 15 bp, Homo sapiens
gggctgtggagggtg

SEQ ID NO: 23720 - DNA, 15 bp, Homo sapiens
ggggctgtggagggt

SEQ ID NO: 23721 - DNA, 15 bp, Homo sapiens
aggggctgtggaggg

SEQ ID NO: 23722 - DNA, 15 bp, Homo sapiens
aaggggctgtggagg

SEQ ID NO: 23723 - DNA, 15 bp, Homo sapiens
taaggggctgtggag

SEQ ID NO: 23724 - DNA, 15 bp, Homo sapiens
ttaaggggctgtgga

SEQ ID NO: 23725 - DNA, 15 bp, Homo sapiens
gttaaggggctgtgg

SEQ ID NO: 23726 - DNA, 15 bp, Homo sapiens
agttaaggggctgtg

SEQ ID NO: 23727 - DNA, 15 bp, Homo sapiens
gagttaaggggctgt

SEQ ID NO: 23728 - DNA, 15 bp, Homo sapiens
agagttaaggggctg

SEQ ID NO: 23729 - DNA, 15 bp, Homo sapiens
gagagttaaggggct

SEQ ID NO: 23730 - DNA, 15 bp, Homo sapiens
ggagagttaaggggc

SEQ ID NO: 23731 - DNA, 15 bp, Homo sapiens
gggagagttaagggg

SEQ ID NO: 23732 - DNA, 15 bp, Homo sapiens
cgggagagttaaggg

SEQ ID NO: 23733 - DNA, 15 bp, Homo sapiens
acgggagagttaagg

SEQ ID NO: 23734 - DNA, 15 bp, Homo sapiens
gacgggagagttaag

SEQ ID NO: 23735 - DNA, 15 bp, Homo sapiens
ggacgggagagttaa

SEQ ID NO: 23736 - DNA, 15 bp, Homo sapiens
aggacgggagagtta

SEQ ID NO: 23737 - DNA, 15 bp, Homo sapiens
aaggacgggagagtt

SEQ ID NO: 23738 - DNA, 15 bp, Homo sapiens
gaaggacgggagagt

SEQ ID NO: 23739 - DNA, 15 bp, Homo sapiens
agaaggacgggagag

SEQ ID NO: 23740 - DNA, 15 bp, Homo sapiens
aagaaggacgggaga

SEQ ID NO: 23741 - DNA, 15 bp, Homo sapiens
caagaaggacgggag

SEQ ID NO: 23742 - DNA, 15 bp, Homo sapiens
acaagaaggacggga

SEQ ID NO: 23743 - DNA, 15 bp, Homo sapiens
cacaagaaggacggg

SEQ ID NO: 23744 - DNA, 15 bp, Homo sapiens
gcacaagaaggacgg

SEQ ID NO: 23745 - DNA, 15 bp, Homo sapiens
ggcacaagaaggacg

SEQ ID NO: 23746 - DNA, 15 bp, Homo sapiens
aggcacaagaaggac

SEQ ID NO: 23747 - DNA, 15 bp, Homo sapiens
gaggcacaagaagga

SEQ ID NO: 23748 - DNA, 15 bp, Homo sapiens
ggaggcacaagaagg

SEQ ID NO: 23749 - DNA, 15 bp, Homo sapiens
tggaggcacaagaag

SEQ ID NO: 23750 - DNA, 15 bp, Homo sapiens
ctggaggcacaagaa

SEQ ID NO: 23751 - DNA, 15 bp, Homo sapiens
cctggaggcacaaga

SEQ ID NO: 23752 - DNA, 15 bp, Homo sapiens
acctggaggcacaag

SEQ ID NO: 23753 - DNA, 15 bp, Homo sapiens
cacctggaggcacaa

SEQ ID NO: 23754 - DNA, 15 bp, Homo sapiens
ccacctggaggcaca

SEQ ID NO: 23755 - DNA, 15 bp, Homo sapiens
gccacctggaggcac

SEQ ID NO: 23756 - DNA, 15 bp, Homo sapiens
tgccacctggaggca

SEQ ID NO: 23757 - DNA, 15 bp, Homo sapiens
atgccacctggaggc

SEQ ID NO: 23758 - DNA, 15 bp, Homo sapiens
catgccacctggagg

SEQ ID NO: 23759 - DNA, 15 bp, Homo sapiens
gcatgccacctggag

SEQ ID NO: 23760 - DNA, 15 bp, Homo sapiens
tgcatgccacctgga

SEQ ID NO: 23761 - DNA, 15 bp, Homo sapiens
ctgcatgccacctgg

SEQ ID NO: 23762 - DNA, 15 bp, Homo sapiens
tctgcatgccacctg

SEQ ID NO: 23763 - DNA, 15 bp, Homo sapiens
ctctgcatgccacct

SEQ ID NO: 23764 - DNA, 15 bp, Homo sapiens
tctctgcatgccacc

SEQ ID NO: 23765 - DNA, 15 bp, Homo sapiens
ttctctgcatgccac

SEQ ID NO: 23766 - DNA, 15 bp, Homo sapiens
tttctctgcatgcca

SEQ ID NO: 23767 - DNA, 15 bp, Homo sapiens
ctttctctgcatgcc

SEQ ID NO: 23768 - DNA, 15 bp, Homo sapiens
gctttctctgcatgc

SEQ ID NO: 23769 - DNA, 15 bp, Homo sapiens
agctttctctgcatg

SEQ ID NO: 23770 - DNA, 15 bp, Homo sapiens
cagctttctctgcat

SEQ ID NO: 23771 - DNA, 15 bp, Homo sapiens
acagctttctctgca

SEQ ID NO: 23772 - DNA, 15 bp, Homo sapiens
gacagctttctctgc

SEQ ID NO: 23773 - DNA, 15 bp, Homo sapiens
cgacagctttctctg

SEQ ID NO: 23774 - DNA, 15 bp, Homo sapiens
ccgacagctttctct

SEQ ID NO: 23775 - DNA, 15 bp, Homo sapiens
accgacagctttctc

SEQ ID NO: 23776 - DNA, 15 bp, Homo sapiens
aaccgacagctttct

SEQ ID NO: 23777 - DNA, 15 bp, Homo sapiens
caaccgacagctttc

SEQ ID NO: 23778 - DNA, 15 bp, Homo sapiens
gcaaccgacagcttt

SEQ ID NO: 23779 - DNA, 15 bp, Homo sapiens
ggcaaccgacagctt

SEQ ID NO: 23780 - DNA, 15 bp, Homo sapiens
tggcaaccgacagct

SEQ ID NO: 23781 - DNA, 15 bp, Homo sapiens
atggcaaccgacagc

SEQ ID NO: 23782 - DNA, 15 bp, Homo sapiens
aatggcaaccgacag

SEQ ID NO: 23783 - DNA, 15 bp, Homo sapiens
caatggcaaccgaca

SEQ ID NO: 23784 - DNA, 15 bp, Homo sapiens
gcaatggcaaccgac

SEQ ID NO: 23785 - DNA, 15 bp, Homo sapiens
ggcaatggcaaccga

SEQ ID NO: 23786 - DNA, 15 bp, Homo sapiens
aggcaatggcaaccg

SEQ ID NO: 23787 - DNA, 15 bp, Homo sapiens
aaggcaatggcaacc

SEQ ID NO: 23788 - DNA, 15 bp, Homo sapiens
aaaggcaatggcaac

SEQ ID NO: 23789 - DNA, 15 bp, Homo sapiens
caaaggcaatggcaa

SEQ ID NO: 23790 - DNA, 15 bp, Homo sapiens
acaaaggcaatggca

SEQ ID NO: 23791 - DNA, 15 bp, Homo sapiens
cacaaaggcaatggc

SEQ ID NO: 23792 - DNA, 15 bp, Homo sapiens
ccacaaaggcaatgg

SEQ ID NO: 23793 - DNA, 15 bp, Homo sapiens
cccacaaaggcaatg

SEQ ID NO: 23794 - DNA, 15 bp, Homo sapiens
tcccacaaaggcaat

SEQ ID NO: 23795 - DNA, 15 bp, Homo sapiens
ctcccacaaaggcaa

SEQ ID NO: 23796 - DNA, 15 bp, Homo sapiens
tctcccacaaaggca

SEQ ID NO: 23797 - DNA, 15 bp, Homo sapiens
atctcccacaaaggc

SEQ ID NO: 23798 - DNA, 15 bp, Homo sapiens
catctcccacaaagg

SEQ ID NO: 23799 - DNA, 15 bp, Homo sapiens
gcatctcccacaaag

SEQ ID NO: 23800 - DNA, 15 bp, Homo sapiens
ggcatctcccacaaa

SEQ ID NO: 23801 - DNA, 15 bp, Homo sapiens
tggcatctcccacaa

SEQ ID NO: 23802 - DNA, 15 bp, Homo sapiens
ttggcatctcccaca

SEQ ID NO: 23803 - DNA, 15 bp, Homo sapiens
cttggcatctcccac

SEQ ID NO: 23804 - DNA, 15 bp, Homo sapiens
ccttggcatctccca

SEQ ID NO: 23805 - DNA, 15 bp, Homo sapiens
accttggcatctccc

SEQ ID NO: 23806 - DNA, 15 bp, Homo sapiens
caccttggcatctcc

SEQ ID NO: 23807 - DNA, 15 bp, Homo sapiens
ccaccttggcatctc

SEQ ID NO: 23808 - DNA, 15 bp, Homo sapiens
accaccttggcatct

SEQ ID NO: 23809 - DNA, 15 bp, Homo sapiens
caccaccttggcatc

SEQ ID NO: 23810 - DNA, 15 bp, Homo sapiens
tcaccaccttggcat

SEQ ID NO: 23811 - DNA, 15 bp, Homo sapiens
atcaccaccttggca

SEQ ID NO: 23812 - DNA, 15 bp, Homo sapiens
aatcaccaccttggc

SEQ ID NO: 23813 - DNA, 15 bp, Homo sapiens
gaatcaccaccttgg

SEQ ID NO: 23814 - DNA, 15 bp, Homo sapiens
agaatcaccaccttg

SEQ ID NO: 23815 - DNA, 15 bp, Homo sapiens
cagaatcaccacctt

SEQ ID NO: 23816 - DNA, 15 bp, Homo sapiens
ccagaatcaccacct

SEQ ID NO: 23817 - DNA, 15 bp, Homo sapiens
tccagaatcaccacc

SEQ ID NO: 23818 - DNA, 15 bp, Homo sapiens
gtccagaatcaccac

SEQ ID NO: 23819 - DNA, 15 bp, Homo sapiens
cgtccagaatcacca

SEQ ID NO: 23820 - DNA, 15 bp, Homo sapiens
tcgtccagaatcacc

SEQ ID NO: 23821 - DNA, 15 bp, Homo sapiens
ttcgtccagaatcac

SEQ ID NO: 23822 - DNA, 15 bp, Homo sapiens
gttcgtccagaatca

SEQ ID NO: 23823 - DNA, 15 bp, Homo sapiens
ggttcgtccagaatc

SEQ ID NO: 23824 - DNA, 15 bp, Homo sapiens
gggttcgtccagaat

SEQ ID NO: 23825 - DNA, 15 bp, Homo sapiens
tgggttcgtccagaa

SEQ ID NO: 23826 - DNA, 15 bp, Homo sapiens
gtgggttcgtccaga

SEQ ID NO: 23827 - DNA, 15 bp, Homo sapiens
ggtgggttcgtccag

SEQ ID NO: 23828 - DNA, 15 bp, Homo sapiens
aggtgggttcgtcca

SEQ ID NO: 23829 - DNA, 15 bp, Homo sapiens
gaggtgggttcgtcc

SEQ ID NO: 23830 - DNA, 15 bp, Homo sapiens
agaggtgggttcgtc

SEQ ID NO: 23831 - DNA, 15 bp, Homo sapiens
cagaggtgggttcgt

SEQ ID NO: 23832 - DNA, 15 bp, Homo sapiens
ccagaggtgggttcg

SEQ ID NO: 23833 - DNA, 15 bp, Homo sapiens
cccagaggtgggttc

SEQ ID NO: 23834 - DNA, 15 bp, Homo sapiens
ccccagaggtgggtt

SEQ ID NO: 23835 - DNA, 15 bp, Homo sapiens
accccagaggtgggt

SEQ ID NO: 23836 - DNA, 15 bp, Homo sapiens
caccccagaggtggg

SEQ ID NO: 23837 - DNA, 15 bp, Homo sapiens
ccaccccagaggtgg

SEQ ID NO: 23838 - DNA, 15 bp, Homo sapiens
tccaccccagaggtg

SEQ ID NO: 23839 - DNA, 15 bp, Homo sapiens
gtccaccccagaggt

SEQ ID NO: 23840 - DNA, 15 bp, Homo sapiens
ggtccaccccagagg

SEQ ID NO: 23841 - DNA, 15 bp, Homo sapiens
gggtccaccccagag

SEQ ID NO: 23842 - DNA, 15 bp, Homo sapiens
agggtccaccccaga

SEQ ID NO: 23843 - DNA, 15 bp, Homo sapiens
aagggtccaccccag

SEQ ID NO: 23844 - DNA, 15 bp, Homo sapiens
taagggtccacccca

SEQ ID NO: 23845 - DNA, 15 bp, Homo sapiens
gtaagggtccacccc

SEQ ID NO: 23846 - DNA, 15 bp, Homo sapiens
agtaagggtccaccc

SEQ ID NO: 23847 - DNA, 15 bp, Homo sapiens
gagtaagggtccacc

SEQ ID NO: 23848 - DNA, 15 bp, Homo sapiens
cgagtaagggtccac

SEQ ID NO: 23849 - DNA, 15 bp, Homo sapiens
tcgagtaagggtcca

SEQ ID NO: 23850 - DNA, 15 bp, Homo sapiens
ctcgagtaagggtcc

SEQ ID NO: 23851 - DNA, 15 bp, Homo sapiens
tctcgagtaagggtc

SEQ ID NO: 23852 - DNA, 15 bp, Homo sapiens
gtctcgagtaagggt

SEQ ID NO: 23853 - DNA, 15 bp, Homo sapiens
cgtctcgagtaaggg

SEQ ID NO: 23854 - DNA, 15 bp, Homo sapiens
gcgtctcgagtaagg

SEQ ID NO: 23855 - DNA, 15 bp, Homo sapiens
agcgtctcgagtaag

SEQ ID NO: 23856 - DNA, 15 bp, Homo sapiens
gagcgtctcgagtaa

SEQ ID NO: 23857 - DNA, 15 bp, Homo sapiens
tgagcgtctcgagta

SEQ ID NO: 23858 - DNA, 15 bp, Homo sapiens
ttgagcgtctcgagt

SEQ ID NO: 23859 - DNA, 15 bp, Homo sapiens
attgagcgtctcgag

SEQ ID NO: 23860 - DNA, 15 bp, Homo sapiens
gattgagcgtctcga

SEQ ID NO: 23861 - DNA, 15 bp, Homo sapiens
agattgagcgtctcg

SEQ ID NO: 23862 - DNA, 15 bp, Homo sapiens
cagattgagcgtctc

SEQ ID NO: 23863 - DNA, 15 bp, Homo sapiens
ccagattgagcgtct

SEQ ID NO: 23864 - DNA, 15 bp, Homo sapiens
cccagattgagcgtc

SEQ ID NO: 23865 - DNA, 15 bp, Homo sapiens
tcccagattgagcgt

SEQ ID NO: 23866 - DNA, 15 bp, Homo sapiens
atcccagattgagcg

SEQ ID NO: 23867 - DNA, 15 bp, Homo sapiens
gatcccagattgagc

SEQ ID NO: 23868 - DNA, 15 bp, Homo sapiens
agatcccagattgag

SEQ ID NO: 23869 - DNA, 15 bp, Homo sapiens
cagatcccagattga

SEQ ID NO: 23870 - DNA, 15 bp, Homo sapiens
gcagatcccagattg

SEQ ID NO: 23871 - DNA, 15 bp, Homo sapiens
agcagatcccagatt

SEQ ID NO: 23872 - DNA, 15 bp, Homo sapiens
gagcagatcccagat

SEQ ID NO: 23873 - DNA, 15 bp, Homo sapiens
ggagcagatcccaga

SEQ ID NO: 23874 - DNA, 15 bp, Homo sapiens
aggagcagatcccag

SEQ ID NO: 23875 - DNA, 15 bp, Homo sapiens
caggagcagatccca

SEQ ID NO: 23876 - DNA, 15 bp, Homo sapiens
tcaggagcagatccc

SEQ ID NO: 23877 - DNA, 15 bp, Homo sapiens
ttcaggagcagatcc

SEQ ID NO: 23878 - DNA, 15 bp, Homo sapiens
cttcaggagcagatc

SEQ ID NO: 23879 - DNA, 15 bp, Homo sapiens
acttcaggagcagat

SEQ ID NO: 23880 - DNA, 15 bp, Homo sapiens
tacttcaggagcaga

SEQ ID NO: 23881 - DNA, 15 bp, Homo sapiens
atacttcaggagcag

SEQ ID NO: 23882 - DNA, 15 bp, Homo sapiens
gatacttcaggagca

SEQ ID NO: 23883 - DNA, 15 bp, Homo sapiens
cgatacttcaggagc

SEQ ID NO: 23884 - DNA, 15 bp, Homo sapiens
gcgatacttcaggag

SEQ ID NO: 23885 - DNA, 15 bp, Homo sapiens
agcgatacttcagga

SEQ ID NO: 23886 - DNA, 15 bp, Homo sapiens
gagcgatacttcagg

SEQ ID NO: 23887 - DNA, 15 bp, Homo sapiens
tgagcgatacttcag

SEQ ID NO: 23888 - DNA, 15 bp, Homo sapiens
ctgagcgatacttca

SEQ ID NO: 23889 - DNA, 15 bp, Homo sapiens
cctgagcgatacttc

SEQ ID NO: 23890 - DNA, 15 bp, Homo sapiens
acctgagcgatactt

SEQ ID NO: 23891 - DNA, 15 bp, Homo sapiens
tacctgagcgatact

SEQ ID NO: 23892 - DNA, 15 bp, Homo sapiens
ttacctgagcgatac

SEQ ID NO: 23893 - DNA, 15 bp, Homo sapiens
gttacctgagcgata

SEQ ID NO: 23894 - DNA, 15 bp, Homo sapiens
tgttacctgagcgat

SEQ ID NO: 23895 - DNA, 15 bp, Homo sapiens
ctgttacctgagcga

SEQ ID NO: 23896 - DNA, 15 bp, Homo sapiens
gctgttacctgagcg

SEQ ID NO: 23897 - DNA, 15 bp, Homo sapiens
agctgttacctgagc

SEQ ID NO: 23898 - DNA, 15 bp, Homo sapiens
cagctgttacctgag

SEQ ID NO: 23899 - DNA, 15 bp, Homo sapiens
gcagctgttacctga

SEQ ID NO: 23900 - DNA, 15 bp, Homo sapiens
agcagctgttacctg

SEQ ID NO: 23901 - DNA, 15 bp, Homo sapiens
cagcagctgttacct

SEQ ID NO: 23902 - DNA, 15 bp, Homo sapiens
gcagcagctgttacc

SEQ ID NO: 23903 - DNA, 15 bp, Homo sapiens
agcagcagctgttac

SEQ ID NO: 23904 - DNA, 15 bp, Homo sapiens
gagcagcagctgtta

SEQ ID NO: 23905 - DNA, 15 bp, Homo sapiens
tgagcagcagctgtt

SEQ ID NO: 23906 - DNA, 15 bp, Homo sapiens
ctgagcagcagctgt

SEQ ID NO: 23907 - DNA, 15 bp, Homo sapiens
actgagcagcagctg

SEQ ID NO: 23908 - DNA, 15 bp, Homo sapiens
gactgagcagcagct

SEQ ID NO: 23909 - DNA, 15 bp, Homo sapiens
agactgagcagcagc

SEQ ID NO: 23910 - DNA, 15 bp, Homo sapiens
gagactgagcagcag

SEQ ID NO: 23911 - DNA, 15 bp, Homo sapiens
ggagactgagcagca

SEQ ID NO: 23912 - DNA, 15 bp, Homo sapiens
aggagactgagcagc

SEQ ID NO: 23913 - DNA, 15 bp, Homo sapiens
caggagactgagcag

SEQ ID NO: 23914 - DNA, 15 bp, Homo sapiens
ccaggagactgagca

SEQ ID NO: 23915 - DNA, 15 bp, Homo sapiens
cccaggagactgagc

SEQ ID NO: 23916 - DNA, 15 bp, Homo sapiens
gcccaggagactgag

SEQ ID NO: 23917 - DNA, 15 bp, Homo sapiens
agcccaggagactga

SEQ ID NO: 23918 - DNA, 15 bp, Homo sapiens
cagcccaggagactg

SEQ ID NO: 23919 - DNA, 15 bp, Homo sapiens
ccagcccaggagact

SEQ ID NO: 23920 - DNA, 15 bp, Homo sapiens
cccagcccaggagac

SEQ ID NO: 23921 - DNA, 15 bp, Homo sapiens
gcccagcccaggaga

SEQ ID NO: 23922 - DNA, 15 bp, Homo sapiens
agcccagcccaggag

SEQ ID NO: 23923 - DNA, 15 bp, Homo sapiens
gagcccagcccagga

SEQ ID NO: 23924 - DNA, 15 bp, Homo sapiens
agagcccagcccagg

SEQ ID NO: 23925 - DNA, 15 bp, Homo sapiens
gagagcccagcccag

SEQ ID NO: 23926 - DNA, 15 bp, Homo sapiens
tgagagcccagccca

SEQ ID NO: 23927 - DNA, 15 bp, Homo sapiens
gtgagagcccagccc

SEQ ID NO: 23928 - DNA, 15 bp, Homo sapiens
agtgagagcccagcc

SEQ ID NO: 23929 - DNA, 15 bp, Homo sapiens
cagtgagagcccagc

SEQ ID NO: 23930 - DNA, 15 bp, Homo sapiens
gcagtgagagcccag

SEQ ID NO: 23931 - DNA, 15 bp, Homo sapiens
tgcagtgagagccca

SEQ ID NO: 23932 - DNA, 15 bp, Homo sapiens
ctgcagtgagagccc

SEQ ID NO: 23933 - DNA, 15 bp, Homo sapiens
gctgcagtgagagcc

SEQ ID NO: 23934 - DNA, 15 bp, Homo sapiens
ggctgcagtgagagc

SEQ ID NO: 23935 - DNA, 15 bp, Homo sapiens
gggctgcagtgagag

SEQ ID NO: 23936 - DNA, 15 bp, Homo sapiens
agggctgcagtgaga

SEQ ID NO: 23937 - DNA, 15 bp, Homo sapiens
tagggctgcagtgag

SEQ ID NO: 23938 - DNA, 15 bp, Homo sapiens
ctagggctgcagtga

SEQ ID NO: 23939 - DNA, 15 bp, Homo sapiens
gctagggctgcagtg

SEQ ID NO: 23940 - DNA, 15 bp, Homo sapiens
agctagggctgcagt

SEQ ID NO: 23941 - DNA, 15 bp, Homo sapiens
cagctagggctgcag

SEQ ID NO: 23942 - DNA, 15 bp, Homo sapiens
acagctagggctgca

SEQ ID NO: 23943 - DNA, 15 bp, Homo sapiens
cacagctagggctgc

SEQ ID NO: 23944 - DNA, 15 bp, Homo sapiens
ccacagctagggctg

SEQ ID NO: 23945 - DNA, 15 bp, Homo sapiens
accacagctagggct

SEQ ID NO: 23946 - DNA, 15 bp, Homo sapiens
gaccacagctagggc

SEQ ID NO: 23947 - DNA, 15 bp, Homo sapiens
ggaccacagctaggg

SEQ ID NO: 23948 - DNA, 15 bp, Homo sapiens
gggaccacagctagg

SEQ ID NO: 23949 - DNA, 15 bp, Homo sapiens
ggggaccacagctag

SEQ ID NO: 23950 - DNA, 15 bp, Homo sapiens
tggggaccacagcta

SEQ ID NO: 23951 - DNA, 15 bp, Homo sapiens
gtggggaccacagct

SEQ ID NO: 23952 - DNA, 15 bp, Homo sapiens
agtggggaccacagc

SEQ ID NO: 23953 - DNA, 15 bp, Homo sapiens
gagtggggaccacag

SEQ ID NO: 23954 - DNA, 15 bp, Homo sapiens
agagtggggaccaca

SEQ ID NO: 23955 - DNA, 15 bp, Homo sapiens
gagagtggggaccac

SEQ ID NO: 23956 - DNA, 15 bp, Homo sapiens
agagagtggggacca

SEQ ID NO: 23957 - DNA, 15 bp, Homo sapiens
gagagagtggggacc

SEQ ID NO: 23958 - DNA, 15 bp, Homo sapiens
tgagagagtggggac

SEQ ID NO: 23959 - DNA, 15 bp, Homo sapiens
gtgagagagtgggga

SEQ ID NO: 23960 - DNA, 15 bp, Homo sapiens
ggtgagagagtgggg

SEQ ID NO: 23961 - DNA, 15 bp, Homo sapiens
aggtgagagagtggg

SEQ ID NO: 23962 - DNA, 15 bp, Homo sapiens
caggtgagagagtgg

SEQ ID NO: 23963 - DNA, 15 bp, Homo sapiens
gcaggtgagagagtg

SEQ ID NO: 23964 - DNA, 15 bp, Homo sapiens
ggcaggtgagagagt

SEQ ID NO: 23965 - DNA, 15 bp, Homo sapiens
tggcaggtgagagag

SEQ ID NO: 23966 - DNA, 15 bp, Homo sapiens
atggcaggtgagaga

SEQ ID NO: 23967 - DNA, 15 bp, Homo sapiens
aatggcaggtgagag

SEQ ID NO: 23968 - DNA, 15 bp, Homo sapiens
aaatggcaggtgaga

SEQ ID NO: 23969 - DNA, 15 bp, Homo sapiens
aaaatggcaggtgag

SEQ ID NO: 23970 - DNA, 15 bp, Homo sapiens
caaaatggcaggtga

SEQ ID NO: 23971 - DNA, 15 bp, Homo sapiens
acaaaatggcaggtg

SEQ ID NO: 23972 - DNA, 15 bp, Homo sapiens
tacaaaatggcaggt

SEQ ID NO: 23973 - DNA, 15 bp, Homo sapiens
ctacaaaatggcagg

SEQ ID NO: 23974 - DNA, 15 bp, Homo sapiens
gctacaaaatggcag

SEQ ID NO: 23975 - DNA, 15 bp, Homo sapiens
agctacaaaatggca

SEQ ID NO: 23976 - DNA, 15 bp, Homo sapiens
cagctacaaaatggc

SEQ ID NO: 23977 - DNA, 15 bp, Homo sapiens
tcagctacaaaatgg

SEQ ID NO: 23978 - DNA, 15 bp, Homo sapiens
ctcagctacaaaatg

SEQ ID NO: 23979 - DNA, 15 bp, Homo sapiens
actcagctacaaaat

SEQ ID NO: 23980 - DNA, 15 bp, Homo sapiens
tactcagctacaaaa

SEQ ID NO: 23981 - DNA, 15 bp, Homo sapiens
gtactcagctacaaa

SEQ ID NO: 23982 - DNA, 15 bp, Homo sapiens
tgtactcagctacaa

SEQ ID NO: 23983 - DNA, 15 bp, Homo sapiens
ctgtactcagctaca

SEQ ID NO: 23984 - DNA, 15 bp, Homo sapiens
cctgtactcagctac

SEQ ID NO: 23985 - DNA, 15 bp, Homo sapiens
tcctgtactcagcta

SEQ ID NO: 23986 - DNA, 15 bp, Homo sapiens
ttcctgtactcagct

SEQ ID NO: 23987 - DNA, 15 bp, Homo sapiens
gttcctgtactcagc

SEQ ID NO: 23988 - DNA, 15 bp, Homo sapiens
ggttcctgtactcag

SEQ ID NO: 23989 - DNA, 15 bp, Homo sapiens
tggttcctgtactca

SEQ ID NO: 23990 - DNA, 15 bp, Homo sapiens
gtggttcctgtactc

SEQ ID NO: 23991 - DNA, 15 bp, Homo sapiens
tgtggttcctgtact

SEQ ID NO: 23992 - DNA, 15 bp, Homo sapiens
ttgtggttcctgtac

SEQ ID NO: 23993 - DNA, 15 bp, Homo sapiens
attgtggttcctgta

SEQ ID NO: 23994 - DNA, 15 bp, Homo sapiens
cattgtggttcctgt

SEQ ID NO: 23995 - DNA, 15 bp, Homo sapiens
tcattgtggttcctg

SEQ ID NO: 23996 - DNA, 15 bp, Homo sapiens
gtcattgtggttcct

SEQ ID NO: 23997 - DNA, 15 bp, Homo sapiens
agtcattgtggttcc

SEQ ID NO: 23998 - DNA, 15 bp, Homo sapiens
tagtcattgtggttc

SEQ ID NO: 23999 - DNA, 15 bp, Homo sapiens
gtagtcattgtggtt

SEQ ID NO: 24000 - DNA, 15 bp, Homo sapiens
tgtagtcattgtggt

SEQ ID NO: 24001 - DNA, 15 bp, Homo sapiens
gtgtagtcattgtgg

SEQ ID NO: 24002 - DNA, 15 bp, Homo sapiens
agtgtagtcattgtg

SEQ ID NO: 24003 - DNA, 15 bp, Homo sapiens
gagtgtagtcattgt

SEQ ID NO: 24004 - DNA, 15 bp, Homo sapiens
tgagtgtagtcattg

SEQ ID NO: 24005 - DNA, 15 bp, Homo sapiens
ctgagtgtagtcatt

SEQ ID NO: 24006 - DNA, 15 bp, Homo sapiens
tctgagtgtagtcat

SEQ ID NO: 24007 - DNA, 15 bp, Homo sapiens
ttctgagtgtagtca

SEQ ID NO: 24008 - DNA, 15 bp, Homo sapiens
cttctgagtgtagtc

SEQ ID NO: 24009 - DNA, 15 bp, Homo sapiens
ccttctgagtgtagt

SEQ ID NO: 24010 - DNA, 15 bp, Homo sapiens
cccttctgagtgtag

SEQ ID NO: 24011 - DNA, 15 bp, Homo sapiens
ccccttctgagtgta

SEQ ID NO: 24012 - DNA, 15 bp, Homo sapiens
cccccttctgagtgt

SEQ ID NO: 24013 - DNA, 15 bp, Homo sapiens
acccccttctgagtg

SEQ ID NO: 24014 - DNA, 15 bp, Homo sapiens
aacccccttctgagt

SEQ ID NO: 24015 - DNA, 15 bp, Homo sapiens
aaacccccttctgag

SEQ ID NO: 24016 - DNA, 15 bp, Homo sapiens
taaacccccttctga

SEQ ID NO: 24017 - DNA, 15 bp, Homo sapiens
ataaacccccttctg

SEQ ID NO: 24018 - DNA, 15 bp, Homo sapiens
gataaacccccttct

SEQ ID NO: 24019 - DNA, 15 bp, Homo sapiens
tgataaacccccttc

SEQ ID NO: 24020 - DNA, 15 bp, Homo sapiens
ctgataaaccccctt

SEQ ID NO: 24021 - DNA, 15 bp, Homo sapiens
actgataaaccccct

SEQ ID NO: 24022 - DNA, 15 bp, Homo sapiens
cactgataaaccccc

SEQ ID NO: 24023 - DNA, 15 bp, Homo sapiens
tcactgataaacccc

SEQ ID NO: 24024 - DNA, 15 bp, Homo sapiens
gtcactgataaaccc

SEQ ID NO: 24025 - DNA, 15 bp, Homo sapiens
agtcactgataaacc

SEQ ID NO: 24026 - DNA, 15 bp, Homo sapiens
aagtcactgataaac

SEQ ID NO: 24027 - DNA, 15 bp, Homo sapiens
caagtcactgataaa

SEQ ID NO: 24028 - DNA, 15 bp, Homo sapiens
ccaagtcactgataa

SEQ ID NO: 24029 - DNA, 15 bp, Homo sapiens
accaagtcactgata

SEQ ID NO: 24030 - DNA, 15 bp, Homo sapiens
caccaagtcactgat

SEQ ID NO: 24031 - DNA, 15 bp, Homo sapiens
tcaccaagtcactga

SEQ ID NO: 24032 - DNA, 15 bp, Homo sapiens
ttcaccaagtcactg

SEQ ID NO: 24033 - DNA, 15 bp, Homo sapiens
attcaccaagtcact

SEQ ID NO: 24034 - DNA, 15 bp, Homo sapiens
gattcaccaagtcac

SEQ ID NO: 24035 - DNA, 15 bp, Homo sapiens
agattcaccaagtca

SEQ ID NO: 24036 - DNA, 15 bp, Homo sapiens
tagattcaccaagtc

SEQ ID NO: 24037 - DNA, 15 bp, Homo sapiens
ttagattcaccaagt

SEQ ID NO: 24038 - DNA, 15 bp, Homo sapiens
cttagattcaccaag

SEQ ID NO: 24039 - DNA, 15 bp, Homo sapiens
acttagattcaccaa

SEQ ID NO: 24040 - DNA, 15 bp, Homo sapiens
aacttagattcacca

SEQ ID NO: 24041 - DNA, 15 bp, Homo sapiens
gaacttagattcacc

SEQ ID NO: 24042 - DNA, 15 bp, Homo sapiens
ggaacttagattcac

SEQ ID NO: 24043 - DNA, 15 bp, Homo sapiens
tggaacttagattca

SEQ ID NO: 24044 - DNA, 15 bp, Homo sapiens
ctggaacttagattc

SEQ ID NO: 24045 - DNA, 15 bp, Homo sapiens
gctggaacttagatt

SEQ ID NO: 24046 - DNA, 15 bp, Homo sapiens
agctggaacttagat

SEQ ID NO: 24047 - DNA, 15 bp, Homo sapiens
tagctggaacttaga

SEQ ID NO: 24048 - DNA, 15 bp, Homo sapiens
ttagctggaacttag

SEQ ID NO: 24049 - DNA, 15 bp, Homo sapiens
tttagctggaactta

SEQ ID NO: 24050 - DNA, 15 bp, Homo sapiens
ctttagctggaactt

SEQ ID NO: 24051 - DNA, 15 bp, Homo sapiens
gctttagctggaact

SEQ ID NO: 24052 - DNA, 15 bp, Homo sapiens
ggctttagctggaac

SEQ ID NO: 24053 - DNA, 15 bp, Homo sapiens
aggctttagctggaa

SEQ ID NO: 24054 - DNA, 15 bp, Homo sapiens
gaggctttagctgga

SEQ ID NO: 24055 - DNA, 15 bp, Homo sapiens
ggaggctttagctgg

SEQ ID NO: 24056 - DNA, 15 bp, Homo sapiens
aggaggctttagctg

SEQ ID NO: 24057 - DNA, 15 bp, Homo sapiens
caggaggctttagct

SEQ ID NO: 24058 - DNA, 15 bp, Homo sapiens
tcaggaggctttagc

SEQ ID NO: 24059 - DNA, 15 bp, Homo sapiens
ctcaggaggctttag

SEQ ID NO: 24060 - DNA, 15 bp, Homo sapiens
cctcaggaggcttta

SEQ ID NO: 24061 - DNA, 15 bp, Homo sapiens
acctcaggaggcttt

SEQ ID NO: 24062 - DNA, 15 bp, Homo sapiens
aacctcaggaggctt

SEQ ID NO: 24063 - DNA, 15 bp, Homo sapiens
aaacctcaggaggct

SEQ ID NO: 24064 - DNA, 15 bp, Homo sapiens
aaaacctcaggaggc

SEQ ID NO: 24065 - DNA, 15 bp, Homo sapiens
aaaaacctcaggagg

SEQ ID NO: 24066 - DNA, 15 bp, Homo sapiens
taaaaacctcaggag

SEQ ID NO: 24067 - DNA, 15 bp, Homo sapiens
gtaaaaacctcagga

SEQ ID NO: 24068 - DNA, 15 bp, Homo sapiens
tgtaaaaacctcagg

SEQ ID NO: 24069 - DNA, 15 bp, Homo sapiens
ttgtaaaaacctcag

SEQ ID NO: 24070 - DNA, 15 bp, Homo sapiens
tttgtaaaaacctca

SEQ ID NO: 24071 - DNA, 15 bp, Homo sapiens
atttgtaaaaacctc

SEQ ID NO: 24072 - DNA, 15 bp, Homo sapiens
tatttgtaaaaacct

SEQ ID NO: 24073 - DNA, 15 bp, Homo sapiens
atatttgtaaaaacc

SEQ ID NO: 24074 - DNA, 15 bp, Homo sapiens
tatatttgtaaaaac

SEQ ID NO: 24075 - DNA, 15 bp, Homo sapiens
ttatatttgtaaaaa

SEQ ID NO: 24076 - DNA, 15 bp, Homo sapiens
tttatatttgtaaaa

SEQ ID NO: 24077 - DNA, 15 bp, Homo sapiens
gtttatatttgtaaa

SEQ ID NO: 24078 - DNA, 15 bp, Homo sapiens
tgtttatatttgtaa

SEQ ID NO: 24079 - DNA, 15 bp, Homo sapiens
ctgtttatatttgta

SEQ ID NO: 24080 - DNA, 15 bp, Homo sapiens
tctgtttatatttgt

SEQ ID NO: 24081 - DNA, 15 bp, Homo sapiens
cgctgtattccagcc

SEQ ID NO: 24082 - DNA, 15 bp, Homo sapiens
ccgctgtattccagc

SEQ ID NO: 24083 - DNA, 15 bp, Homo sapiens
gccgctgtattccag

SEQ ID NO: 24084 - DNA, 15 bp, Homo sapiens
agccgctgtattcca

SEQ ID NO: 24085 - DNA, 15 bp, Homo sapiens
gagccgctgtattcc

SEQ ID NO: 24086 - DNA, 15 bp, Homo sapiens
cgagccgctgtattc

SEQ ID NO: 24087 - DNA, 15 bp, Homo sapiens
tcgagccgctgtatt

SEQ ID NO: 24088 - DNA, 15 bp, Homo sapiens
atcgagccgctgtat

SEQ ID NO: 24089 - DNA, 15 bp, Homo sapiens
gatcgagccgctgta

SEQ ID NO: 24090 - DNA, 15 bp, Homo sapiens
tgatcgagccgctgt

SEQ ID NO: 24091 - DNA, 15 bp, Homo sapiens
atgatcgagccgctg

SEQ ID NO: 24092 - DNA, 15 bp, Homo sapiens
tatgatcgagccgct

SEQ ID NO: 24093 - DNA, 15 bp, Homo sapiens
ctatgatcgagccgc

SEQ ID NO: 24094 - DNA, 15 bp, Homo sapiens
gctatgatcgagccg

SEQ ID NO: 24095 - DNA, 15 bp, Homo sapiens
agctatgatcgagcc

SEQ ID NO: 24096 - DNA, 15 bp, Homo sapiens
gagctatgatcgagc

SEQ ID NO: 24097 - DNA, 15 bp, Homo sapiens
tgagctatgatcgag

SEQ ID NO: 24098 - DNA, 15 bp, Homo sapiens
gtgagctatgatcga

SEQ ID NO: 24099 - DNA, 15 bp, Homo sapiens
agtgagctatgatcg

SEQ ID NO: 24100 - DNA, 15 bp, Homo sapiens
cagtgagctatgatc

SEQ ID NO: 24101 - DNA, 15 bp, Homo sapiens
gcagtgagctatgat

SEQ ID NO: 24102 - DNA, 15 bp, Homo sapiens
tgcagtgagctatga

SEQ ID NO: 24103 - DNA, 15 bp, Homo sapiens
ctgcagtgagctatg

SEQ ID NO: 24104 - DNA, 15 bp, Homo sapiens
gctgcagtgagctat

SEQ ID NO: 24105 - DNA, 15 bp, Homo sapiens
ggctgcagtgagcta

SEQ ID NO: 24106 - DNA, 15 bp, Homo sapiens
aggctgcagtgagct

SEQ ID NO: 24107 - DNA, 15 bp, Homo sapiens
aaggctgcagtgagc

SEQ ID NO: 24108 - DNA, 15 bp, Homo sapiens
caaggctgcagtgag

SEQ ID NO: 24109 - DNA, 15 bp, Homo sapiens
tcaaggctgcagtga

SEQ ID NO: 24110 - DNA, 15 bp, Homo sapiens
gtcaaggctgcagtg

SEQ ID NO: 24111 - DNA, 15 bp, Homo sapiens
ggtcaaggctgcagt

SEQ ID NO: 24112 - DNA, 15 bp, Homo sapiens
aggtcaaggctgcag

SEQ ID NO: 24113 - DNA, 15 bp, Homo sapiens
gaggtcaaggctgca

SEQ ID NO: 24114 - DNA, 15 bp, Homo sapiens
ggaggtcaaggctgc

SEQ ID NO: 24115 - DNA, 15 bp, Homo sapiens
aggaggtcaaggctg

SEQ ID NO: 24116 - DNA, 15 bp, Homo sapiens
caggaggtcaaggct

SEQ ID NO: 24117 - DNA, 15 bp, Homo sapiens
ccaggaggtcaaggc

SEQ ID NO: 24118 - DNA, 15 bp, Homo sapiens
cccaggaggtcaagg

SEQ ID NO: 24119 - DNA, 15 bp, Homo sapiens
gcccaggaggtcaag

SEQ ID NO: 24120 - DNA, 15 bp, Homo sapiens
ggcccaggaggtcaa

SEQ ID NO: 24121 - DNA, 15 bp, Homo sapiens
gggcccaggaggtca

SEQ ID NO: 24122 - DNA, 15 bp, Homo sapiens
tgggcccaggaggtc

SEQ ID NO: 24123 - DNA, 15 bp, Homo sapiens
ttgggcccaggaggt

SEQ ID NO: 24124 - DNA, 15 bp, Homo sapiens
cttgggcccaggagg

SEQ ID NO: 24125 - DNA, 15 bp, Homo sapiens
ccttgggcccaggag

SEQ ID NO: 24126 - DNA, 15 bp, Homo sapiens
cccttgggcccagga

SEQ ID NO: 24127 - DNA, 15 bp, Homo sapiens
ccccttgggcccagg

SEQ ID NO: 24128 - DNA, 15 bp, Homo sapiens
accccttgggcccag

SEQ ID NO: 24129 - DNA, 15 bp, Homo sapiens
gaccccttgggccca

SEQ ID NO: 24130 - DNA, 15 bp, Homo sapiens
ggaccccttgggccc

SEQ ID NO: 24131 - DNA, 15 bp, Homo sapiens
aggaccccttgggcc

SEQ ID NO: 24132 - DNA, 15 bp, Homo sapiens
gaggaccccttgggc

SEQ ID NO: 24133 - DNA, 15 bp, Homo sapiens
ggaggaccccttggg

SEQ ID NO: 24134 - DNA, 15 bp, Homo sapiens
gggaggaccccttgg

SEQ ID NO: 24135 - DNA, 15 bp, Homo sapiens
tgggaggaccccttg

SEQ ID NO: 24136 - DNA, 15 bp, Homo sapiens
gtgggaggacccctt

SEQ ID NO: 24137 - DNA, 15 bp, Homo sapiens
ggtgggaggacccct

SEQ ID NO: 24138 - DNA, 15 bp, Homo sapiens
aggtgggaggacccc

SEQ ID NO: 24139 - DNA, 15 bp, Homo sapiens
gaggtgggaggaccc

SEQ ID NO: 24140 - DNA, 15 bp, Homo sapiens
tgaggtgggaggacc

SEQ ID NO: 24141 - DNA, 15 bp, Homo sapiens
ctgaggtgggaggac

SEQ ID NO: 24142 - DNA, 15 bp, Homo sapiens
ggctgaggtgggagg

SEQ ID NO: 24143 - DNA, 15 bp, Homo sapiens
gcctgtagtcccagc

SEQ ID NO: 24144 - DNA, 15 bp, Homo sapiens
tgcctgtagtcccag

SEQ ID NO: 24145 - DNA, 15 bp, Homo sapiens
gtgcctgtagtccca

SEQ ID NO: 24146 - DNA, 15 bp, Homo sapiens
tgtgcctgtagtccc

SEQ ID NO: 24147 - DNA, 15 bp, Homo sapiens
gtgtgcctgtagtcc

SEQ ID NO: 24148 - DNA, 15 bp, Homo sapiens
cgtgtgcctgtagtc

SEQ ID NO: 24149 - DNA, 15 bp, Homo sapiens
gcgtgtgcctgtagt

SEQ ID NO: 24150 - DNA, 15 bp, Homo sapiens
ggcgtgtgcctgtag

SEQ ID NO: 24151 - DNA, 15 bp, Homo sapiens
tggcgtgtgcctgta

SEQ ID NO: 24152 - DNA, 15 bp, Homo sapiens
gtggcgtgtgcctgt

SEQ ID NO: 24153 - DNA, 15 bp, Homo sapiens
ggtggcgtgtgcctg

SEQ ID NO: 24154 - DNA, 15 bp, Homo sapiens
cggtggcgtgtgcct

SEQ ID NO: 24155 - DNA, 15 bp, Homo sapiens
acggtggcgtgtgcc

SEQ ID NO: 24156 - DNA, 15 bp, Homo sapiens
cacggtggcgtgtgc

SEQ ID NO: 24157 - DNA, 15 bp, Homo sapiens
gcacggtggcgtgtg

SEQ ID NO: 24158 - DNA, 15 bp, Homo sapiens
ggcacggtggcgtgt

SEQ ID NO: 24159 - DNA, 15 bp, Homo sapiens
aggcacggtggcgtg

SEQ ID NO: 24160 - DNA, 15 bp, Homo sapiens
caggcacggtggcgt

SEQ ID NO: 24161 - DNA, 15 bp, Homo sapiens
ccaggcacggtggcg

SEQ ID NO: 24162 - DNA, 15 bp, Homo sapiens
gccaggcacggtggc

SEQ ID NO: 24163 - DNA, 15 bp, Homo sapiens
agccaggcacggtgg

SEQ ID NO: 24164 - DNA, 15 bp, Homo sapiens
tagccaggcacggtg

SEQ ID NO: 24165 - DNA, 15 bp, Homo sapiens
ttagccaggcacggt

SEQ ID NO: 24166 - DNA, 15 bp, Homo sapiens
attagccaggcacgg

SEQ ID NO: 24167 - DNA, 15 bp, Homo sapiens
aattagccaggcacg

SEQ ID NO: 24168 - DNA, 15 bp, Homo sapiens
aaattagccaggcac

SEQ ID NO: 24169 - DNA, 15 bp, Homo sapiens
gaaattagccaggca

SEQ ID NO: 24170 - DNA, 15 bp, Homo sapiens
agaaattagccaggc

SEQ ID NO: 24171 - DNA, 15 bp, Homo sapiens
aagaaattagccagg

SEQ ID NO: 24172 - DNA, 15 bp, Homo sapiens
aaagaaattagccag

SEQ ID NO: 24173 - DNA, 15 bp, Homo sapiens
aaaagaaattagcca

SEQ ID NO: 24174 - DNA, 15 bp, Homo sapiens
gaaaagaaattagcc

SEQ ID NO: 24175 - DNA, 15 bp, Homo sapiens
agaaaagaaattagc

SEQ ID NO: 24176 - DNA, 15 bp, Homo sapiens
tagaaaagaaattag

SEQ ID NO: 24177 - DNA, 15 bp, Homo sapiens
ctagaaaagaaatta

SEQ ID NO: 24178 - DNA, 15 bp, Homo sapiens
actagaaaagaaatt

SEQ ID NO: 24179 - DNA, 15 bp, Homo sapiens
aactagaaaagaaat

SEQ ID NO: 24180 - DNA, 15 bp, Homo sapiens
caactagaaaagaaa

SEQ ID NO: 24181 - DNA, 15 bp, Homo sapiens
acaactagaaaagaa

SEQ ID NO: 24182 - DNA, 15 bp, Homo sapiens
aacaactagaaaaga

SEQ ID NO: 24183 - DNA, 15 bp, Homo sapiens
aaacaactagaaaag

SEQ ID NO: 24184 - DNA, 15 bp, Homo sapiens
caaacaactagaaaa

SEQ ID NO: 24185 - DNA, 15 bp, Homo sapiens
acaaacaactagaaa

SEQ ID NO: 24186 - DNA, 15 bp, Homo sapiens
tacaaacaactagaa

SEQ ID NO: 24187 - DNA, 15 bp, Homo sapiens
ctacaaacaactaga

SEQ ID NO: 24188 - DNA, 15 bp, Homo sapiens
tctacaaacaactag

SEQ ID NO: 24189 - DNA, 15 bp, Homo sapiens
ctctacaaacaacta

SEQ ID NO: 24190 - DNA, 15 bp, Homo sapiens
tctctacaaacaact

SEQ ID NO: 24191 - DNA, 15 bp, Homo sapiens
gtctctacaaacaac

SEQ ID NO: 24192 - DNA, 15 bp, Homo sapiens
tgtctctacaaacaa

SEQ ID NO: 24193 - DNA, 15 bp, Homo sapiens
ctgtctctacaaaca

SEQ ID NO: 24194 - DNA, 15 bp, Homo sapiens
cctgtctctacaaac

SEQ ID NO: 24195 - DNA, 15 bp, Homo sapiens
ccctgtctctacaaa

SEQ ID NO: 24196 - DNA, 15 bp, Homo sapiens
accctgtctctacaa

SEQ ID NO: 24197 - DNA, 15 bp, Homo sapiens
gaccctgtctctaca

SEQ ID NO: 24198 - DNA, 15 bp, Homo sapiens
agaccctgtctctac

SEQ ID NO: 24199 - DNA, 15 bp, Homo sapiens
ggagaccctgtctct

SEQ ID NO: 24200 - DNA, 15 bp, Homo sapiens
gggagaccctgtctc

SEQ ID NO: 24201 - DNA, 15 bp, Homo sapiens
agggagaccctgtct

SEQ ID NO: 24202 - DNA, 15 bp, Homo sapiens
tagggagaccctgtc

SEQ ID NO: 24203 - DNA, 15 bp, Homo sapiens
atagggagaccctgt

SEQ ID NO: 24204 - DNA, 15 bp, Homo sapiens
catagggagaccctg

SEQ ID NO: 24205 - DNA, 15 bp, Homo sapiens
acatagggagaccct

SEQ ID NO: 24206 - DNA, 15 bp, Homo sapiens
aacatagggagaccc

SEQ ID NO: 24207 - DNA, 15 bp, Homo sapiens
caacatagggagacc

SEQ ID NO: 24208 - DNA, 15 bp, Homo sapiens
acaacatagggagac

SEQ ID NO: 24209 - DNA, 15 bp, Homo sapiens
tacaacatagggaga

SEQ ID NO: 24210 - DNA, 15 bp, Homo sapiens
gtacaacatagggag

SEQ ID NO: 24211 - DNA, 15 bp, Homo sapiens
tgtacaacataggga

SEQ ID NO: 24212 - DNA, 15 bp, Homo sapiens
ctgtacaacataggg

SEQ ID NO: 24213 - DNA, 15 bp, Homo sapiens
cctgtacaacatagg

SEQ ID NO: 24214 - DNA, 15 bp, Homo sapiens
gcctgtacaacatag

SEQ ID NO: 24215 - DNA, 15 bp, Homo sapiens
agcctgtacaacata

SEQ ID NO: 24216 - DNA, 15 bp, Homo sapiens
cagcctgtacaacat

SEQ ID NO: 24217 - DNA, 15 bp, Homo sapiens
tcagcctgtacaaca

SEQ ID NO: 24218 - DNA, 15 bp, Homo sapiens
atcagcctgtacaac

SEQ ID NO: 24219 - DNA, 15 bp, Homo sapiens
gatcagcctgtacaa

SEQ ID NO: 24220 - DNA, 15 bp, Homo sapiens
agatcagcctgtaca

SEQ ID NO: 24221 - DNA, 15 bp, Homo sapiens
cagatcagcctgtac

SEQ ID NO: 24222 - DNA, 15 bp, Homo sapiens
tcagatcagcctgta

SEQ ID NO: 24223 - DNA, 15 bp, Homo sapiens
ttcagatcagcctgt

SEQ ID NO: 24224 - DNA, 15 bp, Homo sapiens
tttcagatcagcctg

SEQ ID NO: 24225 - DNA, 15 bp, Homo sapiens
gtttcagatcagcct

SEQ ID NO: 24226 - DNA, 15 bp, Homo sapiens
agtttcagatcagcc

SEQ ID NO: 24227 - DNA, 15 bp, Homo sapiens
gagtttcagatcagc

SEQ ID NO: 24228 - DNA, 15 bp, Homo sapiens
ggagtttcagatcag

SEQ ID NO: 24229 - DNA, 15 bp, Homo sapiens
aggagtttcagatca

SEQ ID NO: 24230 - DNA, 15 bp, Homo sapiens
caggagtttcagatc

SEQ ID NO: 24231 - DNA, 15 bp, Homo sapiens
ccaggagtttcagat

SEQ ID NO: 24232 - DNA, 15 bp, Homo sapiens
cccaggagtttcaga

SEQ ID NO: 24233 - DNA, 15 bp, Homo sapiens
ccccaggagtttcag

SEQ ID NO: 24234 - DNA, 15 bp, Homo sapiens
accccaggagtttca

SEQ ID NO: 24235 - DNA, 15 bp, Homo sapiens
gaccccaggagtttc

SEQ ID NO: 24236 - DNA, 15 bp, Homo sapiens
tgaccccaggagttt

SEQ ID NO: 24237 - DNA, 15 bp, Homo sapiens
ttgaccccaggagtt

SEQ ID NO: 24238 - DNA, 15 bp, Homo sapiens
attgaccccaggagt

SEQ ID NO: 24239 - DNA, 15 bp, Homo sapiens
gattgaccccaggag

SEQ ID NO: 24240 - DNA, 15 bp, Homo sapiens
tgattgaccccagga

SEQ ID NO: 24241 - DNA, 15 bp, Homo sapiens
ttgattgaccccagg

SEQ ID NO: 24242 - DNA, 15 bp, Homo sapiens
attgattgaccccag

SEQ ID NO: 24243 - DNA, 15 bp, Homo sapiens
gattgattgacccca

SEQ ID NO: 24244 - DNA, 15 bp, Homo sapiens
ggattgattgacccc

SEQ ID NO: 24245 - DNA, 15 bp, Homo sapiens
aggattgattgaccc

SEQ ID NO: 24246 - DNA, 15 bp, Homo sapiens
gaggattgattgacc

SEQ ID NO: 24247 - DNA, 15 bp, Homo sapiens
ggaggattgattgac

SEQ ID NO: 24248 - DNA, 15 bp, Homo sapiens
aggaggattgattga

SEQ ID NO: 24249 - DNA, 15 bp, Homo sapiens
caggaggattgattg

SEQ ID NO: 24250 - DNA, 15 bp, Homo sapiens
ccaggaggattgatt

SEQ ID NO: 24251 - DNA, 15 bp, Homo sapiens
gccaggaggattgat

SEQ ID NO: 24252 - DNA, 15 bp, Homo sapiens
agccaggaggattga

SEQ ID NO: 24253 - DNA, 15 bp, Homo sapiens
aagccaggaggattg

SEQ ID NO: 24254 - DNA, 15 bp, Homo sapiens
caagccaggaggatt

SEQ ID NO: 24255 - DNA, 15 bp, Homo sapiens
ccaagccaggaggat

SEQ ID NO: 24256 - DNA, 15 bp, Homo sapiens
gccaagccaggagga

SEQ ID NO: 24257 - DNA, 15 bp, Homo sapiens
ggccaagccaggagg

SEQ ID NO: 24258 - DNA, 15 bp, Homo sapiens
aggccaagccaggag

SEQ ID NO: 24259 - DNA, 15 bp, Homo sapiens
gaggccaagccagga

SEQ ID NO: 24260 - DNA, 15 bp, Homo sapiens
ggaggccaagccagg

SEQ ID NO: 24261 - DNA, 15 bp, Homo sapiens
gggaggccaagccag

SEQ ID NO: 24262 - DNA, 15 bp, Homo sapiens
tgggaggccaagcca

SEQ ID NO: 24263 - DNA, 15 bp, Homo sapiens
ttgggaggccaagcc

SEQ ID NO: 24264 - DNA, 15 bp, Homo sapiens
tttgggaggccaagc

SEQ ID NO: 24265 - DNA, 15 bp, Homo sapiens
ctttgggaggccaag

SEQ ID NO: 24266 - DNA, 15 bp, Homo sapiens
tggtggctcatgcct

SEQ ID NO: 24267 - DNA, 15 bp, Homo sapiens
atggtggctcatgcc

SEQ ID NO: 24268 - DNA, 15 bp, Homo sapiens
catggtggctcatgc

SEQ ID NO: 24269 - DNA, 15 bp, Homo sapiens
gcatggtggctcatg

SEQ ID NO: 24270 - DNA, 15 bp, Homo sapiens
ggcatggtggctcat

SEQ ID NO: 24271 - DNA, 15 bp, Homo sapiens
aggcatggtggctca

SEQ ID NO: 24272 - DNA, 15 bp, Homo sapiens
aaggcatggtggctc

SEQ ID NO: 24273 - DNA, 15 bp, Homo sapiens
gaaggcatggtggct

SEQ ID NO: 24274 - DNA, 15 bp, Homo sapiens
tgaaggcatggtggc

SEQ ID NO: 24275 - DNA, 15 bp, Homo sapiens
atgaaggcatggtgg

SEQ ID NO: 24276 - DNA, 15 bp, Homo sapiens
aatgaaggcatggtg

SEQ ID NO: 24277 - DNA, 15 bp, Homo sapiens
aaatgaaggcatggt

SEQ ID NO: 24278 - DNA, 15 bp, Homo sapiens
aaaatgaaggcatgg

SEQ ID NO: 24279 - DNA, 15 bp, Homo sapiens
taaaatgaaggcatg

SEQ ID NO: 24280 - DNA, 15 bp, Homo sapiens
gtaaaatgaaggcat

SEQ ID NO: 24281 - DNA, 15 bp, Homo sapiens
tgtaaaatgaaggca

SEQ ID NO: 24282 - DNA, 15 bp, Homo sapiens
ctgtaaaatgaaggc

SEQ ID NO: 24283 - DNA, 15 bp, Homo sapiens
tctgtaaaatgaagg

SEQ ID NO: 24284 - DNA, 15 bp, Homo sapiens
atctgtaaaatgaag

SEQ ID NO: 24285 - DNA, 15 bp, Homo sapiens
tatctgtaaaatgaa

SEQ ID NO: 24286 - DNA, 15 bp, Homo sapiens
ttatctgtaaaatga

SEQ ID NO: 24287 - DNA, 15 bp, Homo sapiens
cttatctgtaaaatg

SEQ ID NO: 24288 - DNA, 15 bp, Homo sapiens
tcttatctgtaaaat

SEQ ID NO: 24289 - DNA, 15 bp, Homo sapiens
ttcttatctgtaaaa

SEQ ID NO: 24290 - DNA, 15 bp, Homo sapiens
cttcttatctgtaaa

SEQ ID NO: 24291 - DNA, 15 bp, Homo sapiens
acttcttatctgtaa

SEQ ID NO: 24292 - DNA, 15 bp, Homo sapiens
gacttcttatctgta

SEQ ID NO: 24293 - DNA, 15 bp, Homo sapiens
agacttcttatctgt

SEQ ID NO: 24294 - DNA, 15 bp, Homo sapiens
cagacttcttatctg

SEQ ID NO: 24295 - DNA, 15 bp, Homo sapiens
tcagacttcttatct

SEQ ID NO: 24296 - DNA, 15 bp, Homo sapiens
ctcagacttcttatc

SEQ ID NO: 24297 - DNA, 15 bp, Homo sapiens
tctcagacttcttat

SEQ ID NO: 24298 - DNA, 15 bp, Homo sapiens
ttctcagacttctta

SEQ ID NO: 24299 - DNA, 15 bp, Homo sapiens
tttctcagacttctt

SEQ ID NO: 24300 - DNA, 15 bp, Homo sapiens
ttttctcagacttct

SEQ ID NO: 24301 - DNA, 15 bp, Homo sapiens
gttttctcagacttc

SEQ ID NO: 24302 - DNA, 15 bp, Homo sapiens
agttttctcagactt

SEQ ID NO: 24303 - DNA, 15 bp, Homo sapiens
gagttttctcagact

SEQ ID NO: 24304 - DNA, 15 bp, Homo sapiens
tgagttttctcagac

SEQ ID NO: 24305 - DNA, 15 bp, Homo sapiens
ctgagttttctcaga

SEQ ID NO: 24306 - DNA, 15 bp, Homo sapiens
tctgagttttctcag

SEQ ID NO: 24307 - DNA, 15 bp, Homo sapiens
atctgagttttctca

SEQ ID NO: 24308 - DNA, 15 bp, Homo sapiens
aatctgagttttctc

SEQ ID NO: 24309 - DNA, 15 bp, Homo sapiens
aaatctgagttttct

SEQ ID NO: 24310 - DNA, 15 bp, Homo sapiens
taaatctgagttttc

SEQ ID NO: 24311 - DNA, 15 bp, Homo sapiens
ctaaatctgagtttt

SEQ ID NO: 24312 - DNA, 15 bp, Homo sapiens
cctaaatctgagttt

SEQ ID NO: 24313 - DNA, 15 bp, Homo sapiens
gcctaaatctgagtt

SEQ ID NO: 24314 - DNA, 15 bp, Homo sapiens
tgcctaaatctgagt

SEQ ID NO: 24315 - DNA, 15 bp, Homo sapiens
ctgcctaaatctgag

SEQ ID NO: 24316 - DNA, 15 bp, Homo sapiens
tctgcctaaatctga

SEQ ID NO: 24317 - DNA, 15 bp, Homo sapiens
atctgcctaaatctg

SEQ ID NO: 24318 - DNA, 15 bp, Homo sapiens
aatctgcctaaatct

SEQ ID NO: 24319 - DNA, 15 bp, Homo sapiens
caatctgcctaaatc

SEQ ID NO: 24320 - DNA, 15 bp, Homo sapiens
tcaatctgcctaaat

SEQ ID NO: 24321 - DNA, 15 bp, Homo sapiens
ctcaatctgcctaaa

SEQ ID NO: 24322 - DNA, 15 bp, Homo sapiens
actcaatctgcctaa

SEQ ID NO: 24323 - DNA, 15 bp, Homo sapiens
gactcaatctgccta

SEQ ID NO: 24324 - DNA, 15 bp, Homo sapiens
tgactcaatctgcct

SEQ ID NO: 24325 - DNA, 15 bp, Homo sapiens
gtgactcaatctgcc

SEQ ID NO: 24326 - DNA, 15 bp, Homo sapiens
agtgactcaatctgc

SEQ ID NO: 24327 - DNA, 15 bp, Homo sapiens
aagtgactcaatctg

SEQ ID NO: 24328 - DNA, 15 bp, Homo sapiens
gaagtgactcaatct

SEQ ID NO: 24329 - DNA, 15 bp, Homo sapiens
ggaagtgactcaatc

SEQ ID NO: 24330 - DNA, 15 bp, Homo sapiens
gggaagtgactcaat

SEQ ID NO: 24331 - DNA, 15 bp, Homo sapiens
ggggaagtgactcaa

SEQ ID NO: 24332 - DNA, 15 bp, Homo sapiens
tggggaagtgactca

SEQ ID NO: 24333 - DNA, 15 bp, Homo sapiens
ttggggaagtgactc

SEQ ID NO: 24334 - DNA, 15 bp, Homo sapiens
tttggggaagtgact

SEQ ID NO: 24335 - DNA, 15 bp, Homo sapiens
atttggggaagtgac

SEQ ID NO: 24336 - DNA, 15 bp, Homo sapiens
aatttggggaagtga

SEQ ID NO: 24337 - DNA, 15 bp, Homo sapiens
aaatttggggaagtg

SEQ ID NO: 24338 - DNA, 15 bp, Homo sapiens
taaatttggggaagt

SEQ ID NO: 24339 - DNA, 15 bp, Homo sapiens
ataaatttggggaag

SEQ ID NO: 24340 - DNA, 15 bp, Homo sapiens
cataaatttggggaa

SEQ ID NO: 24341 - DNA, 15 bp, Homo sapiens
acataaatttgggga

SEQ ID NO: 24342 - DNA, 15 bp, Homo sapiens
tacataaatttgggg

SEQ ID NO: 24343 - DNA, 15 bp, Homo sapiens
atacataaatttggg

SEQ ID NO: 24344 - DNA, 15 bp, Homo sapiens
gatacataaatttgg

SEQ ID NO: 24345 - DNA, 15 bp, Homo sapiens
agatacataaatttg

SEQ ID NO: 24346 - DNA, 15 bp, Homo sapiens
aagatacataaattt

SEQ ID NO: 24347 - DNA, 15 bp, Homo sapiens
caagatacataaatt

SEQ ID NO: 24348 - DNA, 15 bp, Homo sapiens
acaagatacataaat

SEQ ID NO: 24349 - DNA, 15 bp, Homo sapiens
tacaagatacataaa

SEQ ID NO: 24350 - DNA, 15 bp, Homo sapiens
ttacaagatacataa

SEQ ID NO: 24351 - DNA, 15 bp, Homo sapiens
cttacaagatacata

SEQ ID NO: 24352 - DNA, 15 bp, Homo sapiens
tcttacaagatacat

SEQ ID NO: 24353 - DNA, 15 bp, Homo sapiens
ttcttacaagataca

SEQ ID NO: 24354 - DNA, 15 bp, Homo sapiens
attcttacaagatac

SEQ ID NO: 24355 - DNA, 15 bp, Homo sapiens
gattcttacaagata

SEQ ID NO: 24356 - DNA, 15 bp, Homo sapiens
ggattcttacaagat

SEQ ID NO: 24357 - DNA, 15 bp, Homo sapiens
tggattcttacaaga

SEQ ID NO: 24358 - DNA, 15 bp, Homo sapiens
atggattcttacaag

SEQ ID NO: 24359 - DNA, 15 bp, Homo sapiens
tatggattcttacaa

SEQ ID NO: 24360 - DNA, 15 bp, Homo sapiens
atatggattcttaca

SEQ ID NO: 24361 - DNA, 15 bp, Homo sapiens
aatatggattcttac

SEQ ID NO: 24362 - DNA, 15 bp, Homo sapiens
gaatatggattctta

SEQ ID NO: 24363 - DNA, 15 bp, Homo sapiens
tgaatatggattctt

SEQ ID NO: 24364 - DNA, 15 bp, Homo sapiens
ttgaatatggattct

SEQ ID NO: 24365 - DNA, 15 bp, Homo sapiens
tttgaatatggattc

SEQ ID NO: 24366 - DNA, 15 bp, Homo sapiens
gtttgaatatggatt

SEQ ID NO: 24367 - DNA, 15 bp, Homo sapiens
ggtttgaatatggat

SEQ ID NO: 24368 - DNA, 15 bp, Homo sapiens
aggtttgaatatgga

SEQ ID NO: 24369 - DNA, 15 bp, Homo sapiens
gaggtttgaatatgg

SEQ ID NO: 24370 - DNA, 15 bp, Homo sapiens
tgaggtttgaatatg

SEQ ID NO: 24371 - DNA, 15 bp, Homo sapiens
ctgaggtttgaatat

SEQ ID NO: 24372 - DNA, 15 bp, Homo sapiens
actgaggtttgaata

SEQ ID NO: 24373 - DNA, 15 bp, Homo sapiens
gactgaggtttgaat

SEQ ID NO: 24374 - DNA, 15 bp, Homo sapiens
ggactgaggtttgaa

SEQ ID NO: 24375 - DNA, 15 bp, Homo sapiens
gggactgaggtttga

SEQ ID NO: 24376 - DNA, 15 bp, Homo sapiens
ggggactgaggtttg

SEQ ID NO: 24377 - DNA, 15 bp, Homo sapiens
aggggactgaggttt

SEQ ID NO: 24378 - DNA, 15 bp, Homo sapiens
taggggactgaggtt

SEQ ID NO: 24379 - DNA, 15 bp, Homo sapiens
ttaggggactgaggt

SEQ ID NO: 24380 - DNA, 15 bp, Homo sapiens
gttaggggactgagg

SEQ ID NO: 24381 - DNA, 15 bp, Homo sapiens
agttaggggactgag

SEQ ID NO: 24382 - DNA, 15 bp, Homo sapiens
gagttaggggactga

SEQ ID NO: 24383 - DNA, 15 bp, Homo sapiens
agagttaggggactg

SEQ ID NO: 24384 - DNA, 15 bp, Homo sapiens
aagagttaggggact

SEQ ID NO: 24385 - DNA, 15 bp, Homo sapiens
taagagttaggggac

SEQ ID NO: 24386 - DNA, 15 bp, Homo sapiens
ctaagagttagggga

SEQ ID NO: 24387 - DNA, 15 bp, Homo sapiens
actaagagttagggg

SEQ ID NO: 24388 - DNA, 15 bp, Homo sapiens
aactaagagttaggg

SEQ ID NO: 24389 - DNA, 15 bp, Homo sapiens
gaactaagagttagg

SEQ ID NO: 24390 - DNA, 15 bp, Homo sapiens
tgaactaagagttag

SEQ ID NO: 24391 - DNA, 15 bp, Homo sapiens
atgaactaagagtta

SEQ ID NO: 24392 - DNA, 15 bp, Homo sapiens
aatgaactaagagtt

SEQ ID NO: 24393 - DNA, 15 bp, Homo sapiens
taatgaactaagagt

SEQ ID NO: 24394 - DNA, 15 bp, Homo sapiens
gtaatgaactaagag

SEQ ID NO: 24395 - DNA, 15 bp, Homo sapiens
agtaatgaactaaga

SEQ ID NO: 24396 - DNA, 15 bp, Homo sapiens
aagtaatgaactaag

SEQ ID NO: 24397 - DNA, 15 bp, Homo sapiens
aaagtaatgaactaa

SEQ ID NO: 24398 - DNA, 15 bp, Homo sapiens
aaaagtaatgaacta

SEQ ID NO: 24399 - DNA, 15 bp, Homo sapiens
aaaaagtaatgaact

SEQ ID NO: 24400 - DNA, 15 bp, Homo sapiens
gaaaaagtaatgaac

SEQ ID NO: 24401 - DNA, 15 bp, Homo sapiens
agaaaaagtaatgaa

SEQ ID NO: 24402 - DNA, 15 bp, Homo sapiens
tagaaaaagtaatga

SEQ ID NO: 24403 - DNA, 15 bp, Homo sapiens
gtagaaaaagtaatg

SEQ ID NO: 24404 - DNA, 15 bp, Homo sapiens
ggtagaaaaagtaat

SEQ ID NO: 24405 - DNA, 15 bp, Homo sapiens
tggtagaaaaagtaa

SEQ ID NO: 24406 - DNA, 15 bp, Homo sapiens
gtggtagaaaaagta

SEQ ID NO: 24407 - DNA, 15 bp, Homo sapiens
agtggtagaaaaagt

SEQ ID NO: 24408 - DNA, 15 bp, Homo sapiens
aagtggtagaaaaag

SEQ ID NO: 24409 - DNA, 15 bp, Homo sapiens
gaagtggtagaaaaa

SEQ ID NO: 24410 - DNA, 15 bp, Homo sapiens
agaagtggtagaaaa

SEQ ID NO: 24411 - DNA, 15 bp, Homo sapiens
gagaagtggtagaaa

SEQ ID NO: 24412 - DNA, 15 bp, Homo sapiens
tgagaagtggtagaa

SEQ ID NO: 24413 - DNA, 15 bp, Homo sapiens
ctgagaagtggtaga

SEQ ID NO: 24414 - DNA, 15 bp, Homo sapiens
actgagaagtggtag

SEQ ID NO: 24415 - DNA, 15 bp, Homo sapiens
tactgagaagtggta

SEQ ID NO: 24416 - DNA, 15 bp, Homo sapiens
atactgagaagtggt

SEQ ID NO: 24417 - DNA, 15 bp, Homo sapiens
gatactgagaagtgg

SEQ ID NO: 24418 - DNA, 15 bp, Homo sapiens
ggatactgagaagtg

SEQ ID NO: 24419 - DNA, 15 bp, Homo sapiens
aggatactgagaagt

SEQ ID NO: 24420 - DNA, 15 bp, Homo sapiens
gaggatactgagaag

SEQ ID NO: 24421 - DNA, 15 bp, Homo sapiens
agaggatactgagaa

SEQ ID NO: 24422 - DNA, 15 bp, Homo sapiens
tagaggatactgaga

SEQ ID NO: 24423 - DNA, 15 bp, Homo sapiens
ttagaggatactgag

SEQ ID NO: 24424 - DNA, 15 bp, Homo sapiens
cttagaggatactga

SEQ ID NO: 24425 - DNA, 15 bp, Homo sapiens
tcttagaggatactg

SEQ ID NO: 24426 - DNA, 15 bp, Homo sapiens
ttcttagaggatact

SEQ ID NO: 24427 - DNA, 15 bp, Homo sapiens
attcttagaggatac

SEQ ID NO: 24428 - DNA, 15 bp, Homo sapiens
aattcttagaggata

SEQ ID NO: 24429 - DNA, 15 bp, Homo sapiens
gaattcttagaggat

SEQ ID NO: 24430 - DNA, 15 bp, Homo sapiens
tgaattcttagagga

SEQ ID NO: 24431 - DNA, 15 bp, Homo sapiens
ctgaattcttagagg

SEQ ID NO: 24432 - DNA, 15 bp, Homo sapiens
tctgaattcttagag

SEQ ID NO: 24433 - DNA, 15 bp, Homo sapiens
ttctgaattcttaga

SEQ ID NO: 24434 - DNA, 15 bp, Homo sapiens
tttctgaattcttag

SEQ ID NO: 24435 - DNA, 15 bp, Homo sapiens
ctttctgaattctta

SEQ ID NO: 24436 - DNA, 15 bp, Homo sapiens
tctttctgaattctt

SEQ ID NO: 24437 - DNA, 15 bp, Homo sapiens
ttctttctgaattct

SEQ ID NO: 24438 - DNA, 15 bp, Homo sapiens
gttctttctgaattc

SEQ ID NO: 24439 - DNA, 15 bp, Homo sapiens
ggttctttctgaatt

SEQ ID NO: 24440 - DNA, 15 bp, Homo sapiens
tggttctttctgaat

SEQ ID NO: 24441 - DNA, 15 bp, Homo sapiens
gtggttctttctgaa

SEQ ID NO: 24442 - DNA, 15 bp, Homo sapiens
tgtggttctttctga

SEQ ID NO: 24443 - DNA, 15 bp, Homo sapiens
atgtggttctttctg

SEQ ID NO: 24444 - DNA, 15 bp, Homo sapiens
gatgtggttctttct

SEQ ID NO: 24445 - DNA, 15 bp, Homo sapiens
cgatgtggttctttc

SEQ ID NO: 24446 - DNA, 15 bp, Homo sapiens
tcgatgtggttcttt

SEQ ID NO: 24447 - DNA, 15 bp, Homo sapiens
gtcgatgtggttctt

SEQ ID NO: 24448 - DNA, 15 bp, Homo sapiens
agtcgatgtggttct

SEQ ID NO: 24449 - DNA, 15 bp, Homo sapiens
gagtcgatgtggttc

SEQ ID NO: 24450 - DNA, 15 bp, Homo sapiens
agagtcgatgtggtt

SEQ ID NO: 24451 - DNA, 15 bp, Homo sapiens
cagagtcgatgtggt

SEQ ID NO: 24452 - DNA, 15 bp, Homo sapiens
tcagagtcgatgtgg

SEQ ID NO: 24453 - DNA, 15 bp, Homo sapiens
atcagagtcgatgtg

SEQ ID NO: 24454 - DNA, 15 bp, Homo sapiens
aatcagagtcgatgt

SEQ ID NO: 24455 - DNA, 15 bp, Homo sapiens
aaatcagagtcgatg

SEQ ID NO: 24456 - DNA, 15 bp, Homo sapiens
aaaatcagagtcgat

SEQ ID NO: 24457 - DNA, 15 bp, Homo sapiens
aaaaatcagagtcga

SEQ ID NO: 24458 - DNA, 15 bp, Homo sapiens
gaaaaatcagagtcg

SEQ ID NO: 24459 - DNA, 15 bp, Homo sapiens
tgaaaaatcagagtc

SEQ ID NO: 24460 - DNA, 15 bp, Homo sapiens
atgaaaaatcagagt

SEQ ID NO: 24461 - DNA, 15 bp, Homo sapiens
aatgaaaaatcagag

SEQ ID NO: 24462 - DNA, 15 bp, Homo sapiens
aaatgaaaaatcaga

SEQ ID NO: 24463 - DNA, 15 bp, Homo sapiens
caaatgaaaaatcag

SEQ ID NO: 24464 - DNA, 15 bp, Homo sapiens
acaaatgaaaaatca

SEQ ID NO: 24465 - DNA, 15 bp, Homo sapiens
aacaaatgaaaaatc

SEQ ID NO: 24466 - DNA, 15 bp, Homo sapiens
aaacaaatgaaaaat

SEQ ID NO: 24467 - DNA, 15 bp, Homo sapiens
taaacaaatgaaaaa

SEQ ID NO: 24468 - DNA, 15 bp, Homo sapiens
ttaaacaaatgaaaa

SEQ ID NO: 24469 - DNA, 15 bp, Homo sapiens
cttaaacaaatgaaa

SEQ ID NO: 24470 - DNA, 15 bp, Homo sapiens
acttaaacaaatgaa

SEQ ID NO: 24471 - DNA, 15 bp, Homo sapiens
tacttaaacaaatga

SEQ ID NO: 24472 - DNA, 15 bp, Homo sapiens
gtacttaaacaaatg

SEQ ID NO: 24473 - DNA, 15 bp, Homo sapiens
tgtacttaaacaaat

SEQ ID NO: 24474 - DNA, 15 bp, Homo sapiens
gtgtacttaaacaaa

SEQ ID NO: 24475 - DNA, 15 bp, Homo sapiens
tgtgtacttaaacaa

SEQ ID NO: 24476 - DNA, 15 bp, Homo sapiens
ctgtgtacttaaaca

SEQ ID NO: 24477 - DNA, 15 bp, Homo sapiens
cctgtgtacttaaac

SEQ ID NO: 24478 - DNA, 15 bp, Homo sapiens
acctgtgtacttaaa

SEQ ID NO: 24479 - DNA, 15 bp, Homo sapiens
tacctgtgtacttaa

SEQ ID NO: 24480 - DNA, 15 bp, Homo sapiens
ttacctgtgtactta

SEQ ID NO: 24481 - DNA, 15 bp, Homo sapiens
attacctgtgtactt

SEQ ID NO: 24482 - DNA, 15 bp, Homo sapiens
tattacctgtgtact

SEQ ID NO: 24483 - DNA, 15 bp, Homo sapiens
ctattacctgtgtac

SEQ ID NO: 24484 - DNA, 15 bp, Homo sapiens
cctattacctgtgta

SEQ ID NO: 24485 - DNA, 15 bp, Homo sapiens
acctattacctgtgt

SEQ ID NO: 24486 - DNA, 15 bp, Homo sapiens
cacctattacctgtg

SEQ ID NO: 24487 - DNA, 15 bp, Homo sapiens
tcacctattacctgt

SEQ ID NO: 24488 - DNA, 15 bp, Homo sapiens
ttcacctattacctg

SEQ ID NO: 24489 - DNA, 15 bp, Homo sapiens
attcacctattacct

SEQ ID NO: 24490 - DNA, 15 bp, Homo sapiens
cattcacctattacc

SEQ ID NO: 24491 - DNA, 15 bp, Homo sapiens
acattcacctattac

SEQ ID NO: 24492 - DNA, 15 bp, Homo sapiens
tacattcacctatta

SEQ ID NO: 24493 - DNA, 15 bp, Homo sapiens
atacattcacctatt

SEQ ID NO: 24494 - DNA, 15 bp, Homo sapiens
aatacattcacctat

SEQ ID NO: 24495 - DNA, 15 bp, Homo sapiens
aaatacattcaccta

SEQ ID NO: 24496 - DNA, 15 bp, Homo sapiens
aaaatacattcacct

SEQ ID NO: 24497 - DNA, 15 bp, Homo sapiens
caaaatacattcacc

SEQ ID NO: 24498 - DNA, 15 bp, Homo sapiens
acaaaatacattcac

SEQ ID NO: 24499 - DNA, 15 bp, Homo sapiens
aacaaaatacattca

SEQ ID NO: 24500 - DNA, 15 bp, Homo sapiens
caacaaaatacattc

SEQ ID NO: 24501 - DNA, 15 bp, Homo sapiens
acaacaaaatacatt

SEQ ID NO: 24502 - DNA, 15 bp, Homo sapiens
aacaacaaaatacat

SEQ ID NO: 24503 - DNA, 15 bp, Homo sapiens
aaacaacaaaataca

SEQ ID NO: 24504 - DNA, 15 bp, Homo sapiens
taaacaacaaaatac

SEQ ID NO: 24505 - DNA, 15 bp, Homo sapiens
ttaaacaacaaaata

SEQ ID NO: 24506 - DNA, 15 bp, Homo sapiens
tttaaacaacaaaat

SEQ ID NO: 24507 - DNA, 15 bp, Homo sapiens
ttttaaacaacaaaa

SEQ ID NO: 24508 - DNA, 15 bp, Homo sapiens
tttttaaacaacaaa

SEQ ID NO: 24509 - DNA, 15 bp, Homo sapiens
atttttaaacaacaa

SEQ ID NO: 24510 - DNA, 15 bp, Homo sapiens
aatttttaaacaaca

SEQ ID NO: 24511 - DNA, 15 bp, Homo sapiens
gaatttttaaacaac

SEQ ID NO: 24512 - DNA, 15 bp, Homo sapiens
tgaatttttaaacaa

SEQ ID NO: 24513 - DNA, 15 bp, Homo sapiens
atgaatttttaaaca

SEQ ID NO: 24514 - DNA, 15 bp, Homo sapiens
tatgaatttttaaac

SEQ ID NO: 24515 - DNA, 15 bp, Homo sapiens
atatgaatttttaaa

SEQ ID NO: 24516 - DNA, 15 bp, Homo sapiens
tatatgaatttttaa

SEQ ID NO: 24517 - DNA, 15 bp, Homo sapiens
ttatatgaattttta

SEQ ID NO: 24518 - DNA, 15 bp, Homo sapiens
attatatgaattttt

SEQ ID NO: 24519 - DNA, 15 bp, Homo sapiens
tattatatgaatttt

SEQ ID NO: 24520 - DNA, 15 bp, Homo sapiens
gtattatatgaattt

SEQ ID NO: 24521 - DNA, 15 bp, Homo sapiens
tgtattatatgaatt

SEQ ID NO: 24522 - DNA, 15 bp, Homo sapiens
gtgtattatatgaat

SEQ ID NO: 24523 - DNA, 15 bp, Homo sapiens
tgtgtattatatgaa

SEQ ID NO: 24524 - DNA, 15 bp, Homo sapiens
ttgtgtattatatga

SEQ ID NO: 24525 - DNA, 15 bp, Homo sapiens
tttgtgtattatatg

SEQ ID NO: 24526 - DNA, 15 bp, Homo sapiens
ttttgtgtattatat

SEQ ID NO: 24527 - DNA, 15 bp, Homo sapiens
cttttgtgtattata

SEQ ID NO: 24528 - DNA, 15 bp, Homo sapiens
ccttttgtgtattat

SEQ ID NO: 24529 - DNA, 15 bp, Homo sapiens
gccttttgtgtatta

SEQ ID NO: 24530 - DNA, 15 bp, Homo sapiens
agccttttgtgtatt

SEQ ID NO: 24531 - DNA, 15 bp, Homo sapiens
tagccttttgtgtat

SEQ ID NO: 24532 - DNA, 15 bp, Homo sapiens
ttagccttttgtgta

SEQ ID NO: 24533 - DNA, 15 bp, Homo sapiens
tttagccttttgtgt

SEQ ID NO: 24534 - DNA, 15 bp, Homo sapiens
ctttagccttttgtg

SEQ ID NO: 24535 - DNA, 15 bp, Homo sapiens
actttagccttttgt

SEQ ID NO: 24536 - DNA, 15 bp, Homo sapiens
gactttagccttttg

SEQ ID NO: 24537 - DNA, 15 bp, Homo sapiens
agactttagcctttt

SEQ ID NO: 24538 - DNA, 15 bp, Homo sapiens
gagactttagccttt

SEQ ID NO: 24539 - DNA, 15 bp, Homo sapiens
cgagactttagcctt

SEQ ID NO: 24540 - DNA, 15 bp, Homo sapiens
gcgagactttagcct

SEQ ID NO: 24541 - DNA, 15 bp, Homo sapiens
agcgagactttagcc

SEQ ID NO: 24542 - DNA, 15 bp, Homo sapiens
aagcgagactttagc

SEQ ID NO: 24543 - DNA, 15 bp, Homo sapiens
gaagcgagactttag

SEQ ID NO: 24544 - DNA, 15 bp, Homo sapiens
ggaagcgagacttta

SEQ ID NO: 24545 - DNA, 15 bp, Homo sapiens
gggaagcgagacttt

SEQ ID NO: 24546 - DNA, 15 bp, Homo sapiens
tgggaagcgagactt

SEQ ID NO: 24547 - DNA, 15 bp, Homo sapiens
gtgggaagcgagact

SEQ ID NO: 24548 - DNA, 15 bp, Homo sapiens
agtgggaagcgagac

SEQ ID NO: 24549 - DNA, 15 bp, Homo sapiens
aagtgggaagcgaga

SEQ ID NO: 24550 - DNA, 15 bp, Homo sapiens
gaagtgggaagcgag

SEQ ID NO: 24551 - DNA, 15 bp, Homo sapiens
ggaagtgggaagcga

SEQ ID NO: 24552 - DNA, 15 bp, Homo sapiens
aggaagtgggaagcg

SEQ ID NO: 24553 - DNA, 15 bp, Homo sapiens
gaggaagtgggaagc

SEQ ID NO: 24554 - DNA, 15 bp, Homo sapiens
agaggaagtgggaag

SEQ ID NO: 24555 - DNA, 15 bp, Homo sapiens
gagaggaagtgggaa

SEQ ID NO: 24556 - DNA, 15 bp, Homo sapiens
ggagaggaagtggga

SEQ ID NO: 24557 - DNA, 15 bp, Homo sapiens
gggagaggaagtggg

SEQ ID NO: 24558 - DNA, 15 bp, Homo sapiens
ggggagaggaagtgg

SEQ ID NO: 24559 - DNA, 15 bp, Homo sapiens
aggggagaggaagtg

SEQ ID NO: 24560 - DNA, 15 bp, Homo sapiens
aaggggagaggaagt

SEQ ID NO: 24561 - DNA, 15 bp, Homo sapiens
aaaggggagaggaag

SEQ ID NO: 24562 - DNA, 15 bp, Homo sapiens
gaaaggggagaggaa

SEQ ID NO: 24563 - DNA, 15 bp, Homo sapiens
agaaaggggagagga

SEQ ID NO: 24564 - DNA, 15 bp, Homo sapiens
tagaaaggggagagg

SEQ ID NO: 24565 - DNA, 15 bp, Homo sapiens
gtagaaaggggagag

SEQ ID NO: 24566 - DNA, 15 bp, Homo sapiens
ggtagaaaggggaga

SEQ ID NO: 24567 - DNA, 15 bp, Homo sapiens
gggtagaaaggggag

SEQ ID NO: 24568 - DNA, 15 bp, Homo sapiens
tgggtagaaagggga

SEQ ID NO: 24569 - DNA, 15 bp, Homo sapiens
ttgggtagaaagggg

SEQ ID NO: 24570 - DNA, 15 bp, Homo sapiens
gttgggtagaaaggg

SEQ ID NO: 24571 - DNA, 15 bp, Homo sapiens
agttgggtagaaagg

SEQ ID NO: 24572 - DNA, 15 bp, Homo sapiens
gagttgggtagaaag

SEQ ID NO: 24573 - DNA, 15 bp, Homo sapiens
agagttgggtagaaa

SEQ ID NO: 24574 - DNA, 15 bp, Homo sapiens
cagagttgggtagaa

SEQ ID NO: 24575 - DNA, 15 bp, Homo sapiens
gcagagttgggtaga

SEQ ID NO: 24576 - DNA, 15 bp, Homo sapiens
ggcagagttgggtag

SEQ ID NO: 24577 - DNA, 15 bp, Homo sapiens
aggcagagttgggta

SEQ ID NO: 24578 - DNA, 15 bp, Homo sapiens
gaggcagagttgggt

SEQ ID NO: 24579 - DNA, 15 bp, Homo sapiens
ggaggcagagttggg

SEQ ID NO: 24580 - DNA, 15 bp, Homo sapiens
gggaggcagagttgg

SEQ ID NO: 24581 - DNA, 15 bp, Homo sapiens
ggggaggcagagttg

SEQ ID NO: 24582 - DNA, 15 bp, Homo sapiens
tggggaggcagagtt

SEQ ID NO: 24583 - DNA, 15 bp, Homo sapiens
ctggggaggcagagt

SEQ ID NO: 24584 - DNA, 15 bp, Homo sapiens
cctggggaggcagag

SEQ ID NO: 24585 - DNA, 15 bp, Homo sapiens
ccctggggaggcaga

SEQ ID NO: 24586 - DNA, 15 bp, Homo sapiens
tccctggggaggcag

SEQ ID NO: 24587 - DNA, 15 bp, Homo sapiens
ctccctggggaggca

SEQ ID NO: 24588 - DNA, 15 bp, Homo sapiens
tctccctggggaggc

SEQ ID NO: 24589 - DNA, 15 bp, Homo sapiens
ctctccctggggagg

SEQ ID NO: 24590 - DNA, 15 bp, Homo sapiens
gctctccctggggag

SEQ ID NO: 24591 - DNA, 15 bp, Homo sapiens
agctctccctgggga

SEQ ID NO: 24592 - DNA, 15 bp, Homo sapiens
aagctctccctgggg

SEQ ID NO: 24593 - DNA, 15 bp, Homo sapiens
gaagctctccctggg

SEQ ID NO: 24594 - DNA, 15 bp, Homo sapiens
agaagctctccctgg

SEQ ID NO: 24595 - DNA, 15 bp, Homo sapiens
cagaagctctccctg

SEQ ID NO: 24596 - DNA, 15 bp, Homo sapiens
gcagaagctctccct

SEQ ID NO: 24597 - DNA, 15 bp, Homo sapiens
agcagaagctctccc

SEQ ID NO: 24598 - DNA, 15 bp, Homo sapiens
cagcagaagctctcc

SEQ ID NO: 24599 - DNA, 15 bp, Homo sapiens
tcagcagaagctctc

SEQ ID NO: 24600 - DNA, 15 bp, Homo sapiens
gtcagcagaagctct

SEQ ID NO: 24601 - DNA, 15 bp, Homo sapiens
tgtcagcagaagctc

SEQ ID NO: 24602 - DNA, 15 bp, Homo sapiens
ctgtcagcagaagct

SEQ ID NO: 24603 - DNA, 15 bp, Homo sapiens
actgtcagcagaagc

SEQ ID NO: 24604 - DNA, 15 bp, Homo sapiens
gactgtcagcagaag

SEQ ID NO: 24605 - DNA, 15 bp, Homo sapiens
cgactgtcagcagaa

SEQ ID NO: 24606 - DNA, 15 bp, Homo sapiens
ccgactgtcagcaga

SEQ ID NO: 24607 - DNA, 15 bp, Homo sapiens
accgactgtcagcag

SEQ ID NO: 24608 - DNA, 15 bp, Homo sapiens
caccgactgtcagca

SEQ ID NO: 24609 - DNA, 15 bp, Homo sapiens
ccaccgactgtcagc

SEQ ID NO: 24610 - DNA, 15 bp, Homo sapiens
tccaccgactgtcag

SEQ ID NO: 24611 - DNA, 15 bp, Homo sapiens
gtccaccgactgtca

SEQ ID NO: 24612 - DNA, 15 bp, Homo sapiens
tgtccaccgactgtc

SEQ ID NO: 24613 - DNA, 15 bp, Homo sapiens
atgtccaccgactgt

SEQ ID NO: 24614 - DNA, 15 bp, Homo sapiens
aatgtccaccgactg

SEQ ID NO: 24615 - DNA, 15 bp, Homo sapiens
gaatgtccaccgact

SEQ ID NO: 24616 - DNA, 15 bp, Homo sapiens
agaatgtccaccgac

SEQ ID NO: 24617 - DNA, 15 bp, Homo sapiens
aagaatgtccaccga

SEQ ID NO: 24618 - DNA, 15 bp, Homo sapiens
aaagaatgtccaccg

SEQ ID NO: 24619 - DNA, 15 bp, Homo sapiens
gaaagaatgtccacc

SEQ ID NO: 24620 - DNA, 15 bp, Homo sapiens
tgaaagaatgtccac

SEQ ID NO: 24621 - DNA, 15 bp, Homo sapiens
ctgaaagaatgtcca

SEQ ID NO: 24622 - DNA, 15 bp, Homo sapiens
tctgaaagaatgtcc

SEQ ID NO: 24623 - DNA, 15 bp, Homo sapiens
ctctgaaagaatgtc

SEQ ID NO: 24624 - DNA, 15 bp, Homo sapiens
actctgaaagaatgt

SEQ ID NO: 24625 - DNA, 15 bp, Homo sapiens
aactctgaaagaatg

SEQ ID NO: 24626 - DNA, 15 bp, Homo sapiens
aaactctgaaagaat

SEQ ID NO: 24627 - DNA, 15 bp, Homo sapiens
aaaactctgaaagaa

SEQ ID NO: 24628 - DNA, 15 bp, Homo sapiens
taaaactctgaaaga

SEQ ID NO: 24629 - DNA, 15 bp, Homo sapiens
gtaaaactctgaaag

SEQ ID NO: 24630 - DNA, 15 bp, Homo sapiens
tgtaaaactctgaaa

SEQ ID NO: 24631 - DNA, 15 bp, Homo sapiens
ttgtaaaactctgaa

SEQ ID NO: 24632 - DNA, 15 bp, Homo sapiens
attgtaaaactctga

SEQ ID NO: 24633 - DNA, 15 bp, Homo sapiens
aattgtaaaactctg

SEQ ID NO: 24634 - DNA, 15 bp, Homo sapiens
taattgtaaaactct

SEQ ID NO: 24635 - DNA, 15 bp, Homo sapiens
ataattgtaaaactc

SEQ ID NO: 24636 - DNA, 15 bp, Homo sapiens
cataattgtaaaact

SEQ ID NO: 24637 - DNA, 15 bp, Homo sapiens
acataattgtaaaac

SEQ ID NO: 24638 - DNA, 15 bp, Homo sapiens
cacataattgtaaaa

SEQ ID NO: 24639 - DNA, 15 bp, Homo sapiens
acacataattgtaaa

SEQ ID NO: 24640 - DNA, 15 bp, Homo sapiens
cacacataattgtaa

SEQ ID NO: 24641 - DNA, 15 bp, Homo sapiens
acacacataattgta

SEQ ID NO: 24642 - DNA, 15 bp, Homo sapiens
cacacacataattgt

SEQ ID NO: 24643 - DNA, 15 bp, Homo sapiens
acacacacataattg

SEQ ID NO: 24644 - DNA, 15 bp, Homo sapiens
cacacacacataatt

SEQ ID NO: 24645 - DNA, 15 bp, Homo sapiens
acacacacacataat

SEQ ID NO: 24646 - DNA, 15 bp, Homo sapiens
cacacacacacataa

SEQ ID NO: 24647 - DNA, 15 bp, Homo sapiens
acacacacacacata

SEQ ID NO: 24648 - DNA, 15 bp, Homo sapiens
tacacacacacacat

SEQ ID NO: 24649 - DNA, 15 bp, Homo sapiens
gtacacacacacaca

SEQ ID NO: 24650 - DNA, 15 bp, Homo sapiens
tgtacacacacacac

SEQ ID NO: 24651 - DNA, 15 bp, Homo sapiens
atgtacacacacaca

SEQ ID NO: 24652 - DNA, 15 bp, Homo sapiens
tatgtacacacacac

SEQ ID NO: 24653 - DNA, 15 bp, Homo sapiens
ttatgtacacacaca

SEQ ID NO: 24654 - DNA, 15 bp, Homo sapiens
cttatgtacacacac

SEQ ID NO: 24655 - DNA, 15 bp, Homo sapiens
tcttatgtacacaca

SEQ ID NO: 24656 - DNA, 15 bp, Homo sapiens
atcttatgtacacac

SEQ ID NO: 24657 - DNA, 15 bp, Homo sapiens
catcttatgtacaca

SEQ ID NO: 24658 - DNA, 15 bp, Homo sapiens
acatcttatgtacac

SEQ ID NO: 24659 - DNA, 15 bp, Homo sapiens
gacatcttatgtaca

SEQ ID NO: 24660 - DNA, 15 bp, Homo sapiens
tgacatcttatgtac

SEQ ID NO: 24661 - DNA, 15 bp, Homo sapiens
ctgacatcttatgta

SEQ ID NO: 24662 - DNA, 15 bp, Homo sapiens
actgacatcttatgt

SEQ ID NO: 24663 - DNA, 15 bp, Homo sapiens
aactgacatcttatg

SEQ ID NO: 24664 - DNA, 15 bp, Homo sapiens
aaactgacatcttat

SEQ ID NO: 24665 - DNA, 15 bp, Homo sapiens
aaaactgacatctta

SEQ ID NO: 24666 - DNA, 15 bp, Homo sapiens
aaaaactgacatctt

SEQ ID NO: 24667 - DNA, 15 bp, Homo sapiens
gaaaaactgacatct

SEQ ID NO: 24668 - DNA, 15 bp, Homo sapiens
agaaaaactgacatc

SEQ ID NO: 24669 - DNA, 15 bp, Homo sapiens
aagaaaaactgacat

SEQ ID NO: 24670 - DNA, 15 bp, Homo sapiens
aaagaaaaactgaca

SEQ ID NO: 24671 - DNA, 15 bp, Homo sapiens
caaagaaaaactgac

SEQ ID NO: 24672 - DNA, 15 bp, Homo sapiens
acaaagaaaaactga

SEQ ID NO: 24673 - DNA, 15 bp, Homo sapiens
cacaaagaaaaactg

SEQ ID NO: 24674 - DNA, 15 bp, Homo sapiens
acacaaagaaaaact

SEQ ID NO: 24675 - DNA, 15 bp, Homo sapiens
tacacaaagaaaaac

SEQ ID NO: 24676 - DNA, 15 bp, Homo sapiens
ctacacaaagaaaaa

SEQ ID NO: 24677 - DNA, 15 bp, Homo sapiens
cctacacaaagaaaa

SEQ ID NO: 24678 - DNA, 15 bp, Homo sapiens
tcctacacaaagaaa

SEQ ID NO: 24679 - DNA, 15 bp, Homo sapiens
atcctacacaaagaa

SEQ ID NO: 24680 - DNA, 15 bp, Homo sapiens
tatcctacacaaaga

SEQ ID NO: 24681 - DNA, 15 bp, Homo sapiens
gtatcctacacaaag

SEQ ID NO: 24682 - DNA, 15 bp, Homo sapiens
tgtatcctacacaaa

SEQ ID NO: 24683 - DNA, 15 bp, Homo sapiens
atgtatcctacacaa

SEQ ID NO: 24684 - DNA, 15 bp, Homo sapiens
catgtatcctacaca

SEQ ID NO: 24685 - DNA, 15 bp, Homo sapiens
tcatgtatcctacac

SEQ ID NO: 24686 - DNA, 15 bp, Homo sapiens
ttcatgtatcctaca

SEQ ID NO: 24687 - DNA, 15 bp, Homo sapiens
gttcatgtatcctac

SEQ ID NO: 24688 - DNA, 15 bp, Homo sapiens
tgttcatgtatccta

SEQ ID NO: 24689 - DNA, 15 bp, Homo sapiens
atgttcatgtatcct

SEQ ID NO: 24690 - DNA, 15 bp, Homo sapiens
catgttcatgtatcc

SEQ ID NO: 24691 - DNA, 15 bp, Homo sapiens
tcatgttcatgtatc

SEQ ID NO: 24692 - DNA, 15 bp, Homo sapiens
ttcatgttcatgtat

SEQ ID NO: 24693 - DNA, 15 bp, Homo sapiens
attcatgttcatgta

SEQ ID NO: 24694 - DNA, 15 bp, Homo sapiens
aattcatgttcatgt

SEQ ID NO: 24695 - DNA, 15 bp, Homo sapiens
aaattcatgttcatg

SEQ ID NO: 24696 - DNA, 15 bp, Homo sapiens
aaaattcatgttcat

SEQ ID NO: 24697 - DNA, 15 bp, Homo sapiens
taaaattcatgttca

SEQ ID NO: 24698 - DNA, 15 bp, Homo sapiens
ttaaaattcatgttc

SEQ ID NO: 24699 - DNA, 15 bp, Homo sapiens
tttaaaattcatgtt

SEQ ID NO: 24700 - DNA, 15 bp, Homo sapiens
gtttaaaattcatgt

SEQ ID NO: 24701 - DNA, 15 bp, Homo sapiens
tgtttaaaattcatg

SEQ ID NO: 24702 - DNA, 15 bp, Homo sapiens
atgtttaaaattcat

SEQ ID NO: 24703 - DNA, 15 bp, Homo sapiens
tatgtttaaaattca

SEQ ID NO: 24704 - DNA, 15 bp, Homo sapiens
ttatgtttaaaattc

SEQ ID NO: 24705 - DNA, 15 bp, Homo sapiens
tttatgtttaaaatt

SEQ ID NO: 24706 - DNA, 15 bp, Homo sapiens
atttatgtttaaaat

SEQ ID NO: 24707 - DNA, 15 bp, Homo sapiens
catttatgtttaaaa

SEQ ID NO: 24708 - DNA, 15 bp, Homo sapiens
acatttatgtttaaa

SEQ ID NO: 24709 - DNA, 15 bp, Homo sapiens
cacatttatgtttaa

SEQ ID NO: 24710 - DNA, 15 bp, Homo sapiens
tcacatttatgttta

SEQ ID NO: 24711 - DNA, 15 bp, Homo sapiens
ctcacatttatgttt

SEQ ID NO: 24712 - DNA, 15 bp, Homo sapiens
actcacatttatgtt

SEQ ID NO: 24713 - DNA, 15 bp, Homo sapiens
cactcacatttatgt

SEQ ID NO: 24714 - DNA, 15 bp, Homo sapiens
acactcacatttatg

SEQ ID NO: 24715 - DNA, 15 bp, Homo sapiens
tacactcacatttat

SEQ ID NO: 24716 - DNA, 15 bp, Homo sapiens
atacactcacattta

SEQ ID NO: 24717 - DNA, 15 bp, Homo sapiens
aatacactcacattt

SEQ ID NO: 24718 - DNA, 15 bp, Homo sapiens
taatacactcacatt

SEQ ID NO: 24719 - DNA, 15 bp, Homo sapiens
gtaatacactcacat

SEQ ID NO: 24720 - DNA, 15 bp, Homo sapiens
tgtaatacactcaca

SEQ ID NO: 24721 - DNA, 15 bp, Homo sapiens
gtgtaatacactcac

SEQ ID NO: 24722 - DNA, 15 bp, Homo sapiens
tgtgtaatacactca

SEQ ID NO: 24723 - DNA, 15 bp, Homo sapiens
atgtgtaatacactc

SEQ ID NO: 24724 - DNA, 15 bp, Homo sapiens
tatgtgtaatacact

SEQ ID NO: 24725 - DNA, 15 bp, Homo sapiens
atatgtgtaatacac

SEQ ID NO: 24726 - DNA, 15 bp, Homo sapiens
aatatgtgtaataca

SEQ ID NO: 24727 - DNA, 15 bp, Homo sapiens
caatatgtgtaatac

SEQ ID NO: 24728 - DNA, 15 bp, Homo sapiens
tcaatatgtgtaata

SEQ ID NO: 24729 - DNA, 15 bp, Homo sapiens
gtcaatatgtgtaat

SEQ ID NO: 24730 - DNA, 15 bp, Homo sapiens
ggtcaatatgtgtaa

SEQ ID NO: 24731 - DNA, 15 bp, Homo sapiens
tggtcaatatgtgta

SEQ ID NO: 24732 - DNA, 15 bp, Homo sapiens
ctggtcaatatgtgt

SEQ ID NO: 24733 - DNA, 15 bp, Homo sapiens
gctggtcaatatgtg

SEQ ID NO: 24734 - DNA, 15 bp, Homo sapiens
tgctggtcaatatgt

SEQ ID NO: 24735 - DNA, 15 bp, Homo sapiens
gtgctggtcaatatg

SEQ ID NO: 24736 - DNA, 15 bp, Homo sapiens
ggtgctggtcaatat

SEQ ID NO: 24737 - DNA, 15 bp, Homo sapiens
aggtgctggtcaata

SEQ ID NO: 24738 - DNA, 15 bp, Homo sapiens
aaggtgctggtcaat

SEQ ID NO: 24739 - DNA, 15 bp, Homo sapiens
taaggtgctggtcaa

SEQ ID NO: 24740 - DNA, 15 bp, Homo sapiens
ctaaggtgctggtca

SEQ ID NO: 24741 - DNA, 15 bp, Homo sapiens
actaaggtgctggtc

SEQ ID NO: 24742 - DNA, 15 bp, Homo sapiens
aactaaggtgctggt

SEQ ID NO: 24743 - DNA, 15 bp, Homo sapiens
aaactaaggtgctgg

SEQ ID NO: 24744 - DNA, 15 bp, Homo sapiens
aaaactaaggtgctg

SEQ ID NO: 24745 - DNA, 15 bp, Homo sapiens
aaaaactaaggtgct

SEQ ID NO: 24746 - DNA, 15 bp, Homo sapiens
aaaaaactaaggtgc

SEQ ID NO: 24747 - DNA, 15 bp, Homo sapiens
aaaaaaactaaggtg

SEQ ID NO: 24748 - DNA, 15 bp, Homo sapiens
caaaaaaactaaggt

SEQ ID NO: 24749 - DNA, 15 bp, Homo sapiens
acaaaaaaactaagg

SEQ ID NO: 24750 - DNA, 15 bp, Homo sapiens
aacaaaaaaactaag

SEQ ID NO: 24751 - DNA, 15 bp, Homo sapiens
aaacaaaaaaactaa

SEQ ID NO: 24752 - DNA, 15 bp, Homo sapiens
caaacaaaaaaacta

SEQ ID NO: 24753 - DNA, 15 bp, Homo sapiens
acaaacaaaaaaact

SEQ ID NO: 24754 - DNA, 15 bp, Homo sapiens
aacaaacaaaaaaac

SEQ ID NO: 24755 - DNA, 15 bp, Homo sapiens
aaacaaacaaaaaaa

SEQ ID NO: 24756 - DNA, 15 bp, Homo sapiens
caaacaaacaaaaaa

SEQ ID NO: 24757 - DNA, 15 bp, Homo sapiens
acaaacaaacaaaaa

SEQ ID NO: 24758 - DNA, 15 bp, Homo sapiens
aacaaacaaacaaaa

SEQ ID NO: 24759 - DNA, 15 bp, Homo sapiens
aaacaaacaaacaaa

SEQ ID NO: 24760 - DNA, 15 bp, Homo sapiens
caaacaaacaaacaa

SEQ ID NO: 24761 - DNA, 15 bp, Homo sapiens
ccaaacaaacaaaca

SEQ ID NO: 24762 - DNA, 15 bp, Homo sapiens
accaaacaaacaaac

SEQ ID NO: 24763 - DNA, 15 bp, Homo sapiens
aaccaaacaaacaaa

SEQ ID NO: 24764 - DNA, 15 bp, Homo sapiens
aaaccaaacaaacaa

SEQ ID NO: 24765 - DNA, 15 bp, Homo sapiens
aaaaccaaacaaaca

SEQ ID NO: 24766 - DNA, 15 bp, Homo sapiens
gaaaaccaaacaaac

SEQ ID NO: 24767 - DNA, 15 bp, Homo sapiens
agaaaaccaaacaaa

SEQ ID NO: 24768 - DNA, 15 bp, Homo sapiens
aagaaaaccaaacaa

SEQ ID NO: 24769 - DNA, 15 bp, Homo sapiens
aaagaaaaccaaaca

SEQ ID NO: 24770 - DNA, 15 bp, Homo sapiens
caaagaaaaccaaac

SEQ ID NO: 24771 - DNA, 15 bp, Homo sapiens
acaaagaaaaccaaa

SEQ ID NO: 24772 - DNA, 15 bp, Homo sapiens
cacaaagaaaaccaa

SEQ ID NO: 24773 - DNA, 15 bp, Homo sapiens
gcacaaagaaaacca

SEQ ID NO: 24774 - DNA, 15 bp, Homo sapiens
agcacaaagaaaacc

SEQ ID NO: 24775 - DNA, 15 bp, Homo sapiens
cagcacaaagaaaac

SEQ ID NO: 24776 - DNA, 15 bp, Homo sapiens
acagcacaaagaaaa

SEQ ID NO: 24777 - DNA, 15 bp, Homo sapiens
aacagcacaaagaaa

SEQ ID NO: 24778 - DNA, 15 bp, Homo sapiens
aaacagcacaaagaa

SEQ ID NO: 24779 - DNA, 15 bp, Homo sapiens
caaacagcacaaaga

SEQ ID NO: 24780 - DNA, 15 bp, Homo sapiens
tcaaacagcacaaag

SEQ ID NO: 24781 - DNA, 15 bp, Homo sapiens
ctcaaacagcacaaa

SEQ ID NO: 24782 - DNA, 15 bp, Homo sapiens
tctcaaacagcacaa

SEQ ID NO: 24783 - DNA, 15 bp, Homo sapiens
ttctcaaacagcaca

SEQ ID NO: 24784 - DNA, 15 bp, Homo sapiens
cttctcaaacagcac

SEQ ID NO: 24785 - DNA, 15 bp, Homo sapiens
ccttctcaaacagca

SEQ ID NO: 24786 - DNA, 15 bp, Homo sapiens
tccttctcaaacagc

SEQ ID NO: 24787 - DNA, 15 bp, Homo sapiens
ctccttctcaaacag

SEQ ID NO: 24788 - DNA, 15 bp, Homo sapiens
actccttctcaaaca

SEQ ID NO: 24789 - DNA, 15 bp, Homo sapiens
gactccttctcaaac

SEQ ID NO: 24790 - DNA, 15 bp, Homo sapiens
agactccttctcaaa

SEQ ID NO: 24791 - DNA, 15 bp, Homo sapiens
aagactccttctcaa

SEQ ID NO: 24792 - DNA, 15 bp, Homo sapiens
caagactccttctca

SEQ ID NO: 24793 - DNA, 15 bp, Homo sapiens
gcaagactccttctc

SEQ ID NO: 24794 - DNA, 15 bp, Homo sapiens
agcaagactccttct

SEQ ID NO: 24795 - DNA, 15 bp, Homo sapiens
gagcaagactccttc

SEQ ID NO: 24796 - DNA, 15 bp, Homo sapiens
agagcaagactcctt

SEQ ID NO: 24797 - DNA, 15 bp, Homo sapiens
cagagcaagactcct

SEQ ID NO: 24798 - DNA, 15 bp, Homo sapiens
acagagcaagactcc

SEQ ID NO: 24799 - DNA, 15 bp, Homo sapiens
gacagagcaagactc

SEQ ID NO: 24800 - DNA, 15 bp, Homo sapiens
tgacagagcaagact

SEQ ID NO: 24801 - DNA, 15 bp, Homo sapiens
gtgacagagcaagac

SEQ ID NO: 24802 - DNA, 15 bp, Homo sapiens
ggtgacagagcaaga

SEQ ID NO: 24803 - DNA, 15 bp, Homo sapiens
gggtgacagagcaag

SEQ ID NO: 24804 - DNA, 15 bp, Homo sapiens
ctccagcctgggtga

SEQ ID NO: 24805 - DNA, 15 bp, Homo sapiens
actccagcctgggtg

SEQ ID NO: 24806 - DNA, 15 bp, Homo sapiens
cactccagcctgggt

SEQ ID NO: 24807 - DNA, 15 bp, Homo sapiens
gactgcactccagcc

SEQ ID NO: 24808 - DNA, 15 bp, Homo sapiens
agactgcactccagc

SEQ ID NO: 24809 - DNA, 15 bp, Homo sapiens
aagactgcactccag

SEQ ID NO: 24810 - DNA, 15 bp, Homo sapiens
caagactgcactcca

SEQ ID NO: 24811 - DNA, 15 bp, Homo sapiens
gcaagactgcactcc

SEQ ID NO: 24812 - DNA, 15 bp, Homo sapiens
tgcaagactgcactc

SEQ ID NO: 24813 - DNA, 15 bp, Homo sapiens
ttgcaagactgcact

SEQ ID NO: 24814 - DNA, 15 bp, Homo sapiens
attgcaagactgcac

SEQ ID NO: 24815 - DNA, 15 bp, Homo sapiens
gattgcaagactgca

SEQ ID NO: 24816 - DNA, 15 bp, Homo sapiens
agattgcaagactgc

SEQ ID NO: 24817 - DNA, 15 bp, Homo sapiens
gagattgcaagactg

SEQ ID NO: 24818 - DNA, 15 bp, Homo sapiens
cgagattgcaagact

SEQ ID NO: 24819 - DNA, 15 bp, Homo sapiens
ccgagattgcaagac

SEQ ID NO: 24820 - DNA, 15 bp, Homo sapiens
gccgagattgcaaga

SEQ ID NO: 24821 - DNA, 15 bp, Homo sapiens
agccgagattgcaag

SEQ ID NO: 24822 - DNA, 15 bp, Homo sapiens
aagccgagattgcaa

SEQ ID NO: 24823 - DNA, 15 bp, Homo sapiens
taagccgagattgca

SEQ ID NO: 24824 - DNA, 15 bp, Homo sapiens
gtaagccgagattgc

SEQ ID NO: 24825 - DNA, 15 bp, Homo sapiens
cgtaagccgagattg

SEQ ID NO: 24826 - DNA, 15 bp, Homo sapiens
gcgtaagccgagatt

SEQ ID NO: 24827 - DNA, 15 bp, Homo sapiens
tgcgtaagccgagat

SEQ ID NO: 24828 - DNA, 15 bp, Homo sapiens
ttgcgtaagccgaga

SEQ ID NO: 24829 - DNA, 15 bp, Homo sapiens
gttgcgtaagccgag

SEQ ID NO: 24830 - DNA, 15 bp, Homo sapiens
ggttgcgtaagccga

SEQ ID NO: 24831 - DNA, 15 bp, Homo sapiens
aggttgcgtaagccg

SEQ ID NO: 24832 - DNA, 15 bp, Homo sapiens
gaggttgcgtaagcc

SEQ ID NO: 24833 - DNA, 15 bp, Homo sapiens
ggaggttgcgtaagc

SEQ ID NO: 24834 - DNA, 15 bp, Homo sapiens
tggaggttgcgtaag

SEQ ID NO: 24835 - DNA, 15 bp, Homo sapiens
gtggaggttgcgtaa

SEQ ID NO: 24836 - DNA, 15 bp, Homo sapiens
ggtggaggttgcgta

SEQ ID NO: 24837 - DNA, 15 bp, Homo sapiens
aggtggaggttgcgt

SEQ ID NO: 24838 - DNA, 15 bp, Homo sapiens
gaggtggaggttgcg

SEQ ID NO: 24839 - DNA, 15 bp, Homo sapiens
ggaggtggaggttgc

SEQ ID NO: 24840 - DNA, 15 bp, Homo sapiens
aggaggtggaggttg

SEQ ID NO: 24841 - DNA, 15 bp, Homo sapiens
caggaggtggaggtt

SEQ ID NO: 24842 - DNA, 15 bp, Homo sapiens
ccaggaggtggaggt

SEQ ID NO: 24843 - DNA, 15 bp, Homo sapiens
cccaggaggtggagg

SEQ ID NO: 24844 - DNA, 15 bp, Homo sapiens
acccaggaggtggag

SEQ ID NO: 24845 - DNA, 15 bp, Homo sapiens
aacccaggaggtgga

SEQ ID NO: 24846 - DNA, 15 bp, Homo sapiens
gaacccaggaggtgg

SEQ ID NO: 24847 - DNA, 15 bp, Homo sapiens
tgaacccaggaggtg

SEQ ID NO: 24848 - DNA, 15 bp, Homo sapiens
ttgaacccaggaggt

SEQ ID NO: 24849 - DNA, 15 bp, Homo sapiens
cttgaacccaggagg

SEQ ID NO: 24850 - DNA, 15 bp, Homo sapiens
acttgaacccaggag

SEQ ID NO: 24851 - DNA, 15 bp, Homo sapiens
cacttgaacccagga

SEQ ID NO: 24852 - DNA, 15 bp, Homo sapiens
tcacttgaacccagg

SEQ ID NO: 24853 - DNA, 15 bp, Homo sapiens
atcacttgaacccag

SEQ ID NO: 24854 - DNA, 15 bp, Homo sapiens
aatcacttgaaccca

SEQ ID NO: 24855 - DNA, 15 bp, Homo sapiens
gaatcacttgaaccc

SEQ ID NO: 24856 - DNA, 15 bp, Homo sapiens
agaatcacttgaacc

SEQ ID NO: 24857 - DNA, 15 bp, Homo sapiens
gagaatcacttgaac

SEQ ID NO: 24858 - DNA, 15 bp, Homo sapiens
ggagaatcacttgaa

SEQ ID NO: 24859 - DNA, 15 bp, Homo sapiens
aggagaatcacttga

SEQ ID NO: 24860 - DNA, 15 bp, Homo sapiens
caggagaatcacttg

SEQ ID NO: 24861 - DNA, 15 bp, Homo sapiens
gcaggagaatcactt

SEQ ID NO: 24862 - DNA, 15 bp, Homo sapiens
ggcaggagaatcact

SEQ ID NO: 24863 - DNA, 15 bp, Homo sapiens
aggcaggagaatcac

SEQ ID NO: 24864 - DNA, 15 bp, Homo sapiens
gaggcaggagaatca

SEQ ID NO: 24865 - DNA, 15 bp, Homo sapiens
ctcgggaggctgagg

SEQ ID NO: 24866 - DNA, 15 bp, Homo sapiens
actcgggaggctgag

SEQ ID NO: 24867 - DNA, 15 bp, Homo sapiens
tactcgggaggctga

SEQ ID NO: 24868 - DNA, 15 bp, Homo sapiens
ctactcgggaggctg

SEQ ID NO: 24869 - DNA, 15 bp, Homo sapiens
actactcgggaggct

SEQ ID NO: 24870 - DNA, 15 bp, Homo sapiens
aactactcgggaggc

SEQ ID NO: 24871 - DNA, 15 bp, Homo sapiens
caactactcgggagg

SEQ ID NO: 24872 - DNA, 15 bp, Homo sapiens
ccaactactcgggag

SEQ ID NO: 24873 - DNA, 15 bp, Homo sapiens
cccaactactcggga

SEQ ID NO: 24874 - DNA, 15 bp, Homo sapiens
tcccaactactcggg

SEQ ID NO: 24875 - DNA, 15 bp, Homo sapiens
atcccaactactcgg

SEQ ID NO: 24876 - DNA, 15 bp, Homo sapiens
aatcccaactactcg

SEQ ID NO: 24877 - DNA, 15 bp, Homo sapiens
taatcccaactactc

SEQ ID NO: 24878 - DNA, 15 bp, Homo sapiens
gtaatcccaactact

SEQ ID NO: 24879 - DNA, 15 bp, Homo sapiens
tgtaatcccaactac

SEQ ID NO: 24880 - DNA, 15 bp, Homo sapiens
ctgtaatcccaacta

SEQ ID NO: 24881 - DNA, 15 bp, Homo sapiens
cctgtaatcccaact

SEQ ID NO: 24882 - DNA, 15 bp, Homo sapiens
acctgtaatcccaac

SEQ ID NO: 24883 - DNA, 15 bp, Homo sapiens
cacctgtaatcccaa

SEQ ID NO: 24884 - DNA, 15 bp, Homo sapiens
gcacctgtaatccca

SEQ ID NO: 24885 - DNA, 15 bp, Homo sapiens
ggcacctgtaatccc

SEQ ID NO: 24886 - DNA, 15 bp, Homo sapiens
aggcacctgtaatcc

SEQ ID NO: 24887 - DNA, 15 bp, Homo sapiens
caggcacctgtaatc

SEQ ID NO: 24888 - DNA, 15 bp, Homo sapiens
gcaggcacctgtaat

SEQ ID NO: 24889 - DNA, 15 bp, Homo sapiens
ggcaggcacctgtaa

SEQ ID NO: 24890 - DNA, 15 bp, Homo sapiens
tggcaggcacctgta

SEQ ID NO: 24891 - DNA, 15 bp, Homo sapiens
gtggcaggcacctgt

SEQ ID NO: 24892 - DNA, 15 bp, Homo sapiens
ggtggcaggcacctg

SEQ ID NO: 24893 - DNA, 15 bp, Homo sapiens
tggtggcaggcacct

SEQ ID NO: 24894 - DNA, 15 bp, Homo sapiens
atggtggcaggcacc

SEQ ID NO: 24895 - DNA, 15 bp, Homo sapiens
catggtggcaggcac

SEQ ID NO: 24896 - DNA, 15 bp, Homo sapiens
gcatggtggcaggca

SEQ ID NO: 24897 - DNA, 15 bp, Homo sapiens
ggcatggtggcaggc

SEQ ID NO: 24898 - DNA, 15 bp, Homo sapiens
aggcatggtggcagg

SEQ ID NO: 24899 - DNA, 15 bp, Homo sapiens
caggcatggtggcag

SEQ ID NO: 24900 - DNA, 15 bp, Homo sapiens
caaaaatacaaaaat

SEQ ID NO: 24901 - DNA, 15 bp, Homo sapiens
acaaaaatacaaaaa

SEQ ID NO: 24902 - DNA, 15 bp, Homo sapiens
tacaaaaatacaaaa

SEQ ID NO: 24903 - DNA, 15 bp, Homo sapiens
ctacaaaaatacaaa

SEQ ID NO: 24904 - DNA, 15 bp, Homo sapiens
ctctacaaaaataca

SEQ ID NO: 24905 - DNA, 15 bp, Homo sapiens
tctctacaaaaatac

SEQ ID NO: 24906 - DNA, 15 bp, Homo sapiens
ctctctacaaaaata

SEQ ID NO: 24907 - DNA, 15 bp, Homo sapiens
cctctctacaaaaat

SEQ ID NO: 24908 - DNA, 15 bp, Homo sapiens
ccctctctacaaaaa

SEQ ID NO: 24909 - DNA, 15 bp, Homo sapiens
cccctctctacaaaa

SEQ ID NO: 24910 - DNA, 15 bp, Homo sapiens
ccccctctctacaaa

SEQ ID NO: 24911 - DNA, 15 bp, Homo sapiens
accccctctctacaa

SEQ ID NO: 24912 - DNA, 15 bp, Homo sapiens
aaccccctctctaca

SEQ ID NO: 24913 - DNA, 15 bp, Homo sapiens
aaaccccctctctac

SEQ ID NO: 24914 - DNA, 15 bp, Homo sapiens
gaaaccccctctcta

SEQ ID NO: 24915 - DNA, 15 bp, Homo sapiens
tgaaaccccctctct

SEQ ID NO: 24916 - DNA, 15 bp, Homo sapiens
gtgaaaccccctctc

SEQ ID NO: 24917 - DNA, 15 bp, Homo sapiens
agtgaaaccccctct

SEQ ID NO: 24918 - DNA, 15 bp, Homo sapiens
tagtgaaaccccctc

SEQ ID NO: 24919 - DNA, 15 bp, Homo sapiens
atagtgaaaccccct

SEQ ID NO: 24920 - DNA, 15 bp, Homo sapiens
catagtgaaaccccc

SEQ ID NO: 24921 - DNA, 15 bp, Homo sapiens
acatagtgaaacccc

SEQ ID NO: 24922 - DNA, 15 bp, Homo sapiens
tacatagtgaaaccc

SEQ ID NO: 24923 - DNA, 15 bp, Homo sapiens
ctacatagtgaaacc

SEQ ID NO: 24924 - DNA, 15 bp, Homo sapiens
cctacatagtgaaac

SEQ ID NO: 24925 - DNA, 15 bp, Homo sapiens
acctacatagtgaaa

SEQ ID NO: 24926 - DNA, 15 bp, Homo sapiens
gacctacatagtgaa

SEQ ID NO: 24927 - DNA, 15 bp, Homo sapiens
tgacctacatagtga

SEQ ID NO: 24928 - DNA, 15 bp, Homo sapiens
ttgacctacatagtg

SEQ ID NO: 24929 - DNA, 15 bp, Homo sapiens
cttgacctacatagt

SEQ ID NO: 24930 - DNA, 15 bp, Homo sapiens
gcttgacctacatag

SEQ ID NO: 24931 - DNA, 15 bp, Homo sapiens
agcttgacctacata

SEQ ID NO: 24932 - DNA, 15 bp, Homo sapiens
cagcttgacctacat

SEQ ID NO: 24933 - DNA, 15 bp, Homo sapiens
ccagcttgacctaca

SEQ ID NO: 24934 - DNA, 15 bp, Homo sapiens
accagcttgacctac

SEQ ID NO: 24935 - DNA, 15 bp, Homo sapiens
gaccagcttgaccta

SEQ ID NO: 24936 - DNA, 15 bp, Homo sapiens
agaccagcttgacct

SEQ ID NO: 24937 - DNA, 15 bp, Homo sapiens
gagaccagcttgacc

SEQ ID NO: 24938 - DNA, 15 bp, Homo sapiens
tgagaccagcttgac

SEQ ID NO: 24939 - DNA, 15 bp, Homo sapiens
ttgagaccagcttga

SEQ ID NO: 24940 - DNA, 15 bp, Homo sapiens
tttgagaccagcttg

SEQ ID NO: 24941 - DNA, 15 bp, Homo sapiens
gtttgagaccagctt

SEQ ID NO: 24942 - DNA, 15 bp, Homo sapiens
agtttgagaccagct

SEQ ID NO: 24943 - DNA, 15 bp, Homo sapiens
cagtttgagaccagc

SEQ ID NO: 24944 - DNA, 15 bp, Homo sapiens
gcagtttgagaccag

SEQ ID NO: 24945 - DNA, 15 bp, Homo sapiens
agcagtttgagacca

SEQ ID NO: 24946 - DNA, 15 bp, Homo sapiens
cagcagtttgagacc

SEQ ID NO: 24947 - DNA, 15 bp, Homo sapiens
tcagcagtttgagac

SEQ ID NO: 24948 - DNA, 15 bp, Homo sapiens
gtcagcagtttgaga

SEQ ID NO: 24949 - DNA, 15 bp, Homo sapiens
ggtcagcagtttgag

SEQ ID NO: 24950 - DNA, 15 bp, Homo sapiens
aggtcagcagtttga

SEQ ID NO: 24951 - DNA, 15 bp, Homo sapiens
gaggtcagcagtttg

SEQ ID NO: 24952 - DNA, 15 bp, Homo sapiens
tgaggtcagcagttt

SEQ ID NO: 24953 - DNA, 15 bp, Homo sapiens
ttgaggtcagcagtt

SEQ ID NO: 24954 - DNA, 15 bp, Homo sapiens
tttgaggtcagcagt

SEQ ID NO: 24955 - DNA, 15 bp, Homo sapiens
atttgaggtcagcag

SEQ ID NO: 24956 - DNA, 15 bp, Homo sapiens
catttgaggtcagca

SEQ ID NO: 24957 - DNA, 15 bp, Homo sapiens
tcatttgaggtcagc

SEQ ID NO: 24958 - DNA, 15 bp, Homo sapiens
atcatttgaggtcag

SEQ ID NO: 24959 - DNA, 15 bp, Homo sapiens
gatcatttgaggtca

SEQ ID NO: 24960 - DNA, 15 bp, Homo sapiens
ggatcatttgaggtc

SEQ ID NO: 24961 - DNA, 15 bp, Homo sapiens
tggatcatttgaggt

SEQ ID NO: 24962 - DNA, 15 bp, Homo sapiens
atggatcatttgagg

SEQ ID NO: 24963 - DNA, 15 bp, Homo sapiens
gatggatcatttgag

SEQ ID NO: 24964 - DNA, 15 bp, Homo sapiens
ggatggatcatttga

SEQ ID NO: 24965 - DNA, 15 bp, Homo sapiens
tggatggatcatttg

SEQ ID NO: 24966 - DNA, 15 bp, Homo sapiens
gtggatggatcattt

SEQ ID NO: 24967 - DNA, 15 bp, Homo sapiens
ggtggatggatcatt

SEQ ID NO: 24968 - DNA, 15 bp, Homo sapiens
aggtggatggatcat

SEQ ID NO: 24969 - DNA, 15 bp, Homo sapiens
gaggtggatggatca

SEQ ID NO: 24970 - DNA, 15 bp, Homo sapiens
tgaggtggatggatc

SEQ ID NO: 24971 - DNA, 15 bp, Homo sapiens
ctgaggtggatggat

SEQ ID NO: 24972 - DNA, 15 bp, Homo sapiens
gctgaggtggatgga

SEQ ID NO: 24973 - DNA, 15 bp, Homo sapiens
ggctgaggtggatgg

SEQ ID NO: 24974 - DNA, 15 bp, Homo sapiens
aggctgaggtggatg

SEQ ID NO: 24975 - DNA, 15 bp, Homo sapiens
gaggctgaggtggat

SEQ ID NO: 24976 - DNA, 15 bp, Homo sapiens
ggaggctgaggtgga

SEQ ID NO: 24977 - DNA, 15 bp, Homo sapiens
tttgggaggctgagg

SEQ ID NO: 24978 - DNA, 15 bp, Homo sapiens
ctttgggaggctgag

SEQ ID NO: 24979 - DNA, 15 bp, Homo sapiens
actttgggaggctga

SEQ ID NO: 24980 - DNA, 15 bp, Homo sapiens
cactttgggaggctg

SEQ ID NO: 24981 - DNA, 15 bp, Homo sapiens
gcactttgggaggct

SEQ ID NO: 24982 - DNA, 15 bp, Homo sapiens
tcagcactttgggag

SEQ ID NO: 24983 - DNA, 15 bp, Homo sapiens
ctcagcactttggga

SEQ ID NO: 24984 - DNA, 15 bp, Homo sapiens
tctcagcactttggg

SEQ ID NO: 24985 - DNA, 15 bp, Homo sapiens
atctcagcactttgg

SEQ ID NO: 24986 - DNA, 15 bp, Homo sapiens
catctcagcactttg

SEQ ID NO: 24987 - DNA, 15 bp, Homo sapiens
tcatctcagcacttt

SEQ ID NO: 24988 - DNA, 15 bp, Homo sapiens
gtcatctcagcactt

SEQ ID NO: 24989 - DNA, 15 bp, Homo sapiens
tgtcatctcagcact

SEQ ID NO: 24990 - DNA, 15 bp, Homo sapiens
ctgtcatctcagcac

SEQ ID NO: 24991 - DNA, 15 bp, Homo sapiens
cctgtcatctcagca

SEQ ID NO: 24992 - DNA, 15 bp, Homo sapiens
gcctgtcatctcagc

SEQ ID NO: 24993 - DNA, 15 bp, Homo sapiens
cgcctgtcatctcag

SEQ ID NO: 24994 - DNA, 15 bp, Homo sapiens
acgcctgtcatctca

SEQ ID NO: 24995 - DNA, 15 bp, Homo sapiens
cacgcctgtcatctc

SEQ ID NO: 24996 - DNA, 15 bp, Homo sapiens
tcacgcctgtcatct

SEQ ID NO: 24997 - DNA, 15 bp, Homo sapiens
ctcacgcctgtcatc

SEQ ID NO: 24998 - DNA, 15 bp, Homo sapiens
gctcacgcctgtcat

SEQ ID NO: 24999 - DNA, 15 bp, Homo sapiens
ggctcacgcctgtca

SEQ ID NO: 25000 - DNA, 15 bp, Homo sapiens
aggctcacgcctgtc

SEQ ID NO: 25001 - DNA, 15 bp, Homo sapiens
gaggctcacgcctgt

SEQ ID NO: 25002 - DNA, 15 bp, Homo sapiens
ggaggctcacgcctg

SEQ ID NO: 25003 - DNA, 15 bp, Homo sapiens
cggaggctcacgcct

SEQ ID NO: 25004 - DNA, 15 bp, Homo sapiens
acggaggctcacgcc

SEQ ID NO: 25005 - DNA, 15 bp, Homo sapiens
cacggaggctcacgc

SEQ ID NO: 25006 - DNA, 15 bp, Homo sapiens
gcacggaggctcacg

SEQ ID NO: 25007 - DNA, 15 bp, Homo sapiens
ggcacggaggctcac

SEQ ID NO: 25008 - DNA, 15 bp, Homo sapiens
gggcacggaggctca

SEQ ID NO: 25009 - DNA, 15 bp, Homo sapiens
tgggcacggaggctc

SEQ ID NO: 25010 - DNA, 15 bp, Homo sapiens
ctgggcacggaggct

SEQ ID NO: 25011 - DNA, 15 bp, Homo sapiens
gctgggcacggaggc

SEQ ID NO: 25012 - DNA, 15 bp, Homo sapiens
ggctgggcacggagg

SEQ ID NO: 25013 - DNA, 15 bp, Homo sapiens
tggctgggcacggag

SEQ ID NO: 25014 - DNA, 15 bp, Homo sapiens
ctggctgggcacgga

SEQ ID NO: 25015 - DNA, 15 bp, Homo sapiens
actggctgggcacgg

SEQ ID NO: 25016 - DNA, 15 bp, Homo sapiens
aactggctgggcacg

SEQ ID NO: 25017 - DNA, 15 bp, Homo sapiens
aaactggctgggcac

SEQ ID NO: 25018 - DNA, 15 bp, Homo sapiens
aaaactggctgggca

SEQ ID NO: 25019 - DNA, 15 bp, Homo sapiens
caaaactggctgggc

SEQ ID NO: 25020 - DNA, 15 bp, Homo sapiens
acaaaactggctggg

SEQ ID NO: 25021 - DNA, 15 bp, Homo sapiens
aacaaaactggctgg

SEQ ID NO: 25022 - DNA, 15 bp, Homo sapiens
aaacaaaactggctg

SEQ ID NO: 25023 - DNA, 15 bp, Homo sapiens
aaaacaaaactggct

SEQ ID NO: 25024 - DNA, 15 bp, Homo sapiens
aaaaacaaaactggc

SEQ ID NO: 25025 - DNA, 15 bp, Homo sapiens
aaaaaacaaaactgg

SEQ ID NO: 25026 - DNA, 15 bp, Homo sapiens
aaaaaaacaaaactg

SEQ ID NO: 25027 - DNA, 15 bp, Homo sapiens
taaaaaaacaaaact

SEQ ID NO: 25028 - DNA, 15 bp, Homo sapiens
ataaaaaaacaaaac

SEQ ID NO: 25029 - DNA, 15 bp, Homo sapiens
aataaaaaaacaaaa

SEQ ID NO: 25030 - DNA, 15 bp, Homo sapiens
taataaaaaaacaaa

SEQ ID NO: 25031 - DNA, 15 bp, Homo sapiens
ttaataaaaaaacaa

SEQ ID NO: 25032 - DNA, 15 bp, Homo sapiens
gttaataaaaaaaca

SEQ ID NO: 25033 - DNA, 15 bp, Homo sapiens
ggttaataaaaaaac

SEQ ID NO: 25034 - DNA, 15 bp, Homo sapiens
tggttaataaaaaaa

SEQ ID NO: 25035 - DNA, 15 bp, Homo sapiens
ttggttaataaaaaa

SEQ ID NO: 25036 - DNA, 15 bp, Homo sapiens
cttggttaataaaaa

SEQ ID NO: 25037 - DNA, 15 bp, Homo sapiens
acttggttaataaaa

SEQ ID NO: 25038 - DNA, 15 bp, Homo sapiens
aacttggttaataaa

SEQ ID NO: 25039 - DNA, 15 bp, Homo sapiens
taacttggttaataa

SEQ ID NO: 25040 - DNA, 15 bp, Homo sapiens
gtaacttggttaata

SEQ ID NO: 25041 - DNA, 15 bp, Homo sapiens
cgtaacttggttaat

SEQ ID NO: 25042 - DNA, 15 bp, Homo sapiens
acgtaacttggttaa

SEQ ID NO: 25043 - DNA, 15 bp, Homo sapiens
tacgtaacttggtta

SEQ ID NO: 25044 - DNA, 15 bp, Homo sapiens
atacgtaacttggtt

SEQ ID NO: 25045 - DNA, 15 bp, Homo sapiens
aatacgtaacttggt

SEQ ID NO: 25046 - DNA, 15 bp, Homo sapiens
aaatacgtaacttgg

SEQ ID NO: 25047 - DNA, 15 bp, Homo sapiens
aaaatacgtaacttg

SEQ ID NO: 25048 - DNA, 15 bp, Homo sapiens
taaaatacgtaactt

SEQ ID NO: 25049 - DNA, 15 bp, Homo sapiens
ttaaaatacgtaact

SEQ ID NO: 25050 - DNA, 15 bp, Homo sapiens
tttaaaatacgtaac

SEQ ID NO: 25051 - DNA, 15 bp, Homo sapiens
gtttaaaatacgtaa

SEQ ID NO: 25052 - DNA, 15 bp, Homo sapiens
agtttaaaatacgta

SEQ ID NO: 25053 - DNA, 15 bp, Homo sapiens
aagtttaaaatacgt

SEQ ID NO: 25054 - DNA, 15 bp, Homo sapiens
gaagtttaaaatacg

SEQ ID NO: 25055 - DNA, 15 bp, Homo sapiens
agaagtttaaaatac

SEQ ID NO: 25056 - DNA, 15 bp, Homo sapiens
gagaagtttaaaata

SEQ ID NO: 25057 - DNA, 15 bp, Homo sapiens
ggagaagtttaaaat

SEQ ID NO: 25058 - DNA, 15 bp, Homo sapiens
tggagaagtttaaaa

SEQ ID NO: 25059 - DNA, 15 bp, Homo sapiens
atggagaagtttaaa

SEQ ID NO: 25060 - DNA, 15 bp, Homo sapiens
catggagaagtttaa

SEQ ID NO: 25061 - DNA, 15 bp, Homo sapiens
acatggagaagttta

SEQ ID NO: 25062 - DNA, 15 bp, Homo sapiens
gacatggagaagttt

SEQ ID NO: 25063 - DNA, 15 bp, Homo sapiens
tgacatggagaagtt

SEQ ID NO: 25064 - DNA, 15 bp, Homo sapiens
ttgacatggagaagt

SEQ ID NO: 25065 - DNA, 15 bp, Homo sapiens
attgacatggagaag

SEQ ID NO: 25066 - DNA, 15 bp, Homo sapiens
cattgacatggagaa

SEQ ID NO: 25067 - DNA, 15 bp, Homo sapiens
gcattgacatggaga

SEQ ID NO: 25068 - DNA, 15 bp, Homo sapiens
agcattgacatggag

SEQ ID NO: 25069 - DNA, 15 bp, Homo sapiens
aagcattgacatgga

SEQ ID NO: 25070 - DNA, 15 bp, Homo sapiens
aaagcattgacatgg

SEQ ID NO: 25071 - DNA, 15 bp, Homo sapiens
aaaagcattgacatg

SEQ ID NO: 25072 - DNA, 15 bp, Homo sapiens
taaaagcattgacat

SEQ ID NO: 25073 - DNA, 15 bp, Homo sapiens
ctaaaagcattgaca

SEQ ID NO: 25074 - DNA, 15 bp, Homo sapiens
tctaaaagcattgac

SEQ ID NO: 25075 - DNA, 15 bp, Homo sapiens
ctctaaaagcattga

SEQ ID NO: 25076 - DNA, 15 bp, Homo sapiens
gctctaaaagcattg

SEQ ID NO: 25077 - DNA, 15 bp, Homo sapiens
agctctaaaagcatt

SEQ ID NO: 25078 - DNA, 15 bp, Homo sapiens
tagctctaaaagcat

SEQ ID NO: 25079 - DNA, 15 bp, Homo sapiens
atagctctaaaagca

SEQ ID NO: 25080 - DNA, 15 bp, Homo sapiens
aatagctctaaaagc

SEQ ID NO: 25081 - DNA, 15 bp, Homo sapiens
aaatagctctaaaag

SEQ ID NO: 25082 - DNA, 15 bp, Homo sapiens
aaaatagctctaaaa

SEQ ID NO: 25083 - DNA, 15 bp, Homo sapiens
caaaatagctctaaa

SEQ ID NO: 25084 - DNA, 15 bp, Homo sapiens
acaaaatagctctaa

SEQ ID NO: 25085 - DNA, 15 bp, Homo sapiens
aacaaaatagctcta

SEQ ID NO: 25086 - DNA, 15 bp, Homo sapiens
gaacaaaatagctct

SEQ ID NO: 25087 - DNA, 15 bp, Homo sapiens
agaacaaaatagctc

SEQ ID NO: 25088 - DNA, 15 bp, Homo sapiens
gagaacaaaatagct

SEQ ID NO: 25089 - DNA, 15 bp, Homo sapiens
agagaacaaaatagc

SEQ ID NO: 25090 - DNA, 15 bp, Homo sapiens
aagagaacaaaatag

SEQ ID NO: 25091 - DNA, 15 bp, Homo sapiens
aaagagaacaaaata

SEQ ID NO: 25092 - DNA, 15 bp, Homo sapiens
taaagagaacaaaat

SEQ ID NO: 25093 - DNA, 15 bp, Homo sapiens
ttaaagagaacaaaa

SEQ ID NO: 25094 - DNA, 15 bp, Homo sapiens
attaaagagaacaaa

SEQ ID NO: 25095 - DNA, 15 bp, Homo sapiens
cattaaagagaacaa

SEQ ID NO: 25096 - DNA, 15 bp, Homo sapiens
acattaaagagaaca

SEQ ID NO: 25097 - DNA, 15 bp, Homo sapiens
aacattaaagagaac

SEQ ID NO: 25098 - DNA, 15 bp, Homo sapiens
taacattaaagagaa

SEQ ID NO: 25099 - DNA, 15 bp, Homo sapiens
ttaacattaaagaga

SEQ ID NO: 25100 - DNA, 15 bp, Homo sapiens
attaacattaaagag

SEQ ID NO: 25101 - DNA, 15 bp, Homo sapiens
tattaacattaaaga

SEQ ID NO: 25102 - DNA, 15 bp, Homo sapiens
ctattaacattaaag

SEQ ID NO: 25103 - DNA, 15 bp, Homo sapiens
tctattaacattaaa

SEQ ID NO: 25104 - DNA, 15 bp, Homo sapiens
ctctattaacattaa

SEQ ID NO: 25105 - DNA, 15 bp, Homo sapiens
tctctattaacatta

SEQ ID NO: 25106 - DNA, 15 bp, Homo sapiens
ttctctattaacatt

SEQ ID NO: 25107 - DNA, 15 bp, Homo sapiens
attctctattaacat

SEQ ID NO: 25108 - DNA, 15 bp, Homo sapiens
aattctctattaaca

SEQ ID NO: 25109 - DNA, 15 bp, Homo sapiens
aaattctctattaac

SEQ ID NO: 25110 - DNA, 15 bp, Homo sapiens
aaaattctctattaa

SEQ ID NO: 25111 - DNA, 15 bp, Homo sapiens
taaaattctctatta

SEQ ID NO: 25112 - DNA, 15 bp, Homo sapiens
ttaaaattctctatt

SEQ ID NO: 25113 - DNA, 15 bp, Homo sapiens
cttaaaattctctat

SEQ ID NO: 25114 - DNA, 15 bp, Homo sapiens
ccttaaaattctcta

SEQ ID NO: 25115 - DNA, 15 bp, Homo sapiens
gccttaaaattctct

SEQ ID NO: 25116 - DNA, 15 bp, Homo sapiens
tgccttaaaattctc

SEQ ID NO: 25117 - DNA, 15 bp, Homo sapiens
ttgccttaaaattct

SEQ ID NO: 25118 - DNA, 15 bp, Homo sapiens
attgccttaaaattc

SEQ ID NO: 25119 - DNA, 15 bp, Homo sapiens
aattgccttaaaatt

SEQ ID NO: 25120 - DNA, 15 bp, Homo sapiens
aaattgccttaaaat

SEQ ID NO: 25121 - DNA, 15 bp, Homo sapiens
gaaattgccttaaaa

SEQ ID NO: 25122 - DNA, 15 bp, Homo sapiens
tgaaattgccttaaa

SEQ ID NO: 25123 - DNA, 15 bp, Homo sapiens
ctgaaattgccttaa

SEQ ID NO: 25124 - DNA, 15 bp, Homo sapiens
cctgaaattgcctta

SEQ ID NO: 25125 - DNA, 15 bp, Homo sapiens
acctgaaattgcctt

SEQ ID NO: 25126 - DNA, 15 bp, Homo sapiens
cacctgaaattgcct

SEQ ID NO: 25127 - DNA, 15 bp, Homo sapiens
tcacctgaaattgcc

SEQ ID NO: 25128 - DNA, 15 bp, Homo sapiens
ttcacctgaaattgc

SEQ ID NO: 25129 - DNA, 15 bp, Homo sapiens
attcacctgaaattg

SEQ ID NO: 25130 - DNA, 15 bp, Homo sapiens
gattcacctgaaatt

SEQ ID NO: 25131 - DNA, 15 bp, Homo sapiens
agattcacctgaaat

SEQ ID NO: 25132 - DNA, 15 bp, Homo sapiens
tagattcacctgaaa

SEQ ID NO: 25133 - DNA, 15 bp, Homo sapiens
atagattcacctgaa

SEQ ID NO: 25134 - DNA, 15 bp, Homo sapiens
tatagattcacctga

SEQ ID NO: 25135 - DNA, 15 bp, Homo sapiens
gtatagattcacctg

SEQ ID NO: 25136 - DNA, 15 bp, Homo sapiens
tgtatagattcacct

SEQ ID NO: 25137 - DNA, 15 bp, Homo sapiens
ttgtatagattcacc

SEQ ID NO: 25138 - DNA, 15 bp, Homo sapiens
attgtatagattcac

SEQ ID NO: 25139 - DNA, 15 bp, Homo sapiens
aattgtatagattca

SEQ ID NO: 25140 - DNA, 15 bp, Homo sapiens
aaattgtatagattc

SEQ ID NO: 25141 - DNA, 15 bp, Homo sapiens
gaaattgtatagatt

SEQ ID NO: 25142 - DNA, 15 bp, Homo sapiens
agaaattgtatagat

SEQ ID NO: 25143 - DNA, 15 bp, Homo sapiens
gagaaattgtataga

SEQ ID NO: 25144 - DNA, 15 bp, Homo sapiens
agagaaattgtatag

SEQ ID NO: 25145 - DNA, 15 bp, Homo sapiens
cagagaaattgtata

SEQ ID NO: 25146 - DNA, 15 bp, Homo sapiens
acagagaaattgtat

SEQ ID NO: 25147 - DNA, 15 bp, Homo sapiens
tacagagaaattgta

SEQ ID NO: 25148 - DNA, 15 bp, Homo sapiens
atacagagaaattgt

SEQ ID NO: 25149 - DNA, 15 bp, Homo sapiens
tatacagagaaattg

SEQ ID NO: 25150 - DNA, 15 bp, Homo sapiens
ttatacagagaaatt

SEQ ID NO: 25151 - DNA, 15 bp, Homo sapiens
cttatacagagaaat

SEQ ID NO: 25152 - DNA, 15 bp, Homo sapiens
acttatacagagaaa

SEQ ID NO: 25153 - DNA, 15 bp, Homo sapiens
tacttatacagagaa

SEQ ID NO: 25154 - DNA, 15 bp, Homo sapiens
ttacttatacagaga

SEQ ID NO: 25155 - DNA, 15 bp, Homo sapiens
attacttatacagag

SEQ ID NO: 25156 - DNA, 15 bp, Homo sapiens
aattacttatacaga

SEQ ID NO: 25157 - DNA, 15 bp, Homo sapiens
aaattacttatacag

SEQ ID NO: 25158 - DNA, 15 bp, Homo sapiens
taaattacttataca

SEQ ID NO: 25159 - DNA, 15 bp, Homo sapiens
gtaaattacttatac

SEQ ID NO: 25160 - DNA, 15 bp, Homo sapiens
tgtaaattacttata

SEQ ID NO: 25161 - DNA, 15 bp, Homo sapiens
gtgtaaattacttat

SEQ ID NO: 25162 - DNA, 15 bp, Homo sapiens
agtgtaaattactta

SEQ ID NO: 25163 - DNA, 15 bp, Homo sapiens
tagtgtaaattactt

SEQ ID NO: 25164 - DNA, 15 bp, Homo sapiens
ctagtgtaaattact

SEQ ID NO: 25165 - DNA, 15 bp, Homo sapiens
tctagtgtaaattac

SEQ ID NO: 25166 - DNA, 15 bp, Homo sapiens
ttctagtgtaaatta

SEQ ID NO: 25167 - DNA, 15 bp, Homo sapiens
tttctagtgtaaatt

SEQ ID NO: 25168 - DNA, 15 bp, Homo sapiens
atttctagtgtaaat

SEQ ID NO: 25169 - DNA, 15 bp, Homo sapiens
tatttctagtgtaaa

SEQ ID NO: 25170 - DNA, 15 bp, Homo sapiens
ctatttctagtgtaa

SEQ ID NO: 25171 - DNA, 15 bp, Homo sapiens
tctatttctagtgta

SEQ ID NO: 25172 - DNA, 15 bp, Homo sapiens
atctatttctagtgt

SEQ ID NO: 25173 - DNA, 15 bp, Homo sapiens
aatctatttctagtg

SEQ ID NO: 25174 - DNA, 15 bp, Homo sapiens
aaatctatttctagt

SEQ ID NO: 25175 - DNA, 15 bp, Homo sapiens
aaaatctatttctag

SEQ ID NO: 25176 - DNA, 15 bp, Homo sapiens
aaaaatctatttcta

SEQ ID NO: 25177 - DNA, 15 bp, Homo sapiens
taaaaatctatttct

SEQ ID NO: 25178 - DNA, 15 bp, Homo sapiens
ataaaaatctatttc

SEQ ID NO: 25179 - DNA, 15 bp, Homo sapiens
tataaaaatctattt

SEQ ID NO: 25180 - DNA, 15 bp, Homo sapiens
ttataaaaatctatt

SEQ ID NO: 25181 - DNA, 15 bp, Homo sapiens
tttataaaaatctat

SEQ ID NO: 25182 - DNA, 15 bp, Homo sapiens
ctttataaaaatcta

SEQ ID NO: 25183 - DNA, 15 bp, Homo sapiens
tctttataaaaatct

SEQ ID NO: 25184 - DNA, 15 bp, Homo sapiens
atctttataaaaatc

SEQ ID NO: 25185 - DNA, 15 bp, Homo sapiens
catctttataaaaat

SEQ ID NO: 25186 - DNA, 15 bp, Homo sapiens
tcatctttataaaaa

SEQ ID NO: 25187 - DNA, 15 bp, Homo sapiens
atcatctttataaaa

SEQ ID NO: 25188 - DNA, 15 bp, Homo sapiens
aatcatctttataaa

SEQ ID NO: 25189 - DNA, 15 bp, Homo sapiens
taatcatctttataa

SEQ ID NO: 25190 - DNA, 15 bp, Homo sapiens
ttaatcatctttata

SEQ ID NO: 25191 - DNA, 15 bp, Homo sapiens
cttaatcatctttat

SEQ ID NO: 25192 - DNA, 15 bp, Homo sapiens
gcttaatcatcttta

SEQ ID NO: 25193 - DNA, 15 bp, Homo sapiens
agcttaatcatcttt

SEQ ID NO: 25194 - DNA, 15 bp, Homo sapiens
tagcttaatcatctt

SEQ ID NO: 25195 - DNA, 15 bp, Homo sapiens
gtagcttaatcatct

SEQ ID NO: 25196 - DNA, 15 bp, Homo sapiens
ggtagcttaatcatc

SEQ ID NO: 25197 - DNA, 15 bp, Homo sapiens
tggtagcttaatcat

SEQ ID NO: 25198 - DNA, 15 bp, Homo sapiens
ctggtagcttaatca

SEQ ID NO: 25199 - DNA, 15 bp, Homo sapiens
gctggtagcttaatc

SEQ ID NO: 25200 - DNA, 15 bp, Homo sapiens
ggctggtagcttaat

SEQ ID NO: 25201 - DNA, 15 bp, Homo sapiens
aggctggtagcttaa

SEQ ID NO: 25202 - DNA, 15 bp, Homo sapiens
caggctggtagctta

SEQ ID NO: 25203 - DNA, 15 bp, Homo sapiens
ccaggctggtagctt

SEQ ID NO: 25204 - DNA, 15 bp, Homo sapiens
accaggctggtagct

SEQ ID NO: 25205 - DNA, 15 bp, Homo sapiens
taccaggctggtagc

SEQ ID NO: 25206 - DNA, 15 bp, Homo sapiens
ataccaggctggtag

SEQ ID NO: 25207 - DNA, 15 bp, Homo sapiens
aataccaggctggta

SEQ ID NO: 25208 - DNA, 15 bp, Homo sapiens
aaataccaggctggt

SEQ ID NO: 25209 - DNA, 15 bp, Homo sapiens
gaaataccaggctgg

SEQ ID NO: 25210 - DNA, 15 bp, Homo sapiens
tgaaataccaggctg

SEQ ID NO: 25211 - DNA, 15 bp, Homo sapiens
atgaaataccaggct

SEQ ID NO: 25212 - DNA, 15 bp, Homo sapiens
aatgaaataccaggc

SEQ ID NO: 25213 - DNA, 15 bp, Homo sapiens
caatgaaataccagg

SEQ ID NO: 25214 - DNA, 15 bp, Homo sapiens
gcaatgaaataccag

SEQ ID NO: 25215 - DNA, 15 bp, Homo sapiens
agcaatgaaatacca

SEQ ID NO: 25216 - DNA, 15 bp, Homo sapiens
cagcaatgaaatacc

SEQ ID NO: 25217 - DNA, 15 bp, Homo sapiens
tcagcaatgaaatac

SEQ ID NO: 25218 - DNA, 15 bp, Homo sapiens
gtcagcaatgaaata

SEQ ID NO: 25219 - DNA, 15 bp, Homo sapiens
agtcagcaatgaaat

SEQ ID NO: 25220 - DNA, 15 bp, Homo sapiens
aagtcagcaatgaaa

SEQ ID NO: 25221 - DNA, 15 bp, Homo sapiens
taagtcagcaatgaa

SEQ ID NO: 25222 - DNA, 15 bp, Homo sapiens
ttaagtcagcaatga

SEQ ID NO: 25223 - DNA, 15 bp, Homo sapiens
tttaagtcagcaatg

SEQ ID NO: 25224 - DNA, 15 bp, Homo sapiens
atttaagtcagcaat

SEQ ID NO: 25225 - DNA, 15 bp, Homo sapiens
catttaagtcagcaa

SEQ ID NO: 25226 - DNA, 15 bp, Homo sapiens
tcatttaagtcagca

SEQ ID NO: 25227 - DNA, 15 bp, Homo sapiens
ttcatttaagtcagc

SEQ ID NO: 25228 - DNA, 15 bp, Homo sapiens
cttcatttaagtcag

SEQ ID NO: 25229 - DNA, 15 bp, Homo sapiens
tcttcatttaagtca

SEQ ID NO: 25230 - DNA, 15 bp, Homo sapiens
ctcttcatttaagtc

SEQ ID NO: 25231 - DNA, 15 bp, Homo sapiens
cctcttcatttaagt

SEQ ID NO: 25232 - DNA, 15 bp, Homo sapiens
tcctcttcatttaag

SEQ ID NO: 25233 - DNA, 15 bp, Homo sapiens
ttcctcttcatttaa

SEQ ID NO: 25234 - DNA, 15 bp, Homo sapiens
tttcctcttcattta

SEQ ID NO: 25235 - DNA, 15 bp, Homo sapiens
ttttcctcttcattt

SEQ ID NO: 25236 - DNA, 15 bp, Homo sapiens
attttcctcttcatt

SEQ ID NO: 25237 - DNA, 15 bp, Homo sapiens
gattttcctcttcat

SEQ ID NO: 25238 - DNA, 15 bp, Homo sapiens
tgattttcctcttca

SEQ ID NO: 25239 - DNA, 15 bp, Homo sapiens
ttgattttcctcttc

SEQ ID NO: 25240 - DNA, 15 bp, Homo sapiens
attgattttcctctt

SEQ ID NO: 25241 - DNA, 15 bp, Homo sapiens
cattgattttcctct

SEQ ID NO: 25242 - DNA, 15 bp, Homo sapiens
gcattgattttcctc

SEQ ID NO: 25243 - DNA, 15 bp, Homo sapiens
agcattgattttcct

SEQ ID NO: 25244 - DNA, 15 bp, Homo sapiens
cagcattgattttcc

SEQ ID NO: 25245 - DNA, 15 bp, Homo sapiens
acagcattgattttc

SEQ ID NO: 25246 - DNA, 15 bp, Homo sapiens
tacagcattgatttt

SEQ ID NO: 25247 - DNA, 15 bp, Homo sapiens
ttacagcattgattt

SEQ ID NO: 25248 - DNA, 15 bp, Homo sapiens
cttacagcattgatt

SEQ ID NO: 25249 - DNA, 15 bp, Homo sapiens
ccttacagcattgat

SEQ ID NO: 25250 - DNA, 15 bp, Homo sapiens
cccttacagcattga

SEQ ID NO: 25251 - DNA, 15 bp, Homo sapiens
tcccttacagcattg

SEQ ID NO: 25252 - DNA, 15 bp, Homo sapiens
ttcccttacagcatt

SEQ ID NO: 25253 - DNA, 15 bp, Homo sapiens
tttcccttacagcat

SEQ ID NO: 25254 - DNA, 15 bp, Homo sapiens
ttttcccttacagca

SEQ ID NO: 25255 - DNA, 15 bp, Homo sapiens
tttttcccttacagc

SEQ ID NO: 25256 - DNA, 15 bp, Homo sapiens
ttttttcccttacag

SEQ ID NO: 25257 - DNA, 15 bp, Homo sapiens
tttttttcccttaca

SEQ ID NO: 25258 - DNA, 15 bp, Homo sapiens
ttttttttcccttac

SEQ ID NO: 25259 - DNA, 15 bp, Homo sapiens
tttttttttccctta

SEQ ID NO: 25260 - DNA, 15 bp, Homo sapiens
ttttttttttccctt

SEQ ID NO: 25261 - DNA, 15 bp, Homo sapiens
attttttttttccct

SEQ ID NO: 25262 - DNA, 15 bp, Homo sapiens
cattttttttttccc

SEQ ID NO: 25263 - DNA, 15 bp, Homo sapiens
ccattttttttttcc

SEQ ID NO: 25264 - DNA, 15 bp, Homo sapiens
gccattttttttttc

SEQ ID NO: 25265 - DNA, 15 bp, Homo sapiens
tgccatttttttttt

SEQ ID NO: 25266 - DNA, 15 bp, Homo sapiens
atgccattttttttt

SEQ ID NO: 25267 - DNA, 15 bp, Homo sapiens
aatgccatttttttt

SEQ ID NO: 25268 - DNA, 15 bp, Homo sapiens
taatgccattttttt

SEQ ID NO: 25269 - DNA, 15 bp, Homo sapiens
ctaatgccatttttt

SEQ ID NO: 25270 - DNA, 15 bp, Homo sapiens
tctaatgccattttt

SEQ ID NO: 25271 - DNA, 15 bp, Homo sapiens
ctctaatgccatttt

SEQ ID NO: 25272 - DNA, 15 bp, Homo sapiens
tctctaatgccattt

SEQ ID NO: 25273 - DNA, 15 bp, Homo sapiens
atctctaatgccatt

SEQ ID NO: 25274 - DNA, 15 bp, Homo sapiens
gatctctaatgccat

SEQ ID NO: 25275 - DNA, 15 bp, Homo sapiens
ggatctctaatgcca

SEQ ID NO: 25276 - DNA, 15 bp, Homo sapiens
tggatctctaatgcc

SEQ ID NO: 25277 - DNA, 15 bp, Homo sapiens
ctggatctctaatgc

SEQ ID NO: 25278 - DNA, 15 bp, Homo sapiens
tctggatctctaatg

SEQ ID NO: 25279 - DNA, 15 bp, Homo sapiens
gtctggatctctaat

SEQ ID NO: 25280 - DNA, 15 bp, Homo sapiens
ggtctggatctctaa

SEQ ID NO: 25281 - DNA, 15 bp, Homo sapiens
aggtctggatctcta

SEQ ID NO: 25282 - DNA, 15 bp, Homo sapiens
aaggtctggatctct

SEQ ID NO: 25283 - DNA, 15 bp, Homo sapiens
taaggtctggatctc

SEQ ID NO: 25284 - DNA, 15 bp, Homo sapiens
ataaggtctggatct

SEQ ID NO: 25285 - DNA, 15 bp, Homo sapiens
tataaggtctggatc

SEQ ID NO: 25286 - DNA, 15 bp, Homo sapiens
ctataaggtctggat

SEQ ID NO: 25287 - DNA, 15 bp, Homo sapiens
cctataaggtctgga

SEQ ID NO: 25288 - DNA, 15 bp, Homo sapiens
gcctataaggtctgg

SEQ ID NO: 25289 - DNA, 15 bp, Homo sapiens
tgcctataaggtctg

SEQ ID NO: 25290 - DNA, 15 bp, Homo sapiens
atgcctataaggtct

SEQ ID NO: 25291 - DNA, 15 bp, Homo sapiens
aatgcctataaggtc

SEQ ID NO: 25292 - DNA, 15 bp, Homo sapiens
aaatgcctataaggt

SEQ ID NO: 25293 - DNA, 15 bp, Homo sapiens
aaaatgcctataagg

SEQ ID NO: 25294 - DNA, 15 bp, Homo sapiens
gaaaatgcctataag

SEQ ID NO: 25295 - DNA, 15 bp, Homo sapiens
ggaaaatgcctataa

SEQ ID NO: 25296 - DNA, 15 bp, Homo sapiens
tggaaaatgcctata

SEQ ID NO: 25297 - DNA, 15 bp, Homo sapiens
ttggaaaatgcctat

SEQ ID NO: 25298 - DNA, 15 bp, Homo sapiens
tttggaaaatgccta

SEQ ID NO: 25299 - DNA, 15 bp, Homo sapiens
atttggaaaatgcct

SEQ ID NO: 25300 - DNA, 15 bp, Homo sapiens
aatttggaaaatgcc

SEQ ID NO: 25301 - DNA, 15 bp, Homo sapiens
taatttggaaaatgc

SEQ ID NO: 25302 - DNA, 15 bp, Homo sapiens
ataatttggaaaatg

SEQ ID NO: 25303 - DNA, 15 bp, Homo sapiens
aataatttggaaaat

SEQ ID NO: 25304 - DNA, 15 bp, Homo sapiens
taataatttggaaaa

SEQ ID NO: 25305 - DNA, 15 bp, Homo sapiens
ttaataatttggaaa

SEQ ID NO: 25306 - DNA, 15 bp, Homo sapiens
attaataatttggaa

SEQ ID NO: 25307 - DNA, 15 bp, Homo sapiens
aattaataatttgga

SEQ ID NO: 25308 - DNA, 15 bp, Homo sapiens
gaattaataatttgg

SEQ ID NO: 25309 - DNA, 15 bp, Homo sapiens
tgaattaataatttg

SEQ ID NO: 25310 - DNA, 15 bp, Homo sapiens
ttgaattaataattt

SEQ ID NO: 25311 - DNA, 15 bp, Homo sapiens
attgaattaataatt

SEQ ID NO: 25312 - DNA, 15 bp, Homo sapiens
gattgaattaataat

SEQ ID NO: 25313 - DNA, 15 bp, Homo sapiens
agattgaattaataa

SEQ ID NO: 25314 - DNA, 15 bp, Homo sapiens
gagattgaattaata

SEQ ID NO: 25315 - DNA, 15 bp, Homo sapiens
agagattgaattaat

SEQ ID NO: 25316 - DNA, 15 bp, Homo sapiens
gagagattgaattaa

SEQ ID NO: 25317 - DNA, 15 bp, Homo sapiens
tgagagattgaatta

SEQ ID NO: 25318 - DNA, 15 bp, Homo sapiens
ttgagagattgaatt

SEQ ID NO: 25319 - DNA, 15 bp, Homo sapiens
tttgagagattgaat

SEQ ID NO: 25320 - DNA, 15 bp, Homo sapiens
ttttgagagattgaa

SEQ ID NO: 25321 - DNA, 15 bp, Homo sapiens
gttttgagagattga

SEQ ID NO: 25322 - DNA, 15 bp, Homo sapiens
tgttttgagagattg

SEQ ID NO: 25323 - DNA, 15 bp, Homo sapiens
ctgttttgagagatt

SEQ ID NO: 25324 - DNA, 15 bp, Homo sapiens
cctgttttgagagat

SEQ ID NO: 25325 - DNA, 15 bp, Homo sapiens
acctgttttgagaga

SEQ ID NO: 25326 - DNA, 15 bp, Homo sapiens
cacctgttttgagag

SEQ ID NO: 25327 - DNA, 15 bp, Homo sapiens
ccacctgttttgaga

SEQ ID NO: 25328 - DNA, 15 bp, Homo sapiens
gccacctgttttgag

SEQ ID NO: 25329 - DNA, 15 bp, Homo sapiens
cgccacctgttttga

SEQ ID NO: 25330 - DNA, 15 bp, Homo sapiens
gcgccacctgttttg

SEQ ID NO: 25331 - DNA, 15 bp, Homo sapiens
agcgccacctgtttt

SEQ ID NO: 25332 - DNA, 15 bp, Homo sapiens
gagcgccacctgttt

SEQ ID NO: 25333 - DNA, 15 bp, Homo sapiens
tgagcgccacctgtt

SEQ ID NO: 25334 - DNA, 15 bp, Homo sapiens
ctgagcgccacctgt

SEQ ID NO: 25335 - DNA, 15 bp, Homo sapiens
gctgagcgccacctg

SEQ ID NO: 25336 - DNA, 15 bp, Homo sapiens
tgctgagcgccacct

SEQ ID NO: 25337 - DNA, 15 bp, Homo sapiens
ctgctgagcgccacc

SEQ ID NO: 25338 - DNA, 15 bp, Homo sapiens
tctgctgagcgccac

SEQ ID NO: 25339 - DNA, 15 bp, Homo sapiens
ttctgctgagcgcca

SEQ ID NO: 25340 - DNA, 15 bp, Homo sapiens
tttctgctgagcgcc

SEQ ID NO: 25341 - DNA, 15 bp, Homo sapiens
ttttctgctgagcgc

SEQ ID NO: 25342 - DNA, 15 bp, Homo sapiens
cttttctgctgagcg

SEQ ID NO: 25343 - DNA, 15 bp, Homo sapiens
tcttttctgctgagc

SEQ ID NO: 25344 - DNA, 15 bp, Homo sapiens
ctcttttctgctgag

SEQ ID NO: 25345 - DNA, 15 bp, Homo sapiens
tctcttttctgctga

SEQ ID NO: 25346 - DNA, 15 bp, Homo sapiens
ttctcttttctgctg

SEQ ID NO: 25347 - DNA, 15 bp, Homo sapiens
tttctcttttctgct

SEQ ID NO: 25348 - DNA, 15 bp, Homo sapiens
ttttctcttttctgc

SEQ ID NO: 25349 - DNA, 15 bp, Homo sapiens
gttttctcttttctg

SEQ ID NO: 25350 - DNA, 15 bp, Homo sapiens
cgttttctcttttct

SEQ ID NO: 25351 - DNA, 15 bp, Homo sapiens
acgttttctcttttc

SEQ ID NO: 25352 - DNA, 15 bp, Homo sapiens
gacgttttctctttt

SEQ ID NO: 25353 - DNA, 15 bp, Homo sapiens
tgacgttttctcttt

SEQ ID NO: 25354 - DNA, 15 bp, Homo sapiens
ttgacgttttctctt

SEQ ID NO: 25355 - DNA, 15 bp, Homo sapiens
gttgacgttttctct

SEQ ID NO: 25356 - DNA, 15 bp, Homo sapiens
ggttgacgttttctc

SEQ ID NO: 25357 - DNA, 15 bp, Homo sapiens
gggttgacgttttct

SEQ ID NO: 25358 - DNA, 15 bp, Homo sapiens
ggggttgacgttttc

SEQ ID NO: 25359 - DNA, 15 bp, Homo sapiens
gggggttgacgtttt

SEQ ID NO: 25360 - DNA, 15 bp, Homo sapiens
cgggggttgacgttt

SEQ ID NO: 25361 - DNA, 15 bp, Homo sapiens
tcgggggttgacgtt

SEQ ID NO: 25362 - DNA, 15 bp, Homo sapiens
gtcgggggttgacgt

SEQ ID NO: 25363 - DNA, 15 bp, Homo sapiens
tgtcgggggttgacg

SEQ ID NO: 25364 - DNA, 15 bp, Homo sapiens
gtgtcgggggttgac

SEQ ID NO: 25365 - DNA, 15 bp, Homo sapiens
ggtgtcgggggttga

SEQ ID NO: 25366 - DNA, 15 bp, Homo sapiens
gggtgtcgggggttg

SEQ ID NO: 25367 - DNA, 15 bp, Homo sapiens
ggggtgtcgggggtt

SEQ ID NO: 25368 - DNA, 15 bp, Homo sapiens
aggggtgtcgggggt

SEQ ID NO: 25369 - DNA, 15 bp, Homo sapiens
caggggtgtcggggg

SEQ ID NO: 25370 - DNA, 15 bp, Homo sapiens
gcaggggtgtcgggg

SEQ ID NO: 25371 - DNA, 15 bp, Homo sapiens
agcaggggtgtcggg

SEQ ID NO: 25372 - DNA, 15 bp, Homo sapiens
aagcaggggtgtcgg

SEQ ID NO: 25373 - DNA, 15 bp, Homo sapiens
caagcaggggtgtcg

SEQ ID NO: 25374 - DNA, 15 bp, Homo sapiens
ccaagcaggggtgtc

SEQ ID NO: 25375 - DNA, 15 bp, Homo sapiens
cccaagcaggggtgt

SEQ ID NO: 25376 - DNA, 15 bp, Homo sapiens
acccaagcaggggtg

SEQ ID NO: 25377 - DNA, 15 bp, Homo sapiens
gacccaagcaggggt

SEQ ID NO: 25378 - DNA, 15 bp, Homo sapiens
ggacccaagcagggg

SEQ ID NO: 25379 - DNA, 15 bp, Homo sapiens
gggacccaagcaggg

SEQ ID NO: 25380 - DNA, 15 bp, Homo sapiens
tgggacccaagcagg

SEQ ID NO: 25381 - DNA, 15 bp, Homo sapiens
ctgggacccaagcag

SEQ ID NO: 25382 - DNA, 15 bp, Homo sapiens
tctgggacccaagca

SEQ ID NO: 25383 - DNA, 15 bp, Homo sapiens
ctctgggacccaagc

SEQ ID NO: 25384 - DNA, 15 bp, Homo sapiens
tctctgggacccaag

SEQ ID NO: 25385 - DNA, 15 bp, Homo sapiens
ctctctgggacccaa

SEQ ID NO: 25386 - DNA, 15 bp, Homo sapiens
tctctctgggaccca

SEQ ID NO: 25387 - DNA, 15 bp, Homo sapiens
ttctctctgggaccc

SEQ ID NO: 25388 - DNA, 15 bp, Homo sapiens
cttctctctgggacc

SEQ ID NO: 25389 - DNA, 15 bp, Homo sapiens
ccttctctctgggac

SEQ ID NO: 25390 - DNA, 15 bp, Homo sapiens
gccttctctctggga

SEQ ID NO: 25391 - DNA, 15 bp, Homo sapiens
agccttctctctggg

SEQ ID NO: 25392 - DNA, 15 bp, Homo sapiens
cagccttctctctgg

SEQ ID NO: 25393 - DNA, 15 bp, Homo sapiens
ccagccttctctctg

SEQ ID NO: 25394 - DNA, 15 bp, Homo sapiens
tccagccttctctct

SEQ ID NO: 25395 - DNA, 15 bp, Homo sapiens
gtccagccttctctc

SEQ ID NO: 25396 - DNA, 15 bp, Homo sapiens
tgtccagccttctct

SEQ ID NO: 25397 - DNA, 15 bp, Homo sapiens
ctgtccagccttctc

SEQ ID NO: 25398 - DNA, 15 bp, Homo sapiens
tctgtccagccttct

SEQ ID NO: 25399 - DNA, 15 bp, Homo sapiens
gtctgtccagccttc

SEQ ID NO: 25400 - DNA, 15 bp, Homo sapiens
tgtctgtccagcctt

SEQ ID NO: 25401 - DNA, 15 bp, Homo sapiens
gtgtctgtccagcct

SEQ ID NO: 25402 - DNA, 15 bp, Homo sapiens
ggtgtctgtccagcc

SEQ ID NO: 25403 - DNA, 15 bp, Homo sapiens
gggtgtctgtccagc

SEQ ID NO: 25404 - DNA, 15 bp, Homo sapiens
ggggtgtctgtccag

SEQ ID NO: 25405 - DNA, 15 bp, Homo sapiens
tggggtgtctgtcca

SEQ ID NO: 25406 - DNA, 15 bp, Homo sapiens
ctggggtgtctgtcc

SEQ ID NO: 25407 - DNA, 15 bp, Homo sapiens
cctggggtgtctgtc

SEQ ID NO: 25408 - DNA, 15 bp, Homo sapiens
tcctggggtgtctgt

SEQ ID NO: 25409 - DNA, 15 bp, Homo sapiens
gtcctggggtgtctg

SEQ ID NO: 25410 - DNA, 15 bp, Homo sapiens
agtcctggggtgtct

SEQ ID NO: 25411 - DNA, 15 bp, Homo sapiens
gagtcctggggtgtc

SEQ ID NO: 25412 - DNA, 15 bp, Homo sapiens
ggagtcctggggtgt

SEQ ID NO: 25413 - DNA, 15 bp, Homo sapiens
tggagtcctggggtg

SEQ ID NO: 25414 - DNA, 15 bp, Homo sapiens
ttggagtcctggggt

SEQ ID NO: 25415 - DNA, 15 bp, Homo sapiens
attggagtcctgggg

SEQ ID NO: 25416 - DNA, 15 bp, Homo sapiens
cattggagtcctggg

SEQ ID NO: 25417 - DNA, 15 bp, Homo sapiens
acattggagtcctgg

SEQ ID NO: 25418 - DNA, 15 bp, Homo sapiens
gacattggagtcctg

SEQ ID NO: 25419 - DNA, 15 bp, Homo sapiens
agacattggagtcct

SEQ ID NO: 25420 - DNA, 15 bp, Homo sapiens
cagacattggagtcc

SEQ ID NO: 25421 - DNA, 15 bp, Homo sapiens
gcagacattggagtc

SEQ ID NO: 25422 - DNA, 15 bp, Homo sapiens
agcagacattggagt

SEQ ID NO: 25423 - DNA, 15 bp, Homo sapiens
gagcagacattggag

SEQ ID NO: 25424 - DNA, 15 bp, Homo sapiens
ggagcagacattgga

SEQ ID NO: 25425 - DNA, 15 bp, Homo sapiens
gggagcagacattgg

SEQ ID NO: 25426 - DNA, 15 bp, Homo sapiens
ggggagcagacattg

SEQ ID NO: 25427 - DNA, 15 bp, Homo sapiens
tggggagcagacatt

SEQ ID NO: 25428 - DNA, 15 bp, Homo sapiens
ctggggagcagacat

SEQ ID NO: 25429 - DNA, 15 bp, Homo sapiens
cctggggagcagaca

SEQ ID NO: 25430 - DNA, 15 bp, Homo sapiens
ccctggggagcagac

SEQ ID NO: 25431 - DNA, 15 bp, Homo sapiens
cccctggggagcaga

SEQ ID NO: 25432 - DNA, 15 bp, Homo sapiens
gcccctggggagcag

SEQ ID NO: 25433 - DNA, 15 bp, Homo sapiens
cgcccctggggagca

SEQ ID NO: 25434 - DNA, 15 bp, Homo sapiens
gcgcccctggggagc

SEQ ID NO: 25435 - DNA, 15 bp, Homo sapiens
ggcgcccctggggag

SEQ ID NO: 25436 - DNA, 15 bp, Homo sapiens
cggcgcccctgggga

SEQ ID NO: 25437 - DNA, 15 bp, Homo sapiens
ccggcgcccctgggg

SEQ ID NO: 25438 - DNA, 15 bp, Homo sapiens
gccggcgcccctggg

SEQ ID NO: 25439 - DNA, 15 bp, Homo sapiens
agccggcgcccctgg

SEQ ID NO: 25440 - DNA, 15 bp, Homo sapiens
cagccggcgcccctg

SEQ ID NO: 25441 - DNA, 15 bp, Homo sapiens
gcagccggcgcccct

SEQ ID NO: 25442 - DNA, 15 bp, Homo sapiens
agcagccggcgcccc

SEQ ID NO: 25443 - DNA, 15 bp, Homo sapiens
gagcagccggcgccc

SEQ ID NO: 25444 - DNA, 15 bp, Homo sapiens
tgagcagccggcgcc

SEQ ID NO: 25445 - DNA, 15 bp, Homo sapiens
gtgagcagccggcgc

SEQ ID NO: 25446 - DNA, 15 bp, Homo sapiens
ggtgagcagccggcg

SEQ ID NO: 25447 - DNA, 15 bp, Homo sapiens
gggtgagcagccggc

SEQ ID NO: 25448 - DNA, 15 bp, Homo sapiens
tgggtgagcagccgg

SEQ ID NO: 25449 - DNA, 15 bp, Homo sapiens
ctgggtgagcagccg

SEQ ID NO: 25450 - DNA, 15 bp, Homo sapiens
tctgggtgagcagcc

SEQ ID NO: 25451 - DNA, 15 bp, Homo sapiens
ctctgggtgagcagc

SEQ ID NO: 25452 - DNA, 15 bp, Homo sapiens
cctctgggtgagcag

SEQ ID NO: 25453 - DNA, 15 bp, Homo sapiens
ccctctgggtgagca

SEQ ID NO: 25454 - DNA, 15 bp, Homo sapiens
gccctctgggtgagc

SEQ ID NO: 25455 - DNA, 15 bp, Homo sapiens
ggccctctgggtgag

SEQ ID NO: 25456 - DNA, 15 bp, Homo sapiens
tggccctctgggtga

SEQ ID NO: 25457 - DNA, 15 bp, Homo sapiens
ctggccctctgggtg

SEQ ID NO: 25458 - DNA, 15 bp, Homo sapiens
gctggccctctgggt

SEQ ID NO: 25459 - DNA, 15 bp, Homo sapiens
ggctggccctctggg

SEQ ID NO: 25460 - DNA, 15 bp, Homo sapiens
aggctggccctctgg

SEQ ID NO: 25461 - DNA, 15 bp, Homo sapiens
gaggctggccctctg

SEQ ID NO: 25462 - DNA, 15 bp, Homo sapiens
ggaggctggccctct

SEQ ID NO: 25463 - DNA, 15 bp, Homo sapiens
gggaggctggccctc

SEQ ID NO: 25464 - DNA, 15 bp, Homo sapiens
ggggaggctggccct

SEQ ID NO: 25465 - DNA, 15 bp, Homo sapiens
gggggaggctggccc

SEQ ID NO: 25466 - DNA, 15 bp, Homo sapiens
tgggggaggctggcc

SEQ ID NO: 25467 - DNA, 15 bp, Homo sapiens
ctgggggaggctggc

SEQ ID NO: 25468 - DNA, 15 bp, Homo sapiens
tctgggggaggctgg

SEQ ID NO: 25469 - DNA, 15 bp, Homo sapiens
ctctgggggaggctg

SEQ ID NO: 25470 - DNA, 15 bp, Homo sapiens
gctctgggggaggct

SEQ ID NO: 25471 - DNA, 15 bp, Homo sapiens
ggctctgggggaggc

SEQ ID NO: 25472 - DNA, 15 bp, Homo sapiens
tggctctgggggagg

SEQ ID NO: 25473 - DNA, 15 bp, Homo sapiens
ctggctctgggggag

SEQ ID NO: 25474 - DNA, 15 bp, Homo sapiens
tctggctctggggga

SEQ ID NO: 25475 - DNA, 15 bp, Homo sapiens
ctctggctctggggg

SEQ ID NO: 25476 - DNA, 15 bp, Homo sapiens
actctggctctgggg

SEQ ID NO: 25477 - DNA, 15 bp, Homo sapiens
cactctggctctggg

SEQ ID NO: 25478 - DNA, 15 bp, Homo sapiens
gcactctggctctgg

SEQ ID NO: 25479 - DNA, 15 bp, Homo sapiens
ggcactctggctctg

SEQ ID NO: 25480 - DNA, 15 bp, Homo sapiens
gggcactctggctct

SEQ ID NO: 25481 - DNA, 15 bp, Homo sapiens
tgggcactctggctc

SEQ ID NO: 25482 - DNA, 15 bp, Homo sapiens
ctgggcactctggct

SEQ ID NO: 25483 - DNA, 15 bp, Homo sapiens
cctgggcactctggc

SEQ ID NO: 25484 - DNA, 15 bp, Homo sapiens
gcctgggcactctgg

SEQ ID NO: 25485 - DNA, 15 bp, Homo sapiens
ggcctgggcactctg

SEQ ID NO: 25486 - DNA, 15 bp, Homo sapiens
gggcctgggcactct

SEQ ID NO: 25487 - DNA, 15 bp, Homo sapiens
cgggcctgggcactc

SEQ ID NO: 25488 - DNA, 15 bp, Homo sapiens
gcgggcctgggcact

SEQ ID NO: 25489 - DNA, 15 bp, Homo sapiens
tgcgggcctgggcac

SEQ ID NO: 25490 - DNA, 15 bp, Homo sapiens
ctgcgggcctgggca

SEQ ID NO: 25491 - DNA, 15 bp, Homo sapiens
gctgcgggcctgggc

SEQ ID NO: 25492 - DNA, 15 bp, Homo sapiens
agctgcgggcctggg

SEQ ID NO: 25493 - DNA, 15 bp, Homo sapiens
gagctgcgggcctgg

SEQ ID NO: 25494 - DNA, 15 bp, Homo sapiens
tgagctgcgggcctg

SEQ ID NO: 25495 - DNA, 15 bp, Homo sapiens
ttgagctgcgggcct

SEQ ID NO: 25496 - DNA, 15 bp, Homo sapiens
gttgagctgcgggcc

SEQ ID NO: 25497 - DNA, 15 bp, Homo sapiens
tgttgagctgcgggc

SEQ ID NO: 25498 - DNA, 15 bp, Homo sapiens
gtgttgagctgcggg

SEQ ID NO: 25499 - DNA, 15 bp, Homo sapiens
cgtgttgagctgcgg

SEQ ID NO: 25500 - DNA, 15 bp, Homo sapiens
ccgtgttgagctgcg

SEQ ID NO: 25501 - DNA, 15 bp, Homo sapiens
cccgtgttgagctgc

SEQ ID NO: 25502 - DNA, 15 bp, Homo sapiens
ccccgtgttgagctg

SEQ ID NO: 25503 - DNA, 15 bp, Homo sapiens
tccccgtgttgagct

SEQ ID NO: 25504 - DNA, 15 bp, Homo sapiens
gtccccgtgttgagc

SEQ ID NO: 25505 - DNA, 15 bp, Homo sapiens
tgtccccgtgttgag

SEQ ID NO: 25506 - DNA, 15 bp, Homo sapiens
gtgtccccgtgttga

SEQ ID NO: 25507 - DNA, 15 bp, Homo sapiens
tgtgtccccgtgttg

SEQ ID NO: 25508 - DNA, 15 bp, Homo sapiens
ctgtgtccccgtgtt

SEQ ID NO: 25509 - DNA, 15 bp, Homo sapiens
gctgtgtccccgtgt

SEQ ID NO: 25510 - DNA, 15 bp, Homo sapiens
agctgtgtccccgtg

SEQ ID NO: 25511 - DNA, 15 bp, Homo sapiens
cagctgtgtccccgt

SEQ ID NO: 25512 - DNA, 15 bp, Homo sapiens
ccagctgtgtccccg

SEQ ID NO: 25513 - DNA, 15 bp, Homo sapiens
accagctgtgtcccc

SEQ ID NO: 25514 - DNA, 15 bp, Homo sapiens
gaccagctgtgtccc

SEQ ID NO: 25515 - DNA, 15 bp, Homo sapiens
ggaccagctgtgtcc

SEQ ID NO: 25516 - DNA, 15 bp, Homo sapiens
aggaccagctgtgtc

SEQ ID NO: 25517 - DNA, 15 bp, Homo sapiens
gaggaccagctgtgt

SEQ ID NO: 25518 - DNA, 15 bp, Homo sapiens
ggaggaccagctgtg

SEQ ID NO: 25519 - DNA, 15 bp, Homo sapiens
tggaggaccagctgt

SEQ ID NO: 25520 - DNA, 15 bp, Homo sapiens
ctggaggaccagctg

SEQ ID NO: 25521 - DNA, 15 bp, Homo sapiens
gctggaggaccagct

SEQ ID NO: 25522 - DNA, 15 bp, Homo sapiens
tgctggaggaccagc

SEQ ID NO: 25523 - DNA, 15 bp, Homo sapiens
atgctggaggaccag

SEQ ID NO: 25524 - DNA, 15 bp, Homo sapiens
catgctggaggacca

SEQ ID NO: 25525 - DNA, 15 bp, Homo sapiens
acatgctggaggacc

SEQ ID NO: 25526 - DNA, 15 bp, Homo sapiens
cacatgctggaggac

SEQ ID NO: 25527 - DNA, 15 bp, Homo sapiens
gcacatgctggagga

SEQ ID NO: 25528 - DNA, 15 bp, Homo sapiens
tgcacatgctggagg

SEQ ID NO: 25529 - DNA, 15 bp, Homo sapiens
ctgcacatgctggag

SEQ ID NO: 25530 - DNA, 15 bp, Homo sapiens
cctgcacatgctgga

SEQ ID NO: 25531 - DNA, 15 bp, Homo sapiens
gcctgcacatgctgg

SEQ ID NO: 25532 - DNA, 15 bp, Homo sapiens
cgcctgcacatgctg

SEQ ID NO: 25533 - DNA, 15 bp, Homo sapiens
gcgcctgcacatgct

SEQ ID NO: 25534 - DNA, 15 bp, Homo sapiens
agcgcctgcacatgc

SEQ ID NO: 25535 - DNA, 15 bp, Homo sapiens
cagcgcctgcacatg

SEQ ID NO: 25536 - DNA, 15 bp, Homo sapiens
gcagcgcctgcacat

SEQ ID NO: 25537 - DNA, 15 bp, Homo sapiens
agcagcgcctgcaca

SEQ ID NO: 25538 - DNA, 15 bp, Homo sapiens
cagcagcgcctgcac

SEQ ID NO: 25539 - DNA, 15 bp, Homo sapiens
ccagcagcgcctgca

SEQ ID NO: 25540 - DNA, 15 bp, Homo sapiens
accagcagcgcctgc

SEQ ID NO: 25541 - DNA, 15 bp, Homo sapiens
gaccagcagcgcctg

SEQ ID NO: 25542 - DNA, 15 bp, Homo sapiens
tgaccagcagcgcct

SEQ ID NO: 25543 - DNA, 15 bp, Homo sapiens
ttgaccagcagcgcc

SEQ ID NO: 25544 - DNA, 15 bp, Homo sapiens
cttgaccagcagcgc

SEQ ID NO: 25545 - DNA, 15 bp, Homo sapiens
tcttgaccagcagcg

SEQ ID NO: 25546 - DNA, 15 bp, Homo sapiens
ctcttgaccagcagc

SEQ ID NO: 25547 - DNA, 15 bp, Homo sapiens
tctcttgaccagcag

SEQ ID NO: 25548 - DNA, 15 bp, Homo sapiens
atctcttgaccagca

SEQ ID NO: 25549 - DNA, 15 bp, Homo sapiens
aatctcttgaccagc

SEQ ID NO: 25550 - DNA, 15 bp, Homo sapiens
gaatctcttgaccag

SEQ ID NO: 25551 - DNA, 15 bp, Homo sapiens
ggaatctcttgacca

SEQ ID NO: 25552 - DNA, 15 bp, Homo sapiens
tggaatctcttgacc

SEQ ID NO: 25553 - DNA, 15 bp, Homo sapiens
ttggaatctcttgac

SEQ ID NO: 25554 - DNA, 15 bp, Homo sapiens
gttggaatctcttga

SEQ ID NO: 25555 - DNA, 15 bp, Homo sapiens
tgttggaatctcttg

SEQ ID NO: 25556 - DNA, 15 bp, Homo sapiens
gtgttggaatctctt

SEQ ID NO: 25557 - DNA, 15 bp, Homo sapiens
tgtgttggaatctct

SEQ ID NO: 25558 - DNA, 15 bp, Homo sapiens
gtgtgttggaatctc

SEQ ID NO: 25559 - DNA, 15 bp, Homo sapiens
ggtgtgttggaatct

SEQ ID NO: 25560 - DNA, 15 bp, Homo sapiens
tggtgtgttggaatc

SEQ ID NO: 25561 - DNA, 15 bp, Homo sapiens
atggtgtgttggaat

SEQ ID NO: 25562 - DNA, 15 bp, Homo sapiens
gatggtgtgttggaa

SEQ ID NO: 25563 - DNA, 15 bp, Homo sapiens
ggatggtgtgttgga

SEQ ID NO: 25564 - DNA, 15 bp, Homo sapiens
cggatggtgtgttgg

SEQ ID NO: 25565 - DNA, 15 bp, Homo sapiens
gcggatggtgtgttg

SEQ ID NO: 25566 - DNA, 15 bp, Homo sapiens
tgcggatggtgtgtt

SEQ ID NO: 25567 - DNA, 15 bp, Homo sapiens
ctgcggatggtgtgt

SEQ ID NO: 25568 - DNA, 15 bp, Homo sapiens
gctgcggatggtgtg

SEQ ID NO: 25569 - DNA, 15 bp, Homo sapiens
ggctgcggatggtgt

SEQ ID NO: 25570 - DNA, 15 bp, Homo sapiens
tggctgcggatggtg

SEQ ID NO: 25571 - DNA, 15 bp, Homo sapiens
gtggctgcggatggt

SEQ ID NO: 25572 - DNA, 15 bp, Homo sapiens
tgtggctgcggatgg

SEQ ID NO: 25573 - DNA, 15 bp, Homo sapiens
ttgtggctgcggatg

SEQ ID NO: 25574 - DNA, 15 bp, Homo sapiens
cttgtggctgcggat

SEQ ID NO: 25575 - DNA, 15 bp, Homo sapiens
ccttgtggctgcgga

SEQ ID NO: 25576 - DNA, 15 bp, Homo sapiens
tccttgtggctgcgg

SEQ ID NO: 25577 - DNA, 15 bp, Homo sapiens
gtccttgtggctgcg

SEQ ID NO: 25578 - DNA, 15 bp, Homo sapiens
agtccttgtggctgc

SEQ ID NO: 25579 - DNA, 15 bp, Homo sapiens
aagtccttgtggctg

SEQ ID NO: 25580 - DNA, 15 bp, Homo sapiens
gaagtccttgtggct

SEQ ID NO: 25581 - DNA, 15 bp, Homo sapiens
ggaagtccttgtggc

SEQ ID NO: 25582 - DNA, 15 bp, Homo sapiens
aggaagtccttgtgg

SEQ ID NO: 25583 - DNA, 15 bp, Homo sapiens
caggaagtccttgtg

SEQ ID NO: 25584 - DNA, 15 bp, Homo sapiens
ccaggaagtccttgt

SEQ ID NO: 25585 - DNA, 15 bp, Homo sapiens
gccaggaagtccttg

SEQ ID NO: 25586 - DNA, 15 bp, Homo sapiens
cgccaggaagtcctt

SEQ ID NO: 25587 - DNA, 15 bp, Homo sapiens
gcgccaggaagtcct

SEQ ID NO: 25588 - DNA, 15 bp, Homo sapiens
tgcgccaggaagtcc

SEQ ID NO: 25589 - DNA, 15 bp, Homo sapiens
ctgcgccaggaagtc

SEQ ID NO: 25590 - DNA, 15 bp, Homo sapiens
cctgcgccaggaagt

SEQ ID NO: 25591 - DNA, 15 bp, Homo sapiens
acctgcgccaggaag

SEQ ID NO: 25592 - DNA, 15 bp, Homo sapiens
tacctgcgccaggaa

SEQ ID NO: 25593 - DNA, 15 bp, Homo sapiens
gtacctgcgccagga

SEQ ID NO: 25594 - DNA, 15 bp, Homo sapiens
agtacctgcgccagg

SEQ ID NO: 25595 - DNA, 15 bp, Homo sapiens
tagtacctgcgccag

SEQ ID NO: 25596 - DNA, 15 bp, Homo sapiens
atagtacctgcgcca

SEQ ID NO: 25597 - DNA, 15 bp, Homo sapiens
aatagtacctgcgcc

SEQ ID NO: 25598 - DNA, 15 bp, Homo sapiens
caatagtacctgcgc

SEQ ID NO: 25599 - DNA, 15 bp, Homo sapiens
acaatagtacctgcg

SEQ ID NO: 25600 - DNA, 15 bp, Homo sapiens
gacaatagtacctgc

SEQ ID NO: 25601 - DNA, 15 bp, Homo sapiens
cgacaatagtacctg

SEQ ID NO: 25602 - DNA, 15 bp, Homo sapiens
ccgacaatagtacct

SEQ ID NO: 25603 - DNA, 15 bp, Homo sapiens
accgacaatagtacc

SEQ ID NO: 25604 - DNA, 15 bp, Homo sapiens
gaccgacaatagtac

SEQ ID NO: 25605 - DNA, 15 bp, Homo sapiens
cgaccgacaatagta

SEQ ID NO: 25606 - DNA, 15 bp, Homo sapiens
ccgaccgacaatagt

SEQ ID NO: 25607 - DNA, 15 bp, Homo sapiens
accgaccgacaatag

SEQ ID NO: 25608 - DNA, 15 bp, Homo sapiens
caccgaccgacaata

SEQ ID NO: 25609 - DNA, 15 bp, Homo sapiens
acaccgaccgacaat

SEQ ID NO: 25610 - DNA, 15 bp, Homo sapiens
aacaccgaccgacaa

SEQ ID NO: 25611 - DNA, 15 bp, Homo sapiens
aaacaccgaccgaca

SEQ ID NO: 25612 - DNA, 15 bp, Homo sapiens
taaacaccgaccgac

SEQ ID NO: 25613 - DNA, 15 bp, Homo sapiens
ctaaacaccgaccga

SEQ ID NO: 25614 - DNA, 15 bp, Homo sapiens
gctaaacaccgaccg

SEQ ID NO: 25615 - DNA, 15 bp, Homo sapiens
agctaaacaccgacc

SEQ ID NO: 25616 - DNA, 15 bp, Homo sapiens
cagctaaacaccgac

SEQ ID NO: 25617 - DNA, 15 bp, Homo sapiens
tcagctaaacaccga

SEQ ID NO: 25618 - DNA, 15 bp, Homo sapiens
ctcagctaaacaccg

SEQ ID NO: 25619 - DNA, 15 bp, Homo sapiens
gctcagctaaacacc

SEQ ID NO: 25620 - DNA, 15 bp, Homo sapiens
agctcagctaaacac

SEQ ID NO: 25621 - DNA, 15 bp, Homo sapiens
gagctcagctaaaca

SEQ ID NO: 25622 - DNA, 15 bp, Homo sapiens
tgagctcagctaaac

SEQ ID NO: 25623 - DNA, 15 bp, Homo sapiens
ctgagctcagctaaa

SEQ ID NO: 25624 - DNA, 15 bp, Homo sapiens
actgagctcagctaa

SEQ ID NO: 25625 - DNA, 15 bp, Homo sapiens
cactgagctcagcta

SEQ ID NO: 25626 - DNA, 15 bp, Homo sapiens
ccactgagctcagct

SEQ ID NO: 25627 - DNA, 15 bp, Homo sapiens
gccactgagctcagc

SEQ ID NO: 25628 - DNA, 15 bp, Homo sapiens
agccactgagctcag

SEQ ID NO: 25629 - DNA, 15 bp, Homo sapiens
gagccactgagctca

SEQ ID NO: 25630 - DNA, 15 bp, Homo sapiens
ggagccactgagctc

SEQ ID NO: 25631 - DNA, 15 bp, Homo sapiens
aggagccactgagct

SEQ ID NO: 25632 - DNA, 15 bp, Homo sapiens
gaggagccactgagc

SEQ ID NO: 25633 - DNA, 15 bp, Homo sapiens
agaggagccactgag

SEQ ID NO: 25634 - DNA, 15 bp, Homo sapiens
gagaggagccactga

SEQ ID NO: 25635 - DNA, 15 bp, Homo sapiens
ggagaggagccactg

SEQ ID NO: 25636 - DNA, 15 bp, Homo sapiens
gggagaggagccact

SEQ ID NO: 25637 - DNA, 15 bp, Homo sapiens
tgggagaggagccac

SEQ ID NO: 25638 - DNA, 15 bp, Homo sapiens
ctgggagaggagcca

SEQ ID NO: 25639 - DNA, 15 bp, Homo sapiens
gctgggagaggagcc

SEQ ID NO: 25640 - DNA, 15 bp, Homo sapiens
ggctgggagaggagc

SEQ ID NO: 25641 - DNA, 15 bp, Homo sapiens
aggctgggagaggag

SEQ ID NO: 25642 - DNA, 15 bp, Homo sapiens
aaggctgggagagga

SEQ ID NO: 25643 - DNA, 15 bp, Homo sapiens
gaaggctgggagagg

SEQ ID NO: 25644 - DNA, 15 bp, Homo sapiens
ggaaggctgggagag

SEQ ID NO: 25645 - DNA, 15 bp, Homo sapiens
gggaaggctgggaga

SEQ ID NO: 25646 - DNA, 15 bp, Homo sapiens
ggggaaggctgggag

SEQ ID NO: 25647 - DNA, 15 bp, Homo sapiens
aggggaaggctggga

SEQ ID NO: 25648 - DNA, 15 bp, Homo sapiens
gaggggaaggctggg

SEQ ID NO: 25649 - DNA, 15 bp, Homo sapiens
ggaggggaaggctgg

SEQ ID NO: 25650 - DNA, 15 bp, Homo sapiens
aggaggggaaggctg

SEQ ID NO: 25651 - DNA, 15 bp, Homo sapiens
gaggaggggaaggct

SEQ ID NO: 25652 - DNA, 15 bp, Homo sapiens
agaggaggggaaggc

SEQ ID NO: 25653 - DNA, 15 bp, Homo sapiens
gagaggaggggaagg

SEQ ID NO: 25654 - DNA, 15 bp, Homo sapiens
ggagaggaggggaag

SEQ ID NO: 25655 - DNA, 15 bp, Homo sapiens
aggagaggaggggaa

SEQ ID NO: 25656 - DNA, 15 bp, Homo sapiens
caggagaggagggga

SEQ ID NO: 25657 - DNA, 15 bp, Homo sapiens
tcaggagaggagggg

SEQ ID NO: 25658 - DNA, 15 bp, Homo sapiens
ctcaggagaggaggg

SEQ ID NO: 25659 - DNA, 15 bp, Homo sapiens
actcaggagaggagg

SEQ ID NO: 25660 - DNA, 15 bp, Homo sapiens
cactcaggagaggag

SEQ ID NO: 25661 - DNA, 15 bp, Homo sapiens
acactcaggagagga

SEQ ID NO: 25662 - DNA, 15 bp, Homo sapiens
aacactcaggagagg

SEQ ID NO: 25663 - DNA, 15 bp, Homo sapiens
gaacactcaggagag

SEQ ID NO: 25664 - DNA, 15 bp, Homo sapiens
ggaacactcaggaga

SEQ ID NO: 25665 - DNA, 15 bp, Homo sapiens
aggaacactcaggag

SEQ ID NO: 25666 - DNA, 15 bp, Homo sapiens
aaggaacactcagga

SEQ ID NO: 25667 - DNA, 15 bp, Homo sapiens
gaaggaacactcagg

SEQ ID NO: 25668 - DNA, 15 bp, Homo sapiens
tgaaggaacactcag

SEQ ID NO: 25669 - DNA, 15 bp, Homo sapiens
ctgaaggaacactca

SEQ ID NO: 25670 - DNA, 15 bp, Homo sapiens
cctgaaggaacactc

SEQ ID NO: 25671 - DNA, 15 bp, Homo sapiens
gcctgaaggaacact

SEQ ID NO: 25672 - DNA, 15 bp, Homo sapiens
tgcctgaaggaacac

SEQ ID NO: 25673 - DNA, 15 bp, Homo sapiens
atgcctgaaggaaca

SEQ ID NO: 25674 - DNA, 15 bp, Homo sapiens
catgcctgaaggaac

SEQ ID NO: 25675 - DNA, 15 bp, Homo sapiens
ccatgcctgaaggaa

SEQ ID NO: 25676 - DNA, 15 bp, Homo sapiens
cccatgcctgaagga

SEQ ID NO: 25677 - DNA, 15 bp, Homo sapiens
acccatgcctgaagg

SEQ ID NO: 25678 - DNA, 15 bp, Homo sapiens
aacccatgcctgaag

SEQ ID NO: 25679 - DNA, 15 bp, Homo sapiens
taacccatgcctgaa

SEQ ID NO: 25680 - DNA, 15 bp, Homo sapiens
ataacccatgcctga

SEQ ID NO: 25681 - DNA, 15 bp, Homo sapiens
tataacccatgcctg

SEQ ID NO: 25682 - DNA, 15 bp, Homo sapiens
ttataacccatgcct

SEQ ID NO: 25683 - DNA, 15 bp, Homo sapiens
gttataacccatgcc

SEQ ID NO: 25684 - DNA, 15 bp, Homo sapiens
agttataacccatgc

SEQ ID NO: 25685 - DNA, 15 bp, Homo sapiens
gagttataacccatg

SEQ ID NO: 25686 - DNA, 15 bp, Homo sapiens
tgagttataacccat

SEQ ID NO: 25687 - DNA, 15 bp, Homo sapiens
ctgagttataaccca

SEQ ID NO: 25688 - DNA, 15 bp, Homo sapiens
gctgagttataaccc

SEQ ID NO: 25689 - DNA, 15 bp, Homo sapiens
tgctgagttataacc

SEQ ID NO: 25690 - DNA, 15 bp, Homo sapiens
ttgctgagttataac

SEQ ID NO: 25691 - DNA, 15 bp, Homo sapiens
cttgctgagttataa

SEQ ID NO: 25692 - DNA, 15 bp, Homo sapiens
ccttgctgagttata

SEQ ID NO: 25693 - DNA, 15 bp, Homo sapiens
tccttgctgagttat

SEQ ID NO: 25694 - DNA, 15 bp, Homo sapiens
ctccttgctgagtta

SEQ ID NO: 25695 - DNA, 15 bp, Homo sapiens
gctccttgctgagtt

SEQ ID NO: 25696 - DNA, 15 bp, Homo sapiens
tgctccttgctgagt

SEQ ID NO: 25697 - DNA, 15 bp, Homo sapiens
gtgctccttgctgag

SEQ ID NO: 25698 - DNA, 15 bp, Homo sapiens
ggtgctccttgctga

SEQ ID NO: 25699 - DNA, 15 bp, Homo sapiens
gggtgctccttgctg

SEQ ID NO: 25700 - DNA, 15 bp, Homo sapiens
agggtgctccttgct

SEQ ID NO: 25701 - DNA, 15 bp, Homo sapiens
gagggtgctccttgc

SEQ ID NO: 25702 - DNA, 15 bp, Homo sapiens
agagggtgctccttg

SEQ ID NO: 25703 - DNA, 15 bp, Homo sapiens
aagagggtgctcctt

SEQ ID NO: 25704 - DNA, 15 bp, Homo sapiens
aaagagggtgctcct

SEQ ID NO: 25705 - DNA, 15 bp, Homo sapiens
taaagagggtgctcc

SEQ ID NO: 25706 - DNA, 15 bp, Homo sapiens
ctaaagagggtgctc

SEQ ID NO: 25707 - DNA, 15 bp, Homo sapiens
tctaaagagggtgct

SEQ ID NO: 25708 - DNA, 15 bp, Homo sapiens
atctaaagagggtgc

SEQ ID NO: 25709 - DNA, 15 bp, Homo sapiens
aatctaaagagggtg

SEQ ID NO: 25710 - DNA, 15 bp, Homo sapiens
gaatctaaagagggt

SEQ ID NO: 25711 - DNA, 15 bp, Homo sapiens
agaatctaaagaggg

SEQ ID NO: 25712 - DNA, 15 bp, Homo sapiens
cagaatctaaagagg

SEQ ID NO: 25713 - DNA, 15 bp, Homo sapiens
gcagaatctaaagag

SEQ ID NO: 25714 - DNA, 15 bp, Homo sapiens
agcagaatctaaaga

SEQ ID NO: 25715 - DNA, 15 bp, Homo sapiens
cagcagaatctaaag

SEQ ID NO: 25716 - DNA, 15 bp, Homo sapiens
ccagcagaatctaaa

SEQ ID NO: 25717 - DNA, 15 bp, Homo sapiens
accagcagaatctaa

SEQ ID NO: 25718 - DNA, 15 bp, Homo sapiens
aaccagcagaatcta

SEQ ID NO: 25719 - DNA, 15 bp, Homo sapiens
aaaccagcagaatct

SEQ ID NO: 25720 - DNA, 15 bp, Homo sapiens
aaaaccagcagaatc

SEQ ID NO: 25721 - DNA, 15 bp, Homo sapiens
caaaaccagcagaat

SEQ ID NO: 25722 - DNA, 15 bp, Homo sapiens
acaaaaccagcagaa

SEQ ID NO: 25723 - DNA, 15 bp, Homo sapiens
aacaaaaccagcaga

SEQ ID NO: 25724 - DNA, 15 bp, Homo sapiens
aaacaaaaccagcag

SEQ ID NO: 25725 - DNA, 15 bp, Homo sapiens
gaaacaaaaccagca

SEQ ID NO: 25726 - DNA, 15 bp, Homo sapiens
ggaaacaaaaccagc

SEQ ID NO: 25727 - DNA, 15 bp, Homo sapiens
aggaaacaaaaccag

SEQ ID NO: 25728 - DNA, 15 bp, Homo sapiens
caggaaacaaaacca

SEQ ID NO: 25729 - DNA, 15 bp, Homo sapiens
gcaggaaacaaaacc

SEQ ID NO: 25730 - DNA, 15 bp, Homo sapiens
agcaggaaacaaaac

SEQ ID NO: 25731 - DNA, 15 bp, Homo sapiens
aagcaggaaacaaaa

SEQ ID NO: 25732 - DNA, 15 bp, Homo sapiens
aaagcaggaaacaaa

SEQ ID NO: 25733 - DNA, 15 bp, Homo sapiens
gaaagcaggaaacaa

SEQ ID NO: 25734 - DNA, 15 bp, Homo sapiens
ggaaagcaggaaaca

SEQ ID NO: 25735 - DNA, 15 bp, Homo sapiens
tggaaagcaggaaac

SEQ ID NO: 25736 - DNA, 15 bp, Homo sapiens
ttggaaagcaggaaa

SEQ ID NO: 25737 - DNA, 15 bp, Homo sapiens
tttggaaagcaggaa

SEQ ID NO: 25738 - DNA, 15 bp, Homo sapiens
gtttggaaagcagga

SEQ ID NO: 25739 - DNA, 15 bp, Homo sapiens
ggtttggaaagcagg

SEQ ID NO: 25740 - DNA, 15 bp, Homo sapiens
gggtttggaaagcag

SEQ ID NO: 25741 - DNA, 15 bp, Homo sapiens
agggtttggaaagca

SEQ ID NO: 25742 - DNA, 15 bp, Homo sapiens
aagggtttggaaagc

SEQ ID NO: 25743 - DNA, 15 bp, Homo sapiens
taagggtttggaaag

SEQ ID NO: 25744 - DNA, 15 bp, Homo sapiens
ataagggtttggaaa

SEQ ID NO: 25745 - DNA, 15 bp, Homo sapiens
gataagggtttggaa

SEQ ID NO: 25746 - DNA, 15 bp, Homo sapiens
agataagggtttgga

SEQ ID NO: 25747 - DNA, 15 bp, Homo sapiens
aagataagggtttgg

SEQ ID NO: 25748 - DNA, 15 bp, Homo sapiens
caagataagggtttg

SEQ ID NO: 25749 - DNA, 15 bp, Homo sapiens
tcaagataagggttt

SEQ ID NO: 25750 - DNA, 15 bp, Homo sapiens
atcaagataagggtt

SEQ ID NO: 25751 - DNA, 15 bp, Homo sapiens
aatcaagataagggt

SEQ ID NO: 25752 - DNA, 15 bp, Homo sapiens
gaatcaagataaggg

SEQ ID NO: 25753 - DNA, 15 bp, Homo sapiens
agaatcaagataagg

SEQ ID NO: 25754 - DNA, 15 bp, Homo sapiens
aagaatcaagataag

SEQ ID NO: 25755 - DNA, 15 bp, Homo sapiens
caagaatcaagataa

SEQ ID NO: 25756 - DNA, 15 bp, Homo sapiens
ccaagaatcaagata

SEQ ID NO: 25757 - DNA, 15 bp, Homo sapiens
accaagaatcaagat

SEQ ID NO: 25758 - DNA, 15 bp, Homo sapiens
taccaagaatcaaga

SEQ ID NO: 25759 - DNA, 15 bp, Homo sapiens
ttaccaagaatcaag

SEQ ID NO: 25760 - DNA, 15 bp, Homo sapiens
gttaccaagaatcaa

SEQ ID NO: 25761 - DNA, 15 bp, Homo sapiens
tgttaccaagaatca

SEQ ID NO: 25762 - DNA, 15 bp, Homo sapiens
atgttaccaagaatc

SEQ ID NO: 25763 - DNA, 15 bp, Homo sapiens
catgttaccaagaat

SEQ ID NO: 25764 - DNA, 15 bp, Homo sapiens
tcatgttaccaagaa

SEQ ID NO: 25765 - DNA, 15 bp, Homo sapiens
ttcatgttaccaaga

SEQ ID NO: 25766 - DNA, 15 bp, Homo sapiens
attcatgttaccaag

SEQ ID NO: 25767 - DNA, 15 bp, Homo sapiens
gattcatgttaccaa

SEQ ID NO: 25768 - DNA, 15 bp, Homo sapiens
agattcatgttacca

SEQ ID NO: 25769 - DNA, 15 bp, Homo sapiens
aagattcatgttacc

SEQ ID NO: 25770 - DNA, 15 bp, Homo sapiens
gaagattcatgttac

SEQ ID NO: 25771 - DNA, 15 bp, Homo sapiens
agaagattcatgtta

SEQ ID NO: 25772 - DNA, 15 bp, Homo sapiens
aagaagattcatgtt

SEQ ID NO: 25773 - DNA, 15 bp, Homo sapiens
aaagaagattcatgt

SEQ ID NO: 25774 - DNA, 15 bp, Homo sapiens
caaagaagattcatg

SEQ ID NO: 25775 - DNA, 15 bp, Homo sapiens
acaaagaagattcat

SEQ ID NO: 25776 - DNA, 15 bp, Homo sapiens
tacaaagaagattca

SEQ ID NO: 25777 - DNA, 15 bp, Homo sapiens
ttacaaagaagattc

SEQ ID NO: 25778 - DNA, 15 bp, Homo sapiens
cttacaaagaagatt

SEQ ID NO: 25779 - DNA, 15 bp, Homo sapiens
acttacaaagaagat

SEQ ID NO: 25780 - DNA, 15 bp, Homo sapiens
aacttacaaagaaga

SEQ ID NO: 25781 - DNA, 15 bp, Homo sapiens
caacttacaaagaag

SEQ ID NO: 25782 - DNA, 15 bp, Homo sapiens
ccaacttacaaagaa

SEQ ID NO: 25783 - DNA, 15 bp, Homo sapiens
tccaacttacaaaga

SEQ ID NO: 25784 - DNA, 15 bp, Homo sapiens
gtccaacttacaaag

SEQ ID NO: 25785 - DNA, 15 bp, Homo sapiens
ggtccaacttacaaa

SEQ ID NO: 25786 - DNA, 15 bp, Homo sapiens
aggtccaacttacaa

SEQ ID NO: 25787 - DNA, 15 bp, Homo sapiens
gaggtccaacttaca

SEQ ID NO: 25788 - DNA, 15 bp, Homo sapiens
ggaggtccaacttac

SEQ ID NO: 25789 - DNA, 15 bp, Homo sapiens
gggaggtccaactta

SEQ ID NO: 25790 - DNA, 15 bp, Homo sapiens
ggggaggtccaactt

SEQ ID NO: 25791 - DNA, 15 bp, Homo sapiens
aggggaggtccaact

SEQ ID NO: 25792 - DNA, 15 bp, Homo sapiens
taggggaggtccaac

SEQ ID NO: 25793 - DNA, 15 bp, Homo sapiens
ctaggggaggtccaa

SEQ ID NO: 25794 - DNA, 15 bp, Homo sapiens
gctaggggaggtcca

SEQ ID NO: 25795 - DNA, 15 bp, Homo sapiens
tgctaggggaggtcc

SEQ ID NO: 25796 - DNA, 15 bp, Homo sapiens
ttgctaggggaggtc

SEQ ID NO: 25797 - DNA, 15 bp, Homo sapiens
tttgctaggggaggt

SEQ ID NO: 25798 - DNA, 15 bp, Homo sapiens
ctttgctaggggagg

SEQ ID NO: 25799 - DNA, 15 bp, Homo sapiens
tctttgctaggggag

SEQ ID NO: 25800 - DNA, 15 bp, Homo sapiens
ttctttgctagggga

SEQ ID NO: 25801 - DNA, 15 bp, Homo sapiens
tttctttgctagggg

SEQ ID NO: 25802 - DNA, 15 bp, Homo sapiens
ttttctttgctaggg

SEQ ID NO: 25803 - DNA, 15 bp, Homo sapiens
attttctttgctagg

SEQ ID NO: 25804 - DNA, 15 bp, Homo sapiens
tattttctttgctag

SEQ ID NO: 25805 - DNA, 15 bp, Homo sapiens
ctattttctttgcta

SEQ ID NO: 25806 - DNA, 15 bp, Homo sapiens
tctattttctttgct

SEQ ID NO: 25807 - DNA, 15 bp, Homo sapiens
ttctattttctttgc

SEQ ID NO: 25808 - DNA, 15 bp, Homo sapiens
attctattttctttg

SEQ ID NO: 25809 - DNA, 15 bp, Homo sapiens
tattctattttcttt

SEQ ID NO: 25810 - DNA, 15 bp, Homo sapiens
ttattctattttctt

SEQ ID NO: 25811 - DNA, 15 bp, Homo sapiens
attattctattttct

SEQ ID NO: 25812 - DNA, 15 bp, Homo sapiens
tattattctattttc

SEQ ID NO: 25813 - DNA, 15 bp, Homo sapiens
ctattattctatttt

SEQ ID NO: 25814 - DNA, 15 bp, Homo sapiens
actattattctattt

SEQ ID NO: 25815 - DNA, 15 bp, Homo sapiens
cactattattctatt

SEQ ID NO: 25816 - DNA, 15 bp, Homo sapiens
tcactattattctat

SEQ ID NO: 25817 - DNA, 15 bp, Homo sapiens
ttcactattattcta

SEQ ID NO: 25818 - DNA, 15 bp, Homo sapiens
tttcactattattct

SEQ ID NO: 25819 - DNA, 15 bp, Homo sapiens
ttttcactattattc

SEQ ID NO: 25820 - DNA, 15 bp, Homo sapiens
attttcactattatt

SEQ ID NO: 25821 - DNA, 15 bp, Homo sapiens
cattttcactattat

SEQ ID NO: 25822 - DNA, 15 bp, Homo sapiens
acattttcactatta

SEQ ID NO: 25823 - DNA, 15 bp, Homo sapiens
aacattttcactatt

SEQ ID NO: 25824 - DNA, 15 bp, Homo sapiens
taacattttcactat

SEQ ID NO: 25825 - DNA, 15 bp, Homo sapiens
ttaacattttcacta

SEQ ID NO: 25826 - DNA, 15 bp, Homo sapiens
attaacattttcact

SEQ ID NO: 25827 - DNA, 15 bp, Homo sapiens
tattaacattttcac

SEQ ID NO: 25828 - DNA, 15 bp, Homo sapiens
atattaacattttca

SEQ ID NO: 25829 - DNA, 15 bp, Homo sapiens
aatattaacattttc

SEQ ID NO: 25830 - DNA, 15 bp, Homo sapiens
caatattaacatttt

SEQ ID NO: 25831 - DNA, 15 bp, Homo sapiens
acaatattaacattt

SEQ ID NO: 25832 - DNA, 15 bp, Homo sapiens
aacaatattaacatt

SEQ ID NO: 25833 - DNA, 15 bp, Homo sapiens
aaacaatattaacat

SEQ ID NO: 25834 - DNA, 15 bp, Homo sapiens
aaaacaatattaaca

SEQ ID NO: 25835 - DNA, 15 bp, Homo sapiens
aaaaacaatattaac

SEQ ID NO: 25836 - DNA, 15 bp, Homo sapiens
taaaaacaatattaa

SEQ ID NO: 25837 - DNA, 15 bp, Homo sapiens
ataaaaacaatatta

SEQ ID NO: 25838 - DNA, 15 bp, Homo sapiens
aataaaaacaatatt

SEQ ID NO: 25839 - DNA, 15 bp, Homo sapiens
aaataaaaacaatat

SEQ ID NO: 25840 - DNA, 15 bp, Homo sapiens
aaaataaaaacaata

SEQ ID NO: 25841 - DNA, 15 bp, Homo sapiens
aaaaataaaaacaat

SEQ ID NO: 25842 - DNA, 15 bp, Homo sapiens
taaaaataaaaacaa

SEQ ID NO: 25843 - DNA, 15 bp, Homo sapiens
gtaaaaataaaaaca

SEQ ID NO: 25844 - DNA, 15 bp, Homo sapiens
tgtaaaaataaaaac

SEQ ID NO: 25845 - DNA, 15 bp, Homo sapiens
ctgtaaaaataaaaa

SEQ ID NO: 25846 - DNA, 15 bp, Homo sapiens
actgtaaaaataaaa

SEQ ID NO: 25847 - DNA, 15 bp, Homo sapiens
cactgtaaaaataaa

SEQ ID NO: 25848 - DNA, 15 bp, Homo sapiens
tcactgtaaaaataa

SEQ ID NO: 25849 - DNA, 15 bp, Homo sapiens
ctcactgtaaaaata

SEQ ID NO: 25850 - DNA, 15 bp, Homo sapiens
cctcactgtaaaaat

SEQ ID NO: 25851 - DNA, 15 bp, Homo sapiens
ccctcactgtaaaaa

SEQ ID NO: 25852 - DNA, 15 bp, Homo sapiens
tccctcactgtaaaa

SEQ ID NO: 25853 - DNA, 15 bp, Homo sapiens
atccctcactgtaaa

SEQ ID NO: 25854 - DNA, 15 bp, Homo sapiens
tatccctcactgtaa

SEQ ID NO: 25855 - DNA, 15 bp, Homo sapiens
ttatccctcactgta

SEQ ID NO: 25856 - DNA, 15 bp, Homo sapiens
tttatccctcactgt

SEQ ID NO: 25857 - DNA, 15 bp, Homo sapiens
ctttatccctcactg

SEQ ID NO: 25858 - DNA, 15 bp, Homo sapiens
actttatccctcact

SEQ ID NO: 25859 - DNA, 15 bp, Homo sapiens
gactttatccctcac

SEQ ID NO: 25860 - DNA, 15 bp, Homo sapiens
tgactttatccctca

SEQ ID NO: 25861 - DNA, 15 bp, Homo sapiens
atgactttatccctc

SEQ ID NO: 25862 - DNA, 15 bp, Homo sapiens
catgactttatccct

SEQ ID NO: 25863 - DNA, 15 bp, Homo sapiens
acatgactttatccc

SEQ ID NO: 25864 - DNA, 15 bp, Homo sapiens
aacatgactttatcc

SEQ ID NO: 25865 - DNA, 15 bp, Homo sapiens
aaacatgactttatc

SEQ ID NO: 25866 - DNA, 15 bp, Homo sapiens
aaaacatgactttat

SEQ ID NO: 25867 - DNA, 15 bp, Homo sapiens
gaaaacatgacttta

SEQ ID NO: 25868 - DNA, 15 bp, Homo sapiens
tgaaaacatgacttt

SEQ ID NO: 25869 - DNA, 15 bp, Homo sapiens
atgaaaacatgactt

SEQ ID NO: 25870 - DNA, 15 bp, Homo sapiens
aatgaaaacatgact

SEQ ID NO: 25871 - DNA, 15 bp, Homo sapiens
gaatgaaaacatgac

SEQ ID NO: 25872 - DNA, 15 bp, Homo sapiens
tgaatgaaaacatga

SEQ ID NO: 25873 - DNA, 15 bp, Homo sapiens
atgaatgaaaacatg

SEQ ID NO: 25874 - DNA, 15 bp, Homo sapiens
aatgaatgaaaacat

SEQ ID NO: 25875 - DNA, 15 bp, Homo sapiens
aaatgaatgaaaaca

SEQ ID NO: 25876 - DNA, 15 bp, Homo sapiens
aaaatgaatgaaaac

SEQ ID NO: 25877 - DNA, 15 bp, Homo sapiens
aaaaatgaatgaaaa

SEQ ID NO: 25878 - DNA, 15 bp, Homo sapiens
caaaaatgaatgaaa

SEQ ID NO: 25879 - DNA, 15 bp, Homo sapiens
gcaaaaatgaatgaa

SEQ ID NO: 25880 - DNA, 15 bp, Homo sapiens
tgcaaaaatgaatga

SEQ ID NO: 25881 - DNA, 15 bp, Homo sapiens
ctgcaaaaatgaatg

SEQ ID NO: 25882 - DNA, 15 bp, Homo sapiens
actgcaaaaatgaat

SEQ ID NO: 25883 - DNA, 15 bp, Homo sapiens
cactgcaaaaatgaa

SEQ ID NO: 25884 - DNA, 15 bp, Homo sapiens
tcactgcaaaaatga

SEQ ID NO: 25885 - DNA, 15 bp, Homo sapiens
gtcactgcaaaaatg

SEQ ID NO: 25886 - DNA, 15 bp, Homo sapiens
ggtcactgcaaaaat

SEQ ID NO: 25887 - DNA, 15 bp, Homo sapiens
gggtcactgcaaaaa

SEQ ID NO: 25888 - DNA, 15 bp, Homo sapiens
agggtcactgcaaaa

SEQ ID NO: 25889 - DNA, 15 bp, Homo sapiens
tagggtcactgcaaa

SEQ ID NO: 25890 - DNA, 15 bp, Homo sapiens
gtagggtcactgcaa

SEQ ID NO: 25891 - DNA, 15 bp, Homo sapiens
tgtagggtcactgca

SEQ ID NO: 25892 - DNA, 15 bp, Homo sapiens
atgtagggtcactgc

SEQ ID NO: 25893 - DNA, 15 bp, Homo sapiens
tatgtagggtcactg

SEQ ID NO: 25894 - DNA, 15 bp, Homo sapiens
atatgtagggtcact

SEQ ID NO: 25895 - DNA, 15 bp, Homo sapiens
gatatgtagggtcac

SEQ ID NO: 25896 - DNA, 15 bp, Homo sapiens
tgatatgtagggtca

SEQ ID NO: 25897 - DNA, 15 bp, Homo sapiens
ttgatatgtagggtc

SEQ ID NO: 25898 - DNA, 15 bp, Homo sapiens
tttgatatgtagggt

SEQ ID NO: 25899 - DNA, 15 bp, Homo sapiens
ttttgatatgtaggg

SEQ ID NO: 25900 - DNA, 15 bp, Homo sapiens
attttgatatgtagg

SEQ ID NO: 25901 - DNA, 15 bp, Homo sapiens
gattttgatatgtag

SEQ ID NO: 25902 - DNA, 15 bp, Homo sapiens
tgattttgatatgta

SEQ ID NO: 25903 - DNA, 15 bp, Homo sapiens
atgattttgatatgt

SEQ ID NO: 25904 - DNA, 15 bp, Homo sapiens
aatgattttgatatg

SEQ ID NO: 25905 - DNA, 15 bp, Homo sapiens
caatgattttgatat

SEQ ID NO: 25906 - DNA, 15 bp, Homo sapiens
gcaatgattttgata

SEQ ID NO: 25907 - DNA, 15 bp, Homo sapiens
ggcaatgattttgat

SEQ ID NO: 25908 - DNA, 15 bp, Homo sapiens
gggcaatgattttga

SEQ ID NO: 25909 - DNA, 15 bp, Homo sapiens
agggcaatgattttg

SEQ ID NO: 25910 - DNA, 15 bp, Homo sapiens
gagggcaatgatttt

SEQ ID NO: 25911 - DNA, 15 bp, Homo sapiens
agagggcaatgattt

SEQ ID NO: 25912 - DNA, 15 bp, Homo sapiens
aagagggcaatgatt

SEQ ID NO: 25913 - DNA, 15 bp, Homo sapiens
aaagagggcaatgat

SEQ ID NO: 25914 - DNA, 15 bp, Homo sapiens
aaaagagggcaatga

SEQ ID NO: 25915 - DNA, 15 bp, Homo sapiens
aaaaagagggcaatg

SEQ ID NO: 25916 - DNA, 15 bp, Homo sapiens
aaaaaagagggcaat

SEQ ID NO: 25917 - DNA, 15 bp, Homo sapiens
gaaaaaagagggcaa

SEQ ID NO: 25918 - DNA, 15 bp, Homo sapiens
agaaaaaagagggca

SEQ ID NO: 25919 - DNA, 15 bp, Homo sapiens
aagaaaaaagagggc

SEQ ID NO: 25920 - DNA, 15 bp, Homo sapiens
aaagaaaaaagaggg

SEQ ID NO: 25921 - DNA, 15 bp, Homo sapiens
aaaagaaaaaagagg

SEQ ID NO: 25922 - DNA, 15 bp, Homo sapiens
taaaagaaaaaagag

SEQ ID NO: 25923 - DNA, 15 bp, Homo sapiens
ttaaaagaaaaaaga

SEQ ID NO: 25924 - DNA, 15 bp, Homo sapiens
attaaaagaaaaaag

SEQ ID NO: 25925 - DNA, 15 bp, Homo sapiens
cattaaaagaaaaaa

SEQ ID NO: 25926 - DNA, 15 bp, Homo sapiens
acattaaaagaaaaa

SEQ ID NO: 25927 - DNA, 15 bp, Homo sapiens
aacattaaaagaaaa

SEQ ID NO: 25928 - DNA, 15 bp, Homo sapiens
caacattaaaagaaa

SEQ ID NO: 25929 - DNA, 15 bp, Homo sapiens
acaacattaaaagaa

SEQ ID NO: 25930 - DNA, 15 bp, Homo sapiens
aacaacattaaaaga

SEQ ID NO: 25931 - DNA, 15 bp, Homo sapiens
aaacaacattaaaag

SEQ ID NO: 25932 - DNA, 15 bp, Homo sapiens
taaacaacattaaaa

SEQ ID NO: 25933 - DNA, 15 bp, Homo sapiens
ttaaacaacattaaa

SEQ ID NO: 25934 - DNA, 15 bp, Homo sapiens
attaaacaacattaa

SEQ ID NO: 25935 - DNA, 15 bp, Homo sapiens
aattaaacaacatta

SEQ ID NO: 25936 - DNA, 15 bp, Homo sapiens
aaattaaacaacatt

SEQ ID NO: 25937 - DNA, 15 bp, Homo sapiens
taaattaaacaacat

SEQ ID NO: 25938 - DNA, 15 bp, Homo sapiens
ctaaattaaacaaca

SEQ ID NO: 25939 - DNA, 15 bp, Homo sapiens
tctaaattaaacaac

SEQ ID NO: 25940 - DNA, 15 bp, Homo sapiens
ttctaaattaaacaa

SEQ ID NO: 25941 - DNA, 15 bp, Homo sapiens
tttctaaattaaaca

SEQ ID NO: 25942 - DNA, 15 bp, Homo sapiens
ttttctaaattaaac

SEQ ID NO: 25943 - DNA, 15 bp, Homo sapiens
tttttctaaattaaa

SEQ ID NO: 25944 - DNA, 15 bp, Homo sapiens
ctttttctaaattaa

SEQ ID NO: 25945 - DNA, 15 bp, Homo sapiens
tctttttctaaatta

SEQ ID NO: 25946 - DNA, 15 bp, Homo sapiens
ttctttttctaaatt

SEQ ID NO: 25947 - DNA, 15 bp, Homo sapiens
cttctttttctaaat

SEQ ID NO: 25948 - DNA, 15 bp, Homo sapiens
gcttctttttctaaa

SEQ ID NO: 25949 - DNA, 15 bp, Homo sapiens
agcttctttttctaa

SEQ ID NO: 25950 - DNA, 15 bp, Homo sapiens
gagcttctttttcta

SEQ ID NO: 25951 - DNA, 15 bp, Homo sapiens
agagcttctttttct

SEQ ID NO: 25952 - DNA, 15 bp, Homo sapiens
cagagcttctttttc

SEQ ID NO: 25953 - DNA, 15 bp, Homo sapiens
ccagagcttcttttt

SEQ ID NO: 25954 - DNA, 15 bp, Homo sapiens
accagagcttctttt

SEQ ID NO: 25955 - DNA, 15 bp, Homo sapiens
aaccagagcttcttt

SEQ ID NO: 25956 - DNA, 15 bp, Homo sapiens
aaaccagagcttctt

SEQ ID NO: 25957 - DNA, 15 bp, Homo sapiens
taaaccagagcttct

SEQ ID NO: 25958 - DNA, 15 bp, Homo sapiens
ttaaaccagagcttc

SEQ ID NO: 25959 - DNA, 15 bp, Homo sapiens
tttaaaccagagctt

SEQ ID NO: 25960 - DNA, 15 bp, Homo sapiens
ctttaaaccagagct

SEQ ID NO: 25961 - DNA, 15 bp, Homo sapiens
tctttaaaccagagc

SEQ ID NO: 25962 - DNA, 15 bp, Homo sapiens
ttctttaaaccagag

SEQ ID NO: 25963 - DNA, 15 bp, Homo sapiens
gttctttaaaccaga

SEQ ID NO: 25964 - DNA, 15 bp, Homo sapiens
tgttctttaaaccag

SEQ ID NO: 25965 - DNA, 15 bp, Homo sapiens
ctgttctttaaacca

SEQ ID NO: 25966 - DNA, 15 bp, Homo sapiens
actgttctttaaacc

SEQ ID NO: 25967 - DNA, 15 bp, Homo sapiens
cactgttctttaaac

SEQ ID NO: 25968 - DNA, 15 bp, Homo sapiens
tcactgttctttaaa

SEQ ID NO: 25969 - DNA, 15 bp, Homo sapiens
ctcactgttctttaa

SEQ ID NO: 25970 - DNA, 15 bp, Homo sapiens
actcactgttcttta

SEQ ID NO: 25971 - DNA, 15 bp, Homo sapiens
gactcactgttcttt

SEQ ID NO: 25972 - DNA, 15 bp, Homo sapiens
tgactcactgttctt

SEQ ID NO: 25973 - DNA, 15 bp, Homo sapiens
gtgactcactgttct

SEQ ID NO: 25974 - DNA, 15 bp, Homo sapiens
cgtgactcactgttc

SEQ ID NO: 25975 - DNA, 15 bp, Homo sapiens
acgtgactcactgtt

SEQ ID NO: 25976 - DNA, 15 bp, Homo sapiens
cacgtgactcactgt

SEQ ID NO: 25977 - DNA, 15 bp, Homo sapiens
tcacgtgactcactg

SEQ ID NO: 25978 - DNA, 15 bp, Homo sapiens
gtcacgtgactcact

SEQ ID NO: 25979 - DNA, 15 bp, Homo sapiens
agtcacgtgactcac

SEQ ID NO: 25980 - DNA, 15 bp, Homo sapiens
aagtcacgtgactca

SEQ ID NO: 25981 - DNA, 15 bp, Homo sapiens
caagtcacgtgactc

SEQ ID NO: 25982 - DNA, 15 bp, Homo sapiens
gcaagtcacgtgact

SEQ ID NO: 25983 - DNA, 15 bp, Homo sapiens
agcaagtcacgtgac

SEQ ID NO: 25984 - DNA, 15 bp, Homo sapiens
gagcaagtcacgtga

SEQ ID NO: 25985 - DNA, 15 bp, Homo sapiens
agagcaagtcacgtg

SEQ ID NO: 25986 - DNA, 15 bp, Homo sapiens
aagagcaagtcacgt

SEQ ID NO: 25987 - DNA, 15 bp, Homo sapiens
aaagagcaagtcacg

SEQ ID NO: 25988 - DNA, 15 bp, Homo sapiens
caaagagcaagtcac

SEQ ID NO: 25989 - DNA, 15 bp, Homo sapiens
tcaaagagcaagtca

SEQ ID NO: 25990 - DNA, 15 bp, Homo sapiens
ttcaaagagcaagtc

SEQ ID NO: 25991 - DNA, 15 bp, Homo sapiens
tttcaaagagcaagt

SEQ ID NO: 25992 - DNA, 15 bp, Homo sapiens
atttcaaagagcaag

SEQ ID NO: 25993 - DNA, 15 bp, Homo sapiens
catttcaaagagcaa

SEQ ID NO: 25994 - DNA, 15 bp, Homo sapiens
gcatttcaaagagca

SEQ ID NO: 25995 - DNA, 15 bp, Homo sapiens
ggcatttcaaagagc

SEQ ID NO: 25996 - DNA, 15 bp, Homo sapiens
gggcatttcaaagag

SEQ ID NO: 25997 - DNA, 15 bp, Homo sapiens
agggcatttcaaaga

SEQ ID NO: 25998 - DNA, 15 bp, Homo sapiens
aagggcatttcaaag

SEQ ID NO: 25999 - DNA, 15 bp, Homo sapiens
aaagggcatttcaaa

SEQ ID NO: 26000 - DNA, 15 bp, Homo sapiens
caaagggcatttcaa

SEQ ID NO: 26001 - DNA, 15 bp, Homo sapiens
tcaaagggcatttca

SEQ ID NO: 26002 - DNA, 15 bp, Homo sapiens
ttcaaagggcatttc

SEQ ID NO: 26003 - DNA, 15 bp, Homo sapiens
cttcaaagggcattt

SEQ ID NO: 26004 - DNA, 15 bp, Homo sapiens
acttcaaagggcatt

SEQ ID NO: 26005 - DNA, 15 bp, Homo sapiens
gacttcaaagggcat

SEQ ID NO: 26006 - DNA, 15 bp, Homo sapiens
agacttcaaagggca

SEQ ID NO: 26007 - DNA, 15 bp, Homo sapiens
cagacttcaaagggc

SEQ ID NO: 26008 - DNA, 15 bp, Homo sapiens
ccagacttcaaaggg

SEQ ID NO: 26009 - DNA, 15 bp, Homo sapiens
gccagacttcaaagg

SEQ ID NO: 26010 - DNA, 15 bp, Homo sapiens
agccagacttcaaag

SEQ ID NO: 26011 - DNA, 15 bp, Homo sapiens
cagccagacttcaaa

SEQ ID NO: 26012 - DNA, 15 bp, Homo sapiens
tcagccagacttcaa

SEQ ID NO: 26013 - DNA, 15 bp, Homo sapiens
ttcagccagacttca

SEQ ID NO: 26014 - DNA, 15 bp, Homo sapiens
gttcagccagacttc

SEQ ID NO: 26015 - DNA, 15 bp, Homo sapiens
tgttcagccagactt

SEQ ID NO: 26016 - DNA, 15 bp, Homo sapiens
gtgttcagccagact

SEQ ID NO: 26017 - DNA, 15 bp, Homo sapiens
agtgttcagccagac

SEQ ID NO: 26018 - DNA, 15 bp, Homo sapiens
cagtgttcagccaga

SEQ ID NO: 26019 - DNA, 15 bp, Homo sapiens
ccagtgttcagccag

SEQ ID NO: 26020 - DNA, 15 bp, Homo sapiens
cccagtgttcagcca

SEQ ID NO: 26021 - DNA, 15 bp, Homo sapiens
gcccagtgttcagcc

SEQ ID NO: 26022 - DNA, 15 bp, Homo sapiens
agcccagtgttcagc

SEQ ID NO: 26023 - DNA, 15 bp, Homo sapiens
cagcccagtgttcag

SEQ ID NO: 26024 - DNA, 15 bp, Homo sapiens
gcagcccagtgttca

SEQ ID NO: 26025 - DNA, 15 bp, Homo sapiens
tgcagcccagtgttc

SEQ ID NO: 26026 - DNA, 15 bp, Homo sapiens
atgcagcccagtgtt

SEQ ID NO: 26027 - DNA, 15 bp, Homo sapiens
aatgcagcccagtgt

SEQ ID NO: 26028 - DNA, 15 bp, Homo sapiens
gaatgcagcccagtg

SEQ ID NO: 26029 - DNA, 15 bp, Homo sapiens
tgaatgcagcccagt

SEQ ID NO: 26030 - DNA, 15 bp, Homo sapiens
ctgaatgcagcccag

SEQ ID NO: 26031 - DNA, 15 bp, Homo sapiens
tctgaatgcagccca

SEQ ID NO: 26032 - DNA, 15 bp, Homo sapiens
atctgaatgcagccc

SEQ ID NO: 26033 - DNA, 15 bp, Homo sapiens
aatctgaatgcagcc

SEQ ID NO: 26034 - DNA, 15 bp, Homo sapiens
gaatctgaatgcagc

SEQ ID NO: 26035 - DNA, 15 bp, Homo sapiens
agaatctgaatgcag

SEQ ID NO: 26036 - DNA, 15 bp, Homo sapiens
aagaatctgaatgca

SEQ ID NO: 26037 - DNA, 15 bp, Homo sapiens
gaagaatctgaatgc

SEQ ID NO: 26038 - DNA, 15 bp, Homo sapiens
tgaagaatctgaatg

SEQ ID NO: 26039 - DNA, 15 bp, Homo sapiens
ctgaagaatctgaat

SEQ ID NO: 26040 - DNA, 15 bp, Homo sapiens
actgaagaatctgaa

SEQ ID NO: 26041 - DNA, 15 bp, Homo sapiens
cactgaagaatctga

SEQ ID NO: 26042 - DNA, 15 bp, Homo sapiens
ccactgaagaatctg

SEQ ID NO: 26043 - DNA, 15 bp, Homo sapiens
gccactgaagaatct

SEQ ID NO: 26044 - DNA, 15 bp, Homo sapiens
ggccactgaagaatc

SEQ ID NO: 26045 - DNA, 15 bp, Homo sapiens
tggccactgaagaat

SEQ ID NO: 26046 - DNA, 15 bp, Homo sapiens
gtggccactgaagaa

SEQ ID NO: 26047 - DNA, 15 bp, Homo sapiens
ggtggccactgaaga

SEQ ID NO: 26048 - DNA, 15 bp, Homo sapiens
tggtggccactgaag

SEQ ID NO: 26049 - DNA, 15 bp, Homo sapiens
ctggtggccactgaa

SEQ ID NO: 26050 - DNA, 15 bp, Homo sapiens
tctggtggccactga

SEQ ID NO: 26051 - DNA, 15 bp, Homo sapiens
ttctggtggccactg

SEQ ID NO: 26052 - DNA, 15 bp, Homo sapiens
gttctggtggccact

SEQ ID NO: 26053 - DNA, 15 bp, Homo sapiens
tgttctggtggccac

SEQ ID NO: 26054 - DNA, 15 bp, Homo sapiens
atgttctggtggcca

SEQ ID NO: 26055 - DNA, 15 bp, Homo sapiens
aatgttctggtggcc

SEQ ID NO: 26056 - DNA, 15 bp, Homo sapiens
gaatgttctggtggc

SEQ ID NO: 26057 - DNA, 15 bp, Homo sapiens
agaatgttctggtgg

SEQ ID NO: 26058 - DNA, 15 bp, Homo sapiens
cagaatgttctggtg

SEQ ID NO: 26059 - DNA, 15 bp, Homo sapiens
acagaatgttctggt

SEQ ID NO: 26060 - DNA, 15 bp, Homo sapiens
aacagaatgttctgg

SEQ ID NO: 26061 - DNA, 15 bp, Homo sapiens
aaacagaatgttctg

SEQ ID NO: 26062 - DNA, 15 bp, Homo sapiens
aaaacagaatgttct

SEQ ID NO: 26063 - DNA, 15 bp, Homo sapiens
gaaaacagaatgttc

SEQ ID NO: 26064 - DNA, 15 bp, Homo sapiens
agaaaacagaatgtt

SEQ ID NO: 26065 - DNA, 15 bp, Homo sapiens
aagaaaacagaatgt

SEQ ID NO: 26066 - DNA, 15 bp, Homo sapiens
gaagaaaacagaatg

SEQ ID NO: 26067 - DNA, 15 bp, Homo sapiens
agaagaaaacagaat

SEQ ID NO: 26068 - DNA, 15 bp, Homo sapiens
cagaagaaaacagaa

SEQ ID NO: 26069 - DNA, 15 bp, Homo sapiens
gcagaagaaaacaga

SEQ ID NO: 26070 - DNA, 15 bp, Homo sapiens
tgcagaagaaaacag

SEQ ID NO: 26071 - DNA, 15 bp, Homo sapiens
gtgcagaagaaaaca

SEQ ID NO: 26072 - DNA, 15 bp, Homo sapiens
tgtgcagaagaaaac

SEQ ID NO: 26073 - DNA, 15 bp, Homo sapiens
atgtgcagaagaaaa

SEQ ID NO: 26074 - DNA, 15 bp, Homo sapiens
gatgtgcagaagaaa

SEQ ID NO: 26075 - DNA, 15 bp, Homo sapiens
agatgtgcagaagaa

SEQ ID NO: 26076 - DNA, 15 bp, Homo sapiens
aagatgtgcagaaga

SEQ ID NO: 26077 - DNA, 15 bp, Homo sapiens
taagatgtgcagaag

SEQ ID NO: 26078 - DNA, 15 bp, Homo sapiens
gtaagatgtgcagaa

SEQ ID NO: 26079 - DNA, 15 bp, Homo sapiens
ggtaagatgtgcaga

SEQ ID NO: 26080 - DNA, 15 bp, Homo sapiens
aggtaagatgtgcag

SEQ ID NO: 26081 - DNA, 15 bp, Homo sapiens
aaggtaagatgtgca

SEQ ID NO: 26082 - DNA, 15 bp, Homo sapiens
aaaggtaagatgtgc

SEQ ID NO: 26083 - DNA, 15 bp, Homo sapiens
caaaggtaagatgtg

SEQ ID NO: 26084 - DNA, 15 bp, Homo sapiens
gcaaaggtaagatgt

SEQ ID NO: 26085 - DNA, 15 bp, Homo sapiens
tgcaaaggtaagatg

SEQ ID NO: 26086 - DNA, 15 bp, Homo sapiens
gtgcaaaggtaagat

SEQ ID NO: 26087 - DNA, 15 bp, Homo sapiens
tgtgcaaaggtaaga

SEQ ID NO: 26088 - DNA, 15 bp, Homo sapiens
gtgtgcaaaggtaag

SEQ ID NO: 26089 - DNA, 15 bp, Homo sapiens
ggtgtgcaaaggtaa

SEQ ID NO: 26090 - DNA, 15 bp, Homo sapiens
gggtgtgcaaaggta

SEQ ID NO: 26091 - DNA, 15 bp, Homo sapiens
agggtgtgcaaaggt

SEQ ID NO: 26092 - DNA, 15 bp, Homo sapiens
cagggtgtgcaaagg

SEQ ID NO: 26093 - DNA, 15 bp, Homo sapiens
gcagggtgtgcaaag

SEQ ID NO: 26094 - DNA, 15 bp, Homo sapiens
agcagggtgtgcaaa

SEQ ID NO: 26095 - DNA, 15 bp, Homo sapiens
aagcagggtgtgcaa

SEQ ID NO: 26096 - DNA, 15 bp, Homo sapiens
taagcagggtgtgca

SEQ ID NO: 26097 - DNA, 15 bp, Homo sapiens
ataagcagggtgtgc

SEQ ID NO: 26098 - DNA, 15 bp, Homo sapiens
aataagcagggtgtg

SEQ ID NO: 26099 - DNA, 15 bp, Homo sapiens
taataagcagggtgt

SEQ ID NO: 26100 - DNA, 15 bp, Homo sapiens
ataataagcagggtg

SEQ ID NO: 26101 - DNA, 15 bp, Homo sapiens
cataataagcagggt

SEQ ID NO: 26102 - DNA, 15 bp, Homo sapiens
acataataagcaggg

SEQ ID NO: 26103 - DNA, 15 bp, Homo sapiens
aacataataagcagg

SEQ ID NO: 26104 - DNA, 15 bp, Homo sapiens
gaacataataagcag

SEQ ID NO: 26105 - DNA, 15 bp, Homo sapiens
ggaacataataagca

SEQ ID NO: 26106 - DNA, 15 bp, Homo sapiens
gggaacataataagc

SEQ ID NO: 26107 - DNA, 15 bp, Homo sapiens
ggggaacataataag

SEQ ID NO: 26108 - DNA, 15 bp, Homo sapiens
gggggaacataataa

SEQ ID NO: 26109 - DNA, 15 bp, Homo sapiens
tgggggaacataata

SEQ ID NO: 26110 - DNA, 15 bp, Homo sapiens
ctgggggaacataat

SEQ ID NO: 26111 - DNA, 15 bp, Homo sapiens
tctgggggaacataa

SEQ ID NO: 26112 - DNA, 15 bp, Homo sapiens
ttctgggggaacata

SEQ ID NO: 26113 - DNA, 15 bp, Homo sapiens
cttctgggggaacat

SEQ ID NO: 26114 - DNA, 15 bp, Homo sapiens
gcttctgggggaaca

SEQ ID NO: 26115 - DNA, 15 bp, Homo sapiens
ggcttctgggggaac

SEQ ID NO: 26116 - DNA, 15 bp, Homo sapiens
gggcttctgggggaa

SEQ ID NO: 26117 - DNA, 15 bp, Homo sapiens
tgggcttctggggga

SEQ ID NO: 26118 - DNA, 15 bp, Homo sapiens
ttgggcttctggggg

SEQ ID NO: 26119 - DNA, 15 bp, Homo sapiens
gttgggcttctgggg

SEQ ID NO: 26120 - DNA, 15 bp, Homo sapiens
ggttgggcttctggg

SEQ ID NO: 26121 - DNA, 15 bp, Homo sapiens
gggttgggcttctgg

SEQ ID NO: 26122 - DNA, 15 bp, Homo sapiens
agggttgggcttctg

SEQ ID NO: 26123 - DNA, 15 bp, Homo sapiens
gagggttgggcttct

SEQ ID NO: 26124 - DNA, 15 bp, Homo sapiens
agagggttgggcttc

SEQ ID NO: 26125 - DNA, 15 bp, Homo sapiens
gagagggttgggctt

SEQ ID NO: 26126 - DNA, 15 bp, Homo sapiens
ggagagggttgggct

SEQ ID NO: 26127 - DNA, 15 bp, Homo sapiens
tggagagggttgggc

SEQ ID NO: 26128 - DNA, 15 bp, Homo sapiens
gtggagagggttggg

SEQ ID NO: 26129 - DNA, 15 bp, Homo sapiens
ggtggagagggttgg

SEQ ID NO: 26130 - DNA, 15 bp, Homo sapiens
tggtggagagggttg

SEQ ID NO: 26131 - DNA, 15 bp, Homo sapiens
ctggtggagagggtt

SEQ ID NO: 26132 - DNA, 15 bp, Homo sapiens
cctggtggagagggt

SEQ ID NO: 26133 - DNA, 15 bp, Homo sapiens
ccctggtggagaggg

SEQ ID NO: 26134 - DNA, 15 bp, Homo sapiens
cccctggtggagagg

SEQ ID NO: 26135 - DNA, 15 bp, Homo sapiens
gcccctggtggagag

SEQ ID NO: 26136 - DNA, 15 bp, Homo sapiens
agcccctggtggaga

SEQ ID NO: 26137 - DNA, 15 bp, Homo sapiens
cagcccctggtggag

SEQ ID NO: 26138 - DNA, 15 bp, Homo sapiens
tcagcccctggtgga

SEQ ID NO: 26139 - DNA, 15 bp, Homo sapiens
atcagcccctggtgg

SEQ ID NO: 26140 - DNA, 15 bp, Homo sapiens
aatcagcccctggtg

SEQ ID NO: 26141 - DNA, 15 bp, Homo sapiens
taatcagcccctggt

SEQ ID NO: 26142 - DNA, 15 bp, Homo sapiens
ctaatcagcccctgg

SEQ ID NO: 26143 - DNA, 15 bp, Homo sapiens
cctaatcagcccctg

SEQ ID NO: 26144 - DNA, 15 bp, Homo sapiens
tcctaatcagcccct

SEQ ID NO: 26145 - DNA, 15 bp, Homo sapiens
ctcctaatcagcccc

SEQ ID NO: 26146 - DNA, 15 bp, Homo sapiens
cctcctaatcagccc

SEQ ID NO: 26147 - DNA, 15 bp, Homo sapiens
gcctcctaatcagcc

SEQ ID NO: 26148 - DNA, 15 bp, Homo sapiens
agcctcctaatcagc

SEQ ID NO: 26149 - DNA, 15 bp, Homo sapiens
cagcctcctaatcag

SEQ ID NO: 26150 - DNA, 15 bp, Homo sapiens
gcagcctcctaatca

SEQ ID NO: 26151 - DNA, 15 bp, Homo sapiens
tgcagcctcctaatc

SEQ ID NO: 26152 - DNA, 15 bp, Homo sapiens
ctgcagcctcctaat

SEQ ID NO: 26153 - DNA, 15 bp, Homo sapiens
cctgcagcctcctaa

SEQ ID NO: 26154 - DNA, 15 bp, Homo sapiens
tcctgcagcctccta

SEQ ID NO: 26155 - DNA, 15 bp, Homo sapiens
atcctgcagcctcct

SEQ ID NO: 26156 - DNA, 15 bp, Homo sapiens
tatcctgcagcctcc

SEQ ID NO: 26157 - DNA, 15 bp, Homo sapiens
ttatcctgcagcctc

SEQ ID NO: 26158 - DNA, 15 bp, Homo sapiens
tttatcctgcagcct

SEQ ID NO: 26159 - DNA, 15 bp, Homo sapiens
atttatcctgcagcc

SEQ ID NO: 26160 - DNA, 15 bp, Homo sapiens
catttatcctgcagc

SEQ ID NO: 26161 - DNA, 15 bp, Homo sapiens
acatttatcctgcag

SEQ ID NO: 26162 - DNA, 15 bp, Homo sapiens
aacatttatcctgca

SEQ ID NO: 26163 - DNA, 15 bp, Homo sapiens
aaacatttatcctgc

SEQ ID NO: 26164 - DNA, 15 bp, Homo sapiens
taaacatttatcctg

SEQ ID NO: 26165 - DNA, 15 bp, Homo sapiens
ttaaacatttatcct

SEQ ID NO: 26166 - DNA, 15 bp, Homo sapiens
tttaaacatttatcc

SEQ ID NO: 26167 - DNA, 15 bp, Homo sapiens
ttttaaacatttatc

SEQ ID NO: 26168 - DNA, 15 bp, Homo sapiens
cttttaaacatttat

SEQ ID NO: 26169 - DNA, 15 bp, Homo sapiens
tcttttaaacattta

SEQ ID NO: 26170 - DNA, 15 bp, Homo sapiens
ttcttttaaacattt

SEQ ID NO: 26171 - DNA, 15 bp, Homo sapiens
attcttttaaacatt

SEQ ID NO: 26172 - DNA, 15 bp, Homo sapiens
cattcttttaaacat

SEQ ID NO: 26173 - DNA, 15 bp, Homo sapiens
tcattcttttaaaca

SEQ ID NO: 26174 - DNA, 15 bp, Homo sapiens
ttcattcttttaaac

SEQ ID NO: 26175 - DNA, 15 bp, Homo sapiens
cttcattcttttaaa

SEQ ID NO: 26176 - DNA, 15 bp, Homo sapiens
tcttcattcttttaa

SEQ ID NO: 26177 - DNA, 15 bp, Homo sapiens
atcttcattctttta

SEQ ID NO: 26178 - DNA, 15 bp, Homo sapiens
catcttcattctttt

SEQ ID NO: 26179 - DNA, 15 bp, Homo sapiens
acatcttcattcttt

SEQ ID NO: 26180 - DNA, 15 bp, Homo sapiens
cacatcttcattctt

SEQ ID NO: 26181 - DNA, 15 bp, Homo sapiens
acacatcttcattct

SEQ ID NO: 26182 - DNA, 15 bp, Homo sapiens
cacacatcttcattc

SEQ ID NO: 26183 - DNA, 15 bp, Homo sapiens
acacacatcttcatt

SEQ ID NO: 26184 - DNA, 15 bp, Homo sapiens
cacacacatcttcat

SEQ ID NO: 26185 - DNA, 15 bp, Homo sapiens
gcacacacatcttca

SEQ ID NO: 26186 - DNA, 15 bp, Homo sapiens
tgcacacacatcttc

SEQ ID NO: 26187 - DNA, 15 bp, Homo sapiens
gtgcacacacatctt

SEQ ID NO: 26188 - DNA, 15 bp, Homo sapiens
cgtgcacacacatct

SEQ ID NO: 26189 - DNA, 15 bp, Homo sapiens
gcgtgcacacacatc

SEQ ID NO: 26190 - DNA, 15 bp, Homo sapiens
cgcgtgcacacacat

SEQ ID NO: 26191 - DNA, 15 bp, Homo sapiens
gcgcgtgcacacaca

SEQ ID NO: 26192 - DNA, 15 bp, Homo sapiens
tgcgcgtgcacacac

SEQ ID NO: 26193 - DNA, 15 bp, Homo sapiens
gtgcgcgtgcacaca

SEQ ID NO: 26194 - DNA, 15 bp, Homo sapiens
cgtgcgcgtgcacac

SEQ ID NO: 26195 - DNA, 15 bp, Homo sapiens
acgtgcgcgtgcaca

SEQ ID NO: 26196 - DNA, 15 bp, Homo sapiens
cacgtgcgcgtgcac

SEQ ID NO: 26197 - DNA, 15 bp, Homo sapiens
acacgtgcgcgtgca

SEQ ID NO: 26198 - DNA, 15 bp, Homo sapiens
cacacgtgcgcgtgc

SEQ ID NO: 26199 - DNA, 15 bp, Homo sapiens
tcacacgtgcgcgtg

SEQ ID NO: 26200 - DNA, 15 bp, Homo sapiens
gtcacacgtgcgcgt

SEQ ID NO: 26201 - DNA, 15 bp, Homo sapiens
tgtcacacgtgcgcg

SEQ ID NO: 26202 - DNA, 15 bp, Homo sapiens
atgtcacacgtgcgc

SEQ ID NO: 26203 - DNA, 15 bp, Homo sapiens
gatgtcacacgtgcg

SEQ ID NO: 26204 - DNA, 15 bp, Homo sapiens
agatgtcacacgtgc

SEQ ID NO: 26205 - DNA, 15 bp, Homo sapiens
gagatgtcacacgtg

SEQ ID NO: 26206 - DNA, 15 bp, Homo sapiens
ggagatgtcacacgt

SEQ ID NO: 26207 - DNA, 15 bp, Homo sapiens
tggagatgtcacacg

SEQ ID NO: 26208 - DNA, 15 bp, Homo sapiens
atggagatgtcacac

SEQ ID NO: 26209 - DNA, 15 bp, Homo sapiens
catggagatgtcaca

SEQ ID NO: 26210 - DNA, 15 bp, Homo sapiens
gcatggagatgtcac

SEQ ID NO: 26211 - DNA, 15 bp, Homo sapiens
ggcatggagatgtca

SEQ ID NO: 26212 - DNA, 15 bp, Homo sapiens
tggcatggagatgtc

SEQ ID NO: 26213 - DNA, 15 bp, Homo sapiens
gtggcatggagatgt

SEQ ID NO: 26214 - DNA, 15 bp, Homo sapiens
tgtggcatggagatg

SEQ ID NO: 26215 - DNA, 15 bp, Homo sapiens
ctgtggcatggagat

SEQ ID NO: 26216 - DNA, 15 bp, Homo sapiens
actgtggcatggaga

SEQ ID NO: 26217 - DNA, 15 bp, Homo sapiens
gactgtggcatggag

SEQ ID NO: 26218 - DNA, 15 bp, Homo sapiens
tgactgtggcatgga

SEQ ID NO: 26219 - DNA, 15 bp, Homo sapiens
atgactgtggcatgg

SEQ ID NO: 26220 - DNA, 15 bp, Homo sapiens
catgactgtggcatg

SEQ ID NO: 26221 - DNA, 15 bp, Homo sapiens
acatgactgtggcat

SEQ ID NO: 26222 - DNA, 15 bp, Homo sapiens
aacatgactgtggca

SEQ ID NO: 26223 - DNA, 15 bp, Homo sapiens
aaacatgactgtggc

SEQ ID NO: 26224 - DNA, 15 bp, Homo sapiens
taaacatgactgtgg

SEQ ID NO: 26225 - DNA, 15 bp, Homo sapiens
ataaacatgactgtg

SEQ ID NO: 26226 - DNA, 15 bp, Homo sapiens
aataaacatgactgt

SEQ ID NO: 26227 - DNA, 15 bp, Homo sapiens
gaataaacatgactg

SEQ ID NO: 26228 - DNA, 15 bp, Homo sapiens
ggaataaacatgact

SEQ ID NO: 26229 - DNA, 15 bp, Homo sapiens
tggaataaacatgac

SEQ ID NO: 26230 - DNA, 15 bp, Homo sapiens
gtggaataaacatga

SEQ ID NO: 26231 - DNA, 15 bp, Homo sapiens
cgtggaataaacatg

SEQ ID NO: 26232 - DNA, 15 bp, Homo sapiens
acgtggaataaacat

SEQ ID NO: 26233 - DNA, 15 bp, Homo sapiens
gacgtggaataaaca

SEQ ID NO: 26234 - DNA, 15 bp, Homo sapiens
agacgtggaataaac

SEQ ID NO: 26235 - DNA, 15 bp, Homo sapiens
tagacgtggaataaa

SEQ ID NO: 26236 - DNA, 15 bp, Homo sapiens
atagacgtggaataa

SEQ ID NO: 26237 - DNA, 15 bp, Homo sapiens
aatagacgtggaata

SEQ ID NO: 26238 - DNA, 15 bp, Homo sapiens
gaatagacgtggaat

SEQ ID NO: 26239 - DNA, 15 bp, Homo sapiens
agaatagacgtggaa

SEQ ID NO: 26240 - DNA, 15 bp, Homo sapiens
gagaatagacgtgga

SEQ ID NO: 26241 - DNA, 15 bp, Homo sapiens
ggagaatagacgtgg

SEQ ID NO: 26242 - DNA, 15 bp, Homo sapiens
gggagaatagacgtg

SEQ ID NO: 26243 - DNA, 15 bp, Homo sapiens
tgggagaatagacgt

SEQ ID NO: 26244 - DNA, 15 bp, Homo sapiens
gtgggagaatagacg

SEQ ID NO: 26245 - DNA, 15 bp, Homo sapiens
tgtgggagaatagac

SEQ ID NO: 26246 - DNA, 15 bp, Homo sapiens
ctgtgggagaataga

SEQ ID NO: 26247 - DNA, 15 bp, Homo sapiens
tctgtgggagaatag

SEQ ID NO: 26248 - DNA, 15 bp, Homo sapiens
atctgtgggagaata

SEQ ID NO: 26249 - DNA, 15 bp, Homo sapiens
gatctgtgggagaat

SEQ ID NO: 26250 - DNA, 15 bp, Homo sapiens
cgatctgtgggagaa

SEQ ID NO: 26251 - DNA, 15 bp, Homo sapiens
acgatctgtgggaga

SEQ ID NO: 26252 - DNA, 15 bp, Homo sapiens
cacgatctgtgggag

SEQ ID NO: 26253 - DNA, 15 bp, Homo sapiens
gcacgatctgtggga

SEQ ID NO: 26254 - DNA, 15 bp, Homo sapiens
agcacgatctgtggg

SEQ ID NO: 26255 - DNA, 15 bp, Homo sapiens
gagcacgatctgtgg

SEQ ID NO: 26256 - DNA, 15 bp, Homo sapiens
ggagcacgatctgtg

SEQ ID NO: 26257 - DNA, 15 bp, Homo sapiens
gggagcacgatctgt

SEQ ID NO: 26258 - DNA, 15 bp, Homo sapiens
cgggagcacgatctg

SEQ ID NO: 26259 - DNA, 15 bp, Homo sapiens
ccgggagcacgatct

SEQ ID NO: 26260 - DNA, 15 bp, Homo sapiens
gccgggagcacgatc

SEQ ID NO: 26261 - DNA, 15 bp, Homo sapiens
agccgggagcacgat

SEQ ID NO: 26262 - DNA, 15 bp, Homo sapiens
tagccgggagcacga

SEQ ID NO: 26263 - DNA, 15 bp, Homo sapiens
gtagccgggagcacg

SEQ ID NO: 26264 - DNA, 15 bp, Homo sapiens
ggtagccgggagcac

SEQ ID NO: 26265 - DNA, 15 bp, Homo sapiens
aggtagccgggagca

SEQ ID NO: 26266 - DNA, 15 bp, Homo sapiens
aaggtagccgggagc

SEQ ID NO: 26267 - DNA, 15 bp, Homo sapiens
aaaggtagccgggag

SEQ ID NO: 26268 - DNA, 15 bp, Homo sapiens
caaaggtagccggga

SEQ ID NO: 26269 - DNA, 15 bp, Homo sapiens
acaaaggtagccggg

SEQ ID NO: 26270 - DNA, 15 bp, Homo sapiens
cacaaaggtagccgg

SEQ ID NO: 26271 - DNA, 15 bp, Homo sapiens
acacaaaggtagccg

SEQ ID NO: 26272 - DNA, 15 bp, Homo sapiens
aacacaaaggtagcc

SEQ ID NO: 26273 - DNA, 15 bp, Homo sapiens
aaacacaaaggtagc

SEQ ID NO: 26274 - DNA, 15 bp, Homo sapiens
aaaacacaaaggtag

SEQ ID NO: 26275 - DNA, 15 bp, Homo sapiens
aaaaacacaaaggta

SEQ ID NO: 26276 - DNA, 15 bp, Homo sapiens
caaaaacacaaaggt

SEQ ID NO: 26277 - DNA, 15 bp, Homo sapiens
ccaaaaacacaaagg

SEQ ID NO: 26278 - DNA, 15 bp, Homo sapiens
gccaaaaacacaaag

SEQ ID NO: 26279 - DNA, 15 bp, Homo sapiens
agccaaaaacacaaa

SEQ ID NO: 26280 - DNA, 15 bp, Homo sapiens
gagccaaaaacacaa

SEQ ID NO: 26281 - DNA, 15 bp, Homo sapiens
agagccaaaaacaca

SEQ ID NO: 26282 - DNA, 15 bp, Homo sapiens
cagagccaaaaacac

SEQ ID NO: 26283 - DNA, 15 bp, Homo sapiens
tcagagccaaaaaca

SEQ ID NO: 26284 - DNA, 15 bp, Homo sapiens
atcagagccaaaaac

SEQ ID NO: 26285 - DNA, 15 bp, Homo sapiens
catcagagccaaaaa

SEQ ID NO: 26286 - DNA, 15 bp, Homo sapiens
gcatcagagccaaaa

SEQ ID NO: 26287 - DNA, 15 bp, Homo sapiens
agcatcagagccaaa

SEQ ID NO: 26288 - DNA, 15 bp, Homo sapiens
aagcatcagagccaa

SEQ ID NO: 26289 - DNA, 15 bp, Homo sapiens
aaagcatcagagcca

SEQ ID NO: 26290 - DNA, 15 bp, Homo sapiens
gaaagcatcagagcc

SEQ ID NO: 26291 - DNA, 15 bp, Homo sapiens
agaaagcatcagagc

SEQ ID NO: 26292 - DNA, 15 bp, Homo sapiens
tagaaagcatcagag

SEQ ID NO: 26293 - DNA, 15 bp, Homo sapiens
atagaaagcatcaga

SEQ ID NO: 26294 - DNA, 15 bp, Homo sapiens
aatagaaagcatcag

SEQ ID NO: 26295 - DNA, 15 bp, Homo sapiens
caatagaaagcatca

SEQ ID NO: 26296 - DNA, 15 bp, Homo sapiens
acaatagaaagcatc

SEQ ID NO: 26297 - DNA, 15 bp, Homo sapiens
aacaatagaaagcat

SEQ ID NO: 26298 - DNA, 15 bp, Homo sapiens
taacaatagaaagca

SEQ ID NO: 26299 - DNA, 15 bp, Homo sapiens
ataacaatagaaagc

SEQ ID NO: 26300 - DNA, 15 bp, Homo sapiens
gataacaatagaaag

SEQ ID NO: 26301 - DNA, 15 bp, Homo sapiens
ggataacaatagaaa

SEQ ID NO: 26302 - DNA, 15 bp, Homo sapiens
gggataacaatagaa

SEQ ID NO: 26303 - DNA, 15 bp, Homo sapiens
agggataacaataga

SEQ ID NO: 26304 - DNA, 15 bp, Homo sapiens
gagggataacaatag

SEQ ID NO: 26305 - DNA, 15 bp, Homo sapiens
ggagggataacaata

SEQ ID NO: 26306 - DNA, 15 bp, Homo sapiens
aggagggataacaat

SEQ ID NO: 26307 - DNA, 15 bp, Homo sapiens
aaggagggataacaa

SEQ ID NO: 26308 - DNA, 15 bp, Homo sapiens
aaaggagggataaca

SEQ ID NO: 26309 - DNA, 15 bp, Homo sapiens
aaaaggagggataac

SEQ ID NO: 26310 - DNA, 15 bp, Homo sapiens
caaaaggagggataa

SEQ ID NO: 26311 - DNA, 15 bp, Homo sapiens
ccaaaaggagggata

SEQ ID NO: 26312 - DNA, 15 bp, Homo sapiens
gccaaaaggagggat

SEQ ID NO: 26313 - DNA, 15 bp, Homo sapiens
cgccaaaaggaggga

SEQ ID NO: 26314 - DNA, 15 bp, Homo sapiens
tcgccaaaaggaggg

SEQ ID NO: 26315 - DNA, 15 bp, Homo sapiens
ttcgccaaaaggagg

SEQ ID NO: 26316 - DNA, 15 bp, Homo sapiens
attcgccaaaaggag

SEQ ID NO: 26317 - DNA, 15 bp, Homo sapiens
tattcgccaaaagga

SEQ ID NO: 26318 - DNA, 15 bp, Homo sapiens
gtattcgccaaaagg

SEQ ID NO: 26319 - DNA, 15 bp, Homo sapiens
ggtattcgccaaaag

SEQ ID NO: 26320 - DNA, 15 bp, Homo sapiens
gggtattcgccaaaa

SEQ ID NO: 26321 - DNA, 15 bp, Homo sapiens
ggggtattcgccaaa

SEQ ID NO: 26322 - DNA, 15 bp, Homo sapiens
cggggtattcgccaa

SEQ ID NO: 26323 - DNA, 15 bp, Homo sapiens
gcggggtattcgcca

SEQ ID NO: 26324 - DNA, 15 bp, Homo sapiens
agcggggtattcgcc

SEQ ID NO: 26325 - DNA, 15 bp, Homo sapiens
aagcggggtattcgc

SEQ ID NO: 26326 - DNA, 15 bp, Homo sapiens
aaagcggggtattcg

SEQ ID NO: 26327 - DNA, 15 bp, Homo sapiens
caaagcggggtattc

SEQ ID NO: 26328 - DNA, 15 bp, Homo sapiens
tcaaagcggggtatt

SEQ ID NO: 26329 - DNA, 15 bp, Homo sapiens
gtcaaagcggggtat

SEQ ID NO: 26330 - DNA, 15 bp, Homo sapiens
ggtcaaagcggggta

SEQ ID NO: 26331 - DNA, 15 bp, Homo sapiens
gggtcaaagcggggt

SEQ ID NO: 26332 - DNA, 15 bp, Homo sapiens
agggtcaaagcgggg

SEQ ID NO: 26333 - DNA, 15 bp, Homo sapiens
aagggtcaaagcggg

SEQ ID NO: 26334 - DNA, 15 bp, Homo sapiens
gaagggtcaaagcgg

SEQ ID NO: 26335 - DNA, 15 bp, Homo sapiens
tgaagggtcaaagcg

SEQ ID NO: 26336 - DNA, 15 bp, Homo sapiens
gtgaagggtcaaagc

SEQ ID NO: 26337 - DNA, 15 bp, Homo sapiens
ggtgaagggtcaaag

SEQ ID NO: 26338 - DNA, 15 bp, Homo sapiens
gggtgaagggtcaaa

SEQ ID NO: 26339 - DNA, 15 bp, Homo sapiens
ggggtgaagggtcaa

SEQ ID NO: 26340 - DNA, 15 bp, Homo sapiens
aggggtgaagggtca

SEQ ID NO: 26341 - DNA, 15 bp, Homo sapiens
caggggtgaagggtc

SEQ ID NO: 26342 - DNA, 15 bp, Homo sapiens
ccaggggtgaagggt

SEQ ID NO: 26343 - DNA, 15 bp, Homo sapiens
tccaggggtgaaggg

SEQ ID NO: 26344 - DNA, 15 bp, Homo sapiens
atccaggggtgaagg

SEQ ID NO: 26345 - DNA, 15 bp, Homo sapiens
tatccaggggtgaag

SEQ ID NO: 26346 - DNA, 15 bp, Homo sapiens
atatccaggggtgaa

SEQ ID NO: 26347 - DNA, 15 bp, Homo sapiens
tatatccaggggtga

SEQ ID NO: 26348 - DNA, 15 bp, Homo sapiens
atatatccaggggtg

SEQ ID NO: 26349 - DNA, 15 bp, Homo sapiens
catatatccaggggt

SEQ ID NO: 26350 - DNA, 15 bp, Homo sapiens
ccatatatccagggg

SEQ ID NO: 26351 - DNA, 15 bp, Homo sapiens
cccatatatccaggg

SEQ ID NO: 26352 - DNA, 15 bp, Homo sapiens
gcccatatatccagg

SEQ ID NO: 26353 - DNA, 15 bp, Homo sapiens
tgcccatatatccag

SEQ ID NO: 26354 - DNA, 15 bp, Homo sapiens
ctgcccatatatcca

SEQ ID NO: 26355 - DNA, 15 bp, Homo sapiens
gctgcccatatatcc

SEQ ID NO: 26356 - DNA, 15 bp, Homo sapiens
tgctgcccatatatc

SEQ ID NO: 26357 - DNA, 15 bp, Homo sapiens
ctgctgcccatatat

SEQ ID NO: 26358 - DNA, 15 bp, Homo sapiens
actgctgcccatata

SEQ ID NO: 26359 - DNA, 15 bp, Homo sapiens
tactgctgcccatat

SEQ ID NO: 26360 - DNA, 15 bp, Homo sapiens
gtactgctgcccata

SEQ ID NO: 26361 - DNA, 15 bp, Homo sapiens
tgtactgctgcccat

SEQ ID NO: 26362 - DNA, 15 bp, Homo sapiens
gtgtactgctgccca

SEQ ID NO: 26363 - DNA, 15 bp, Homo sapiens
ggtgtactgctgccc

SEQ ID NO: 26364 - DNA, 15 bp, Homo sapiens
aggtgtactgctgcc

SEQ ID NO: 26365 - DNA, 15 bp, Homo sapiens
aaggtgtactgctgc

SEQ ID NO: 26366 - DNA, 15 bp, Homo sapiens
gaaggtgtactgctg

SEQ ID NO: 26367 - DNA, 15 bp, Homo sapiens
agaaggtgtactgct

SEQ ID NO: 26368 - DNA, 15 bp, Homo sapiens
aagaaggtgtactgc

SEQ ID NO: 26369 - DNA, 15 bp, Homo sapiens
gaagaaggtgtactg

SEQ ID NO: 26370 - DNA, 15 bp, Homo sapiens
tgaagaaggtgtact

SEQ ID NO: 26371 - DNA, 15 bp, Homo sapiens
ctgaagaaggtgtac

SEQ ID NO: 26372 - DNA, 15 bp, Homo sapiens
cctgaagaaggtgta

SEQ ID NO: 26373 - DNA, 15 bp, Homo sapiens
acctgaagaaggtgt

SEQ ID NO: 26374 - DNA, 15 bp, Homo sapiens
cacctgaagaaggtg

SEQ ID NO: 26375 - DNA, 15 bp, Homo sapiens
gcacctgaagaaggt

SEQ ID NO: 26376 - DNA, 15 bp, Homo sapiens
cgcacctgaagaagg

SEQ ID NO: 26377 - DNA, 15 bp, Homo sapiens
gcgcacctgaagaag

SEQ ID NO: 26378 - DNA, 15 bp, Homo sapiens
cgcgcacctgaagaa

SEQ ID NO: 26379 - DNA, 15 bp, Homo sapiens
ccgcgcacctgaaga

SEQ ID NO: 26380 - DNA, 15 bp, Homo sapiens
tccgcgcacctgaag

SEQ ID NO: 26381 - DNA, 15 bp, Homo sapiens
gtccgcgcacctgaa

SEQ ID NO: 26382 - DNA, 15 bp, Homo sapiens
agtccgcgcacctga

SEQ ID NO: 26383 - DNA, 15 bp, Homo sapiens
gagtccgcgcacctg

SEQ ID NO: 26384 - DNA, 15 bp, Homo sapiens
cgagtccgcgcacct

SEQ ID NO: 26385 - DNA, 15 bp, Homo sapiens
ccgagtccgcgcacc

SEQ ID NO: 26386 - DNA, 15 bp, Homo sapiens
cccgagtccgcgcac

SEQ ID NO: 26387 - DNA, 15 bp, Homo sapiens
ccccgagtccgcgca

SEQ ID NO: 26388 - DNA, 15 bp, Homo sapiens
accccgagtccgcgc

SEQ ID NO: 26389 - DNA, 15 bp, Homo sapiens
gaccccgagtccgcg

SEQ ID NO: 26390 - DNA, 15 bp, Homo sapiens
tgaccccgagtccgc

SEQ ID NO: 26391 - DNA, 15 bp, Homo sapiens
gtgaccccgagtccg

SEQ ID NO: 26392 - DNA, 15 bp, Homo sapiens
ggtgaccccgagtcc

SEQ ID NO: 26393 - DNA, 15 bp, Homo sapiens
tggtgaccccgagtc

SEQ ID NO: 26394 - DNA, 15 bp, Homo sapiens
atggtgaccccgagt

SEQ ID NO: 26395 - DNA, 15 bp, Homo sapiens
aatggtgaccccgag

SEQ ID NO: 26396 - DNA, 15 bp, Homo sapiens
gaatggtgaccccga

SEQ ID NO: 26397 - DNA, 15 bp, Homo sapiens
agaatggtgaccccg

SEQ ID NO: 26398 - DNA, 15 bp, Homo sapiens
gagaatggtgacccc

SEQ ID NO: 26399 - DNA, 15 bp, Homo sapiens
ggagaatggtgaccc

SEQ ID NO: 26400 - DNA, 15 bp, Homo sapiens
aggagaatggtgacc

SEQ ID NO: 26401 - DNA, 15 bp, Homo sapiens
gaggagaatggtgac

SEQ ID NO: 26402 - DNA, 15 bp, Homo sapiens
agaggagaatggtga

SEQ ID NO: 26403 - DNA, 15 bp, Homo sapiens
cagaggagaatggtg

SEQ ID NO: 26404 - DNA, 15 bp, Homo sapiens
acagaggagaatggt

SEQ ID NO: 26405 - DNA, 15 bp, Homo sapiens
cacagaggagaatgg

SEQ ID NO: 26406 - DNA, 15 bp, Homo sapiens
ccacagaggagaatg

SEQ ID NO: 26407 - DNA, 15 bp, Homo sapiens
cccacagaggagaat

SEQ ID NO: 26408 - DNA, 15 bp, Homo sapiens
acccacagaggagaa

SEQ ID NO: 26409 - DNA, 15 bp, Homo sapiens
aacccacagaggaga

SEQ ID NO: 26410 - DNA, 15 bp, Homo sapiens
aaacccacagaggag

SEQ ID NO: 26411 - DNA, 15 bp, Homo sapiens
caaacccacagagga

SEQ ID NO: 26412 - DNA, 15 bp, Homo sapiens
ccaaacccacagagg

SEQ ID NO: 26413 - DNA, 15 bp, Homo sapiens
cccaaacccacagag

SEQ ID NO: 26414 - DNA, 15 bp, Homo sapiens
ccccaaacccacaga

SEQ ID NO: 26415 - DNA, 15 bp, Homo sapiens
gccccaaacccacag

SEQ ID NO: 26416 - DNA, 15 bp, Homo sapiens
tgccccaaacccaca

SEQ ID NO: 26417 - DNA, 15 bp, Homo sapiens
gtgccccaaacccac

SEQ ID NO: 26418 - DNA, 15 bp, Homo sapiens
ggtgccccaaaccca

SEQ ID NO: 26419 - DNA, 15 bp, Homo sapiens
aggtgccccaaaccc

SEQ ID NO: 26420 - DNA, 15 bp, Homo sapiens
caggtgccccaaacc

SEQ ID NO: 26421 - DNA, 15 bp, Homo sapiens
ccaggtgccccaaac

SEQ ID NO: 26422 - DNA, 15 bp, Homo sapiens
cccaggtgccccaaa

SEQ ID NO: 26423 - DNA, 15 bp, Homo sapiens
acccaggtgccccaa

SEQ ID NO: 26424 - DNA, 15 bp, Homo sapiens
gacccaggtgcccca

SEQ ID NO: 26425 - DNA, 15 bp, Homo sapiens
tgacccaggtgcccc

SEQ ID NO: 26426 - DNA, 15 bp, Homo sapiens
gtgacccaggtgccc

SEQ ID NO: 26427 - DNA, 15 bp, Homo sapiens
tgtgacccaggtgcc

SEQ ID NO: 26428 - DNA, 15 bp, Homo sapiens
atgtgacccaggtgc

SEQ ID NO: 26429 - DNA, 15 bp, Homo sapiens
catgtgacccaggtg

SEQ ID NO: 26430 - DNA, 15 bp, Homo sapiens
gcatgtgacccaggt

SEQ ID NO: 26431 - DNA, 15 bp, Homo sapiens
agcatgtgacccagg

SEQ ID NO: 26432 - DNA, 15 bp, Homo sapiens
cagcatgtgacccag

SEQ ID NO: 26433 - DNA, 15 bp, Homo sapiens
gcagcatgtgaccca

SEQ ID NO: 26434 - DNA, 15 bp, Homo sapiens
agcagcatgtgaccc

SEQ ID NO: 26435 - DNA, 15 bp, Homo sapiens
aagcagcatgtgacc

SEQ ID NO: 26436 - DNA, 15 bp, Homo sapiens
taagcagcatgtgac

SEQ ID NO: 26437 - DNA, 15 bp, Homo sapiens
ctaagcagcatgtga

SEQ ID NO: 26438 - DNA, 15 bp, Homo sapiens
tctaagcagcatgtg

SEQ ID NO: 26439 - DNA, 15 bp, Homo sapiens
ttctaagcagcatgt

SEQ ID NO: 26440 - DNA, 15 bp, Homo sapiens
cttctaagcagcatg

SEQ ID NO: 26441 - DNA, 15 bp, Homo sapiens
ccttctaagcagcat

SEQ ID NO: 26442 - DNA, 15 bp, Homo sapiens
cccttctaagcagca

SEQ ID NO: 26443 - DNA, 15 bp, Homo sapiens
gcccttctaagcagc

SEQ ID NO: 26444 - DNA, 15 bp, Homo sapiens
ggcccttctaagcag

SEQ ID NO: 26445 - DNA, 15 bp, Homo sapiens
gggcccttctaagca

SEQ ID NO: 26446 - DNA, 15 bp, Homo sapiens
agggcccttctaagc

SEQ ID NO: 26447 - DNA, 15 bp, Homo sapiens
cagggcccttctaag

SEQ ID NO: 26448 - DNA, 15 bp, Homo sapiens
tcagggcccttctaa

SEQ ID NO: 26449 - DNA, 15 bp, Homo sapiens
gtcagggcccttcta

SEQ ID NO: 26450 - DNA, 15 bp, Homo sapiens
ggtcagggcccttct

SEQ ID NO: 26451 - DNA, 15 bp, Homo sapiens
aggtcagggcccttc

SEQ ID NO: 26452 - DNA, 15 bp, Homo sapiens
aaggtcagggccctt

SEQ ID NO: 26453 - DNA, 15 bp, Homo sapiens
gaaggtcagggccct

SEQ ID NO: 26454 - DNA, 15 bp, Homo sapiens
ggaaggtcagggccc

SEQ ID NO: 26455 - DNA, 15 bp, Homo sapiens
gggaaggtcagggcc

SEQ ID NO: 26456 - DNA, 15 bp, Homo sapiens
tgggaaggtcagggc

SEQ ID NO: 26457 - DNA, 15 bp, Homo sapiens
gtgggaaggtcaggg

SEQ ID NO: 26458 - DNA, 15 bp, Homo sapiens
agtgggaaggtcagg

SEQ ID NO: 26459 - DNA, 15 bp, Homo sapiens
aagtgggaaggtcag

SEQ ID NO: 26460 - DNA, 15 bp, Homo sapiens
gaagtgggaaggtca

SEQ ID NO: 26461 - DNA, 15 bp, Homo sapiens
tgaagtgggaaggtc

SEQ ID NO: 26462 - DNA, 15 bp, Homo sapiens
gtgaagtgggaaggt

SEQ ID NO: 26463 - DNA, 15 bp, Homo sapiens
agtgaagtgggaagg

SEQ ID NO: 26464 - DNA, 15 bp, Homo sapiens
cagtgaagtgggaag

SEQ ID NO: 26465 - DNA, 15 bp, Homo sapiens
ccagtgaagtgggaa

SEQ ID NO: 26466 - DNA, 15 bp, Homo sapiens
cccagtgaagtggga

SEQ ID NO: 26467 - DNA, 15 bp, Homo sapiens
tcccagtgaagtggg

SEQ ID NO: 26468 - DNA, 15 bp, Homo sapiens
gtcccagtgaagtgg

SEQ ID NO: 26469 - DNA, 15 bp, Homo sapiens
ggtcccagtgaagtg

SEQ ID NO: 26470 - DNA, 15 bp, Homo sapiens
aggtcccagtgaagt

SEQ ID NO: 26471 - DNA, 15 bp, Homo sapiens
aaggtcccagtgaag

SEQ ID NO: 26472 - DNA, 15 bp, Homo sapiens
gaaggtcccagtgaa

SEQ ID NO: 26473 - DNA, 15 bp, Homo sapiens
tgaaggtcccagtga

SEQ ID NO: 26474 - DNA, 15 bp, Homo sapiens
gtgaaggtcccagtg

SEQ ID NO: 26475 - DNA, 15 bp, Homo sapiens
ggtgaaggtcccagt

SEQ ID NO: 26476 - DNA, 15 bp, Homo sapiens
tggtgaaggtcccag

SEQ ID NO: 26477 - DNA, 15 bp, Homo sapiens
ttggtgaaggtccca

SEQ ID NO: 26478 - DNA, 15 bp, Homo sapiens
attggtgaaggtccc

SEQ ID NO: 26479 - DNA, 15 bp, Homo sapiens
cattggtgaaggtcc

SEQ ID NO: 26480 - DNA, 15 bp, Homo sapiens
tcattggtgaaggtc

SEQ ID NO: 26481 - DNA, 15 bp, Homo sapiens
ctcattggtgaaggt

SEQ ID NO: 26482 - DNA, 15 bp, Homo sapiens
tctcattggtgaagg

SEQ ID NO: 26483 - DNA, 15 bp, Homo sapiens
ctctcattggtgaag

SEQ ID NO: 26484 - DNA, 15 bp, Homo sapiens
tctctcattggtgaa

SEQ ID NO: 26485 - DNA, 15 bp, Homo sapiens
ctctctcattggtga

SEQ ID NO: 26486 - DNA, 15 bp, Homo sapiens
cctctctcattggtg

SEQ ID NO: 26487 - DNA, 15 bp, Homo sapiens
ccctctctcattggt

SEQ ID NO: 26488 - DNA, 15 bp, Homo sapiens
cccctctctcattgg

SEQ ID NO: 26489 - DNA, 15 bp, Homo sapiens
tcccctctctcattg

SEQ ID NO: 26490 - DNA, 15 bp, Homo sapiens
ctcccctctctcatt

SEQ ID NO: 26491 - DNA, 15 bp, Homo sapiens
cctcccctctctcat

SEQ ID NO: 26492 - DNA, 15 bp, Homo sapiens
ccctcccctctctca

SEQ ID NO: 26493 - DNA, 15 bp, Homo sapiens
cccctcccctctctc

SEQ ID NO: 26494 - DNA, 15 bp, Homo sapiens
acccctcccctctct

SEQ ID NO: 26495 - DNA, 15 bp, Homo sapiens
gacccctcccctctc

SEQ ID NO: 26496 - DNA, 15 bp, Homo sapiens
agacccctcccctct

SEQ ID NO: 26497 - DNA, 15 bp, Homo sapiens
aagacccctcccctc

SEQ ID NO: 26498 - DNA, 15 bp, Homo sapiens
aaagacccctcccct

SEQ ID NO: 26499 - DNA, 15 bp, Homo sapiens
caaagacccctcccc

SEQ ID NO: 26500 - DNA, 15 bp, Homo sapiens
ccaaagacccctccc

SEQ ID NO: 26501 - DNA, 15 bp, Homo sapiens
cccaaagacccctcc

SEQ ID NO: 26502 - DNA, 15 bp, Homo sapiens
gcccaaagacccctc

SEQ ID NO: 26503 - DNA, 15 bp, Homo sapiens
agcccaaagacccct

SEQ ID NO: 26504 - DNA, 15 bp, Homo sapiens
cagcccaaagacccc

SEQ ID NO: 26505 - DNA, 15 bp, Homo sapiens
gcagcccaaagaccc

SEQ ID NO: 26506 - DNA, 15 bp, Homo sapiens
ggcagcccaaagacc

SEQ ID NO: 26507 - DNA, 15 bp, Homo sapiens
aggcagcccaaagac

SEQ ID NO: 26508 - DNA, 15 bp, Homo sapiens
caggcagcccaaaga

SEQ ID NO: 26509 - DNA, 15 bp, Homo sapiens
gcaggcagcccaaag

SEQ ID NO: 26510 - DNA, 15 bp, Homo sapiens
tgcaggcagcccaaa

SEQ ID NO: 26511 - DNA, 15 bp, Homo sapiens
ctgcaggcagcccaa

SEQ ID NO: 26512 - DNA, 15 bp, Homo sapiens
tctgcaggcagccca

SEQ ID NO: 26513 - DNA, 15 bp, Homo sapiens
ttctgcaggcagccc

SEQ ID NO: 26514 - DNA, 15 bp, Homo sapiens
tttctgcaggcagcc

SEQ ID NO: 26515 - DNA, 15 bp, Homo sapiens
ctttctgcaggcagc

SEQ ID NO: 26516 - DNA, 15 bp, Homo sapiens
cctttctgcaggcag

SEQ ID NO: 26517 - DNA, 15 bp, Homo sapiens
tcctttctgcaggca

SEQ ID NO: 26518 - DNA, 15 bp, Homo sapiens
ttcctttctgcaggc

SEQ ID NO: 26519 - DNA, 15 bp, Homo sapiens
gttcctttctgcagg

SEQ ID NO: 26520 - DNA, 15 bp, Homo sapiens
agttcctttctgcag

SEQ ID NO: 26521 - DNA, 15 bp, Homo sapiens
aagttcctttctgca

SEQ ID NO: 26522 - DNA, 15 bp, Homo sapiens
taagttcctttctgc

SEQ ID NO: 26523 - DNA, 15 bp, Homo sapiens
ttaagttcctttctg

SEQ ID NO: 26524 - DNA, 15 bp, Homo sapiens
attaagttcctttct

SEQ ID NO: 26525 - DNA, 15 bp, Homo sapiens
cattaagttcctttc

SEQ ID NO: 26526 - DNA, 15 bp, Homo sapiens
acattaagttccttt

SEQ ID NO: 26527 - DNA, 15 bp, Homo sapiens
tacattaagttcctt

SEQ ID NO: 26528 - DNA, 15 bp, Homo sapiens
atacattaagttcct

SEQ ID NO: 26529 - DNA, 15 bp, Homo sapiens
gatacattaagttcc

SEQ ID NO: 26530 - DNA, 15 bp, Homo sapiens
agatacattaagttc

SEQ ID NO: 26531 - DNA, 15 bp, Homo sapiens
cagatacattaagtt

SEQ ID NO: 26532 - DNA, 15 bp, Homo sapiens
gcagatacattaagt

SEQ ID NO: 26533 - DNA, 15 bp, Homo sapiens
ggcagatacattaag

SEQ ID NO: 26534 - DNA, 15 bp, Homo sapiens
tggcagatacattaa

SEQ ID NO: 26535 - DNA, 15 bp, Homo sapiens
gtggcagatacatta

SEQ ID NO: 26536 - DNA, 15 bp, Homo sapiens
agtggcagatacatt

SEQ ID NO: 26537 - DNA, 15 bp, Homo sapiens
cagtggcagatacat

SEQ ID NO: 26538 - DNA, 15 bp, Homo sapiens
gcagtggcagataca

SEQ ID NO: 26539 - DNA, 15 bp, Homo sapiens
agcagtggcagatac

SEQ ID NO: 26540 - DNA, 15 bp, Homo sapiens
aagcagtggcagata

SEQ ID NO: 26541 - DNA, 15 bp, Homo sapiens
caagcagtggcagat

SEQ ID NO: 26542 - DNA, 15 bp, Homo sapiens
ccaagcagtggcaga

SEQ ID NO: 26543 - DNA, 15 bp, Homo sapiens
tccaagcagtggcag

SEQ ID NO: 26544 - DNA, 15 bp, Homo sapiens
ttccaagcagtggca

SEQ ID NO: 26545 - DNA, 15 bp, Homo sapiens
tttccaagcagtggc

SEQ ID NO: 26546 - DNA, 15 bp, Homo sapiens
ctttccaagcagtgg

SEQ ID NO: 26547 - DNA, 15 bp, Homo sapiens
cctttccaagcagtg

SEQ ID NO: 26548 - DNA, 15 bp, Homo sapiens
gcctttccaagcagt

SEQ ID NO: 26549 - DNA, 15 bp, Homo sapiens
cgcctttccaagcag

SEQ ID NO: 26550 - DNA, 15 bp, Homo sapiens
tcgcctttccaagca

SEQ ID NO: 26551 - DNA, 15 bp, Homo sapiens
atcgcctttccaagc

SEQ ID NO: 26552 - DNA, 15 bp, Homo sapiens
gatcgcctttccaag

SEQ ID NO: 26553 - DNA, 15 bp, Homo sapiens
ggatcgcctttccaa

SEQ ID NO: 26554 - DNA, 15 bp, Homo sapiens
aggatcgcctttcca

SEQ ID NO: 26555 - DNA, 15 bp, Homo sapiens
taggatcgcctttcc

SEQ ID NO: 26556 - DNA, 15 bp, Homo sapiens
ctaggatcgcctttc

SEQ ID NO: 26557 - DNA, 15 bp, Homo sapiens
actaggatcgccttt

SEQ ID NO: 26558 - DNA, 15 bp, Homo sapiens
cactaggatcgcctt

SEQ ID NO: 26559 - DNA, 15 bp, Homo sapiens
ccactaggatcgcct

SEQ ID NO: 26560 - DNA, 15 bp, Homo sapiens
tccactaggatcgcc

SEQ ID NO: 26561 - DNA, 15 bp, Homo sapiens
gtccactaggatcgc

SEQ ID NO: 26562 - DNA, 15 bp, Homo sapiens
tgtccactaggatcg

SEQ ID NO: 26563 - DNA, 15 bp, Homo sapiens
ctgtccactaggatc

SEQ ID NO: 26564 - DNA, 15 bp, Homo sapiens
cctgtccactaggat

SEQ ID NO: 26565 - DNA, 15 bp, Homo sapiens
gcctgtccactagga

SEQ ID NO: 26566 - DNA, 15 bp, Homo sapiens
tgcctgtccactagg

SEQ ID NO: 26567 - DNA, 15 bp, Homo sapiens
ctgcctgtccactag

SEQ ID NO: 26568 - DNA, 15 bp, Homo sapiens
cctgcctgtccacta

SEQ ID NO: 26569 - DNA, 15 bp, Homo sapiens
tcctgcctgtccact

SEQ ID NO: 26570 - DNA, 15 bp, Homo sapiens
gtcctgcctgtccac

SEQ ID NO: 26571 - DNA, 15 bp, Homo sapiens
agtcctgcctgtcca

SEQ ID NO: 26572 - DNA, 15 bp, Homo sapiens
cagtcctgcctgtcc

SEQ ID NO: 26573 - DNA, 15 bp, Homo sapiens
gcagtcctgcctgtc

SEQ ID NO: 26574 - DNA, 15 bp, Homo sapiens
agcagtcctgcctgt

SEQ ID NO: 26575 - DNA, 15 bp, Homo sapiens
aagcagtcctgcctg

SEQ ID NO: 26576 - DNA, 15 bp, Homo sapiens
caagcagtcctgcct

SEQ ID NO: 26577 - DNA, 15 bp, Homo sapiens
ccaagcagtcctgcc

SEQ ID NO: 26578 - DNA, 15 bp, Homo sapiens
cccaagcagtcctgc

SEQ ID NO: 26579 - DNA, 15 bp, Homo sapiens
tcccaagcagtcctg

SEQ ID NO: 26580 - DNA, 15 bp, Homo sapiens
ttcccaagcagtcct

SEQ ID NO: 26581 - DNA, 15 bp, Homo sapiens
cttcccaagcagtcc

SEQ ID NO: 26582 - DNA, 15 bp, Homo sapiens
ccttcccaagcagtc

SEQ ID NO: 26583 - DNA, 15 bp, Homo sapiens
gccttcccaagcagt

SEQ ID NO: 26584 - DNA, 15 bp, Homo sapiens
ggccttcccaagcag

SEQ ID NO: 26585 - DNA, 15 bp, Homo sapiens
cggccttcccaagca

SEQ ID NO: 26586 - DNA, 15 bp, Homo sapiens
tcggccttcccaagc

SEQ ID NO: 26587 - DNA, 15 bp, Homo sapiens
ttcggccttcccaag

SEQ ID NO: 26588 - DNA, 15 bp, Homo sapiens
attcggccttcccaa

SEQ ID NO: 26589 - DNA, 15 bp, Homo sapiens
cattcggccttccca

SEQ ID NO: 26590 - DNA, 15 bp, Homo sapiens
ccattcggccttccc

SEQ ID NO: 26591 - DNA, 15 bp, Homo sapiens
cccattcggccttcc

SEQ ID NO: 26592 - DNA, 15 bp, Homo sapiens
ccccattcggccttc

SEQ ID NO: 26593 - DNA, 15 bp, Homo sapiens
tccccattcggcctt

SEQ ID NO: 26594 - DNA, 15 bp, Homo sapiens
ttccccattcggcct

SEQ ID NO: 26595 - DNA, 15 bp, Homo sapiens
tttccccattcggcc

SEQ ID NO: 26596 - DNA, 15 bp, Homo sapiens
ctttccccattcggc

SEQ ID NO: 26597 - DNA, 15 bp, Homo sapiens
cctttccccattcgg

SEQ ID NO: 26598 - DNA, 15 bp, Homo sapiens
tcctttccccattcg

SEQ ID NO: 26599 - DNA, 15 bp, Homo sapiens
ttcctttccccattc

SEQ ID NO: 26600 - DNA, 15 bp, Homo sapiens
attcctttccccatt

SEQ ID NO: 26601 - DNA, 15 bp, Homo sapiens
cattcctttccccat

SEQ ID NO: 26602 - DNA, 15 bp, Homo sapiens
gcattcctttcccca

SEQ ID NO: 26603 - DNA, 15 bp, Homo sapiens
tgcattcctttcccc

SEQ ID NO: 26604 - DNA, 15 bp, Homo sapiens
ttgcattcctttccc

SEQ ID NO: 26605 - DNA, 15 bp, Homo sapiens
tttgcattcctttcc

SEQ ID NO: 26606 - DNA, 15 bp, Homo sapiens
ctttgcattcctttc

SEQ ID NO: 26607 - DNA, 15 bp, Homo sapiens
gctttgcattccttt

SEQ ID NO: 26608 - DNA, 15 bp, Homo sapiens
agctttgcattcctt

SEQ ID NO: 26609 - DNA, 15 bp, Homo sapiens
aagctttgcattcct

SEQ ID NO: 26610 - DNA, 15 bp, Homo sapiens
taagctttgcattcc

SEQ ID NO: 26611 - DNA, 15 bp, Homo sapiens
ctaagctttgcattc

SEQ ID NO: 26612 - DNA, 15 bp, Homo sapiens
cctaagctttgcatt

SEQ ID NO: 26613 - DNA, 15 bp, Homo sapiens
acctaagctttgcat

SEQ ID NO: 26614 - DNA, 15 bp, Homo sapiens
cacctaagctttgca

SEQ ID NO: 26615 - DNA, 15 bp, Homo sapiens
tcacctaagctttgc

SEQ ID NO: 26616 - DNA, 15 bp, Homo sapiens
ttcacctaagctttg

SEQ ID NO: 26617 - DNA, 15 bp, Homo sapiens
attcacctaagcttt

SEQ ID NO: 26618 - DNA, 15 bp, Homo sapiens
cattcacctaagctt

SEQ ID NO: 26619 - DNA, 15 bp, Homo sapiens
ccattcacctaagct

SEQ ID NO: 26620 - DNA, 15 bp, Homo sapiens
cccattcacctaagc

SEQ ID NO: 26621 - DNA, 15 bp, Homo sapiens
acccattcacctaag

SEQ ID NO: 26622 - DNA, 15 bp, Homo sapiens
aacccattcacctaa

SEQ ID NO: 26623 - DNA, 15 bp, Homo sapiens
caacccattcaccta

SEQ ID NO: 26624 - DNA, 15 bp, Homo sapiens
tcaacccattcacct

SEQ ID NO: 26625 - DNA, 15 bp, Homo sapiens
ttcaacccattcacc

SEQ ID NO: 26626 - DNA, 15 bp, Homo sapiens
cttcaacccattcac

SEQ ID NO: 26627 - DNA, 15 bp, Homo sapiens
gcttcaacccattca

SEQ ID NO: 26628 - DNA, 15 bp, Homo sapiens
cgcttcaacccattc

SEQ ID NO: 26629 - DNA, 15 bp, Homo sapiens
gcgcttcaacccatt

SEQ ID NO: 26630 - DNA, 15 bp, Homo sapiens
ggcgcttcaacccat

SEQ ID NO: 26631 - DNA, 15 bp, Homo sapiens
tggcgcttcaaccca

SEQ ID NO: 26632 - DNA, 15 bp, Homo sapiens
atggcgcttcaaccc

SEQ ID NO: 26633 - DNA, 15 bp, Homo sapiens
gatggcgcttcaacc

SEQ ID NO: 26634 - DNA, 15 bp, Homo sapiens
agatggcgcttcaac

SEQ ID NO: 26635 - DNA, 15 bp, Homo sapiens
aagatggcgcttcaa

SEQ ID NO: 26636 - DNA, 15 bp, Homo sapiens
aaagatggcgcttca

SEQ ID NO: 26637 - DNA, 15 bp, Homo sapiens
aaaagatggcgcttc

SEQ ID NO: 26638 - DNA, 15 bp, Homo sapiens
aaaaagatggcgctt

SEQ ID NO: 26639 - DNA, 15 bp, Homo sapiens
caaaaagatggcgct

SEQ ID NO: 26640 - DNA, 15 bp, Homo sapiens
tcaaaaagatggcgc

SEQ ID NO: 26641 - DNA, 15 bp, Homo sapiens
ctcaaaaagatggcg

SEQ ID NO: 26642 - DNA, 15 bp, Homo sapiens
cctcaaaaagatggc

SEQ ID NO: 26643 - DNA, 15 bp, Homo sapiens
gcctcaaaaagatgg

SEQ ID NO: 26644 - DNA, 15 bp, Homo sapiens
tgcctcaaaaagatg

SEQ ID NO: 26645 - DNA, 15 bp, Homo sapiens
atgcctcaaaaagat

SEQ ID NO: 26646 - DNA, 15 bp, Homo sapiens
tatgcctcaaaaaga

SEQ ID NO: 26647 - DNA, 15 bp, Homo sapiens
ctatgcctcaaaaag

SEQ ID NO: 26648 - DNA, 15 bp, Homo sapiens
cctatgcctcaaaaa

SEQ ID NO: 26649 - DNA, 15 bp, Homo sapiens
acctatgcctcaaaa

SEQ ID NO: 26650 - DNA, 15 bp, Homo sapiens
cacctatgcctcaaa

SEQ ID NO: 26651 - DNA, 15 bp, Homo sapiens
tcacctatgcctcaa

SEQ ID NO: 26652 - DNA, 15 bp, Homo sapiens
gtcacctatgcctca

SEQ ID NO: 26653 - DNA, 15 bp, Homo sapiens
tgtcacctatgcctc

SEQ ID NO: 26654 - DNA, 15 bp, Homo sapiens
atgtcacctatgcct

SEQ ID NO: 26655 - DNA, 15 bp, Homo sapiens
catgtcacctatgcc

SEQ ID NO: 26656 - DNA, 15 bp, Homo sapiens
gcatgtcacctatgc

SEQ ID NO: 26657 - DNA, 15 bp, Homo sapiens
ggcatgtcacctatg

SEQ ID NO: 26658 - DNA, 15 bp, Homo sapiens
tggcatgtcacctat

SEQ ID NO: 26659 - DNA, 15 bp, Homo sapiens
atggcatgtcaccta

SEQ ID NO: 26660 - DNA, 15 bp, Homo sapiens
gatggcatgtcacct

SEQ ID NO: 26661 - DNA, 15 bp, Homo sapiens
tgatggcatgtcacc

SEQ ID NO: 26662 - DNA, 15 bp, Homo sapiens
ctgatggcatgtcac

SEQ ID NO: 26663 - DNA, 15 bp, Homo sapiens
tctgatggcatgtca

SEQ ID NO: 26664 - DNA, 15 bp, Homo sapiens
gtctgatggcatgtc

SEQ ID NO: 26665 - DNA, 15 bp, Homo sapiens
ggtctgatggcatgt

SEQ ID NO: 26666 - DNA, 15 bp, Homo sapiens
tggtctgatggcatg

SEQ ID NO: 26667 - DNA, 15 bp, Homo sapiens
gtggtctgatggcat

SEQ ID NO: 26668 - DNA, 15 bp, Homo sapiens
agtggtctgatggca

SEQ ID NO: 26669 - DNA, 15 bp, Homo sapiens
cagtggtctgatggc

SEQ ID NO: 26670 - DNA, 15 bp, Homo sapiens
gcagtggtctgatgg

SEQ ID NO: 26671 - DNA, 15 bp, Homo sapiens
cgcagtggtctgatg

SEQ ID NO: 26672 - DNA, 15 bp, Homo sapiens
tcgcagtggtctgat

SEQ ID NO: 26673 - DNA, 15 bp, Homo sapiens
ctcgcagtggtctga

SEQ ID NO: 26674 - DNA, 15 bp, Homo sapiens
actcgcagtggtctg

SEQ ID NO: 26675 - DNA, 15 bp, Homo sapiens
cactcgcagtggtct

SEQ ID NO: 26676 - DNA, 15 bp, Homo sapiens
acactcgcagtggtc

SEQ ID NO: 26677 - DNA, 15 bp, Homo sapiens
aacactcgcagtggt

SEQ ID NO: 26678 - DNA, 15 bp, Homo sapiens
gaacactcgcagtgg

SEQ ID NO: 26679 - DNA, 15 bp, Homo sapiens
tgaacactcgcagtg

SEQ ID NO: 26680 - DNA, 15 bp, Homo sapiens
ctgaacactcgcagt

SEQ ID NO: 26681 - DNA, 15 bp, Homo sapiens
cctgaacactcgcag

SEQ ID NO: 26682 - DNA, 15 bp, Homo sapiens
gcctgaacactcgca

SEQ ID NO: 26683 - DNA, 15 bp, Homo sapiens
tgcctgaacactcgc

SEQ ID NO: 26684 - DNA, 15 bp, Homo sapiens
ctgcctgaacactcg

SEQ ID NO: 26685 - DNA, 15 bp, Homo sapiens
gctgcctgaacactc

SEQ ID NO: 26686 - DNA, 15 bp, Homo sapiens
ggctgcctgaacact

SEQ ID NO: 26687 - DNA, 15 bp, Homo sapiens
aggctgcctgaacac

SEQ ID NO: 26688 - DNA, 15 bp, Homo sapiens
taggctgcctgaaca

SEQ ID NO: 26689 - DNA, 15 bp, Homo sapiens
gtaggctgcctgaac

SEQ ID NO: 26690 - DNA, 15 bp, Homo sapiens
ggtaggctgcctgaa

SEQ ID NO: 26691 - DNA, 15 bp, Homo sapiens
cggtaggctgcctga

SEQ ID NO: 26692 - DNA, 15 bp, Homo sapiens
gcggtaggctgcctg

SEQ ID NO: 26693 - DNA, 15 bp, Homo sapiens
tgcggtaggctgcct

SEQ ID NO: 26694 - DNA, 15 bp, Homo sapiens
gtgcggtaggctgcc

SEQ ID NO: 26695 - DNA, 15 bp, Homo sapiens
agtgcggtaggctgc

SEQ ID NO: 26696 - DNA, 15 bp, Homo sapiens
gagtgcggtaggctg

SEQ ID NO: 26697 - DNA, 15 bp, Homo sapiens
ggagtgcggtaggct

SEQ ID NO: 26698 - DNA, 15 bp, Homo sapiens
gggagtgcggtaggc

SEQ ID NO: 26699 - DNA, 15 bp, Homo sapiens
tgggagtgcggtagg

SEQ ID NO: 26700 - DNA, 15 bp, Homo sapiens
ctgggagtgcggtag

SEQ ID NO: 26701 - DNA, 15 bp, Homo sapiens
cctgggagtgcggta

SEQ ID NO: 26702 - DNA, 15 bp, Homo sapiens
tcctgggagtgcggt

SEQ ID NO: 26703 - DNA, 15 bp, Homo sapiens
ctcctgggagtgcgg

SEQ ID NO: 26704 - DNA, 15 bp, Homo sapiens
tctcctgggagtgcg

SEQ ID NO: 26705 - DNA, 15 bp, Homo sapiens
ctctcctgggagtgc

SEQ ID NO: 26706 - DNA, 15 bp, Homo sapiens
gctctcctgggagtg

SEQ ID NO: 26707 - DNA, 15 bp, Homo sapiens
agctctcctgggagt

SEQ ID NO: 26708 - DNA, 15 bp, Homo sapiens
tagctctcctgggag

SEQ ID NO: 26709 - DNA, 15 bp, Homo sapiens
ctagctctcctggga

SEQ ID NO: 26710 - DNA, 15 bp, Homo sapiens
gctagctctcctggg

SEQ ID NO: 26711 - DNA, 15 bp, Homo sapiens
cgctagctctcctgg

SEQ ID NO: 26712 - DNA, 15 bp, Homo sapiens
gcgctagctctcctg

SEQ ID NO: 26713 - DNA, 15 bp, Homo sapiens
ggcgctagctctcct

SEQ ID NO: 26714 - DNA, 15 bp, Homo sapiens
tggcgctagctctcc

SEQ ID NO: 26715 - DNA, 15 bp, Homo sapiens
atggcgctagctctc

SEQ ID NO: 26716 - DNA, 15 bp, Homo sapiens
gatggcgctagctct

SEQ ID NO: 26717 - DNA, 15 bp, Homo sapiens
ggatggcgctagctc

SEQ ID NO: 26718 - DNA, 15 bp, Homo sapiens
gggatggcgctagct

SEQ ID NO: 26719 - DNA, 15 bp, Homo sapiens
tgggatggcgctagc

SEQ ID NO: 26720 - DNA, 15 bp, Homo sapiens
ttgggatggcgctag

SEQ ID NO: 26721 - DNA, 15 bp, Homo sapiens
cttgggatggcgcta

SEQ ID NO: 26722 - DNA, 15 bp, Homo sapiens
ccttgggatggcgct

SEQ ID NO: 26723 - DNA, 15 bp, Homo sapiens
gccttgggatggcgc

SEQ ID NO: 26724 - DNA, 15 bp, Homo sapiens
tgccttgggatggcg

SEQ ID NO: 26725 - DNA, 15 bp, Homo sapiens
ctgccttgggatggc

SEQ ID NO: 26726 - DNA, 15 bp, Homo sapiens
gctgccttgggatgg

SEQ ID NO: 26727 - DNA, 15 bp, Homo sapiens
tgctgccttgggatg

SEQ ID NO: 26728 - DNA, 15 bp, Homo sapiens
atgctgccttgggat

SEQ ID NO: 26729 - DNA, 15 bp, Homo sapiens
aatgctgccttggga

SEQ ID NO: 26730 - DNA, 15 bp, Homo sapiens
gaatgctgccttggg

SEQ ID NO: 26731 - DNA, 15 bp, Homo sapiens
cgaatgctgccttgg

SEQ ID NO: 26732 - DNA, 15 bp, Homo sapiens
ccgaatgctgccttg

SEQ ID NO: 26733 - DNA, 15 bp, Homo sapiens
accgaatgctgcctt

SEQ ID NO: 26734 - DNA, 15 bp, Homo sapiens
caccgaatgctgcct

SEQ ID NO: 26735 - DNA, 15 bp, Homo sapiens
gcaccgaatgctgcc

SEQ ID NO: 26736 - DNA, 15 bp, Homo sapiens
ggcaccgaatgctgc

SEQ ID NO: 26737 - DNA, 15 bp, Homo sapiens
aggcaccgaatgctg

SEQ ID NO: 26738 - DNA, 15 bp, Homo sapiens
gaggcaccgaatgct

SEQ ID NO: 26739 - DNA, 15 bp, Homo sapiens
ggaggcaccgaatgc

SEQ ID NO: 26740 - DNA, 15 bp, Homo sapiens
tggaggcaccgaatg

SEQ ID NO: 26741 - DNA, 15 bp, Homo sapiens
ttggaggcaccgaat

SEQ ID NO: 26742 - DNA, 15 bp, Homo sapiens
attggaggcaccgaa

SEQ ID NO: 26743 - DNA, 15 bp, Homo sapiens
tattggaggcaccga

SEQ ID NO: 26744 - DNA, 15 bp, Homo sapiens
gtattggaggcaccg

SEQ ID NO: 26745 - DNA, 15 bp, Homo sapiens
tgtattggaggcacc

SEQ ID NO: 26746 - DNA, 15 bp, Homo sapiens
atgtattggaggcac

SEQ ID NO: 26747 - DNA, 15 bp, Homo sapiens
tatgtattggaggca

SEQ ID NO: 26748 - DNA, 15 bp, Homo sapiens
gtatgtattggaggc

SEQ ID NO: 26749 - DNA, 15 bp, Homo sapiens
ggtatgtattggagg

SEQ ID NO: 26750 - DNA, 15 bp, Homo sapiens
aggtatgtattggag

SEQ ID NO: 26751 - DNA, 15 bp, Homo sapiens
caggtatgtattgga

SEQ ID NO: 26752 - DNA, 15 bp, Homo sapiens
ccaggtatgtattgg

SEQ ID NO: 26753 - DNA, 15 bp, Homo sapiens
gccaggtatgtattg

SEQ ID NO: 26754 - DNA, 15 bp, Homo sapiens
tgccaggtatgtatt

SEQ ID NO: 26755 - DNA, 15 bp, Homo sapiens
gtgccaggtatgtat

SEQ ID NO: 26756 - DNA, 15 bp, Homo sapiens
tgtgccaggtatgta

SEQ ID NO: 26757 - DNA, 15 bp, Homo sapiens
gtgtgccaggtatgt

SEQ ID NO: 26758 - DNA, 15 bp, Homo sapiens
tgtgtgccaggtatg

SEQ ID NO: 26759 - DNA, 15 bp, Homo sapiens
ctgtgtgccaggtat

SEQ ID NO: 26760 - DNA, 15 bp, Homo sapiens
gctgtgtgccaggta

SEQ ID NO: 26761 - DNA, 15 bp, Homo sapiens
tgctgtgtgccaggt

SEQ ID NO: 26762 - DNA, 15 bp, Homo sapiens
ctgctgtgtgccagg

SEQ ID NO: 26763 - DNA, 15 bp, Homo sapiens
gctgctgtgtgccag

SEQ ID NO: 26764 - DNA, 15 bp, Homo sapiens
agctgctgtgtgcca

SEQ ID NO: 26765 - DNA, 15 bp, Homo sapiens
tagctgctgtgtgcc

SEQ ID NO: 26766 - DNA, 15 bp, Homo sapiens
atagctgctgtgtgc

SEQ ID NO: 26767 - DNA, 15 bp, Homo sapiens
gatagctgctgtgtg

SEQ ID NO: 26768 - DNA, 15 bp, Homo sapiens
ggatagctgctgtgt

SEQ ID NO: 26769 - DNA, 15 bp, Homo sapiens
tggatagctgctgtg

SEQ ID NO: 26770 - DNA, 15 bp, Homo sapiens
ctggatagctgctgt

SEQ ID NO: 26771 - DNA, 15 bp, Homo sapiens
actggatagctgctg

SEQ ID NO: 26772 - DNA, 15 bp, Homo sapiens
tactggatagctgct

SEQ ID NO: 26773 - DNA, 15 bp, Homo sapiens
ttactggatagctgc

SEQ ID NO: 26774 - DNA, 15 bp, Homo sapiens
tttactggatagctg

SEQ ID NO: 26775 - DNA, 15 bp, Homo sapiens
ctttactggatagct

SEQ ID NO: 26776 - DNA, 15 bp, Homo sapiens
cctttactggatagc

SEQ ID NO: 26777 - DNA, 15 bp, Homo sapiens
gcctttactggatag

SEQ ID NO: 26778 - DNA, 15 bp, Homo sapiens
agcctttactggata

SEQ ID NO: 26779 - DNA, 15 bp, Homo sapiens
gagcctttactggat

SEQ ID NO: 26780 - DNA, 15 bp, Homo sapiens
agagcctttactgga

SEQ ID NO: 26781 - DNA, 15 bp, Homo sapiens
cagagcctttactgg

SEQ ID NO: 26782 - DNA, 15 bp, Homo sapiens
tcagagcctttactg

SEQ ID NO: 26783 - DNA, 15 bp, Homo sapiens
ctcagagcctttact

SEQ ID NO: 26784 - DNA, 15 bp, Homo sapiens
actcagagcctttac

SEQ ID NO: 26785 - DNA, 15 bp, Homo sapiens
aactcagagccttta

SEQ ID NO: 26786 - DNA, 15 bp, Homo sapiens
caactcagagccttt

SEQ ID NO: 26787 - DNA, 15 bp, Homo sapiens
gcaactcagagcctt

SEQ ID NO: 26788 - DNA, 15 bp, Homo sapiens
tgcaactcagagcct

SEQ ID NO: 26789 - DNA, 15 bp, Homo sapiens
atgcaactcagagcc

SEQ ID NO: 26790 - DNA, 15 bp, Homo sapiens
catgcaactcagagc

SEQ ID NO: 26791 - DNA, 15 bp, Homo sapiens
tcatgcaactcagag

SEQ ID NO: 26792 - DNA, 15 bp, Homo sapiens
atcatgcaactcaga

SEQ ID NO: 26793 - DNA, 15 bp, Homo sapiens
catcatgcaactcag

SEQ ID NO: 26794 - DNA, 15 bp, Homo sapiens
acatcatgcaactca

SEQ ID NO: 26795 - DNA, 15 bp, Homo sapiens
aacatcatgcaactc

SEQ ID NO: 26796 - DNA, 15 bp, Homo sapiens
caacatcatgcaact

SEQ ID NO: 26797 - DNA, 15 bp, Homo sapiens
ccaacatcatgcaac

SEQ ID NO: 26798 - DNA, 15 bp, Homo sapiens
gccaacatcatgcaa

SEQ ID NO: 26799 - DNA, 15 bp, Homo sapiens
tgccaacatcatgca

SEQ ID NO: 26800 - DNA, 15 bp, Homo sapiens
gtgccaacatcatgc

SEQ ID NO: 26801 - DNA, 15 bp, Homo sapiens
cgtgccaacatcatg

SEQ ID NO: 26802 - DNA, 15 bp, Homo sapiens
gcgtgccaacatcat

SEQ ID NO: 26803 - DNA, 15 bp, Homo sapiens
cgcgtgccaacatca

SEQ ID NO: 26804 - DNA, 15 bp, Homo sapiens
gcgcgtgccaacatc

SEQ ID NO: 26805 - DNA, 15 bp, Homo sapiens
ggcgcgtgccaacat

SEQ ID NO: 26806 - DNA, 15 bp, Homo sapiens
aggcgcgtgccaaca

SEQ ID NO: 26807 - DNA, 15 bp, Homo sapiens
caggcgcgtgccaac

SEQ ID NO: 26808 - DNA, 15 bp, Homo sapiens
gcaggcgcgtgccaa

SEQ ID NO: 26809 - DNA, 15 bp, Homo sapiens
agcaggcgcgtgcca

SEQ ID NO: 26810 - DNA, 15 bp, Homo sapiens
gagcaggcgcgtgcc

SEQ ID NO: 26811 - DNA, 15 bp, Homo sapiens
agagcaggcgcgtgc

SEQ ID NO: 26812 - DNA, 15 bp, Homo sapiens
cagagcaggcgcgtg

SEQ ID NO: 26813 - DNA, 15 bp, Homo sapiens
acagagcaggcgcgt

SEQ ID NO: 26814 - DNA, 15 bp, Homo sapiens
gacagagcaggcgcg

SEQ ID NO: 26815 - DNA, 15 bp, Homo sapiens
ggacagagcaggcgc

SEQ ID NO: 26816 - DNA, 15 bp, Homo sapiens
gggacagagcaggcg

SEQ ID NO: 26817 - DNA, 15 bp, Homo sapiens
tgggacagagcaggc

SEQ ID NO: 26818 - DNA, 15 bp, Homo sapiens
ctgggacagagcagg

SEQ ID NO: 26819 - DNA, 15 bp, Homo sapiens
actgggacagagcag

SEQ ID NO: 26820 - DNA, 15 bp, Homo sapiens
gactgggacagagca

SEQ ID NO: 26821 - DNA, 15 bp, Homo sapiens
tgactgggacagagc

SEQ ID NO: 26822 - DNA, 15 bp, Homo sapiens
gtgactgggacagag

SEQ ID NO: 26823 - DNA, 15 bp, Homo sapiens
tgtgactgggacaga

SEQ ID NO: 26824 - DNA, 15 bp, Homo sapiens
atgtgactgggacag

SEQ ID NO: 26825 - DNA, 15 bp, Homo sapiens
catgtgactgggaca

SEQ ID NO: 26826 - DNA, 15 bp, Homo sapiens
acatgtgactgggac

SEQ ID NO: 26827 - DNA, 15 bp, Homo sapiens
gacatgtgactggga

SEQ ID NO: 26828 - DNA, 15 bp, Homo sapiens
agacatgtgactggg

SEQ ID NO: 26829 - DNA, 15 bp, Homo sapiens
gagacatgtgactgg

SEQ ID NO: 26830 - DNA, 15 bp, Homo sapiens
tgagacatgtgactg

SEQ ID NO: 26831 - DNA, 15 bp, Homo sapiens
gtgagacatgtgact

SEQ ID NO: 26832 - DNA, 15 bp, Homo sapiens
agtgagacatgtgac

SEQ ID NO: 26833 - DNA, 15 bp, Homo sapiens
gagtgagacatgtga

SEQ ID NO: 26834 - DNA, 15 bp, Homo sapiens
agagtgagacatgtg

SEQ ID NO: 26835 - DNA, 15 bp, Homo sapiens
cagagtgagacatgt

SEQ ID NO: 26836 - DNA, 15 bp, Homo sapiens
acagagtgagacatg

SEQ ID NO: 26837 - DNA, 15 bp, Homo sapiens
gacagagtgagacat

SEQ ID NO: 26838 - DNA, 15 bp, Homo sapiens
agacagagtgagaca

SEQ ID NO: 26839 - DNA, 15 bp, Homo sapiens
tagacagagtgagac

SEQ ID NO: 26840 - DNA, 15 bp, Homo sapiens
ctagacagagtgaga

SEQ ID NO: 26841 - DNA, 15 bp, Homo sapiens
gctagacagagtgag

SEQ ID NO: 26842 - DNA, 15 bp, Homo sapiens
tgctagacagagtga

SEQ ID NO: 26843 - DNA, 15 bp, Homo sapiens
atgctagacagagtg

SEQ ID NO: 26844 - DNA, 15 bp, Homo sapiens
catgctagacagagt

SEQ ID NO: 26845 - DNA, 15 bp, Homo sapiens
ccatgctagacagag

SEQ ID NO: 26846 - DNA, 15 bp, Homo sapiens
tccatgctagacaga

SEQ ID NO: 26847 - DNA, 15 bp, Homo sapiens
atccatgctagacag

SEQ ID NO: 26848 - DNA, 15 bp, Homo sapiens
catccatgctagaca

SEQ ID NO: 26849 - DNA, 15 bp, Homo sapiens
tcatccatgctagac

SEQ ID NO: 26850 - DNA, 15 bp, Homo sapiens
ttcatccatgctaga

SEQ ID NO: 26851 - DNA, 15 bp, Homo sapiens
gttcatccatgctag

SEQ ID NO: 26852 - DNA, 15 bp, Homo sapiens
ggttcatccatgcta

SEQ ID NO: 26853 - DNA, 15 bp, Homo sapiens
tggttcatccatgct

SEQ ID NO: 26854 - DNA, 15 bp, Homo sapiens
ctggttcatccatgc

SEQ ID NO: 26855 - DNA, 15 bp, Homo sapiens
cctggttcatccatg

SEQ ID NO: 26856 - DNA, 15 bp, Homo sapiens
gcctggttcatccat

SEQ ID NO: 26857 - DNA, 15 bp, Homo sapiens
tgcctggttcatcca

SEQ ID NO: 26858 - DNA, 15 bp, Homo sapiens
ctgcctggttcatcc

SEQ ID NO: 26859 - DNA, 15 bp, Homo sapiens
actgcctggttcatc

SEQ ID NO: 26860 - DNA, 15 bp, Homo sapiens
cactgcctggttcat

SEQ ID NO: 26861 - DNA, 15 bp, Homo sapiens
tcactgcctggttca

SEQ ID NO: 26862 - DNA, 15 bp, Homo sapiens
ctcactgcctggttc

SEQ ID NO: 26863 - DNA, 15 bp, Homo sapiens
gctcactgcctggtt

SEQ ID NO: 26864 - DNA, 15 bp, Homo sapiens
tgctcactgcctggt

SEQ ID NO: 26865 - DNA, 15 bp, Homo sapiens
ctgctcactgcctgg

SEQ ID NO: 26866 - DNA, 15 bp, Homo sapiens
actgctcactgcctg

SEQ ID NO: 26867 - DNA, 15 bp, Homo sapiens
aactgctcactgcct

SEQ ID NO: 26868 - DNA, 15 bp, Homo sapiens
gaactgctcactgcc

SEQ ID NO: 26869 - DNA, 15 bp, Homo sapiens
tgaactgctcactgc

SEQ ID NO: 26870 - DNA, 15 bp, Homo sapiens
gtgaactgctcactg

SEQ ID NO: 26871 - DNA, 15 bp, Homo sapiens
cgtgaactgctcact

SEQ ID NO: 26872 - DNA, 15 bp, Homo sapiens
ccgtgaactgctcac

SEQ ID NO: 26873 - DNA, 15 bp, Homo sapiens
accgtgaactgctca

SEQ ID NO: 26874 - DNA, 15 bp, Homo sapiens
taccgtgaactgctc

SEQ ID NO: 26875 - DNA, 15 bp, Homo sapiens
gtaccgtgaactgct

SEQ ID NO: 26876 - DNA, 15 bp, Homo sapiens
agtaccgtgaactgc

SEQ ID NO: 26877 - DNA, 15 bp, Homo sapiens
aagtaccgtgaactg

SEQ ID NO: 26878 - DNA, 15 bp, Homo sapiens
caagtaccgtgaact

SEQ ID NO: 26879 - DNA, 15 bp, Homo sapiens
gcaagtaccgtgaac

SEQ ID NO: 26880 - DNA, 15 bp, Homo sapiens
tgcaagtaccgtgaa

SEQ ID NO: 26881 - DNA, 15 bp, Homo sapiens
ctgcaagtaccgtga

SEQ ID NO: 26882 - DNA, 15 bp, Homo sapiens
tctgcaagtaccgtg

SEQ ID NO: 26883 - DNA, 15 bp, Homo sapiens
gtctgcaagtaccgt

SEQ ID NO: 26884 - DNA, 15 bp, Homo sapiens
cgtctgcaagtaccg

SEQ ID NO: 26885 - DNA, 15 bp, Homo sapiens
acgtctgcaagtacc

SEQ ID NO: 26886 - DNA, 15 bp, Homo sapiens
gacgtctgcaagtac

SEQ ID NO: 26887 - DNA, 15 bp, Homo sapiens
ggacgtctgcaagta

SEQ ID NO: 26888 - DNA, 15 bp, Homo sapiens
aggacgtctgcaagt

SEQ ID NO: 26889 - DNA, 15 bp, Homo sapiens
gaggacgtctgcaag

SEQ ID NO: 26890 - DNA, 15 bp, Homo sapiens
ggaggacgtctgcaa

SEQ ID NO: 26891 - DNA, 15 bp, Homo sapiens
aggaggacgtctgca

SEQ ID NO: 26892 - DNA, 15 bp, Homo sapiens
caggaggacgtctgc

SEQ ID NO: 26893 - DNA, 15 bp, Homo sapiens
tcaggaggacgtctg

SEQ ID NO: 26894 - DNA, 15 bp, Homo sapiens
ttcaggaggacgtct

SEQ ID NO: 26895 - DNA, 15 bp, Homo sapiens
attcaggaggacgtc

SEQ ID NO: 26896 - DNA, 15 bp, Homo sapiens
tattcaggaggacgt

SEQ ID NO: 26897 - DNA, 15 bp, Homo sapiens
ttattcaggaggacg

SEQ ID NO: 26898 - DNA, 15 bp, Homo sapiens
cttattcaggaggac

SEQ ID NO: 26899 - DNA, 15 bp, Homo sapiens
gcttattcaggagga

SEQ ID NO: 26900 - DNA, 15 bp, Homo sapiens
ggcttattcaggagg

SEQ ID NO: 26901 - DNA, 15 bp, Homo sapiens
tggcttattcaggag

SEQ ID NO: 26902 - DNA, 15 bp, Homo sapiens
ctggcttattcagga

SEQ ID NO: 26903 - DNA, 15 bp, Homo sapiens
cctggcttattcagg

SEQ ID NO: 26904 - DNA, 15 bp, Homo sapiens
gcctggcttattcag

SEQ ID NO: 26905 - DNA, 15 bp, Homo sapiens
agcctggcttattca

SEQ ID NO: 26906 - DNA, 15 bp, Homo sapiens
aagcctggcttattc

SEQ ID NO: 26907 - DNA, 15 bp, Homo sapiens
aaagcctggcttatt

SEQ ID NO: 26908 - DNA, 15 bp, Homo sapiens
caaagcctggcttat

SEQ ID NO: 26909 - DNA, 15 bp, Homo sapiens
ccaaagcctggctta

SEQ ID NO: 26910 - DNA, 15 bp, Homo sapiens
gccaaagcctggctt

SEQ ID NO: 26911 - DNA, 15 bp, Homo sapiens
tgccaaagcctggct

SEQ ID NO: 26912 - DNA, 15 bp, Homo sapiens
ttgccaaagcctggc

SEQ ID NO: 26913 - DNA, 15 bp, Homo sapiens
gttgccaaagcctgg

SEQ ID NO: 26914 - DNA, 15 bp, Homo sapiens
ggttgccaaagcctg

SEQ ID NO: 26915 - DNA, 15 bp, Homo sapiens
cggttgccaaagcct

SEQ ID NO: 26916 - DNA, 15 bp, Homo sapiens
gcggttgccaaagcc

SEQ ID NO: 26917 - DNA, 15 bp, Homo sapiens
agcggttgccaaagc

SEQ ID NO: 26918 - DNA, 15 bp, Homo sapiens
cagcggttgccaaag

SEQ ID NO: 26919 - DNA, 15 bp, Homo sapiens
gcagcggttgccaaa

SEQ ID NO: 26920 - DNA, 15 bp, Homo sapiens
ggcagcggttgccaa

SEQ ID NO: 26921 - DNA, 15 bp, Homo sapiens
aggcagcggttgcca

SEQ ID NO: 26922 - DNA, 15 bp, Homo sapiens
caggcagcggttgcc

SEQ ID NO: 26923 - DNA, 15 bp, Homo sapiens
tcaggcagcggttgc

SEQ ID NO: 26924 - DNA, 15 bp, Homo sapiens
ttcaggcagcggttg

SEQ ID NO: 26925 - DNA, 15 bp, Homo sapiens
cttcaggcagcggtt

SEQ ID NO: 26926 - DNA, 15 bp, Homo sapiens
ccttcaggcagcggt

SEQ ID NO: 26927 - DNA, 15 bp, Homo sapiens
tccttcaggcagcgg

SEQ ID NO: 26928 - DNA, 15 bp, Homo sapiens
ttccttcaggcagcg

SEQ ID NO: 26929 - DNA, 15 bp, Homo sapiens
cttccttcaggcagc

SEQ ID NO: 26930 - DNA, 15 bp, Homo sapiens
ccttccttcaggcag

SEQ ID NO: 26931 - DNA, 15 bp, Homo sapiens
cccttccttcaggca

SEQ ID NO: 26932 - DNA, 15 bp, Homo sapiens
acccttccttcaggc

SEQ ID NO: 26933 - DNA, 15 bp, Homo sapiens
cacccttccttcagg

SEQ ID NO: 26934 - DNA, 15 bp, Homo sapiens
ccacccttccttcag

SEQ ID NO: 26935 - DNA, 15 bp, Homo sapiens
gccacccttccttca

SEQ ID NO: 26936 - DNA, 15 bp, Homo sapiens
agccacccttccttc

SEQ ID NO: 26937 - DNA, 15 bp, Homo sapiens
aagccacccttcctt

SEQ ID NO: 26938 - DNA, 15 bp, Homo sapiens
gaagccacccttcct

SEQ ID NO: 26939 - DNA, 15 bp, Homo sapiens
ggaagccacccttcc

SEQ ID NO: 26940 - DNA, 15 bp, Homo sapiens
cggaagccacccttc

SEQ ID NO: 26941 - DNA, 15 bp, Homo sapiens
acggaagccaccctt

SEQ ID NO: 26942 - DNA, 15 bp, Homo sapiens
tacggaagccaccct

SEQ ID NO: 26943 - DNA, 15 bp, Homo sapiens
ttacggaagccaccc

SEQ ID NO: 26944 - DNA, 15 bp, Homo sapiens
cttacggaagccacc

SEQ ID NO: 26945 - DNA, 15 bp, Homo sapiens
acttacggaagccac

SEQ ID NO: 26946 - DNA, 15 bp, Homo sapiens
cacttacggaagcca

SEQ ID NO: 26947 - DNA, 15 bp, Homo sapiens
gcacttacggaagcc

SEQ ID NO: 26948 - DNA, 15 bp, Homo sapiens
ggcacttacggaagc

SEQ ID NO: 26949 - DNA, 15 bp, Homo sapiens
aggcacttacggaag

SEQ ID NO: 26950 - DNA, 15 bp, Homo sapiens
taggcacttacggaa

SEQ ID NO: 26951 - DNA, 15 bp, Homo sapiens
gtaggcacttacgga

SEQ ID NO: 26952 - DNA, 15 bp, Homo sapiens
cgtaggcacttacgg

SEQ ID NO: 26953 - DNA, 15 bp, Homo sapiens
gcgtaggcacttacg

SEQ ID NO: 26954 - DNA, 15 bp, Homo sapiens
cgcgtaggcacttac

SEQ ID NO: 26955 - DNA, 15 bp, Homo sapiens
gcgcgtaggcactta

SEQ ID NO: 26956 - DNA, 15 bp, Homo sapiens
ggcgcgtaggcactt

SEQ ID NO: 26957 - DNA, 15 bp, Homo sapiens
gggcgcgtaggcact

SEQ ID NO: 26958 - DNA, 15 bp, Homo sapiens
ggggcgcgtaggcac

SEQ ID NO: 26959 - DNA, 15 bp, Homo sapiens
aggggcgcgtaggca

SEQ ID NO: 26960 - DNA, 15 bp, Homo sapiens
caggggcgcgtaggc

SEQ ID NO: 26961 - DNA, 15 bp, Homo sapiens
acaggggcgcgtagg

SEQ ID NO: 26962 - DNA, 15 bp, Homo sapiens
gacaggggcgcgtag

SEQ ID NO: 26963 - DNA, 15 bp, Homo sapiens
ggacaggggcgcgta

SEQ ID NO: 26964 - DNA, 15 bp, Homo sapiens
aggacaggggcgcgt

SEQ ID NO: 26965 - DNA, 15 bp, Homo sapiens
taggacaggggcgcg

SEQ ID NO: 26966 - DNA, 15 bp, Homo sapiens
ttaggacaggggcgc

SEQ ID NO: 26967 - DNA, 15 bp, Homo sapiens
cttaggacaggggcg

SEQ ID NO: 26968 - DNA, 15 bp, Homo sapiens
tcttaggacaggggc

SEQ ID NO: 26969 - DNA, 15 bp, Homo sapiens
ttcttaggacagggg

SEQ ID NO: 26970 - DNA, 15 bp, Homo sapiens
cttcttaggacaggg

SEQ ID NO: 26971 - DNA, 15 bp, Homo sapiens
tcttcttaggacagg

SEQ ID NO: 26972 - DNA, 15 bp, Homo sapiens
gtcttcttaggacag

SEQ ID NO: 26973 - DNA, 15 bp, Homo sapiens
agtcttcttaggaca

SEQ ID NO: 26974 - DNA, 15 bp, Homo sapiens
tagtcttcttaggac

SEQ ID NO: 26975 - DNA, 15 bp, Homo sapiens
ctagtcttcttagga

SEQ ID NO: 26976 - DNA, 15 bp, Homo sapiens
gctagtcttcttagg

SEQ ID NO: 26977 - DNA, 15 bp, Homo sapiens
agctagtcttcttag

SEQ ID NO: 26978 - DNA, 15 bp, Homo sapiens
gagctagtcttctta

SEQ ID NO: 26979 - DNA, 15 bp, Homo sapiens
ggagctagtcttctt

SEQ ID NO: 26980 - DNA, 15 bp, Homo sapiens
gggagctagtcttct

SEQ ID NO: 26981 - DNA, 15 bp, Homo sapiens
ggggagctagtcttc

SEQ ID NO: 26982 - DNA, 15 bp, Homo sapiens
aggggagctagtctt

SEQ ID NO: 26983 - DNA, 15 bp, Homo sapiens
caggggagctagtct

SEQ ID NO: 26984 - DNA, 15 bp, Homo sapiens
ccaggggagctagtc

SEQ ID NO: 26985 - DNA, 15 bp, Homo sapiens
cccaggggagctagt

SEQ ID NO: 26986 - DNA, 15 bp, Homo sapiens
tcccaggggagctag

SEQ ID NO: 26987 - DNA, 15 bp, Homo sapiens
ctcccaggggagcta

SEQ ID NO: 26988 - DNA, 15 bp, Homo sapiens
cctcccaggggagct

SEQ ID NO: 26989 - DNA, 15 bp, Homo sapiens
tcctcccaggggagc

SEQ ID NO: 26990 - DNA, 15 bp, Homo sapiens
gtcctcccaggggag

SEQ ID NO: 26991 - DNA, 15 bp, Homo sapiens
ggtcctcccagggga

SEQ ID NO: 26992 - DNA, 15 bp, Homo sapiens
gggtcctcccagggg

SEQ ID NO: 26993 - DNA, 15 bp, Homo sapiens
tgggtcctcccaggg

SEQ ID NO: 26994 - DNA, 15 bp, Homo sapiens
ttgggtcctcccagg

SEQ ID NO: 26995 - DNA, 15 bp, Homo sapiens
gttgggtcctcccag

SEQ ID NO: 26996 - DNA, 15 bp, Homo sapiens
cgttgggtcctccca

SEQ ID NO: 26997 - DNA, 15 bp, Homo sapiens
ccgttgggtcctccc

SEQ ID NO: 26998 - DNA, 15 bp, Homo sapiens
accgttgggtcctcc

SEQ ID NO: 26999 - DNA, 15 bp, Homo sapiens
caccgttgggtcctc

SEQ ID NO: 27000 - DNA, 15 bp, Homo sapiens
ccaccgttgggtcct

SEQ ID NO: 27001 - DNA, 15 bp, Homo sapiens
cccaccgttgggtcc

SEQ ID NO: 27002 - DNA, 15 bp, Homo sapiens
acccaccgttgggtc

SEQ ID NO: 27003 - DNA, 15 bp, Homo sapiens
aacccaccgttgggt

SEQ ID NO: 27004 - DNA, 15 bp, Homo sapiens
gaacccaccgttggg

SEQ ID NO: 27005 - DNA, 15 bp, Homo sapiens
tgaacccaccgttgg

SEQ ID NO: 27006 - DNA, 15 bp, Homo sapiens
ttgaacccaccgttg

SEQ ID NO: 27007 - DNA, 15 bp, Homo sapiens
cttgaacccaccgtt

SEQ ID NO: 27008 - DNA, 15 bp, Homo sapiens
tcttgaacccaccgt

SEQ ID NO: 27009 - DNA, 15 bp, Homo sapiens
atcttgaacccaccg

SEQ ID NO: 27010 - DNA, 15 bp, Homo sapiens
catcttgaacccacc

SEQ ID NO: 27011 - DNA, 15 bp, Homo sapiens
ccatcttgaacccac

SEQ ID NO: 27012 - DNA, 15 bp, Homo sapiens
gccatcttgaaccca

SEQ ID NO: 27013 - DNA, 15 bp, Homo sapiens
tgccatcttgaaccc

SEQ ID NO: 27014 - DNA, 15 bp, Homo sapiens
ctgccatcttgaacc

SEQ ID NO: 27015 - DNA, 15 bp, Homo sapiens
cctgccatcttgaac

SEQ ID NO: 27016 - DNA, 15 bp, Homo sapiens
gcctgccatcttgaa

SEQ ID NO: 27017 - DNA, 15 bp, Homo sapiens
cgcctgccatcttga

SEQ ID NO: 27018 - DNA, 15 bp, Homo sapiens
acgcctgccatcttg

SEQ ID NO: 27019 - DNA, 15 bp, Homo sapiens
aacgcctgccatctt

SEQ ID NO: 27020 - DNA, 15 bp, Homo sapiens
caacgcctgccatct

SEQ ID NO: 27021 - DNA, 15 bp, Homo sapiens
ccaacgcctgccatc

SEQ ID NO: 27022 - DNA, 15 bp, Homo sapiens
cccaacgcctgccat

SEQ ID NO: 27023 - DNA, 15 bp, Homo sapiens
ccccaacgcctgcca

SEQ ID NO: 27024 - DNA, 15 bp, Homo sapiens
tccccaacgcctgcc

SEQ ID NO: 27025 - DNA, 15 bp, Homo sapiens
ctccccaacgcctgc

SEQ ID NO: 27026 - DNA, 15 bp, Homo sapiens
cctccccaacgcctg

SEQ ID NO: 27027 - DNA, 15 bp, Homo sapiens
gcctccccaacgcct

SEQ ID NO: 27028 - DNA, 15 bp, Homo sapiens
ggcctccccaacgcc

SEQ ID NO: 27029 - DNA, 15 bp, Homo sapiens
gggcctccccaacgc

SEQ ID NO: 27030 - DNA, 15 bp, Homo sapiens
ggggcctccccaacg

SEQ ID NO: 27031 - DNA, 15 bp, Homo sapiens
tggggcctccccaac

SEQ ID NO: 27032 - DNA, 15 bp, Homo sapiens
gtggggcctccccaa

SEQ ID NO: 27033 - DNA, 15 bp, Homo sapiens
agtggggcctcccca

SEQ ID NO: 27034 - DNA, 15 bp, Homo sapiens
gagtggggcctcccc

SEQ ID NO: 27035 - DNA, 15 bp, Homo sapiens
tgagtggggcctccc

SEQ ID NO: 27036 - DNA, 15 bp, Homo sapiens
ttgagtggggcctcc

SEQ ID NO: 27037 - DNA, 15 bp, Homo sapiens
attgagtggggcctc

SEQ ID NO: 27038 - DNA, 15 bp, Homo sapiens
gattgagtggggcct

SEQ ID NO: 27039 - DNA, 15 bp, Homo sapiens
ggattgagtggggcc

SEQ ID NO: 27040 - DNA, 15 bp, Homo sapiens
aggattgagtggggc

SEQ ID NO: 27041 - DNA, 15 bp, Homo sapiens
caggattgagtgggg

SEQ ID NO: 27042 - DNA, 15 bp, Homo sapiens
gcaggattgagtggg

SEQ ID NO: 27043 - DNA, 15 bp, Homo sapiens
agcaggattgagtgg

SEQ ID NO: 27044 - DNA, 15 bp, Homo sapiens
gagcaggattgagtg

SEQ ID NO: 27045 - DNA, 15 bp, Homo sapiens
agagcaggattgagt

SEQ ID NO: 27046 - DNA, 15 bp, Homo sapiens
cagagcaggattgag

SEQ ID NO: 27047 - DNA, 15 bp, Homo sapiens
gcagagcaggattga

SEQ ID NO: 27048 - DNA, 15 bp, Homo sapiens
agcagagcaggattg

SEQ ID NO: 27049 - DNA, 15 bp, Homo sapiens
cagcagagcaggatt

SEQ ID NO: 27050 - DNA, 15 bp, Homo sapiens
ccagcagagcaggat

SEQ ID NO: 27051 - DNA, 15 bp, Homo sapiens
accagcagagcagga

SEQ ID NO: 27052 - DNA, 15 bp, Homo sapiens
gaccagcagagcagg

SEQ ID NO: 27053 - DNA, 15 bp, Homo sapiens
tgaccagcagagcag

SEQ ID NO: 27054 - DNA, 15 bp, Homo sapiens
gtgaccagcagagca

SEQ ID NO: 27055 - DNA, 15 bp, Homo sapiens
agtgaccagcagagc

SEQ ID NO: 27056 - DNA, 15 bp, Homo sapiens
aagtgaccagcagag

SEQ ID NO: 27057 - DNA, 15 bp, Homo sapiens
gaagtgaccagcaga

SEQ ID NO: 27058 - DNA, 15 bp, Homo sapiens
ggaagtgaccagcag

SEQ ID NO: 27059 - DNA, 15 bp, Homo sapiens
tggaagtgaccagca

SEQ ID NO: 27060 - DNA, 15 bp, Homo sapiens
atggaagtgaccagc

SEQ ID NO: 27061 - DNA, 15 bp, Homo sapiens
catggaagtgaccag

SEQ ID NO: 27062 - DNA, 15 bp, Homo sapiens
acatggaagtgacca

SEQ ID NO: 27063 - DNA, 15 bp, Homo sapiens
gacatggaagtgacc

SEQ ID NO: 27064 - DNA, 15 bp, Homo sapiens
agacatggaagtgac

SEQ ID NO: 27065 - DNA, 15 bp, Homo sapiens
gagacatggaagtga

SEQ ID NO: 27066 - DNA, 15 bp, Homo sapiens
agagacatggaagtg

SEQ ID NO: 27067 - DNA, 15 bp, Homo sapiens
cagagacatggaagt

SEQ ID NO: 27068 - DNA, 15 bp, Homo sapiens
tcagagacatggaag

SEQ ID NO: 27069 - DNA, 15 bp, Homo sapiens
gtcagagacatggaa

SEQ ID NO: 27070 - DNA, 15 bp, Homo sapiens
ggtcagagacatgga

SEQ ID NO: 27071 - DNA, 15 bp, Homo sapiens
tggtcagagacatgg

SEQ ID NO: 27072 - DNA, 15 bp, Homo sapiens
ctggtcagagacatg

SEQ ID NO: 27073 - DNA, 15 bp, Homo sapiens
gctggtcagagacat

SEQ ID NO: 27074 - DNA, 15 bp, Homo sapiens
tgctggtcagagaca

SEQ ID NO: 27075 - DNA, 15 bp, Homo sapiens
gtgctggtcagagac

SEQ ID NO: 27076 - DNA, 15 bp, Homo sapiens
agtgctggtcagaga

SEQ ID NO: 27077 - DNA, 15 bp, Homo sapiens
gagtgctggtcagag

SEQ ID NO: 27078 - DNA, 15 bp, Homo sapiens
ggagtgctggtcaga

SEQ ID NO: 27079 - DNA, 15 bp, Homo sapiens
gggagtgctggtcag

SEQ ID NO: 27080 - DNA, 15 bp, Homo sapiens
ggggagtgctggtca

SEQ ID NO: 27081 - DNA, 15 bp, Homo sapiens
gggggagtgctggtc

SEQ ID NO: 27082 - DNA, 15 bp, Homo sapiens
tgggggagtgctggt

SEQ ID NO: 27083 - DNA, 15 bp, Homo sapiens
ttgggggagtgctgg

SEQ ID NO: 27084 - DNA, 15 bp, Homo sapiens
gttgggggagtgctg

SEQ ID NO: 27085 - DNA, 15 bp, Homo sapiens
ggttgggggagtgct

SEQ ID NO: 27086 - DNA, 15 bp, Homo sapiens
aggttgggggagtgc

SEQ ID NO: 27087 - DNA, 15 bp, Homo sapiens
gaggttgggggagtg

SEQ ID NO: 27088 - DNA, 15 bp, Homo sapiens
agaggttgggggagt

SEQ ID NO: 27089 - DNA, 15 bp, Homo sapiens
gagaggttgggggag

SEQ ID NO: 27090 - DNA, 15 bp, Homo sapiens
ggagaggttggggga

SEQ ID NO: 27091 - DNA, 15 bp, Homo sapiens
aggagaggttggggg

SEQ ID NO: 27092 - DNA, 15 bp, Homo sapiens
aaggagaggttgggg

SEQ ID NO: 27093 - DNA, 15 bp, Homo sapiens
gaaggagaggttggg

SEQ ID NO: 27094 - DNA, 15 bp, Homo sapiens
ggaaggagaggttgg

SEQ ID NO: 27095 - DNA, 15 bp, Homo sapiens
tggaaggagaggttg

SEQ ID NO: 27096 - DNA, 15 bp, Homo sapiens
gtggaaggagaggtt

SEQ ID NO: 27097 - DNA, 15 bp, Homo sapiens
tgtggaaggagaggt

SEQ ID NO: 27098 - DNA, 15 bp, Homo sapiens
gtgtggaaggagagg

SEQ ID NO: 27099 - DNA, 15 bp, Homo sapiens
agtgtggaaggagag

SEQ ID NO: 27100 - DNA, 15 bp, Homo sapiens
aagtgtggaaggaga

SEQ ID NO: 27101 - DNA, 15 bp, Homo sapiens
caagtgtggaaggag

SEQ ID NO: 27102 - DNA, 15 bp, Homo sapiens
acaagtgtggaagga

SEQ ID NO: 27103 - DNA, 15 bp, Homo sapiens
cacaagtgtggaagg

SEQ ID NO: 27104 - DNA, 15 bp, Homo sapiens
acacaagtgtggaag

SEQ ID NO: 27105 - DNA, 15 bp, Homo sapiens
cacacaagtgtggaa

SEQ ID NO: 27106 - DNA, 15 bp, Homo sapiens
gcacacaagtgtgga

SEQ ID NO: 27107 - DNA, 15 bp, Homo sapiens
tgcacacaagtgtgg

SEQ ID NO: 27108 - DNA, 15 bp, Homo sapiens
ctgcacacaagtgtg

SEQ ID NO: 27109 - DNA, 15 bp, Homo sapiens
cctgcacacaagtgt

SEQ ID NO: 27110 - DNA, 15 bp, Homo sapiens
ccctgcacacaagtg

SEQ ID NO: 27111 - DNA, 15 bp, Homo sapiens
tccctgcacacaagt

SEQ ID NO: 27112 - DNA, 15 bp, Homo sapiens
gtccctgcacacaag

SEQ ID NO: 27113 - DNA, 15 bp, Homo sapiens
tgtccctgcacacaa

SEQ ID NO: 27114 - DNA, 15 bp, Homo sapiens
atgtccctgcacaca

SEQ ID NO: 27115 - DNA, 15 bp, Homo sapiens
aatgtccctgcacac

SEQ ID NO: 27116 - DNA, 15 bp, Homo sapiens
gaatgtccctgcaca

SEQ ID NO: 27117 - DNA, 15 bp, Homo sapiens
tgaatgtccctgcac

SEQ ID NO: 27118 - DNA, 15 bp, Homo sapiens
gtgaatgtccctgca

SEQ ID NO: 27119 - DNA, 15 bp, Homo sapiens
agtgaatgtccctgc

SEQ ID NO: 27120 - DNA, 15 bp, Homo sapiens
tagtgaatgtccctg

SEQ ID NO: 27121 - DNA, 15 bp, Homo sapiens
gtagtgaatgtccct

SEQ ID NO: 27122 - DNA, 15 bp, Homo sapiens
ggtagtgaatgtccc

SEQ ID NO: 27123 - DNA, 15 bp, Homo sapiens
aggtagtgaatgtcc

SEQ ID NO: 27124 - DNA, 15 bp, Homo sapiens
gaggtagtgaatgtc

SEQ ID NO: 27125 - DNA, 15 bp, Homo sapiens
ggaggtagtgaatgt

SEQ ID NO: 27126 - DNA, 15 bp, Homo sapiens
aggaggtagtgaatg

SEQ ID NO: 27127 - DNA, 15 bp, Homo sapiens
taggaggtagtgaat

SEQ ID NO: 27128 - DNA, 15 bp, Homo sapiens
ctaggaggtagtgaa

SEQ ID NO: 27129 - DNA, 15 bp, Homo sapiens
cctaggaggtagtga

SEQ ID NO: 27130 - DNA, 15 bp, Homo sapiens
tcctaggaggtagtg

SEQ ID NO: 27131 - DNA, 15 bp, Homo sapiens
ttcctaggaggtagt

SEQ ID NO: 27132 - DNA, 15 bp, Homo sapiens
cttcctaggaggtag

SEQ ID NO: 27133 - DNA, 15 bp, Homo sapiens
gcttcctaggaggta

SEQ ID NO: 27134 - DNA, 15 bp, Homo sapiens
ggcttcctaggaggt

SEQ ID NO: 27135 - DNA, 15 bp, Homo sapiens
gggcttcctaggagg

SEQ ID NO: 27136 - DNA, 15 bp, Homo sapiens
ggggcttcctaggag

SEQ ID NO: 27137 - DNA, 15 bp, Homo sapiens
gggggcttcctagga

SEQ ID NO: 27138 - DNA, 15 bp, Homo sapiens
tgggggcttcctagg

SEQ ID NO: 27139 - DNA, 15 bp, Homo sapiens
gtgggggcttcctag

SEQ ID NO: 27140 - DNA, 15 bp, Homo sapiens
tgtgggggcttccta

SEQ ID NO: 27141 - DNA, 15 bp, Homo sapiens
gtgtgggggcttcct

SEQ ID NO: 27142 - DNA, 15 bp, Homo sapiens
ggtgtgggggcttcc

SEQ ID NO: 27143 - DNA, 15 bp, Homo sapiens
tggtgtgggggcttc

SEQ ID NO: 27144 - DNA, 15 bp, Homo sapiens
gtggtgtgggggctt

SEQ ID NO: 27145 - DNA, 15 bp, Homo sapiens
agtggtgtgggggct

SEQ ID NO: 27146 - DNA, 15 bp, Homo sapiens
cagtggtgtgggggc

SEQ ID NO: 27147 - DNA, 15 bp, Homo sapiens
ccagtggtgtggggg

SEQ ID NO: 27148 - DNA, 15 bp, Homo sapiens
tccagtggtgtgggg

SEQ ID NO: 27149 - DNA, 15 bp, Homo sapiens
gtccagtggtgtggg

SEQ ID NO: 27150 - DNA, 15 bp, Homo sapiens
tgtccagtggtgtgg

SEQ ID NO: 27151 - DNA, 15 bp, Homo sapiens
ctgtccagtggtgtg

SEQ ID NO: 27152 - DNA, 15 bp, Homo sapiens
gctgtccagtggtgt

SEQ ID NO: 27153 - DNA, 15 bp, Homo sapiens
agctgtccagtggtg

SEQ ID NO: 27154 - DNA, 15 bp, Homo sapiens
gagctgtccagtggt

SEQ ID NO: 27155 - DNA, 15 bp, Homo sapiens
agagctgtccagtgg

SEQ ID NO: 27156 - DNA, 15 bp, Homo sapiens
tagagctgtccagtg

SEQ ID NO: 27157 - DNA, 15 bp, Homo sapiens
atagagctgtccagt

SEQ ID NO: 27158 - DNA, 15 bp, Homo sapiens
tatagagctgtccag

SEQ ID NO: 27159 - DNA, 15 bp, Homo sapiens
atatagagctgtcca

SEQ ID NO: 27160 - DNA, 15 bp, Homo sapiens
aatatagagctgtcc

SEQ ID NO: 27161 - DNA, 15 bp, Homo sapiens
aaatatagagctgtc

SEQ ID NO: 27162 - DNA, 15 bp, Homo sapiens
gaaatatagagctgt

SEQ ID NO: 27163 - DNA, 15 bp, Homo sapiens
agaaatatagagctg

SEQ ID NO: 27164 - DNA, 15 bp, Homo sapiens
gagaaatatagagct

SEQ ID NO: 27165 - DNA, 15 bp, Homo sapiens
tgagaaatatagagc

SEQ ID NO: 27166 - DNA, 15 bp, Homo sapiens
ctgagaaatatagag

SEQ ID NO: 27167 - DNA, 15 bp, Homo sapiens
gctgagaaatataga

SEQ ID NO: 27168 - DNA, 15 bp, Homo sapiens
tgctgagaaatatag

SEQ ID NO: 27169 - DNA, 15 bp, Homo sapiens
atgctgagaaatata

SEQ ID NO: 27170 - DNA, 15 bp, Homo sapiens
tatgctgagaaatat

SEQ ID NO: 27171 - DNA, 15 bp, Homo sapiens
ctatgctgagaaata

SEQ ID NO: 27172 - DNA, 15 bp, Homo sapiens
tctatgctgagaaat

SEQ ID NO: 27173 - DNA, 15 bp, Homo sapiens
ttctatgctgagaaa

SEQ ID NO: 27174 - DNA, 15 bp, Homo sapiens
cttctatgctgagaa

SEQ ID NO: 27175 - DNA, 15 bp, Homo sapiens
acttctatgctgaga

SEQ ID NO: 27176 - DNA, 15 bp, Homo sapiens
aacttctatgctgag

SEQ ID NO: 27177 - DNA, 15 bp, Homo sapiens
gaacttctatgctga

SEQ ID NO: 27178 - DNA, 15 bp, Homo sapiens
agaacttctatgctg

SEQ ID NO: 27179 - DNA, 15 bp, Homo sapiens
tagaacttctatgct

SEQ ID NO: 27180 - DNA, 15 bp, Homo sapiens
atagaacttctatgc

SEQ ID NO: 27181 - DNA, 15 bp, Homo sapiens
catagaacttctatg

SEQ ID NO: 27182 - DNA, 15 bp, Homo sapiens
acatagaacttctat

SEQ ID NO: 27183 - DNA, 15 bp, Homo sapiens
aacatagaacttcta

SEQ ID NO: 27184 - DNA, 15 bp, Homo sapiens
caacatagaacttct

SEQ ID NO: 27185 - DNA, 15 bp, Homo sapiens
tcaacatagaacttc

SEQ ID NO: 27186 - DNA, 15 bp, Homo sapiens
ctcaacatagaactt

SEQ ID NO: 27187 - DNA, 15 bp, Homo sapiens
actcaacatagaact

SEQ ID NO: 27188 - DNA, 15 bp, Homo sapiens
aactcaacatagaac

SEQ ID NO: 27189 - DNA, 15 bp, Homo sapiens
caactcaacatagaa

SEQ ID NO: 27190 - DNA, 15 bp, Homo sapiens
tcaactcaacataga

SEQ ID NO: 27191 - DNA, 15 bp, Homo sapiens
gtcaactcaacatag

SEQ ID NO: 27192 - DNA, 15 bp, Homo sapiens
tgtcaactcaacata

SEQ ID NO: 27193 - DNA, 15 bp, Homo sapiens
ctgtcaactcaacat

SEQ ID NO: 27194 - DNA, 15 bp, Homo sapiens
tctgtcaactcaaca

SEQ ID NO: 27195 - DNA, 15 bp, Homo sapiens
atctgtcaactcaac

SEQ ID NO: 27196 - DNA, 15 bp, Homo sapiens
catctgtcaactcaa

SEQ ID NO: 27197 - DNA, 15 bp, Homo sapiens
tcatctgtcaactca

SEQ ID NO: 27198 - DNA, 15 bp, Homo sapiens
atcatctgtcaactc

SEQ ID NO: 27199 - DNA, 15 bp, Homo sapiens
aatcatctgtcaact

SEQ ID NO: 27200 - DNA, 15 bp, Homo sapiens
gaatcatctgtcaac

SEQ ID NO: 27201 - DNA, 15 bp, Homo sapiens
ggaatcatctgtcaa

SEQ ID NO: 27202 - DNA, 15 bp, Homo sapiens
gggaatcatctgtca

SEQ ID NO: 27203 - DNA, 15 bp, Homo sapiens
ggggaatcatctgtc

SEQ ID NO: 27204 - DNA, 15 bp, Homo sapiens
tggggaatcatctgt

SEQ ID NO: 27205 - DNA, 15 bp, Homo sapiens
atggggaatcatctg

SEQ ID NO: 27206 - DNA, 15 bp, Homo sapiens
tatggggaatcatct

SEQ ID NO: 27207 - DNA, 15 bp, Homo sapiens
ttatggggaatcatc

SEQ ID NO: 27208 - DNA, 15 bp, Homo sapiens
gttatggggaatcat

SEQ ID NO: 27209 - DNA, 15 bp, Homo sapiens
agttatggggaatca

SEQ ID NO: 27210 - DNA, 15 bp, Homo sapiens
aagttatggggaatc

SEQ ID NO: 27211 - DNA, 15 bp, Homo sapiens
taagttatggggaat

SEQ ID NO: 27212 - DNA, 15 bp, Homo sapiens
ataagttatggggaa

SEQ ID NO: 27213 - DNA, 15 bp, Homo sapiens
aataagttatgggga

SEQ ID NO: 27214 - DNA, 15 bp, Homo sapiens
aaataagttatgggg

SEQ ID NO: 27215 - DNA, 15 bp, Homo sapiens
caaataagttatggg

SEQ ID NO: 27216 - DNA, 15 bp, Homo sapiens
tcaaataagttatgg

SEQ ID NO: 27217 - DNA, 15 bp, Homo sapiens
ttcaaataagttatg

SEQ ID NO: 27218 - DNA, 15 bp, Homo sapiens
tttcaaataagttat

SEQ ID NO: 27219 - DNA, 15 bp, Homo sapiens
ctttcaaataagtta

SEQ ID NO: 27220 - DNA, 15 bp, Homo sapiens
cctttcaaataagtt

SEQ ID NO: 27221 - DNA, 15 bp, Homo sapiens
gcctttcaaataagt

SEQ ID NO: 27222 - DNA, 15 bp, Homo sapiens
ggcctttcaaataag

SEQ ID NO: 27223 - DNA, 15 bp, Homo sapiens
aggcctttcaaataa

SEQ ID NO: 27224 - DNA, 15 bp, Homo sapiens
gaggcctttcaaata

SEQ ID NO: 27225 - DNA, 15 bp, Homo sapiens
agaggcctttcaaat

SEQ ID NO: 27226 - DNA, 15 bp, Homo sapiens
cagaggcctttcaaa

SEQ ID NO: 27227 - DNA, 15 bp, Homo sapiens
tcagaggcctttcaa

SEQ ID NO: 27228 - DNA, 15 bp, Homo sapiens
ctcagaggcctttca

SEQ ID NO: 27229 - DNA, 15 bp, Homo sapiens
gctcagaggcctttc

SEQ ID NO: 27230 - DNA, 15 bp, Homo sapiens
tgctcagaggccttt

SEQ ID NO: 27231 - DNA, 15 bp, Homo sapiens
ctgctcagaggcctt

SEQ ID NO: 27232 - DNA, 15 bp, Homo sapiens
cctgctcagaggcct

SEQ ID NO: 27233 - DNA, 15 bp, Homo sapiens
ccctgctcagaggcc

SEQ ID NO: 27234 - DNA, 15 bp, Homo sapiens
tccctgctcagaggc

SEQ ID NO: 27235 - DNA, 15 bp, Homo sapiens
ctccctgctcagagg

SEQ ID NO: 27236 - DNA, 15 bp, Homo sapiens
cctccctgctcagag

SEQ ID NO: 27237 - DNA, 15 bp, Homo sapiens
ccctccctgctcaga

SEQ ID NO: 27238 - DNA, 15 bp, Homo sapiens
tccctccctgctcag

SEQ ID NO: 27239 - DNA, 15 bp, Homo sapiens
ctccctccctgctca

SEQ ID NO: 27240 - DNA, 15 bp, Homo sapiens
cctccctccctgctc

SEQ ID NO: 27241 - DNA, 15 bp, Homo sapiens
ccctccctccctgct

SEQ ID NO: 27242 - DNA, 15 bp, Homo sapiens
tccctccctccctgc

SEQ ID NO: 27243 - DNA, 15 bp, Homo sapiens
ttccctccctccctg

SEQ ID NO: 27244 - DNA, 15 bp, Homo sapiens
tttccctccctccct

SEQ ID NO: 27245 - DNA, 15 bp, Homo sapiens
atttccctccctccc

SEQ ID NO: 27246 - DNA, 15 bp, Homo sapiens
tatttccctccctcc

SEQ ID NO: 27247 - DNA, 15 bp, Homo sapiens
ctatttccctccctc

SEQ ID NO: 27248 - DNA, 15 bp, Homo sapiens
cctatttccctccct

SEQ ID NO: 27249 - DNA, 15 bp, Homo sapiens
ccctatttccctccc

SEQ ID NO: 27250 - DNA, 15 bp, Homo sapiens
accctatttccctcc

SEQ ID NO: 27251 - DNA, 15 bp, Homo sapiens
aaccctatttccctc

SEQ ID NO: 27252 - DNA, 15 bp, Homo sapiens
taaccctatttccct

SEQ ID NO: 27253 - DNA, 15 bp, Homo sapiens
ataaccctatttccc

SEQ ID NO: 27254 - DNA, 15 bp, Homo sapiens
cataaccctatttcc

SEQ ID NO: 27255 - DNA, 15 bp, Homo sapiens
gcataaccctatttc

SEQ ID NO: 27256 - DNA, 15 bp, Homo sapiens
agcataaccctattt

SEQ ID NO: 27257 - DNA, 15 bp, Homo sapiens
tagcataaccctatt

SEQ ID NO: 27258 - DNA, 15 bp, Homo sapiens
atagcataaccctat

SEQ ID NO: 27259 - DNA, 15 bp, Homo sapiens
aatagcataacccta

SEQ ID NO: 27260 - DNA, 15 bp, Homo sapiens
caatagcataaccct

SEQ ID NO: 27261 - DNA, 15 bp, Homo sapiens
acaatagcataaccc

SEQ ID NO: 27262 - DNA, 15 bp, Homo sapiens
cacaatagcataacc

SEQ ID NO: 27263 - DNA, 15 bp, Homo sapiens
acacaatagcataac

SEQ ID NO: 27264 - DNA, 15 bp, Homo sapiens
cacacaatagcataa

SEQ ID NO: 27265 - DNA, 15 bp, Homo sapiens
tcacacaatagcata

SEQ ID NO: 27266 - DNA, 15 bp, Homo sapiens
atcacacaatagcat

SEQ ID NO: 27267 - DNA, 15 bp, Homo sapiens
aatcacacaatagca

SEQ ID NO: 27268 - DNA, 15 bp, Homo sapiens
caatcacacaatagc

SEQ ID NO: 27269 - DNA, 15 bp, Homo sapiens
ccaatcacacaatag

SEQ ID NO: 27270 - DNA, 15 bp, Homo sapiens
cccaatcacacaata

SEQ ID NO: 27271 - DNA, 15 bp, Homo sapiens
gcccaatcacacaat

SEQ ID NO: 27272 - DNA, 15 bp, Homo sapiens
ggcccaatcacacaa

SEQ ID NO: 27273 - DNA, 15 bp, Homo sapiens
aggcccaatcacaca

SEQ ID NO: 27274 - DNA, 15 bp, Homo sapiens
aaggcccaatcacac

SEQ ID NO: 27275 - DNA, 15 bp, Homo sapiens
caaggcccaatcaca

SEQ ID NO: 27276 - DNA, 15 bp, Homo sapiens
tcaaggcccaatcac

SEQ ID NO: 27277 - DNA, 15 bp, Homo sapiens
ttcaaggcccaatca

SEQ ID NO: 27278 - DNA, 15 bp, Homo sapiens
attcaaggcccaatc

SEQ ID NO: 27279 - DNA, 15 bp, Homo sapiens
cattcaaggcccaat

SEQ ID NO: 27280 - DNA, 15 bp, Homo sapiens
ccattcaaggcccaa

SEQ ID NO: 27281 - DNA, 15 bp, Homo sapiens
gccattcaaggccca

SEQ ID NO: 27282 - DNA, 15 bp, Homo sapiens
cgccattcaaggccc

SEQ ID NO: 27283 - DNA, 15 bp, Homo sapiens
acgccattcaaggcc

SEQ ID NO: 27284 - DNA, 15 bp, Homo sapiens
cacgccattcaaggc

SEQ ID NO: 27285 - DNA, 15 bp, Homo sapiens
tcacgccattcaagg

SEQ ID NO: 27286 - DNA, 15 bp, Homo sapiens
ctcacgccattcaag

SEQ ID NO: 27287 - DNA, 15 bp, Homo sapiens
actcacgccattcaa

SEQ ID NO: 27288 - DNA, 15 bp, Homo sapiens
cactcacgccattca

SEQ ID NO: 27289 - DNA, 15 bp, Homo sapiens
tcactcacgccattc

SEQ ID NO: 27290 - DNA, 15 bp, Homo sapiens
gtcactcacgccatt

SEQ ID NO: 27291 - DNA, 15 bp, Homo sapiens
tgtcactcacgccat

SEQ ID NO: 27292 - DNA, 15 bp, Homo sapiens
gtgtcactcacgcca

SEQ ID NO: 27293 - DNA, 15 bp, Homo sapiens
tgtgtcactcacgcc

SEQ ID NO: 27294 - DNA, 15 bp, Homo sapiens
ctgtgtcactcacgc

SEQ ID NO: 27295 - DNA, 15 bp, Homo sapiens
actgtgtcactcacg

SEQ ID NO: 27296 - DNA, 15 bp, Homo sapiens
cactgtgtcactcac

SEQ ID NO: 27297 - DNA, 15 bp, Homo sapiens
ccactgtgtcactca

SEQ ID NO: 27298 - DNA, 15 bp, Homo sapiens
gccactgtgtcactc

SEQ ID NO: 27299 - DNA, 15 bp, Homo sapiens
ggccactgtgtcact

SEQ ID NO: 27300 - DNA, 15 bp, Homo sapiens
tggccactgtgtcac

SEQ ID NO: 27301 - DNA, 15 bp, Homo sapiens
ctggccactgtgtca

SEQ ID NO: 27302 - DNA, 15 bp, Homo sapiens
actggccactgtgtc

SEQ ID NO: 27303 - DNA, 15 bp, Homo sapiens
tactggccactgtgt

SEQ ID NO: 27304 - DNA, 15 bp, Homo sapiens
gtactggccactgtg

SEQ ID NO: 27305 - DNA, 15 bp, Homo sapiens
agtactggccactgt

SEQ ID NO: 27306 - DNA, 15 bp, Homo sapiens
aagtactggccactg

SEQ ID NO: 27307 - DNA, 15 bp, Homo sapiens
aaagtactggccact

SEQ ID NO: 27308 - DNA, 15 bp, Homo sapiens
caaagtactggccac

SEQ ID NO: 27309 - DNA, 15 bp, Homo sapiens
acaaagtactggcca

SEQ ID NO: 27310 - DNA, 15 bp, Homo sapiens
cacaaagtactggcc

SEQ ID NO: 27311 - DNA, 15 bp, Homo sapiens
tcacaaagtactggc

SEQ ID NO: 27312 - DNA, 15 bp, Homo sapiens
atcacaaagtactgg

SEQ ID NO: 27313 - DNA, 15 bp, Homo sapiens
tatcacaaagtactg

SEQ ID NO: 27314 - DNA, 15 bp, Homo sapiens
ctatcacaaagtact

SEQ ID NO: 27315 - DNA, 15 bp, Homo sapiens
actatcacaaagtac

SEQ ID NO: 27316 - DNA, 15 bp, Homo sapiens
aactatcacaaagta

SEQ ID NO: 27317 - DNA, 15 bp, Homo sapiens
caactatcacaaagt

SEQ ID NO: 27318 - DNA, 15 bp, Homo sapiens
acaactatcacaaag

SEQ ID NO: 27319 - DNA, 15 bp, Homo sapiens
cacaactatcacaaa

SEQ ID NO: 27320 - DNA, 15 bp, Homo sapiens
tcacaactatcacaa

SEQ ID NO: 27321 - DNA, 15 bp, Homo sapiens
ctcacaactatcaca

SEQ ID NO: 27322 - DNA, 15 bp, Homo sapiens
actcacaactatcac

SEQ ID NO: 27323 - DNA, 15 bp, Homo sapiens
gactcacaactatca

SEQ ID NO: 27324 - DNA, 15 bp, Homo sapiens
agactcacaactatc

SEQ ID NO: 27325 - DNA, 15 bp, Homo sapiens
cagactcacaactat

SEQ ID NO: 27326 - DNA, 15 bp, Homo sapiens
ccagactcacaacta

SEQ ID NO: 27327 - DNA, 15 bp, Homo sapiens
tccagactcacaact

SEQ ID NO: 27328 - DNA, 15 bp, Homo sapiens
ctccagactcacaac

SEQ ID NO: 27329 - DNA, 15 bp, Homo sapiens
tctccagactcacaa

SEQ ID NO: 27330 - DNA, 15 bp, Homo sapiens
ttctccagactcaca

SEQ ID NO: 27331 - DNA, 15 bp, Homo sapiens
cttctccagactcac

SEQ ID NO: 27332 - DNA, 15 bp, Homo sapiens
ccttctccagactca

SEQ ID NO: 27333 - DNA, 15 bp, Homo sapiens
cccttctccagactc

SEQ ID NO: 27334 - DNA, 15 bp, Homo sapiens
tcccttctccagact

SEQ ID NO: 27335 - DNA, 15 bp, Homo sapiens
ctcccttctccagac

SEQ ID NO: 27336 - DNA, 15 bp, Homo sapiens
actcccttctccaga

SEQ ID NO: 27337 - DNA, 15 bp, Homo sapiens
aactcccttctccag

SEQ ID NO: 27338 - DNA, 15 bp, Homo sapiens
taactcccttctcca

SEQ ID NO: 27339 - DNA, 15 bp, Homo sapiens
ctaactcccttctcc

SEQ ID NO: 27340 - DNA, 15 bp, Homo sapiens
gctaactcccttctc

SEQ ID NO: 27341 - DNA, 15 bp, Homo sapiens
cgctaactcccttct

SEQ ID NO: 27342 - DNA, 15 bp, Homo sapiens
tcgctaactcccttc

SEQ ID NO: 27343 - DNA, 15 bp, Homo sapiens
ttcgctaactccctt

SEQ ID NO: 27344 - DNA, 15 bp, Homo sapiens
cttcgctaactccct

SEQ ID NO: 27345 - DNA, 15 bp, Homo sapiens
ccttcgctaactccc

SEQ ID NO: 27346 - DNA, 15 bp, Homo sapiens
gccttcgctaactcc

SEQ ID NO: 27347 - DNA, 15 bp, Homo sapiens
ggccttcgctaactc

SEQ ID NO: 27348 - DNA, 15 bp, Homo sapiens
tggccttcgctaact

SEQ ID NO: 27349 - DNA, 15 bp, Homo sapiens
atggccttcgctaac

SEQ ID NO: 27350 - DNA, 15 bp, Homo sapiens
aatggccttcgctaa

SEQ ID NO: 27351 - DNA, 15 bp, Homo sapiens
caatggccttcgcta

SEQ ID NO: 27352 - DNA, 15 bp, Homo sapiens
tcaatggccttcgct

SEQ ID NO: 27353 - DNA, 15 bp, Homo sapiens
gtcaatggccttcgc

SEQ ID NO: 27354 - DNA, 15 bp, Homo sapiens
tgtcaatggccttcg

SEQ ID NO: 27355 - DNA, 15 bp, Homo sapiens
atgtcaatggccttc

SEQ ID NO: 27356 - DNA, 15 bp, Homo sapiens
gatgtcaatggcctt

SEQ ID NO: 27357 - DNA, 15 bp, Homo sapiens
ggatgtcaatggcct

SEQ ID NO: 27358 - DNA, 15 bp, Homo sapiens
tggatgtcaatggcc

SEQ ID NO: 27359 - DNA, 15 bp, Homo sapiens
gtggatgtcaatggc

SEQ ID NO: 27360 - DNA, 15 bp, Homo sapiens
ggtggatgtcaatgg

SEQ ID NO: 27361 - DNA, 15 bp, Homo sapiens
tggtggatgtcaatg

SEQ ID NO: 27362 - DNA, 15 bp, Homo sapiens
ctggtggatgtcaat

SEQ ID NO: 27363 - DNA, 15 bp, Homo sapiens
cctggtggatgtcaa

SEQ ID NO: 27364 - DNA, 15 bp, Homo sapiens
tcctggtggatgtca

SEQ ID NO: 27365 - DNA, 15 bp, Homo sapiens
ttcctggtggatgtc

SEQ ID NO: 27366 - DNA, 15 bp, Homo sapiens
attcctggtggatgt

SEQ ID NO: 27367 - DNA, 15 bp, Homo sapiens
gattcctggtggatg

SEQ ID NO: 27368 - DNA, 15 bp, Homo sapiens
ggattcctggtggat

SEQ ID NO: 27369 - DNA, 15 bp, Homo sapiens
aggattcctggtgga

SEQ ID NO: 27370 - DNA, 15 bp, Homo sapiens
taggattcctggtgg

SEQ ID NO: 27371 - DNA, 15 bp, Homo sapiens
ttaggattcctggtg

SEQ ID NO: 27372 - DNA, 15 bp, Homo sapiens
tttaggattcctggt

SEQ ID NO: 27373 - DNA, 15 bp, Homo sapiens
ttttaggattcctgg

SEQ ID NO: 27374 - DNA, 15 bp, Homo sapiens
cttttaggattcctg

SEQ ID NO: 27375 - DNA, 15 bp, Homo sapiens
acttttaggattcct

SEQ ID NO: 27376 - DNA, 15 bp, Homo sapiens
aacttttaggattcc

SEQ ID NO: 27377 - DNA, 15 bp, Homo sapiens
gaacttttaggattc

SEQ ID NO: 27378 - DNA, 15 bp, Homo sapiens
tgaacttttaggatt

SEQ ID NO: 27379 - DNA, 15 bp, Homo sapiens
ttgaacttttaggat

SEQ ID NO: 27380 - DNA, 15 bp, Homo sapiens
attgaacttttagga

SEQ ID NO: 27381 - DNA, 15 bp, Homo sapiens
tattgaacttttagg

SEQ ID NO: 27382 - DNA, 15 bp, Homo sapiens
atattgaacttttag

SEQ ID NO: 27383 - DNA, 15 bp, Homo sapiens
tatattgaactttta

SEQ ID NO: 27384 - DNA, 15 bp, Homo sapiens
ttatattgaactttt

SEQ ID NO: 27385 - DNA, 15 bp, Homo sapiens
attatattgaacttt

SEQ ID NO: 27386 - DNA, 15 bp, Homo sapiens
aattatattgaactt

SEQ ID NO: 27387 - DNA, 15 bp, Homo sapiens
aaattatattgaact

SEQ ID NO: 27388 - DNA, 15 bp, Homo sapiens
aaaattatattgaac

SEQ ID NO: 27389 - DNA, 15 bp, Homo sapiens
taaaattatattgaa

SEQ ID NO: 27390 - DNA, 15 bp, Homo sapiens
ttaaaattatattga

SEQ ID NO: 27391 - DNA, 15 bp, Homo sapiens
gttaaaattatattg

SEQ ID NO: 27392 - DNA, 15 bp, Homo sapiens
agttaaaattatatt

SEQ ID NO: 27393 - DNA, 15 bp, Homo sapiens
aagttaaaattatat

SEQ ID NO: 27394 - DNA, 15 bp, Homo sapiens
aaagttaaaattata

SEQ ID NO: 27395 - DNA, 15 bp, Homo sapiens
aaaagttaaaattat

SEQ ID NO: 27396 - DNA, 15 bp, Homo sapiens
gaaaagttaaaatta

SEQ ID NO: 27397 - DNA, 15 bp, Homo sapiens
agaaaagttaaaatt

SEQ ID NO: 27398 - DNA, 15 bp, Homo sapiens
gagaaaagttaaaat

SEQ ID NO: 27399 - DNA, 15 bp, Homo sapiens
ggagaaaagttaaaa

SEQ ID NO: 27400 - DNA, 15 bp, Homo sapiens
gggagaaaagttaaa

SEQ ID NO: 27401 - DNA, 15 bp, Homo sapiens
agggagaaaagttaa

SEQ ID NO: 27402 - DNA, 15 bp, Homo sapiens
gagggagaaaagtta

SEQ ID NO: 27403 - DNA, 15 bp, Homo sapiens
tgagggagaaaagtt

SEQ ID NO: 27404 - DNA, 15 bp, Homo sapiens
ctgagggagaaaagt

SEQ ID NO: 27405 - DNA, 15 bp, Homo sapiens
actgagggagaaaag

SEQ ID NO: 27406 - DNA, 15 bp, Homo sapiens
gactgagggagaaaa

SEQ ID NO: 27407 - DNA, 15 bp, Homo sapiens
agactgagggagaaa

SEQ ID NO: 27408 - DNA, 15 bp, Homo sapiens
aagactgagggagaa

SEQ ID NO: 27409 - DNA, 15 bp, Homo sapiens
aaagactgagggaga

SEQ ID NO: 27410 - DNA, 15 bp, Homo sapiens
aaaagactgagggag

SEQ ID NO: 27411 - DNA, 15 bp, Homo sapiens
aaaaagactgaggga

SEQ ID NO: 27412 - DNA, 15 bp, Homo sapiens
gaaaaagactgaggg

SEQ ID NO: 27413 - DNA, 15 bp, Homo sapiens
tgaaaaagactgagg

SEQ ID NO: 27414 - DNA, 15 bp, Homo sapiens
ttgaaaaagactgag

SEQ ID NO: 27415 - DNA, 15 bp, Homo sapiens
tttgaaaaagactga

SEQ ID NO: 27416 - DNA, 15 bp, Homo sapiens
ctttgaaaaagactg

SEQ ID NO: 27417 - DNA, 15 bp, Homo sapiens
gctttgaaaaagact

SEQ ID NO: 27418 - DNA, 15 bp, Homo sapiens
agctttgaaaaagac

SEQ ID NO: 27419 - DNA, 15 bp, Homo sapiens
cagctttgaaaaaga

SEQ ID NO: 27420 - DNA, 15 bp, Homo sapiens
acagctttgaaaaag

SEQ ID NO: 27421 - DNA, 15 bp, Homo sapiens
gacagctttgaaaaa

SEQ ID NO: 27422 - DNA, 15 bp, Homo sapiens
tgacagctttgaaaa

SEQ ID NO: 27423 - DNA, 15 bp, Homo sapiens
ttgacagctttgaaa

SEQ ID NO: 27424 - DNA, 15 bp, Homo sapiens
attgacagctttgaa

SEQ ID NO: 27425 - DNA, 15 bp, Homo sapiens
tattgacagctttga

SEQ ID NO: 27426 - DNA, 15 bp, Homo sapiens
ttattgacagctttg

SEQ ID NO: 27427 - DNA, 15 bp, Homo sapiens
cttattgacagcttt

SEQ ID NO: 27428 - DNA, 15 bp, Homo sapiens
ccttattgacagctt

SEQ ID NO: 27429 - DNA, 15 bp, Homo sapiens
tccttattgacagct

SEQ ID NO: 27430 - DNA, 15 bp, Homo sapiens
gtccttattgacagc

SEQ ID NO: 27431 - DNA, 15 bp, Homo sapiens
ggtccttattgacag

SEQ ID NO: 27432 - DNA, 15 bp, Homo sapiens
tggtccttattgaca

SEQ ID NO: 27433 - DNA, 15 bp, Homo sapiens
ttggtccttattgac

SEQ ID NO: 27434 - DNA, 15 bp, Homo sapiens
tttggtccttattga

SEQ ID NO: 27435 - DNA, 15 bp, Homo sapiens
ttttggtccttattg

SEQ ID NO: 27436 - DNA, 15 bp, Homo sapiens
gttttggtccttatt

SEQ ID NO: 27437 - DNA, 15 bp, Homo sapiens
tgttttggtccttat

SEQ ID NO: 27438 - DNA, 15 bp, Homo sapiens
ctgttttggtcctta

SEQ ID NO: 27439 - DNA, 15 bp, Homo sapiens
tctgttttggtcctt

SEQ ID NO: 27440 - DNA, 15 bp, Homo sapiens
gtctgttttggtcct

SEQ ID NO: 27441 - DNA, 15 bp, Homo sapiens
agtctgttttggtcc

SEQ ID NO: 27442 - DNA, 15 bp, Homo sapiens
tagtctgttttggtc

SEQ ID NO: 27443 - DNA, 15 bp, Homo sapiens
ttagtctgttttggt

SEQ ID NO: 27444 - DNA, 15 bp, Homo sapiens
attagtctgttttgg

SEQ ID NO: 27445 - DNA, 15 bp, Homo sapiens
aattagtctgttttg

SEQ ID NO: 27446 - DNA, 15 bp, Homo sapiens
aaattagtctgtttt

SEQ ID NO: 27447 - DNA, 15 bp, Homo sapiens
gaaattagtctgttt

SEQ ID NO: 27448 - DNA, 15 bp, Homo sapiens
tgaaattagtctgtt

SEQ ID NO: 27449 - DNA, 15 bp, Homo sapiens
ttgaaattagtctgt

SEQ ID NO: 27450 - DNA, 15 bp, Homo sapiens
tttgaaattagtctg

SEQ ID NO: 27451 - DNA, 15 bp, Homo sapiens
atttgaaattagtct

SEQ ID NO: 27452 - DNA, 15 bp, Homo sapiens
aatttgaaattagtc

SEQ ID NO: 27453 - DNA, 15 bp, Homo sapiens
gaatttgaaattagt

SEQ ID NO: 27454 - DNA, 15 bp, Homo sapiens
ggaatttgaaattag

SEQ ID NO: 27455 - DNA, 15 bp, Homo sapiens
aggaatttgaaatta

SEQ ID NO: 27456 - DNA, 15 bp, Homo sapiens
gaggaatttgaaatt

SEQ ID NO: 27457 - DNA, 15 bp, Homo sapiens
agaggaatttgaaat

SEQ ID NO: 27458 - DNA, 15 bp, Homo sapiens
aagaggaatttgaaa

SEQ ID NO: 27459 - DNA, 15 bp, Homo sapiens
gaagaggaatttgaa

SEQ ID NO: 27460 - DNA, 15 bp, Homo sapiens
agaagaggaatttga

SEQ ID NO: 27461 - DNA, 15 bp, Homo sapiens
cagaagaggaatttg

SEQ ID NO: 27462 - DNA, 15 bp, Homo sapiens
ccagaagaggaattt

SEQ ID NO: 27463 - DNA, 15 bp, Homo sapiens
accagaagaggaatt

SEQ ID NO: 27464 - DNA, 15 bp, Homo sapiens
aaccagaagaggaat

SEQ ID NO: 27465 - DNA, 15 bp, Homo sapiens
caaccagaagaggaa

SEQ ID NO: 27466 - DNA, 15 bp, Homo sapiens
gcaaccagaagagga

SEQ ID NO: 27467 - DNA, 15 bp, Homo sapiens
agcaaccagaagagg

SEQ ID NO: 27468 - DNA, 15 bp, Homo sapiens
cagcaaccagaagag

SEQ ID NO: 27469 - DNA, 15 bp, Homo sapiens
acagcaaccagaaga

SEQ ID NO: 27470 - DNA, 15 bp, Homo sapiens
cacagcaaccagaag

SEQ ID NO: 27471 - DNA, 15 bp, Homo sapiens
acacagcaaccagaa

SEQ ID NO: 27472 - DNA, 15 bp, Homo sapiens
gacacagcaaccaga

SEQ ID NO: 27473 - DNA, 15 bp, Homo sapiens
agacacagcaaccag

SEQ ID NO: 27474 - DNA, 15 bp, Homo sapiens
gagacacagcaacca

SEQ ID NO: 27475 - DNA, 15 bp, Homo sapiens
agagacacagcaacc

SEQ ID NO: 27476 - DNA, 15 bp, Homo sapiens
gagagacacagcaac

SEQ ID NO: 27477 - DNA, 15 bp, Homo sapiens
tgagagacacagcaa

SEQ ID NO: 27478 - DNA, 15 bp, Homo sapiens
ttgagagacacagca

SEQ ID NO: 27479 - DNA, 15 bp, Homo sapiens
gttgagagacacagc

SEQ ID NO: 27480 - DNA, 15 bp, Homo sapiens
tgttgagagacacag

SEQ ID NO: 27481 - DNA, 15 bp, Homo sapiens
ctgttgagagacaca

SEQ ID NO: 27482 - DNA, 15 bp, Homo sapiens
gctgttgagagacac

SEQ ID NO: 27483 - DNA, 15 bp, Homo sapiens
agctgttgagagaca

SEQ ID NO: 27484 - DNA, 15 bp, Homo sapiens
tagctgttgagagac

SEQ ID NO: 27485 - DNA, 15 bp, Homo sapiens
ctagctgttgagaga

SEQ ID NO: 27486 - DNA, 15 bp, Homo sapiens
tctagctgttgagag

SEQ ID NO: 27487 - DNA, 15 bp, Homo sapiens
ctctagctgttgaga

SEQ ID NO: 27488 - DNA, 15 bp, Homo sapiens
gctctagctgttgag

SEQ ID NO: 27489 - DNA, 15 bp, Homo sapiens
agctctagctgttga

SEQ ID NO: 27490 - DNA, 15 bp, Homo sapiens
cagctctagctgttg

SEQ ID NO: 27491 - DNA, 15 bp, Homo sapiens
gcagctctagctgtt

SEQ ID NO: 27492 - DNA, 15 bp, Homo sapiens
agcagctctagctgt

SEQ ID NO: 27493 - DNA, 15 bp, Homo sapiens
tagcagctctagctg

SEQ ID NO: 27494 - DNA, 15 bp, Homo sapiens
ctagcagctctagct

SEQ ID NO: 27495 - DNA, 15 bp, Homo sapiens
cctagcagctctagc

SEQ ID NO: 27496 - DNA, 15 bp, Homo sapiens
tcctagcagctctag

SEQ ID NO: 27497 - DNA, 15 bp, Homo sapiens
ttcctagcagctcta

SEQ ID NO: 27498 - DNA, 15 bp, Homo sapiens
attcctagcagctct

SEQ ID NO: 27499 - DNA, 15 bp, Homo sapiens
tattcctagcagctc

SEQ ID NO: 27500 - DNA, 15 bp, Homo sapiens
ttattcctagcagct

SEQ ID NO: 27501 - DNA, 15 bp, Homo sapiens
tttattcctagcagc

SEQ ID NO: 27502 - DNA, 15 bp, Homo sapiens
ttttattcctagcag

SEQ ID NO: 27503 - DNA, 15 bp, Homo sapiens
tttttattcctagca

SEQ ID NO: 27504 - DNA, 15 bp, Homo sapiens
ctttttattcctagc

SEQ ID NO: 27505 - DNA, 15 bp, Homo sapiens
cctttttattcctag

SEQ ID NO: 27506 - DNA, 15 bp, Homo sapiens
ccctttttattccta

SEQ ID NO: 27507 - DNA, 15 bp, Homo sapiens
tccctttttattcct

SEQ ID NO: 27508 - DNA, 15 bp, Homo sapiens
ctccctttttattcc

SEQ ID NO: 27509 - DNA, 15 bp, Homo sapiens
tctccctttttattc

SEQ ID NO: 27510 - DNA, 15 bp, Homo sapiens
gtctccctttttatt

SEQ ID NO: 27511 - DNA, 15 bp, Homo sapiens
tgtctccctttttat

SEQ ID NO: 27512 - DNA, 15 bp, Homo sapiens
ttgtctcccttttta

SEQ ID NO: 27513 - DNA, 15 bp, Homo sapiens
tttgtctcccttttt

SEQ ID NO: 27514 - DNA, 15 bp, Homo sapiens
ttttgtctccctttt

SEQ ID NO: 27515 - DNA, 15 bp, Homo sapiens
gttttgtctcccttt

SEQ ID NO: 27516 - DNA, 15 bp, Homo sapiens
cgttttgtctccctt

SEQ ID NO: 27517 - DNA, 15 bp, Homo sapiens
tcgttttgtctccct

SEQ ID NO: 27518 - DNA, 15 bp, Homo sapiens
atcgttttgtctccc

SEQ ID NO: 27519 - DNA, 15 bp, Homo sapiens
gatcgttttgtctcc

SEQ ID NO: 27520 - DNA, 15 bp, Homo sapiens
ggatcgttttgtctc

SEQ ID NO: 27521 - DNA, 15 bp, Homo sapiens
tggatcgttttgtct

SEQ ID NO: 27522 - DNA, 15 bp, Homo sapiens
gtggatcgttttgtc

SEQ ID NO: 27523 - DNA, 15 bp, Homo sapiens
tgtggatcgttttgt

SEQ ID NO: 27524 - DNA, 15 bp, Homo sapiens
ttgtggatcgttttg

SEQ ID NO: 27525 - DNA, 15 bp, Homo sapiens
cttgtggatcgtttt

SEQ ID NO: 27526 - DNA, 15 bp, Homo sapiens
gcttgtggatcgttt

SEQ ID NO: 27527 - DNA, 15 bp, Homo sapiens
agcttgtggatcgtt

SEQ ID NO: 27528 - DNA, 15 bp, Homo sapiens
tagcttgtggatcgt

SEQ ID NO: 27529 - DNA, 15 bp, Homo sapiens
ctagcttgtggatcg

SEQ ID NO: 27530 - DNA, 15 bp, Homo sapiens
tctagcttgtggatc

SEQ ID NO: 27531 - DNA, 15 bp, Homo sapiens
ctctagcttgtggat

SEQ ID NO: 27532 - DNA, 15 bp, Homo sapiens
tctctagcttgtgga

SEQ ID NO: 27533 - DNA, 15 bp, Homo sapiens
atctctagcttgtgg

SEQ ID NO: 27534 - DNA, 15 bp, Homo sapiens
catctctagcttgtg

SEQ ID NO: 27535 - DNA, 15 bp, Homo sapiens
ccatctctagcttgt

SEQ ID NO: 27536 - DNA, 15 bp, Homo sapiens
accatctctagcttg

SEQ ID NO: 27537 - DNA, 15 bp, Homo sapiens
aaccatctctagctt

SEQ ID NO: 27538 - DNA, 15 bp, Homo sapiens
taaccatctctagct

SEQ ID NO: 27539 - DNA, 15 bp, Homo sapiens
ataaccatctctagc

SEQ ID NO: 27540 - DNA, 15 bp, Homo sapiens
aataaccatctctag

SEQ ID NO: 27541 - DNA, 15 bp, Homo sapiens
gaataaccatctcta

SEQ ID NO: 27542 - DNA, 15 bp, Homo sapiens
ggaataaccatctct

SEQ ID NO: 27543 - DNA, 15 bp, Homo sapiens
gggaataaccatctc

SEQ ID NO: 27544 - DNA, 15 bp, Homo sapiens
ggggaataaccatct

SEQ ID NO: 27545 - DNA, 15 bp, Homo sapiens
tggggaataaccatc

SEQ ID NO: 27546 - DNA, 15 bp, Homo sapiens
ctggggaataaccat

SEQ ID NO: 27547 - DNA, 15 bp, Homo sapiens
gctggggaataacca

SEQ ID NO: 27548 - DNA, 15 bp, Homo sapiens
ggctggggaataacc

SEQ ID NO: 27549 - DNA, 15 bp, Homo sapiens
gggctggggaataac

SEQ ID NO: 27550 - DNA, 15 bp, Homo sapiens
ggggctggggaataa

SEQ ID NO: 27551 - DNA, 15 bp, Homo sapiens
tggggctggggaata

SEQ ID NO: 27552 - DNA, 15 bp, Homo sapiens
gtggggctggggaat

SEQ ID NO: 27553 - DNA, 15 bp, Homo sapiens
tgtggggctggggaa

SEQ ID NO: 27554 - DNA, 15 bp, Homo sapiens
gtgtggggctgggga

SEQ ID NO: 27555 - DNA, 15 bp, Homo sapiens
ggtgtggggctgggg

SEQ ID NO: 27556 - DNA, 15 bp, Homo sapiens
aggtgtggggctggg

SEQ ID NO: 27557 - DNA, 15 bp, Homo sapiens
taggtgtggggctgg

SEQ ID NO: 27558 - DNA, 15 bp, Homo sapiens
ctaggtgtggggctg

SEQ ID NO: 27559 - DNA, 15 bp, Homo sapiens
actaggtgtggggct

SEQ ID NO: 27560 - DNA, 15 bp, Homo sapiens
gactaggtgtggggc

SEQ ID NO: 27561 - DNA, 15 bp, Homo sapiens
tgactaggtgtgggg

SEQ ID NO: 27562 - DNA, 15 bp, Homo sapiens
ctgactaggtgtggg

SEQ ID NO: 27563 - DNA, 15 bp, Homo sapiens
actgactaggtgtgg

SEQ ID NO: 27564 - DNA, 15 bp, Homo sapiens
gactgactaggtgtg

SEQ ID NO: 27565 - DNA, 15 bp, Homo sapiens
tgactgactaggtgt

SEQ ID NO: 27566 - DNA, 15 bp, Homo sapiens
gtgactgactaggtg

SEQ ID NO: 27567 - DNA, 15 bp, Homo sapiens
tgtgactgactaggt

SEQ ID NO: 27568 - DNA, 15 bp, Homo sapiens
ttgtgactgactagg

SEQ ID NO: 27569 - DNA, 15 bp, Homo sapiens
tttgtgactgactag

SEQ ID NO: 27570 - DNA, 15 bp, Homo sapiens
ttttgtgactgacta

SEQ ID NO: 27571 - DNA, 15 bp, Homo sapiens
gttttgtgactgact

SEQ ID NO: 27572 - DNA, 15 bp, Homo sapiens
ggttttgtgactgac

SEQ ID NO: 27573 - DNA, 15 bp, Homo sapiens
gggttttgtgactga

SEQ ID NO: 27574 - DNA, 15 bp, Homo sapiens
agggttttgtgactg

SEQ ID NO: 27575 - DNA, 15 bp, Homo sapiens
tagggttttgtgact

SEQ ID NO: 27576 - DNA, 15 bp, Homo sapiens
ctagggttttgtgac

SEQ ID NO: 27577 - DNA, 15 bp, Homo sapiens
actagggttttgtga

SEQ ID NO: 27578 - DNA, 15 bp, Homo sapiens
aactagggttttgtg

SEQ ID NO: 27579 - DNA, 15 bp, Homo sapiens
aaactagggttttgt

SEQ ID NO: 27580 - DNA, 15 bp, Homo sapiens
aaaactagggttttg

SEQ ID NO: 27581 - DNA, 15 bp, Homo sapiens
caaaactagggtttt

SEQ ID NO: 27582 - DNA, 15 bp, Homo sapiens
tcaaaactagggttt

SEQ ID NO: 27583 - DNA, 15 bp, Homo sapiens
atcaaaactagggtt

SEQ ID NO: 27584 - DNA, 15 bp, Homo sapiens
tatcaaaactagggt

SEQ ID NO: 27585 - DNA, 15 bp, Homo sapiens
atatcaaaactaggg

SEQ ID NO: 27586 - DNA, 15 bp, Homo sapiens
aatatcaaaactagg

SEQ ID NO: 27587 - DNA, 15 bp, Homo sapiens
caatatcaaaactag

SEQ ID NO: 27588 - DNA, 15 bp, Homo sapiens
gcaatatcaaaacta

SEQ ID NO: 27589 - DNA, 15 bp, Homo sapiens
agcaatatcaaaact

SEQ ID NO: 27590 - DNA, 15 bp, Homo sapiens
aagcaatatcaaaac

SEQ ID NO: 27591 - DNA, 15 bp, Homo sapiens
caagcaatatcaaaa

SEQ ID NO: 27592 - DNA, 15 bp, Homo sapiens
tcaagcaatatcaaa

SEQ ID NO: 27593 - DNA, 15 bp, Homo sapiens
ctcaagcaatatcaa

SEQ ID NO: 27594 - DNA, 15 bp, Homo sapiens
gctcaagcaatatca

SEQ ID NO: 27595 - DNA, 15 bp, Homo sapiens
tgctcaagcaatatc

SEQ ID NO: 27596 - DNA, 15 bp, Homo sapiens
ctgctcaagcaatat

SEQ ID NO: 27597 - DNA, 15 bp, Homo sapiens
tctgctcaagcaata

SEQ ID NO: 27598 - DNA, 15 bp, Homo sapiens
ttctgctcaagcaat

SEQ ID NO: 27599 - DNA, 15 bp, Homo sapiens
tttctgctcaagcaa

SEQ ID NO: 27600 - DNA, 15 bp, Homo sapiens
gtttctgctcaagca

SEQ ID NO: 27601 - DNA, 15 bp, Homo sapiens
ggtttctgctcaagc

SEQ ID NO: 27602 - DNA, 15 bp, Homo sapiens
tggtttctgctcaag

SEQ ID NO: 27603 - DNA, 15 bp, Homo sapiens
ctggtttctgctcaa

SEQ ID NO: 27604 - DNA, 15 bp, Homo sapiens
gctggtttctgctca

SEQ ID NO: 27605 - DNA, 15 bp, Homo sapiens
ggctggtttctgctc

SEQ ID NO: 27606 - DNA, 15 bp, Homo sapiens
aggctggtttctgct

SEQ ID NO: 27607 - DNA, 15 bp, Homo sapiens
gaggctggtttctgc

SEQ ID NO: 27608 - DNA, 15 bp, Homo sapiens
ggaggctggtttctg

SEQ ID NO: 27609 - DNA, 15 bp, Homo sapiens
tggaggctggtttct

SEQ ID NO: 27610 - DNA, 15 bp, Homo sapiens
ttggaggctggtttc

SEQ ID NO: 27611 - DNA, 15 bp, Homo sapiens
cttggaggctggttt

SEQ ID NO: 27612 - DNA, 15 bp, Homo sapiens
tcttggaggctggtt

SEQ ID NO: 27613 - DNA, 15 bp, Homo sapiens
ctcttggaggctggt

SEQ ID NO: 27614 - DNA, 15 bp, Homo sapiens
tctcttggaggctgg

SEQ ID NO: 27615 - DNA, 15 bp, Homo sapiens
ttctcttggaggctg

SEQ ID NO: 27616 - DNA, 15 bp, Homo sapiens
attctcttggaggct

SEQ ID NO: 27617 - DNA, 15 bp, Homo sapiens
tattctcttggaggc

SEQ ID NO: 27618 - DNA, 15 bp, Homo sapiens
ttattctcttggagg

SEQ ID NO: 27619 - DNA, 15 bp, Homo sapiens
cttattctcttggag

SEQ ID NO: 27620 - DNA, 15 bp, Homo sapiens
tcttattctcttgga

SEQ ID NO: 27621 - DNA, 15 bp, Homo sapiens
ttcttattctcttgg

SEQ ID NO: 27622 - DNA, 15 bp, Homo sapiens
cttcttattctcttg

SEQ ID NO: 27623 - DNA, 15 bp, Homo sapiens
tcttcttattctctt

SEQ ID NO: 27624 - DNA, 15 bp, Homo sapiens
ttcttcttattctct

SEQ ID NO: 27625 - DNA, 15 bp, Homo sapiens
tttcttcttattctc

SEQ ID NO: 27626 - DNA, 15 bp, Homo sapiens
ctttcttcttattct

SEQ ID NO: 27627 - DNA, 15 bp, Homo sapiens
cctttcttcttattc

SEQ ID NO: 27628 - DNA, 15 bp, Homo sapiens
ccctttcttcttatt

SEQ ID NO: 27629 - DNA, 15 bp, Homo sapiens
gccctttcttcttat

SEQ ID NO: 27630 - DNA, 15 bp, Homo sapiens
ggccctttcttctta

SEQ ID NO: 27631 - DNA, 15 bp, Homo sapiens
aggccctttcttctt

SEQ ID NO: 27632 - DNA, 15 bp, Homo sapiens
caggccctttcttct

SEQ ID NO: 27633 - DNA, 15 bp, Homo sapiens
ccaggccctttcttc

SEQ ID NO: 27634 - DNA, 15 bp, Homo sapiens
cccaggccctttctt

SEQ ID NO: 27635 - DNA, 15 bp, Homo sapiens
acccaggccctttct

SEQ ID NO: 27636 - DNA, 15 bp, Homo sapiens
gacccaggccctttc

SEQ ID NO: 27637 - DNA, 15 bp, Homo sapiens
agacccaggcccttt

SEQ ID NO: 27638 - DNA, 15 bp, Homo sapiens
gcagccacaggagcc

SEQ ID NO: 27639 - DNA, 15 bp, Homo sapiens
ggcagccacaggagc

SEQ ID NO: 27640 - DNA, 15 bp, Homo sapiens
aggcagccacaggag

SEQ ID NO: 27641 - DNA, 15 bp, Homo sapiens
gaggcagccacagga

SEQ ID NO: 27642 - DNA, 15 bp, Homo sapiens
ggaggcagccacagg

SEQ ID NO: 27643 - DNA, 15 bp, Homo sapiens
tggaggcagccacag

SEQ ID NO: 27644 - DNA, 15 bp, Homo sapiens
gtggaggcagccaca

SEQ ID NO: 27645 - DNA, 15 bp, Homo sapiens
agtggaggcagccac

SEQ ID NO: 27646 - DNA, 15 bp, Homo sapiens
gagtggaggcagcca

SEQ ID NO: 27647 - DNA, 15 bp, Homo sapiens
tgagtggaggcagcc

SEQ ID NO: 27648 - DNA, 15 bp, Homo sapiens
ttgagtggaggcagc

SEQ ID NO: 27649 - DNA, 15 bp, Homo sapiens
tttgagtggaggcag

SEQ ID NO: 27650 - DNA, 15 bp, Homo sapiens
ttttgagtggaggca

SEQ ID NO: 27651 - DNA, 15 bp, Homo sapiens
gttttgagtggaggc

SEQ ID NO: 27652 - DNA, 15 bp, Homo sapiens
ggttttgagtggagg

SEQ ID NO: 27653 - DNA, 15 bp, Homo sapiens
gggttttgagtggag

SEQ ID NO: 27654 - DNA, 15 bp, Homo sapiens
agggttttgagtgga

SEQ ID NO: 27655 - DNA, 15 bp, Homo sapiens
gagggttttgagtgg

SEQ ID NO: 27656 - DNA, 15 bp, Homo sapiens
ggagggttttgagtg

SEQ ID NO: 27657 - DNA, 15 bp, Homo sapiens
tggagggttttgagt

SEQ ID NO: 27658 - DNA, 15 bp, Homo sapiens
ctggagggttttgag

SEQ ID NO: 27659 - DNA, 15 bp, Homo sapiens
gctggagggttttga

SEQ ID NO: 27660 - DNA, 15 bp, Homo sapiens
tgctggagggttttg

SEQ ID NO: 27661 - DNA, 15 bp, Homo sapiens
atgctggagggtttt

SEQ ID NO: 27662 - DNA, 15 bp, Homo sapiens
gatgctggagggttt

SEQ ID NO: 27663 - DNA, 15 bp, Homo sapiens
tgatgctggagggtt

SEQ ID NO: 27664 - DNA, 15 bp, Homo sapiens
ctgatgctggagggt

SEQ ID NO: 27665 - DNA, 15 bp, Homo sapiens
cctgatgctggaggg

SEQ ID NO: 27666 - DNA, 15 bp, Homo sapiens
tcctgatgctggagg

SEQ ID NO: 27667 - DNA, 15 bp, Homo sapiens
gtcctgatgctggag

SEQ ID NO: 27668 - DNA, 15 bp, Homo sapiens
cgtcctgatgctgga

SEQ ID NO: 27669 - DNA, 15 bp, Homo sapiens
acgtcctgatgctgg

SEQ ID NO: 27670 - DNA, 15 bp, Homo sapiens
gacgtcctgatgctg

SEQ ID NO: 27671 - DNA, 15 bp, Homo sapiens
tgacgtcctgatgct

SEQ ID NO: 27672 - DNA, 15 bp, Homo sapiens
ttgacgtcctgatgc

SEQ ID NO: 27673 - DNA, 15 bp, Homo sapiens
cttgacgtcctgatg

SEQ ID NO: 27674 - DNA, 15 bp, Homo sapiens
ccttgacgtcctgat

SEQ ID NO: 27675 - DNA, 15 bp, Homo sapiens
gccttgacgtcctga

SEQ ID NO: 27676 - DNA, 15 bp, Homo sapiens
agccttgacgtcctg

SEQ ID NO: 27677 - DNA, 15 bp, Homo sapiens
cagccttgacgtcct

SEQ ID NO: 27678 - DNA, 15 bp, Homo sapiens
acagccttgacgtcc

SEQ ID NO: 27679 - DNA, 15 bp, Homo sapiens
cacagccttgacgtc

SEQ ID NO: 27680 - DNA, 15 bp, Homo sapiens
tcacagccttgacgt

SEQ ID NO: 27681 - DNA, 15 bp, Homo sapiens
atcacagccttgacg

SEQ ID NO: 27682 - DNA, 15 bp, Homo sapiens
tatcacagccttgac

SEQ ID NO: 27683 - DNA, 15 bp, Homo sapiens
gtatcacagccttga

SEQ ID NO: 27684 - DNA, 15 bp, Homo sapiens
agtatcacagccttg

SEQ ID NO: 27685 - DNA, 15 bp, Homo sapiens
cagtatcacagcctt

SEQ ID NO: 27686 - DNA, 15 bp, Homo sapiens
acagtatcacagcct

SEQ ID NO: 27687 - DNA, 15 bp, Homo sapiens
tacagtatcacagcc

SEQ ID NO: 27688 - DNA, 15 bp, Homo sapiens
gtacagtatcacagc

SEQ ID NO: 27689 - DNA, 15 bp, Homo sapiens
ggtacagtatcacag

SEQ ID NO: 27690 - DNA, 15 bp, Homo sapiens
gggtacagtatcaca

SEQ ID NO: 27691 - DNA, 15 bp, Homo sapiens
agggtacagtatcac

SEQ ID NO: 27692 - DNA, 15 bp, Homo sapiens
cagggtacagtatca

SEQ ID NO: 27693 - DNA, 15 bp, Homo sapiens
tcagggtacagtatc

SEQ ID NO: 27694 - DNA, 15 bp, Homo sapiens
ctcagggtacagtat

SEQ ID NO: 27695 - DNA, 15 bp, Homo sapiens
gctcagggtacagta

SEQ ID NO: 27696 - DNA, 15 bp, Homo sapiens
agctcagggtacagt

SEQ ID NO: 27697 - DNA, 15 bp, Homo sapiens
gagctcagggtacag

SEQ ID NO: 27698 - DNA, 15 bp, Homo sapiens
agagctcagggtaca

SEQ ID NO: 27699 - DNA, 15 bp, Homo sapiens
aagagctcagggtac

SEQ ID NO: 27700 - DNA, 15 bp, Homo sapiens
caagagctcagggta

SEQ ID NO: 27701 - DNA, 15 bp, Homo sapiens
ccaagagctcagggt

SEQ ID NO: 27702 - DNA, 15 bp, Homo sapiens
gccaagagctcaggg

SEQ ID NO: 27703 - DNA, 15 bp, Homo sapiens
ggccaagagctcagg

SEQ ID NO: 27704 - DNA, 15 bp, Homo sapiens
tggccaagagctcag

SEQ ID NO: 27705 - DNA, 15 bp, Homo sapiens
ctggccaagagctca

SEQ ID NO: 27706 - DNA, 15 bp, Homo sapiens
cctggccaagagctc

SEQ ID NO: 27707 - DNA, 15 bp, Homo sapiens
ccctggccaagagct

SEQ ID NO: 27708 - DNA, 15 bp, Homo sapiens
gccctggccaagagc

SEQ ID NO: 27709 - DNA, 15 bp, Homo sapiens
cgccctggccaagag

SEQ ID NO: 27710 - DNA, 15 bp, Homo sapiens
tcgccctggccaaga

SEQ ID NO: 27711 - DNA, 15 bp, Homo sapiens
ctcgccctggccaag

SEQ ID NO: 27712 - DNA, 15 bp, Homo sapiens
cctcgccctggccaa

SEQ ID NO: 27713 - DNA, 15 bp, Homo sapiens
ccctcgccctggcca

SEQ ID NO: 27714 - DNA, 15 bp, Homo sapiens
tccctcgccctggcc

SEQ ID NO: 27715 - DNA, 15 bp, Homo sapiens
ctccctcgccctggc

SEQ ID NO: 27716 - DNA, 15 bp, Homo sapiens
cctccctcgccctgg

SEQ ID NO: 27717 - DNA, 15 bp, Homo sapiens
ccctccctcgccctg

SEQ ID NO: 27718 - DNA, 15 bp, Homo sapiens
cccctccctcgccct

SEQ ID NO: 27719 - DNA, 15 bp, Homo sapiens
tcccctccctcgccc

SEQ ID NO: 27720 - DNA, 15 bp, Homo sapiens
ctcccctccctcgcc

SEQ ID NO: 27721 - DNA, 15 bp, Homo sapiens
cctcccctccctcgc

SEQ ID NO: 27722 - DNA, 15 bp, Homo sapiens
gcctcccctccctcg

SEQ ID NO: 27723 - DNA, 15 bp, Homo sapiens
ggcctcccctccctc

SEQ ID NO: 27724 - DNA, 15 bp, Homo sapiens
tggcctcccctccct

SEQ ID NO: 27725 - DNA, 15 bp, Homo sapiens
ttggcctcccctccc

SEQ ID NO: 27726 - DNA, 15 bp, Homo sapiens
cttggcctcccctcc

SEQ ID NO: 27727 - DNA, 15 bp, Homo sapiens
gcttggcctcccctc

SEQ ID NO: 27728 - DNA, 15 bp, Homo sapiens
ggcttggcctcccct

SEQ ID NO: 27729 - DNA, 15 bp, Homo sapiens
aggcttggcctcccc

SEQ ID NO: 27730 - DNA, 15 bp, Homo sapiens
taggcttggcctccc

SEQ ID NO: 27731 - DNA, 15 bp, Homo sapiens
gtaggcttggcctcc

SEQ ID NO: 27732 - DNA, 15 bp, Homo sapiens
ggtaggcttggcctc

SEQ ID NO: 27733 - DNA, 15 bp, Homo sapiens
aggtaggcttggcct

SEQ ID NO: 27734 - DNA, 15 bp, Homo sapiens
taggtaggcttggcc

SEQ ID NO: 27735 - DNA, 15 bp, Homo sapiens
gtaggtaggcttggc

SEQ ID NO: 27736 - DNA, 15 bp, Homo sapiens
tgtaggtaggcttgg

SEQ ID NO: 27737 - DNA, 15 bp, Homo sapiens
atgtaggtaggcttg

SEQ ID NO: 27738 - DNA, 15 bp, Homo sapiens
catgtaggtaggctt

SEQ ID NO: 27739 - DNA, 15 bp, Homo sapiens
ccatgtaggtaggct

SEQ ID NO: 27740 - DNA, 15 bp, Homo sapiens
accatgtaggtaggc

SEQ ID NO: 27741 - DNA, 15 bp, Homo sapiens
caccatgtaggtagg

SEQ ID NO: 27742 - DNA, 15 bp, Homo sapiens
acaccatgtaggtag

SEQ ID NO: 27743 - DNA, 15 bp, Homo sapiens
aacaccatgtaggta

SEQ ID NO: 27744 - DNA, 15 bp, Homo sapiens
aaacaccatgtaggt

SEQ ID NO: 27745 - DNA, 15 bp, Homo sapiens
gaaacaccatgtagg

SEQ ID NO: 27746 - DNA, 15 bp, Homo sapiens
tgaaacaccatgtag

SEQ ID NO: 27747 - DNA, 15 bp, Homo sapiens
atgaaacaccatgta

SEQ ID NO: 27748 - DNA, 15 bp, Homo sapiens
aatgaaacaccatgt

SEQ ID NO: 27749 - DNA, 15 bp, Homo sapiens
aaatgaaacaccatg

SEQ ID NO: 27750 - DNA, 15 bp, Homo sapiens
gaaatgaaacaccat

SEQ ID NO: 27751 - DNA, 15 bp, Homo sapiens
ggaaatgaaacacca

SEQ ID NO: 27752 - DNA, 15 bp, Homo sapiens
aggaaatgaaacacc

SEQ ID NO: 27753 - DNA, 15 bp, Homo sapiens
taggaaatgaaacac

SEQ ID NO: 27754 - DNA, 15 bp, Homo sapiens
ttaggaaatgaaaca

SEQ ID NO: 27755 - DNA, 15 bp, Homo sapiens
tttaggaaatgaaac

SEQ ID NO: 27756 - DNA, 15 bp, Homo sapiens
gtttaggaaatgaaa

SEQ ID NO: 27757 - DNA, 15 bp, Homo sapiens
cgtttaggaaatgaa

SEQ ID NO: 27758 - DNA, 15 bp, Homo sapiens
tcgtttaggaaatga

SEQ ID NO: 27759 - DNA, 15 bp, Homo sapiens
ttcgtttaggaaatg

SEQ ID NO: 27760 - DNA, 15 bp, Homo sapiens
gttcgtttaggaaat

SEQ ID NO: 27761 - DNA, 15 bp, Homo sapiens
ggttcgtttaggaaa

SEQ ID NO: 27762 - DNA, 15 bp, Homo sapiens
gggttcgtttaggaa

SEQ ID NO: 27763 - DNA, 15 bp, Homo sapiens
agggttcgtttagga

SEQ ID NO: 27764 - DNA, 15 bp, Homo sapiens
aagggttcgtttagg

SEQ ID NO: 27765 - DNA, 15 bp, Homo sapiens
taagggttcgtttag

SEQ ID NO: 27766 - DNA, 15 bp, Homo sapiens
gtaagggttcgttta

SEQ ID NO: 27767 - DNA, 15 bp, Homo sapiens
agtaagggttcgttt

SEQ ID NO: 27768 - DNA, 15 bp, Homo sapiens
aagtaagggttcgtt

SEQ ID NO: 27769 - DNA, 15 bp, Homo sapiens
gaagtaagggttcgt

SEQ ID NO: 27770 - DNA, 15 bp, Homo sapiens
ggaagtaagggttcg

SEQ ID NO: 27771 - DNA, 15 bp, Homo sapiens
tggaagtaagggttc

SEQ ID NO: 27772 - DNA, 15 bp, Homo sapiens
gtggaagtaagggtt

SEQ ID NO: 27773 - DNA, 15 bp, Homo sapiens
cgtggaagtaagggt

SEQ ID NO: 27774 - DNA, 15 bp, Homo sapiens
gcgtggaagtaaggg

SEQ ID NO: 27775 - DNA, 15 bp, Homo sapiens
cgcgtggaagtaagg

SEQ ID NO: 27776 - DNA, 15 bp, Homo sapiens
ccgcgtggaagtaag

SEQ ID NO: 27777 - DNA, 15 bp, Homo sapiens
accgcgtggaagtaa

SEQ ID NO: 27778 - DNA, 15 bp, Homo sapiens
gaccgcgtggaagta

SEQ ID NO: 27779 - DNA, 15 bp, Homo sapiens
agaccgcgtggaagt

SEQ ID NO: 27780 - DNA, 15 bp, Homo sapiens
cagaccgcgtggaag

SEQ ID NO: 27781 - DNA, 15 bp, Homo sapiens
acagaccgcgtggaa

SEQ ID NO: 27782 - DNA, 15 bp, Homo sapiens
gacagaccgcgtgga

SEQ ID NO: 27783 - DNA, 15 bp, Homo sapiens
ggacagaccgcgtgg

SEQ ID NO: 27784 - DNA, 15 bp, Homo sapiens
tggacagaccgcgtg

SEQ ID NO: 27785 - DNA, 15 bp, Homo sapiens
ctggacagaccgcgt

SEQ ID NO: 27786 - DNA, 15 bp, Homo sapiens
gctggacagaccgcg

SEQ ID NO: 27787 - DNA, 15 bp, Homo sapiens
agctggacagaccgc

SEQ ID NO: 27788 - DNA, 15 bp, Homo sapiens
aagctggacagaccg

SEQ ID NO: 27789 - DNA, 15 bp, Homo sapiens
taagctggacagacc

SEQ ID NO: 27790 - DNA, 15 bp, Homo sapiens
ctaagctggacagac

SEQ ID NO: 27791 - DNA, 15 bp, Homo sapiens
tctaagctggacaga

SEQ ID NO: 27792 - DNA, 15 bp, Homo sapiens
ttctaagctggacag

SEQ ID NO: 27793 - DNA, 15 bp, Homo sapiens
tttctaagctggaca

SEQ ID NO: 27794 - DNA, 15 bp, Homo sapiens
gtttctaagctggac

SEQ ID NO: 27795 - DNA, 15 bp, Homo sapiens
agtttctaagctgga

SEQ ID NO: 27796 - DNA, 15 bp, Homo sapiens
aagtttctaagctgg

SEQ ID NO: 27797 - DNA, 15 bp, Homo sapiens
taagtttctaagctg

SEQ ID NO: 27798 - DNA, 15 bp, Homo sapiens
ataagtttctaagct

SEQ ID NO: 27799 - DNA, 15 bp, Homo sapiens
aataagtttctaagc

SEQ ID NO: 27800 - DNA, 15 bp, Homo sapiens
aaataagtttctaag

SEQ ID NO: 27801 - DNA, 15 bp, Homo sapiens
aaaataagtttctaa

SEQ ID NO: 27802 - DNA, 15 bp, Homo sapiens
gaaaataagtttcta

SEQ ID NO: 27803 - DNA, 15 bp, Homo sapiens
tgaaaataagtttct

SEQ ID NO: 27804 - DNA, 15 bp, Homo sapiens
ctgaaaataagtttc

SEQ ID NO: 27805 - DNA, 15 bp, Homo sapiens
actgaaaataagttt

SEQ ID NO: 27806 - DNA, 15 bp, Homo sapiens
tactgaaaataagtt

SEQ ID NO: 27807 - DNA, 15 bp, Homo sapiens
ctactgaaaataagt

SEQ ID NO: 27808 - DNA, 15 bp, Homo sapiens
actactgaaaataag

SEQ ID NO: 27809 - DNA, 15 bp, Homo sapiens
cactactgaaaataa

SEQ ID NO: 27810 - DNA, 15 bp, Homo sapiens
acactactgaaaata

SEQ ID NO: 27811 - DNA, 15 bp, Homo sapiens
aacactactgaaaat

SEQ ID NO: 27812 - DNA, 15 bp, Homo sapiens
caacactactgaaaa

SEQ ID NO: 27813 - DNA, 15 bp, Homo sapiens
ccaacactactgaaa

SEQ ID NO: 27814 - DNA, 15 bp, Homo sapiens
accaacactactgaa

SEQ ID NO: 27815 - DNA, 15 bp, Homo sapiens
gaccaacactactga

SEQ ID NO: 27816 - DNA, 15 bp, Homo sapiens
ggaccaacactactg

SEQ ID NO: 27817 - DNA, 15 bp, Homo sapiens
aggaccaacactact

SEQ ID NO: 27818 - DNA, 15 bp, Homo sapiens
aaggaccaacactac

SEQ ID NO: 27819 - DNA, 15 bp, Homo sapiens
caaggaccaacacta

SEQ ID NO: 27820 - DNA, 15 bp, Homo sapiens
ccaaggaccaacact

SEQ ID NO: 27821 - DNA, 15 bp, Homo sapiens
accaaggaccaacac

SEQ ID NO: 27822 - DNA, 15 bp, Homo sapiens
gaccaaggaccaaca

SEQ ID NO: 27823 - DNA, 15 bp, Homo sapiens
ggaccaaggaccaac

SEQ ID NO: 27824 - DNA, 15 bp, Homo sapiens
gggaccaaggaccaa

SEQ ID NO: 27825 - DNA, 15 bp, Homo sapiens
agggaccaaggacca

SEQ ID NO: 27826 - DNA, 15 bp, Homo sapiens
cagggaccaaggacc

SEQ ID NO: 27827 - DNA, 15 bp, Homo sapiens
ccagggaccaaggac

SEQ ID NO: 27828 - DNA, 15 bp, Homo sapiens
tccagggaccaagga

SEQ ID NO: 27829 - DNA, 15 bp, Homo sapiens
gtccagggaccaagg

SEQ ID NO: 27830 - DNA, 15 bp, Homo sapiens
tgtccagggaccaag

SEQ ID NO: 27831 - DNA, 15 bp, Homo sapiens
ttgtccagggaccaa

SEQ ID NO: 27832 - DNA, 15 bp, Homo sapiens
tttgtccagggacca

SEQ ID NO: 27833 - DNA, 15 bp, Homo sapiens
ttttgtccagggacc

SEQ ID NO: 27834 - DNA, 15 bp, Homo sapiens
attttgtccagggac

SEQ ID NO: 27835 - DNA, 15 bp, Homo sapiens
cattttgtccaggga

SEQ ID NO: 27836 - DNA, 15 bp, Homo sapiens
acattttgtccaggg

SEQ ID NO: 27837 - DNA, 15 bp, Homo sapiens
tacattttgtccagg

SEQ ID NO: 27838 - DNA, 15 bp, Homo sapiens
ttacattttgtccag

SEQ ID NO: 27839 - DNA, 15 bp, Homo sapiens
gttacattttgtcca

SEQ ID NO: 27840 - DNA, 15 bp, Homo sapiens
tgttacattttgtcc

SEQ ID NO: 27841 - DNA, 15 bp, Homo sapiens
ctgttacattttgtc

SEQ ID NO: 27842 - DNA, 15 bp, Homo sapiens
gctgttacattttgt

SEQ ID NO: 27843 - DNA, 15 bp, Homo sapiens
ggctgttacattttg

SEQ ID NO: 27844 - DNA, 15 bp, Homo sapiens
tggctgttacatttt

SEQ ID NO: 27845 - DNA, 15 bp, Homo sapiens
ttggctgttacattt

SEQ ID NO: 27846 - DNA, 15 bp, Homo sapiens
tttggctgttacatt

SEQ ID NO: 27847 - DNA, 15 bp, Homo sapiens
ctttggctgttacat

SEQ ID NO: 27848 - DNA, 15 bp, Homo sapiens
actttggctgttaca

SEQ ID NO: 27849 - DNA, 15 bp, Homo sapiens
gactttggctgttac

SEQ ID NO: 27850 - DNA, 15 bp, Homo sapiens
ggactttggctgtta

SEQ ID NO: 27851 - DNA, 15 bp, Homo sapiens
aggactttggctgtt

SEQ ID NO: 27852 - DNA, 15 bp, Homo sapiens
taggactttggctgt

SEQ ID NO: 27853 - DNA, 15 bp, Homo sapiens
ctaggactttggctg

SEQ ID NO: 27854 - DNA, 15 bp, Homo sapiens
tctaggactttggct

SEQ ID NO: 27855 - DNA, 15 bp, Homo sapiens
ttctaggactttggc

SEQ ID NO: 27856 - DNA, 15 bp, Homo sapiens
tttctaggactttgg

SEQ ID NO: 27857 - DNA, 15 bp, Homo sapiens
ttttctaggactttg

SEQ ID NO: 27858 - DNA, 15 bp, Homo sapiens
tttttctaggacttt

SEQ ID NO: 27859 - DNA, 15 bp, Homo sapiens
ctttttctaggactt

SEQ ID NO: 27860 - DNA, 15 bp, Homo sapiens
cctttttctaggact

SEQ ID NO: 27861 - DNA, 15 bp, Homo sapiens
gcctttttctaggac

SEQ ID NO: 27862 - DNA, 15 bp, Homo sapiens
tgcctttttctagga

SEQ ID NO: 27863 - DNA, 15 bp, Homo sapiens
ttgcctttttctagg

SEQ ID NO: 27864 - DNA, 15 bp, Homo sapiens
cttgcctttttctag

SEQ ID NO: 27865 - DNA, 15 bp, Homo sapiens
gcttgcctttttcta

SEQ ID NO: 27866 - DNA, 15 bp, Homo sapiens
ggcttgcctttttct

SEQ ID NO: 27867 - DNA, 15 bp, Homo sapiens
tggcttgcctttttc

SEQ ID NO: 27868 - DNA, 15 bp, Homo sapiens
ctggcttgccttttt

SEQ ID NO: 27869 - DNA, 15 bp, Homo sapiens
actggcttgcctttt

SEQ ID NO: 27870 - DNA, 15 bp, Homo sapiens
aactggcttgccttt

SEQ ID NO: 27871 - DNA, 15 bp, Homo sapiens
gaactggcttgcctt

SEQ ID NO: 27872 - DNA, 15 bp, Homo sapiens
ggaactggcttgcct

SEQ ID NO: 27873 - DNA, 15 bp, Homo sapiens
aggaactggcttgcc

SEQ ID NO: 27874 - DNA, 15 bp, Homo sapiens
caggaactggcttgc

SEQ ID NO: 27875 - DNA, 15 bp, Homo sapiens
gcaggaactggcttg

SEQ ID NO: 27876 - DNA, 15 bp, Homo sapiens
ggcaggaactggctt

SEQ ID NO: 27877 - DNA, 15 bp, Homo sapiens
tggcaggaactggct

SEQ ID NO: 27878 - DNA, 15 bp, Homo sapiens
atggcaggaactggc

SEQ ID NO: 27879 - DNA, 15 bp, Homo sapiens
aatggcaggaactgg

SEQ ID NO: 27880 - DNA, 15 bp, Homo sapiens
aaatggcaggaactg

SEQ ID NO: 27881 - DNA, 15 bp, Homo sapiens
aaaatggcaggaact

SEQ ID NO: 27882 - DNA, 15 bp, Homo sapiens
gaaaatggcaggaac

SEQ ID NO: 27883 - DNA, 15 bp, Homo sapiens
agaaaatggcaggaa

SEQ ID NO: 27884 - DNA, 15 bp, Homo sapiens
aagaaaatggcagga

SEQ ID NO: 27885 - DNA, 15 bp, Homo sapiens
aaagaaaatggcagg

SEQ ID NO: 27886 - DNA, 15 bp, Homo sapiens
gaaagaaaatggcag

SEQ ID NO: 27887 - DNA, 15 bp, Homo sapiens
tgaaagaaaatggca

SEQ ID NO: 27888 - DNA, 15 bp, Homo sapiens
gtgaaagaaaatggc

SEQ ID NO: 27889 - DNA, 15 bp, Homo sapiens
agtgaaagaaaatgg

SEQ ID NO: 27890 - DNA, 15 bp, Homo sapiens
aagtgaaagaaaatg

SEQ ID NO: 27891 - DNA, 15 bp, Homo sapiens
gaagtgaaagaaaat

SEQ ID NO: 27892 - DNA, 15 bp, Homo sapiens
agaagtgaaagaaaa

SEQ ID NO: 27893 - DNA, 15 bp, Homo sapiens
cagaagtgaaagaaa

SEQ ID NO: 27894 - DNA, 15 bp, Homo sapiens
gcagaagtgaaagaa

SEQ ID NO: 27895 - DNA, 15 bp, Homo sapiens
tgcagaagtgaaaga

SEQ ID NO: 27896 - DNA, 15 bp, Homo sapiens
atgcagaagtgaaag

SEQ ID NO: 27897 - DNA, 15 bp, Homo sapiens
aatgcagaagtgaaa

SEQ ID NO: 27898 - DNA, 15 bp, Homo sapiens
aaatgcagaagtgaa

SEQ ID NO: 27899 - DNA, 15 bp, Homo sapiens
gaaatgcagaagtga

SEQ ID NO: 27900 - DNA, 15 bp, Homo sapiens
ggaaatgcagaagtg

SEQ ID NO: 27901 - DNA, 15 bp, Homo sapiens
aggaaatgcagaagt

SEQ ID NO: 27902 - DNA, 15 bp, Homo sapiens
gaggaaatgcagaag

SEQ ID NO: 27903 - DNA, 15 bp, Homo sapiens
tgaggaaatgcagaa

SEQ ID NO: 27904 - DNA, 15 bp, Homo sapiens
gtgaggaaatgcaga

SEQ ID NO: 27905 - DNA, 15 bp, Homo sapiens
agtgaggaaatgcag

SEQ ID NO: 27906 - DNA, 15 bp, Homo sapiens
tagtgaggaaatgca

SEQ ID NO: 27907 - DNA, 15 bp, Homo sapiens
atagtgaggaaatgc

SEQ ID NO: 27908 - DNA, 15 bp, Homo sapiens
aatagtgaggaaatg

SEQ ID NO: 27909 - DNA, 15 bp, Homo sapiens
taatagtgaggaaat

SEQ ID NO: 27910 - DNA, 15 bp, Homo sapiens
ataatagtgaggaaa

SEQ ID NO: 27911 - DNA, 15 bp, Homo sapiens
tataatagtgaggaa

SEQ ID NO: 27912 - DNA, 15 bp, Homo sapiens
gtataatagtgagga

SEQ ID NO: 27913 - DNA, 15 bp, Homo sapiens
cgtataatagtgagg

SEQ ID NO: 27914 - DNA, 15 bp, Homo sapiens
acgtataatagtgag

SEQ ID NO: 27915 - DNA, 15 bp, Homo sapiens
cacgtataatagtga

SEQ ID NO: 27916 - DNA, 15 bp, Homo sapiens
gcacgtataatagtg

SEQ ID NO: 27917 - DNA, 15 bp, Homo sapiens
ggcacgtataatagt

SEQ ID NO: 27918 - DNA, 15 bp, Homo sapiens
aggcacgtataatag

SEQ ID NO: 27919 - DNA, 15 bp, Homo sapiens
aaggcacgtataata

SEQ ID NO: 27920 - DNA, 15 bp, Homo sapiens
gaaggcacgtataat

SEQ ID NO: 27921 - DNA, 15 bp, Homo sapiens
ggaaggcacgtataa

SEQ ID NO: 27922 - DNA, 15 bp, Homo sapiens
tggaaggcacgtata

SEQ ID NO: 27923 - DNA, 15 bp, Homo sapiens
atggaaggcacgtat

SEQ ID NO: 27924 - DNA, 15 bp, Homo sapiens
aatggaaggcacgta

SEQ ID NO: 27925 - DNA, 15 bp, Homo sapiens
caatggaaggcacgt

SEQ ID NO: 27926 - DNA, 15 bp, Homo sapiens
ccaatggaaggcacg

SEQ ID NO: 27927 - DNA, 15 bp, Homo sapiens
tccaatggaaggcac

SEQ ID NO: 27928 - DNA, 15 bp, Homo sapiens
ctccaatggaaggca

SEQ ID NO: 27929 - DNA, 15 bp, Homo sapiens
gctccaatggaaggc

SEQ ID NO: 27930 - DNA, 15 bp, Homo sapiens
tgctccaatggaagg

SEQ ID NO: 27931 - DNA, 15 bp, Homo sapiens
ttgctccaatggaag

SEQ ID NO: 27932 - DNA, 15 bp, Homo sapiens
tttgctccaatggaa

SEQ ID NO: 27933 - DNA, 15 bp, Homo sapiens
ttttgctccaatgga

SEQ ID NO: 27934 - DNA, 15 bp, Homo sapiens
gttttgctccaatgg

SEQ ID NO: 27935 - DNA, 15 bp, Homo sapiens
agttttgctccaatg

SEQ ID NO: 27936 - DNA, 15 bp, Homo sapiens
cagttttgctccaat

SEQ ID NO: 27937 - DNA, 15 bp, Homo sapiens
tcagttttgctccaa

SEQ ID NO: 27938 - DNA, 15 bp, Homo sapiens
ttcagttttgctcca

SEQ ID NO: 27939 - DNA, 15 bp, Homo sapiens
attcagttttgctcc

SEQ ID NO: 27940 - DNA, 15 bp, Homo sapiens
cattcagttttgctc

SEQ ID NO: 27941 - DNA, 15 bp, Homo sapiens
gcattcagttttgct

SEQ ID NO: 27942 - DNA, 15 bp, Homo sapiens
ggcattcagttttgc

SEQ ID NO: 27943 - DNA, 15 bp, Homo sapiens
tggcattcagttttg

SEQ ID NO: 27944 - DNA, 15 bp, Homo sapiens
gtggcattcagtttt

SEQ ID NO: 27945 - DNA, 15 bp, Homo sapiens
cgtggcattcagttt

SEQ ID NO: 27946 - DNA, 15 bp, Homo sapiens
gcgtggcattcagtt

SEQ ID NO: 27947 - DNA, 15 bp, Homo sapiens
tgcgtggcattcagt

SEQ ID NO: 27948 - DNA, 15 bp, Homo sapiens
atgcgtggcattcag

SEQ ID NO: 27949 - DNA, 15 bp, Homo sapiens
tatgcgtggcattca

SEQ ID NO: 27950 - DNA, 15 bp, Homo sapiens
atatgcgtggcattc

SEQ ID NO: 27951 - DNA, 15 bp, Homo sapiens
catatgcgtggcatt

SEQ ID NO: 27952 - DNA, 15 bp, Homo sapiens
gcatatgcgtggcat

SEQ ID NO: 27953 - DNA, 15 bp, Homo sapiens
tgcatatgcgtggca

SEQ ID NO: 27954 - DNA, 15 bp, Homo sapiens
gtgcatatgcgtggc

SEQ ID NO: 27955 - DNA, 15 bp, Homo sapiens
tgtgcatatgcgtgg

SEQ ID NO: 27956 - DNA, 15 bp, Homo sapiens
ctgtgcatatgcgtg

SEQ ID NO: 27957 - DNA, 15 bp, Homo sapiens
cctgtgcatatgcgt

SEQ ID NO: 27958 - DNA, 15 bp, Homo sapiens
tcctgtgcatatgcg

SEQ ID NO: 27959 - DNA, 15 bp, Homo sapiens
ctcctgtgcatatgc

SEQ ID NO: 27960 - DNA, 15 bp, Homo sapiens
gctcctgtgcatatg

SEQ ID NO: 27961 - DNA, 15 bp, Homo sapiens
agctcctgtgcatat

SEQ ID NO: 27962 - DNA, 15 bp, Homo sapiens
cagctcctgtgcata

SEQ ID NO: 27963 - DNA, 15 bp, Homo sapiens
acagctcctgtgcat

SEQ ID NO: 27964 - DNA, 15 bp, Homo sapiens
cacagctcctgtgca

SEQ ID NO: 27965 - DNA, 15 bp, Homo sapiens
gcacagctcctgtgc

SEQ ID NO: 27966 - DNA, 15 bp, Homo sapiens
cgcacagctcctgtg

SEQ ID NO: 27967 - DNA, 15 bp, Homo sapiens
gcgcacagctcctgt

SEQ ID NO: 27968 - DNA, 15 bp, Homo sapiens
cgcgcacagctcctg

SEQ ID NO: 27969 - DNA, 15 bp, Homo sapiens
gcgcgcacagctcct

SEQ ID NO: 27970 - DNA, 15 bp, Homo sapiens
agcgcgcacagctcc

SEQ ID NO: 27971 - DNA, 15 bp, Homo sapiens
gagcgcgcacagctc

SEQ ID NO: 27972 - DNA, 15 bp, Homo sapiens
agagcgcgcacagct

SEQ ID NO: 27973 - DNA, 15 bp, Homo sapiens
cagagcgcgcacagc

SEQ ID NO: 27974 - DNA, 15 bp, Homo sapiens
acagagcgcgcacag

SEQ ID NO: 27975 - DNA, 15 bp, Homo sapiens
gacagagcgcgcaca

SEQ ID NO: 27976 - DNA, 15 bp, Homo sapiens
agacagagcgcgcac

SEQ ID NO: 27977 - DNA, 15 bp, Homo sapiens
gagacagagcgcgca

SEQ ID NO: 27978 - DNA, 15 bp, Homo sapiens
agagacagagcgcgc

SEQ ID NO: 27979 - DNA, 15 bp, Homo sapiens
gagagacagagcgcg

SEQ ID NO: 27980 - DNA, 15 bp, Homo sapiens
agagagacagagcgc

SEQ ID NO: 27981 - DNA, 15 bp, Homo sapiens
gagagagacagagcg

SEQ ID NO: 27982 - DNA, 15 bp, Homo sapiens
tgagagagacagagc

SEQ ID NO: 27983 - DNA, 15 bp, Homo sapiens
gtgagagagacagag

SEQ ID NO: 27984 - DNA, 15 bp, Homo sapiens
agtgagagagacaga

SEQ ID NO: 27985 - DNA, 15 bp, Homo sapiens
gagtgagagagacag

SEQ ID NO: 27986 - DNA, 15 bp, Homo sapiens
tgagtgagagagaca

SEQ ID NO: 27987 - DNA, 15 bp, Homo sapiens
gtgagtgagagagac

SEQ ID NO: 27988 - DNA, 15 bp, Homo sapiens
agtgagtgagagaga

SEQ ID NO: 27989 - DNA, 15 bp, Homo sapiens
gagtgagtgagagag

SEQ ID NO: 27990 - DNA, 15 bp, Homo sapiens
agagtgagtgagaga

SEQ ID NO: 27991 - DNA, 15 bp, Homo sapiens
aagagtgagtgagag

SEQ ID NO: 27992 - DNA, 15 bp, Homo sapiens
aaagagtgagtgaga

SEQ ID NO: 27993 - DNA, 15 bp, Homo sapiens
aaaagagtgagtgag

SEQ ID NO: 27994 - DNA, 15 bp, Homo sapiens
aaaaagagtgagtga

SEQ ID NO: 27995 - DNA, 15 bp, Homo sapiens
gaaaaagagtgagtg

SEQ ID NO: 27996 - DNA, 15 bp, Homo sapiens
agaaaaagagtgagt

SEQ ID NO: 27997 - DNA, 15 bp, Homo sapiens
gagaaaaagagtgag

SEQ ID NO: 27998 - DNA, 15 bp, Homo sapiens
agagaaaaagagtga

SEQ ID NO: 27999 - DNA, 15 bp, Homo sapiens
gagagaaaaagagtg

SEQ ID NO: 28000 - DNA, 15 bp, Homo sapiens
agagagaaaaagagt

SEQ ID NO: 28001 - DNA, 15 bp, Homo sapiens
gagagagaaaaagag

SEQ ID NO: 28002 - DNA, 15 bp, Homo sapiens
agagagagaaaaaga

SEQ ID NO: 28003 - DNA, 15 bp, Homo sapiens
gagagagagaaaaag

SEQ ID NO: 28004 - DNA, 15 bp, Homo sapiens
agagagagagaaaaa

SEQ ID NO: 28005 - DNA, 15 bp, Homo sapiens
gagagagagagaaaa

SEQ ID NO: 28006 - DNA, 15 bp, Homo sapiens
agagagagagagaaa

SEQ ID NO: 28007 - DNA, 15 bp, Homo sapiens
aagagagagagagaa

SEQ ID NO: 28008 - DNA, 15 bp, Homo sapiens
aaagagagagagaga

SEQ ID NO: 28009 - DNA, 15 bp, Homo sapiens
gaaagagagagagag

SEQ ID NO: 28010 - DNA, 15 bp, Homo sapiens
agaaagagagagaga

SEQ ID NO: 28011 - DNA, 15 bp, Homo sapiens
gagaaagagagagag

SEQ ID NO: 28012 - DNA, 15 bp, Homo sapiens
agagaaagagagaga

SEQ ID NO: 28013 - DNA, 15 bp, Homo sapiens
gagagaaagagagag

SEQ ID NO: 28014 - DNA, 15 bp, Homo sapiens
agagagaaagagaga

SEQ ID NO: 28015 - DNA, 15 bp, Homo sapiens
gagagagaaagagag

SEQ ID NO: 28016 - DNA, 15 bp, Homo sapiens
tgagagagaaagaga

SEQ ID NO: 28017 - DNA, 15 bp, Homo sapiens
ttgagagagaaagag

SEQ ID NO: 28018 - DNA, 15 bp, Homo sapiens
attgagagagaaaga

SEQ ID NO: 28019 - DNA, 15 bp, Homo sapiens
gattgagagagaaag

SEQ ID NO: 28020 - DNA, 15 bp, Homo sapiens
agattgagagagaaa

SEQ ID NO: 28021 - DNA, 15 bp, Homo sapiens
gagattgagagagaa

SEQ ID NO: 28022 - DNA, 15 bp, Homo sapiens
agagattgagagaga

SEQ ID NO: 28023 - DNA, 15 bp, Homo sapiens
gagagattgagagag

SEQ ID NO: 28024 - DNA, 15 bp, Homo sapiens
agagagattgagaga

SEQ ID NO: 28025 - DNA, 15 bp, Homo sapiens
cagagagattgagag

SEQ ID NO: 28026 - DNA, 15 bp, Homo sapiens
acagagagattgaga

SEQ ID NO: 28027 - DNA, 15 bp, Homo sapiens
gacagagagattgag

SEQ ID NO: 28028 - DNA, 15 bp, Homo sapiens
agacagagagattga

SEQ ID NO: 28029 - DNA, 15 bp, Homo sapiens
gagacagagagattg

SEQ ID NO: 28030 - DNA, 15 bp, Homo sapiens
agagacagagagatt

SEQ ID NO: 28031 - DNA, 15 bp, Homo sapiens
tagagacagagagat

SEQ ID NO: 28032 - DNA, 15 bp, Homo sapiens
atagagacagagaga

SEQ ID NO: 28033 - DNA, 15 bp, Homo sapiens
gatagagacagagag

SEQ ID NO: 28034 - DNA, 15 bp, Homo sapiens
agatagagacagaga

SEQ ID NO: 28035 - DNA, 15 bp, Homo sapiens
tagatagagacagag

SEQ ID NO: 28036 - DNA, 15 bp, Homo sapiens
atagatagagacaga

SEQ ID NO: 28037 - DNA, 15 bp, Homo sapiens
gatagatagagacag

SEQ ID NO: 28038 - DNA, 15 bp, Homo sapiens
agatagatagagaca

SEQ ID NO: 28039 - DNA, 15 bp, Homo sapiens
gagatagatagagac

SEQ ID NO: 28040 - DNA, 15 bp, Homo sapiens
agagatagatagaga

SEQ ID NO: 28041 - DNA, 15 bp, Homo sapiens
aagagatagatagag

SEQ ID NO: 28042 - DNA, 15 bp, Homo sapiens
taagagatagataga

SEQ ID NO: 28043 - DNA, 15 bp, Homo sapiens
gtaagagatagatag

SEQ ID NO: 28044 - DNA, 15 bp, Homo sapiens
agtaagagatagata

SEQ ID NO: 28045 - DNA, 15 bp, Homo sapiens
gagtaagagatagat

SEQ ID NO: 28046 - DNA, 15 bp, Homo sapiens
agagtaagagataga

SEQ ID NO: 28047 - DNA, 15 bp, Homo sapiens
aagagtaagagatag

SEQ ID NO: 28048 - DNA, 15 bp, Homo sapiens
aaagagtaagagata

SEQ ID NO: 28049 - DNA, 15 bp, Homo sapiens
taaagagtaagagat

SEQ ID NO: 28050 - DNA, 15 bp, Homo sapiens
ataaagagtaagaga

SEQ ID NO: 28051 - DNA, 15 bp, Homo sapiens
gataaagagtaagag

SEQ ID NO: 28052 - DNA, 15 bp, Homo sapiens
agataaagagtaaga

SEQ ID NO: 28053 - DNA, 15 bp, Homo sapiens
gagataaagagtaag

SEQ ID NO: 28054 - DNA, 15 bp, Homo sapiens
agagataaagagtaa

SEQ ID NO: 28055 - DNA, 15 bp, Homo sapiens
gagagataaagagta

SEQ ID NO: 28056 - DNA, 15 bp, Homo sapiens
tgagagataaagagt

SEQ ID NO: 28057 - DNA, 15 bp, Homo sapiens
gtgagagataaagag

SEQ ID NO: 28058 - DNA, 15 bp, Homo sapiens
agtgagagataaaga

SEQ ID NO: 28059 - DNA, 15 bp, Homo sapiens
gagtgagagataaag

SEQ ID NO: 28060 - DNA, 15 bp, Homo sapiens
agagtgagagataaa

SEQ ID NO: 28061 - DNA, 15 bp, Homo sapiens
gagagtgagagataa

SEQ ID NO: 28062 - DNA, 15 bp, Homo sapiens
agagagtgagagata

SEQ ID NO: 28063 - DNA, 15 bp, Homo sapiens
gagagagtgagagat

SEQ ID NO: 28064 - DNA, 15 bp, Homo sapiens
tgagagagtgagaga

SEQ ID NO: 28065 - DNA, 15 bp, Homo sapiens
gtgagagagtgagag

SEQ ID NO: 28066 - DNA, 15 bp, Homo sapiens
agtgagagagtgaga

SEQ ID NO: 28067 - DNA, 15 bp, Homo sapiens
gagtgagagagtgag

SEQ ID NO: 28068 - DNA, 15 bp, Homo sapiens
agagtgagagagtga

SEQ ID NO: 28069 - DNA, 15 bp, Homo sapiens
aagagtgagagagtg

SEQ ID NO: 28070 - DNA, 15 bp, Homo sapiens
aaagagtgagagagt

SEQ ID NO: 28071 - DNA, 15 bp, Homo sapiens
gaaagagtgagagag

SEQ ID NO: 28072 - DNA, 15 bp, Homo sapiens
agaaagagtgagaga

SEQ ID NO: 28073 - DNA, 15 bp, Homo sapiens
gagaaagagtgagag

SEQ ID NO: 28074 - DNA, 15 bp, Homo sapiens
tgagaaagagtgaga

SEQ ID NO: 28075 - DNA, 15 bp, Homo sapiens
gtgagaaagagtgag

SEQ ID NO: 28076 - DNA, 15 bp, Homo sapiens
agtgagaaagagtga

SEQ ID NO: 28077 - DNA, 15 bp, Homo sapiens
gagtgagaaagagtg

SEQ ID NO: 28078 - DNA, 15 bp, Homo sapiens
agagtgagaaagagt

SEQ ID NO: 28079 - DNA, 15 bp, Homo sapiens
aagagtgagaaagag

SEQ ID NO: 28080 - DNA, 15 bp, Homo sapiens
aaagagtgagaaaga

SEQ ID NO: 28081 - DNA, 15 bp, Homo sapiens
gaaagagtgagaaag

SEQ ID NO: 28082 - DNA, 15 bp, Homo sapiens
agaaagagtgagaaa

SEQ ID NO: 28083 - DNA, 15 bp, Homo sapiens
gagaaagagtgagaa

SEQ ID NO: 28084 - DNA, 15 bp, Homo sapiens
agagaaagagtgaga

SEQ ID NO: 28085 - DNA, 15 bp, Homo sapiens
gagagaaagagtgag

SEQ ID NO: 28086 - DNA, 15 bp, Homo sapiens
tgagagaaagagtga

SEQ ID NO: 28087 - DNA, 15 bp, Homo sapiens
ttgagagaaagagtg

SEQ ID NO: 28088 - DNA, 15 bp, Homo sapiens
attgagagaaagagt

SEQ ID NO: 28089 - DNA, 15 bp, Homo sapiens
gattgagagaaagag

SEQ ID NO: 28090 - DNA, 15 bp, Homo sapiens
agattgagagaaaga

SEQ ID NO: 28091 - DNA, 15 bp, Homo sapiens
gagattgagagaaag

SEQ ID NO: 28092 - DNA, 15 bp, Homo sapiens
agagattgagagaaa

SEQ ID NO: 28093 - DNA, 15 bp, Homo sapiens
aagagattgagagaa

SEQ ID NO: 28094 - DNA, 15 bp, Homo sapiens
aaagagattgagaga

SEQ ID NO: 28095 - DNA, 15 bp, Homo sapiens
gaaagagattgagag

SEQ ID NO: 28096 - DNA, 15 bp, Homo sapiens
agaaagagattgaga

SEQ ID NO: 28097 - DNA, 15 bp, Homo sapiens
gagaaagagattgag

SEQ ID NO: 28098 - DNA, 15 bp, Homo sapiens
tgagaaagagattga

SEQ ID NO: 28099 - DNA, 15 bp, Homo sapiens
atgagaaagagattg

SEQ ID NO: 28100 - DNA, 15 bp, Homo sapiens
aatgagaaagagatt

SEQ ID NO: 28101 - DNA, 15 bp, Homo sapiens
gaatgagaaagagat

SEQ ID NO: 28102 - DNA, 15 bp, Homo sapiens
agaatgagaaagaga

SEQ ID NO: 28103 - DNA, 15 bp, Homo sapiens
gagaatgagaaagag

SEQ ID NO: 28104 - DNA, 15 bp, Homo sapiens
agagaatgagaaaga

SEQ ID NO: 28105 - DNA, 15 bp, Homo sapiens
gagagaatgagaaag

SEQ ID NO: 28106 - DNA, 15 bp, Homo sapiens
agagagaatgagaaa

SEQ ID NO: 28107 - DNA, 15 bp, Homo sapiens
gagagagaatgagaa

SEQ ID NO: 28108 - DNA, 15 bp, Homo sapiens
agagagagaatgaga

SEQ ID NO: 28109 - DNA, 15 bp, Homo sapiens
tagagagagaatgag

SEQ ID NO: 28110 - DNA, 15 bp, Homo sapiens
atagagagagaatga

SEQ ID NO: 28111 - DNA, 15 bp, Homo sapiens
gatagagagagaatg

SEQ ID NO: 28112 - DNA, 15 bp, Homo sapiens
agatagagagagaat

SEQ ID NO: 28113 - DNA, 15 bp, Homo sapiens
aagatagagagagaa

SEQ ID NO: 28114 - DNA, 15 bp, Homo sapiens
aaagatagagagaga

SEQ ID NO: 28115 - DNA, 15 bp, Homo sapiens
gaaagatagagagag

SEQ ID NO: 28116 - DNA, 15 bp, Homo sapiens
agaaagatagagaga

SEQ ID NO: 28117 - DNA, 15 bp, Homo sapiens
gagaaagatagagag

SEQ ID NO: 28118 - DNA, 15 bp, Homo sapiens
agagaaagatagaga

SEQ ID NO: 28119 - DNA, 15 bp, Homo sapiens
gagagaaagatagag

SEQ ID NO: 28120 - DNA, 15 bp, Homo sapiens
agagagaaagataga

SEQ ID NO: 28121 - DNA, 15 bp, Homo sapiens
gagagagaaagatag

SEQ ID NO: 28122 - DNA, 15 bp, Homo sapiens
agagagagaaagata

SEQ ID NO: 28123 - DNA, 15 bp, Homo sapiens
gagagagagaaagat

SEQ ID NO: 28124 - DNA, 15 bp, Homo sapiens
agagagagagaaaga

SEQ ID NO: 28125 - DNA, 15 bp, Homo sapiens
gagagagagagaaag

SEQ ID NO: 28126 - DNA, 15 bp, Homo sapiens
gagagagagagagaa

SEQ ID NO: 28127 - DNA, 15 bp, Homo sapiens
agagagagagagaga

SEQ ID NO: 28128 - DNA, 15 bp, Homo sapiens
aagagagagagagag

SEQ ID NO: 28129 - DNA, 15 bp, Homo sapiens
tgagaaagagagaga

SEQ ID NO: 28130 - DNA, 15 bp, Homo sapiens
gtgagaaagagagag

SEQ ID NO: 28131 - DNA, 15 bp, Homo sapiens
tgtgagaaagagaga

SEQ ID NO: 28132 - DNA, 15 bp, Homo sapiens
gtgtgagaaagagag

SEQ ID NO: 28133 - DNA, 15 bp, Homo sapiens
tgtgtgagaaagaga

SEQ ID NO: 28134 - DNA, 15 bp, Homo sapiens
gtgtgtgagaaagag

SEQ ID NO: 28135 - DNA, 15 bp, Homo sapiens
tgtgtgtgagaaaga

SEQ ID NO: 28136 - DNA, 15 bp, Homo sapiens
gtgtgtgtgagaaag

SEQ ID NO: 28137 - DNA, 15 bp, Homo sapiens
tgtgtgtgtgagaaa

SEQ ID NO: 28138 - DNA, 15 bp, Homo sapiens
gtgtgtgtgtgagaa

SEQ ID NO: 28139 - DNA, 15 bp, Homo sapiens
tgtgtgtgtgtgaga

SEQ ID NO: 28140 - DNA, 15 bp, Homo sapiens
gtgtgtgtgtgtgag

SEQ ID NO: 28141 - DNA, 15 bp, Homo sapiens
agtgtgtgtgtgtga

SEQ ID NO: 28142 - DNA, 15 bp, Homo sapiens
gagtgtgtgtgtgtg

SEQ ID NO: 28143 - DNA, 15 bp, Homo sapiens
tgagtgtgtgtgtgt

SEQ ID NO: 28144 - DNA, 15 bp, Homo sapiens
ttgtgagtgtgtgtg

SEQ ID NO: 28145 - DNA, 15 bp, Homo sapiens
tttgtgagtgtgtgt

SEQ ID NO: 28146 - DNA, 15 bp, Homo sapiens
gtttgtgagtgtgtg

SEQ ID NO: 28147 - DNA, 15 bp, Homo sapiens
ggtttgtgagtgtgt

SEQ ID NO: 28148 - DNA, 15 bp, Homo sapiens
gggtttgtgagtgtg

SEQ ID NO: 28149 - DNA, 15 bp, Homo sapiens
tgggtttgtgagtgt

SEQ ID NO: 28150 - DNA, 15 bp, Homo sapiens
gtgggtttgtgagtg

SEQ ID NO: 28151 - DNA, 15 bp, Homo sapiens
tgtgggtttgtgagt

SEQ ID NO: 28152 - DNA, 15 bp, Homo sapiens
gtgtgggtttgtgag

SEQ ID NO: 28153 - DNA, 15 bp, Homo sapiens
agtgtgggtttgtga

SEQ ID NO: 28154 - DNA, 15 bp, Homo sapiens
gagtgtgggtttgtg

SEQ ID NO: 28155 - DNA, 15 bp, Homo sapiens
agagtgtgggtttgt

SEQ ID NO: 28156 - DNA, 15 bp, Homo sapiens
aagagtgtgggtttg

SEQ ID NO: 28157 - DNA, 15 bp, Homo sapiens
taagagtgtgggttt

SEQ ID NO: 28158 - DNA, 15 bp, Homo sapiens
ataagagtgtgggtt

SEQ ID NO: 28159 - DNA, 15 bp, Homo sapiens
aataagagtgtgggt

SEQ ID NO: 28160 - DNA, 15 bp, Homo sapiens
gaataagagtgtggg

SEQ ID NO: 28161 - DNA, 15 bp, Homo sapiens
tgaataagagtgtgg

SEQ ID NO: 28162 - DNA, 15 bp, Homo sapiens
gtgaataagagtgtg

SEQ ID NO: 28163 - DNA, 15 bp, Homo sapiens
tgtgaataagagtgt

SEQ ID NO: 28164 - DNA, 15 bp, Homo sapiens
atgtgaataagagtg

SEQ ID NO: 28165 - DNA, 15 bp, Homo sapiens
gatgtgaataagagt

SEQ ID NO: 28166 - DNA, 15 bp, Homo sapiens
agatgtgaataagag

SEQ ID NO: 28167 - DNA, 15 bp, Homo sapiens
cagatgtgaataaga

SEQ ID NO: 28168 - DNA, 15 bp, Homo sapiens
gcagatgtgaataag

SEQ ID NO: 28169 - DNA, 15 bp, Homo sapiens
agcagatgtgaataa

SEQ ID NO: 28170 - DNA, 15 bp, Homo sapiens
gagcagatgtgaata

SEQ ID NO: 28171 - DNA, 15 bp, Homo sapiens
tgagcagatgtgaat

SEQ ID NO: 28172 - DNA, 15 bp, Homo sapiens
gtgagcagatgtgaa

SEQ ID NO: 28173 - DNA, 15 bp, Homo sapiens
ggtgagcagatgtga

SEQ ID NO: 28174 - DNA, 15 bp, Homo sapiens
gggtgagcagatgtg

SEQ ID NO: 28175 - DNA, 15 bp, Homo sapiens
agggtgagcagatgt

SEQ ID NO: 28176 - DNA, 15 bp, Homo sapiens
tagggtgagcagatg

SEQ ID NO: 28177 - DNA, 15 bp, Homo sapiens
ctagggtgagcagat

SEQ ID NO: 28178 - DNA, 15 bp, Homo sapiens
gctagggtgagcaga

SEQ ID NO: 28179 - DNA, 15 bp, Homo sapiens
ggctagggtgagcag

SEQ ID NO: 28180 - DNA, 15 bp, Homo sapiens
tggctagggtgagca

SEQ ID NO: 28181 - DNA, 15 bp, Homo sapiens
gtggctagggtgagc

SEQ ID NO: 28182 - DNA, 15 bp, Homo sapiens
agtggctagggtgag

SEQ ID NO: 28183 - DNA, 15 bp, Homo sapiens
gagtggctagggtga

SEQ ID NO: 28184 - DNA, 15 bp, Homo sapiens
tgagtggctagggtg

SEQ ID NO: 28185 - DNA, 15 bp, Homo sapiens
ttgagtggctagggt

SEQ ID NO: 28186 - DNA, 15 bp, Homo sapiens
tttgagtggctaggg

SEQ ID NO: 28187 - DNA, 15 bp, Homo sapiens
gtttgagtggctagg

SEQ ID NO: 28188 - DNA, 15 bp, Homo sapiens
tgtttgagtggctag

SEQ ID NO: 28189 - DNA, 15 bp, Homo sapiens
gtgtttgagtggcta

SEQ ID NO: 28190 - DNA, 15 bp, Homo sapiens
tgtgtttgagtggct

SEQ ID NO: 28191 - DNA, 15 bp, Homo sapiens
ttgtgtttgagtggc

SEQ ID NO: 28192 - DNA, 15 bp, Homo sapiens
attgtgtttgagtgg

SEQ ID NO: 28193 - DNA, 15 bp, Homo sapiens
gattgtgtttgagtg

SEQ ID NO: 28194 - DNA, 15 bp, Homo sapiens
ggattgtgtttgagt

SEQ ID NO: 28195 - DNA, 15 bp, Homo sapiens
gggattgtgtttgag

SEQ ID NO: 28196 - DNA, 15 bp, Homo sapiens
agggattgtgtttga

SEQ ID NO: 28197 - DNA, 15 bp, Homo sapiens
gagggattgtgtttg

SEQ ID NO: 28198 - DNA, 15 bp, Homo sapiens
tgagggattgtgttt

SEQ ID NO: 28199 - DNA, 15 bp, Homo sapiens
atgagggattgtgtt

SEQ ID NO: 28200 - DNA, 15 bp, Homo sapiens
aatgagggattgtgt

SEQ ID NO: 28201 - DNA, 15 bp, Homo sapiens
gaatgagggattgtg

SEQ ID NO: 28202 - DNA, 15 bp, Homo sapiens
tgaatgagggattgt

SEQ ID NO: 28203 - DNA, 15 bp, Homo sapiens
ctgaatgagggattg

SEQ ID NO: 28204 - DNA, 15 bp, Homo sapiens
gctgaatgagggatt

SEQ ID NO: 28205 - DNA, 15 bp, Homo sapiens
ggctgaatgagggat

SEQ ID NO: 28206 - DNA, 15 bp, Homo sapiens
aggctgaatgaggga

SEQ ID NO: 28207 - DNA, 15 bp, Homo sapiens
caggctgaatgaggg

SEQ ID NO: 28208 - DNA, 15 bp, Homo sapiens
ccaggctgaatgagg

SEQ ID NO: 28209 - DNA, 15 bp, Homo sapiens
tccaggctgaatgag

SEQ ID NO: 28210 - DNA, 15 bp, Homo sapiens
ttccaggctgaatga

SEQ ID NO: 28211 - DNA, 15 bp, Homo sapiens
attccaggctgaatg

SEQ ID NO: 28212 - DNA, 15 bp, Homo sapiens
tattccaggctgaat

SEQ ID NO: 28213 - DNA, 15 bp, Homo sapiens
ttattccaggctgaa

SEQ ID NO: 28214 - DNA, 15 bp, Homo sapiens
cttattccaggctga

SEQ ID NO: 28215 - DNA, 15 bp, Homo sapiens
acttattccaggctg

SEQ ID NO: 28216 - DNA, 15 bp, Homo sapiens
gacttattccaggct

SEQ ID NO: 28217 - DNA, 15 bp, Homo sapiens
ggacttattccaggc

SEQ ID NO: 28218 - DNA, 15 bp, Homo sapiens
tggacttattccagg

SEQ ID NO: 28219 - DNA, 15 bp, Homo sapiens
ctggacttattccag

SEQ ID NO: 28220 - DNA, 15 bp, Homo sapiens
tctggacttattcca

SEQ ID NO: 28221 - DNA, 15 bp, Homo sapiens
ctctggacttattcc

SEQ ID NO: 28222 - DNA, 15 bp, Homo sapiens
cctctggacttattc

SEQ ID NO: 28223 - DNA, 15 bp, Homo sapiens
ccctctggacttatt

SEQ ID NO: 28224 - DNA, 15 bp, Homo sapiens
gccctctggacttat

SEQ ID NO: 28225 - DNA, 15 bp, Homo sapiens
cgccctctggactta

SEQ ID NO: 28226 - DNA, 15 bp, Homo sapiens
acgccctctggactt

SEQ ID NO: 28227 - DNA, 15 bp, Homo sapiens
cacgccctctggact

SEQ ID NO: 28228 - DNA, 15 bp, Homo sapiens
ccacgccctctggac

SEQ ID NO: 28229 - DNA, 15 bp, Homo sapiens
cccacgccctctgga

SEQ ID NO: 28230 - DNA, 15 bp, Homo sapiens
gcccacgccctctgg

SEQ ID NO: 28231 - DNA, 15 bp, Homo sapiens
ggcccacgccctctg

SEQ ID NO: 28232 - DNA, 15 bp, Homo sapiens
aggcccacgccctct

SEQ ID NO: 28233 - DNA, 15 bp, Homo sapiens
caggcccacgccctc

SEQ ID NO: 28234 - DNA, 15 bp, Homo sapiens
tcaggcccacgccct

SEQ ID NO: 28235 - DNA, 15 bp, Homo sapiens
atcaggcccacgccc

SEQ ID NO: 28236 - DNA, 15 bp, Homo sapiens
aatcaggcccacgcc

SEQ ID NO: 28237 - DNA, 15 bp, Homo sapiens
gaatcaggcccacgc

SEQ ID NO: 28238 - DNA, 15 bp, Homo sapiens
tgaatcaggcccacg

SEQ ID NO: 28239 - DNA, 15 bp, Homo sapiens
ctgaatcaggcccac

SEQ ID NO: 28240 - DNA, 15 bp, Homo sapiens
tctgaatcaggccca

SEQ ID NO: 28241 - DNA, 15 bp, Homo sapiens
ctctgaatcaggccc

SEQ ID NO: 28242 - DNA, 15 bp, Homo sapiens
tctctgaatcaggcc

SEQ ID NO: 28243 - DNA, 15 bp, Homo sapiens
gtctctgaatcaggc

SEQ ID NO: 28244 - DNA, 15 bp, Homo sapiens
tgtctctgaatcagg

SEQ ID NO: 28245 - DNA, 15 bp, Homo sapiens
ttgtctctgaatcag

SEQ ID NO: 28246 - DNA, 15 bp, Homo sapiens
attgtctctgaatca

SEQ ID NO: 28247 - DNA, 15 bp, Homo sapiens
gattgtctctgaatc

SEQ ID NO: 28248 - DNA, 15 bp, Homo sapiens
tgattgtctctgaat

SEQ ID NO: 28249 - DNA, 15 bp, Homo sapiens
ctgattgtctctgaa

SEQ ID NO: 28250 - DNA, 15 bp, Homo sapiens
actgattgtctctga

SEQ ID NO: 28251 - DNA, 15 bp, Homo sapiens
aactgattgtctctg

SEQ ID NO: 28252 - DNA, 15 bp, Homo sapiens
caactgattgtctct

SEQ ID NO: 28253 - DNA, 15 bp, Homo sapiens
acaactgattgtctc

SEQ ID NO: 28254 - DNA, 15 bp, Homo sapiens
aacaactgattgtct

SEQ ID NO: 28255 - DNA, 15 bp, Homo sapiens
gaacaactgattgtc

SEQ ID NO: 28256 - DNA, 15 bp, Homo sapiens
agaacaactgattgt

SEQ ID NO: 28257 - DNA, 15 bp, Homo sapiens
gagaacaactgattg

SEQ ID NO: 28258 - DNA, 15 bp, Homo sapiens
tgagaacaactgatt

SEQ ID NO: 28259 - DNA, 15 bp, Homo sapiens
atgagaacaactgat

SEQ ID NO: 28260 - DNA, 15 bp, Homo sapiens
gatgagaacaactga

SEQ ID NO: 28261 - DNA, 15 bp, Homo sapiens
agatgagaacaactg

SEQ ID NO: 28262 - DNA, 15 bp, Homo sapiens
cagatgagaacaact

SEQ ID NO: 28263 - DNA, 15 bp, Homo sapiens
ccagatgagaacaac

SEQ ID NO: 28264 - DNA, 15 bp, Homo sapiens
cccagatgagaacaa

SEQ ID NO: 28265 - DNA, 15 bp, Homo sapiens
tcccagatgagaaca

SEQ ID NO: 28266 - DNA, 15 bp, Homo sapiens
ttcccagatgagaac

SEQ ID NO: 28267 - DNA, 15 bp, Homo sapiens
tttcccagatgagaa

SEQ ID NO: 28268 - DNA, 15 bp, Homo sapiens
atttcccagatgaga

SEQ ID NO: 28269 - DNA, 15 bp, Homo sapiens
catttcccagatgag

SEQ ID NO: 28270 - DNA, 15 bp, Homo sapiens
ccatttcccagatga

SEQ ID NO: 28271 - DNA, 15 bp, Homo sapiens
cccatttcccagatg

SEQ ID NO: 28272 - DNA, 15 bp, Homo sapiens
ccccatttcccagat

SEQ ID NO: 28273 - DNA, 15 bp, Homo sapiens
gccccatttcccaga

SEQ ID NO: 28274 - DNA, 15 bp, Homo sapiens
tgccccatttcccag

SEQ ID NO: 28275 - DNA, 15 bp, Homo sapiens
ttgccccatttccca

SEQ ID NO: 28276 - DNA, 15 bp, Homo sapiens
attgccccatttccc

SEQ ID NO: 28277 - DNA, 15 bp, Homo sapiens
cattgccccatttcc

SEQ ID NO: 28278 - DNA, 15 bp, Homo sapiens
acattgccccatttc

SEQ ID NO: 28279 - DNA, 15 bp, Homo sapiens
cacattgccccattt

SEQ ID NO: 28280 - DNA, 15 bp, Homo sapiens
ccacattgccccatt

SEQ ID NO: 28281 - DNA, 15 bp, Homo sapiens
accacattgccccat

SEQ ID NO: 28282 - DNA, 15 bp, Homo sapiens
gaccacattgcccca

SEQ ID NO: 28283 - DNA, 15 bp, Homo sapiens
tgaccacattgcccc

SEQ ID NO: 28284 - DNA, 15 bp, Homo sapiens
atgaccacattgccc

SEQ ID NO: 28285 - DNA, 15 bp, Homo sapiens
gatgaccacattgcc

SEQ ID NO: 28286 - DNA, 15 bp, Homo sapiens
agatgaccacattgc

SEQ ID NO: 28287 - DNA, 15 bp, Homo sapiens
gagatgaccacattg

SEQ ID NO: 28288 - DNA, 15 bp, Homo sapiens
agagatgaccacatt

SEQ ID NO: 28289 - DNA, 15 bp, Homo sapiens
tagagatgaccacat

SEQ ID NO: 28290 - DNA, 15 bp, Homo sapiens
ctagagatgaccaca

SEQ ID NO: 28291 - DNA, 15 bp, Homo sapiens
cctagagatgaccac

SEQ ID NO: 28292 - DNA, 15 bp, Homo sapiens
ccctagagatgacca

SEQ ID NO: 28293 - DNA, 15 bp, Homo sapiens
tccctagagatgacc

SEQ ID NO: 28294 - DNA, 15 bp, Homo sapiens
gtccctagagatgac

SEQ ID NO: 28295 - DNA, 15 bp, Homo sapiens
ggtccctagagatga

SEQ ID NO: 28296 - DNA, 15 bp, Homo sapiens
gggtccctagagatg

SEQ ID NO: 28297 - DNA, 15 bp, Homo sapiens
agggtccctagagat

SEQ ID NO: 28298 - DNA, 15 bp, Homo sapiens
gagggtccctagaga

SEQ ID NO: 28299 - DNA, 15 bp, Homo sapiens
ggagggtccctagag

SEQ ID NO: 28300 - DNA, 15 bp, Homo sapiens
gggagggtccctaga

SEQ ID NO: 28301 - DNA, 15 bp, Homo sapiens
agggagggtccctag

SEQ ID NO: 28302 - DNA, 15 bp, Homo sapiens
cagggagggtcccta

SEQ ID NO: 28303 - DNA, 15 bp, Homo sapiens
gcagggagggtccct

SEQ ID NO: 28304 - DNA, 15 bp, Homo sapiens
agcagggagggtccc

SEQ ID NO: 28305 - DNA, 15 bp, Homo sapiens
gagcagggagggtcc

SEQ ID NO: 28306 - DNA, 15 bp, Homo sapiens
agagcagggagggtc

SEQ ID NO: 28307 - DNA, 15 bp, Homo sapiens
tagagcagggagggt

SEQ ID NO: 28308 - DNA, 15 bp, Homo sapiens
ttagagcagggaggg

SEQ ID NO: 28309 - DNA, 15 bp, Homo sapiens
gttagagcagggagg

SEQ ID NO: 28310 - DNA, 15 bp, Homo sapiens
tgttagagcagggag

SEQ ID NO: 28311 - DNA, 15 bp, Homo sapiens
atgttagagcaggga

SEQ ID NO: 28312 - DNA, 15 bp, Homo sapiens
aatgttagagcaggg

SEQ ID NO: 28313 - DNA, 15 bp, Homo sapiens
gaatgttagagcagg

SEQ ID NO: 28314 - DNA, 15 bp, Homo sapiens
agaatgttagagcag

SEQ ID NO: 28315 - DNA, 15 bp, Homo sapiens
aagaatgttagagca

SEQ ID NO: 28316 - DNA, 15 bp, Homo sapiens
aaagaatgttagagc

SEQ ID NO: 28317 - DNA, 15 bp, Homo sapiens
caaagaatgttagag

SEQ ID NO: 28318 - DNA, 15 bp, Homo sapiens
tcaaagaatgttaga

SEQ ID NO: 28319 - DNA, 15 bp, Homo sapiens
ttcaaagaatgttag

SEQ ID NO: 28320 - DNA, 15 bp, Homo sapiens
attcaaagaatgtta

SEQ ID NO: 28321 - DNA, 15 bp, Homo sapiens
cattcaaagaatgtt

SEQ ID NO: 28322 - DNA, 15 bp, Homo sapiens
acattcaaagaatgt

SEQ ID NO: 28323 - DNA, 15 bp, Homo sapiens
cacattcaaagaatg

SEQ ID NO: 28324 - DNA, 15 bp, Homo sapiens
ccacattcaaagaat

SEQ ID NO: 28325 - DNA, 15 bp, Homo sapiens
accacattcaaagaa

SEQ ID NO: 28326 - DNA, 15 bp, Homo sapiens
caccacattcaaaga

SEQ ID NO: 28327 - DNA, 15 bp, Homo sapiens
ccaccacattcaaag

SEQ ID NO: 28328 - DNA, 15 bp, Homo sapiens
cccaccacattcaaa

SEQ ID NO: 28329 - DNA, 15 bp, Homo sapiens
acccaccacattcaa

SEQ ID NO: 28330 - DNA, 15 bp, Homo sapiens
gacccaccacattca

SEQ ID NO: 28331 - DNA, 15 bp, Homo sapiens
ggacccaccacattc

SEQ ID NO: 28332 - DNA, 15 bp, Homo sapiens
aggacccaccacatt

SEQ ID NO: 28333 - DNA, 15 bp, Homo sapiens
caggacccaccacat

SEQ ID NO: 28334 - DNA, 15 bp, Homo sapiens
tcaggacccaccaca

SEQ ID NO: 28335 - DNA, 15 bp, Homo sapiens
ctcaggacccaccac

SEQ ID NO: 28336 - DNA, 15 bp, Homo sapiens
cctcaggacccacca

SEQ ID NO: 28337 - DNA, 15 bp, Homo sapiens
acctcaggacccacc

SEQ ID NO: 28338 - DNA, 15 bp, Homo sapiens
cacctcaggacccac

SEQ ID NO: 28339 - DNA, 15 bp, Homo sapiens
ccacctcaggaccca

SEQ ID NO: 28340 - DNA, 15 bp, Homo sapiens
tccacctcaggaccc

SEQ ID NO: 28341 - DNA, 15 bp, Homo sapiens
ttccacctcaggacc

SEQ ID NO: 28342 - DNA, 15 bp, Homo sapiens
cttccacctcaggac

SEQ ID NO: 28343 - DNA, 15 bp, Homo sapiens
gcttccacctcagga

SEQ ID NO: 28344 - DNA, 15 bp, Homo sapiens
tgcttccacctcagg

SEQ ID NO: 28345 - DNA, 15 bp, Homo sapiens
gtgcttccacctcag

SEQ ID NO: 28346 - DNA, 15 bp, Homo sapiens
agtgcttccacctca

SEQ ID NO: 28347 - DNA, 15 bp, Homo sapiens
gagtgcttccacctc

SEQ ID NO: 28348 - DNA, 15 bp, Homo sapiens
agagtgcttccacct

SEQ ID NO: 28349 - DNA, 15 bp, Homo sapiens
cagagtgcttccacc

SEQ ID NO: 28350 - DNA, 15 bp, Homo sapiens
acagagtgcttccac

SEQ ID NO: 28351 - DNA, 15 bp, Homo sapiens
gacagagtgcttcca

SEQ ID NO: 28352 - DNA, 15 bp, Homo sapiens
ggacagagtgcttcc

SEQ ID NO: 28353 - DNA, 15 bp, Homo sapiens
gggacagagtgcttc

SEQ ID NO: 28354 - DNA, 15 bp, Homo sapiens
agggacagagtgctt

SEQ ID NO: 28355 - DNA, 15 bp, Homo sapiens
cagggacagagtgct

SEQ ID NO: 28356 - DNA, 15 bp, Homo sapiens
tcagggacagagtgc

SEQ ID NO: 28357 - DNA, 15 bp, Homo sapiens
gtcagggacagagtg

SEQ ID NO: 28358 - DNA, 15 bp, Homo sapiens
agtcagggacagagt

SEQ ID NO: 28359 - DNA, 15 bp, Homo sapiens
aagtcagggacagag

SEQ ID NO: 28360 - DNA, 15 bp, Homo sapiens
gaagtcagggacaga

SEQ ID NO: 28361 - DNA, 15 bp, Homo sapiens
agaagtcagggacag

SEQ ID NO: 28362 - DNA, 15 bp, Homo sapiens
tagaagtcagggaca

SEQ ID NO: 28363 - DNA, 15 bp, Homo sapiens
ctagaagtcagggac

SEQ ID NO: 28364 - DNA, 15 bp, Homo sapiens
actagaagtcaggga

SEQ ID NO: 28365 - DNA, 15 bp, Homo sapiens
tactagaagtcaggg

SEQ ID NO: 28366 - DNA, 15 bp, Homo sapiens
atactagaagtcagg

SEQ ID NO: 28367 - DNA, 15 bp, Homo sapiens
tatactagaagtcag

SEQ ID NO: 28368 - DNA, 15 bp, Homo sapiens
atatactagaagtca

SEQ ID NO: 28369 - DNA, 15 bp, Homo sapiens
catatactagaagtc

SEQ ID NO: 28370 - DNA, 15 bp, Homo sapiens
acatatactagaagt

SEQ ID NO: 28371 - DNA, 15 bp, Homo sapiens
cacatatactagaag

SEQ ID NO: 28372 - DNA, 15 bp, Homo sapiens
ccacatatactagaa

SEQ ID NO: 28373 - DNA, 15 bp, Homo sapiens
tccacatatactaga

SEQ ID NO: 28374 - DNA, 15 bp, Homo sapiens
ctccacatatactag

SEQ ID NO: 28375 - DNA, 15 bp, Homo sapiens
tctccacatatacta

SEQ ID NO: 28376 - DNA, 15 bp, Homo sapiens
atctccacatatact

SEQ ID NO: 28377 - DNA, 15 bp, Homo sapiens
tatctccacatatac

SEQ ID NO: 28378 - DNA, 15 bp, Homo sapiens
ctatctccacatata

SEQ ID NO: 28379 - DNA, 15 bp, Homo sapiens
cctatctccacatat

SEQ ID NO: 28380 - DNA, 15 bp, Homo sapiens
ccctatctccacata

SEQ ID NO: 28381 - DNA, 15 bp, Homo sapiens
accctatctccacat

SEQ ID NO: 28382 - DNA, 15 bp, Homo sapiens
aaccctatctccaca

SEQ ID NO: 28383 - DNA, 15 bp, Homo sapiens
taaccctatctccac

SEQ ID NO: 28384 - DNA, 15 bp, Homo sapiens
gtaaccctatctcca

SEQ ID NO: 28385 - DNA, 15 bp, Homo sapiens
tgtaaccctatctcc

SEQ ID NO: 28386 - DNA, 15 bp, Homo sapiens
gtgtaaccctatctc

SEQ ID NO: 28387 - DNA, 15 bp, Homo sapiens
tgtgtaaccctatct

SEQ ID NO: 28388 - DNA, 15 bp, Homo sapiens
ttgtgtaaccctatc

SEQ ID NO: 28389 - DNA, 15 bp, Homo sapiens
tttgtgtaaccctat

SEQ ID NO: 28390 - DNA, 15 bp, Homo sapiens
atttgtgtaacccta

SEQ ID NO: 28391 - DNA, 15 bp, Homo sapiens
tatttgtgtaaccct

SEQ ID NO: 28392 - DNA, 15 bp, Homo sapiens
atatttgtgtaaccc

SEQ ID NO: 28393 - DNA, 15 bp, Homo sapiens
aatatttgtgtaacc

SEQ ID NO: 28394 - DNA, 15 bp, Homo sapiens
aaatatttgtgtaac

SEQ ID NO: 28395 - DNA, 15 bp, Homo sapiens
aaaatatttgtgtaa

SEQ ID NO: 28396 - DNA, 15 bp, Homo sapiens
taaaatatttgtgta

SEQ ID NO: 28397 - DNA, 15 bp, Homo sapiens
ataaaatatttgtgt

SEQ ID NO: 28398 - DNA, 15 bp, Homo sapiens
aataaaatatttgtg

SEQ ID NO: 28399 - DNA, 15 bp, Homo sapiens
caataaaatatttgt

SEQ ID NO: 28400 - DNA, 15 bp, Homo sapiens
ccaataaaatatttg

SEQ ID NO: 28401 - DNA, 15 bp, Homo sapiens
cccaataaaatattt

SEQ ID NO: 28402 - DNA, 15 bp, Homo sapiens
gcccaataaaatatt

SEQ ID NO: 28403 - DNA, 15 bp, Homo sapiens
tgcccaataaaatat

SEQ ID NO: 28404 - DNA, 15 bp, Homo sapiens
ctgcccaataaaata

SEQ ID NO: 28405 - DNA, 15 bp, Homo sapiens
tctgcccaataaaat

SEQ ID NO: 28406 - DNA, 15 bp, Homo sapiens
ttctgcccaataaaa

SEQ ID NO: 28407 - DNA, 15 bp, Homo sapiens
gttctgcccaataaa

SEQ ID NO: 28408 - DNA, 15 bp, Homo sapiens
agttctgcccaataa

SEQ ID NO: 28409 - DNA, 15 bp, Homo sapiens
aagttctgcccaata

SEQ ID NO: 28410 - DNA, 15 bp, Homo sapiens
aaagttctgcccaat

SEQ ID NO: 28411 - DNA, 15 bp, Homo sapiens
aaaagttctgcccaa

SEQ ID NO: 28412 - DNA, 15 bp, Homo sapiens
taaaagttctgccca

SEQ ID NO: 28413 - DNA, 15 bp, Homo sapiens
ataaaagttctgccc

SEQ ID NO: 28414 - DNA, 15 bp, Homo sapiens
tataaaagttctgcc

SEQ ID NO: 28415 - DNA, 15 bp, Homo sapiens
ttataaaagttctgc

SEQ ID NO: 28416 - DNA, 15 bp, Homo sapiens
tttataaaagttctg

SEQ ID NO: 28417 - DNA, 15 bp, Homo sapiens
ttttataaaagttct

SEQ ID NO: 28418 - DNA, 15 bp, Homo sapiens
gttttataaaagttc

SEQ ID NO: 28419 - DNA, 15 bp, Homo sapiens
tgttttataaaagtt

SEQ ID NO: 28420 - DNA, 15 bp, Homo sapiens
ttgttttataaaagt

SEQ ID NO: 28421 - DNA, 15 bp, Homo sapiens
attgttttataaaag

SEQ ID NO: 28422 - DNA, 15 bp, Homo sapiens
aattgttttataaaa

SEQ ID NO: 28423 - DNA, 15 bp, Homo sapiens
aaattgttttataaa

SEQ ID NO: 28424 - DNA, 15 bp, Homo sapiens
taaattgttttataa

SEQ ID NO: 28425 - DNA, 15 bp, Homo sapiens
ataaattgttttata

SEQ ID NO: 28426 - DNA, 15 bp, Homo sapiens
gataaattgttttat

SEQ ID NO: 28427 - DNA, 15 bp, Homo sapiens
tgataaattgtttta

SEQ ID NO: 28428 - DNA, 15 bp, Homo sapiens
atgataaattgtttt

SEQ ID NO: 28429 - DNA, 15 bp, Homo sapiens
tatgataaattgttt

SEQ ID NO: 28430 - DNA, 15 bp, Homo sapiens
ttatgataaattgtt

SEQ ID NO: 28431 - DNA, 15 bp, Homo sapiens
cttatgataaattgt

SEQ ID NO: 28432 - DNA, 15 bp, Homo sapiens
gcttatgataaattg

SEQ ID NO: 28433 - DNA, 15 bp, Homo sapiens
agcttatgataaatt

SEQ ID NO: 28434 - DNA, 15 bp, Homo sapiens
tagcttatgataaat

SEQ ID NO: 28435 - DNA, 15 bp, Homo sapiens
atagcttatgataaa

SEQ ID NO: 28436 - DNA, 15 bp, Homo sapiens
gatagcttatgataa

SEQ ID NO: 28437 - DNA, 15 bp, Homo sapiens
cgatagcttatgata

SEQ ID NO: 28438 - DNA, 15 bp, Homo sapiens
gcgatagcttatgat

SEQ ID NO: 28439 - DNA, 15 bp, Homo sapiens
tgcgatagcttatga

SEQ ID NO: 28440 - DNA, 15 bp, Homo sapiens
ctgcgatagcttatg

SEQ ID NO: 28441 - DNA, 15 bp, Homo sapiens
gctgcgatagcttat

SEQ ID NO: 28442 - DNA, 15 bp, Homo sapiens
ggctgcgatagctta

SEQ ID NO: 28443 - DNA, 15 bp, Homo sapiens
tggctgcgatagctt

SEQ ID NO: 28444 - DNA, 15 bp, Homo sapiens
ctggctgcgatagct

SEQ ID NO: 28445 - DNA, 15 bp, Homo sapiens
gctggctgcgatagc

SEQ ID NO: 28446 - DNA, 15 bp, Homo sapiens
tgctggctgcgatag

SEQ ID NO: 28447 - DNA, 15 bp, Homo sapiens
ctgctggctgcgata

SEQ ID NO: 28448 - DNA, 15 bp, Homo sapiens
gctgctggctgcgat

SEQ ID NO: 28449 - DNA, 15 bp, Homo sapiens
tgctgctggctgcga

SEQ ID NO: 28450 - DNA, 15 bp, Homo sapiens
ttgctgctggctgcg

SEQ ID NO: 28451 - DNA, 15 bp, Homo sapiens
attgctgctggctgc

SEQ ID NO: 28452 - DNA, 15 bp, Homo sapiens
aattgctgctggctg

SEQ ID NO: 28453 - DNA, 15 bp, Homo sapiens
aaattgctgctggct

SEQ ID NO: 28454 - DNA, 15 bp, Homo sapiens
aaaattgctgctggc

SEQ ID NO: 28455 - DNA, 15 bp, Homo sapiens
aaaaattgctgctgg

SEQ ID NO: 28456 - DNA, 15 bp, Homo sapiens
gaaaaattgctgctg

SEQ ID NO: 28457 - DNA, 15 bp, Homo sapiens
ggaaaaattgctgct

SEQ ID NO: 28458 - DNA, 15 bp, Homo sapiens
tggaaaaattgctgc

SEQ ID NO: 28459 - DNA, 15 bp, Homo sapiens
ttggaaaaattgctg

SEQ ID NO: 28460 - DNA, 15 bp, Homo sapiens
gttggaaaaattgct

SEQ ID NO: 28461 - DNA, 15 bp, Homo sapiens
ggttggaaaaattgc

SEQ ID NO: 28462 - DNA, 15 bp, Homo sapiens
aggttggaaaaattg

SEQ ID NO: 28463 - DNA, 15 bp, Homo sapiens
caggttggaaaaatt

SEQ ID NO: 28464 - DNA, 15 bp, Homo sapiens
ccaggttggaaaaat

SEQ ID NO: 28465 - DNA, 15 bp, Homo sapiens
tccaggttggaaaaa

SEQ ID NO: 28466 - DNA, 15 bp, Homo sapiens
atccaggttggaaaa

SEQ ID NO: 28467 - DNA, 15 bp, Homo sapiens
aatccaggttggaaa

SEQ ID NO: 28468 - DNA, 15 bp, Homo sapiens
gaatccaggttggaa

SEQ ID NO: 28469 - DNA, 15 bp, Homo sapiens
ggaatccaggttgga

SEQ ID NO: 28470 - DNA, 15 bp, Homo sapiens
tggaatccaggttgg

SEQ ID NO: 28471 - DNA, 15 bp, Homo sapiens
gtggaatccaggttg

SEQ ID NO: 28472 - DNA, 15 bp, Homo sapiens
ggtggaatccaggtt

SEQ ID NO: 28473 - DNA, 15 bp, Homo sapiens
tggtggaatccaggt

SEQ ID NO: 28474 - DNA, 15 bp, Homo sapiens
ctggtggaatccagg

SEQ ID NO: 28475 - DNA, 15 bp, Homo sapiens
cctggtggaatccag

SEQ ID NO: 28476 - DNA, 15 bp, Homo sapiens
ccctggtggaatcca

SEQ ID NO: 28477 - DNA, 15 bp, Homo sapiens
cccctggtggaatcc

SEQ ID NO: 28478 - DNA, 15 bp, Homo sapiens
tcccctggtggaatc

SEQ ID NO: 28479 - DNA, 15 bp, Homo sapiens
ctcccctggtggaat

SEQ ID NO: 28480 - DNA, 15 bp, Homo sapiens
gctcccctggtggaa

SEQ ID NO: 28481 - DNA, 15 bp, Homo sapiens
agctcccctggtgga

SEQ ID NO: 28482 - DNA, 15 bp, Homo sapiens
aagctcccctggtgg

SEQ ID NO: 28483 - DNA, 15 bp, Homo sapiens
caagctcccctggtg

SEQ ID NO: 28484 - DNA, 15 bp, Homo sapiens
ccaagctcccctggt

SEQ ID NO: 28485 - DNA, 15 bp, Homo sapiens
gccaagctcccctgg

SEQ ID NO: 28486 - DNA, 15 bp, Homo sapiens
ggccaagctcccctg

SEQ ID NO: 28487 - DNA, 15 bp, Homo sapiens
cggccaagctcccct

SEQ ID NO: 28488 - DNA, 15 bp, Homo sapiens
ccggccaagctcccc

SEQ ID NO: 28489 - DNA, 15 bp, Homo sapiens
accggccaagctccc

SEQ ID NO: 28490 - DNA, 15 bp, Homo sapiens
caccggccaagctcc

SEQ ID NO: 28491 - DNA, 15 bp, Homo sapiens
acaccggccaagctc

SEQ ID NO: 28492 - DNA, 15 bp, Homo sapiens
gacaccggccaagct

SEQ ID NO: 28493 - DNA, 15 bp, Homo sapiens
agacaccggccaagc

SEQ ID NO: 28494 - DNA, 15 bp, Homo sapiens
cagacaccggccaag

SEQ ID NO: 28495 - DNA, 15 bp, Homo sapiens
tcagacaccggccaa

SEQ ID NO: 28496 - DNA, 15 bp, Homo sapiens
ctcagacaccggcca

SEQ ID NO: 28497 - DNA, 15 bp, Homo sapiens
actcagacaccggcc

SEQ ID NO: 28498 - DNA, 15 bp, Homo sapiens
cactcagacaccggc

SEQ ID NO: 28499 - DNA, 15 bp, Homo sapiens
gcactcagacaccgg

SEQ ID NO: 28500 - DNA, 15 bp, Homo sapiens
ggcactcagacaccg

SEQ ID NO: 28501 - DNA, 15 bp, Homo sapiens
tggcactcagacacc

SEQ ID NO: 28502 - DNA, 15 bp, Homo sapiens
gtggcactcagacac

SEQ ID NO: 28503 - DNA, 15 bp, Homo sapiens
agtggcactcagaca

SEQ ID NO: 28504 - DNA, 15 bp, Homo sapiens
aagtggcactcagac

SEQ ID NO: 28505 - DNA, 15 bp, Homo sapiens
aaagtggcactcaga

SEQ ID NO: 28506 - DNA, 15 bp, Homo sapiens
gaaagtggcactcag

SEQ ID NO: 28507 - DNA, 15 bp, Homo sapiens
tgaaagtggcactca

SEQ ID NO: 28508 - DNA, 15 bp, Homo sapiens
ctgaaagtggcactc

SEQ ID NO: 28509 - DNA, 15 bp, Homo sapiens
gctgaaagtggcact

SEQ ID NO: 28510 - DNA, 15 bp, Homo sapiens
agctgaaagtggcac

SEQ ID NO: 28511 - DNA, 15 bp, Homo sapiens
aagctgaaagtggca

SEQ ID NO: 28512 - DNA, 15 bp, Homo sapiens
caagctgaaagtggc

SEQ ID NO: 28513 - DNA, 15 bp, Homo sapiens
tcaagctgaaagtgg

SEQ ID NO: 28514 - DNA, 15 bp, Homo sapiens
ctcaagctgaaagtg

SEQ ID NO: 28515 - DNA, 15 bp, Homo sapiens
tctcaagctgaaagt

SEQ ID NO: 28516 - DNA, 15 bp, Homo sapiens
ttctcaagctgaaag

SEQ ID NO: 28517 - DNA, 15 bp, Homo sapiens
cttctcaagctgaaa

SEQ ID NO: 28518 - DNA, 15 bp, Homo sapiens
gcttctcaagctgaa

SEQ ID NO: 28519 - DNA, 15 bp, Homo sapiens
tgcttctcaagctga

SEQ ID NO: 28520 - DNA, 15 bp, Homo sapiens
ctgcttctcaagctg

SEQ ID NO: 28521 - DNA, 15 bp, Homo sapiens
cctgcttctcaagct

SEQ ID NO: 28522 - DNA, 15 bp, Homo sapiens
acctgcttctcaagc

SEQ ID NO: 28523 - DNA, 15 bp, Homo sapiens
cacctgcttctcaag

SEQ ID NO: 28524 - DNA, 15 bp, Homo sapiens
tcacctgcttctcaa

SEQ ID NO: 28525 - DNA, 15 bp, Homo sapiens
gtcacctgcttctca

SEQ ID NO: 28526 - DNA, 15 bp, Homo sapiens
agtcacctgcttctc

SEQ ID NO: 28527 - DNA, 15 bp, Homo sapiens
gagtcacctgcttct

SEQ ID NO: 28528 - DNA, 15 bp, Homo sapiens
tgagtcacctgcttc

SEQ ID NO: 28529 - DNA, 15 bp, Homo sapiens
ctgagtcacctgctt

SEQ ID NO: 28530 - DNA, 15 bp, Homo sapiens
actgagtcacctgct

SEQ ID NO: 28531 - DNA, 15 bp, Homo sapiens
cactgagtcacctgc

SEQ ID NO: 28532 - DNA, 15 bp, Homo sapiens
tcactgagtcacctg

SEQ ID NO: 28533 - DNA, 15 bp, Homo sapiens
ttcactgagtcacct

SEQ ID NO: 28534 - DNA, 15 bp, Homo sapiens
tttcactgagtcacc

SEQ ID NO: 28535 - DNA, 15 bp, Homo sapiens
ttttcactgagtcac

SEQ ID NO: 28536 - DNA, 15 bp, Homo sapiens
cttttcactgagtca

SEQ ID NO: 28537 - DNA, 15 bp, Homo sapiens
tcttttcactgagtc

SEQ ID NO: 28538 - DNA, 15 bp, Homo sapiens
ctcttttcactgagt

SEQ ID NO: 28539 - DNA, 15 bp, Homo sapiens
gctcttttcactgag

SEQ ID NO: 28540 - DNA, 15 bp, Homo sapiens
tgctcttttcactga

SEQ ID NO: 28541 - DNA, 15 bp, Homo sapiens
ttgctcttttcactg

SEQ ID NO: 28542 - DNA, 15 bp, Homo sapiens
cttgctcttttcact

SEQ ID NO: 28543 - DNA, 15 bp, Homo sapiens
ccttgctcttttcac

SEQ ID NO: 28544 - DNA, 15 bp, Homo sapiens
tccttgctcttttca

SEQ ID NO: 28545 - DNA, 15 bp, Homo sapiens
ctccttgctcttttc

SEQ ID NO: 28546 - DNA, 15 bp, Homo sapiens
cctccttgctctttt

SEQ ID NO: 28547 - DNA, 15 bp, Homo sapiens
tcctccttgctcttt

SEQ ID NO: 28548 - DNA, 15 bp, Homo sapiens
ctcctccttgctctt

SEQ ID NO: 28549 - DNA, 15 bp, Homo sapiens
tctcctccttgctct

SEQ ID NO: 28550 - DNA, 15 bp, Homo sapiens
gtctcctccttgctc

SEQ ID NO: 28551 - DNA, 15 bp, Homo sapiens
tgtctcctccttgct

SEQ ID NO: 28552 - DNA, 15 bp, Homo sapiens
ctgtctcctccttgc

SEQ ID NO: 28553 - DNA, 15 bp, Homo sapiens
tctgtctcctccttg

SEQ ID NO: 28554 - DNA, 15 bp, Homo sapiens
ctctgtctcctcctt

SEQ ID NO: 28555 - DNA, 15 bp, Homo sapiens
cctctgtctcctcct

SEQ ID NO: 28556 - DNA, 15 bp, Homo sapiens
gcctctgtctcctcc

SEQ ID NO: 28557 - DNA, 15 bp, Homo sapiens
tgcctctgtctcctc

SEQ ID NO: 28558 - DNA, 15 bp, Homo sapiens
ctgcctctgtctcct

SEQ ID NO: 28559 - DNA, 15 bp, Homo sapiens
tctgcctctgtctcc

SEQ ID NO: 28560 - DNA, 15 bp, Homo sapiens
atctgcctctgtctc

SEQ ID NO: 28561 - DNA, 15 bp, Homo sapiens
aatctgcctctgtct

SEQ ID NO: 28562 - DNA, 15 bp, Homo sapiens
gaatctgcctctgtc

SEQ ID NO: 28563 - DNA, 15 bp, Homo sapiens
tgaatctgcctctgt

SEQ ID NO: 28564 - DNA, 15 bp, Homo sapiens
ctgaatctgcctctg

SEQ ID NO: 28565 - DNA, 15 bp, Homo sapiens
actgaatctgcctct

SEQ ID NO: 28566 - DNA, 15 bp, Homo sapiens
aactgaatctgcctc

SEQ ID NO: 28567 - DNA, 15 bp, Homo sapiens
gaactgaatctgcct

SEQ ID NO: 28568 - DNA, 15 bp, Homo sapiens
ggaactgaatctgcc

SEQ ID NO: 28569 - DNA, 15 bp, Homo sapiens
aggaactgaatctgc

SEQ ID NO: 28570 - DNA, 15 bp, Homo sapiens
taggaactgaatctg

SEQ ID NO: 28571 - DNA, 15 bp, Homo sapiens
ctaggaactgaatct

SEQ ID NO: 28572 - DNA, 15 bp, Homo sapiens
cctaggaactgaatc

SEQ ID NO: 28573 - DNA, 15 bp, Homo sapiens
gcctaggaactgaat

SEQ ID NO: 28574 - DNA, 15 bp, Homo sapiens
ggcctaggaactgaa

SEQ ID NO: 28575 - DNA, 15 bp, Homo sapiens
gggcctaggaactga

SEQ ID NO: 28576 - DNA, 15 bp, Homo sapiens
agggcctaggaactg

SEQ ID NO: 28577 - DNA, 15 bp, Homo sapiens
cagggcctaggaact

SEQ ID NO: 28578 - DNA, 15 bp, Homo sapiens
ccagggcctaggaac

SEQ ID NO: 28579 - DNA, 15 bp, Homo sapiens
cccagggcctaggaa

SEQ ID NO: 28580 - DNA, 15 bp, Homo sapiens
gcccagggcctagga

SEQ ID NO: 28581 - DNA, 15 bp, Homo sapiens
ggcccagggcctagg

SEQ ID NO: 28582 - DNA, 15 bp, Homo sapiens
tggcccagggcctag

SEQ ID NO: 28583 - DNA, 15 bp, Homo sapiens
gtggcccagggccta

SEQ ID NO: 28584 - DNA, 15 bp, Homo sapiens
ggtggcccagggcct

SEQ ID NO: 28585 - DNA, 15 bp, Homo sapiens
gggtggcccagggcc

SEQ ID NO: 28586 - DNA, 15 bp, Homo sapiens
tgggtggcccagggc

SEQ ID NO: 28587 - DNA, 15 bp, Homo sapiens
gtgggtggcccaggg

SEQ ID NO: 28588 - DNA, 15 bp, Homo sapiens
ggtgggtggcccagg

SEQ ID NO: 28589 - DNA, 15 bp, Homo sapiens
aggtgggtggcccag

SEQ ID NO: 28590 - DNA, 15 bp, Homo sapiens
caggtgggtggccca

SEQ ID NO: 28591 - DNA, 15 bp, Homo sapiens
gcaggtgggtggccc

SEQ ID NO: 28592 - DNA, 15 bp, Homo sapiens
tgcaggtgggtggcc

SEQ ID NO: 28593 - DNA, 15 bp, Homo sapiens
ttgcaggtgggtggc

SEQ ID NO: 28594 - DNA, 15 bp, Homo sapiens
cttgcaggtgggtgg

SEQ ID NO: 28595 - DNA, 15 bp, Homo sapiens
acttgcaggtgggtg

SEQ ID NO: 28596 - DNA, 15 bp, Homo sapiens
aacttgcaggtgggt

SEQ ID NO: 28597 - DNA, 15 bp, Homo sapiens
aaacttgcaggtggg

SEQ ID NO: 28598 - DNA, 15 bp, Homo sapiens
caaacttgcaggtgg

SEQ ID NO: 28599 - DNA, 15 bp, Homo sapiens
gcaaacttgcaggtg

SEQ ID NO: 28600 - DNA, 15 bp, Homo sapiens
tgcaaacttgcaggt

SEQ ID NO: 28601 - DNA, 15 bp, Homo sapiens
ctgcaaacttgcagg

SEQ ID NO: 28602 - DNA, 15 bp, Homo sapiens
gctgcaaacttgcag

SEQ ID NO: 28603 - DNA, 15 bp, Homo sapiens
ggctgcaaacttgca

SEQ ID NO: 28604 - DNA, 15 bp, Homo sapiens
gggctgcaaacttgc

SEQ ID NO: 28605 - DNA, 15 bp, Homo sapiens
tgggctgcaaacttg

SEQ ID NO: 28606 - DNA, 15 bp, Homo sapiens
ctgggctgcaaactt

SEQ ID NO: 28607 - DNA, 15 bp, Homo sapiens
actgggctgcaaact

SEQ ID NO: 28608 - DNA, 15 bp, Homo sapiens
gactgggctgcaaac

SEQ ID NO: 28609 - DNA, 15 bp, Homo sapiens
tgactgggctgcaaa

SEQ ID NO: 28610 - DNA, 15 bp, Homo sapiens
ctgactgggctgcaa

SEQ ID NO: 28611 - DNA, 15 bp, Homo sapiens
actgactgggctgca

SEQ ID NO: 28612 - DNA, 15 bp, Homo sapiens
cactgactgggctgc

SEQ ID NO: 28613 - DNA, 15 bp, Homo sapiens
gcactgactgggctg

SEQ ID NO: 28614 - DNA, 15 bp, Homo sapiens
tgcactgactgggct

SEQ ID NO: 28615 - DNA, 15 bp, Homo sapiens
ttgcactgactgggc

SEQ ID NO: 28616 - DNA, 15 bp, Homo sapiens
cttgcactgactggg

SEQ ID NO: 28617 - DNA, 15 bp, Homo sapiens
acttgcactgactgg

SEQ ID NO: 28618 - DNA, 15 bp, Homo sapiens
gacttgcactgactg

SEQ ID NO: 28619 - DNA, 15 bp, Homo sapiens
tgacttgcactgact

SEQ ID NO: 28620 - DNA, 15 bp, Homo sapiens
ctgacttgcactgac

SEQ ID NO: 28621 - DNA, 15 bp, Homo sapiens
gctgacttgcactga

SEQ ID NO: 28622 - DNA, 15 bp, Homo sapiens
agctgacttgcactg

SEQ ID NO: 28623 - DNA, 15 bp, Homo sapiens
tagctgacttgcact

SEQ ID NO: 28624 - DNA, 15 bp, Homo sapiens
ttagctgacttgcac

SEQ ID NO: 28625 - DNA, 15 bp, Homo sapiens
gttagctgacttgca

SEQ ID NO: 28626 - DNA, 15 bp, Homo sapiens
agttagctgacttgc

SEQ ID NO: 28627 - DNA, 15 bp, Homo sapiens
cagttagctgacttg

SEQ ID NO: 28628 - DNA, 15 bp, Homo sapiens
acagttagctgactt

SEQ ID NO: 28629 - DNA, 15 bp, Homo sapiens
aacagttagctgact

SEQ ID NO: 28630 - DNA, 15 bp, Homo sapiens
gaacagttagctgac

SEQ ID NO: 28631 - DNA, 15 bp, Homo sapiens
agaacagttagctga

SEQ ID NO: 28632 - DNA, 15 bp, Homo sapiens
cagaacagttagctg

SEQ ID NO: 28633 - DNA, 15 bp, Homo sapiens
tcagaacagttagct

SEQ ID NO: 28634 - DNA, 15 bp, Homo sapiens
ttcagaacagttagc

SEQ ID NO: 28635 - DNA, 15 bp, Homo sapiens
gttcagaacagttag

SEQ ID NO: 28636 - DNA, 15 bp, Homo sapiens
ggttcagaacagtta

SEQ ID NO: 28637 - DNA, 15 bp, Homo sapiens
aggttcagaacagtt

SEQ ID NO: 28638 - DNA, 15 bp, Homo sapiens
gaggttcagaacagt

SEQ ID NO: 28639 - DNA, 15 bp, Homo sapiens
tgaggttcagaacag

SEQ ID NO: 28640 - DNA, 15 bp, Homo sapiens
ctgaggttcagaaca

SEQ ID NO: 28641 - DNA, 15 bp, Homo sapiens
actgaggttcagaac

SEQ ID NO: 28642 - DNA, 15 bp, Homo sapiens
aactgaggttcagaa

SEQ ID NO: 28643 - DNA, 15 bp, Homo sapiens
aaactgaggttcaga

SEQ ID NO: 28644 - DNA, 15 bp, Homo sapiens
gaaactgaggttcag

SEQ ID NO: 28645 - DNA, 15 bp, Homo sapiens
agaaactgaggttca

SEQ ID NO: 28646 - DNA, 15 bp, Homo sapiens
gagaaactgaggttc

SEQ ID NO: 28647 - DNA, 15 bp, Homo sapiens
agagaaactgaggtt

SEQ ID NO: 28648 - DNA, 15 bp, Homo sapiens
cagagaaactgaggt

SEQ ID NO: 28649 - DNA, 15 bp, Homo sapiens
acagagaaactgagg

SEQ ID NO: 28650 - DNA, 15 bp, Homo sapiens
gacagagaaactgag

SEQ ID NO: 28651 - DNA, 15 bp, Homo sapiens
agacagagaaactga

SEQ ID NO: 28652 - DNA, 15 bp, Homo sapiens
cagacagagaaactg

SEQ ID NO: 28653 - DNA, 15 bp, Homo sapiens
acagacagagaaact

SEQ ID NO: 28654 - DNA, 15 bp, Homo sapiens
tacagacagagaaac

SEQ ID NO: 28655 - DNA, 15 bp, Homo sapiens
ttacagacagagaaa

SEQ ID NO: 28656 - DNA, 15 bp, Homo sapiens
tttacagacagagaa

SEQ ID NO: 28657 - DNA, 15 bp, Homo sapiens
atttacagacagaga

SEQ ID NO: 28658 - DNA, 15 bp, Homo sapiens
aatttacagacagag

SEQ ID NO: 28659 - DNA, 15 bp, Homo sapiens
taatttacagacaga

SEQ ID NO: 28660 - DNA, 15 bp, Homo sapiens
ttaatttacagacag

SEQ ID NO: 28661 - DNA, 15 bp, Homo sapiens
cttaatttacagaca

SEQ ID NO: 28662 - DNA, 15 bp, Homo sapiens
gcttaatttacagac

SEQ ID NO: 28663 - DNA, 15 bp, Homo sapiens
agcttaatttacaga

SEQ ID NO: 28664 - DNA, 15 bp, Homo sapiens
tagcttaatttacag

SEQ ID NO: 28665 - DNA, 15 bp, Homo sapiens
ttagcttaatttaca

SEQ ID NO: 28666 - DNA, 15 bp, Homo sapiens
tttagcttaatttac

SEQ ID NO: 28667 - DNA, 15 bp, Homo sapiens
ttttagcttaattta

SEQ ID NO: 28668 - DNA, 15 bp, Homo sapiens
tttttagcttaattt

SEQ ID NO: 28669 - DNA, 15 bp, Homo sapiens
atttttagcttaatt

SEQ ID NO: 28670 - DNA, 15 bp, Homo sapiens
aatttttagcttaat

SEQ ID NO: 28671 - DNA, 15 bp, Homo sapiens
gaatttttagcttaa

SEQ ID NO: 28672 - DNA, 15 bp, Homo sapiens
agaatttttagctta

SEQ ID NO: 28673 - DNA, 15 bp, Homo sapiens
aagaatttttagctt

SEQ ID NO: 28674 - DNA, 15 bp, Homo sapiens
gaagaatttttagct

SEQ ID NO: 28675 - DNA, 15 bp, Homo sapiens
agaagaatttttagc

SEQ ID NO: 28676 - DNA, 15 bp, Homo sapiens
aagaagaatttttag

SEQ ID NO: 28677 - DNA, 15 bp, Homo sapiens
aaagaagaattttta

SEQ ID NO: 28678 - DNA, 15 bp, Homo sapiens
gaaagaagaattttt

SEQ ID NO: 28679 - DNA, 15 bp, Homo sapiens
tgaaagaagaatttt

SEQ ID NO: 28680 - DNA, 15 bp, Homo sapiens
ttgaaagaagaattt

SEQ ID NO: 28681 - DNA, 15 bp, Homo sapiens
tttgaaagaagaatt

SEQ ID NO: 28682 - DNA, 15 bp, Homo sapiens
ctttgaaagaagaat

SEQ ID NO: 28683 - DNA, 15 bp, Homo sapiens
tctttgaaagaagaa

SEQ ID NO: 28684 - DNA, 15 bp, Homo sapiens
ctctttgaaagaaga

SEQ ID NO: 28685 - DNA, 15 bp, Homo sapiens
actctttgaaagaag

SEQ ID NO: 28686 - DNA, 15 bp, Homo sapiens
cactctttgaaagaa

SEQ ID NO: 28687 - DNA, 15 bp, Homo sapiens
acactctttgaaaga

SEQ ID NO: 28688 - DNA, 15 bp, Homo sapiens
gacactctttgaaag

SEQ ID NO: 28689 - DNA, 15 bp, Homo sapiens
tgacactctttgaaa

SEQ ID NO: 28690 - DNA, 15 bp, Homo sapiens
ctgacactctttgaa

SEQ ID NO: 28691 - DNA, 15 bp, Homo sapiens
cctgacactctttga

SEQ ID NO: 28692 - DNA, 15 bp, Homo sapiens
tcctgacactctttg

SEQ ID NO: 28693 - DNA, 15 bp, Homo sapiens
atcctgacactcttt

SEQ ID NO: 28694 - DNA, 15 bp, Homo sapiens
catcctgacactctt

SEQ ID NO: 28695 - DNA, 15 bp, Homo sapiens
tcatcctgacactct

SEQ ID NO: 28696 - DNA, 15 bp, Homo sapiens
ttcatcctgacactc

SEQ ID NO: 28697 - DNA, 15 bp, Homo sapiens
cttcatcctgacact

SEQ ID NO: 28698 - DNA, 15 bp, Homo sapiens
acttcatcctgacac

SEQ ID NO: 28699 - DNA, 15 bp, Homo sapiens
cacttcatcctgaca

SEQ ID NO: 28700 - DNA, 15 bp, Homo sapiens
tcacttcatcctgac

SEQ ID NO: 28701 - DNA, 15 bp, Homo sapiens
ctcacttcatcctga

SEQ ID NO: 28702 - DNA, 15 bp, Homo sapiens
tctcacttcatcctg

SEQ ID NO: 28703 - DNA, 15 bp, Homo sapiens
atctcacttcatcct

SEQ ID NO: 28704 - DNA, 15 bp, Homo sapiens
gatctcacttcatcc

SEQ ID NO: 28705 - DNA, 15 bp, Homo sapiens
cgatctcacttcatc

SEQ ID NO: 28706 - DNA, 15 bp, Homo sapiens
acgatctcacttcat

SEQ ID NO: 28707 - DNA, 15 bp, Homo sapiens
cacgatctcacttca

SEQ ID NO: 28708 - DNA, 15 bp, Homo sapiens
acacgatctcacttc

SEQ ID NO: 28709 - DNA, 15 bp, Homo sapiens
tacacgatctcactt

SEQ ID NO: 28710 - DNA, 15 bp, Homo sapiens
atacacgatctcact

SEQ ID NO: 28711 - DNA, 15 bp, Homo sapiens
catacacgatctcac

SEQ ID NO: 28712 - DNA, 15 bp, Homo sapiens
acatacacgatctca

SEQ ID NO: 28713 - DNA, 15 bp, Homo sapiens
tacatacacgatctc

SEQ ID NO: 28714 - DNA, 15 bp, Homo sapiens
ctacatacacgatct

SEQ ID NO: 28715 - DNA, 15 bp, Homo sapiens
cctacatacacgatc

SEQ ID NO: 28716 - DNA, 15 bp, Homo sapiens
ccctacatacacgat

SEQ ID NO: 28717 - DNA, 15 bp, Homo sapiens
gccctacatacacga

SEQ ID NO: 28718 - DNA, 15 bp, Homo sapiens
tgccctacatacacg

SEQ ID NO: 28719 - DNA, 15 bp, Homo sapiens
atgccctacatacac

SEQ ID NO: 28720 - DNA, 15 bp, Homo sapiens
aatgccctacataca

SEQ ID NO: 28721 - DNA, 15 bp, Homo sapiens
aaatgccctacatac

SEQ ID NO: 28722 - DNA, 15 bp, Homo sapiens
taaatgccctacata

SEQ ID NO: 28723 - DNA, 15 bp, Homo sapiens
ttaaatgccctacat

SEQ ID NO: 28724 - DNA, 15 bp, Homo sapiens
gttaaatgccctaca

SEQ ID NO: 28725 - DNA, 15 bp, Homo sapiens
tgttaaatgccctac

SEQ ID NO: 28726 - DNA, 15 bp, Homo sapiens
atgttaaatgcccta

SEQ ID NO: 28727 - DNA, 15 bp, Homo sapiens
tatgttaaatgccct

SEQ ID NO: 28728 - DNA, 15 bp, Homo sapiens
ctatgttaaatgccc

SEQ ID NO: 28729 - DNA, 15 bp, Homo sapiens
actatgttaaatgcc

SEQ ID NO: 28730 - DNA, 15 bp, Homo sapiens
cactatgttaaatgc

SEQ ID NO: 28731 - DNA, 15 bp, Homo sapiens
gcactatgttaaatg

SEQ ID NO: 28732 - DNA, 15 bp, Homo sapiens
ggcactatgttaaat

SEQ ID NO: 28733 - DNA, 15 bp, Homo sapiens
gggcactatgttaaa

SEQ ID NO: 28734 - DNA, 15 bp, Homo sapiens
cgggcactatgttaa

SEQ ID NO: 28735 - DNA, 15 bp, Homo sapiens
tcgggcactatgtta

SEQ ID NO: 28736 - DNA, 15 bp, Homo sapiens
gtcgggcactatgtt

SEQ ID NO: 28737 - DNA, 15 bp, Homo sapiens
tgtcgggcactatgt

SEQ ID NO: 28738 - DNA, 15 bp, Homo sapiens
gtgtcgggcactatg

SEQ ID NO: 28739 - DNA, 15 bp, Homo sapiens
tgtgtcgggcactat

SEQ ID NO: 28740 - DNA, 15 bp, Homo sapiens
gtgtgtcgggcacta

SEQ ID NO: 28741 - DNA, 15 bp, Homo sapiens
tgtgtgtcgggcact

SEQ ID NO: 28742 - DNA, 15 bp, Homo sapiens
ctgtgtgtcgggcac

SEQ ID NO: 28743 - DNA, 15 bp, Homo sapiens
cctgtgtgtcgggca

SEQ ID NO: 28744 - DNA, 15 bp, Homo sapiens
ccctgtgtgtcgggc

SEQ ID NO: 28745 - DNA, 15 bp, Homo sapiens
tccctgtgtgtcggg

SEQ ID NO: 28746 - DNA, 15 bp, Homo sapiens
ctccctgtgtgtcgg

SEQ ID NO: 28747 - DNA, 15 bp, Homo sapiens
gctccctgtgtgtcg

SEQ ID NO: 28748 - DNA, 15 bp, Homo sapiens
tgctccctgtgtgtc

SEQ ID NO: 28749 - DNA, 15 bp, Homo sapiens
atgctccctgtgtgt

SEQ ID NO: 28750 - DNA, 15 bp, Homo sapiens
aatgctccctgtgtg

SEQ ID NO: 28751 - DNA, 15 bp, Homo sapiens
gaatgctccctgtgt

SEQ ID NO: 28752 - DNA, 15 bp, Homo sapiens
cgaatgctccctgtg

SEQ ID NO: 28753 - DNA, 15 bp, Homo sapiens
ccgaatgctccctgt

SEQ ID NO: 28754 - DNA, 15 bp, Homo sapiens
accgaatgctccctg

SEQ ID NO: 28755 - DNA, 15 bp, Homo sapiens
taccgaatgctccct

SEQ ID NO: 28756 - DNA, 15 bp, Homo sapiens
ctaccgaatgctccc

SEQ ID NO: 28757 - DNA, 15 bp, Homo sapiens
cctaccgaatgctcc

SEQ ID NO: 28758 - DNA, 15 bp, Homo sapiens
acctaccgaatgctc

SEQ ID NO: 28759 - DNA, 15 bp, Homo sapiens
cacctaccgaatgct

SEQ ID NO: 28760 - DNA, 15 bp, Homo sapiens
gcacctaccgaatgc

SEQ ID NO: 28761 - DNA, 15 bp, Homo sapiens
ggcacctaccgaatg

SEQ ID NO: 28762 - DNA, 15 bp, Homo sapiens
tggcacctaccgaat

SEQ ID NO: 28763 - DNA, 15 bp, Homo sapiens
ctggcacctaccgaa

SEQ ID NO: 28764 - DNA, 15 bp, Homo sapiens
gctggcacctaccga

SEQ ID NO: 28765 - DNA, 15 bp, Homo sapiens
agctggcacctaccg

SEQ ID NO: 28766 - DNA, 15 bp, Homo sapiens
gagctggcacctacc

SEQ ID NO: 28767 - DNA, 15 bp, Homo sapiens
agagctggcacctac

SEQ ID NO: 28768 - DNA, 15 bp, Homo sapiens
gagagctggcaccta

SEQ ID NO: 28769 - DNA, 15 bp, Homo sapiens
ggagagctggcacct

SEQ ID NO: 28770 - DNA, 15 bp, Homo sapiens
aggagagctggcacc

SEQ ID NO: 28771 - DNA, 15 bp, Homo sapiens
gaggagagctggcac

SEQ ID NO: 28772 - DNA, 15 bp, Homo sapiens
ggaggagagctggca

SEQ ID NO: 28773 - DNA, 15 bp, Homo sapiens
aggaggagagctggc

SEQ ID NO: 28774 - DNA, 15 bp, Homo sapiens
caggaggagagctgg

SEQ ID NO: 28775 - DNA, 15 bp, Homo sapiens
ccaggaggagagctg

SEQ ID NO: 28776 - DNA, 15 bp, Homo sapiens
gccaggaggagagct

SEQ ID NO: 28777 - DNA, 15 bp, Homo sapiens
tgccaggaggagagc

SEQ ID NO: 28778 - DNA, 15 bp, Homo sapiens
ctgccaggaggagag

SEQ ID NO: 28779 - DNA, 15 bp, Homo sapiens
cctgccaggaggaga

SEQ ID NO: 28780 - DNA, 15 bp, Homo sapiens
tcctgccaggaggag

SEQ ID NO: 28781 - DNA, 15 bp, Homo sapiens
ctcctgccaggagga

SEQ ID NO: 28782 - DNA, 15 bp, Homo sapiens
tctcctgccaggagg

SEQ ID NO: 28783 - DNA, 15 bp, Homo sapiens
ctctcctgccaggag

SEQ ID NO: 28784 - DNA, 15 bp, Homo sapiens
tctctcctgccagga

SEQ ID NO: 28785 - DNA, 15 bp, Homo sapiens
ctctctcctgccagg

SEQ ID NO: 28786 - DNA, 15 bp, Homo sapiens
tctctctcctgccag

SEQ ID NO: 28787 - DNA, 15 bp, Homo sapiens
ctctctctcctgcca

SEQ ID NO: 28788 - DNA, 15 bp, Homo sapiens
tctctctctcctgcc

SEQ ID NO: 28789 - DNA, 15 bp, Homo sapiens
ttctctctctcctgc

SEQ ID NO: 28790 - DNA, 15 bp, Homo sapiens
tttctctctctcctg

SEQ ID NO: 28791 - DNA, 15 bp, Homo sapiens
gtttctctctctcct

SEQ ID NO: 28792 - DNA, 15 bp, Homo sapiens
tgtttctctctctcc

SEQ ID NO: 28793 - DNA, 15 bp, Homo sapiens
ttgtttctctctctc

SEQ ID NO: 28794 - DNA, 15 bp, Homo sapiens
cttgtttctctctct

SEQ ID NO: 28795 - DNA, 15 bp, Homo sapiens
ccttgtttctctctc

SEQ ID NO: 28796 - DNA, 15 bp, Homo sapiens
accttgtttctctct

SEQ ID NO: 28797 - DNA, 15 bp, Homo sapiens
caccttgtttctctc

SEQ ID NO: 28798 - DNA, 15 bp, Homo sapiens
tcaccttgtttctct

SEQ ID NO: 28799 - DNA, 15 bp, Homo sapiens
ttcaccttgtttctc

SEQ ID NO: 28800 - DNA, 15 bp, Homo sapiens
tttcaccttgtttct

SEQ ID NO: 28801 - DNA, 15 bp, Homo sapiens
ttttcaccttgtttc

SEQ ID NO: 28802 - DNA, 15 bp, Homo sapiens
cttttcaccttgttt

SEQ ID NO: 28803 - DNA, 15 bp, Homo sapiens
tcttttcaccttgtt

SEQ ID NO: 28804 - DNA, 15 bp, Homo sapiens
ctcttttcaccttgt

SEQ ID NO: 28805 - DNA, 15 bp, Homo sapiens
actcttttcaccttg

SEQ ID NO: 28806 - DNA, 15 bp, Homo sapiens
cactcttttcacctt

SEQ ID NO: 28807 - DNA, 15 bp, Homo sapiens
tcactcttttcacct

SEQ ID NO: 28808 - DNA, 15 bp, Homo sapiens
ttcactcttttcacc

SEQ ID NO: 28809 - DNA, 15 bp, Homo sapiens
attcactcttttcac

SEQ ID NO: 28810 - DNA, 15 bp, Homo sapiens
aattcactcttttca

SEQ ID NO: 28811 - DNA, 15 bp, Homo sapiens
taattcactcttttc

SEQ ID NO: 28812 - DNA, 15 bp, Homo sapiens
ttaattcactctttt

SEQ ID NO: 28813 - DNA, 15 bp, Homo sapiens
tttaattcactcttt

SEQ ID NO: 28814 - DNA, 15 bp, Homo sapiens
ctttaattcactctt

SEQ ID NO: 28815 - DNA, 15 bp, Homo sapiens
tctttaattcactct

SEQ ID NO: 28816 - DNA, 15 bp, Homo sapiens
ttctttaattcactc

SEQ ID NO: 28817 - DNA, 15 bp, Homo sapiens
cttctttaattcact

SEQ ID NO: 28818 - DNA, 15 bp, Homo sapiens
tcttctttaattcac

SEQ ID NO: 28819 - DNA, 15 bp, Homo sapiens
ctcttctttaattca

SEQ ID NO: 28820 - DNA, 15 bp, Homo sapiens
cctcttctttaattc

SEQ ID NO: 28821 - DNA, 15 bp, Homo sapiens
tcctcttctttaatt

SEQ ID NO: 28822 - DNA, 15 bp, Homo sapiens
ttcctcttctttaat

SEQ ID NO: 28823 - DNA, 15 bp, Homo sapiens
tttcctcttctttaa

SEQ ID NO: 28824 - DNA, 15 bp, Homo sapiens
ctttcctcttcttta

SEQ ID NO: 28825 - DNA, 15 bp, Homo sapiens
actttcctcttcttt

SEQ ID NO: 28826 - DNA, 15 bp, Homo sapiens
gactttcctcttctt

SEQ ID NO: 28827 - DNA, 15 bp, Homo sapiens
tgactttcctcttct

SEQ ID NO: 28828 - DNA, 15 bp, Homo sapiens
ttgactttcctcttc

SEQ ID NO: 28829 - DNA, 15 bp, Homo sapiens
tttgactttcctctt

SEQ ID NO: 28830 - DNA, 15 bp, Homo sapiens
atttgactttcctct

SEQ ID NO: 28831 - DNA, 15 bp, Homo sapiens
catttgactttcctc

SEQ ID NO: 28832 - DNA, 15 bp, Homo sapiens
ccatttgactttcct

SEQ ID NO: 28833 - DNA, 15 bp, Homo sapiens
cccatttgactttcc

SEQ ID NO: 28834 - DNA, 15 bp, Homo sapiens
tcccatttgactttc

SEQ ID NO: 28835 - DNA, 15 bp, Homo sapiens
ttcccatttgacttt

SEQ ID NO: 28836 - DNA, 15 bp, Homo sapiens
tttcccatttgactt

SEQ ID NO: 28837 - DNA, 15 bp, Homo sapiens
ttttcccatttgact

SEQ ID NO: 28838 - DNA, 15 bp, Homo sapiens
gttttcccatttgac

SEQ ID NO: 28839 - DNA, 15 bp, Homo sapiens
tgttttcccatttga

SEQ ID NO: 28840 - DNA, 15 bp, Homo sapiens
ctgttttcccatttg

SEQ ID NO: 28841 - DNA, 15 bp, Homo sapiens
cctgttttcccattt

SEQ ID NO: 28842 - DNA, 15 bp, Homo sapiens
ccctgttttcccatt

SEQ ID NO: 28843 - DNA, 15 bp, Homo sapiens
cccctgttttcccat

SEQ ID NO: 28844 - DNA, 15 bp, Homo sapiens
ccccctgttttccca

SEQ ID NO: 28845 - DNA, 15 bp, Homo sapiens
tccccctgttttccc

SEQ ID NO: 28846 - DNA, 15 bp, Homo sapiens
ctccccctgttttcc

SEQ ID NO: 28847 - DNA, 15 bp, Homo sapiens
cctccccctgttttc

SEQ ID NO: 28848 - DNA, 15 bp, Homo sapiens
tcctccccctgtttt

SEQ ID NO: 28849 - DNA, 15 bp, Homo sapiens
ctcctccccctgttt

SEQ ID NO: 28850 - DNA, 15 bp, Homo sapiens
tctcctccccctgtt

SEQ ID NO: 28851 - DNA, 15 bp, Homo sapiens
atctcctccccctgt

SEQ ID NO: 28852 - DNA, 15 bp, Homo sapiens
tatctcctccccctg

SEQ ID NO: 28853 - DNA, 15 bp, Homo sapiens
ctatctcctccccct

SEQ ID NO: 28854 - DNA, 15 bp, Homo sapiens
tctatctcctccccc

SEQ ID NO: 28855 - DNA, 15 bp, Homo sapiens
ttctatctcctcccc

SEQ ID NO: 28856 - DNA, 15 bp, Homo sapiens
tttctatctcctccc

SEQ ID NO: 28857 - DNA, 15 bp, Homo sapiens
ctttctatctcctcc

SEQ ID NO: 28858 - DNA, 15 bp, Homo sapiens
actttctatctcctc

SEQ ID NO: 28859 - DNA, 15 bp, Homo sapiens
cactttctatctcct

SEQ ID NO: 28860 - DNA, 15 bp, Homo sapiens
acactttctatctcc

SEQ ID NO: 28861 - DNA, 15 bp, Homo sapiens
tacactttctatctc

SEQ ID NO: 28862 - DNA, 15 bp, Homo sapiens
atacactttctatct

SEQ ID NO: 28863 - DNA, 15 bp, Homo sapiens
catacactttctatc

SEQ ID NO: 28864 - DNA, 15 bp, Homo sapiens
tcatacactttctat

SEQ ID NO: 28865 - DNA, 15 bp, Homo sapiens
ttcatacactttcta

SEQ ID NO: 28866 - DNA, 15 bp, Homo sapiens
tttcatacactttct

SEQ ID NO: 28867 - DNA, 15 bp, Homo sapiens
ttttcatacactttc

SEQ ID NO: 28868 - DNA, 15 bp, Homo sapiens
cttttcatacacttt

SEQ ID NO: 28869 - DNA, 15 bp, Homo sapiens
ccttttcatacactt

SEQ ID NO: 28870 - DNA, 15 bp, Homo sapiens
tccttttcatacact

SEQ ID NO: 28871 - DNA, 15 bp, Homo sapiens
ttccttttcatacac

SEQ ID NO: 28872 - DNA, 15 bp, Homo sapiens
tttccttttcataca

SEQ ID NO: 28873 - DNA, 15 bp, Homo sapiens
ctttccttttcatac

SEQ ID NO: 28874 - DNA, 15 bp, Homo sapiens
tctttccttttcata

SEQ ID NO: 28875 - DNA, 15 bp, Homo sapiens
ttctttccttttcat

SEQ ID NO: 28876 - DNA, 15 bp, Homo sapiens
attctttccttttca

SEQ ID NO: 28877 - DNA, 15 bp, Homo sapiens
cattctttccttttc

SEQ ID NO: 28878 - DNA, 15 bp, Homo sapiens
ccattctttcctttt

SEQ ID NO: 28879 - DNA, 15 bp, Homo sapiens
accattctttccttt

SEQ ID NO: 28880 - DNA, 15 bp, Homo sapiens
caccattctttcctt

SEQ ID NO: 28881 - DNA, 15 bp, Homo sapiens
gcaccattctttcct

SEQ ID NO: 28882 - DNA, 15 bp, Homo sapiens
cgcaccattctttcc

SEQ ID NO: 28883 - DNA, 15 bp, Homo sapiens
gcgcaccattctttc

SEQ ID NO: 28884 - DNA, 15 bp, Homo sapiens
tgcgcaccattcttt

SEQ ID NO: 28885 - DNA, 15 bp, Homo sapiens
ttgcgcaccattctt

SEQ ID NO: 28886 - DNA, 15 bp, Homo sapiens
attgcgcaccattct

SEQ ID NO: 28887 - DNA, 15 bp, Homo sapiens
tattgcgcaccattc

SEQ ID NO: 28888 - DNA, 15 bp, Homo sapiens
ttattgcgcaccatt

SEQ ID NO: 28889 - DNA, 15 bp, Homo sapiens
gttattgcgcaccat

SEQ ID NO: 28890 - DNA, 15 bp, Homo sapiens
cgttattgcgcacca

SEQ ID NO: 28891 - DNA, 15 bp, Homo sapiens
ccgttattgcgcacc

SEQ ID NO: 28892 - DNA, 15 bp, Homo sapiens
gccgttattgcgcac

SEQ ID NO: 28893 - DNA, 15 bp, Homo sapiens
cgccgttattgcgca

SEQ ID NO: 28894 - DNA, 15 bp, Homo sapiens
ccgccgttattgcgc

SEQ ID NO: 28895 - DNA, 15 bp, Homo sapiens
accgccgttattgcg

SEQ ID NO: 28896 - DNA, 15 bp, Homo sapiens
caccgccgttattgc

SEQ ID NO: 28897 - DNA, 15 bp, Homo sapiens
acaccgccgttattg

SEQ ID NO: 28898 - DNA, 15 bp, Homo sapiens
tacaccgccgttatt

SEQ ID NO: 28899 - DNA, 15 bp, Homo sapiens
ttacaccgccgttat

SEQ ID NO: 28900 - DNA, 15 bp, Homo sapiens
attacaccgccgtta

SEQ ID NO: 28901 - DNA, 15 bp, Homo sapiens
cattacaccgccgtt

SEQ ID NO: 28902 - DNA, 15 bp, Homo sapiens
gcattacaccgccgt

SEQ ID NO: 28903 - DNA, 15 bp, Homo sapiens
ggcattacaccgccg

SEQ ID NO: 28904 - DNA, 15 bp, Homo sapiens
tggcattacaccgcc

SEQ ID NO: 28905 - DNA, 15 bp, Homo sapiens
gtggcattacaccgc

SEQ ID NO: 28906 - DNA, 15 bp, Homo sapiens
ggtggcattacaccg

SEQ ID NO: 28907 - DNA, 15 bp, Homo sapiens
tggtggcattacacc

SEQ ID NO: 28908 - DNA, 15 bp, Homo sapiens
ttggtggcattacac

SEQ ID NO: 28909 - DNA, 15 bp, Homo sapiens
tttggtggcattaca

SEQ ID NO: 28910 - DNA, 15 bp, Homo sapiens
ttttggtggcattac

SEQ ID NO: 28911 - DNA, 15 bp, Homo sapiens
attttggtggcatta

SEQ ID NO: 28912 - DNA, 15 bp, Homo sapiens
gattttggtggcatt

SEQ ID NO: 28913 - DNA, 15 bp, Homo sapiens
ggattttggtggcat

SEQ ID NO: 28914 - DNA, 15 bp, Homo sapiens
gggattttggtggca

SEQ ID NO: 28915 - DNA, 15 bp, Homo sapiens
ggggattttggtggc

SEQ ID NO: 28916 - DNA, 15 bp, Homo sapiens
aggggattttggtgg

SEQ ID NO: 28917 - DNA, 15 bp, Homo sapiens
gaggggattttggtg

SEQ ID NO: 28918 - DNA, 15 bp, Homo sapiens
tgaggggattttggt

SEQ ID NO: 28919 - DNA, 15 bp, Homo sapiens
ttgaggggattttgg

SEQ ID NO: 28920 - DNA, 15 bp, Homo sapiens
gttgaggggattttg

SEQ ID NO: 28921 - DNA, 15 bp, Homo sapiens
agttgaggggatttt

SEQ ID NO: 28922 - DNA, 15 bp, Homo sapiens
tagttgaggggattt

SEQ ID NO: 28923 - DNA, 15 bp, Homo sapiens
gtagttgaggggatt

SEQ ID NO: 28924 - DNA, 15 bp, Homo sapiens
agtagttgaggggat

SEQ ID NO: 28925 - DNA, 15 bp, Homo sapiens
aagtagttgagggga

SEQ ID NO: 28926 - DNA, 15 bp, Homo sapiens
gaagtagttgagggg

SEQ ID NO: 28927 - DNA, 15 bp, Homo sapiens
agaagtagttgaggg

SEQ ID NO: 28928 - DNA, 15 bp, Homo sapiens
cagaagtagttgagg

SEQ ID NO: 28929 - DNA, 15 bp, Homo sapiens
ccagaagtagttgag

SEQ ID NO: 28930 - DNA, 15 bp, Homo sapiens
cccagaagtagttga

SEQ ID NO: 28931 - DNA, 15 bp, Homo sapiens
gcccagaagtagttg

SEQ ID NO: 28932 - DNA, 15 bp, Homo sapiens
tgcccagaagtagtt

SEQ ID NO: 28933 - DNA, 15 bp, Homo sapiens
ctgcccagaagtagt

SEQ ID NO: 28934 - DNA, 15 bp, Homo sapiens
gctgcccagaagtag

SEQ ID NO: 28935 - DNA, 15 bp, Homo sapiens
tgctgcccagaagta

SEQ ID NO: 28936 - DNA, 15 bp, Homo sapiens
gtgctgcccagaagt

SEQ ID NO: 28937 - DNA, 15 bp, Homo sapiens
ggtgctgcccagaag

SEQ ID NO: 28938 - DNA, 15 bp, Homo sapiens
gggtgctgcccagaa

SEQ ID NO: 28939 - DNA, 15 bp, Homo sapiens
agggtgctgcccaga

SEQ ID NO: 28940 - DNA, 15 bp, Homo sapiens
aagggtgctgcccag

SEQ ID NO: 28941 - DNA, 15 bp, Homo sapiens
caagggtgctgccca

SEQ ID NO: 28942 - DNA, 15 bp, Homo sapiens
tcaagggtgctgccc

SEQ ID NO: 28943 - DNA, 15 bp, Homo sapiens
gtcaagggtgctgcc

SEQ ID NO: 28944 - DNA, 15 bp, Homo sapiens
tgtcaagggtgctgc

SEQ ID NO: 28945 - DNA, 15 bp, Homo sapiens
ctgtcaagggtgctg

SEQ ID NO: 28946 - DNA, 15 bp, Homo sapiens
tctgtcaagggtgct

SEQ ID NO: 28947 - DNA, 15 bp, Homo sapiens
ctctgtcaagggtgc

SEQ ID NO: 28948 - DNA, 15 bp, Homo sapiens
actctgtcaagggtg

SEQ ID NO: 28949 - DNA, 15 bp, Homo sapiens
cactctgtcaagggt

SEQ ID NO: 28950 - DNA, 15 bp, Homo sapiens
tcactctgtcaaggg

SEQ ID NO: 28951 - DNA, 15 bp, Homo sapiens
ttcactctgtcaagg

SEQ ID NO: 28952 - DNA, 15 bp, Homo sapiens
attcactctgtcaag

SEQ ID NO: 28953 - DNA, 15 bp, Homo sapiens
cattcactctgtcaa

SEQ ID NO: 28954 - DNA, 15 bp, Homo sapiens
gcattcactctgtca

SEQ ID NO: 28955 - DNA, 15 bp, Homo sapiens
agcattcactctgtc

SEQ ID NO: 28956 - DNA, 15 bp, Homo sapiens
aagcattcactctgt

SEQ ID NO: 28957 - DNA, 15 bp, Homo sapiens
aaagcattcactctg

SEQ ID NO: 28958 - DNA, 15 bp, Homo sapiens
aaaagcattcactct

SEQ ID NO: 28959 - DNA, 15 bp, Homo sapiens
taaaagcattcactc

SEQ ID NO: 28960 - DNA, 15 bp, Homo sapiens
ataaaagcattcact

SEQ ID NO: 28961 - DNA, 15 bp, Homo sapiens
cataaaagcattcac

SEQ ID NO: 28962 - DNA, 15 bp, Homo sapiens
tcataaaagcattca

SEQ ID NO: 28963 - DNA, 15 bp, Homo sapiens
ctcataaaagcattc

SEQ ID NO: 28964 - DNA, 15 bp, Homo sapiens
tctcataaaagcatt

SEQ ID NO: 28965 - DNA, 15 bp, Homo sapiens
ttctcataaaagcat

SEQ ID NO: 28966 - DNA, 15 bp, Homo sapiens
attctcataaaagca

SEQ ID NO: 28967 - DNA, 15 bp, Homo sapiens
cattctcataaaagc

SEQ ID NO: 28968 - DNA, 15 bp, Homo sapiens
acattctcataaaag

SEQ ID NO: 28969 - DNA, 15 bp, Homo sapiens
tacattctcataaaa

SEQ ID NO: 28970 - DNA, 15 bp, Homo sapiens
ttacattctcataaa

SEQ ID NO: 28971 - DNA, 15 bp, Homo sapiens
cttacattctcataa

SEQ ID NO: 28972 - DNA, 15 bp, Homo sapiens
gcttacattctcata

SEQ ID NO: 28973 - DNA, 15 bp, Homo sapiens
cgcttacattctcat

SEQ ID NO: 28974 - DNA, 15 bp, Homo sapiens
ccgcttacattctca

SEQ ID NO: 28975 - DNA, 15 bp, Homo sapiens
tccgcttacattctc

SEQ ID NO: 28976 - DNA, 15 bp, Homo sapiens
ttccgcttacattct

SEQ ID NO: 28977 - DNA, 15 bp, Homo sapiens
attccgcttacattc

SEQ ID NO: 28978 - DNA, 15 bp, Homo sapiens
cattccgcttacatt

SEQ ID NO: 28979 - DNA, 15 bp, Homo sapiens
acattccgcttacat

SEQ ID NO: 28980 - DNA, 15 bp, Homo sapiens
cacattccgcttaca

SEQ ID NO: 28981 - DNA, 15 bp, Homo sapiens
acacattccgcttac

SEQ ID NO: 28982 - DNA, 15 bp, Homo sapiens
aacacattccgctta

SEQ ID NO: 28983 - DNA, 15 bp, Homo sapiens
gaacacattccgctt

SEQ ID NO: 28984 - DNA, 15 bp, Homo sapiens
ggaacacattccgct

SEQ ID NO: 28985 - DNA, 15 bp, Homo sapiens
gggaacacattccgc

SEQ ID NO: 28986 - DNA, 15 bp, Homo sapiens
tgggaacacattccg

SEQ ID NO: 28987 - DNA, 15 bp, Homo sapiens
ctgggaacacattcc

SEQ ID NO: 28988 - DNA, 15 bp, Homo sapiens
tctgggaacacattc

SEQ ID NO: 28989 - DNA, 15 bp, Homo sapiens
atctgggaacacatt

SEQ ID NO: 28990 - DNA, 15 bp, Homo sapiens
aatctgggaacacat

SEQ ID NO: 28991 - DNA, 15 bp, Homo sapiens
aaatctgggaacaca

SEQ ID NO: 28992 - DNA, 15 bp, Homo sapiens
caaatctgggaacac

SEQ ID NO: 28993 - DNA, 15 bp, Homo sapiens
gcaaatctgggaaca

SEQ ID NO: 28994 - DNA, 15 bp, Homo sapiens
tgcaaatctgggaac

SEQ ID NO: 28995 - DNA, 15 bp, Homo sapiens
ctgcaaatctgggaa

SEQ ID NO: 28996 - DNA, 15 bp, Homo sapiens
actgcaaatctggga

SEQ ID NO: 28997 - DNA, 15 bp, Homo sapiens
tactgcaaatctggg

SEQ ID NO: 28998 - DNA, 15 bp, Homo sapiens
ttactgcaaatctgg

SEQ ID NO: 28999 - DNA, 15 bp, Homo sapiens
attactgcaaatctg

SEQ ID NO: 29000 - DNA, 15 bp, Homo sapiens
tattactgcaaatct

SEQ ID NO: 29001 - DNA, 15 bp, Homo sapiens
atattactgcaaatc

SEQ ID NO: 29002 - DNA, 15 bp, Homo sapiens
aatattactgcaaat

SEQ ID NO: 29003 - DNA, 15 bp, Homo sapiens
caatattactgcaaa

SEQ ID NO: 29004 - DNA, 15 bp, Homo sapiens
gcaatattactgcaa

SEQ ID NO: 29005 - DNA, 15 bp, Homo sapiens
ggcaatattactgca

SEQ ID NO: 29006 - DNA, 15 bp, Homo sapiens
tggcaatattactgc

SEQ ID NO: 29007 - DNA, 15 bp, Homo sapiens
gtggcaatattactg

SEQ ID NO: 29008 - DNA, 15 bp, Homo sapiens
ggtggcaatattact

SEQ ID NO: 29009 - DNA, 15 bp, Homo sapiens
aggtggcaatattac

SEQ ID NO: 29010 - DNA, 15 bp, Homo sapiens
caggtggcaatatta

SEQ ID NO: 29011 - DNA, 15 bp, Homo sapiens
ccaggtggcaatatt

SEQ ID NO: 29012 - DNA, 15 bp, Homo sapiens
accaggtggcaatat

SEQ ID NO: 29013 - DNA, 15 bp, Homo sapiens
caccaggtggcaata

SEQ ID NO: 29014 - DNA, 15 bp, Homo sapiens
ccaccaggtggcaat

SEQ ID NO: 29015 - DNA, 15 bp, Homo sapiens
tccaccaggtggcaa

SEQ ID NO: 29016 - DNA, 15 bp, Homo sapiens
gtccaccaggtggca

SEQ ID NO: 29017 - DNA, 15 bp, Homo sapiens
tgtccaccaggtggc

SEQ ID NO: 29018 - DNA, 15 bp, Homo sapiens
ttgtccaccaggtgg

SEQ ID NO: 29019 - DNA, 15 bp, Homo sapiens
tttgtccaccaggtg

SEQ ID NO: 29020 - DNA, 15 bp, Homo sapiens
gtttgtccaccaggt

SEQ ID NO: 29021 - DNA, 15 bp, Homo sapiens
ggtttgtccaccagg

SEQ ID NO: 29022 - DNA, 15 bp, Homo sapiens
gggtttgtccaccag

SEQ ID NO: 29023 - DNA, 15 bp, Homo sapiens
tgggtttgtccacca

SEQ ID NO: 29024 - DNA, 15 bp, Homo sapiens
atgggtttgtccacc

SEQ ID NO: 29025 - DNA, 15 bp, Homo sapiens
catgggtttgtccac

SEQ ID NO: 29026 - DNA, 15 bp, Homo sapiens
gcatgggtttgtcca

SEQ ID NO: 29027 - DNA, 15 bp, Homo sapiens
tgcatgggtttgtcc

SEQ ID NO: 29028 - DNA, 15 bp, Homo sapiens
gtgcatgggtttgtc

SEQ ID NO: 29029 - DNA, 15 bp, Homo sapiens
ggtgcatgggtttgt

SEQ ID NO: 29030 - DNA, 15 bp, Homo sapiens
aggtgcatgggtttg

SEQ ID NO: 29031 - DNA, 15 bp, Homo sapiens
aaggtgcatgggttt

SEQ ID NO: 29032 - DNA, 15 bp, Homo sapiens
aaaggtgcatgggtt

SEQ ID NO: 29033 - DNA, 15 bp, Homo sapiens
caaaggtgcatgggt

SEQ ID NO: 29034 - DNA, 15 bp, Homo sapiens
tcaaaggtgcatggg

SEQ ID NO: 29035 - DNA, 15 bp, Homo sapiens
ttcaaaggtgcatgg

SEQ ID NO: 29036 - DNA, 15 bp, Homo sapiens
attcaaaggtgcatg

SEQ ID NO: 29037 - DNA, 15 bp, Homo sapiens
aattcaaaggtgcat

SEQ ID NO: 29038 - DNA, 15 bp, Homo sapiens
aaattcaaaggtgca

SEQ ID NO: 29039 - DNA, 15 bp, Homo sapiens
aaaattcaaaggtgc

SEQ ID NO: 29040 - DNA, 15 bp, Homo sapiens
gaaaattcaaaggtg

SEQ ID NO: 29041 - DNA, 15 bp, Homo sapiens
ggaaaattcaaaggt

SEQ ID NO: 29042 - DNA, 15 bp, Homo sapiens
tggaaaattcaaagg

SEQ ID NO: 29043 - DNA, 15 bp, Homo sapiens
ttggaaaattcaaag

SEQ ID NO: 29044 - DNA, 15 bp, Homo sapiens
tttggaaaattcaaa

SEQ ID NO: 29045 - DNA, 15 bp, Homo sapiens
ttttggaaaattcaa

SEQ ID NO: 29046 - DNA, 15 bp, Homo sapiens
attttggaaaattca

SEQ ID NO: 29047 - DNA, 15 bp, Homo sapiens
tattttggaaaattc

SEQ ID NO: 29048 - DNA, 15 bp, Homo sapiens
atattttggaaaatt

SEQ ID NO: 29049 - DNA, 15 bp, Homo sapiens
aatattttggaaaat

SEQ ID NO: 29050 - DNA, 15 bp, Homo sapiens
aaatattttggaaaa

SEQ ID NO: 29051 - DNA, 15 bp, Homo sapiens
gaaatattttggaaa

SEQ ID NO: 29052 - DNA, 15 bp, Homo sapiens
cgaaatattttggaa

SEQ ID NO: 29053 - DNA, 15 bp, Homo sapiens
tcgaaatattttgga

SEQ ID NO: 29054 - DNA, 15 bp, Homo sapiens
atcgaaatattttgg

SEQ ID NO: 29055 - DNA, 15 bp, Homo sapiens
catcgaaatattttg

SEQ ID NO: 29056 - DNA, 15 bp, Homo sapiens
tcatcgaaatatttt

SEQ ID NO: 29057 - DNA, 15 bp, Homo sapiens
ttcatcgaaatattt

SEQ ID NO: 29058 - DNA, 15 bp, Homo sapiens
gttcatcgaaatatt

SEQ ID NO: 29059 - DNA, 15 bp, Homo sapiens
agttcatcgaaatat

SEQ ID NO: 29060 - DNA, 15 bp, Homo sapiens
tagttcatcgaaata

SEQ ID NO: 29061 - DNA, 15 bp, Homo sapiens
ctagttcatcgaaat

SEQ ID NO: 29062 - DNA, 15 bp, Homo sapiens
gctagttcatcgaaa

SEQ ID NO: 29063 - DNA, 15 bp, Homo sapiens
agctagttcatcgaa

SEQ ID NO: 29064 - DNA, 15 bp, Homo sapiens
aagctagttcatcga

SEQ ID NO: 29065 - DNA, 15 bp, Homo sapiens
gaagctagttcatcg

SEQ ID NO: 29066 - DNA, 15 bp, Homo sapiens
ggaagctagttcatc

SEQ ID NO: 29067 - DNA, 15 bp, Homo sapiens
tggaagctagttcat

SEQ ID NO: 29068 - DNA, 15 bp, Homo sapiens
ctggaagctagttca

SEQ ID NO: 29069 - DNA, 15 bp, Homo sapiens
actggaagctagttc

SEQ ID NO: 29070 - DNA, 15 bp, Homo sapiens
gactggaagctagtt

SEQ ID NO: 29071 - DNA, 15 bp, Homo sapiens
ggactggaagctagt

SEQ ID NO: 29072 - DNA, 15 bp, Homo sapiens
aggactggaagctag

SEQ ID NO: 29073 - DNA, 15 bp, Homo sapiens
taggactggaagcta

SEQ ID NO: 29074 - DNA, 15 bp, Homo sapiens
ctaggactggaagct

SEQ ID NO: 29075 - DNA, 15 bp, Homo sapiens
tctaggactggaagc

SEQ ID NO: 29076 - DNA, 15 bp, Homo sapiens
atctaggactggaag

SEQ ID NO: 29077 - DNA, 15 bp, Homo sapiens
catctaggactggaa

SEQ ID NO: 29078 - DNA, 15 bp, Homo sapiens
acatctaggactgga

SEQ ID NO: 29079 - DNA, 15 bp, Homo sapiens
tacatctaggactgg

SEQ ID NO: 29080 - DNA, 15 bp, Homo sapiens
atacatctaggactg

SEQ ID NO: 29081 - DNA, 15 bp, Homo sapiens
aatacatctaggact

SEQ ID NO: 29082 - DNA, 15 bp, Homo sapiens
aaatacatctaggac

SEQ ID NO: 29083 - DNA, 15 bp, Homo sapiens
aaaatacatctagga

SEQ ID NO: 29084 - DNA, 15 bp, Homo sapiens
caaaatacatctagg

SEQ ID NO: 29085 - DNA, 15 bp, Homo sapiens
tcaaaatacatctag

SEQ ID NO: 29086 - DNA, 15 bp, Homo sapiens
ttcaaaatacatcta

SEQ ID NO: 29087 - DNA, 15 bp, Homo sapiens
tttcaaaatacatct

SEQ ID NO: 29088 - DNA, 15 bp, Homo sapiens
ctttcaaaatacatc

SEQ ID NO: 29089 - DNA, 15 bp, Homo sapiens
actttcaaaatacat

SEQ ID NO: 29090 - DNA, 15 bp, Homo sapiens
cactttcaaaataca

SEQ ID NO: 29091 - DNA, 15 bp, Homo sapiens
tcactttcaaaatac

SEQ ID NO: 29092 - DNA, 15 bp, Homo sapiens
atcactttcaaaata

SEQ ID NO: 29093 - DNA, 15 bp, Homo sapiens
aatcactttcaaaat

SEQ ID NO: 29094 - DNA, 15 bp, Homo sapiens
aaatcactttcaaaa

SEQ ID NO: 29095 - DNA, 15 bp, Homo sapiens
caaatcactttcaaa

SEQ ID NO: 29096 - DNA, 15 bp, Homo sapiens
acaaatcactttcaa

SEQ ID NO: 29097 - DNA, 15 bp, Homo sapiens
tacaaatcactttca

SEQ ID NO: 29098 - DNA, 15 bp, Homo sapiens
ttacaaatcactttc

SEQ ID NO: 29099 - DNA, 15 bp, Homo sapiens
tttacaaatcacttt

SEQ ID NO: 29100 - DNA, 15 bp, Homo sapiens
atttacaaatcactt

SEQ ID NO: 29101 - DNA, 15 bp, Homo sapiens
aatttacaaatcact

SEQ ID NO: 29102 - DNA, 15 bp, Homo sapiens
caatttacaaatcac

SEQ ID NO: 29103 - DNA, 15 bp, Homo sapiens
acaatttacaaatca

SEQ ID NO: 29104 - DNA, 15 bp, Homo sapiens
tacaatttacaaatc

SEQ ID NO: 29105 - DNA, 15 bp, Homo sapiens
ttacaatttacaaat

SEQ ID NO: 29106 - DNA, 15 bp, Homo sapiens
cttacaatttacaaa

SEQ ID NO: 29107 - DNA, 15 bp, Homo sapiens
ccttacaatttacaa

SEQ ID NO: 29108 - DNA, 15 bp, Homo sapiens
tccttacaatttaca

SEQ ID NO: 29109 - DNA, 15 bp, Homo sapiens
ttccttacaatttac

SEQ ID NO: 29110 - DNA, 15 bp, Homo sapiens
gttccttacaattta

SEQ ID NO: 29111 - DNA, 15 bp, Homo sapiens
agttccttacaattt

SEQ ID NO: 29112 - DNA, 15 bp, Homo sapiens
tagttccttacaatt

SEQ ID NO: 29113 - DNA, 15 bp, Homo sapiens
atagttccttacaat

SEQ ID NO: 29114 - DNA, 15 bp, Homo sapiens
aatagttccttacaa

SEQ ID NO: 29115 - DNA, 15 bp, Homo sapiens
gaatagttccttaca

SEQ ID NO: 29116 - DNA, 15 bp, Homo sapiens
tgaatagttccttac

SEQ ID NO: 29117 - DNA, 15 bp, Homo sapiens
ttgaatagttcctta

SEQ ID NO: 29118 - DNA, 15 bp, Homo sapiens
tttgaatagttcctt

SEQ ID NO: 29119 - DNA, 15 bp, Homo sapiens
atttgaatagttcct

SEQ ID NO: 29120 - DNA, 15 bp, Homo sapiens
aatttgaatagttcc

SEQ ID NO: 29121 - DNA, 15 bp, Homo sapiens
gaatttgaatagttc

SEQ ID NO: 29122 - DNA, 15 bp, Homo sapiens
agaatttgaatagtt

SEQ ID NO: 29123 - DNA, 15 bp, Homo sapiens
aagaatttgaatagt

SEQ ID NO: 29124 - DNA, 15 bp, Homo sapiens
aaagaatttgaatag

SEQ ID NO: 29125 - DNA, 15 bp, Homo sapiens
gaaagaatttgaata

SEQ ID NO: 29126 - DNA, 15 bp, Homo sapiens
tgaaagaatttgaat

SEQ ID NO: 29127 - DNA, 15 bp, Homo sapiens
atgaaagaatttgaa

SEQ ID NO: 29128 - DNA, 15 bp, Homo sapiens
aatgaaagaatttga

SEQ ID NO: 29129 - DNA, 15 bp, Homo sapiens
taatgaaagaatttg

SEQ ID NO: 29130 - DNA, 15 bp, Homo sapiens
ttaatgaaagaattt

SEQ ID NO: 29131 - DNA, 15 bp, Homo sapiens
attaatgaaagaatt

SEQ ID NO: 29132 - DNA, 15 bp, Homo sapiens
cattaatgaaagaat

SEQ ID NO: 29133 - DNA, 15 bp, Homo sapiens
acattaatgaaagaa

SEQ ID NO: 29134 - DNA, 15 bp, Homo sapiens
gacattaatgaaaga

SEQ ID NO: 29135 - DNA, 15 bp, Homo sapiens
tgacattaatgaaag

SEQ ID NO: 29136 - DNA, 15 bp, Homo sapiens
gtgacattaatgaaa

SEQ ID NO: 29137 - DNA, 15 bp, Homo sapiens
tgtgacattaatgaa

SEQ ID NO: 29138 - DNA, 15 bp, Homo sapiens
ttgtgacattaatga

SEQ ID NO: 29139 - DNA, 15 bp, Homo sapiens
tttgtgacattaatg

SEQ ID NO: 29140 - DNA, 15 bp, Homo sapiens
atttgtgacattaat

SEQ ID NO: 29141 - DNA, 15 bp, Homo sapiens
gatttgtgacattaa

SEQ ID NO: 29142 - DNA, 15 bp, Homo sapiens
tgatttgtgacatta

SEQ ID NO: 29143 - DNA, 15 bp, Homo sapiens
ttgatttgtgacatt

SEQ ID NO: 29144 - DNA, 15 bp, Homo sapiens
gttgatttgtgacat

SEQ ID NO: 29145 - DNA, 15 bp, Homo sapiens
agttgatttgtgaca

SEQ ID NO: 29146 - DNA, 15 bp, Homo sapiens
cagttgatttgtgac

SEQ ID NO: 29147 - DNA, 15 bp, Homo sapiens
acagttgatttgtga

SEQ ID NO: 29148 - DNA, 15 bp, Homo sapiens
cacagttgatttgtg

SEQ ID NO: 29149 - DNA, 15 bp, Homo sapiens
acacagttgatttgt

SEQ ID NO: 29150 - DNA, 15 bp, Homo sapiens
gacacagttgatttg

SEQ ID NO: 29151 - DNA, 15 bp, Homo sapiens
tgacacagttgattt

SEQ ID NO: 29152 - DNA, 15 bp, Homo sapiens
atgacacagttgatt

SEQ ID NO: 29153 - DNA, 15 bp, Homo sapiens
gatgacacagttgat

SEQ ID NO: 29154 - DNA, 15 bp, Homo sapiens
agatgacacagttga

SEQ ID NO: 29155 - DNA, 15 bp, Homo sapiens
cagatgacacagttg

SEQ ID NO: 29156 - DNA, 15 bp, Homo sapiens
acagatgacacagtt

SEQ ID NO: 29157 - DNA, 15 bp, Homo sapiens
tacagatgacacagt

SEQ ID NO: 29158 - DNA, 15 bp, Homo sapiens
atacagatgacacag

SEQ ID NO: 29159 - DNA, 15 bp, Homo sapiens
catacagatgacaca

SEQ ID NO: 29160 - DNA, 15 bp, Homo sapiens
gcatacagatgacac

SEQ ID NO: 29161 - DNA, 15 bp, Homo sapiens
ggcatacagatgaca

SEQ ID NO: 29162 - DNA, 15 bp, Homo sapiens
tggcatacagatgac

SEQ ID NO: 29163 - DNA, 15 bp, Homo sapiens
gtggcatacagatga

SEQ ID NO: 29164 - DNA, 15 bp, Homo sapiens
ggtggcatacagatg

SEQ ID NO: 29165 - DNA, 15 bp, Homo sapiens
gggtggcatacagat

SEQ ID NO: 29166 - DNA, 15 bp, Homo sapiens
tgggtggcatacaga

SEQ ID NO: 29167 - DNA, 15 bp, Homo sapiens
gtgggtggcatacag

SEQ ID NO: 29168 - DNA, 15 bp, Homo sapiens
agtgggtggcataca

SEQ ID NO: 29169 - DNA, 15 bp, Homo sapiens
tagtgggtggcatac

SEQ ID NO: 29170 - DNA, 15 bp, Homo sapiens
atagtgggtggcata

SEQ ID NO: 29171 - DNA, 15 bp, Homo sapiens
aatagtgggtggcat

SEQ ID NO: 29172 - DNA, 15 bp, Homo sapiens
gaatagtgggtggca

SEQ ID NO: 29173 - DNA, 15 bp, Homo sapiens
agaatagtgggtggc

SEQ ID NO: 29174 - DNA, 15 bp, Homo sapiens
cagaatagtgggtgg

SEQ ID NO: 29175 - DNA, 15 bp, Homo sapiens
ccagaatagtgggtg

SEQ ID NO: 29176 - DNA, 15 bp, Homo sapiens
cccagaatagtgggt

SEQ ID NO: 29177 - DNA, 15 bp, Homo sapiens
acccagaatagtggg

SEQ ID NO: 29178 - DNA, 15 bp, Homo sapiens
cacccagaatagtgg

SEQ ID NO: 29179 - DNA, 15 bp, Homo sapiens
gcacccagaatagtg

SEQ ID NO: 29180 - DNA, 15 bp, Homo sapiens
agcacccagaatagt

SEQ ID NO: 29181 - DNA, 15 bp, Homo sapiens
cagcacccagaatag

SEQ ID NO: 29182 - DNA, 15 bp, Homo sapiens
ccagcacccagaata

SEQ ID NO: 29183 - DNA, 15 bp, Homo sapiens
cccagcacccagaat

SEQ ID NO: 29184 - DNA, 15 bp, Homo sapiens
ccccagcacccagaa

SEQ ID NO: 29185 - DNA, 15 bp, Homo sapiens
tccccagcacccaga

SEQ ID NO: 29186 - DNA, 15 bp, Homo sapiens
gtccccagcacccag

SEQ ID NO: 29187 - DNA, 15 bp, Homo sapiens
tgtccccagcaccca

SEQ ID NO: 29188 - DNA, 15 bp, Homo sapiens
gtgtccccagcaccc

SEQ ID NO: 29189 - DNA, 15 bp, Homo sapiens
tgtgtccccagcacc

SEQ ID NO: 29190 - DNA, 15 bp, Homo sapiens
ttgtgtccccagcac

SEQ ID NO: 29191 - DNA, 15 bp, Homo sapiens
gttgtgtccccagca

SEQ ID NO: 29192 - DNA, 15 bp, Homo sapiens
tgttgtgtccccagc

SEQ ID NO: 29193 - DNA, 15 bp, Homo sapiens
ctgttgtgtccccag

SEQ ID NO: 29194 - DNA, 15 bp, Homo sapiens
gctgttgtgtcccca

SEQ ID NO: 29195 - DNA, 15 bp, Homo sapiens
agctgttgtgtcccc

SEQ ID NO: 29196 - DNA, 15 bp, Homo sapiens
gagctgttgtgtccc

SEQ ID NO: 29197 - DNA, 15 bp, Homo sapiens
tgagctgttgtgtcc

SEQ ID NO: 29198 - DNA, 15 bp, Homo sapiens
gtgagctgttgtgtc

SEQ ID NO: 29199 - DNA, 15 bp, Homo sapiens
tgtgagctgttgtgt

SEQ ID NO: 29200 - DNA, 15 bp, Homo sapiens
ttgtgagctgttgtg

SEQ ID NO: 29201 - DNA, 15 bp, Homo sapiens
tttgtgagctgttgt

SEQ ID NO: 29202 - DNA, 15 bp, Homo sapiens
atttgtgagctgttg

SEQ ID NO: 29203 - DNA, 15 bp, Homo sapiens
gatttgtgagctgtt

SEQ ID NO: 29204 - DNA, 15 bp, Homo sapiens
tgatttgtgagctgt

SEQ ID NO: 29205 - DNA, 15 bp, Homo sapiens
ctgatttgtgagctg

SEQ ID NO: 29206 - DNA, 15 bp, Homo sapiens
cctgatttgtgagct

SEQ ID NO: 29207 - DNA, 15 bp, Homo sapiens
gcctgatttgtgagc

SEQ ID NO: 29208 - DNA, 15 bp, Homo sapiens
tgcctgatttgtgag

SEQ ID NO: 29209 - DNA, 15 bp, Homo sapiens
ttgcctgatttgtga

SEQ ID NO: 29210 - DNA, 15 bp, Homo sapiens
tttgcctgatttgtg

SEQ ID NO: 29211 - DNA, 15 bp, Homo sapiens
ctttgcctgatttgt

SEQ ID NO: 29212 - DNA, 15 bp, Homo sapiens
actttgcctgatttg

SEQ ID NO: 29213 - DNA, 15 bp, Homo sapiens
gactttgcctgattt

SEQ ID NO: 29214 - DNA, 15 bp, Homo sapiens
ggactttgcctgatt

SEQ ID NO: 29215 - DNA, 15 bp, Homo sapiens
gggactttgcctgat

SEQ ID NO: 29216 - DNA, 15 bp, Homo sapiens
agggactttgcctga

SEQ ID NO: 29217 - DNA, 15 bp, Homo sapiens
cagggactttgcctg

SEQ ID NO: 29218 - DNA, 15 bp, Homo sapiens
gcagggactttgcct

SEQ ID NO: 29219 - DNA, 15 bp, Homo sapiens
agcagggactttgcc

SEQ ID NO: 29220 - DNA, 15 bp, Homo sapiens
gagcagggactttgc

SEQ ID NO: 29221 - DNA, 15 bp, Homo sapiens
agagcagggactttg

SEQ ID NO: 29222 - DNA, 15 bp, Homo sapiens
gagagcagggacttt

SEQ ID NO: 29223 - DNA, 15 bp, Homo sapiens
tgagagcagggactt

SEQ ID NO: 29224 - DNA, 15 bp, Homo sapiens
gtgagagcagggact

SEQ ID NO: 29225 - DNA, 15 bp, Homo sapiens
ggtgagagcagggac

SEQ ID NO: 29226 - DNA, 15 bp, Homo sapiens
tggtgagagcaggga

SEQ ID NO: 29227 - DNA, 15 bp, Homo sapiens
ttggtgagagcaggg

SEQ ID NO: 29228 - DNA, 15 bp, Homo sapiens
tttggtgagagcagg

SEQ ID NO: 29229 - DNA, 15 bp, Homo sapiens
ttttggtgagagcag

SEQ ID NO: 29230 - DNA, 15 bp, Homo sapiens
attttggtgagagca

SEQ ID NO: 29231 - DNA, 15 bp, Homo sapiens
cattttggtgagagc

SEQ ID NO: 29232 - DNA, 15 bp, Homo sapiens
tcattttggtgagag

SEQ ID NO: 29233 - DNA, 15 bp, Homo sapiens
atcattttggtgaga

SEQ ID NO: 29234 - DNA, 15 bp, Homo sapiens
tatcattttggtgag

SEQ ID NO: 29235 - DNA, 15 bp, Homo sapiens
atatcattttggtga

SEQ ID NO: 29236 - DNA, 15 bp, Homo sapiens
gatatcattttggtg

SEQ ID NO: 29237 - DNA, 15 bp, Homo sapiens
ggatatcattttggt

SEQ ID NO: 29238 - DNA, 15 bp, Homo sapiens
aggatatcattttgg

SEQ ID NO: 29239 - DNA, 15 bp, Homo sapiens
taggatatcattttg

SEQ ID NO: 29240 - DNA, 15 bp, Homo sapiens
gtaggatatcatttt

SEQ ID NO: 29241 - DNA, 15 bp, Homo sapiens
cgtaggatatcattt

SEQ ID NO: 29242 - DNA, 15 bp, Homo sapiens
ccgtaggatatcatt

SEQ ID NO: 29243 - DNA, 15 bp, Homo sapiens
cccgtaggatatcat

SEQ ID NO: 29244 - DNA, 15 bp, Homo sapiens
ccccgtaggatatca

SEQ ID NO: 29245 - DNA, 15 bp, Homo sapiens
cccccgtaggatatc

SEQ ID NO: 29246 - DNA, 15 bp, Homo sapiens
tcccccgtaggatat

SEQ ID NO: 29247 - DNA, 15 bp, Homo sapiens
atcccccgtaggata

SEQ ID NO: 29248 - DNA, 15 bp, Homo sapiens
aatcccccgtaggat

SEQ ID NO: 29249 - DNA, 15 bp, Homo sapiens
taatcccccgtagga

SEQ ID NO: 29250 - DNA, 15 bp, Homo sapiens
gtaatcccccgtagg

SEQ ID NO: 29251 - DNA, 15 bp, Homo sapiens
tgtaatcccccgtag

SEQ ID NO: 29252 - DNA, 15 bp, Homo sapiens
ctgtaatcccccgta

SEQ ID NO: 29253 - DNA, 15 bp, Homo sapiens
tctgtaatcccccgt

SEQ ID NO: 29254 - DNA, 15 bp, Homo sapiens
atctgtaatcccccg

SEQ ID NO: 29255 - DNA, 15 bp, Homo sapiens
tatctgtaatccccc

SEQ ID NO: 29256 - DNA, 15 bp, Homo sapiens
gtatctgtaatcccc

SEQ ID NO: 29257 - DNA, 15 bp, Homo sapiens
tgtatctgtaatccc

SEQ ID NO: 29258 - DNA, 15 bp, Homo sapiens
ttgtatctgtaatcc

SEQ ID NO: 29259 - DNA, 15 bp, Homo sapiens
tttgtatctgtaatc

SEQ ID NO: 29260 - DNA, 15 bp, Homo sapiens
atttgtatctgtaat

SEQ ID NO: 29261 - DNA, 15 bp, Homo sapiens
tatttgtatctgtaa

SEQ ID NO: 29262 - DNA, 15 bp, Homo sapiens
gtatttgtatctgta

SEQ ID NO: 29263 - DNA, 15 bp, Homo sapiens
cgtatttgtatctgt

SEQ ID NO: 29264 - DNA, 15 bp, Homo sapiens
acgtatttgtatctg

SEQ ID NO: 29265 - DNA, 15 bp, Homo sapiens
tacgtatttgtatct

SEQ ID NO: 29266 - DNA, 15 bp, Homo sapiens
ttacgtatttgtatc

SEQ ID NO: 29267 - DNA, 15 bp, Homo sapiens
tttacgtatttgtat

SEQ ID NO: 29268 - DNA, 15 bp, Homo sapiens
gtttacgtatttgta

SEQ ID NO: 29269 - DNA, 15 bp, Homo sapiens
tgtttacgtatttgt

SEQ ID NO: 29270 - DNA, 15 bp, Homo sapiens
ctgtttacgtatttg

SEQ ID NO: 29271 - DNA, 15 bp, Homo sapiens
tctgtttacgtattt

SEQ ID NO: 29272 - DNA, 15 bp, Homo sapiens
atctgtttacgtatt

SEQ ID NO: 29273 - DNA, 15 bp, Homo sapiens
gatctgtttacgtat

SEQ ID NO: 29274 - DNA, 15 bp, Homo sapiens
ggatctgtttacgta

SEQ ID NO: 29275 - DNA, 15 bp, Homo sapiens
tggatctgtttacgt

SEQ ID NO: 29276 - DNA, 15 bp, Homo sapiens
atggatctgtttacg

SEQ ID NO: 29277 - DNA, 15 bp, Homo sapiens
gatggatctgtttac

SEQ ID NO: 29278 - DNA, 15 bp, Homo sapiens
cgatggatctgttta

SEQ ID NO: 29279 - DNA, 15 bp, Homo sapiens
ccgatggatctgttt

SEQ ID NO: 29280 - DNA, 15 bp, Homo sapiens
cccgatggatctgtt

SEQ ID NO: 29281 - DNA, 15 bp, Homo sapiens
tcccgatggatctgt

SEQ ID NO: 29282 - DNA, 15 bp, Homo sapiens
ctcccgatggatctg

SEQ ID NO: 29283 - DNA, 15 bp, Homo sapiens
cctcccgatggatct

SEQ ID NO: 29284 - DNA, 15 bp, Homo sapiens
tcctcccgatggatc

SEQ ID NO: 29285 - DNA, 15 bp, Homo sapiens
ttcctcccgatggat

SEQ ID NO: 29286 - DNA, 15 bp, Homo sapiens
tttcctcccgatgga

SEQ ID NO: 29287 - DNA, 15 bp, Homo sapiens
gtttcctcccgatgg

SEQ ID NO: 29288 - DNA, 15 bp, Homo sapiens
agtttcctcccgatg

SEQ ID NO: 29289 - DNA, 15 bp, Homo sapiens
gagtttcctcccgat

SEQ ID NO: 29290 - DNA, 15 bp, Homo sapiens
agagtttcctcccga

SEQ ID NO: 29291 - DNA, 15 bp, Homo sapiens
gagagtttcctcccg

SEQ ID NO: 29292 - DNA, 15 bp, Homo sapiens
tgagagtttcctccc

SEQ ID NO: 29293 - DNA, 15 bp, Homo sapiens
ctgagagtttcctcc

SEQ ID NO: 29294 - DNA, 15 bp, Homo sapiens
tctgagagtttcctc

SEQ ID NO: 29295 - DNA, 15 bp, Homo sapiens
atctgagagtttcct

SEQ ID NO: 29296 - DNA, 15 bp, Homo sapiens
catctgagagtttcc

SEQ ID NO: 29297 - DNA, 15 bp, Homo sapiens
ccatctgagagtttc

SEQ ID NO: 29298 - DNA, 15 bp, Homo sapiens
tccatctgagagttt

SEQ ID NO: 29299 - DNA, 15 bp, Homo sapiens
ttccatctgagagtt

SEQ ID NO: 29300 - DNA, 15 bp, Homo sapiens
tttccatctgagagt

SEQ ID NO: 29301 - DNA, 15 bp, Homo sapiens
atttccatctgagag

SEQ ID NO: 29302 - DNA, 15 bp, Homo sapiens
catttccatctgaga

SEQ ID NO: 29303 - DNA, 15 bp, Homo sapiens
tcatttccatctgag

SEQ ID NO: 29304 - DNA, 15 bp, Homo sapiens
ctcatttccatctga

SEQ ID NO: 29305 - DNA, 15 bp, Homo sapiens
tctcatttccatctg

SEQ ID NO: 29306 - DNA, 15 bp, Homo sapiens
ctctcatttccatct

SEQ ID NO: 29307 - DNA, 15 bp, Homo sapiens
gctctcatttccatc

SEQ ID NO: 29308 - DNA, 15 bp, Homo sapiens
agctctcatttccat

SEQ ID NO: 29309 - DNA, 15 bp, Homo sapiens
tagctctcatttcca

SEQ ID NO: 29310 - DNA, 15 bp, Homo sapiens
atagctctcatttcc

SEQ ID NO: 29311 - DNA, 15 bp, Homo sapiens
catagctctcatttc

SEQ ID NO: 29312 - DNA, 15 bp, Homo sapiens
tcatagctctcattt

SEQ ID NO: 29313 - DNA, 15 bp, Homo sapiens
ttcatagctctcatt

SEQ ID NO: 29314 - DNA, 15 bp, Homo sapiens
cttcatagctctcat

SEQ ID NO: 29315 - DNA, 15 bp, Homo sapiens
tcttcatagctctca

SEQ ID NO: 29316 - DNA, 15 bp, Homo sapiens
atcttcatagctctc

SEQ ID NO: 29317 - DNA, 15 bp, Homo sapiens
tatcttcatagctct

SEQ ID NO: 29318 - DNA, 15 bp, Homo sapiens
ttatcttcatagctc

SEQ ID NO: 29319 - DNA, 15 bp, Homo sapiens
gttatcttcatagct

SEQ ID NO: 29320 - DNA, 15 bp, Homo sapiens
tgttatcttcatagc

SEQ ID NO: 29321 - DNA, 15 bp, Homo sapiens
gtgttatcttcatag

SEQ ID NO: 29322 - DNA, 15 bp, Homo sapiens
tgtgttatcttcata

SEQ ID NO: 29323 - DNA, 15 bp, Homo sapiens
ttgtgttatcttcat

SEQ ID NO: 29324 - DNA, 15 bp, Homo sapiens
gttgtgttatcttca

SEQ ID NO: 29325 - DNA, 15 bp, Homo sapiens
tgttgtgttatcttc

SEQ ID NO: 29326 - DNA, 15 bp, Homo sapiens
ctgttgtgttatctt

SEQ ID NO: 29327 - DNA, 15 bp, Homo sapiens
actgttgtgttatct

SEQ ID NO: 29328 - DNA, 15 bp, Homo sapiens
tactgttgtgttatc

SEQ ID NO: 29329 - DNA, 15 bp, Homo sapiens
gtactgttgtgttat

SEQ ID NO: 29330 - DNA, 15 bp, Homo sapiens
tgtactgttgtgtta

SEQ ID NO: 29331 - DNA, 15 bp, Homo sapiens
atgtactgttgtgtt

SEQ ID NO: 29332 - DNA, 15 bp, Homo sapiens
catgtactgttgtgt

SEQ ID NO: 29333 - DNA, 15 bp, Homo sapiens
tcatgtactgttgtg

SEQ ID NO: 29334 - DNA, 15 bp, Homo sapiens
gtcatgtactgttgt

SEQ ID NO: 29335 - DNA, 15 bp, Homo sapiens
tgtcatgtactgttg

SEQ ID NO: 29336 - DNA, 15 bp, Homo sapiens
ttgtcatgtactgtt

SEQ ID NO: 29337 - DNA, 15 bp, Homo sapiens
attgtcatgtactgt

SEQ ID NO: 29338 - DNA, 15 bp, Homo sapiens
tattgtcatgtactg

SEQ ID NO: 29339 - DNA, 15 bp, Homo sapiens
gtattgtcatgtact

SEQ ID NO: 29340 - DNA, 15 bp, Homo sapiens
tgtattgtcatgtac

SEQ ID NO: 29341 - DNA, 15 bp, Homo sapiens
ctgtattgtcatgta

SEQ ID NO: 29342 - DNA, 15 bp, Homo sapiens
tctgtattgtcatgt

SEQ ID NO: 29343 - DNA, 15 bp, Homo sapiens
ctctgtattgtcatg

SEQ ID NO: 29344 - DNA, 15 bp, Homo sapiens
actctgtattgtcat

SEQ ID NO: 29345 - DNA, 15 bp, Homo sapiens
cactctgtattgtca

SEQ ID NO: 29346 - DNA, 15 bp, Homo sapiens
tcactctgtattgtc

SEQ ID NO: 29347 - DNA, 15 bp, Homo sapiens
gtcactctgtattgt

SEQ ID NO: 29348 - DNA, 15 bp, Homo sapiens
agtcactctgtattg

SEQ ID NO: 29349 - DNA, 15 bp, Homo sapiens
cagtcactctgtatt

SEQ ID NO: 29350 - DNA, 15 bp, Homo sapiens
ccagtcactctgtat

SEQ ID NO: 29351 - DNA, 15 bp, Homo sapiens
tccagtcactctgta

SEQ ID NO: 29352 - DNA, 15 bp, Homo sapiens
ttccagtcactctgt

SEQ ID NO: 29353 - DNA, 15 bp, Homo sapiens
gttccagtcactctg

SEQ ID NO: 29354 - DNA, 15 bp, Homo sapiens
ggttccagtcactct

SEQ ID NO: 29355 - DNA, 15 bp, Homo sapiens
tggttccagtcactc

SEQ ID NO: 29356 - DNA, 15 bp, Homo sapiens
ctggttccagtcact

SEQ ID NO: 29357 - DNA, 15 bp, Homo sapiens
cctggttccagtcac

SEQ ID NO: 29358 - DNA, 15 bp, Homo sapiens
tcctggttccagtca

SEQ ID NO: 29359 - DNA, 15 bp, Homo sapiens
ttcctggttccagtc

SEQ ID NO: 29360 - DNA, 15 bp, Homo sapiens
gttcctggttccagt

SEQ ID NO: 29361 - DNA, 15 bp, Homo sapiens
tgttcctggttccag

SEQ ID NO: 29362 - DNA, 15 bp, Homo sapiens
atgttcctggttcca

SEQ ID NO: 29363 - DNA, 15 bp, Homo sapiens
aatgttcctggttcc

SEQ ID NO: 29364 - DNA, 15 bp, Homo sapiens
aaatgttcctggttc

SEQ ID NO: 29365 - DNA, 15 bp, Homo sapiens
gaaatgttcctggtt

SEQ ID NO: 29366 - DNA, 15 bp, Homo sapiens
agaaatgttcctggt

SEQ ID NO: 29367 - DNA, 15 bp, Homo sapiens
gagaaatgttcctgg

SEQ ID NO: 29368 - DNA, 15 bp, Homo sapiens
ggagaaatgttcctg

SEQ ID NO: 29369 - DNA, 15 bp, Homo sapiens
cggagaaatgttcct

SEQ ID NO: 29370 - DNA, 15 bp, Homo sapiens
tcggagaaatgttcc

SEQ ID NO: 29371 - DNA, 15 bp, Homo sapiens
ctcggagaaatgttc

SEQ ID NO: 29372 - DNA, 15 bp, Homo sapiens
cctcggagaaatgtt

SEQ ID NO: 29373 - DNA, 15 bp, Homo sapiens
tcctcggagaaatgt

SEQ ID NO: 29374 - DNA, 15 bp, Homo sapiens
ttcctcggagaaatg

SEQ ID NO: 29375 - DNA, 15 bp, Homo sapiens
attcctcggagaaat

SEQ ID NO: 29376 - DNA, 15 bp, Homo sapiens
tattcctcggagaaa

SEQ ID NO: 29377 - DNA, 15 bp, Homo sapiens
ttattcctcggagaa

SEQ ID NO: 29378 - DNA, 15 bp, Homo sapiens
tttattcctcggaga

SEQ ID NO: 29379 - DNA, 15 bp, Homo sapiens
ttttattcctcggag

SEQ ID NO: 29380 - DNA, 15 bp, Homo sapiens
attttattcctcgga

SEQ ID NO: 29381 - DNA, 15 bp, Homo sapiens
aattttattcctcgg

SEQ ID NO: 29382 - DNA, 15 bp, Homo sapiens
aaattttattcctcg

SEQ ID NO: 29383 - DNA, 15 bp, Homo sapiens
caaattttattcctc

SEQ ID NO: 29384 - DNA, 15 bp, Homo sapiens
tcaaattttattcct

SEQ ID NO: 29385 - DNA, 15 bp, Homo sapiens
ttcaaattttattcc

SEQ ID NO: 29386 - DNA, 15 bp, Homo sapiens
cttcaaattttattc

SEQ ID NO: 29387 - DNA, 15 bp, Homo sapiens
gcttcaaattttatt

SEQ ID NO: 29388 - DNA, 15 bp, Homo sapiens
cgcttcaaattttat

SEQ ID NO: 29389 - DNA, 15 bp, Homo sapiens
tcgcttcaaatttta

SEQ ID NO: 29390 - DNA, 15 bp, Homo sapiens
ctcgcttcaaatttt

SEQ ID NO: 29391 - DNA, 15 bp, Homo sapiens
gctcgcttcaaattt

SEQ ID NO: 29392 - DNA, 15 bp, Homo sapiens
ggctcgcttcaaatt

SEQ ID NO: 29393 - DNA, 15 bp, Homo sapiens
tggctcgcttcaaat

SEQ ID NO: 29394 - DNA, 15 bp, Homo sapiens
atggctcgcttcaaa

SEQ ID NO: 29395 - DNA, 15 bp, Homo sapiens
catggctcgcttcaa

SEQ ID NO: 29396 - DNA, 15 bp, Homo sapiens
tcatggctcgcttca

SEQ ID NO: 29397 - DNA, 15 bp, Homo sapiens
ctcatggctcgcttc

SEQ ID NO: 29398 - DNA, 15 bp, Homo sapiens
tctcatggctcgctt

SEQ ID NO: 29399 - DNA, 15 bp, Homo sapiens
ctctcatggctcgct

SEQ ID NO: 29400 - DNA, 15 bp, Homo sapiens
cctctcatggctcgc

SEQ ID NO: 29401 - DNA, 15 bp, Homo sapiens
ccctctcatggctcg

SEQ ID NO: 29402 - DNA, 15 bp, Homo sapiens
accctctcatggctc

SEQ ID NO: 29403 - DNA, 15 bp, Homo sapiens
gaccctctcatggct

SEQ ID NO: 29404 - DNA, 15 bp, Homo sapiens
agaccctctcatggc

SEQ ID NO: 29405 - DNA, 15 bp, Homo sapiens
tagaccctctcatgg

SEQ ID NO: 29406 - DNA, 15 bp, Homo sapiens
gtagaccctctcatg

SEQ ID NO: 29407 - DNA, 15 bp, Homo sapiens
tgtagaccctctcat

SEQ ID NO: 29408 - DNA, 15 bp, Homo sapiens
ctgtagaccctctca

SEQ ID NO: 29409 - DNA, 15 bp, Homo sapiens
cctgtagaccctctc

SEQ ID NO: 29410 - DNA, 15 bp, Homo sapiens
acctgtagaccctct

SEQ ID NO: 29411 - DNA, 15 bp, Homo sapiens
tacctgtagaccctc

SEQ ID NO: 29412 - DNA, 15 bp, Homo sapiens
ctacctgtagaccct

SEQ ID NO: 29413 - DNA, 15 bp, Homo sapiens
tctacctgtagaccc

SEQ ID NO: 29414 - DNA, 15 bp, Homo sapiens
ctctacctgtagacc

SEQ ID NO: 29415 - DNA, 15 bp, Homo sapiens
actctacctgtagac

SEQ ID NO: 29416 - DNA, 15 bp, Homo sapiens
aactctacctgtaga

SEQ ID NO: 29417 - DNA, 15 bp, Homo sapiens
gaactctacctgtag

SEQ ID NO: 29418 - DNA, 15 bp, Homo sapiens
ggaactctacctgta

SEQ ID NO: 29419 - DNA, 15 bp, Homo sapiens
gggaactctacctgt

SEQ ID NO: 29420 - DNA, 15 bp, Homo sapiens
tgggaactctacctg

SEQ ID NO: 29421 - DNA, 15 bp, Homo sapiens
ctgggaactctacct

SEQ ID NO: 29422 - DNA, 15 bp, Homo sapiens
cctgggaactctacc

SEQ ID NO: 29423 - DNA, 15 bp, Homo sapiens
gcctgggaactctac

SEQ ID NO: 29424 - DNA, 15 bp, Homo sapiens
tgcctgggaactcta

SEQ ID NO: 29425 - DNA, 15 bp, Homo sapiens
ctgcctgggaactct

SEQ ID NO: 29426 - DNA, 15 bp, Homo sapiens
tctgcctgggaactc

SEQ ID NO: 29427 - DNA, 15 bp, Homo sapiens
ctctgcctgggaact

SEQ ID NO: 29428 - DNA, 15 bp, Homo sapiens
actctgcctgggaac

SEQ ID NO: 29429 - DNA, 15 bp, Homo sapiens
cactctgcctgggaa

SEQ ID NO: 29430 - DNA, 15 bp, Homo sapiens
tcactctgcctggga

SEQ ID NO: 29431 - DNA, 15 bp, Homo sapiens
ttcactctgcctggg

SEQ ID NO: 29432 - DNA, 15 bp, Homo sapiens
gttcactctgcctgg

SEQ ID NO: 29433 - DNA, 15 bp, Homo sapiens
tgttcactctgcctg

SEQ ID NO: 29434 - DNA, 15 bp, Homo sapiens
ctgttcactctgcct

SEQ ID NO: 29435 - DNA, 15 bp, Homo sapiens
gctgttcactctgcc

SEQ ID NO: 29436 - DNA, 15 bp, Homo sapiens
ggctgttcactctgc

SEQ ID NO: 29437 - DNA, 15 bp, Homo sapiens
tggctgttcactctg

SEQ ID NO: 29438 - DNA, 15 bp, Homo sapiens
ttggctgttcactct

SEQ ID NO: 29439 - DNA, 15 bp, Homo sapiens
cttggctgttcactc

SEQ ID NO: 29440 - DNA, 15 bp, Homo sapiens
gcttggctgttcact

SEQ ID NO: 29441 - DNA, 15 bp, Homo sapiens
tgcttggctgttcac

SEQ ID NO: 29442 - DNA, 15 bp, Homo sapiens
gtgcttggctgttca

SEQ ID NO: 29443 - DNA, 15 bp, Homo sapiens
tgtgcttggctgttc

SEQ ID NO: 29444 - DNA, 15 bp, Homo sapiens
ttgtgcttggctgtt

SEQ ID NO: 29445 - DNA, 15 bp, Homo sapiens
tttgtgcttggctgt

SEQ ID NO: 29446 - DNA, 15 bp, Homo sapiens
ctttgtgcttggctg

SEQ ID NO: 29447 - DNA, 15 bp, Homo sapiens
gctttgtgcttggct

SEQ ID NO: 29448 - DNA, 15 bp, Homo sapiens
agctttgtgcttggc

SEQ ID NO: 29449 - DNA, 15 bp, Homo sapiens
cagctttgtgcttgg

SEQ ID NO: 29450 - DNA, 15 bp, Homo sapiens
gcagctttgtgcttg

SEQ ID NO: 29451 - DNA, 15 bp, Homo sapiens
tgcagctttgtgctt

SEQ ID NO: 29452 - DNA, 15 bp, Homo sapiens
gtgcagctttgtgct

SEQ ID NO: 29453 - DNA, 15 bp, Homo sapiens
ggtgcagctttgtgc

SEQ ID NO: 29454 - DNA, 15 bp, Homo sapiens
tggtgcagctttgtg

SEQ ID NO: 29455 - DNA, 15 bp, Homo sapiens
ctggtgcagctttgt

SEQ ID NO: 29456 - DNA, 15 bp, Homo sapiens
cctggtgcagctttg

SEQ ID NO: 29457 - DNA, 15 bp, Homo sapiens
tcctggtgcagcttt

SEQ ID NO: 29458 - DNA, 15 bp, Homo sapiens
ctcctggtgcagctt

SEQ ID NO: 29459 - DNA, 15 bp, Homo sapiens
tctcctggtgcagct

SEQ ID NO: 29460 - DNA, 15 bp, Homo sapiens
ctctcctggtgcagc

SEQ ID NO: 29461 - DNA, 15 bp, Homo sapiens
tctctcctggtgcag

SEQ ID NO: 29462 - DNA, 15 bp, Homo sapiens
ctctctcctggtgca

SEQ ID NO: 29463 - DNA, 15 bp, Homo sapiens
tctctctcctggtgc

SEQ ID NO: 29464 - DNA, 15 bp, Homo sapiens
ctctctctcctggtg

SEQ ID NO: 29465 - DNA, 15 bp, Homo sapiens
cctctctctcctggt

SEQ ID NO: 29466 - DNA, 15 bp, Homo sapiens
acctctctctcctgg

SEQ ID NO: 29467 - DNA, 15 bp, Homo sapiens
cacctctctctcctg

SEQ ID NO: 29468 - DNA, 15 bp, Homo sapiens
gcacctctctctcct

SEQ ID NO: 29469 - DNA, 15 bp, Homo sapiens
agcacctctctctcc

SEQ ID NO: 29470 - DNA, 15 bp, Homo sapiens
gagcacctctctctc

SEQ ID NO: 29471 - DNA, 15 bp, Homo sapiens
cgagcacctctctct

SEQ ID NO: 29472 - DNA, 15 bp, Homo sapiens
gcgagcacctctctc

SEQ ID NO: 29473 - DNA, 15 bp, Homo sapiens
ggcgagcacctctct

SEQ ID NO: 29474 - DNA, 15 bp, Homo sapiens
cggcgagcacctctc

SEQ ID NO: 29475 - DNA, 15 bp, Homo sapiens
tcggcgagcacctct

SEQ ID NO: 29476 - DNA, 15 bp, Homo sapiens
ctcggcgagcacctc

SEQ ID NO: 29477 - DNA, 15 bp, Homo sapiens
tctcggcgagcacct

SEQ ID NO: 29478 - DNA, 15 bp, Homo sapiens
ctctcggcgagcacc

SEQ ID NO: 29479 - DNA, 15 bp, Homo sapiens
tctctcggcgagcac

SEQ ID NO: 29480 - DNA, 15 bp, Homo sapiens
gtctctcggcgagca

SEQ ID NO: 29481 - DNA, 15 bp, Homo sapiens
tgtctctcggcgagc

SEQ ID NO: 29482 - DNA, 15 bp, Homo sapiens
ctgtctctcggcgag

SEQ ID NO: 29483 - DNA, 15 bp, Homo sapiens
cctgtctctcggcga

SEQ ID NO: 29484 - DNA, 15 bp, Homo sapiens
ccctgtctctcggcg

SEQ ID NO: 29485 - DNA, 15 bp, Homo sapiens
tccctgtctctcggc

SEQ ID NO: 29486 - DNA, 15 bp, Homo sapiens
ctccctgtctctcgg

SEQ ID NO: 29487 - DNA, 15 bp, Homo sapiens
cctccctgtctctcg

SEQ ID NO: 29488 - DNA, 15 bp, Homo sapiens
ccctccctgtctctc

SEQ ID NO: 29489 - DNA, 15 bp, Homo sapiens
cccctccctgtctct

SEQ ID NO: 29490 - DNA, 15 bp, Homo sapiens
tcccctccctgtctc

SEQ ID NO: 29491 - DNA, 15 bp, Homo sapiens
ctcccctccctgtct

SEQ ID NO: 29492 - DNA, 15 bp, Homo sapiens
actcccctccctgtc

SEQ ID NO: 29493 - DNA, 15 bp, Homo sapiens
cactcccctccctgt

SEQ ID NO: 29494 - DNA, 15 bp, Homo sapiens
acactcccctccctg

SEQ ID NO: 29495 - DNA, 15 bp, Homo sapiens
cacactcccctccct

SEQ ID NO: 29496 - DNA, 15 bp, Homo sapiens
ccacactcccctccc

SEQ ID NO: 29497 - DNA, 15 bp, Homo sapiens
gccacactcccctcc

SEQ ID NO: 29498 - DNA, 15 bp, Homo sapiens
tgccacactcccctc

SEQ ID NO: 29499 - DNA, 15 bp, Homo sapiens
ctgccacactcccct

SEQ ID NO: 29500 - DNA, 15 bp, Homo sapiens
cctgccacactcccc

SEQ ID NO: 29501 - DNA, 15 bp, Homo sapiens
acctgccacactccc

SEQ ID NO: 29502 - DNA, 15 bp, Homo sapiens
cacctgccacactcc

SEQ ID NO: 29503 - DNA, 15 bp, Homo sapiens
tcacctgccacactc

SEQ ID NO: 29504 - DNA, 15 bp, Homo sapiens
ctcacctgccacact

SEQ ID NO: 29505 - DNA, 15 bp, Homo sapiens
gctcacctgccacac

SEQ ID NO: 29506 - DNA, 15 bp, Homo sapiens
agctcacctgccaca

SEQ ID NO: 29507 - DNA, 15 bp, Homo sapiens
gagctcacctgccac

SEQ ID NO: 29508 - DNA, 15 bp, Homo sapiens
tgagctcacctgcca

SEQ ID NO: 29509 - DNA, 15 bp, Homo sapiens
ctgagctcacctgcc

SEQ ID NO: 29510 - DNA, 15 bp, Homo sapiens
tctgagctcacctgc

SEQ ID NO: 29511 - DNA, 15 bp, Homo sapiens
ctctgagctcacctg

SEQ ID NO: 29512 - DNA, 15 bp, Homo sapiens
tctctgagctcacct

SEQ ID NO: 29513 - DNA, 15 bp, Homo sapiens
ctctctgagctcacc

SEQ ID NO: 29514 - DNA, 15 bp, Homo sapiens
cctctctgagctcac

SEQ ID NO: 29515 - DNA, 15 bp, Homo sapiens
ccctctctgagctca

SEQ ID NO: 29516 - DNA, 15 bp, Homo sapiens
cccctctctgagctc

SEQ ID NO: 29517 - DNA, 15 bp, Homo sapiens
gcccctctctgagct

SEQ ID NO: 29518 - DNA, 15 bp, Homo sapiens
tgcccctctctgagc

SEQ ID NO: 29519 - DNA, 15 bp, Homo sapiens
ctgcccctctctgag

SEQ ID NO: 29520 - DNA, 15 bp, Homo sapiens
cctgcccctctctga

SEQ ID NO: 29521 - DNA, 15 bp, Homo sapiens
ccctgcccctctctg

SEQ ID NO: 29522 - DNA, 15 bp, Homo sapiens
gccctgcccctctct

SEQ ID NO: 29523 - DNA, 15 bp, Homo sapiens
ggccctgcccctctc

SEQ ID NO: 29524 - DNA, 15 bp, Homo sapiens
tggccctgcccctct

SEQ ID NO: 29525 - DNA, 15 bp, Homo sapiens
gtggccctgcccctc

SEQ ID NO: 29526 - DNA, 15 bp, Homo sapiens
tgtggccctgcccct

SEQ ID NO: 29527 - DNA, 15 bp, Homo sapiens
gtgtggccctgcccc

SEQ ID NO: 29528 - DNA, 15 bp, Homo sapiens
tgtgtggccctgccc

SEQ ID NO: 29529 - DNA, 15 bp, Homo sapiens
gtgtgtggccctgcc

SEQ ID NO: 29530 - DNA, 15 bp, Homo sapiens
tgtgtgtggccctgc

SEQ ID NO: 29531 - DNA, 15 bp, Homo sapiens
atgtgtgtggccctg

SEQ ID NO: 29532 - DNA, 15 bp, Homo sapiens
gatgtgtgtggccct

SEQ ID NO: 29533 - DNA, 15 bp, Homo sapiens
cgatgtgtgtggccc

SEQ ID NO: 29534 - DNA, 15 bp, Homo sapiens
ccgatgtgtgtggcc

SEQ ID NO: 29535 - DNA, 15 bp, Homo sapiens
gccgatgtgtgtggc

SEQ ID NO: 29536 - DNA, 15 bp, Homo sapiens
ggccgatgtgtgtgg

SEQ ID NO: 29537 - DNA, 15 bp, Homo sapiens
tggccgatgtgtgtg

SEQ ID NO: 29538 - DNA, 15 bp, Homo sapiens
gtggccgatgtgtgt

SEQ ID NO: 29539 - DNA, 15 bp, Homo sapiens
tgtggccgatgtgtg

SEQ ID NO: 29540 - DNA, 15 bp, Homo sapiens
atgtggccgatgtgt

SEQ ID NO: 29541 - DNA, 15 bp, Homo sapiens
catgtggccgatgtg

SEQ ID NO: 29542 - DNA, 15 bp, Homo sapiens
ccatgtggccgatgt

SEQ ID NO: 29543 - DNA, 15 bp, Homo sapiens
cccatgtggccgatg

SEQ ID NO: 29544 - DNA, 15 bp, Homo sapiens
gcccatgtggccgat

SEQ ID NO: 29545 - DNA, 15 bp, Homo sapiens
ggcccatgtggccga

SEQ ID NO: 29546 - DNA, 15 bp, Homo sapiens
aggcccatgtggccg

SEQ ID NO: 29547 - DNA, 15 bp, Homo sapiens
aaggcccatgtggcc

SEQ ID NO: 29548 - DNA, 15 bp, Homo sapiens
caaggcccatgtggc

SEQ ID NO: 29549 - DNA, 15 bp, Homo sapiens
ccaaggcccatgtgg

SEQ ID NO: 29550 - DNA, 15 bp, Homo sapiens
accaaggcccatgtg

SEQ ID NO: 29551 - DNA, 15 bp, Homo sapiens
taccaaggcccatgt

SEQ ID NO: 29552 - DNA, 15 bp, Homo sapiens
ctaccaaggcccatg

SEQ ID NO: 29553 - DNA, 15 bp, Homo sapiens
actaccaaggcccat

SEQ ID NO: 29554 - DNA, 15 bp, Homo sapiens
cactaccaaggccca

SEQ ID NO: 29555 - DNA, 15 bp, Homo sapiens
tcactaccaaggccc

SEQ ID NO: 29556 - DNA, 15 bp, Homo sapiens
ctcactaccaaggcc

SEQ ID NO: 29557 - DNA, 15 bp, Homo sapiens
actcactaccaaggc

SEQ ID NO: 29558 - DNA, 15 bp, Homo sapiens
gactcactaccaagg

SEQ ID NO: 29559 - DNA, 15 bp, Homo sapiens
cgactcactaccaag

SEQ ID NO: 29560 - DNA, 15 bp, Homo sapiens
tcgactcactaccaa

SEQ ID NO: 29561 - DNA, 15 bp, Homo sapiens
ctcgactcactacca

SEQ ID NO: 29562 - DNA, 15 bp, Homo sapiens
tctcgactcactacc

SEQ ID NO: 29563 - DNA, 15 bp, Homo sapiens
atctcgactcactac

SEQ ID NO: 29564 - DNA, 15 bp, Homo sapiens
aatctcgactcacta

SEQ ID NO: 29565 - DNA, 15 bp, Homo sapiens
aaatctcgactcact

SEQ ID NO: 29566 - DNA, 15 bp, Homo sapiens
caaatctcgactcac

SEQ ID NO: 29567 - DNA, 15 bp, Homo sapiens
tcaaatctcgactca

SEQ ID NO: 29568 - DNA, 15 bp, Homo sapiens
atcaaatctcgactc

SEQ ID NO: 29569 - DNA, 15 bp, Homo sapiens
gatcaaatctcgact

SEQ ID NO: 29570 - DNA, 15 bp, Homo sapiens
ggatcaaatctcgac

SEQ ID NO: 29571 - DNA, 15 bp, Homo sapiens
gggatcaaatctcga

SEQ ID NO: 29572 - DNA, 15 bp, Homo sapiens
tgggatcaaatctcg

SEQ ID NO: 29573 - DNA, 15 bp, Homo sapiens
ctgggatcaaatctc

SEQ ID NO: 29574 - DNA, 15 bp, Homo sapiens
cctgggatcaaatct

SEQ ID NO: 29575 - DNA, 15 bp, Homo sapiens
ccctgggatcaaatc

SEQ ID NO: 29576 - DNA, 15 bp, Homo sapiens
accctgggatcaaat

SEQ ID NO: 29577 - DNA, 15 bp, Homo sapiens
aaccctgggatcaaa

SEQ ID NO: 29578 - DNA, 15 bp, Homo sapiens
aaaccctgggatcaa

SEQ ID NO: 29579 - DNA, 15 bp, Homo sapiens
taaaccctgggatca

SEQ ID NO: 29580 - DNA, 15 bp, Homo sapiens
ataaaccctgggatc

SEQ ID NO: 29581 - DNA, 15 bp, Homo sapiens
aataaaccctgggat

SEQ ID NO: 29582 - DNA, 15 bp, Homo sapiens
caataaaccctggga

SEQ ID NO: 29583 - DNA, 15 bp, Homo sapiens
ccaataaaccctggg

SEQ ID NO: 29584 - DNA, 15 bp, Homo sapiens
tccaataaaccctgg

SEQ ID NO: 29585 - DNA, 15 bp, Homo sapiens
ctccaataaaccctg

SEQ ID NO: 29586 - DNA, 15 bp, Homo sapiens
actccaataaaccct

SEQ ID NO: 29587 - DNA, 15 bp, Homo sapiens
cactccaataaaccc

SEQ ID NO: 29588 - DNA, 15 bp, Homo sapiens
ccactccaataaacc

SEQ ID NO: 29589 - DNA, 15 bp, Homo sapiens
tccactccaataaac

SEQ ID NO: 29590 - DNA, 15 bp, Homo sapiens
atccactccaataaa

SEQ ID NO: 29591 - DNA, 15 bp, Homo sapiens
tatccactccaataa

SEQ ID NO: 29592 - DNA, 15 bp, Homo sapiens
ttatccactccaata

SEQ ID NO: 29593 - DNA, 15 bp, Homo sapiens
cttatccactccaat

SEQ ID NO: 29594 - DNA, 15 bp, Homo sapiens
acttatccactccaa

SEQ ID NO: 29595 - DNA, 15 bp, Homo sapiens
tacttatccactcca

SEQ ID NO: 29596 - DNA, 15 bp, Homo sapiens
ttacttatccactcc

SEQ ID NO: 29597 - DNA, 15 bp, Homo sapiens
cttacttatccactc

SEQ ID NO: 29598 - DNA, 15 bp, Homo sapiens
gcttacttatccact

SEQ ID NO: 29599 - DNA, 15 bp, Homo sapiens
tgcttacttatccac

SEQ ID NO: 29600 - DNA, 15 bp, Homo sapiens
ttgcttacttatcca

SEQ ID NO: 29601 - DNA, 15 bp, Homo sapiens
cttgcttacttatcc

SEQ ID NO: 29602 - DNA, 15 bp, Homo sapiens
ccttgcttacttatc

SEQ ID NO: 29603 - DNA, 15 bp, Homo sapiens
accttgcttacttat

SEQ ID NO: 29604 - DNA, 15 bp, Homo sapiens
caccttgcttactta

SEQ ID NO: 29605 - DNA, 15 bp, Homo sapiens
tcaccttgcttactt

SEQ ID NO: 29606 - DNA, 15 bp, Homo sapiens
gtcaccttgcttact

SEQ ID NO: 29607 - DNA, 15 bp, Homo sapiens
agtcaccttgcttac

SEQ ID NO: 29608 - DNA, 15 bp, Homo sapiens
cagtcaccttgctta

SEQ ID NO: 29609 - DNA, 15 bp, Homo sapiens
tcagtcaccttgctt

SEQ ID NO: 29610 - DNA, 15 bp, Homo sapiens
ctcagtcaccttgct

SEQ ID NO: 29611 - DNA, 15 bp, Homo sapiens
cctcagtcaccttgc

SEQ ID NO: 29612 - DNA, 15 bp, Homo sapiens
acctcagtcaccttg

SEQ ID NO: 29613 - DNA, 15 bp, Homo sapiens
cacctcagtcacctt

SEQ ID NO: 29614 - DNA, 15 bp, Homo sapiens
gcacctcagtcacct

SEQ ID NO: 29615 - DNA, 15 bp, Homo sapiens
agcacctcagtcacc

SEQ ID NO: 29616 - DNA, 15 bp, Homo sapiens
gagcacctcagtcac

SEQ ID NO: 29617 - DNA, 15 bp, Homo sapiens
cgagcacctcagtca

SEQ ID NO: 29618 - DNA, 15 bp, Homo sapiens
ccgagcacctcagtc

SEQ ID NO: 29619 - DNA, 15 bp, Homo sapiens
cccgagcacctcagt

SEQ ID NO: 29620 - DNA, 15 bp, Homo sapiens
acccgagcacctcag

SEQ ID NO: 29621 - DNA, 15 bp, Homo sapiens
aacccgagcacctca

SEQ ID NO: 29622 - DNA, 15 bp, Homo sapiens
aaacccgagcacctc

SEQ ID NO: 29623 - DNA, 15 bp, Homo sapiens
taaacccgagcacct

SEQ ID NO: 29624 - DNA, 15 bp, Homo sapiens
gtaaacccgagcacc

SEQ ID NO: 29625 - DNA, 15 bp, Homo sapiens
tgtaaacccgagcac

SEQ ID NO: 29626 - DNA, 15 bp, Homo sapiens
atgtaaacccgagca

SEQ ID NO: 29627 - DNA, 15 bp, Homo sapiens
aatgtaaacccgagc

SEQ ID NO: 29628 - DNA, 15 bp, Homo sapiens
aaatgtaaacccgag

SEQ ID NO: 29629 - DNA, 15 bp, Homo sapiens
aaaatgtaaacccga

SEQ ID NO: 29630 - DNA, 15 bp, Homo sapiens
aaaaatgtaaacccg

SEQ ID NO: 29631 - DNA, 15 bp, Homo sapiens
taaaaatgtaaaccc

SEQ ID NO: 29632 - DNA, 15 bp, Homo sapiens
ataaaaatgtaaacc

SEQ ID NO: 29633 - DNA, 15 bp, Homo sapiens
tataaaaatgtaaac

SEQ ID NO: 29634 - DNA, 15 bp, Homo sapiens
ctataaaaatgtaaa

SEQ ID NO: 29635 - DNA, 15 bp, Homo sapiens
actataaaaatgtaa

SEQ ID NO: 29636 - DNA, 15 bp, Homo sapiens
aactataaaaatgta

SEQ ID NO: 29637 - DNA, 15 bp, Homo sapiens
gaactataaaaatgt

SEQ ID NO: 29638 - DNA, 15 bp, Homo sapiens
tgaactataaaaatg

SEQ ID NO: 29639 - DNA, 15 bp, Homo sapiens
ttgaactataaaaat

SEQ ID NO: 29640 - DNA, 15 bp, Homo sapiens
cttgaactataaaaa

SEQ ID NO: 29641 - DNA, 15 bp, Homo sapiens
gcttgaactataaaa

SEQ ID NO: 29642 - DNA, 15 bp, Homo sapiens
agcttgaactataaa

SEQ ID NO: 29643 - DNA, 15 bp, Homo sapiens
cagcttgaactataa

SEQ ID NO: 29644 - DNA, 15 bp, Homo sapiens
ccagcttgaactata

SEQ ID NO: 29645 - DNA, 15 bp, Homo sapiens
gccagcttgaactat

SEQ ID NO: 29646 - DNA, 15 bp, Homo sapiens
agccagcttgaacta

SEQ ID NO: 29647 - DNA, 15 bp, Homo sapiens
cagccagcttgaact

SEQ ID NO: 29648 - DNA, 15 bp, Homo sapiens
gcagccagcttgaac

SEQ ID NO: 29649 - DNA, 15 bp, Homo sapiens
agcagccagcttgaa

SEQ ID NO: 29650 - DNA, 15 bp, Homo sapiens
cagcagccagcttga

SEQ ID NO: 29651 - DNA, 15 bp, Homo sapiens
ccagcagccagcttg

SEQ ID NO: 29652 - DNA, 15 bp, Homo sapiens
cccagcagccagctt

SEQ ID NO: 29653 - DNA, 15 bp, Homo sapiens
acccagcagccagct

SEQ ID NO: 29654 - DNA, 15 bp, Homo sapiens
cacccagcagccagc

SEQ ID NO: 29655 - DNA, 15 bp, Homo sapiens
ccacccagcagccag

SEQ ID NO: 29656 - DNA, 15 bp, Homo sapiens
tccacccagcagcca

SEQ ID NO: 29657 - DNA, 15 bp, Homo sapiens
ttccacccagcagcc

SEQ ID NO: 29658 - DNA, 15 bp, Homo sapiens
tttccacccagcagc

SEQ ID NO: 29659 - DNA, 15 bp, Homo sapiens
ttttccacccagcag

SEQ ID NO: 29660 - DNA, 15 bp, Homo sapiens
gttttccacccagca

SEQ ID NO: 29661 - DNA, 15 bp, Homo sapiens
cgttttccacccagc

SEQ ID NO: 29662 - DNA, 15 bp, Homo sapiens
ccgttttccacccag

SEQ ID NO: 29663 - DNA, 15 bp, Homo sapiens
tccgttttccaccca

SEQ ID NO: 29664 - DNA, 15 bp, Homo sapiens
ttccgttttccaccc

SEQ ID NO: 29665 - DNA, 15 bp, Homo sapiens
cttccgttttccacc

SEQ ID NO: 29666 - DNA, 15 bp, Homo sapiens
acttccgttttccac

SEQ ID NO: 29667 - DNA, 15 bp, Homo sapiens
aacttccgttttcca

SEQ ID NO: 29668 - DNA, 15 bp, Homo sapiens
caacttccgttttcc

SEQ ID NO: 29669 - DNA, 15 bp, Homo sapiens
ccaacttccgttttc

SEQ ID NO: 29670 - DNA, 15 bp, Homo sapiens
gccaacttccgtttt

SEQ ID NO: 29671 - DNA, 15 bp, Homo sapiens
tgccaacttccgttt

SEQ ID NO: 29672 - DNA, 15 bp, Homo sapiens
ctgccaacttccgtt

SEQ ID NO: 29673 - DNA, 15 bp, Homo sapiens
tctgccaacttccgt

SEQ ID NO: 29674 - DNA, 15 bp, Homo sapiens
gtctgccaacttccg

SEQ ID NO: 29675 - DNA, 15 bp, Homo sapiens
ggtctgccaacttcc

SEQ ID NO: 29676 - DNA, 15 bp, Homo sapiens
tggtctgccaacttc

SEQ ID NO: 29677 - DNA, 15 bp, Homo sapiens
ttggtctgccaactt

SEQ ID NO: 29678 - DNA, 15 bp, Homo sapiens
cttggtctgccaact

SEQ ID NO: 29679 - DNA, 15 bp, Homo sapiens
ccttggtctgccaac

SEQ ID NO: 29680 - DNA, 15 bp, Homo sapiens
tccttggtctgccaa

SEQ ID NO: 29681 - DNA, 15 bp, Homo sapiens
gtccttggtctgcca

SEQ ID NO: 29682 - DNA, 15 bp, Homo sapiens
tgtccttggtctgcc

SEQ ID NO: 29683 - DNA, 15 bp, Homo sapiens
ctgtccttggtctgc

SEQ ID NO: 29684 - DNA, 15 bp, Homo sapiens
tctgtccttggtctg

SEQ ID NO: 29685 - DNA, 15 bp, Homo sapiens
ttctgtccttggtct

SEQ ID NO: 29686 - DNA, 15 bp, Homo sapiens
attctgtccttggtc

SEQ ID NO: 29687 - DNA, 15 bp, Homo sapiens
gattctgtccttggt

SEQ ID NO: 29688 - DNA, 15 bp, Homo sapiens
tgattctgtccttgg

SEQ ID NO: 29689 - DNA, 15 bp, Homo sapiens
ctgattctgtccttg

SEQ ID NO: 29690 - DNA, 15 bp, Homo sapiens
cctgattctgtcctt

SEQ ID NO: 29691 - DNA, 15 bp, Homo sapiens
gcctgattctgtcct

SEQ ID NO: 29692 - DNA, 15 bp, Homo sapiens
tgcctgattctgtcc

SEQ ID NO: 29693 - DNA, 15 bp, Homo sapiens
ctgcctgattctgtc

SEQ ID NO: 29694 - DNA, 15 bp, Homo sapiens
tctgcctgattctgt

SEQ ID NO: 29695 - DNA, 15 bp, Homo sapiens
gtctgcctgattctg

SEQ ID NO: 29696 - DNA, 15 bp, Homo sapiens
ggtctgcctgattct

SEQ ID NO: 29697 - DNA, 15 bp, Homo sapiens
gggtctgcctgattc

SEQ ID NO: 29698 - DNA, 15 bp, Homo sapiens
tgggtctgcctgatt

SEQ ID NO: 29699 - DNA, 15 bp, Homo sapiens
atgggtctgcctgat

SEQ ID NO: 29700 - DNA, 15 bp, Homo sapiens
catgggtctgcctga

SEQ ID NO: 29701 - DNA, 15 bp, Homo sapiens
acatgggtctgcctg

SEQ ID NO: 29702 - DNA, 15 bp, Homo sapiens
cacatgggtctgcct

SEQ ID NO: 29703 - DNA, 15 bp, Homo sapiens
ccacatgggtctgcc

SEQ ID NO: 29704 - DNA, 15 bp, Homo sapiens
tccacatgggtctgc

SEQ ID NO: 29705 - DNA, 15 bp, Homo sapiens
ttccacatgggtctg

SEQ ID NO: 29706 - DNA, 15 bp, Homo sapiens
cttccacatgggtct

SEQ ID NO: 29707 - DNA, 15 bp, Homo sapiens
acttccacatgggtc

SEQ ID NO: 29708 - DNA, 15 bp, Homo sapiens
aacttccacatgggt

SEQ ID NO: 29709 - DNA, 15 bp, Homo sapiens
aaacttccacatggg

SEQ ID NO: 29710 - DNA, 15 bp, Homo sapiens
gaaacttccacatgg

SEQ ID NO: 29711 - DNA, 15 bp, Homo sapiens
agaaacttccacatg

SEQ ID NO: 29712 - DNA, 15 bp, Homo sapiens
gagaaacttccacat

SEQ ID NO: 29713 - DNA, 15 bp, Homo sapiens
agagaaacttccaca

SEQ ID NO: 29714 - DNA, 15 bp, Homo sapiens
tagagaaacttccac

SEQ ID NO: 29715 - DNA, 15 bp, Homo sapiens
ctagagaaacttcca

SEQ ID NO: 29716 - DNA, 15 bp, Homo sapiens
actagagaaacttcc

SEQ ID NO: 29717 - DNA, 15 bp, Homo sapiens
cactagagaaacttc

SEQ ID NO: 29718 - DNA, 15 bp, Homo sapiens
ccactagagaaactt

SEQ ID NO: 29719 - DNA, 15 bp, Homo sapiens
accactagagaaact

SEQ ID NO: 29720 - DNA, 15 bp, Homo sapiens
gaccactagagaaac

SEQ ID NO: 29721 - DNA, 15 bp, Homo sapiens
agaccactagagaaa

SEQ ID NO: 29722 - DNA, 15 bp, Homo sapiens
tagaccactagagaa

SEQ ID NO: 29723 - DNA, 15 bp, Homo sapiens
ctagaccactagaga

SEQ ID NO: 29724 - DNA, 15 bp, Homo sapiens
cctagaccactagag

SEQ ID NO: 29725 - DNA, 15 bp, Homo sapiens
acctagaccactaga

SEQ ID NO: 29726 - DNA, 15 bp, Homo sapiens
cacctagaccactag

SEQ ID NO: 29727 - DNA, 15 bp, Homo sapiens
ccacctagaccacta

SEQ ID NO: 29728 - DNA, 15 bp, Homo sapiens
accacctagaccact

SEQ ID NO: 29729 - DNA, 15 bp, Homo sapiens
caccacctagaccac

SEQ ID NO: 29730 - DNA, 15 bp, Homo sapiens
ccaccacctagacca

SEQ ID NO: 29731 - DNA, 15 bp, Homo sapiens
gccaccacctagacc

SEQ ID NO: 29732 - DNA, 15 bp, Homo sapiens
agccaccacctagac

SEQ ID NO: 29733 - DNA, 15 bp, Homo sapiens
aagccaccacctaga

SEQ ID NO: 29734 - DNA, 15 bp, Homo sapiens
caagccaccacctag

SEQ ID NO: 29735 - DNA, 15 bp, Homo sapiens
ccaagccaccaccta

SEQ ID NO: 29736 - DNA, 15 bp, Homo sapiens
cccaagccaccacct

SEQ ID NO: 29737 - DNA, 15 bp, Homo sapiens
acccaagccaccacc

SEQ ID NO: 29738 - DNA, 15 bp, Homo sapiens
tacccaagccaccac

SEQ ID NO: 29739 - DNA, 15 bp, Homo sapiens
ctacccaagccacca

SEQ ID NO: 29740 - DNA, 15 bp, Homo sapiens
gctacccaagccacc

SEQ ID NO: 29741 - DNA, 15 bp, Homo sapiens
cgctacccaagccac

SEQ ID NO: 29742 - DNA, 15 bp, Homo sapiens
acgctacccaagcca

SEQ ID NO: 29743 - DNA, 15 bp, Homo sapiens
cacgctacccaagcc

SEQ ID NO: 29744 - DNA, 15 bp, Homo sapiens
ccacgctacccaagc

SEQ ID NO: 29745 - DNA, 15 bp, Homo sapiens
gccacgctacccaag

SEQ ID NO: 29746 - DNA, 15 bp, Homo sapiens
tgccacgctacccaa

SEQ ID NO: 29747 - DNA, 15 bp, Homo sapiens
ctgccacgctaccca

SEQ ID NO: 29748 - DNA, 15 bp, Homo sapiens
actgccacgctaccc

SEQ ID NO: 29749 - DNA, 15 bp, Homo sapiens
tactgccacgctacc

SEQ ID NO: 29750 - DNA, 15 bp, Homo sapiens
atactgccacgctac

SEQ ID NO: 29751 - DNA, 15 bp, Homo sapiens
aatactgccacgcta

SEQ ID NO: 29752 - DNA, 15 bp, Homo sapiens
caatactgccacgct

SEQ ID NO: 29753 - DNA, 15 bp, Homo sapiens
ccaatactgccacgc

SEQ ID NO: 29754 - DNA, 15 bp, Homo sapiens
tccaatactgccacg

SEQ ID NO: 29755 - DNA, 15 bp, Homo sapiens
ctccaatactgccac

SEQ ID NO: 29756 - DNA, 15 bp, Homo sapiens
gctccaatactgcca

SEQ ID NO: 29757 - DNA, 15 bp, Homo sapiens
agctccaatactgcc

SEQ ID NO: 29758 - DNA, 15 bp, Homo sapiens
cagctccaatactgc

SEQ ID NO: 29759 - DNA, 15 bp, Homo sapiens
ccagctccaatactg

SEQ ID NO: 29760 - DNA, 15 bp, Homo sapiens
tccagctccaatact

SEQ ID NO: 29761 - DNA, 15 bp, Homo sapiens
ctccagctccaatac

SEQ ID NO: 29762 - DNA, 15 bp, Homo sapiens
tctccagctccaata

SEQ ID NO: 29763 - DNA, 15 bp, Homo sapiens
ttctccagctccaat

SEQ ID NO: 29764 - DNA, 15 bp, Homo sapiens
tttctccagctccaa

SEQ ID NO: 29765 - DNA, 15 bp, Homo sapiens
gtttctccagctcca

SEQ ID NO: 29766 - DNA, 15 bp, Homo sapiens
cgtttctccagctcc

SEQ ID NO: 29767 - DNA, 15 bp, Homo sapiens
gcgtttctccagctc

SEQ ID NO: 29768 - DNA, 15 bp, Homo sapiens
tgcgtttctccagct

SEQ ID NO: 29769 - DNA, 15 bp, Homo sapiens
ctgcgtttctccagc

SEQ ID NO: 29770 - DNA, 15 bp, Homo sapiens
tctgcgtttctccag

SEQ ID NO: 29771 - DNA, 15 bp, Homo sapiens
atctgcgtttctcca

SEQ ID NO: 29772 - DNA, 15 bp, Homo sapiens
catctgcgtttctcc

SEQ ID NO: 29773 - DNA, 15 bp, Homo sapiens
ccatctgcgtttctc

SEQ ID NO: 29774 - DNA, 15 bp, Homo sapiens
tccatctgcgtttct

SEQ ID NO: 29775 - DNA, 15 bp, Homo sapiens
atccatctgcgtttc

SEQ ID NO: 29776 - DNA, 15 bp, Homo sapiens
aatccatctgcgttt

SEQ ID NO: 29777 - DNA, 15 bp, Homo sapiens
caatccatctgcgtt

SEQ ID NO: 29778 - DNA, 15 bp, Homo sapiens
ccaatccatctgcgt

SEQ ID NO: 29779 - DNA, 15 bp, Homo sapiens
tccaatccatctgcg

SEQ ID NO: 29780 - DNA, 15 bp, Homo sapiens
ctccaatccatctgc

SEQ ID NO: 29781 - DNA, 15 bp, Homo sapiens
tctccaatccatctg

SEQ ID NO: 29782 - DNA, 15 bp, Homo sapiens
atctccaatccatct

SEQ ID NO: 29783 - DNA, 15 bp, Homo sapiens
aatctccaatccatc

SEQ ID NO: 29784 - DNA, 15 bp, Homo sapiens
aaatctccaatccat

SEQ ID NO: 29785 - DNA, 15 bp, Homo sapiens
caaatctccaatcca

SEQ ID NO: 29786 - DNA, 15 bp, Homo sapiens
acaaatctccaatcc

SEQ ID NO: 29787 - DNA, 15 bp, Homo sapiens
aacaaatctccaatc

SEQ ID NO: 29788 - DNA, 15 bp, Homo sapiens
aaacaaatctccaat

SEQ ID NO: 29789 - DNA, 15 bp, Homo sapiens
aaaacaaatctccaa

SEQ ID NO: 29790 - DNA, 15 bp, Homo sapiens
caaaacaaatctcca

SEQ ID NO: 29791 - DNA, 15 bp, Homo sapiens
ccaaaacaaatctcc

SEQ ID NO: 29792 - DNA, 15 bp, Homo sapiens
tccaaaacaaatctc

SEQ ID NO: 29793 - DNA, 15 bp, Homo sapiens
ctccaaaacaaatct

SEQ ID NO: 29794 - DNA, 15 bp, Homo sapiens
actccaaaacaaatc

SEQ ID NO: 29795 - DNA, 15 bp, Homo sapiens
cactccaaaacaaat

SEQ ID NO: 29796 - DNA, 15 bp, Homo sapiens
tcactccaaaacaaa

SEQ ID NO: 29797 - DNA, 15 bp, Homo sapiens
gtcactccaaaacaa

SEQ ID NO: 29798 - DNA, 15 bp, Homo sapiens
cgtcactccaaaaca

SEQ ID NO: 29799 - DNA, 15 bp, Homo sapiens
gcgtcactccaaaac

SEQ ID NO: 29800 - DNA, 15 bp, Homo sapiens
ggcgtcactccaaaa

SEQ ID NO: 29801 - DNA, 15 bp, Homo sapiens
tggcgtcactccaaa

SEQ ID NO: 29802 - DNA, 15 bp, Homo sapiens
atggcgtcactccaa

SEQ ID NO: 29803 - DNA, 15 bp, Homo sapiens
aatggcgtcactcca

SEQ ID NO: 29804 - DNA, 15 bp, Homo sapiens
gaatggcgtcactcc

SEQ ID NO: 29805 - DNA, 15 bp, Homo sapiens
agaatggcgtcactc

SEQ ID NO: 29806 - DNA, 15 bp, Homo sapiens
cagaatggcgtcact

SEQ ID NO: 29807 - DNA, 15 bp, Homo sapiens
acagaatggcgtcac

SEQ ID NO: 29808 - DNA, 15 bp, Homo sapiens
gacagaatggcgtca

SEQ ID NO: 29809 - DNA, 15 bp, Homo sapiens
agacagaatggcgtc

SEQ ID NO: 29810 - DNA, 15 bp, Homo sapiens
aagacagaatggcgt

SEQ ID NO: 29811 - DNA, 15 bp, Homo sapiens
caagacagaatggcg

SEQ ID NO: 29812 - DNA, 15 bp, Homo sapiens
acaagacagaatggc

SEQ ID NO: 29813 - DNA, 15 bp, Homo sapiens
gacaagacagaatgg

SEQ ID NO: 29814 - DNA, 15 bp, Homo sapiens
tgacaagacagaatg

SEQ ID NO: 29815 - DNA, 15 bp, Homo sapiens
ttgacaagacagaat

SEQ ID NO: 29816 - DNA, 15 bp, Homo sapiens
attgacaagacagaa

SEQ ID NO: 29817 - DNA, 15 bp, Homo sapiens
cattgacaagacaga

SEQ ID NO: 29818 - DNA, 15 bp, Homo sapiens
ccattgacaagacag

SEQ ID NO: 29819 - DNA, 15 bp, Homo sapiens
tccattgacaagaca

SEQ ID NO: 29820 - DNA, 15 bp, Homo sapiens
atccattgacaagac

SEQ ID NO: 29821 - DNA, 15 bp, Homo sapiens
aatccattgacaaga

SEQ ID NO: 29822 - DNA, 15 bp, Homo sapiens
caatccattgacaag

SEQ ID NO: 29823 - DNA, 15 bp, Homo sapiens
ccaatccattgacaa

SEQ ID NO: 29824 - DNA, 15 bp, Homo sapiens
gccaatccattgaca

SEQ ID NO: 29825 - DNA, 15 bp, Homo sapiens
cgccaatccattgac

SEQ ID NO: 29826 - DNA, 15 bp, Homo sapiens
tcgccaatccattga

SEQ ID NO: 29827 - DNA, 15 bp, Homo sapiens
ttcgccaatccattg

SEQ ID NO: 29828 - DNA, 15 bp, Homo sapiens
tttcgccaatccatt

SEQ ID NO: 29829 - DNA, 15 bp, Homo sapiens
ttttcgccaatccat

SEQ ID NO: 29830 - DNA, 15 bp, Homo sapiens
tttttcgccaatcca

SEQ ID NO: 29831 - DNA, 15 bp, Homo sapiens
ttttttcgccaatcc

SEQ ID NO: 29832 - DNA, 15 bp, Homo sapiens
cttttttcgccaatc

SEQ ID NO: 29833 - DNA, 15 bp, Homo sapiens
tcttttttcgccaat

SEQ ID NO: 29834 - DNA, 15 bp, Homo sapiens
ctcttttttcgccaa

SEQ ID NO: 29835 - DNA, 15 bp, Homo sapiens
cctcttttttcgcca

SEQ ID NO: 29836 - DNA, 15 bp, Homo sapiens
gcctcttttttcgcc

SEQ ID NO: 29837 - DNA, 15 bp, Homo sapiens
tgcctcttttttcgc

SEQ ID NO: 29838 - DNA, 15 bp, Homo sapiens
atgcctcttttttcg

SEQ ID NO: 29839 - DNA, 15 bp, Homo sapiens
gatgcctcttttttc

SEQ ID NO: 29840 - DNA, 15 bp, Homo sapiens
tgatgcctctttttt

SEQ ID NO: 29841 - DNA, 15 bp, Homo sapiens
ttgatgcctcttttt

SEQ ID NO: 29842 - DNA, 15 bp, Homo sapiens
tttgatgcctctttt

SEQ ID NO: 29843 - DNA, 15 bp, Homo sapiens
ctttgatgcctcttt

SEQ ID NO: 29844 - DNA, 15 bp, Homo sapiens
tctttgatgcctctt

SEQ ID NO: 29845 - DNA, 15 bp, Homo sapiens
atctttgatgcctct

SEQ ID NO: 29846 - DNA, 15 bp, Homo sapiens
catctttgatgcctc

SEQ ID NO: 29847 - DNA, 15 bp, Homo sapiens
tcatctttgatgcct

SEQ ID NO: 29848 - DNA, 15 bp, Homo sapiens
ctcatctttgatgcc

SEQ ID NO: 29849 - DNA, 15 bp, Homo sapiens
actcatctttgatgc

SEQ ID NO: 29850 - DNA, 15 bp, Homo sapiens
aactcatctttgatg

SEQ ID NO: 29851 - DNA, 15 bp, Homo sapiens
taactcatctttgat

SEQ ID NO: 29852 - DNA, 15 bp, Homo sapiens
gtaactcatctttga

SEQ ID NO: 29853 - DNA, 15 bp, Homo sapiens
tgtaactcatctttg

SEQ ID NO: 29854 - DNA, 15 bp, Homo sapiens
gtgtaactcatcttt

SEQ ID NO: 29855 - DNA, 15 bp, Homo sapiens
tgtgtaactcatctt

SEQ ID NO: 29856 - DNA, 15 bp, Homo sapiens
atgtgtaactcatct

SEQ ID NO: 29857 - DNA, 15 bp, Homo sapiens
gatgtgtaactcatc

SEQ ID NO: 29858 - DNA, 15 bp, Homo sapiens
tgatgtgtaactcat

SEQ ID NO: 29859 - DNA, 15 bp, Homo sapiens
atgatgtgtaactca

SEQ ID NO: 29860 - DNA, 15 bp, Homo sapiens
aatgatgtgtaactc

SEQ ID NO: 29861 - DNA, 15 bp, Homo sapiens
caatgatgtgtaact

SEQ ID NO: 29862 - DNA, 15 bp, Homo sapiens
tcaatgatgtgtaac

SEQ ID NO: 29863 - DNA, 15 bp, Homo sapiens
ttcaatgatgtgtaa

SEQ ID NO: 29864 - DNA, 15 bp, Homo sapiens
cttcaatgatgtgta

SEQ ID NO: 29865 - DNA, 15 bp, Homo sapiens
acttcaatgatgtgt

SEQ ID NO: 29866 - DNA, 15 bp, Homo sapiens
cacttcaatgatgtg

SEQ ID NO: 29867 - DNA, 15 bp, Homo sapiens
tcacttcaatgatgt

SEQ ID NO: 29868 - DNA, 15 bp, Homo sapiens
ctcacttcaatgatg

SEQ ID NO: 29869 - DNA, 15 bp, Homo sapiens
tctcacttcaatgat

SEQ ID NO: 29870 - DNA, 15 bp, Homo sapiens
ttctcacttcaatga

SEQ ID NO: 29871 - DNA, 15 bp, Homo sapiens
gttctcacttcaatg

SEQ ID NO: 29872 - DNA, 15 bp, Homo sapiens
agttctcacttcaat

SEQ ID NO: 29873 - DNA, 15 bp, Homo sapiens
tagttctcacttcaa

SEQ ID NO: 29874 - DNA, 15 bp, Homo sapiens
ctagttctcacttca

SEQ ID NO: 29875 - DNA, 15 bp, Homo sapiens
cctagttctcacttc

SEQ ID NO: 29876 - DNA, 15 bp, Homo sapiens
ccctagttctcactt

SEQ ID NO: 29877 - DNA, 15 bp, Homo sapiens
tccctagttctcact

SEQ ID NO: 29878 - DNA, 15 bp, Homo sapiens
ctccctagttctcac

SEQ ID NO: 29879 - DNA, 15 bp, Homo sapiens
tctccctagttctca

SEQ ID NO: 29880 - DNA, 15 bp, Homo sapiens
atctccctagttctc

SEQ ID NO: 29881 - DNA, 15 bp, Homo sapiens
catctccctagttct

SEQ ID NO: 29882 - DNA, 15 bp, Homo sapiens
gcatctccctagttc

SEQ ID NO: 29883 - DNA, 15 bp, Homo sapiens
ggcatctccctagtt

SEQ ID NO: 29884 - DNA, 15 bp, Homo sapiens
tggcatctccctagt

SEQ ID NO: 29885 - DNA, 15 bp, Homo sapiens
ctggcatctccctag

SEQ ID NO: 29886 - DNA, 15 bp, Homo sapiens
actggcatctcccta

SEQ ID NO: 29887 - DNA, 15 bp, Homo sapiens
tactggcatctccct

SEQ ID NO: 29888 - DNA, 15 bp, Homo sapiens
gtactggcatctccc

SEQ ID NO: 29889 - DNA, 15 bp, Homo sapiens
agtactggcatctcc

SEQ ID NO: 29890 - DNA, 15 bp, Homo sapiens
aagtactggcatctc

SEQ ID NO: 29891 - DNA, 15 bp, Homo sapiens
aaagtactggcatct

SEQ ID NO: 29892 - DNA, 15 bp, Homo sapiens
taaagtactggcatc

SEQ ID NO: 29893 - DNA, 15 bp, Homo sapiens
ataaagtactggcat

SEQ ID NO: 29894 - DNA, 15 bp, Homo sapiens
aataaagtactggca

SEQ ID NO: 29895 - DNA, 15 bp, Homo sapiens
aaataaagtactggc

SEQ ID NO: 29896 - DNA, 15 bp, Homo sapiens
taaataaagtactgg

SEQ ID NO: 29897 - DNA, 15 bp, Homo sapiens
ctaaataaagtactg

SEQ ID NO: 29898 - DNA, 15 bp, Homo sapiens
actaaataaagtact

SEQ ID NO: 29899 - DNA, 15 bp, Homo sapiens
tactaaataaagtac

SEQ ID NO: 29900 - DNA, 15 bp, Homo sapiens
atactaaataaagta

SEQ ID NO: 29901 - DNA, 15 bp, Homo sapiens
aatactaaataaagt

SEQ ID NO: 29902 - DNA, 15 bp, Homo sapiens
aaatactaaataaag

SEQ ID NO: 29903 - DNA, 15 bp, Homo sapiens
aaaatactaaataaa

SEQ ID NO: 29904 - DNA, 15 bp, Homo sapiens
gaaaatactaaataa

SEQ ID NO: 29905 - DNA, 15 bp, Homo sapiens
agaaaatactaaata

SEQ ID NO: 29906 - DNA, 15 bp, Homo sapiens
gagaaaatactaaat

SEQ ID NO: 29907 - DNA, 15 bp, Homo sapiens
tgagaaaatactaaa

SEQ ID NO: 29908 - DNA, 15 bp, Homo sapiens
ctgagaaaatactaa

SEQ ID NO: 29909 - DNA, 15 bp, Homo sapiens
gctgagaaaatacta

SEQ ID NO: 29910 - DNA, 15 bp, Homo sapiens
tgctgagaaaatact

SEQ ID NO: 29911 - DNA, 15 bp, Homo sapiens
ctgctgagaaaatac

SEQ ID NO: 29912 - DNA, 15 bp, Homo sapiens
gctgctgagaaaata

SEQ ID NO: 29913 - DNA, 15 bp, Homo sapiens
agctgctgagaaaat

SEQ ID NO: 29914 - DNA, 15 bp, Homo sapiens
gagctgctgagaaaa

SEQ ID NO: 29915 - DNA, 15 bp, Homo sapiens
tgagctgctgagaaa

SEQ ID NO: 29916 - DNA, 15 bp, Homo sapiens
ttgagctgctgagaa

SEQ ID NO: 29917 - DNA, 15 bp, Homo sapiens
attgagctgctgaga

SEQ ID NO: 29918 - DNA, 15 bp, Homo sapiens
gattgagctgctgag

SEQ ID NO: 29919 - DNA, 15 bp, Homo sapiens
ggattgagctgctga

SEQ ID NO: 29920 - DNA, 15 bp, Homo sapiens
tggattgagctgctg

SEQ ID NO: 29921 - DNA, 15 bp, Homo sapiens
atggattgagctgct

SEQ ID NO: 29922 - DNA, 15 bp, Homo sapiens
tatggattgagctgc

SEQ ID NO: 29923 - DNA, 15 bp, Homo sapiens
ttatggattgagctg

SEQ ID NO: 29924 - DNA, 15 bp, Homo sapiens
tttatggattgagct

SEQ ID NO: 29925 - DNA, 15 bp, Homo sapiens
atttatggattgagc

SEQ ID NO: 29926 - DNA, 15 bp, Homo sapiens
tatttatggattgag

SEQ ID NO: 29927 - DNA, 15 bp, Homo sapiens
ttatttatggattga

SEQ ID NO: 29928 - DNA, 15 bp, Homo sapiens
attatttatggattg

SEQ ID NO: 29929 - DNA, 15 bp, Homo sapiens
aattatttatggatt

SEQ ID NO: 29930 - DNA, 15 bp, Homo sapiens
aaattatttatggat

SEQ ID NO: 29931 - DNA, 15 bp, Homo sapiens
aaaattatttatgga

SEQ ID NO: 29932 - DNA, 15 bp, Homo sapiens
aaaaattatttatgg

SEQ ID NO: 29933 - DNA, 15 bp, Homo sapiens
caaaaattatttatg

SEQ ID NO: 29934 - DNA, 15 bp, Homo sapiens
ccaaaaattatttat

SEQ ID NO: 29935 - DNA, 15 bp, Homo sapiens
tccaaaaattattta

SEQ ID NO: 29936 - DNA, 15 bp, Homo sapiens
ttccaaaaattattt

SEQ ID NO: 29937 - DNA, 15 bp, Homo sapiens
cttccaaaaattatt

SEQ ID NO: 29938 - DNA, 15 bp, Homo sapiens
tcttccaaaaattat

SEQ ID NO: 29939 - DNA, 15 bp, Homo sapiens
gtcttccaaaaatta

SEQ ID NO: 29940 - DNA, 15 bp, Homo sapiens
tgtcttccaaaaatt

SEQ ID NO: 29941 - DNA, 15 bp, Homo sapiens
ttgtcttccaaaaat

SEQ ID NO: 29942 - DNA, 15 bp, Homo sapiens
gttgtcttccaaaaa

SEQ ID NO: 29943 - DNA, 15 bp, Homo sapiens
tgttgtcttccaaaa

SEQ ID NO: 29944 - DNA, 15 bp, Homo sapiens
ttgttgtcttccaaa

SEQ ID NO: 29945 - DNA, 15 bp, Homo sapiens
cttgttgtcttccaa

SEQ ID NO: 29946 - DNA, 15 bp, Homo sapiens
gcttgttgtcttcca

SEQ ID NO: 29947 - DNA, 15 bp, Homo sapiens
tgcttgttgtcttcc

SEQ ID NO: 29948 - DNA, 15 bp, Homo sapiens
ctgcttgttgtcttc

SEQ ID NO: 29949 - DNA, 15 bp, Homo sapiens
actgcttgttgtctt

SEQ ID NO: 29950 - DNA, 15 bp, Homo sapiens
aactgcttgttgtct

SEQ ID NO: 29951 - DNA, 15 bp, Homo sapiens
aaactgcttgttgtc

SEQ ID NO: 29952 - DNA, 15 bp, Homo sapiens
gaaactgcttgttgt

SEQ ID NO: 29953 - DNA, 15 bp, Homo sapiens
tgaaactgcttgttg

SEQ ID NO: 29954 - DNA, 15 bp, Homo sapiens
gtgaaactgcttgtt

SEQ ID NO: 29955 - DNA, 15 bp, Homo sapiens
tgtgaaactgcttgt

SEQ ID NO: 29956 - DNA, 15 bp, Homo sapiens
ttgtgaaactgcttg

SEQ ID NO: 29957 - DNA, 15 bp, Homo sapiens
tttgtgaaactgctt

SEQ ID NO: 29958 - DNA, 15 bp, Homo sapiens
gtttgtgaaactgct

SEQ ID NO: 29959 - DNA, 15 bp, Homo sapiens
agtttgtgaaactgc

SEQ ID NO: 29960 - DNA, 15 bp, Homo sapiens
tagtttgtgaaactg

SEQ ID NO: 29961 - DNA, 15 bp, Homo sapiens
gtagtttgtgaaact

SEQ ID NO: 29962 - DNA, 15 bp, Homo sapiens
agtagtttgtgaaac

SEQ ID NO: 29963 - DNA, 15 bp, Homo sapiens
aagtagtttgtgaaa

SEQ ID NO: 29964 - DNA, 15 bp, Homo sapiens
taagtagtttgtgaa

SEQ ID NO: 29965 - DNA, 15 bp, Homo sapiens
ataagtagtttgtga

SEQ ID NO: 29966 - DNA, 15 bp, Homo sapiens
tataagtagtttgtg

SEQ ID NO: 29967 - DNA, 15 bp, Homo sapiens
ttataagtagtttgt

SEQ ID NO: 29968 - DNA, 15 bp, Homo sapiens
cttataagtagtttg

SEQ ID NO: 29969 - DNA, 15 bp, Homo sapiens
acttataagtagttt

SEQ ID NO: 29970 - DNA, 15 bp, Homo sapiens
gacttataagtagtt

SEQ ID NO: 29971 - DNA, 15 bp, Homo sapiens
ggacttataagtagt

SEQ ID NO: 29972 - DNA, 15 bp, Homo sapiens
aggacttataagtag

SEQ ID NO: 29973 - DNA, 15 bp, Homo sapiens
gaggacttataagta

SEQ ID NO: 29974 - DNA, 15 bp, Homo sapiens
tgaggacttataagt

SEQ ID NO: 29975 - DNA, 15 bp, Homo sapiens
ttgaggacttataag

SEQ ID NO: 29976 - DNA, 15 bp, Homo sapiens
cttgaggacttataa

SEQ ID NO: 29977 - DNA, 15 bp, Homo sapiens
acttgaggacttata

SEQ ID NO: 29978 - DNA, 15 bp, Homo sapiens
aacttgaggacttat

SEQ ID NO: 29979 - DNA, 15 bp, Homo sapiens
gaacttgaggactta

SEQ ID NO: 29980 - DNA, 15 bp, Homo sapiens
ggaacttgaggactt

SEQ ID NO: 29981 - DNA, 15 bp, Homo sapiens
tggaacttgaggact

SEQ ID NO: 29982 - DNA, 15 bp, Homo sapiens
ttggaacttgaggac

SEQ ID NO: 29983 - DNA, 15 bp, Homo sapiens
cttggaacttgagga

SEQ ID NO: 29984 - DNA, 15 bp, Homo sapiens
ccttggaacttgagg

SEQ ID NO: 29985 - DNA, 15 bp, Homo sapiens
accttggaacttgag

SEQ ID NO: 29986 - DNA, 15 bp, Homo sapiens
taccttggaacttga

SEQ ID NO: 29987 - DNA, 15 bp, Homo sapiens
ttaccttggaacttg

SEQ ID NO: 29988 - DNA, 15 bp, Homo sapiens
attaccttggaactt

SEQ ID NO: 29989 - DNA, 15 bp, Homo sapiens
aattaccttggaact

SEQ ID NO: 29990 - DNA, 15 bp, Homo sapiens
taattaccttggaac

SEQ ID NO: 29991 - DNA, 15 bp, Homo sapiens
ttaattaccttggaa

SEQ ID NO: 29992 - DNA, 15 bp, Homo sapiens
gttaattaccttgga

SEQ ID NO: 29993 - DNA, 15 bp, Homo sapiens
cgttaattaccttgg

SEQ ID NO: 29994 - DNA, 15 bp, Homo sapiens
acgttaattaccttg

SEQ ID NO: 29995 - DNA, 15 bp, Homo sapiens
cacgttaattacctt

SEQ ID NO: 29996 - DNA, 15 bp, Homo sapiens
ccacgttaattacct

SEQ ID NO: 29997 - DNA, 15 bp, Homo sapiens
cccacgttaattacc

SEQ ID NO: 29998 - DNA, 15 bp, Homo sapiens
acccacgttaattac

SEQ ID NO: 29999 - DNA, 15 bp, Homo sapiens
cacccacgttaatta

SEQ ID NO: 30000 - DNA, 15 bp, Homo sapiens
acacccacgttaatt

SEQ ID NO: 30001 - DNA, 15 bp, Homo sapiens
gacacccacgttaat

SEQ ID NO: 30002 - DNA, 15 bp, Homo sapiens
agacacccacgttaa

SEQ ID NO: 30003 - DNA, 15 bp, Homo sapiens
gagacacccacgtta

SEQ ID NO: 30004 - DNA, 15 bp, Homo sapiens
tgagacacccacgtt

SEQ ID NO: 30005 - DNA, 15 bp, Homo sapiens
atgagacacccacgt

SEQ ID NO: 30006 - DNA, 15 bp, Homo sapiens
aatgagacacccacg

SEQ ID NO: 30007 - DNA, 15 bp, Homo sapiens
caatgagacacccac

SEQ ID NO: 30008 - DNA, 15 bp, Homo sapiens
gcaatgagacaccca

SEQ ID NO: 30009 - DNA, 15 bp, Homo sapiens
ggcaatgagacaccc

SEQ ID NO: 30010 - DNA, 15 bp, Homo sapiens
aggcaatgagacacc

SEQ ID NO: 30011 - DNA, 15 bp, Homo sapiens
gaggcaatgagacac

SEQ ID NO: 30012 - DNA, 15 bp, Homo sapiens
tgaggcaatgagaca

SEQ ID NO: 30013 - DNA, 15 bp, Homo sapiens
ctgaggcaatgagac

SEQ ID NO: 30014 - DNA, 15 bp, Homo sapiens
tctgaggcaatgaga

SEQ ID NO: 30015 - DNA, 15 bp, Homo sapiens
ctctgaggcaatgag

SEQ ID NO: 30016 - DNA, 15 bp, Homo sapiens
tctctgaggcaatga

SEQ ID NO: 30017 - DNA, 15 bp, Homo sapiens
ttctctgaggcaatg

SEQ ID NO: 30018 - DNA, 15 bp, Homo sapiens
gttctctgaggcaat

SEQ ID NO: 30019 - DNA, 15 bp, Homo sapiens
tgttctctgaggcaa

SEQ ID NO: 30020 - DNA, 15 bp, Homo sapiens
gtgttctctgaggca

SEQ ID NO: 30021 - DNA, 15 bp, Homo sapiens
tgtgttctctgaggc

SEQ ID NO: 30022 - DNA, 15 bp, Homo sapiens
ctgtgttctctgagg

SEQ ID NO: 30023 - DNA, 15 bp, Homo sapiens
gctgtgttctctgag

SEQ ID NO: 30024 - DNA, 15 bp, Homo sapiens
cgctgtgttctctga

SEQ ID NO: 30025 - DNA, 15 bp, Homo sapiens
gcgctgtgttctctg

SEQ ID NO: 30026 - DNA, 15 bp, Homo sapiens
tgcgctgtgttctct

SEQ ID NO: 30027 - DNA, 15 bp, Homo sapiens
ctgcgctgtgttctc

SEQ ID NO: 30028 - DNA, 15 bp, Homo sapiens
gctgcgctgtgttct

SEQ ID NO: 30029 - DNA, 15 bp, Homo sapiens
tgctgcgctgtgttc

SEQ ID NO: 30030 - DNA, 15 bp, Homo sapiens
gtgctgcgctgtgtt

SEQ ID NO: 30031 - DNA, 15 bp, Homo sapiens
cgtgctgcgctgtgt

SEQ ID NO: 30032 - DNA, 15 bp, Homo sapiens
ccgtgctgcgctgtg

SEQ ID NO: 30033 - DNA, 15 bp, Homo sapiens
tccgtgctgcgctgt

SEQ ID NO: 30034 - DNA, 15 bp, Homo sapiens
ttccgtgctgcgctg

SEQ ID NO: 30035 - DNA, 15 bp, Homo sapiens
tttccgtgctgcgct

SEQ ID NO: 30036 - DNA, 15 bp, Homo sapiens
atttccgtgctgcgc

SEQ ID NO: 30037 - DNA, 15 bp, Homo sapiens
aatttccgtgctgcg

SEQ ID NO: 30038 - DNA, 15 bp, Homo sapiens
gaatttccgtgctgc

SEQ ID NO: 30039 - DNA, 15 bp, Homo sapiens
agaatttccgtgctg

SEQ ID NO: 30040 - DNA, 15 bp, Homo sapiens
tagaatttccgtgct

SEQ ID NO: 30041 - DNA, 15 bp, Homo sapiens
gtagaatttccgtgc

SEQ ID NO: 30042 - DNA, 15 bp, Homo sapiens
tgtagaatttccgtg

SEQ ID NO: 30043 - DNA, 15 bp, Homo sapiens
ttgtagaatttccgt

SEQ ID NO: 30044 - DNA, 15 bp, Homo sapiens
cttgtagaatttccg

SEQ ID NO: 30045 - DNA, 15 bp, Homo sapiens
tcttgtagaatttcc

SEQ ID NO: 30046 - DNA, 15 bp, Homo sapiens
gtcttgtagaatttc

SEQ ID NO: 30047 - DNA, 15 bp, Homo sapiens
ggtcttgtagaattt

SEQ ID NO: 30048 - DNA, 15 bp, Homo sapiens
aggtcttgtagaatt

SEQ ID NO: 30049 - DNA, 15 bp, Homo sapiens
caggtcttgtagaat

SEQ ID NO: 30050 - DNA, 15 bp, Homo sapiens
tcaggtcttgtagaa

SEQ ID NO: 30051 - DNA, 15 bp, Homo sapiens
gtcaggtcttgtaga

SEQ ID NO: 30052 - DNA, 15 bp, Homo sapiens
cgtcaggtcttgtag

SEQ ID NO: 30053 - DNA, 15 bp, Homo sapiens
ccgtcaggtcttgta

SEQ ID NO: 30054 - DNA, 15 bp, Homo sapiens
tccgtcaggtcttgt

SEQ ID NO: 30055 - DNA, 15 bp, Homo sapiens
gtccgtcaggtcttg

SEQ ID NO: 30056 - DNA, 15 bp, Homo sapiens
tgtccgtcaggtctt

SEQ ID NO: 30057 - DNA, 15 bp, Homo sapiens
ctgtccgtcaggtct

SEQ ID NO: 30058 - DNA, 15 bp, Homo sapiens
cctgtccgtcaggtc

SEQ ID NO: 30059 - DNA, 15 bp, Homo sapiens
tcctgtccgtcaggt

SEQ ID NO: 30060 - DNA, 15 bp, Homo sapiens
ttcctgtccgtcagg

SEQ ID NO: 30061 - DNA, 15 bp, Homo sapiens
gttcctgtccgtcag

SEQ ID NO: 30062 - DNA, 15 bp, Homo sapiens
tgttcctgtccgtca

SEQ ID NO: 30063 - DNA, 15 bp, Homo sapiens
atgttcctgtccgtc

SEQ ID NO: 30064 - DNA, 15 bp, Homo sapiens
gatgttcctgtccgt

SEQ ID NO: 30065 - DNA, 15 bp, Homo sapiens
agatgttcctgtccg

SEQ ID NO: 30066 - DNA, 15 bp, Homo sapiens
gagatgttcctgtcc

SEQ ID NO: 30067 - DNA, 15 bp, Homo sapiens
ggagatgttcctgtc

SEQ ID NO: 30068 - DNA, 15 bp, Homo sapiens
cggagatgttcctgt

SEQ ID NO: 30069 - DNA, 15 bp, Homo sapiens
tcggagatgttcctg

SEQ ID NO: 30070 - DNA, 15 bp, Homo sapiens
gtcggagatgttcct

SEQ ID NO: 30071 - DNA, 15 bp, Homo sapiens
agtcggagatgttcc

SEQ ID NO: 30072 - DNA, 15 bp, Homo sapiens
aagtcggagatgttc

SEQ ID NO: 30073 - DNA, 15 bp, Homo sapiens
gaagtcggagatgtt

SEQ ID NO: 30074 - DNA, 15 bp, Homo sapiens
agaagtcggagatgt

SEQ ID NO: 30075 - DNA, 15 bp, Homo sapiens
aagaagtcggagatg

SEQ ID NO: 30076 - DNA, 15 bp, Homo sapiens
caagaagtcggagat

SEQ ID NO: 30077 - DNA, 15 bp, Homo sapiens
ccaagaagtcggaga

SEQ ID NO: 30078 - DNA, 15 bp, Homo sapiens
accaagaagtcggag

SEQ ID NO: 30079 - DNA, 15 bp, Homo sapiens
taccaagaagtcgga

SEQ ID NO: 30080 - DNA, 15 bp, Homo sapiens
ttaccaagaagtcgg

SEQ ID NO: 30081 - DNA, 15 bp, Homo sapiens
tttaccaagaagtcg

SEQ ID NO: 30082 - DNA, 15 bp, Homo sapiens
ttttaccaagaagtc

SEQ ID NO: 30083 - DNA, 15 bp, Homo sapiens
tttttaccaagaagt

SEQ ID NO: 30084 - DNA, 15 bp, Homo sapiens
gtttttaccaagaag

SEQ ID NO: 30085 - DNA, 15 bp, Homo sapiens
cgtttttaccaagaa

SEQ ID NO: 30086 - DNA, 15 bp, Homo sapiens
acgtttttaccaaga

SEQ ID NO: 30087 - DNA, 15 bp, Homo sapiens
tacgtttttaccaag

SEQ ID NO: 30088 - DNA, 15 bp, Homo sapiens
atacgtttttaccaa

SEQ ID NO: 30089 - DNA, 15 bp, Homo sapiens
gatacgtttttacca

SEQ ID NO: 30090 - DNA, 15 bp, Homo sapiens
ggatacgtttttacc

SEQ ID NO: 30091 - DNA, 15 bp, Homo sapiens
aggatacgtttttac

SEQ ID NO: 30092 - DNA, 15 bp, Homo sapiens
caggatacgttttta

SEQ ID NO: 30093 - DNA, 15 bp, Homo sapiens
gcaggatacgttttt

SEQ ID NO: 30094 - DNA, 15 bp, Homo sapiens
agcaggatacgtttt

SEQ ID NO: 30095 - DNA, 15 bp, Homo sapiens
gagcaggatacgttt

SEQ ID NO: 30096 - DNA, 15 bp, Homo sapiens
agagcaggatacgtt

SEQ ID NO: 30097 - DNA, 15 bp, Homo sapiens
aagagcaggatacgt

SEQ ID NO: 30098 - DNA, 15 bp, Homo sapiens
taagagcaggatacg

SEQ ID NO: 30099 - DNA, 15 bp, Homo sapiens
ataagagcaggatac

SEQ ID NO: 30100 - DNA, 15 bp, Homo sapiens
tataagagcaggata

SEQ ID NO: 30101 - DNA, 15 bp, Homo sapiens
ttataagagcaggat

SEQ ID NO: 30102 - DNA, 15 bp, Homo sapiens
cttataagagcagga

SEQ ID NO: 30103 - DNA, 15 bp, Homo sapiens
tcttataagagcagg

SEQ ID NO: 30104 - DNA, 15 bp, Homo sapiens
ttcttataagagcag

SEQ ID NO: 30105 - DNA, 15 bp, Homo sapiens
cttcttataagagca

SEQ ID NO: 30106 - DNA, 15 bp, Homo sapiens
gcttcttataagagc

SEQ ID NO: 30107 - DNA, 15 bp, Homo sapiens
tgcttcttataagag

SEQ ID NO: 30108 - DNA, 15 bp, Homo sapiens
ctgcttcttataaga

SEQ ID NO: 30109 - DNA, 15 bp, Homo sapiens
cctgcttcttataag

SEQ ID NO: 30110 - DNA, 15 bp, Homo sapiens
acctgcttcttataa

SEQ ID NO: 30111 - DNA, 15 bp, Homo sapiens
tacctgcttcttata

SEQ ID NO: 30112 - DNA, 15 bp, Homo sapiens
ttacctgcttcttat

SEQ ID NO: 30113 - DNA, 15 bp, Homo sapiens
cttacctgcttctta

SEQ ID NO: 30114 - DNA, 15 bp, Homo sapiens
tcttacctgcttctt

SEQ ID NO: 30115 - DNA, 15 bp, Homo sapiens
ttcttacctgcttct

SEQ ID NO: 30116 - DNA, 15 bp, Homo sapiens
cttcttacctgcttc

SEQ ID NO: 30117 - DNA, 15 bp, Homo sapiens
tcttcttacctgctt

SEQ ID NO: 30118 - DNA, 15 bp, Homo sapiens
ttcttcttacctgct

SEQ ID NO: 30119 - DNA, 15 bp, Homo sapiens
tttcttcttacctgc

SEQ ID NO: 30120 - DNA, 15 bp, Homo sapiens
atttcttcttacctg

SEQ ID NO: 30121 - DNA, 15 bp, Homo sapiens
gatttcttcttacct

SEQ ID NO: 30122 - DNA, 15 bp, Homo sapiens
ggatttcttcttacc

SEQ ID NO: 30123 - DNA, 15 bp, Homo sapiens
aggatttcttcttac

SEQ ID NO: 30124 - DNA, 15 bp, Homo sapiens
aaggatttcttctta

SEQ ID NO: 30125 - DNA, 15 bp, Homo sapiens
aaaggatttcttctt

SEQ ID NO: 30126 - DNA, 15 bp, Homo sapiens
aaaaggatttcttct

SEQ ID NO: 30127 - DNA, 15 bp, Homo sapiens
taaaaggatttcttc

SEQ ID NO: 30128 - DNA, 15 bp, Homo sapiens
ataaaaggatttctt

SEQ ID NO: 30129 - DNA, 15 bp, Homo sapiens
cataaaaggatttct

SEQ ID NO: 30130 - DNA, 15 bp, Homo sapiens
gcataaaaggatttc

SEQ ID NO: 30131 - DNA, 15 bp, Homo sapiens
agcataaaaggattt

SEQ ID NO: 30132 - DNA, 15 bp, Homo sapiens
aagcataaaaggatt

SEQ ID NO: 30133 - DNA, 15 bp, Homo sapiens
aaagcataaaaggat

SEQ ID NO: 30134 - DNA, 15 bp, Homo sapiens
aaaagcataaaagga

SEQ ID NO: 30135 - DNA, 15 bp, Homo sapiens
aaaaagcataaaagg

SEQ ID NO: 30136 - DNA, 15 bp, Homo sapiens
taaaaagcataaaag

SEQ ID NO: 30137 - DNA, 15 bp, Homo sapiens
ataaaaagcataaaa

SEQ ID NO: 30138 - DNA, 15 bp, Homo sapiens
gataaaaagcataaa

SEQ ID NO: 30139 - DNA, 15 bp, Homo sapiens
ggataaaaagcataa

SEQ ID NO: 30140 - DNA, 15 bp, Homo sapiens
aggataaaaagcata

SEQ ID NO: 30141 - DNA, 15 bp, Homo sapiens
caggataaaaagcat

SEQ ID NO: 30142 - DNA, 15 bp, Homo sapiens
ccaggataaaaagca

SEQ ID NO: 30143 - DNA, 15 bp, Homo sapiens
gccaggataaaaagc

SEQ ID NO: 30144 - DNA, 15 bp, Homo sapiens
agccaggataaaaag

SEQ ID NO: 30145 - DNA, 15 bp, Homo sapiens
gagccaggataaaaa

SEQ ID NO: 30146 - DNA, 15 bp, Homo sapiens
ggagccaggataaaa

SEQ ID NO: 30147 - DNA, 15 bp, Homo sapiens
gggagccaggataaa

SEQ ID NO: 30148 - DNA, 15 bp, Homo sapiens
agggagccaggataa

SEQ ID NO: 30149 - DNA, 15 bp, Homo sapiens
cagggagccaggata

SEQ ID NO: 30150 - DNA, 15 bp, Homo sapiens
acagggagccaggat

SEQ ID NO: 30151 - DNA, 15 bp, Homo sapiens
tacagggagccagga

SEQ ID NO: 30152 - DNA, 15 bp, Homo sapiens
ctacagggagccagg

SEQ ID NO: 30153 - DNA, 15 bp, Homo sapiens
tctacagggagccag

SEQ ID NO: 30154 - DNA, 15 bp, Homo sapiens
ttctacagggagcca

SEQ ID NO: 30155 - DNA, 15 bp, Homo sapiens
cttctacagggagcc

SEQ ID NO: 30156 - DNA, 15 bp, Homo sapiens
tcttctacagggagc

SEQ ID NO: 30157 - DNA, 15 bp, Homo sapiens
atcttctacagggag

SEQ ID NO: 30158 - DNA, 15 bp, Homo sapiens
tatcttctacaggga

SEQ ID NO: 30159 - DNA, 15 bp, Homo sapiens
atatcttctacaggg

SEQ ID NO: 30160 - DNA, 15 bp, Homo sapiens
aatatcttctacagg

SEQ ID NO: 30161 - DNA, 15 bp, Homo sapiens
taatatcttctacag

SEQ ID NO: 30162 - DNA, 15 bp, Homo sapiens
ttaatatcttctaca

SEQ ID NO: 30163 - DNA, 15 bp, Homo sapiens
gttaatatcttctac

SEQ ID NO: 30164 - DNA, 15 bp, Homo sapiens
agttaatatcttcta

SEQ ID NO: 30165 - DNA, 15 bp, Homo sapiens
tagttaatatcttct

SEQ ID NO: 30166 - DNA, 15 bp, Homo sapiens
ctagttaatatcttc

SEQ ID NO: 30167 - DNA, 15 bp, Homo sapiens
cctagttaatatctt

SEQ ID NO: 30168 - DNA, 15 bp, Homo sapiens
ccctagttaatatct

SEQ ID NO: 30169 - DNA, 15 bp, Homo sapiens
tccctagttaatatc

SEQ ID NO: 30170 - DNA, 15 bp, Homo sapiens
gtccctagttaatat

SEQ ID NO: 30171 - DNA, 15 bp, Homo sapiens
tgtccctagttaata

SEQ ID NO: 30172 - DNA, 15 bp, Homo sapiens
ctgtccctagttaat

SEQ ID NO: 30173 - DNA, 15 bp, Homo sapiens
tctgtccctagttaa

SEQ ID NO: 30174 - DNA, 15 bp, Homo sapiens
ttctgtccctagtta

SEQ ID NO: 30175 - DNA, 15 bp, Homo sapiens
cttctgtccctagtt

SEQ ID NO: 30176 - DNA, 15 bp, Homo sapiens
tcttctgtccctagt

SEQ ID NO: 30177 - DNA, 15 bp, Homo sapiens
atcttctgtccctag

SEQ ID NO: 30178 - DNA, 15 bp, Homo sapiens
tatcttctgtcccta

SEQ ID NO: 30179 - DNA, 15 bp, Homo sapiens
ttatcttctgtccct

SEQ ID NO: 30180 - DNA, 15 bp, Homo sapiens
attatcttctgtccc

SEQ ID NO: 30181 - DNA, 15 bp, Homo sapiens
aattatcttctgtcc

SEQ ID NO: 30182 - DNA, 15 bp, Homo sapiens
aaattatcttctgtc

SEQ ID NO: 30183 - DNA, 15 bp, Homo sapiens
aaaattatcttctgt

SEQ ID NO: 30184 - DNA, 15 bp, Homo sapiens
gaaaattatcttctg

SEQ ID NO: 30185 - DNA, 15 bp, Homo sapiens
agaaaattatcttct

SEQ ID NO: 30186 - DNA, 15 bp, Homo sapiens
gagaaaattatcttc

SEQ ID NO: 30187 - DNA, 15 bp, Homo sapiens
agagaaaattatctt

SEQ ID NO: 30188 - DNA, 15 bp, Homo sapiens
gagagaaaattatct

SEQ ID NO: 30189 - DNA, 15 bp, Homo sapiens
agagagaaaattatc

SEQ ID NO: 30190 - DNA, 15 bp, Homo sapiens
gagagagaaaattat

SEQ ID NO: 30191 - DNA, 15 bp, Homo sapiens
tgagagagaaaatta

SEQ ID NO: 30192 - DNA, 15 bp, Homo sapiens
ttgagagagaaaatt

SEQ ID NO: 30193 - DNA, 15 bp, Homo sapiens
attgagagagaaaat

SEQ ID NO: 30194 - DNA, 15 bp, Homo sapiens
aattgagagagaaaa

SEQ ID NO: 30195 - DNA, 15 bp, Homo sapiens
aaattgagagagaaa

SEQ ID NO: 30196 - DNA, 15 bp, Homo sapiens
taaattgagagagaa

SEQ ID NO: 30197 - DNA, 15 bp, Homo sapiens
ataaattgagagaga

SEQ ID NO: 30198 - DNA, 15 bp, Homo sapiens
cataaattgagagag

SEQ ID NO: 30199 - DNA, 15 bp, Homo sapiens
acataaattgagaga

SEQ ID NO: 30200 - DNA, 15 bp, Homo sapiens
tacataaattgagag

SEQ ID NO: 30201 - DNA, 15 bp, Homo sapiens
atacataaattgaga

SEQ ID NO: 30202 - DNA, 15 bp, Homo sapiens
catacataaattgag

SEQ ID NO: 30203 - DNA, 15 bp, Homo sapiens
tcatacataaattga

SEQ ID NO: 30204 - DNA, 15 bp, Homo sapiens
atcatacataaattg

SEQ ID NO: 30205 - DNA, 15 bp, Homo sapiens
gatcatacataaatt

SEQ ID NO: 30206 - DNA, 15 bp, Homo sapiens
tgatcatacataaat

SEQ ID NO: 30207 - DNA, 15 bp, Homo sapiens
ctgatcatacataaa

SEQ ID NO: 30208 - DNA, 15 bp, Homo sapiens
cctgatcatacataa

SEQ ID NO: 30209 - DNA, 15 bp, Homo sapiens
ccctgatcatacata

SEQ ID NO: 30210 - DNA, 15 bp, Homo sapiens
gccctgatcatacat

SEQ ID NO: 30211 - DNA, 15 bp, Homo sapiens
tgccctgatcataca

SEQ ID NO: 30212 - DNA, 15 bp, Homo sapiens
ctgccctgatcatac

SEQ ID NO: 30213 - DNA, 15 bp, Homo sapiens
actgccctgatcata

SEQ ID NO: 30214 - DNA, 15 bp, Homo sapiens
tactgccctgatcat

SEQ ID NO: 30215 - DNA, 15 bp, Homo sapiens
ctactgccctgatca

SEQ ID NO: 30216 - DNA, 15 bp, Homo sapiens
tctactgccctgatc

SEQ ID NO: 30217 - DNA, 15 bp, Homo sapiens
atctactgccctgat

SEQ ID NO: 30218 - DNA, 15 bp, Homo sapiens
aatctactgccctga

SEQ ID NO: 30219 - DNA, 15 bp, Homo sapiens
aaatctactgccctg

SEQ ID NO: 30220 - DNA, 15 bp, Homo sapiens
aaaatctactgccct

SEQ ID NO: 30221 - DNA, 15 bp, Homo sapiens
aaaaatctactgccc

SEQ ID NO: 30222 - DNA, 15 bp, Homo sapiens
aaaaaatctactgcc

SEQ ID NO: 30223 - DNA, 15 bp, Homo sapiens
aaaaaaatctactgc

SEQ ID NO: 30224 - DNA, 15 bp, Homo sapiens
gaaaaaaatctactg

SEQ ID NO: 30225 - DNA, 15 bp, Homo sapiens
agaaaaaaatctact

SEQ ID NO: 30226 - DNA, 15 bp, Homo sapiens
aagaaaaaaatctac

SEQ ID NO: 30227 - DNA, 15 bp, Homo sapiens
aaagaaaaaaatcta

SEQ ID NO: 30228 - DNA, 15 bp, Homo sapiens
aaaagaaaaaaatct

SEQ ID NO: 30229 - DNA, 15 bp, Homo sapiens
aaaaagaaaaaaatc

SEQ ID NO: 30230 - DNA, 15 bp, Homo sapiens
aaaaaagaaaaaaat

SEQ ID NO: 30231 - DNA, 15 bp, Homo sapiens
taaaaaagaaaaaaa

SEQ ID NO: 30232 - DNA, 15 bp, Homo sapiens
ataaaaaagaaaaaa

SEQ ID NO: 30233 - DNA, 15 bp, Homo sapiens
gataaaaaagaaaaa

SEQ ID NO: 30234 - DNA, 15 bp, Homo sapiens
agataaaaaagaaaa

SEQ ID NO: 30235 - DNA, 15 bp, Homo sapiens
cagataaaaaagaaa

SEQ ID NO: 30236 - DNA, 15 bp, Homo sapiens
tcagataaaaaagaa

SEQ ID NO: 30237 - DNA, 15 bp, Homo sapiens
atcagataaaaaaga

SEQ ID NO: 30238 - DNA, 15 bp, Homo sapiens
aatcagataaaaaag

SEQ ID NO: 30239 - DNA, 15 bp, Homo sapiens
aaatcagataaaaaa

SEQ ID NO: 30240 - DNA, 15 bp, Homo sapiens
caaatcagataaaaa

SEQ ID NO: 30241 - DNA, 15 bp, Homo sapiens
tcaaatcagataaaa

SEQ ID NO: 30242 - DNA, 15 bp, Homo sapiens
ctcaaatcagataaa

SEQ ID NO: 30243 - DNA, 15 bp, Homo sapiens
cctcaaatcagataa

SEQ ID NO: 30244 - DNA, 15 bp, Homo sapiens
ccctcaaatcagata

SEQ ID NO: 30245 - DNA, 15 bp, Homo sapiens
gccctcaaatcagat

SEQ ID NO: 30246 - DNA, 15 bp, Homo sapiens
ggccctcaaatcaga

SEQ ID NO: 30247 - DNA, 15 bp, Homo sapiens
gggccctcaaatcag

SEQ ID NO: 30248 - DNA, 15 bp, Homo sapiens
ggggccctcaaatca

SEQ ID NO: 30249 - DNA, 15 bp, Homo sapiens
tggggccctcaaatc

SEQ ID NO: 30250 - DNA, 15 bp, Homo sapiens
atggggccctcaaat

SEQ ID NO: 30251 - DNA, 15 bp, Homo sapiens
aatggggccctcaaa

SEQ ID NO: 30252 - DNA, 15 bp, Homo sapiens
gaatggggccctcaa

SEQ ID NO: 30253 - DNA, 15 bp, Homo sapiens
tgaatggggccctca

SEQ ID NO: 30254 - DNA, 15 bp, Homo sapiens
ttgaatggggccctc

SEQ ID NO: 30255 - DNA, 15 bp, Homo sapiens
gttgaatggggccct

SEQ ID NO: 30256 - DNA, 15 bp, Homo sapiens
tgttgaatggggccc

SEQ ID NO: 30257 - DNA, 15 bp, Homo sapiens
atgttgaatggggcc

SEQ ID NO: 30258 - DNA, 15 bp, Homo sapiens
tatgttgaatggggc

SEQ ID NO: 30259 - DNA, 15 bp, Homo sapiens
ttatgttgaatgggg

SEQ ID NO: 30260 - DNA, 15 bp, Homo sapiens
tttatgttgaatggg

SEQ ID NO: 30261 - DNA, 15 bp, Homo sapiens
ttttatgttgaatgg

SEQ ID NO: 30262 - DNA, 15 bp, Homo sapiens
tttttatgttgaatg

SEQ ID NO: 30263 - DNA, 15 bp, Homo sapiens
ctttttatgttgaat

SEQ ID NO: 30264 - DNA, 15 bp, Homo sapiens
gctttttatgttgaa

SEQ ID NO: 30265 - DNA, 15 bp, Homo sapiens
tgctttttatgttga

SEQ ID NO: 30266 - DNA, 15 bp, Homo sapiens
ttgctttttatgttg

SEQ ID NO: 30267 - DNA, 15 bp, Homo sapiens
attgctttttatgtt

SEQ ID NO: 30268 - DNA, 15 bp, Homo sapiens
aattgctttttatgt

SEQ ID NO: 30269 - DNA, 15 bp, Homo sapiens
caattgctttttatg

SEQ ID NO: 30270 - DNA, 15 bp, Homo sapiens
tcaattgctttttat

SEQ ID NO: 30271 - DNA, 15 bp, Homo sapiens
ctcaattgcttttta

SEQ ID NO: 30272 - DNA, 15 bp, Homo sapiens
cctcaattgcttttt

SEQ ID NO: 30273 - DNA, 15 bp, Homo sapiens
gcctcaattgctttt

SEQ ID NO: 30274 - DNA, 15 bp, Homo sapiens
tgcctcaattgcttt

SEQ ID NO: 30275 - DNA, 15 bp, Homo sapiens
gtgcctcaattgctt

SEQ ID NO: 30276 - DNA, 15 bp, Homo sapiens
tgtgcctcaattgct

SEQ ID NO: 30277 - DNA, 15 bp, Homo sapiens
atgtgcctcaattgc

SEQ ID NO: 30278 - DNA, 15 bp, Homo sapiens
tatgtgcctcaattg

SEQ ID NO: 30279 - DNA, 15 bp, Homo sapiens
gtatgtgcctcaatt

SEQ ID NO: 30280 - DNA, 15 bp, Homo sapiens
tgtatgtgcctcaat

SEQ ID NO: 30281 - DNA, 15 bp, Homo sapiens
ttgtatgtgcctcaa

SEQ ID NO: 30282 - DNA, 15 bp, Homo sapiens
cttgtatgtgcctca

SEQ ID NO: 30283 - DNA, 15 bp, Homo sapiens
acttgtatgtgcctc

SEQ ID NO: 30284 - DNA, 15 bp, Homo sapiens
tacttgtatgtgcct

SEQ ID NO: 30285 - DNA, 15 bp, Homo sapiens
ttacttgtatgtgcc

SEQ ID NO: 30286 - DNA, 15 bp, Homo sapiens
tttacttgtatgtgc

SEQ ID NO: 30287 - DNA, 15 bp, Homo sapiens
ttttacttgtatgtg

SEQ ID NO: 30288 - DNA, 15 bp, Homo sapiens
attttacttgtatgt

SEQ ID NO: 30289 - DNA, 15 bp, Homo sapiens
cattttacttgtatg

SEQ ID NO: 30290 - DNA, 15 bp, Homo sapiens
acattttacttgtat

SEQ ID NO: 30291 - DNA, 15 bp, Homo sapiens
tacattttacttgta

SEQ ID NO: 30292 - DNA, 15 bp, Homo sapiens
ttacattttacttgt

SEQ ID NO: 30293 - DNA, 15 bp, Homo sapiens
gttacattttacttg

SEQ ID NO: 30294 - DNA, 15 bp, Homo sapiens
agttacattttactt

SEQ ID NO: 30295 - DNA, 15 bp, Homo sapiens
aagttacattttact

SEQ ID NO: 30296 - DNA, 15 bp, Homo sapiens
taagttacattttac

SEQ ID NO: 30297 - DNA, 15 bp, Homo sapiens
ttaagttacatttta

SEQ ID NO: 30298 - DNA, 15 bp, Homo sapiens
cttaagttacatttt

SEQ ID NO: 30299 - DNA, 15 bp, Homo sapiens
tcttaagttacattt

SEQ ID NO: 30300 - DNA, 15 bp, Homo sapiens
atcttaagttacatt

SEQ ID NO: 30301 - DNA, 15 bp, Homo sapiens
aatcttaagttacat

SEQ ID NO: 30302 - DNA, 15 bp, Homo sapiens
taatcttaagttaca

SEQ ID NO: 30303 - DNA, 15 bp, Homo sapiens
ttaatcttaagttac

SEQ ID NO: 30304 - DNA, 15 bp, Homo sapiens
attaatcttaagtta

SEQ ID NO: 30305 - DNA, 15 bp, Homo sapiens
aattaatcttaagtt

SEQ ID NO: 30306 - DNA, 15 bp, Homo sapiens
gaattaatcttaagt

SEQ ID NO: 30307 - DNA, 15 bp, Homo sapiens
agaattaatcttaag

SEQ ID NO: 30308 - DNA, 15 bp, Homo sapiens
aagaattaatcttaa

SEQ ID NO: 30309 - DNA, 15 bp, Homo sapiens
aaagaattaatctta

SEQ ID NO: 30310 - DNA, 15 bp, Homo sapiens
aaaagaattaatctt

SEQ ID NO: 30311 - DNA, 15 bp, Homo sapiens
aaaaagaattaatct

SEQ ID NO: 30312 - DNA, 15 bp, Homo sapiens
aaaaaagaattaatc

SEQ ID NO: 30313 - DNA, 15 bp, Homo sapiens
aaaaaaagaattaat

SEQ ID NO: 30314 - DNA, 15 bp, Homo sapiens
caaaaaaagaattaa

SEQ ID NO: 30315 - DNA, 15 bp, Homo sapiens
acaaaaaaagaatta

SEQ ID NO: 30316 - DNA, 15 bp, Homo sapiens
aacaaaaaaagaatt

SEQ ID NO: 30317 - DNA, 15 bp, Homo sapiens
caacaaaaaaagaat

SEQ ID NO: 30318 - DNA, 15 bp, Homo sapiens
acaacaaaaaaagaa

SEQ ID NO: 30319 - DNA, 15 bp, Homo sapiens
aacaacaaaaaaaga

SEQ ID NO: 30320 - DNA, 15 bp, Homo sapiens
aaacaacaaaaaaag

SEQ ID NO: 30321 - DNA, 15 bp, Homo sapiens
caaacaacaaaaaaa

SEQ ID NO: 30322 - DNA, 15 bp, Homo sapiens
acaaacaacaaaaaa

SEQ ID NO: 30323 - DNA, 15 bp, Homo sapiens
aacaaacaacaaaaa

SEQ ID NO: 30324 - DNA, 15 bp, Homo sapiens
aaacaaacaacaaaa

SEQ ID NO: 30325 - DNA, 15 bp, Homo sapiens
caaacaaacaacaaa

SEQ ID NO: 30326 - DNA, 15 bp, Homo sapiens
acaaacaaacaacaa

SEQ ID NO: 30327 - DNA, 15 bp, Homo sapiens
aacaaacaaacaaca

SEQ ID NO: 30328 - DNA, 15 bp, Homo sapiens
aaacaaacaaacaac

SEQ ID NO: 30329 - DNA, 15 bp, Homo sapiens
acaaacaaacaaaca

SEQ ID NO: 30330 - DNA, 15 bp, Homo sapiens
aacaaacaaacaaac

SEQ ID NO: 30331 - DNA, 15 bp, Homo sapiens
aaaacaaacaaacaa

SEQ ID NO: 30332 - DNA, 15 bp, Homo sapiens
aaaaacaaacaaaca

SEQ ID NO: 30333 - DNA, 15 bp, Homo sapiens
taaaaacaaacaaac

SEQ ID NO: 30334 - DNA, 15 bp, Homo sapiens
gtaaaaacaaacaaa

SEQ ID NO: 30335 - DNA, 15 bp, Homo sapiens
tgtaaaaacaaacaa

SEQ ID NO: 30336 - DNA, 15 bp, Homo sapiens
atgtaaaaacaaaca

SEQ ID NO: 30337 - DNA, 15 bp, Homo sapiens
aatgtaaaaacaaac

SEQ ID NO: 30338 - DNA, 15 bp, Homo sapiens
aaatgtaaaaacaaa

SEQ ID NO: 30339 - DNA, 15 bp, Homo sapiens
taaatgtaaaaacaa

SEQ ID NO: 30340 - DNA, 15 bp, Homo sapiens
ctaaatgtaaaaaca

SEQ ID NO: 30341 - DNA, 15 bp, Homo sapiens
cctaaatgtaaaaac

SEQ ID NO: 30342 - DNA, 15 bp, Homo sapiens
ccctaaatgtaaaaa

SEQ ID NO: 30343 - DNA, 15 bp, Homo sapiens
gccctaaatgtaaaa

SEQ ID NO: 30344 - DNA, 15 bp, Homo sapiens
tgccctaaatgtaaa

SEQ ID NO: 30345 - DNA, 15 bp, Homo sapiens
ttgccctaaatgtaa

SEQ ID NO: 30346 - DNA, 15 bp, Homo sapiens
cttgccctaaatgta

SEQ ID NO: 30347 - DNA, 15 bp, Homo sapiens
gcttgccctaaatgt

SEQ ID NO: 30348 - DNA, 15 bp, Homo sapiens
tgcttgccctaaatg

SEQ ID NO: 30349 - DNA, 15 bp, Homo sapiens
ctgcttgccctaaat

SEQ ID NO: 30350 - DNA, 15 bp, Homo sapiens
actgcttgccctaaa

SEQ ID NO: 30351 - DNA, 15 bp, Homo sapiens
gactgcttgccctaa

SEQ ID NO: 30352 - DNA, 15 bp, Homo sapiens
agactgcttgcccta

SEQ ID NO: 30353 - DNA, 15 bp, Homo sapiens
aagactgcttgccct

SEQ ID NO: 30354 - DNA, 15 bp, Homo sapiens
taagactgcttgccc

SEQ ID NO: 30355 - DNA, 15 bp, Homo sapiens
ttaagactgcttgcc

SEQ ID NO: 30356 - DNA, 15 bp, Homo sapiens
tttaagactgcttgc

SEQ ID NO: 30357 - DNA, 15 bp, Homo sapiens
atttaagactgcttg

SEQ ID NO: 30358 - DNA, 15 bp, Homo sapiens
aatttaagactgctt

SEQ ID NO: 30359 - DNA, 15 bp, Homo sapiens
aaatttaagactgct

SEQ ID NO: 30360 - DNA, 15 bp, Homo sapiens
aaaatttaagactgc

SEQ ID NO: 30361 - DNA, 15 bp, Homo sapiens
taaaatttaagactg

SEQ ID NO: 30362 - DNA, 15 bp, Homo sapiens
ttaaaatttaagact

SEQ ID NO: 30363 - DNA, 15 bp, Homo sapiens
gttaaaatttaagac

SEQ ID NO: 30364 - DNA, 15 bp, Homo sapiens
ggttaaaatttaaga

SEQ ID NO: 30365 - DNA, 15 bp, Homo sapiens
gggttaaaatttaag

SEQ ID NO: 30366 - DNA, 15 bp, Homo sapiens
tgggttaaaatttaa

SEQ ID NO: 30367 - DNA, 15 bp, Homo sapiens
gtgggttaaaattta

SEQ ID NO: 30368 - DNA, 15 bp, Homo sapiens
cgtgggttaaaattt

SEQ ID NO: 30369 - DNA, 15 bp, Homo sapiens
acgtgggttaaaatt

SEQ ID NO: 30370 - DNA, 15 bp, Homo sapiens
tacgtgggttaaaat

SEQ ID NO: 30371 - DNA, 15 bp, Homo sapiens
atacgtgggttaaaa

SEQ ID NO: 30372 - DNA, 15 bp, Homo sapiens
aatacgtgggttaaa

SEQ ID NO: 30373 - DNA, 15 bp, Homo sapiens
taatacgtgggttaa

SEQ ID NO: 30374 - DNA, 15 bp, Homo sapiens
ataatacgtgggtta

SEQ ID NO: 30375 - DNA, 15 bp, Homo sapiens
aataatacgtgggtt

SEQ ID NO: 30376 - DNA, 15 bp, Homo sapiens
taataatacgtgggt

SEQ ID NO: 30377 - DNA, 15 bp, Homo sapiens
ttaataatacgtggg

SEQ ID NO: 30378 - DNA, 15 bp, Homo sapiens
tttaataatacgtgg

SEQ ID NO: 30379 - DNA, 15 bp, Homo sapiens
ttttaataatacgtg

SEQ ID NO: 30380 - DNA, 15 bp, Homo sapiens
cttttaataatacgt

SEQ ID NO: 30381 - DNA, 15 bp, Homo sapiens
acttttaataatacg

SEQ ID NO: 30382 - DNA, 15 bp, Homo sapiens
aacttttaataatac

SEQ ID NO: 30383 - DNA, 15 bp, Homo sapiens
taacttttaataata

SEQ ID NO: 30384 - DNA, 15 bp, Homo sapiens
ataacttttaataat

SEQ ID NO: 30385 - DNA, 15 bp, Homo sapiens
tataacttttaataa

SEQ ID NO: 30386 - DNA, 15 bp, Homo sapiens
atataacttttaata

SEQ ID NO: 30387 - DNA, 15 bp, Homo sapiens
gatataacttttaat

SEQ ID NO: 30388 - DNA, 15 bp, Homo sapiens
tgatataacttttaa

SEQ ID NO: 30389 - DNA, 15 bp, Homo sapiens
ctgatataactttta

SEQ ID NO: 30390 - DNA, 15 bp, Homo sapiens
tctgatataactttt

SEQ ID NO: 30391 - DNA, 15 bp, Homo sapiens
ttctgatataacttt

SEQ ID NO: 30392 - DNA, 15 bp, Homo sapiens
cttctgatataactt

SEQ ID NO: 30393 - DNA, 15 bp, Homo sapiens
tcttctgatataact

SEQ ID NO: 30394 - DNA, 15 bp, Homo sapiens
gtcttctgatataac

SEQ ID NO: 30395 - DNA, 15 bp, Homo sapiens
ggtcttctgatataa

SEQ ID NO: 30396 - DNA, 15 bp, Homo sapiens
tggtcttctgatata

SEQ ID NO: 30397 - DNA, 15 bp, Homo sapiens
atggtcttctgatat

SEQ ID NO: 30398 - DNA, 15 bp, Homo sapiens
tatggtcttctgata

SEQ ID NO: 30399 - DNA, 15 bp, Homo sapiens
ctatggtcttctgat

SEQ ID NO: 30400 - DNA, 15 bp, Homo sapiens
tctatggtcttctga

SEQ ID NO: 30401 - DNA, 15 bp, Homo sapiens
ttctatggtcttctg

SEQ ID NO: 30402 - DNA, 15 bp, Homo sapiens
cttctatggtcttct

SEQ ID NO: 30403 - DNA, 15 bp, Homo sapiens
acttctatggtcttc

SEQ ID NO: 30404 - DNA, 15 bp, Homo sapiens
aacttctatggtctt

SEQ ID NO: 30405 - DNA, 15 bp, Homo sapiens
taacttctatggtct

SEQ ID NO: 30406 - DNA, 15 bp, Homo sapiens
ataacttctatggtc

SEQ ID NO: 30407 - DNA, 15 bp, Homo sapiens
aataacttctatggt

SEQ ID NO: 30408 - DNA, 15 bp, Homo sapiens
gaataacttctatgg

SEQ ID NO: 30409 - DNA, 15 bp, Homo sapiens
tgaataacttctatg

SEQ ID NO: 30410 - DNA, 15 bp, Homo sapiens
ttgaataacttctat

SEQ ID NO: 30411 - DNA, 15 bp, Homo sapiens
tttgaataacttcta

SEQ ID NO: 30412 - DNA, 15 bp, Homo sapiens
ttttgaataacttct

SEQ ID NO: 30413 - DNA, 15 bp, Homo sapiens
tttttgaataacttc

SEQ ID NO: 30414 - DNA, 15 bp, Homo sapiens
atttttgaataactt

SEQ ID NO: 30415 - DNA, 15 bp, Homo sapiens
catttttgaataact

SEQ ID NO: 30416 - DNA, 15 bp, Homo sapiens
gcatttttgaataac

SEQ ID NO: 30417 - DNA, 15 bp, Homo sapiens
tgcatttttgaataa

SEQ ID NO: 30418 - DNA, 15 bp, Homo sapiens
ctgcatttttgaata

SEQ ID NO: 30419 - DNA, 15 bp, Homo sapiens
gctgcatttttgaat

SEQ ID NO: 30420 - DNA, 15 bp, Homo sapiens
ggctgcatttttgaa

SEQ ID NO: 30421 - DNA, 15 bp, Homo sapiens
tggctgcatttttga

SEQ ID NO: 30422 - DNA, 15 bp, Homo sapiens
gtggctgcatttttg

SEQ ID NO: 30423 - DNA, 15 bp, Homo sapiens
tgtggctgcattttt

SEQ ID NO: 30424 - DNA, 15 bp, Homo sapiens
atgtggctgcatttt

SEQ ID NO: 30425 - DNA, 15 bp, Homo sapiens
tatgtggctgcattt

SEQ ID NO: 30426 - DNA, 15 bp, Homo sapiens
atatgtggctgcatt

SEQ ID NO: 30427 - DNA, 15 bp, Homo sapiens
aatatgtggctgcat

SEQ ID NO: 30428 - DNA, 15 bp, Homo sapiens
aaatatgtggctgca

SEQ ID NO: 30429 - DNA, 15 bp, Homo sapiens
aaaatatgtggctgc

SEQ ID NO: 30430 - DNA, 15 bp, Homo sapiens
taaaatatgtggctg

SEQ ID NO: 30431 - DNA, 15 bp, Homo sapiens
ttaaaatatgtggct

SEQ ID NO: 30432 - DNA, 15 bp, Homo sapiens
gttaaaatatgtggc

SEQ ID NO: 30433 - DNA, 15 bp, Homo sapiens
agttaaaatatgtgg

SEQ ID NO: 30434 - DNA, 15 bp, Homo sapiens
tagttaaaatatgtg

SEQ ID NO: 30435 - DNA, 15 bp, Homo sapiens
ctagttaaaatatgt

SEQ ID NO: 30436 - DNA, 15 bp, Homo sapiens
actagttaaaatatg

SEQ ID NO: 30437 - DNA, 15 bp, Homo sapiens
aactagttaaaatat

SEQ ID NO: 30438 - DNA, 15 bp, Homo sapiens
taactagttaaaata

SEQ ID NO: 30439 - DNA, 15 bp, Homo sapiens
ttaactagttaaaat

SEQ ID NO: 30440 - DNA, 15 bp, Homo sapiens
tttaactagttaaaa

SEQ ID NO: 30441 - DNA, 15 bp, Homo sapiens
ttttaactagttaaa

SEQ ID NO: 30442 - DNA, 15 bp, Homo sapiens
cttttaactagttaa

SEQ ID NO: 30443 - DNA, 15 bp, Homo sapiens
tcttttaactagtta

SEQ ID NO: 30444 - DNA, 15 bp, Homo sapiens
ctcttttaactagtt

SEQ ID NO: 30445 - DNA, 15 bp, Homo sapiens
tctcttttaactagt

SEQ ID NO: 30446 - DNA, 15 bp, Homo sapiens
ctctcttttaactag

SEQ ID NO: 30447 - DNA, 15 bp, Homo sapiens
tctctcttttaacta

SEQ ID NO: 30448 - DNA, 15 bp, Homo sapiens
ctctctcttttaact

SEQ ID NO: 30449 - DNA, 15 bp, Homo sapiens
actctctcttttaac

SEQ ID NO: 30450 - DNA, 15 bp, Homo sapiens
tactctctcttttaa

SEQ ID NO: 30451 - DNA, 15 bp, Homo sapiens
ttactctctctttta

SEQ ID NO: 30452 - DNA, 15 bp, Homo sapiens
tttactctctctttt

SEQ ID NO: 30453 - DNA, 15 bp, Homo sapiens
ttttactctctcttt

SEQ ID NO: 30454 - DNA, 15 bp, Homo sapiens
tttttactctctctt

SEQ ID NO: 30455 - DNA, 15 bp, Homo sapiens
atttttactctctct

SEQ ID NO: 30456 - DNA, 15 bp, Homo sapiens
aatttttactctctc

SEQ ID NO: 30457 - DNA, 15 bp, Homo sapiens
aaatttttactctct

SEQ ID NO: 30458 - DNA, 15 bp, Homo sapiens
caaatttttactctc

SEQ ID NO: 30459 - DNA, 15 bp, Homo sapiens
ccaaatttttactct

SEQ ID NO: 30460 - DNA, 15 bp, Homo sapiens
tccaaatttttactc

SEQ ID NO: 30461 - DNA, 15 bp, Homo sapiens
ctccaaatttttact

SEQ ID NO: 30462 - DNA, 15 bp, Homo sapiens
cctccaaatttttac

SEQ ID NO: 30463 - DNA, 15 bp, Homo sapiens
ccctccaaattttta

SEQ ID NO: 30464 - DNA, 15 bp, Homo sapiens
tccctccaaattttt

SEQ ID NO: 30465 - DNA, 15 bp, Homo sapiens
ctccctccaaatttt

SEQ ID NO: 30466 - DNA, 15 bp, Homo sapiens
cctccctccaaattt

SEQ ID NO: 30467 - DNA, 15 bp, Homo sapiens
acctccctccaaatt

SEQ ID NO: 30468 - DNA, 15 bp, Homo sapiens
cacctccctccaaat

SEQ ID NO: 30469 - DNA, 15 bp, Homo sapiens
ccacctccctccaaa

SEQ ID NO: 30470 - DNA, 15 bp, Homo sapiens
tccacctccctccaa

SEQ ID NO: 30471 - DNA, 15 bp, Homo sapiens
ctccacctccctcca

SEQ ID NO: 30472 - DNA, 15 bp, Homo sapiens
cctccacctccctcc

SEQ ID NO: 30473 - DNA, 15 bp, Homo sapiens
tcctccacctccctc

SEQ ID NO: 30474 - DNA, 15 bp, Homo sapiens
ctcctccacctccct

SEQ ID NO: 30475 - DNA, 15 bp, Homo sapiens
actcctccacctccc

SEQ ID NO: 30476 - DNA, 15 bp, Homo sapiens
tactcctccacctcc

SEQ ID NO: 30477 - DNA, 15 bp, Homo sapiens
atactcctccacctc

SEQ ID NO: 30478 - DNA, 15 bp, Homo sapiens
tatactcctccacct

SEQ ID NO: 30479 - DNA, 15 bp, Homo sapiens
ctatactcctccacc

SEQ ID NO: 30480 - DNA, 15 bp, Homo sapiens
cctatactcctccac

SEQ ID NO: 30481 - DNA, 15 bp, Homo sapiens
ccctatactcctcca

SEQ ID NO: 30482 - DNA, 15 bp, Homo sapiens
cccctatactcctcc

SEQ ID NO: 30483 - DNA, 15 bp, Homo sapiens
tcccctatactcctc

SEQ ID NO: 30484 - DNA, 15 bp, Homo sapiens
ttcccctatactcct

SEQ ID NO: 30485 - DNA, 15 bp, Homo sapiens
tttcccctatactcc

SEQ ID NO: 30486 - DNA, 15 bp, Homo sapiens
ttttcccctatactc

SEQ ID NO: 30487 - DNA, 15 bp, Homo sapiens
cttttcccctatact

SEQ ID NO: 30488 - DNA, 15 bp, Homo sapiens
ccttttcccctatac

SEQ ID NO: 30489 - DNA, 15 bp, Homo sapiens
accttttcccctata

SEQ ID NO: 30490 - DNA, 15 bp, Homo sapiens
taccttttcccctat

SEQ ID NO: 30491 - DNA, 15 bp, Homo sapiens
ctaccttttccccta

SEQ ID NO: 30492 - DNA, 15 bp, Homo sapiens
tctaccttttcccct

SEQ ID NO: 30493 - DNA, 15 bp, Homo sapiens
ttctaccttttcccc

SEQ ID NO: 30494 - DNA, 15 bp, Homo sapiens
cttctaccttttccc

SEQ ID NO: 30495 - DNA, 15 bp, Homo sapiens
tcttctaccttttcc

SEQ ID NO: 30496 - DNA, 15 bp, Homo sapiens
ttcttctaccttttc

SEQ ID NO: 30497 - DNA, 15 bp, Homo sapiens
tttcttctacctttt

SEQ ID NO: 30498 - DNA, 15 bp, Homo sapiens
ttttcttctaccttt

SEQ ID NO: 30499 - DNA, 15 bp, Homo sapiens
tttttcttctacctt

SEQ ID NO: 30500 - DNA, 15 bp, Homo sapiens
ctttttcttctacct

SEQ ID NO: 30501 - DNA, 15 bp, Homo sapiens
tctttttcttctacc

SEQ ID NO: 30502 - DNA, 15 bp, Homo sapiens
ctctttttcttctac

SEQ ID NO: 30503 - DNA, 15 bp, Homo sapiens
tctctttttcttcta

SEQ ID NO: 30504 - DNA, 15 bp, Homo sapiens
ttctctttttcttct

SEQ ID NO: 30505 - DNA, 15 bp, Homo sapiens
tttctctttttcttc

SEQ ID NO: 30506 - DNA, 15 bp, Homo sapiens
ttttctctttttctt

SEQ ID NO: 30507 - DNA, 15 bp, Homo sapiens
attttctctttttct

SEQ ID NO: 30508 - DNA, 15 bp, Homo sapiens
tattttctctttttc

SEQ ID NO: 30509 - DNA, 15 bp, Homo sapiens
ttattttctcttttt

SEQ ID NO: 30510 - DNA, 15 bp, Homo sapiens
cttattttctctttt

SEQ ID NO: 30511 - DNA, 15 bp, Homo sapiens
acttattttctcttt

SEQ ID NO: 30512 - DNA, 15 bp, Homo sapiens
tacttattttctctt

SEQ ID NO: 30513 - DNA, 15 bp, Homo sapiens
ttacttattttctct

SEQ ID NO: 30514 - DNA, 15 bp, Homo sapiens
cttacttattttctc

SEQ ID NO: 30515 - DNA, 15 bp, Homo sapiens
acttacttattttct

SEQ ID NO: 30516 - DNA, 15 bp, Homo sapiens
cacttacttattttc

SEQ ID NO: 30517 - DNA, 15 bp, Homo sapiens
ccacttacttatttt

SEQ ID NO: 30518 - DNA, 15 bp, Homo sapiens
gccacttacttattt

SEQ ID NO: 30519 - DNA, 15 bp, Homo sapiens
tgccacttacttatt

SEQ ID NO: 30520 - DNA, 15 bp, Homo sapiens
ttgccacttacttat

SEQ ID NO: 30521 - DNA, 15 bp, Homo sapiens
tttgccacttactta

SEQ ID NO: 30522 - DNA, 15 bp, Homo sapiens
ttttgccacttactt

SEQ ID NO: 30523 - DNA, 15 bp, Homo sapiens
tttttgccacttact

SEQ ID NO: 30524 - DNA, 15 bp, Homo sapiens
ttttttgccacttac

SEQ ID NO: 30525 - DNA, 15 bp, Homo sapiens
cttttttgccactta

SEQ ID NO: 30526 - DNA, 15 bp, Homo sapiens
tcttttttgccactt

SEQ ID NO: 30527 - DNA, 15 bp, Homo sapiens
ctcttttttgccact

SEQ ID NO: 30528 - DNA, 15 bp, Homo sapiens
tctcttttttgccac

SEQ ID NO: 30529 - DNA, 15 bp, Homo sapiens
ttctcttttttgcca

SEQ ID NO: 30530 - DNA, 15 bp, Homo sapiens
tttctcttttttgcc

SEQ ID NO: 30531 - DNA, 15 bp, Homo sapiens
ctttctcttttttgc

SEQ ID NO: 30532 - DNA, 15 bp, Homo sapiens
cctttctcttttttg

SEQ ID NO: 30533 - DNA, 15 bp, Homo sapiens
tcctttctctttttt

SEQ ID NO: 30534 - DNA, 15 bp, Homo sapiens
ttcctttctcttttt

SEQ ID NO: 30535 - DNA, 15 bp, Homo sapiens
tttcctttctctttt

SEQ ID NO: 30536 - DNA, 15 bp, Homo sapiens
ttttcctttctcttt

SEQ ID NO: 30537 - DNA, 15 bp, Homo sapiens
tttttcctttctctt

SEQ ID NO: 30538 - DNA, 15 bp, Homo sapiens
ctttttcctttctct

SEQ ID NO: 30539 - DNA, 15 bp, Homo sapiens
tctttttcctttctc

SEQ ID NO: 30540 - DNA, 15 bp, Homo sapiens
atctttttcctttct

SEQ ID NO: 30541 - DNA, 15 bp, Homo sapiens
tatctttttcctttc

SEQ ID NO: 30542 - DNA, 15 bp, Homo sapiens
ctatctttttccttt

SEQ ID NO: 30543 - DNA, 15 bp, Homo sapiens
cctatctttttcctt

SEQ ID NO: 30544 - DNA, 15 bp, Homo sapiens
ccctatctttttcct

SEQ ID NO: 30545 - DNA, 15 bp, Homo sapiens
accctatctttttcc

SEQ ID NO: 30546 - DNA, 15 bp, Homo sapiens
caccctatctttttc

SEQ ID NO: 30547 - DNA, 15 bp, Homo sapiens
ccaccctatcttttt

SEQ ID NO: 30548 - DNA, 15 bp, Homo sapiens
cccaccctatctttt

SEQ ID NO: 30549 - DNA, 15 bp, Homo sapiens
tcccaccctatcttt

SEQ ID NO: 30550 - DNA, 15 bp, Homo sapiens
ttcccaccctatctt

SEQ ID NO: 30551 - DNA, 15 bp, Homo sapiens
tttcccaccctatct

SEQ ID NO: 30552 - DNA, 15 bp, Homo sapiens
ctttcccaccctatc

SEQ ID NO: 30553 - DNA, 15 bp, Homo sapiens
tctttcccaccctat

SEQ ID NO: 30554 - DNA, 15 bp, Homo sapiens
ctctttcccacccta

SEQ ID NO: 30555 - DNA, 15 bp, Homo sapiens
cctctttcccaccct

SEQ ID NO: 30556 - DNA, 15 bp, Homo sapiens
gcctctttcccaccc

SEQ ID NO: 30557 - DNA, 15 bp, Homo sapiens
tgcctctttcccacc

SEQ ID NO: 30558 - DNA, 15 bp, Homo sapiens
ctgcctctttcccac

SEQ ID NO: 30559 - DNA, 15 bp, Homo sapiens
gctgcctctttccca

SEQ ID NO: 30560 - DNA, 15 bp, Homo sapiens
cgctgcctctttccc

SEQ ID NO: 30561 - DNA, 15 bp, Homo sapiens
ccgctgcctctttcc

SEQ ID NO: 30562 - DNA, 15 bp, Homo sapiens
cccgctgcctctttc

SEQ ID NO: 30563 - DNA, 15 bp, Homo sapiens
tcccgctgcctcttt

SEQ ID NO: 30564 - DNA, 15 bp, Homo sapiens
gtcccgctgcctctt

SEQ ID NO: 30565 - DNA, 15 bp, Homo sapiens
tgtcccgctgcctct

SEQ ID NO: 30566 - DNA, 15 bp, Homo sapiens
ctgtcccgctgcctc

SEQ ID NO: 30567 - DNA, 15 bp, Homo sapiens
actgtcccgctgcct

SEQ ID NO: 30568 - DNA, 15 bp, Homo sapiens
cactgtcccgctgcc

SEQ ID NO: 30569 - DNA, 15 bp, Homo sapiens
acactgtcccgctgc

SEQ ID NO: 30570 - DNA, 15 bp, Homo sapiens
gacactgtcccgctg

SEQ ID NO: 30571 - DNA, 15 bp, Homo sapiens
agacactgtcccgct

SEQ ID NO: 30572 - DNA, 15 bp, Homo sapiens
cagacactgtcccgc

SEQ ID NO: 30573 - DNA, 15 bp, Homo sapiens
tcagacactgtcccg

SEQ ID NO: 30574 - DNA, 15 bp, Homo sapiens
ctcagacactgtccc

SEQ ID NO: 30575 - DNA, 15 bp, Homo sapiens
actcagacactgtcc

SEQ ID NO: 30576 - DNA, 15 bp, Homo sapiens
gactcagacactgtc

SEQ ID NO: 30577 - DNA, 15 bp, Homo sapiens
ggactcagacactgt

SEQ ID NO: 30578 - DNA, 15 bp, Homo sapiens
tggactcagacactg

SEQ ID NO: 30579 - DNA, 15 bp, Homo sapiens
ctggactcagacact

SEQ ID NO: 30580 - DNA, 15 bp, Homo sapiens
gctggactcagacac

SEQ ID NO: 30581 - DNA, 15 bp, Homo sapiens
tgctggactcagaca

SEQ ID NO: 30582 - DNA, 15 bp, Homo sapiens
gtgctggactcagac

SEQ ID NO: 30583 - DNA, 15 bp, Homo sapiens
tgtgctggactcaga

SEQ ID NO: 30584 - DNA, 15 bp, Homo sapiens
gtgtgctggactcag

SEQ ID NO: 30585 - DNA, 15 bp, Homo sapiens
cgtgtgctggactca

SEQ ID NO: 30586 - DNA, 15 bp, Homo sapiens
gcgtgtgctggactc

SEQ ID NO: 30587 - DNA, 15 bp, Homo sapiens
ggcgtgtgctggact

SEQ ID NO: 30588 - DNA, 15 bp, Homo sapiens
tggcgtgtgctggac

SEQ ID NO: 30589 - DNA, 15 bp, Homo sapiens
ctggcgtgtgctgga

SEQ ID NO: 30590 - DNA, 15 bp, Homo sapiens
cctggcgtgtgctgg

SEQ ID NO: 30591 - DNA, 15 bp, Homo sapiens
ccctggcgtgtgctg

SEQ ID NO: 30592 - DNA, 15 bp, Homo sapiens
gccctggcgtgtgct

SEQ ID NO: 30593 - DNA, 15 bp, Homo sapiens
cgccctggcgtgtgc

SEQ ID NO: 30594 - DNA, 15 bp, Homo sapiens
tcgccctggcgtgtg

SEQ ID NO: 30595 - DNA, 15 bp, Homo sapiens
ctcgccctggcgtgt

SEQ ID NO: 30596 - DNA, 15 bp, Homo sapiens
gctcgccctggcgtg

SEQ ID NO: 30597 - DNA, 15 bp, Homo sapiens
ggctcgccctggcgt

SEQ ID NO: 30598 - DNA, 15 bp, Homo sapiens
tggctcgccctggcg

SEQ ID NO: 30599 - DNA, 15 bp, Homo sapiens
ctggctcgccctggc

SEQ ID NO: 30600 - DNA, 15 bp, Homo sapiens
cctggctcgccctgg

SEQ ID NO: 30601 - DNA, 15 bp, Homo sapiens
acctggctcgccctg

SEQ ID NO: 30602 - DNA, 15 bp, Homo sapiens
gacctggctcgccct

SEQ ID NO: 30603 - DNA, 15 bp, Homo sapiens
tgacctggctcgccc

SEQ ID NO: 30604 - DNA, 15 bp, Homo sapiens
ttgacctggctcgcc

SEQ ID NO: 30605 - DNA, 15 bp, Homo sapiens
gttgacctggctcgc

SEQ ID NO: 30606 - DNA, 15 bp, Homo sapiens
agttgacctggctcg

SEQ ID NO: 30607 - DNA, 15 bp, Homo sapiens
cagttgacctggctc

SEQ ID NO: 30608 - DNA, 15 bp, Homo sapiens
gcagttgacctggct

SEQ ID NO: 30609 - DNA, 15 bp, Homo sapiens
tgcagttgacctggc

SEQ ID NO: 30610 - DNA, 15 bp, Homo sapiens
ctgcagttgacctgg

SEQ ID NO: 30611 - DNA, 15 bp, Homo sapiens
gctgcagttgacctg

SEQ ID NO: 30612 - DNA, 15 bp, Homo sapiens
agctgcagttgacct

SEQ ID NO: 30613 - DNA, 15 bp, Homo sapiens
cagctgcagttgacc

SEQ ID NO: 30614 - DNA, 15 bp, Homo sapiens
acagctgcagttgac

SEQ ID NO: 30615 - DNA, 15 bp, Homo sapiens
gacagctgcagttga

SEQ ID NO: 30616 - DNA, 15 bp, Homo sapiens
tgacagctgcagttg

SEQ ID NO: 30617 - DNA, 15 bp, Homo sapiens
atgacagctgcagtt

SEQ ID NO: 30618 - DNA, 15 bp, Homo sapiens
tatgacagctgcagt

SEQ ID NO: 30619 - DNA, 15 bp, Homo sapiens
atatgacagctgcag

SEQ ID NO: 30620 - DNA, 15 bp, Homo sapiens
aatatgacagctgca

SEQ ID NO: 30621 - DNA, 15 bp, Homo sapiens
gaatatgacagctgc

SEQ ID NO: 30622 - DNA, 15 bp, Homo sapiens
agaatatgacagctg

SEQ ID NO: 30623 - DNA, 15 bp, Homo sapiens
tagaatatgacagct

SEQ ID NO: 30624 - DNA, 15 bp, Homo sapiens
ttagaatatgacagc

SEQ ID NO: 30625 - DNA, 15 bp, Homo sapiens
gttagaatatgacag

SEQ ID NO: 30626 - DNA, 15 bp, Homo sapiens
agttagaatatgaca

SEQ ID NO: 30627 - DNA, 15 bp, Homo sapiens
cagttagaatatgac

SEQ ID NO: 30628 - DNA, 15 bp, Homo sapiens
acagttagaatatga

SEQ ID NO: 30629 - DNA, 15 bp, Homo sapiens
cacagttagaatatg

SEQ ID NO: 30630 - DNA, 15 bp, Homo sapiens
tcacagttagaatat

SEQ ID NO: 30631 - DNA, 15 bp, Homo sapiens
ttcacagttagaata

SEQ ID NO: 30632 - DNA, 15 bp, Homo sapiens
attcacagttagaat

SEQ ID NO: 30633 - DNA, 15 bp, Homo sapiens
aattcacagttagaa

SEQ ID NO: 30634 - DNA, 15 bp, Homo sapiens
taattcacagttaga

SEQ ID NO: 30635 - DNA, 15 bp, Homo sapiens
ataattcacagttag

SEQ ID NO: 30636 - DNA, 15 bp, Homo sapiens
gataattcacagtta

SEQ ID NO: 30637 - DNA, 15 bp, Homo sapiens
tgataattcacagtt

SEQ ID NO: 30638 - DNA, 15 bp, Homo sapiens
atgataattcacagt

SEQ ID NO: 30639 - DNA, 15 bp, Homo sapiens
gatgataattcacag

SEQ ID NO: 30640 - DNA, 15 bp, Homo sapiens
agatgataattcaca

SEQ ID NO: 30641 - DNA, 15 bp, Homo sapiens
aagatgataattcac

SEQ ID NO: 30642 - DNA, 15 bp, Homo sapiens
aaagatgataattca

SEQ ID NO: 30643 - DNA, 15 bp, Homo sapiens
caaagatgataattc

SEQ ID NO: 30644 - DNA, 15 bp, Homo sapiens
tcaaagatgataatt

SEQ ID NO: 30645 - DNA, 15 bp, Homo sapiens
atcaaagatgataat

SEQ ID NO: 30646 - DNA, 15 bp, Homo sapiens
gatcaaagatgataa

SEQ ID NO: 30647 - DNA, 15 bp, Homo sapiens
tgatcaaagatgata

SEQ ID NO: 30648 - DNA, 15 bp, Homo sapiens
gtgatcaaagatgat

SEQ ID NO: 30649 - DNA, 15 bp, Homo sapiens
agtgatcaaagatga

SEQ ID NO: 30650 - DNA, 15 bp, Homo sapiens
cagtgatcaaagatg

SEQ ID NO: 30651 - DNA, 15 bp, Homo sapiens
gcagtgatcaaagat

SEQ ID NO: 30652 - DNA, 15 bp, Homo sapiens
ggcagtgatcaaaga

SEQ ID NO: 30653 - DNA, 15 bp, Homo sapiens
gggcagtgatcaaag

SEQ ID NO: 30654 - DNA, 15 bp, Homo sapiens
agggcagtgatcaaa

SEQ ID NO: 30655 - DNA, 15 bp, Homo sapiens
aagggcagtgatcaa

SEQ ID NO: 30656 - DNA, 15 bp, Homo sapiens
aaagggcagtgatca

SEQ ID NO: 30657 - DNA, 15 bp, Homo sapiens
caaagggcagtgatc

SEQ ID NO: 30658 - DNA, 15 bp, Homo sapiens
tcaaagggcagtgat

SEQ ID NO: 30659 - DNA, 15 bp, Homo sapiens
ctcaaagggcagtga

SEQ ID NO: 30660 - DNA, 15 bp, Homo sapiens
tctcaaagggcagtg

SEQ ID NO: 30661 - DNA, 15 bp, Homo sapiens
atctcaaagggcagt

SEQ ID NO: 30662 - DNA, 15 bp, Homo sapiens
catctcaaagggcag

SEQ ID NO: 30663 - DNA, 15 bp, Homo sapiens
gcatctcaaagggca

SEQ ID NO: 30664 - DNA, 15 bp, Homo sapiens
ggcatctcaaagggc

SEQ ID NO: 30665 - DNA, 15 bp, Homo sapiens
tggcatctcaaaggg

SEQ ID NO: 30666 - DNA, 15 bp, Homo sapiens
ttggcatctcaaagg

SEQ ID NO: 30667 - DNA, 15 bp, Homo sapiens
attggcatctcaaag

SEQ ID NO: 30668 - DNA, 15 bp, Homo sapiens
cattggcatctcaaa

SEQ ID NO: 30669 - DNA, 15 bp, Homo sapiens
tcattggcatctcaa

SEQ ID NO: 30670 - DNA, 15 bp, Homo sapiens
ttcattggcatctca

SEQ ID NO: 30671 - DNA, 15 bp, Homo sapiens
gttcattggcatctc

SEQ ID NO: 30672 - DNA, 15 bp, Homo sapiens
agttcattggcatct

SEQ ID NO: 30673 - DNA, 15 bp, Homo sapiens
aagttcattggcatc

SEQ ID NO: 30674 - DNA, 15 bp, Homo sapiens
aaagttcattggcat

SEQ ID NO: 30675 - DNA, 15 bp, Homo sapiens
aaaagttcattggca

SEQ ID NO: 30676 - DNA, 15 bp, Homo sapiens
gaaaagttcattggc

SEQ ID NO: 30677 - DNA, 15 bp, Homo sapiens
tgaaaagttcattgg

SEQ ID NO: 30678 - DNA, 15 bp, Homo sapiens
ttgaaaagttcattg

SEQ ID NO: 30679 - DNA, 15 bp, Homo sapiens
cttgaaaagttcatt

SEQ ID NO: 30680 - DNA, 15 bp, Homo sapiens
tcttgaaaagttcat

SEQ ID NO: 30681 - DNA, 15 bp, Homo sapiens
ttcttgaaaagttca

SEQ ID NO: 30682 - DNA, 15 bp, Homo sapiens
tttcttgaaaagttc

SEQ ID NO: 30683 - DNA, 15 bp, Homo sapiens
atttcttgaaaagtt

SEQ ID NO: 30684 - DNA, 15 bp, Homo sapiens
tatttcttgaaaagt

SEQ ID NO: 30685 - DNA, 15 bp, Homo sapiens
atatttcttgaaaag

SEQ ID NO: 30686 - DNA, 15 bp, Homo sapiens
gatatttcttgaaaa

SEQ ID NO: 30687 - DNA, 15 bp, Homo sapiens
agatatttcttgaaa

SEQ ID NO: 30688 - DNA, 15 bp, Homo sapiens
tagatatttcttgaa

SEQ ID NO: 30689 - DNA, 15 bp, Homo sapiens
ctagatatttcttga

SEQ ID NO: 30690 - DNA, 15 bp, Homo sapiens
actagatatttcttg

SEQ ID NO: 30691 - DNA, 15 bp, Homo sapiens
aactagatatttctt

SEQ ID NO: 30692 - DNA, 15 bp, Homo sapiens
gaactagatatttct

SEQ ID NO: 30693 - DNA, 15 bp, Homo sapiens
agaactagatatttc

SEQ ID NO: 30694 - DNA, 15 bp, Homo sapiens
gagaactagatattt

SEQ ID NO: 30695 - DNA, 15 bp, Homo sapiens
agagaactagatatt

SEQ ID NO: 30696 - DNA, 15 bp, Homo sapiens
aagagaactagatat

SEQ ID NO: 30697 - DNA, 15 bp, Homo sapiens
caagagaactagata

SEQ ID NO: 30698 - DNA, 15 bp, Homo sapiens
ccaagagaactagat

SEQ ID NO: 30699 - DNA, 15 bp, Homo sapiens
gccaagagaactaga

SEQ ID NO: 30700 - DNA, 15 bp, Homo sapiens
agccaagagaactag

SEQ ID NO: 30701 - DNA, 15 bp, Homo sapiens
gagccaagagaacta

SEQ ID NO: 30702 - DNA, 15 bp, Homo sapiens
agagccaagagaact

SEQ ID NO: 30703 - DNA, 15 bp, Homo sapiens
gagagccaagagaac

SEQ ID NO: 30704 - DNA, 15 bp, Homo sapiens
ggagagccaagagaa

SEQ ID NO: 30705 - DNA, 15 bp, Homo sapiens
tggagagccaagaga

SEQ ID NO: 30706 - DNA, 15 bp, Homo sapiens
ctggagagccaagag

SEQ ID NO: 30707 - DNA, 15 bp, Homo sapiens
gctggagagccaaga

SEQ ID NO: 30708 - DNA, 15 bp, Homo sapiens
agctggagagccaag

SEQ ID NO: 30709 - DNA, 15 bp, Homo sapiens
cagctggagagccaa

SEQ ID NO: 30710 - DNA, 15 bp, Homo sapiens
acagctggagagcca

SEQ ID NO: 30711 - DNA, 15 bp, Homo sapiens
aacagctggagagcc

SEQ ID NO: 30712 - DNA, 15 bp, Homo sapiens
gaacagctggagagc

SEQ ID NO: 30713 - DNA, 15 bp, Homo sapiens
agaacagctggagag

SEQ ID NO: 30714 - DNA, 15 bp, Homo sapiens
aagaacagctggaga

SEQ ID NO: 30715 - DNA, 15 bp, Homo sapiens
taagaacagctggag

SEQ ID NO: 30716 - DNA, 15 bp, Homo sapiens
ataagaacagctgga

SEQ ID NO: 30717 - DNA, 15 bp, Homo sapiens
gataagaacagctgg

SEQ ID NO: 30718 - DNA, 15 bp, Homo sapiens
tgataagaacagctg

SEQ ID NO: 30719 - DNA, 15 bp, Homo sapiens
ctgataagaacagct

SEQ ID NO: 30720 - DNA, 15 bp, Homo sapiens
gctgataagaacagc

SEQ ID NO: 30721 - DNA, 15 bp, Homo sapiens
ggctgataagaacag

SEQ ID NO: 30722 - DNA, 15 bp, Homo sapiens
gggctgataagaaca

SEQ ID NO: 30723 - DNA, 15 bp, Homo sapiens
ggggctgataagaac

SEQ ID NO: 30724 - DNA, 15 bp, Homo sapiens
tggggctgataagaa

SEQ ID NO: 30725 - DNA, 15 bp, Homo sapiens
atggggctgataaga

SEQ ID NO: 30726 - DNA, 15 bp, Homo sapiens
gatggggctgataag

SEQ ID NO: 30727 - DNA, 15 bp, Homo sapiens
ggatggggctgataa

SEQ ID NO: 30728 - DNA, 15 bp, Homo sapiens
tggatggggctgata

SEQ ID NO: 30729 - DNA, 15 bp, Homo sapiens
ctggatggggctgat

SEQ ID NO: 30730 - DNA, 15 bp, Homo sapiens
cctggatggggctga

SEQ ID NO: 30731 - DNA, 15 bp, Homo sapiens
tcctggatggggctg

SEQ ID NO: 30732 - DNA, 15 bp, Homo sapiens
atcctggatggggct

SEQ ID NO: 30733 - DNA, 15 bp, Homo sapiens
catcctggatggggc

SEQ ID NO: 30734 - DNA, 15 bp, Homo sapiens
ccatcctggatgggg

SEQ ID NO: 30735 - DNA, 15 bp, Homo sapiens
tccatcctggatggg

SEQ ID NO: 30736 - DNA, 15 bp, Homo sapiens
ttccatcctggatgg

SEQ ID NO: 30737 - DNA, 15 bp, Homo sapiens
gttccatcctggatg

SEQ ID NO: 30738 - DNA, 15 bp, Homo sapiens
tgttccatcctggat

SEQ ID NO: 30739 - DNA, 15 bp, Homo sapiens
ctgttccatcctgga

SEQ ID NO: 30740 - DNA, 15 bp, Homo sapiens
gctgttccatcctgg

SEQ ID NO: 30741 - DNA, 15 bp, Homo sapiens
agctgttccatcctg

SEQ ID NO: 30742 - DNA, 15 bp, Homo sapiens
aagctgttccatcct

SEQ ID NO: 30743 - DNA, 15 bp, Homo sapiens
aaagctgttccatcc

SEQ ID NO: 30744 - DNA, 15 bp, Homo sapiens
caaagctgttccatc

SEQ ID NO: 30745 - DNA, 15 bp, Homo sapiens
ccaaagctgttccat

SEQ ID NO: 30746 - DNA, 15 bp, Homo sapiens
gccaaagctgttcca

SEQ ID NO: 30747 - DNA, 15 bp, Homo sapiens
tgccaaagctgttcc

SEQ ID NO: 30748 - DNA, 15 bp, Homo sapiens
ctgccaaagctgttc

SEQ ID NO: 30749 - DNA, 15 bp, Homo sapiens
gctgccaaagctgtt

SEQ ID NO: 30750 - DNA, 15 bp, Homo sapiens
ggctgccaaagctgt

SEQ ID NO: 30751 - DNA, 15 bp, Homo sapiens
gggctgccaaagctg

SEQ ID NO: 30752 - DNA, 15 bp, Homo sapiens
cgggctgccaaagct

SEQ ID NO: 30753 - DNA, 15 bp, Homo sapiens
acgggctgccaaagc

SEQ ID NO: 30754 - DNA, 15 bp, Homo sapiens
tacgggctgccaaag

SEQ ID NO: 30755 - DNA, 15 bp, Homo sapiens
atacgggctgccaaa

SEQ ID NO: 30756 - DNA, 15 bp, Homo sapiens
gatacgggctgccaa

SEQ ID NO: 30757 - DNA, 15 bp, Homo sapiens
tgatacgggctgcca

SEQ ID NO: 30758 - DNA, 15 bp, Homo sapiens
ctgatacgggctgcc

SEQ ID NO: 30759 - DNA, 15 bp, Homo sapiens
tctgatacgggctgc

SEQ ID NO: 30760 - DNA, 15 bp, Homo sapiens
ttctgatacgggctg

SEQ ID NO: 30761 - DNA, 15 bp, Homo sapiens
gttctgatacgggct

SEQ ID NO: 30762 - DNA, 15 bp, Homo sapiens
tgttctgatacgggc

SEQ ID NO: 30763 - DNA, 15 bp, Homo sapiens
ttgttctgatacggg

SEQ ID NO: 30764 - DNA, 15 bp, Homo sapiens
cttgttctgatacgg

SEQ ID NO: 30765 - DNA, 15 bp, Homo sapiens
gcttgttctgatacg

SEQ ID NO: 30766 - DNA, 15 bp, Homo sapiens
tgcttgttctgatac

SEQ ID NO: 30767 - DNA, 15 bp, Homo sapiens
ctgcttgttctgata

SEQ ID NO: 30768 - DNA, 15 bp, Homo sapiens
gctgcttgttctgat

SEQ ID NO: 30769 - DNA, 15 bp, Homo sapiens
agctgcttgttctga

SEQ ID NO: 30770 - DNA, 15 bp, Homo sapiens
aagctgcttgttctg

SEQ ID NO: 30771 - DNA, 15 bp, Homo sapiens
caagctgcttgttct

SEQ ID NO: 30772 - DNA, 15 bp, Homo sapiens
tcaagctgcttgttc

SEQ ID NO: 30773 - DNA, 15 bp, Homo sapiens
gtcaagctgcttgtt

SEQ ID NO: 30774 - DNA, 15 bp, Homo sapiens
tgtcaagctgcttgt

SEQ ID NO: 30775 - DNA, 15 bp, Homo sapiens
ctgtcaagctgcttg

SEQ ID NO: 30776 - DNA, 15 bp, Homo sapiens
cctgtcaagctgctt

SEQ ID NO: 30777 - DNA, 15 bp, Homo sapiens
ccctgtcaagctgct

SEQ ID NO: 30778 - DNA, 15 bp, Homo sapiens
cccctgtcaagctgc

SEQ ID NO: 30779 - DNA, 15 bp, Homo sapiens
gcccctgtcaagctg

SEQ ID NO: 30780 - DNA, 15 bp, Homo sapiens
tgcccctgtcaagct

SEQ ID NO: 30781 - DNA, 15 bp, Homo sapiens
atgcccctgtcaagc

SEQ ID NO: 30782 - DNA, 15 bp, Homo sapiens
catgcccctgtcaag

SEQ ID NO: 30783 - DNA, 15 bp, Homo sapiens
gcatgcccctgtcaa

SEQ ID NO: 30784 - DNA, 15 bp, Homo sapiens
ggcatgcccctgtca

SEQ ID NO: 30785 - DNA, 15 bp, Homo sapiens
tggcatgcccctgtc

SEQ ID NO: 30786 - DNA, 15 bp, Homo sapiens
atggcatgcccctgt

SEQ ID NO: 30787 - DNA, 15 bp, Homo sapiens
catggcatgcccctg

SEQ ID NO: 30788 - DNA, 15 bp, Homo sapiens
gcatggcatgcccct

SEQ ID NO: 30789 - DNA, 15 bp, Homo sapiens
ggcatggcatgcccc

SEQ ID NO: 30790 - DNA, 15 bp, Homo sapiens
tggcatggcatgccc

SEQ ID NO: 30791 - DNA, 15 bp, Homo sapiens
ctggcatggcatgcc

SEQ ID NO: 30792 - DNA, 15 bp, Homo sapiens
cctggcatggcatgc

SEQ ID NO: 30793 - DNA, 15 bp, Homo sapiens
tcctggcatggcatg

SEQ ID NO: 30794 - DNA, 15 bp, Homo sapiens
ctcctggcatggcat

SEQ ID NO: 30795 - DNA, 15 bp, Homo sapiens
tctcctggcatggca

SEQ ID NO: 30796 - DNA, 15 bp, Homo sapiens
ctctcctggcatggc

SEQ ID NO: 30797 - DNA, 15 bp, Homo sapiens
tctctcctggcatgg

SEQ ID NO: 30798 - DNA, 15 bp, Homo sapiens
ctctctcctggcatg

SEQ ID NO: 30799 - DNA, 15 bp, Homo sapiens
cctctctcctggcat

SEQ ID NO: 30800 - DNA, 15 bp, Homo sapiens
tcctctctcctggca

SEQ ID NO: 30801 - DNA, 15 bp, Homo sapiens
atcctctctcctggc

SEQ ID NO: 30802 - DNA, 15 bp, Homo sapiens
gatcctctctcctgg

SEQ ID NO: 30803 - DNA, 15 bp, Homo sapiens
ggatcctctctcctg

SEQ ID NO: 30804 - DNA, 15 bp, Homo sapiens
aggatcctctctcct

SEQ ID NO: 30805 - DNA, 15 bp, Homo sapiens
taggatcctctctcc

SEQ ID NO: 30806 - DNA, 15 bp, Homo sapiens
ttaggatcctctctc

SEQ ID NO: 30807 - DNA, 15 bp, Homo sapiens
cttaggatcctctct

SEQ ID NO: 30808 - DNA, 15 bp, Homo sapiens
ccttaggatcctctc

SEQ ID NO: 30809 - DNA, 15 bp, Homo sapiens
tccttaggatcctct

SEQ ID NO: 30810 - DNA, 15 bp, Homo sapiens
ttccttaggatcctc

SEQ ID NO: 30811 - DNA, 15 bp, Homo sapiens
cttccttaggatcct

SEQ ID NO: 30812 - DNA, 15 bp, Homo sapiens
gcttccttaggatcc

SEQ ID NO: 30813 - DNA, 15 bp, Homo sapiens
cgcttccttaggatc

SEQ ID NO: 30814 - DNA, 15 bp, Homo sapiens
acgcttccttaggat

SEQ ID NO: 30815 - DNA, 15 bp, Homo sapiens
cacgcttccttagga

SEQ ID NO: 30816 - DNA, 15 bp, Homo sapiens
ccacgcttccttagg

SEQ ID NO: 30817 - DNA, 15 bp, Homo sapiens
accacgcttccttag

SEQ ID NO: 30818 - DNA, 15 bp, Homo sapiens
gaccacgcttcctta

SEQ ID NO: 30819 - DNA, 15 bp, Homo sapiens
ggaccacgcttcctt

SEQ ID NO: 30820 - DNA, 15 bp, Homo sapiens
tggaccacgcttcct

SEQ ID NO: 30821 - DNA, 15 bp, Homo sapiens
ctggaccacgcttcc

SEQ ID NO: 30822 - DNA, 15 bp, Homo sapiens
actggaccacgcttc

SEQ ID NO: 30823 - DNA, 15 bp, Homo sapiens
gactggaccacgctt

SEQ ID NO: 30824 - DNA, 15 bp, Homo sapiens
ggactggaccacgct

SEQ ID NO: 30825 - DNA, 15 bp, Homo sapiens
cggactggaccacgc

SEQ ID NO: 30826 - DNA, 15 bp, Homo sapiens
gcggactggaccacg

SEQ ID NO: 30827 - DNA, 15 bp, Homo sapiens
tgcggactggaccac

SEQ ID NO: 30828 - DNA, 15 bp, Homo sapiens
gtgcggactggacca

SEQ ID NO: 30829 - DNA, 15 bp, Homo sapiens
tgtgcggactggacc

SEQ ID NO: 30830 - DNA, 15 bp, Homo sapiens
ctgtgcggactggac

SEQ ID NO: 30831 - DNA, 15 bp, Homo sapiens
cctgtgcggactgga

SEQ ID NO: 30832 - DNA, 15 bp, Homo sapiens
gcctgtgcggactgg

SEQ ID NO: 30833 - DNA, 15 bp, Homo sapiens
agcctgtgcggactg

SEQ ID NO: 30834 - DNA, 15 bp, Homo sapiens
gagcctgtgcggact

SEQ ID NO: 30835 - DNA, 15 bp, Homo sapiens
agagcctgtgcggac

SEQ ID NO: 30836 - DNA, 15 bp, Homo sapiens
cagagcctgtgcgga

SEQ ID NO: 30837 - DNA, 15 bp, Homo sapiens
ccagagcctgtgcgg

SEQ ID NO: 30838 - DNA, 15 bp, Homo sapiens
cccagagcctgtgcg

SEQ ID NO: 30839 - DNA, 15 bp, Homo sapiens
ccccagagcctgtgc

SEQ ID NO: 30840 - DNA, 15 bp, Homo sapiens
gccccagagcctgtg

SEQ ID NO: 30841 - DNA, 15 bp, Homo sapiens
agccccagagcctgt

SEQ ID NO: 30842 - DNA, 15 bp, Homo sapiens
aagccccagagcctg

SEQ ID NO: 30843 - DNA, 15 bp, Homo sapiens
aaagccccagagcct

SEQ ID NO: 30844 - DNA, 15 bp, Homo sapiens
taaagccccagagcc

SEQ ID NO: 30845 - DNA, 15 bp, Homo sapiens
ttaaagccccagagc

SEQ ID NO: 30846 - DNA, 15 bp, Homo sapiens
cttaaagccccagag

SEQ ID NO: 30847 - DNA, 15 bp, Homo sapiens
tcttaaagccccaga

SEQ ID NO: 30848 - DNA, 15 bp, Homo sapiens
atcttaaagccccag

SEQ ID NO: 30849 - DNA, 15 bp, Homo sapiens
tatcttaaagcccca

SEQ ID NO: 30850 - DNA, 15 bp, Homo sapiens
ttatcttaaagcccc

SEQ ID NO: 30851 - DNA, 15 bp, Homo sapiens
tttatcttaaagccc

SEQ ID NO: 30852 - DNA, 15 bp, Homo sapiens
ttttatcttaaagcc

SEQ ID NO: 30853 - DNA, 15 bp, Homo sapiens
gttttatcttaaagc

SEQ ID NO: 30854 - DNA, 15 bp, Homo sapiens
ggttttatcttaaag

SEQ ID NO: 30855 - DNA, 15 bp, Homo sapiens
aggttttatcttaaa

SEQ ID NO: 30856 - DNA, 15 bp, Homo sapiens
gaggttttatcttaa

SEQ ID NO: 30857 - DNA, 15 bp, Homo sapiens
ggaggttttatctta

SEQ ID NO: 30858 - DNA, 15 bp, Homo sapiens
aggaggttttatctt

SEQ ID NO: 30859 - DNA, 15 bp, Homo sapiens
caggaggttttatct

SEQ ID NO: 30860 - DNA, 15 bp, Homo sapiens
acaggaggttttatc

SEQ ID NO: 30861 - DNA, 15 bp, Homo sapiens
gacaggaggttttat

SEQ ID NO: 30862 - DNA, 15 bp, Homo sapiens
agacaggaggtttta

SEQ ID NO: 30863 - DNA, 15 bp, Homo sapiens
tagacaggaggtttt

SEQ ID NO: 30864 - DNA, 15 bp, Homo sapiens
ttagacaggaggttt

SEQ ID NO: 30865 - DNA, 15 bp, Homo sapiens
gttagacaggaggtt

SEQ ID NO: 30866 - DNA, 15 bp, Homo sapiens
agttagacaggaggt

SEQ ID NO: 30867 - DNA, 15 bp, Homo sapiens
aagttagacaggagg

SEQ ID NO: 30868 - DNA, 15 bp, Homo sapiens
aaagttagacaggag

SEQ ID NO: 30869 - DNA, 15 bp, Homo sapiens
taaagttagacagga

SEQ ID NO: 30870 - DNA, 15 bp, Homo sapiens
ctaaagttagacagg

SEQ ID NO: 30871 - DNA, 15 bp, Homo sapiens
actaaagttagacag

SEQ ID NO: 30872 - DNA, 15 bp, Homo sapiens
tactaaagttagaca

SEQ ID NO: 30873 - DNA, 15 bp, Homo sapiens
ctactaaagttagac

SEQ ID NO: 30874 - DNA, 15 bp, Homo sapiens
cctactaaagttaga

SEQ ID NO: 30875 - DNA, 15 bp, Homo sapiens
tcctactaaagttag

SEQ ID NO: 30876 - DNA, 15 bp, Homo sapiens
gtcctactaaagtta

SEQ ID NO: 30877 - DNA, 15 bp, Homo sapiens
agtcctactaaagtt

SEQ ID NO: 30878 - DNA, 15 bp, Homo sapiens
aagtcctactaaagt

SEQ ID NO: 30879 - DNA, 15 bp, Homo sapiens
aaagtcctactaaag

SEQ ID NO: 30880 - DNA, 15 bp, Homo sapiens
gaaagtcctactaaa

SEQ ID NO: 30881 - DNA, 15 bp, Homo sapiens
agaaagtcctactaa

SEQ ID NO: 30882 - DNA, 15 bp, Homo sapiens
cagaaagtcctacta

SEQ ID NO: 30883 - DNA, 15 bp, Homo sapiens
acagaaagtcctact

SEQ ID NO: 30884 - DNA, 15 bp, Homo sapiens
aacagaaagtcctac

SEQ ID NO: 30885 - DNA, 15 bp, Homo sapiens
caacagaaagtccta

SEQ ID NO: 30886 - DNA, 15 bp, Homo sapiens
agcaacagaaagtcc

SEQ ID NO: 30887 - DNA, 15 bp, Homo sapiens
aagcaacagaaagtc

SEQ ID NO: 30888 - DNA, 15 bp, Homo sapiens
gaagcaacagaaagt

SEQ ID NO: 30889 - DNA, 15 bp, Homo sapiens
tgaagcaacagaaag

SEQ ID NO: 30890 - DNA, 15 bp, Homo sapiens
gtgaagcaacagaaa

SEQ ID NO: 30891 - DNA, 15 bp, Homo sapiens
ggtgaagcaacagaa

SEQ ID NO: 30892 - DNA, 15 bp, Homo sapiens
aggtgaagcaacaga

SEQ ID NO: 30893 - DNA, 15 bp, Homo sapiens
caggtgaagcaacag

SEQ ID NO: 30894 - DNA, 15 bp, Homo sapiens
gcaggtgaagcaaca

SEQ ID NO: 30895 - DNA, 15 bp, Homo sapiens
ggcaggtgaagcaac

SEQ ID NO: 30896 - DNA, 15 bp, Homo sapiens
tggcaggtgaagcaa

SEQ ID NO: 30897 - DNA, 15 bp, Homo sapiens
ctggcaggtgaagca

SEQ ID NO: 30898 - DNA, 15 bp, Homo sapiens
tctggcaggtgaagc

SEQ ID NO: 30899 - DNA, 15 bp, Homo sapiens
ctctggcaggtgaag

SEQ ID NO: 30900 - DNA, 15 bp, Homo sapiens
gctctggcaggtgaa

SEQ ID NO: 30901 - DNA, 15 bp, Homo sapiens
ggctctggcaggtga

SEQ ID NO: 30902 - DNA, 15 bp, Homo sapiens
gggctctggcaggtg

SEQ ID NO: 30903 - DNA, 15 bp, Homo sapiens
agggctctggcaggt

SEQ ID NO: 30904 - DNA, 15 bp, Homo sapiens
cagggctctggcagg

SEQ ID NO: 30905 - DNA, 15 bp, Homo sapiens
tcagggctctggcag

SEQ ID NO: 30906 - DNA, 15 bp, Homo sapiens
ttcagggctctggca

SEQ ID NO: 30907 - DNA, 15 bp, Homo sapiens
gttcagggctctggc

SEQ ID NO: 30908 - DNA, 15 bp, Homo sapiens
cgttcagggctctgg

SEQ ID NO: 30909 - DNA, 15 bp, Homo sapiens
tcgttcagggctctg

SEQ ID NO: 30910 - DNA, 15 bp, Homo sapiens
ctcgttcagggctct

SEQ ID NO: 30911 - DNA, 15 bp, Homo sapiens
cctcgttcagggctc

SEQ ID NO: 30912 - DNA, 15 bp, Homo sapiens
ccctcgttcagggct

SEQ ID NO: 30913 - DNA, 15 bp, Homo sapiens
tccctcgttcagggc

SEQ ID NO: 30914 - DNA, 15 bp, Homo sapiens
atccctcgttcaggg

SEQ ID NO: 30915 - DNA, 15 bp, Homo sapiens
tatccctcgttcagg

SEQ ID NO: 30916 - DNA, 15 bp, Homo sapiens
ttatccctcgttcag

SEQ ID NO: 30917 - DNA, 15 bp, Homo sapiens
tttatccctcgttca

SEQ ID NO: 30918 - DNA, 15 bp, Homo sapiens
atttatccctcgttc

SEQ ID NO: 30919 - DNA, 15 bp, Homo sapiens
aatttatccctcgtt

SEQ ID NO: 30920 - DNA, 15 bp, Homo sapiens
caatttatccctcgt

SEQ ID NO: 30921 - DNA, 15 bp, Homo sapiens
tcaatttatccctcg

SEQ ID NO: 30922 - DNA, 15 bp, Homo sapiens
gtcaatttatccctc

SEQ ID NO: 30923 - DNA, 15 bp, Homo sapiens
agtcaatttatccct

SEQ ID NO: 30924 - DNA, 15 bp, Homo sapiens
aagtcaatttatccc

SEQ ID NO: 30925 - DNA, 15 bp, Homo sapiens
taagtcaatttatcc

SEQ ID NO: 30926 - DNA, 15 bp, Homo sapiens
ttaagtcaatttatc

SEQ ID NO: 30927 - DNA, 15 bp, Homo sapiens
attaagtcaatttat

SEQ ID NO: 30928 - DNA, 15 bp, Homo sapiens
aattaagtcaattta

SEQ ID NO: 30929 - DNA, 15 bp, Homo sapiens
taattaagtcaattt

SEQ ID NO: 30930 - DNA, 15 bp, Homo sapiens
ttaattaagtcaatt

SEQ ID NO: 30931 - DNA, 15 bp, Homo sapiens
gttaattaagtcaat

SEQ ID NO: 30932 - DNA, 15 bp, Homo sapiens
agttaattaagtcaa

SEQ ID NO: 30933 - DNA, 15 bp, Homo sapiens
tagttaattaagtca

SEQ ID NO: 30934 - DNA, 15 bp, Homo sapiens
ctagttaattaagtc

SEQ ID NO: 30935 - DNA, 15 bp, Homo sapiens
tctagttaattaagt

SEQ ID NO: 30936 - DNA, 15 bp, Homo sapiens
ttctagttaattaag

SEQ ID NO: 30937 - DNA, 15 bp, Homo sapiens
gttctagttaattaa

SEQ ID NO: 30938 - DNA, 15 bp, Homo sapiens
tgttctagttaatta

SEQ ID NO: 30939 - DNA, 15 bp, Homo sapiens
gtgttctagttaatt

SEQ ID NO: 30940 - DNA, 15 bp, Homo sapiens
tgtgttctagttaat

SEQ ID NO: 30941 - DNA, 15 bp, Homo sapiens
gtgtgttctagttaa

SEQ ID NO: 30942 - DNA, 15 bp, Homo sapiens
agtgtgttctagtta

SEQ ID NO: 30943 - DNA, 15 bp, Homo sapiens
cagtgtgttctagtt

SEQ ID NO: 30944 - DNA, 15 bp, Homo sapiens
gcagtgtgttctagt

SEQ ID NO: 30945 - DNA, 15 bp, Homo sapiens
tgcagtgtgttctag

SEQ ID NO: 30946 - DNA, 15 bp, Homo sapiens
ttgcagtgtgttcta

SEQ ID NO: 30947 - DNA, 15 bp, Homo sapiens
tttgcagtgtgttct

SEQ ID NO: 30948 - DNA, 15 bp, Homo sapiens
atttgcagtgtgttc

SEQ ID NO: 30949 - DNA, 15 bp, Homo sapiens
catttgcagtgtgtt

SEQ ID NO: 30950 - DNA, 15 bp, Homo sapiens
ccatttgcagtgtgt

SEQ ID NO: 30951 - DNA, 15 bp, Homo sapiens
accatttgcagtgtg

SEQ ID NO: 30952 - DNA, 15 bp, Homo sapiens
caccatttgcagtgt

SEQ ID NO: 30953 - DNA, 15 bp, Homo sapiens
tcaccatttgcagtg

SEQ ID NO: 30954 - DNA, 15 bp, Homo sapiens
ttcaccatttgcagt

SEQ ID NO: 30955 - DNA, 15 bp, Homo sapiens
tttcaccatttgcag

SEQ ID NO: 30956 - DNA, 15 bp, Homo sapiens
ctttcaccatttgca

SEQ ID NO: 30957 - DNA, 15 bp, Homo sapiens
gctttcaccatttgc

SEQ ID NO: 30958 - DNA, 15 bp, Homo sapiens
tgctttcaccatttg

SEQ ID NO: 30959 - DNA, 15 bp, Homo sapiens
atgctttcaccattt

SEQ ID NO: 30960 - DNA, 15 bp, Homo sapiens
aatgctttcaccatt

SEQ ID NO: 30961 - DNA, 15 bp, Homo sapiens
aaatgctttcaccat

SEQ ID NO: 30962 - DNA, 15 bp, Homo sapiens
taaatgctttcacca

SEQ ID NO: 30963 - DNA, 15 bp, Homo sapiens
ctaaatgctttcacc

SEQ ID NO: 30964 - DNA, 15 bp, Homo sapiens
gctaaatgctttcac

SEQ ID NO: 30965 - DNA, 15 bp, Homo sapiens
tgctaaatgctttca

SEQ ID NO: 30966 - DNA, 15 bp, Homo sapiens
ttgctaaatgctttc

SEQ ID NO: 30967 - DNA, 15 bp, Homo sapiens
tttgctaaatgcttt

SEQ ID NO: 30968 - DNA, 15 bp, Homo sapiens
ttttgctaaatgctt

SEQ ID NO: 30969 - DNA, 15 bp, Homo sapiens
gttttgctaaatgct

SEQ ID NO: 30970 - DNA, 15 bp, Homo sapiens
tgttttgctaaatgc

SEQ ID NO: 30971 - DNA, 15 bp, Homo sapiens
ttgttttgctaaatg

SEQ ID NO: 30972 - DNA, 15 bp, Homo sapiens
tttgttttgctaaat

SEQ ID NO: 30973 - DNA, 15 bp, Homo sapiens
ctttgttttgctaaa

SEQ ID NO: 30974 - DNA, 15 bp, Homo sapiens
tctttgttttgctaa

SEQ ID NO: 30975 - DNA, 15 bp, Homo sapiens
ttctttgttttgcta

SEQ ID NO: 30976 - DNA, 15 bp, Homo sapiens
attctttgttttgct

SEQ ID NO: 30977 - DNA, 15 bp, Homo sapiens
cattctttgttttgc

SEQ ID NO: 30978 - DNA, 15 bp, Homo sapiens
gcattctttgttttg

SEQ ID NO: 30979 - DNA, 15 bp, Homo sapiens
ggcattctttgtttt

SEQ ID NO: 30980 - DNA, 15 bp, Homo sapiens
tggcattctttgttt

SEQ ID NO: 30981 - DNA, 15 bp, Homo sapiens
atggcattctttgtt

SEQ ID NO: 30982 - DNA, 15 bp, Homo sapiens
gatggcattctttgt

SEQ ID NO: 30983 - DNA, 15 bp, Homo sapiens
ggatggcattctttg

SEQ ID NO: 30984 - DNA, 15 bp, Homo sapiens
tggatggcattcttt

SEQ ID NO: 30985 - DNA, 15 bp, Homo sapiens
ttggatggcattctt

SEQ ID NO: 30986 - DNA, 15 bp, Homo sapiens
cttggatggcattct

SEQ ID NO: 30987 - DNA, 15 bp, Homo sapiens
gcttggatggcattc

SEQ ID NO: 30988 - DNA, 15 bp, Homo sapiens
ggcttggatggcatt

SEQ ID NO: 30989 - DNA, 15 bp, Homo sapiens
gggcttggatggcat

SEQ ID NO: 30990 - DNA, 15 bp, Homo sapiens
ggggcttggatggca

SEQ ID NO: 30991 - DNA, 15 bp, Homo sapiens
tggggcttggatggc

SEQ ID NO: 30992 - DNA, 15 bp, Homo sapiens
ttggggcttggatgg

SEQ ID NO: 30993 - DNA, 15 bp, Homo sapiens
tttggggcttggatg

SEQ ID NO: 30994 - DNA, 15 bp, Homo sapiens
ttttggggcttggat

SEQ ID NO: 30995 - DNA, 15 bp, Homo sapiens
attttggggcttgga

SEQ ID NO: 30996 - DNA, 15 bp, Homo sapiens
tattttggggcttgg

SEQ ID NO: 30997 - DNA, 15 bp, Homo sapiens
ttattttggggcttg

SEQ ID NO: 30998 - DNA, 15 bp, Homo sapiens
tttattttggggctt

SEQ ID NO: 30999 - DNA, 15 bp, Homo sapiens
ttttattttggggct

SEQ ID NO: 31000 - DNA, 15 bp, Homo sapiens
cttttattttggggc

SEQ ID NO: 31001 - DNA, 15 bp, Homo sapiens
gcttttattttgggg

SEQ ID NO: 31002 - DNA, 15 bp, Homo sapiens
tgcttttattttggg

SEQ ID NO: 31003 - DNA, 15 bp, Homo sapiens
ctgcttttattttgg

SEQ ID NO: 31004 - DNA, 15 bp, Homo sapiens
tctgcttttattttg

SEQ ID NO: 31005 - DNA, 15 bp, Homo sapiens
ttctgcttttatttt

SEQ ID NO: 31006 - DNA, 15 bp, Homo sapiens
attctgcttttattt

SEQ ID NO: 31007 - DNA, 15 bp, Homo sapiens
tattctgcttttatt

SEQ ID NO: 31008 - DNA, 15 bp, Homo sapiens
ttattctgcttttat

SEQ ID NO: 31009 - DNA, 15 bp, Homo sapiens
tttattctgctttta

SEQ ID NO: 31010 - DNA, 15 bp, Homo sapiens
atttattctgctttt

SEQ ID NO: 31011 - DNA, 15 bp, Homo sapiens
tatttattctgcttt

SEQ ID NO: 31012 - DNA, 15 bp, Homo sapiens
ctatttattctgctt

SEQ ID NO: 31013 - DNA, 15 bp, Homo sapiens
tctatttattctgct

SEQ ID NO: 31014 - DNA, 15 bp, Homo sapiens
ttctatttattctgc

SEQ ID NO: 31015 - DNA, 15 bp, Homo sapiens
attctatttattctg

SEQ ID NO: 31016 - DNA, 15 bp, Homo sapiens
cattctatttattct

SEQ ID NO: 31017 - DNA, 15 bp, Homo sapiens
gcattctatttattc

SEQ ID NO: 31018 - DNA, 15 bp, Homo sapiens
tgcattctatttatt

SEQ ID NO: 31019 - DNA, 15 bp, Homo sapiens
ttgcattctatttat

SEQ ID NO: 31020 - DNA, 15 bp, Homo sapiens
attgcattctattta

SEQ ID NO: 31021 - DNA, 15 bp, Homo sapiens
tattgcattctattt

SEQ ID NO: 31022 - DNA, 15 bp, Homo sapiens
ttattgcattctatt

SEQ ID NO: 31023 - DNA, 15 bp, Homo sapiens
tttattgcattctat

SEQ ID NO: 31024 - DNA, 15 bp, Homo sapiens
gtttattgcattcta

SEQ ID NO: 31025 - DNA, 15 bp, Homo sapiens
tgtttattgcattct

SEQ ID NO: 31026 - DNA, 15 bp, Homo sapiens
ctgtttattgcattc

SEQ ID NO: 31027 - DNA, 15 bp, Homo sapiens
gctgtttattgcatt

SEQ ID NO: 31028 - DNA, 15 bp, Homo sapiens
tgctgtttattgcat

SEQ ID NO: 31029 - DNA, 15 bp, Homo sapiens
ttgctgtttattgca

SEQ ID NO: 31030 - DNA, 15 bp, Homo sapiens
gttgctgtttattgc

SEQ ID NO: 31031 - DNA, 15 bp, Homo sapiens
ggttgctgtttattg

SEQ ID NO: 31032 - DNA, 15 bp, Homo sapiens
tggttgctgtttatt

SEQ ID NO: 31033 - DNA, 15 bp, Homo sapiens
atggttgctgtttat

SEQ ID NO: 31034 - DNA, 15 bp, Homo sapiens
gatggttgctgttta

SEQ ID NO: 31035 - DNA, 15 bp, Homo sapiens
ggatggttgctgttt

SEQ ID NO: 31036 - DNA, 15 bp, Homo sapiens
gggatggttgctgtt

SEQ ID NO: 31037 - DNA, 15 bp, Homo sapiens
tgggatggttgctgt

SEQ ID NO: 31038 - DNA, 15 bp, Homo sapiens
ttgggatggttgctg

SEQ ID NO: 31039 - DNA, 15 bp, Homo sapiens
tttgggatggttgct

SEQ ID NO: 31040 - DNA, 15 bp, Homo sapiens
gtttgggatggttgc

SEQ ID NO: 31041 - DNA, 15 bp, Homo sapiens
agtttgggatggttg

SEQ ID NO: 31042 - DNA, 15 bp, Homo sapiens
cagtttgggatggtt

SEQ ID NO: 31043 - DNA, 15 bp, Homo sapiens
tcagtttgggatggt

SEQ ID NO: 31044 - DNA, 15 bp, Homo sapiens
ctcagtttgggatgg

SEQ ID NO: 31045 - DNA, 15 bp, Homo sapiens
actcagtttgggatg

SEQ ID NO: 31046 - DNA, 15 bp, Homo sapiens
aactcagtttgggat

SEQ ID NO: 31047 - DNA, 15 bp, Homo sapiens
gaactcagtttggga

SEQ ID NO: 31048 - DNA, 15 bp, Homo sapiens
agaactcagtttggg

SEQ ID NO: 31049 - DNA, 15 bp, Homo sapiens
gagaactcagtttgg

SEQ ID NO: 31050 - DNA, 15 bp, Homo sapiens
tgagaactcagtttg

SEQ ID NO: 31051 - DNA, 15 bp, Homo sapiens
ctgagaactcagttt

SEQ ID NO: 31052 - DNA, 15 bp, Homo sapiens
gctgagaactcagtt

SEQ ID NO: 31053 - DNA, 15 bp, Homo sapiens
tgctgagaactcagt

SEQ ID NO: 31054 - DNA, 15 bp, Homo sapiens
ctgctgagaactcag

SEQ ID NO: 31055 - DNA, 15 bp, Homo sapiens
gctgctgagaactca

SEQ ID NO: 31056 - DNA, 15 bp, Homo sapiens
tgctgctgagaactc

SEQ ID NO: 31057 - DNA, 15 bp, Homo sapiens
ttgctgctgagaact

SEQ ID NO: 31058 - DNA, 15 bp, Homo sapiens
tttgctgctgagaac

SEQ ID NO: 31059 - DNA, 15 bp, Homo sapiens
atttgctgctgagaa

SEQ ID NO: 31060 - DNA, 15 bp, Homo sapiens
gatttgctgctgaga

SEQ ID NO: 31061 - DNA, 15 bp, Homo sapiens
agatttgctgctgag

SEQ ID NO: 31062 - DNA, 15 bp, Homo sapiens
gagatttgctgctga

SEQ ID NO: 31063 - DNA, 15 bp, Homo sapiens
ggagatttgctgctg

SEQ ID NO: 31064 - DNA, 15 bp, Homo sapiens
tggagatttgctgct

SEQ ID NO: 31065 - DNA, 15 bp, Homo sapiens
ctggagatttgctgc

SEQ ID NO: 31066 - DNA, 15 bp, Homo sapiens
actggagatttgctg

SEQ ID NO: 31067 - DNA, 15 bp, Homo sapiens
tactggagatttgct

SEQ ID NO: 31068 - DNA, 15 bp, Homo sapiens
atactggagatttgc

SEQ ID NO: 31069 - DNA, 15 bp, Homo sapiens
catactggagatttg

SEQ ID NO: 31070 - DNA, 15 bp, Homo sapiens
tcatactggagattt

SEQ ID NO: 31071 - DNA, 15 bp, Homo sapiens
ttcatactggagatt

SEQ ID NO: 31072 - DNA, 15 bp, Homo sapiens
tttcatactggagat

SEQ ID NO: 31073 - DNA, 15 bp, Homo sapiens
atttcatactggaga

SEQ ID NO: 31074 - DNA, 15 bp, Homo sapiens
aatttcatactggag

SEQ ID NO: 31075 - DNA, 15 bp, Homo sapiens
aaatttcatactgga

SEQ ID NO: 31076 - DNA, 15 bp, Homo sapiens
aaaatttcatactgg

SEQ ID NO: 31077 - DNA, 15 bp, Homo sapiens
caaaatttcatactg

SEQ ID NO: 31078 - DNA, 15 bp, Homo sapiens
ccaaaatttcatact

SEQ ID NO: 31079 - DNA, 15 bp, Homo sapiens
tccaaaatttcatac

SEQ ID NO: 31080 - DNA, 15 bp, Homo sapiens
atccaaaatttcata

SEQ ID NO: 31081 - DNA, 15 bp, Homo sapiens
aatccaaaatttcat

SEQ ID NO: 31082 - DNA, 15 bp, Homo sapiens
aaatccaaaatttca

SEQ ID NO: 31083 - DNA, 15 bp, Homo sapiens
aaaatccaaaatttc

SEQ ID NO: 31084 - DNA, 15 bp, Homo sapiens
caaaatccaaaattt

SEQ ID NO: 31085 - DNA, 15 bp, Homo sapiens
acaaaatccaaaatt

SEQ ID NO: 31086 - DNA, 15 bp, Homo sapiens
cacaaaatccaaaat

SEQ ID NO: 31087 - DNA, 15 bp, Homo sapiens
gcacaaaatccaaaa

SEQ ID NO: 31088 - DNA, 15 bp, Homo sapiens
cgcacaaaatccaaa

SEQ ID NO: 31089 - DNA, 15 bp, Homo sapiens
acgcacaaaatccaa

SEQ ID NO: 31090 - DNA, 15 bp, Homo sapiens
cacgcacaaaatcca

SEQ ID NO: 31091 - DNA, 15 bp, Homo sapiens
acacgcacaaaatcc

SEQ ID NO: 31092 - DNA, 15 bp, Homo sapiens
cacacgcacaaaatc

SEQ ID NO: 31093 - DNA, 15 bp, Homo sapiens
acacacgcacaaaat

SEQ ID NO: 31094 - DNA, 15 bp, Homo sapiens
cacacacgcacaaaa

SEQ ID NO: 31095 - DNA, 15 bp, Homo sapiens
gcacacacgcacaaa

SEQ ID NO: 31096 - DNA, 15 bp, Homo sapiens
agcacacacgcacaa

SEQ ID NO: 31097 - DNA, 15 bp, Homo sapiens
aagcacacacgcaca

SEQ ID NO: 31098 - DNA, 15 bp, Homo sapiens
taagcacacacgcac

SEQ ID NO: 31099 - DNA, 15 bp, Homo sapiens
ttaagcacacacgca

SEQ ID NO: 31100 - DNA, 15 bp, Homo sapiens
tttaagcacacacgc

SEQ ID NO: 31101 - DNA, 15 bp, Homo sapiens
ctttaagcacacacg

SEQ ID NO: 31102 - DNA, 15 bp, Homo sapiens
cctttaagcacacac

SEQ ID NO: 31103 - DNA, 15 bp, Homo sapiens
acctttaagcacaca

SEQ ID NO: 31104 - DNA, 15 bp, Homo sapiens
cacctttaagcacac

SEQ ID NO: 31105 - DNA, 15 bp, Homo sapiens
ccacctttaagcaca

SEQ ID NO: 31106 - DNA, 15 bp, Homo sapiens
tccacctttaagcac

SEQ ID NO: 31107 - DNA, 15 bp, Homo sapiens
atccacctttaagca

SEQ ID NO: 31108 - DNA, 15 bp, Homo sapiens
catccacctttaagc

SEQ ID NO: 31109 - DNA, 15 bp, Homo sapiens
tcatccacctttaag

SEQ ID NO: 31110 - DNA, 15 bp, Homo sapiens
gtcatccacctttaa

SEQ ID NO: 31111 - DNA, 15 bp, Homo sapiens
tgtcatccaccttta

SEQ ID NO: 31112 - DNA, 15 bp, Homo sapiens
ttgtcatccaccttt

SEQ ID NO: 31113 - DNA, 15 bp, Homo sapiens
attgtcatccacctt

SEQ ID NO: 31114 - DNA, 15 bp, Homo sapiens
cattgtcatccacct

SEQ ID NO: 31115 - DNA, 15 bp, Homo sapiens
tcattgtcatccacc

SEQ ID NO: 31116 - DNA, 15 bp, Homo sapiens
gtcattgtcatccac

SEQ ID NO: 31117 - DNA, 15 bp, Homo sapiens
tgtcattgtcatcca

SEQ ID NO: 31118 - DNA, 15 bp, Homo sapiens
ctgtcattgtcatcc

SEQ ID NO: 31119 - DNA, 15 bp, Homo sapiens
actgtcattgtcatc

SEQ ID NO: 31120 - DNA, 15 bp, Homo sapiens
aactgtcattgtcat

SEQ ID NO: 31121 - DNA, 15 bp, Homo sapiens
gaactgtcattgtca

SEQ ID NO: 31122 - DNA, 15 bp, Homo sapiens
tgaactgtcattgtc

SEQ ID NO: 31123 - DNA, 15 bp, Homo sapiens
atgaactgtcattgt

SEQ ID NO: 31124 - DNA, 15 bp, Homo sapiens
catgaactgtcattg

SEQ ID NO: 31125 - DNA, 15 bp, Homo sapiens
ccatgaactgtcatt

SEQ ID NO: 31126 - DNA, 15 bp, Homo sapiens
cccatgaactgtcat

SEQ ID NO: 31127 - DNA, 15 bp, Homo sapiens
tcccatgaactgtca

SEQ ID NO: 31128 - DNA, 15 bp, Homo sapiens
atcccatgaactgtc

SEQ ID NO: 31129 - DNA, 15 bp, Homo sapiens
aatcccatgaactgt

SEQ ID NO: 31130 - DNA, 15 bp, Homo sapiens
caatcccatgaactg

SEQ ID NO: 31131 - DNA, 15 bp, Homo sapiens
tcaatcccatgaact

SEQ ID NO: 31132 - DNA, 15 bp, Homo sapiens
ctcaatcccatgaac

SEQ ID NO: 31133 - DNA, 15 bp, Homo sapiens
gctcaatcccatgaa

SEQ ID NO: 31134 - DNA, 15 bp, Homo sapiens
agctcaatcccatga

SEQ ID NO: 31135 - DNA, 15 bp, Homo sapiens
gagctcaatcccatg

SEQ ID NO: 31136 - DNA, 15 bp, Homo sapiens
agagctcaatcccat

SEQ ID NO: 31137 - DNA, 15 bp, Homo sapiens
cagagctcaatccca

SEQ ID NO: 31138 - DNA, 15 bp, Homo sapiens
ccagagctcaatccc

SEQ ID NO: 31139 - DNA, 15 bp, Homo sapiens
cccagagctcaatcc

SEQ ID NO: 31140 - DNA, 15 bp, Homo sapiens
ccccagagctcaatc

SEQ ID NO: 31141 - DNA, 15 bp, Homo sapiens
accccagagctcaat

SEQ ID NO: 31142 - DNA, 15 bp, Homo sapiens
gaccccagagctcaa

SEQ ID NO: 31143 - DNA, 15 bp, Homo sapiens
ggaccccagagctca

SEQ ID NO: 31144 - DNA, 15 bp, Homo sapiens
tggaccccagagctc

SEQ ID NO: 31145 - DNA, 15 bp, Homo sapiens
ctggaccccagagct

SEQ ID NO: 31146 - DNA, 15 bp, Homo sapiens
tctggaccccagagc

SEQ ID NO: 31147 - DNA, 15 bp, Homo sapiens
ctctggaccccagag

SEQ ID NO: 31148 - DNA, 15 bp, Homo sapiens
actctggaccccaga

SEQ ID NO: 31149 - DNA, 15 bp, Homo sapiens
aactctggaccccag

SEQ ID NO: 31150 - DNA, 15 bp, Homo sapiens
caactctggacccca

SEQ ID NO: 31151 - DNA, 15 bp, Homo sapiens
ccaactctggacccc

SEQ ID NO: 31152 - DNA, 15 bp, Homo sapiens
gccaactctggaccc

SEQ ID NO: 31153 - DNA, 15 bp, Homo sapiens
tgccaactctggacc

SEQ ID NO: 31154 - DNA, 15 bp, Homo sapiens
atgccaactctggac

SEQ ID NO: 31155 - DNA, 15 bp, Homo sapiens
gatgccaactctgga

SEQ ID NO: 31156 - DNA, 15 bp, Homo sapiens
agatgccaactctgg

SEQ ID NO: 31157 - DNA, 15 bp, Homo sapiens
cagatgccaactctg

SEQ ID NO: 31158 - DNA, 15 bp, Homo sapiens
acagatgccaactct

SEQ ID NO: 31159 - DNA, 15 bp, Homo sapiens
aacagatgccaactc

SEQ ID NO: 31160 - DNA, 15 bp, Homo sapiens
gaacagatgccaact

SEQ ID NO: 31161 - DNA, 15 bp, Homo sapiens
tgaacagatgccaac

SEQ ID NO: 31162 - DNA, 15 bp, Homo sapiens
atgaacagatgccaa

SEQ ID NO: 31163 - DNA, 15 bp, Homo sapiens
aatgaacagatgcca

SEQ ID NO: 31164 - DNA, 15 bp, Homo sapiens
aaatgaacagatgcc

SEQ ID NO: 31165 - DNA, 15 bp, Homo sapiens
gaaatgaacagatgc

SEQ ID NO: 31166 - DNA, 15 bp, Homo sapiens
ggaaatgaacagatg

SEQ ID NO: 31167 - DNA, 15 bp, Homo sapiens
gggaaatgaacagat

SEQ ID NO: 31168 - DNA, 15 bp, Homo sapiens
tgggaaatgaacaga

SEQ ID NO: 31169 - DNA, 15 bp, Homo sapiens
atgggaaatgaacag

SEQ ID NO: 31170 - DNA, 15 bp, Homo sapiens
aatgggaaatgaaca

SEQ ID NO: 31171 - DNA, 15 bp, Homo sapiens
aaatgggaaatgaac

SEQ ID NO: 31172 - DNA, 15 bp, Homo sapiens
aaaatgggaaatgaa

SEQ ID NO: 31173 - DNA, 15 bp, Homo sapiens
caaaatgggaaatga

SEQ ID NO: 31174 - DNA, 15 bp, Homo sapiens
acaaaatgggaaatg

SEQ ID NO: 31175 - DNA, 15 bp, Homo sapiens
gacaaaatgggaaat

SEQ ID NO: 31176 - DNA, 15 bp, Homo sapiens
tgacaaaatgggaaa

SEQ ID NO: 31177 - DNA, 15 bp, Homo sapiens
atgacaaaatgggaa

SEQ ID NO: 31178 - DNA, 15 bp, Homo sapiens
aatgacaaaatggga

SEQ ID NO: 31179 - DNA, 15 bp, Homo sapiens
aaatgacaaaatggg

SEQ ID NO: 31180 - DNA, 15 bp, Homo sapiens
aaaatgacaaaatgg

SEQ ID NO: 31181 - DNA, 15 bp, Homo sapiens
taaaatgacaaaatg

SEQ ID NO: 31182 - DNA, 15 bp, Homo sapiens
gtaaaatgacaaaat

SEQ ID NO: 31183 - DNA, 15 bp, Homo sapiens
ggtaaaatgacaaaa

SEQ ID NO: 31184 - DNA, 15 bp, Homo sapiens
gggtaaaatgacaaa

SEQ ID NO: 31185 - DNA, 15 bp, Homo sapiens
agggtaaaatgacaa

SEQ ID NO: 31186 - DNA, 15 bp, Homo sapiens
aagggtaaaatgaca

SEQ ID NO: 31187 - DNA, 15 bp, Homo sapiens
caagggtaaaatgac

SEQ ID NO: 31188 - DNA, 15 bp, Homo sapiens
tcaagggtaaaatga

SEQ ID NO: 31189 - DNA, 15 bp, Homo sapiens
atcaagggtaaaatg

SEQ ID NO: 31190 - DNA, 15 bp, Homo sapiens
aatcaagggtaaaat

SEQ ID NO: 31191 - DNA, 15 bp, Homo sapiens
caatcaagggtaaaa

SEQ ID NO: 31192 - DNA, 15 bp, Homo sapiens
tcaatcaagggtaaa

SEQ ID NO: 31193 - DNA, 15 bp, Homo sapiens
gtcaatcaagggtaa

SEQ ID NO: 31194 - DNA, 15 bp, Homo sapiens
agtcaatcaagggta

SEQ ID NO: 31195 - DNA, 15 bp, Homo sapiens
cagtcaatcaagggt

SEQ ID NO: 31196 - DNA, 15 bp, Homo sapiens
tcagtcaatcaaggg

SEQ ID NO: 31197 - DNA, 15 bp, Homo sapiens
ttcagtcaatcaagg

SEQ ID NO: 31198 - DNA, 15 bp, Homo sapiens
attcagtcaatcaag

SEQ ID NO: 31199 - DNA, 15 bp, Homo sapiens
cattcagtcaatcaa

SEQ ID NO: 31200 - DNA, 15 bp, Homo sapiens
acattcagtcaatca

SEQ ID NO: 31201 - DNA, 15 bp, Homo sapiens
gacattcagtcaatc

SEQ ID NO: 31202 - DNA, 15 bp, Homo sapiens
tgacattcagtcaat

SEQ ID NO: 31203 - DNA, 15 bp, Homo sapiens
ctgacattcagtcaa

SEQ ID NO: 31204 - DNA, 15 bp, Homo sapiens
actgacattcagtca

SEQ ID NO: 31205 - DNA, 15 bp, Homo sapiens
cactgacattcagtc

SEQ ID NO: 31206 - DNA, 15 bp, Homo sapiens
gcactgacattcagt

SEQ ID NO: 31207 - DNA, 15 bp, Homo sapiens
ggcactgacattcag

SEQ ID NO: 31208 - DNA, 15 bp, Homo sapiens
aggcactgacattca

SEQ ID NO: 31209 - DNA, 15 bp, Homo sapiens
aaggcactgacattc

SEQ ID NO: 31210 - DNA, 15 bp, Homo sapiens
taaggcactgacatt

SEQ ID NO: 31211 - DNA, 15 bp, Homo sapiens
ttaaggcactgacat

SEQ ID NO: 31212 - DNA, 15 bp, Homo sapiens
gttaaggcactgaca

SEQ ID NO: 31213 - DNA, 15 bp, Homo sapiens
agttaaggcactgac

SEQ ID NO: 31214 - DNA, 15 bp, Homo sapiens
aagttaaggcactga

SEQ ID NO: 31215 - DNA, 15 bp, Homo sapiens
aaagttaaggcactg

SEQ ID NO: 31216 - DNA, 15 bp, Homo sapiens
caaagttaaggcact

SEQ ID NO: 31217 - DNA, 15 bp, Homo sapiens
ccaaagttaaggcac

SEQ ID NO: 31218 - DNA, 15 bp, Homo sapiens
cccaaagttaaggca

SEQ ID NO: 31219 - DNA, 15 bp, Homo sapiens
gcccaaagttaaggc

SEQ ID NO: 31220 - DNA, 15 bp, Homo sapiens
agcccaaagttaagg

SEQ ID NO: 31221 - DNA, 15 bp, Homo sapiens
cagcccaaagttaag

SEQ ID NO: 31222 - DNA, 15 bp, Homo sapiens
acagcccaaagttaa

SEQ ID NO: 31223 - DNA, 15 bp, Homo sapiens
cacagcccaaagtta

SEQ ID NO: 31224 - DNA, 15 bp, Homo sapiens
ccacagcccaaagtt

SEQ ID NO: 31225 - DNA, 15 bp, Homo sapiens
tccacagcccaaagt

SEQ ID NO: 31226 - DNA, 15 bp, Homo sapiens
ctccacagcccaaag

SEQ ID NO: 31227 - DNA, 15 bp, Homo sapiens
actccacagcccaaa

SEQ ID NO: 31228 - DNA, 15 bp, Homo sapiens
cactccacagcccaa

SEQ ID NO: 31229 - DNA, 15 bp, Homo sapiens
tcactccacagccca

SEQ ID NO: 31230 - DNA, 15 bp, Homo sapiens
ctcactccacagccc

SEQ ID NO: 31231 - DNA, 15 bp, Homo sapiens
actcactccacagcc

SEQ ID NO: 31232 - DNA, 15 bp, Homo sapiens
gactcactccacagc

SEQ ID NO: 31233 - DNA, 15 bp, Homo sapiens
cgactcactccacag

SEQ ID NO: 31234 - DNA, 15 bp, Homo sapiens
ccgactcactccaca

SEQ ID NO: 31235 - DNA, 15 bp, Homo sapiens
tccgactcactccac

SEQ ID NO: 31236 - DNA, 15 bp, Homo sapiens
ttccgactcactcca

SEQ ID NO: 31237 - DNA, 15 bp, Homo sapiens
gttccgactcactcc

SEQ ID NO: 31238 - DNA, 15 bp, Homo sapiens
agttccgactcactc

SEQ ID NO: 31239 - DNA, 15 bp, Homo sapiens
gagttccgactcact

SEQ ID NO: 31240 - DNA, 15 bp, Homo sapiens
ggagttccgactcac

SEQ ID NO: 31241 - DNA, 15 bp, Homo sapiens
gggagttccgactca

SEQ ID NO: 31242 - DNA, 15 bp, Homo sapiens
ggggagttccgactc

SEQ ID NO: 31243 - DNA, 15 bp, Homo sapiens
gggggagttccgact

SEQ ID NO: 31244 - DNA, 15 bp, Homo sapiens
cgggggagttccgac

SEQ ID NO: 31245 - DNA, 15 bp, Homo sapiens
tcgggggagttccga

SEQ ID NO: 31246 - DNA, 15 bp, Homo sapiens
ctcgggggagttccg

SEQ ID NO: 31247 - DNA, 15 bp, Homo sapiens
cctcgggggagttcc

SEQ ID NO: 31248 - DNA, 15 bp, Homo sapiens
acctcgggggagttc

SEQ ID NO: 31249 - DNA, 15 bp, Homo sapiens
cacctcgggggagtt

SEQ ID NO: 31250 - DNA, 15 bp, Homo sapiens
acacctcgggggagt

SEQ ID NO: 31251 - DNA, 15 bp, Homo sapiens
cacacctcgggggag

SEQ ID NO: 31252 - DNA, 15 bp, Homo sapiens
gcacacctcggggga

SEQ ID NO: 31253 - DNA, 15 bp, Homo sapiens
tgcacacctcggggg

SEQ ID NO: 31254 - DNA, 15 bp, Homo sapiens
ctgcacacctcgggg

SEQ ID NO: 31255 - DNA, 15 bp, Homo sapiens
cctgcacacctcggg

SEQ ID NO: 31256 - DNA, 15 bp, Homo sapiens
acctgcacacctcgg

SEQ ID NO: 31257 - DNA, 15 bp, Homo sapiens
cacctgcacacctcg

SEQ ID NO: 31258 - DNA, 15 bp, Homo sapiens
ccacctgcacacctc

SEQ ID NO: 31259 - DNA, 15 bp, Homo sapiens
accacctgcacacct

SEQ ID NO: 31260 - DNA, 15 bp, Homo sapiens
aaccacctgcacacc

SEQ ID NO: 31261 - DNA, 15 bp, Homo sapiens
caaccacctgcacac

SEQ ID NO: 31262 - DNA, 15 bp, Homo sapiens
acaaccacctgcaca

SEQ ID NO: 31263 - DNA, 15 bp, Homo sapiens
aacaaccacctgcac

SEQ ID NO: 31264 - DNA, 15 bp, Homo sapiens
taacaaccacctgca

SEQ ID NO: 31265 - DNA, 15 bp, Homo sapiens
ctaacaaccacctgc

SEQ ID NO: 31266 - DNA, 15 bp, Homo sapiens
tctaacaaccacctg

SEQ ID NO: 31267 - DNA, 15 bp, Homo sapiens
ctctaacaaccacct

SEQ ID NO: 31268 - DNA, 15 bp, Homo sapiens
actctaacaaccacc

SEQ ID NO: 31269 - DNA, 15 bp, Homo sapiens
gactctaacaaccac

SEQ ID NO: 31270 - DNA, 15 bp, Homo sapiens
agactctaacaacca

SEQ ID NO: 31271 - DNA, 15 bp, Homo sapiens
gagactctaacaacc

SEQ ID NO: 31272 - DNA, 15 bp, Homo sapiens
tgagactctaacaac

SEQ ID NO: 31273 - DNA, 15 bp, Homo sapiens
atgagactctaacaa

SEQ ID NO: 31274 - DNA, 15 bp, Homo sapiens
aatgagactctaaca

SEQ ID NO: 31275 - DNA, 15 bp, Homo sapiens
aaatgagactctaac

SEQ ID NO: 31276 - DNA, 15 bp, Homo sapiens
aaaatgagactctaa

SEQ ID NO: 31277 - DNA, 15 bp, Homo sapiens
aaaaatgagactcta

SEQ ID NO: 31278 - DNA, 15 bp, Homo sapiens
caaaaatgagactct

SEQ ID NO: 31279 - DNA, 15 bp, Homo sapiens
gcaaaaatgagactc

SEQ ID NO: 31280 - DNA, 15 bp, Homo sapiens
tgcaaaaatgagact

SEQ ID NO: 31281 - DNA, 15 bp, Homo sapiens
ctgcaaaaatgagac

SEQ ID NO: 31282 - DNA, 15 bp, Homo sapiens
cctgcaaaaatgaga

SEQ ID NO: 31283 - DNA, 15 bp, Homo sapiens
ccctgcaaaaatgag

SEQ ID NO: 31284 - DNA, 15 bp, Homo sapiens
accctgcaaaaatga

SEQ ID NO: 31285 - DNA, 15 bp, Homo sapiens
caccctgcaaaaatg

SEQ ID NO: 31286 - DNA, 15 bp, Homo sapiens
ccaccctgcaaaaat

SEQ ID NO: 31287 - DNA, 15 bp, Homo sapiens
tccaccctgcaaaaa

SEQ ID NO: 31288 - DNA, 15 bp, Homo sapiens
ttccaccctgcaaaa

SEQ ID NO: 31289 - DNA, 15 bp, Homo sapiens
cttccaccctgcaaa

SEQ ID NO: 31290 - DNA, 15 bp, Homo sapiens
tcttccaccctgcaa

SEQ ID NO: 31291 - DNA, 15 bp, Homo sapiens
gtcttccaccctgca

SEQ ID NO: 31292 - DNA, 15 bp, Homo sapiens
tgtcttccaccctgc

SEQ ID NO: 31293 - DNA, 15 bp, Homo sapiens
ctgtcttccaccctg

SEQ ID NO: 31294 - DNA, 15 bp, Homo sapiens
cctgtcttccaccct

SEQ ID NO: 31295 - DNA, 15 bp, Homo sapiens
tcctgtcttccaccc

SEQ ID NO: 31296 - DNA, 15 bp, Homo sapiens
ctcctgtcttccacc

SEQ ID NO: 31297 - DNA, 15 bp, Homo sapiens
cctcctgtcttccac

SEQ ID NO: 31298 - DNA, 15 bp, Homo sapiens
ccctcctgtcttcca

SEQ ID NO: 31299 - DNA, 15 bp, Homo sapiens
gccctcctgtcttcc

SEQ ID NO: 31300 - DNA, 15 bp, Homo sapiens
agccctcctgtcttc

SEQ ID NO: 31301 - DNA, 15 bp, Homo sapiens
cagccctcctgtctt

SEQ ID NO: 31302 - DNA, 15 bp, Homo sapiens
gcagccctcctgtct

SEQ ID NO: 31303 - DNA, 15 bp, Homo sapiens
tgcagccctcctgtc

SEQ ID NO: 31304 - DNA, 15 bp, Homo sapiens
ctgcagccctcctgt

SEQ ID NO: 31305 - DNA, 15 bp, Homo sapiens
gctgcagccctcctg

SEQ ID NO: 31306 - DNA, 15 bp, Homo sapiens
ggctgcagccctcct

SEQ ID NO: 31307 - DNA, 15 bp, Homo sapiens
aggctgcagccctcc

SEQ ID NO: 31308 - DNA, 15 bp, Homo sapiens
aaggctgcagccctc

SEQ ID NO: 31309 - DNA, 15 bp, Homo sapiens
gaaggctgcagccct

SEQ ID NO: 31310 - DNA, 15 bp, Homo sapiens
tgaaggctgcagccc

SEQ ID NO: 31311 - DNA, 15 bp, Homo sapiens
atgaaggctgcagcc

SEQ ID NO: 31312 - DNA, 15 bp, Homo sapiens
aatgaaggctgcagc

SEQ ID NO: 31313 - DNA, 15 bp, Homo sapiens
gaatgaaggctgcag

SEQ ID NO: 31314 - DNA, 15 bp, Homo sapiens
ggaatgaaggctgca

SEQ ID NO: 31315 - DNA, 15 bp, Homo sapiens
tggaatgaaggctgc

SEQ ID NO: 31316 - DNA, 15 bp, Homo sapiens
gtggaatgaaggctg

SEQ ID NO: 31317 - DNA, 15 bp, Homo sapiens
tgtggaatgaaggct

SEQ ID NO: 31318 - DNA, 15 bp, Homo sapiens
gtgtggaatgaaggc

SEQ ID NO: 31319 - DNA, 15 bp, Homo sapiens
agtgtggaatgaagg

SEQ ID NO: 31320 - DNA, 15 bp, Homo sapiens
cagtgtggaatgaag

SEQ ID NO: 31321 - DNA, 15 bp, Homo sapiens
tcagtgtggaatgaa

SEQ ID NO: 31322 - DNA, 15 bp, Homo sapiens
gtcagtgtggaatga

SEQ ID NO: 31323 - DNA, 15 bp, Homo sapiens
tgtcagtgtggaatg

SEQ ID NO: 31324 - DNA, 15 bp, Homo sapiens
atgtcagtgtggaat

SEQ ID NO: 31325 - DNA, 15 bp, Homo sapiens
catgtcagtgtggaa

SEQ ID NO: 31326 - DNA, 15 bp, Homo sapiens
ccatgtcagtgtgga

SEQ ID NO: 31327 - DNA, 15 bp, Homo sapiens
accatgtcagtgtgg

SEQ ID NO: 31328 - DNA, 15 bp, Homo sapiens
gaccatgtcagtgtg

SEQ ID NO: 31329 - DNA, 15 bp, Homo sapiens
tgaccatgtcagtgt

SEQ ID NO: 31330 - DNA, 15 bp, Homo sapiens
atgaccatgtcagtg

SEQ ID NO: 31331 - DNA, 15 bp, Homo sapiens
aatgaccatgtcagt

SEQ ID NO: 31332 - DNA, 15 bp, Homo sapiens
caatgaccatgtcag

SEQ ID NO: 31333 - DNA, 15 bp, Homo sapiens
gcaatgaccatgtca

SEQ ID NO: 31334 - DNA, 15 bp, Homo sapiens
ggcaatgaccatgtc

SEQ ID NO: 31335 - DNA, 15 bp, Homo sapiens
cggcaatgaccatgt

SEQ ID NO: 31336 - DNA, 15 bp, Homo sapiens
acggcaatgaccatg

SEQ ID NO: 31337 - DNA, 15 bp, Homo sapiens
cacggcaatgaccat

SEQ ID NO: 31338 - DNA, 15 bp, Homo sapiens
acacggcaatgacca

SEQ ID NO: 31339 - DNA, 15 bp, Homo sapiens
cacacggcaatgacc

SEQ ID NO: 31340 - DNA, 15 bp, Homo sapiens
acacacggcaatgac

SEQ ID NO: 31341 - DNA, 15 bp, Homo sapiens
aacacacggcaatga

SEQ ID NO: 31342 - DNA, 15 bp, Homo sapiens
gaacacacggcaatg

SEQ ID NO: 31343 - DNA, 15 bp, Homo sapiens
agaacacacggcaat

SEQ ID NO: 31344 - DNA, 15 bp, Homo sapiens
cagaacacacggcaa

SEQ ID NO: 31345 - DNA, 15 bp, Homo sapiens
ccagaacacacggca

SEQ ID NO: 31346 - DNA, 15 bp, Homo sapiens
cccagaacacacggc

SEQ ID NO: 31347 - DNA, 15 bp, Homo sapiens
acccagaacacacgg

SEQ ID NO: 31348 - DNA, 15 bp, Homo sapiens
gacccagaacacacg

SEQ ID NO: 31349 - DNA, 15 bp, Homo sapiens
ggacccagaacacac

SEQ ID NO: 31350 - DNA, 15 bp, Homo sapiens
tggacccagaacaca

SEQ ID NO: 31351 - DNA, 15 bp, Homo sapiens
ctggacccagaacac

SEQ ID NO: 31352 - DNA, 15 bp, Homo sapiens
tctggacccagaaca

SEQ ID NO: 31353 - DNA, 15 bp, Homo sapiens
atctggacccagaac

SEQ ID NO: 31354 - DNA, 15 bp, Homo sapiens
gatctggacccagaa

SEQ ID NO: 31355 - DNA, 15 bp, Homo sapiens
tgatctggacccaga

SEQ ID NO: 31356 - DNA, 15 bp, Homo sapiens
ctgatctggacccag

SEQ ID NO: 31357 - DNA, 15 bp, Homo sapiens
cctgatctggaccca

SEQ ID NO: 31358 - DNA, 15 bp, Homo sapiens
gcctgatctggaccc

SEQ ID NO: 31359 - DNA, 15 bp, Homo sapiens
tgcctgatctggacc

SEQ ID NO: 31360 - DNA, 15 bp, Homo sapiens
atgcctgatctggac

SEQ ID NO: 31361 - DNA, 15 bp, Homo sapiens
tatgcctgatctgga

SEQ ID NO: 31362 - DNA, 15 bp, Homo sapiens
atatgcctgatctgg

SEQ ID NO: 31363 - DNA, 15 bp, Homo sapiens
aatatgcctgatctg

SEQ ID NO: 31364 - DNA, 15 bp, Homo sapiens
caatatgcctgatct

SEQ ID NO: 31365 - DNA, 15 bp, Homo sapiens
tcaatatgcctgatc

SEQ ID NO: 31366 - DNA, 15 bp, Homo sapiens
gtcaatatgcctgat

SEQ ID NO: 31367 - DNA, 15 bp, Homo sapiens
ggtcaatatgcctga

SEQ ID NO: 31368 - DNA, 15 bp, Homo sapiens
aggtcaatatgcctg

SEQ ID NO: 31369 - DNA, 15 bp, Homo sapiens
caggtcaatatgcct

SEQ ID NO: 31370 - DNA, 15 bp, Homo sapiens
tcaggtcaatatgcc

SEQ ID NO: 31371 - DNA, 15 bp, Homo sapiens
gtcaggtcaatatgc

SEQ ID NO: 31372 - DNA, 15 bp, Homo sapiens
tgtcaggtcaatatg

SEQ ID NO: 31373 - DNA, 15 bp, Homo sapiens
atgtcaggtcaatat

SEQ ID NO: 31374 - DNA, 15 bp, Homo sapiens
tatgtcaggtcaata

SEQ ID NO: 31375 - DNA, 15 bp, Homo sapiens
atatgtcaggtcaat

SEQ ID NO: 31376 - DNA, 15 bp, Homo sapiens
catatgtcaggtcaa

SEQ ID NO: 31377 - DNA, 15 bp, Homo sapiens
tcatatgtcaggtca

SEQ ID NO: 31378 - DNA, 15 bp, Homo sapiens
gtcatatgtcaggtc

SEQ ID NO: 31379 - DNA, 15 bp, Homo sapiens
ggtcatatgtcaggt

SEQ ID NO: 31380 - DNA, 15 bp, Homo sapiens
aggtcatatgtcagg

SEQ ID NO: 31381 - DNA, 15 bp, Homo sapiens
caggtcatatgtcag

SEQ ID NO: 31382 - DNA, 15 bp, Homo sapiens
tcaggtcatatgtca

SEQ ID NO: 31383 - DNA, 15 bp, Homo sapiens
gtcaggtcatatgtc

SEQ ID NO: 31384 - DNA, 15 bp, Homo sapiens
tgtcaggtcatatgt

SEQ ID NO: 31385 - DNA, 15 bp, Homo sapiens
ttgtcaggtcatatg

SEQ ID NO: 31386 - DNA, 15 bp, Homo sapiens
gttgtcaggtcatat

SEQ ID NO: 31387 - DNA, 15 bp, Homo sapiens
tgttgtcaggtcata

SEQ ID NO: 31388 - DNA, 15 bp, Homo sapiens
ctgttgtcaggtcat

SEQ ID NO: 31389 - DNA, 15 bp, Homo sapiens
cctgttgtcaggtca

SEQ ID NO: 31390 - DNA, 15 bp, Homo sapiens
tcctgttgtcaggtc

SEQ ID NO: 31391 - DNA, 15 bp, Homo sapiens
gtcctgttgtcaggt

SEQ ID NO: 31392 - DNA, 15 bp, Homo sapiens
ggtcctgttgtcagg

SEQ ID NO: 31393 - DNA, 15 bp, Homo sapiens
tggtcctgttgtcag

SEQ ID NO: 31394 - DNA, 15 bp, Homo sapiens
gtggtcctgttgtca

SEQ ID NO: 31395 - DNA, 15 bp, Homo sapiens
agtggtcctgttgtc

SEQ ID NO: 31396 - DNA, 15 bp, Homo sapiens
gagtggtcctgttgt

SEQ ID NO: 31397 - DNA, 15 bp, Homo sapiens
tgagtggtcctgttg

SEQ ID NO: 31398 - DNA, 15 bp, Homo sapiens
ctgagtggtcctgtt

SEQ ID NO: 31399 - DNA, 15 bp, Homo sapiens
tctgagtggtcctgt

SEQ ID NO: 31400 - DNA, 15 bp, Homo sapiens
ttctgagtggtcctg

SEQ ID NO: 31401 - DNA, 15 bp, Homo sapiens
tttctgagtggtcct

SEQ ID NO: 31402 - DNA, 15 bp, Homo sapiens
ctttctgagtggtcc

SEQ ID NO: 31403 - DNA, 15 bp, Homo sapiens
actttctgagtggtc

SEQ ID NO: 31404 - DNA, 15 bp, Homo sapiens
gactttctgagtggt

SEQ ID NO: 31405 - DNA, 15 bp, Homo sapiens
ggactttctgagtgg

SEQ ID NO: 31406 - DNA, 15 bp, Homo sapiens
tggactttctgagtg

SEQ ID NO: 31407 - DNA, 15 bp, Homo sapiens
ctggactttctgagt

SEQ ID NO: 31408 - DNA, 15 bp, Homo sapiens
gctggactttctgag

SEQ ID NO: 31409 - DNA, 15 bp, Homo sapiens
tgctggactttctga

SEQ ID NO: 31410 - DNA, 15 bp, Homo sapiens
atgctggactttctg

SEQ ID NO: 31411 - DNA, 15 bp, Homo sapiens
catgctggactttct

SEQ ID NO: 31412 - DNA, 15 bp, Homo sapiens
gcatgctggactttc

SEQ ID NO: 31413 - DNA, 15 bp, Homo sapiens
cgcatgctggacttt

SEQ ID NO: 31414 - DNA, 15 bp, Homo sapiens
ccgcatgctggactt

SEQ ID NO: 31415 - DNA, 15 bp, Homo sapiens
cccgcatgctggact

SEQ ID NO: 31416 - DNA, 15 bp, Homo sapiens
tcccgcatgctggac

SEQ ID NO: 31417 - DNA, 15 bp, Homo sapiens
atcccgcatgctgga

SEQ ID NO: 31418 - DNA, 15 bp, Homo sapiens
tatcccgcatgctgg

SEQ ID NO: 31419 - DNA, 15 bp, Homo sapiens
atatcccgcatgctg

SEQ ID NO: 31420 - DNA, 15 bp, Homo sapiens
catatcccgcatgct

SEQ ID NO: 31421 - DNA, 15 bp, Homo sapiens
tcatatcccgcatgc

SEQ ID NO: 31422 - DNA, 15 bp, Homo sapiens
atcatatcccgcatg

SEQ ID NO: 31423 - DNA, 15 bp, Homo sapiens
aatcatatcccgcat

SEQ ID NO: 31424 - DNA, 15 bp, Homo sapiens
aaatcatatcccgca

SEQ ID NO: 31425 - DNA, 15 bp, Homo sapiens
caaatcatatcccgc

SEQ ID NO: 31426 - DNA, 15 bp, Homo sapiens
ccaaatcatatcccg

SEQ ID NO: 31427 - DNA, 15 bp, Homo sapiens
tccaaatcatatccc

SEQ ID NO: 31428 - DNA, 15 bp, Homo sapiens
ctccaaatcatatcc

SEQ ID NO: 31429 - DNA, 15 bp, Homo sapiens
tctccaaatcatatc

SEQ ID NO: 31430 - DNA, 15 bp, Homo sapiens
ctctccaaatcatat

SEQ ID NO: 31431 - DNA, 15 bp, Homo sapiens
gctctccaaatcata

SEQ ID NO: 31432 - DNA, 15 bp, Homo sapiens
ggctctccaaatcat

SEQ ID NO: 31433 - DNA, 15 bp, Homo sapiens
tggctctccaaatca

SEQ ID NO: 31434 - DNA, 15 bp, Homo sapiens
ctggctctccaaatc

SEQ ID NO: 31435 - DNA, 15 bp, Homo sapiens
actggctctccaaat

SEQ ID NO: 31436 - DNA, 15 bp, Homo sapiens
cactggctctccaaa

SEQ ID NO: 31437 - DNA, 15 bp, Homo sapiens
ccactggctctccaa

SEQ ID NO: 31438 - DNA, 15 bp, Homo sapiens
cccactggctctcca

SEQ ID NO: 31439 - DNA, 15 bp, Homo sapiens
ccccactggctctcc

SEQ ID NO: 31440 - DNA, 15 bp, Homo sapiens
cccccactggctctc

SEQ ID NO: 31441 - DNA, 15 bp, Homo sapiens
tcccccactggctct

SEQ ID NO: 31442 - DNA, 15 bp, Homo sapiens
ttcccccactggctc

SEQ ID NO: 31443 - DNA, 15 bp, Homo sapiens
tttcccccactggct

SEQ ID NO: 31444 - DNA, 15 bp, Homo sapiens
atttcccccactggc

SEQ ID NO: 31445 - DNA, 15 bp, Homo sapiens
gatttcccccactgg

SEQ ID NO: 31446 - DNA, 15 bp, Homo sapiens
tgatttcccccactg

SEQ ID NO: 31447 - DNA, 15 bp, Homo sapiens
atgatttcccccact

SEQ ID NO: 31448 - DNA, 15 bp, Homo sapiens
tatgatttcccccac

SEQ ID NO: 31449 - DNA, 15 bp, Homo sapiens
ctatgatttccccca

SEQ ID NO: 31450 - DNA, 15 bp, Homo sapiens
cctatgatttccccc

SEQ ID NO: 31451 - DNA, 15 bp, Homo sapiens
acctatgatttcccc

SEQ ID NO: 31452 - DNA, 15 bp, Homo sapiens
gacctatgatttccc

SEQ ID NO: 31453 - DNA, 15 bp, Homo sapiens
ggacctatgatttcc

SEQ ID NO: 31454 - DNA, 15 bp, Homo sapiens
aggacctatgatttc

SEQ ID NO: 31455 - DNA, 15 bp, Homo sapiens
aaggacctatgattt

SEQ ID NO: 31456 - DNA, 15 bp, Homo sapiens
aaaggacctatgatt

SEQ ID NO: 31457 - DNA, 15 bp, Homo sapiens
gaaaggacctatgat

SEQ ID NO: 31458 - DNA, 15 bp, Homo sapiens
agaaaggacctatga

SEQ ID NO: 31459 - DNA, 15 bp, Homo sapiens
gagaaaggacctatg

SEQ ID NO: 31460 - DNA, 15 bp, Homo sapiens
agagaaaggacctat

SEQ ID NO: 31461 - DNA, 15 bp, Homo sapiens
cagagaaaggaccta

SEQ ID NO: 31462 - DNA, 15 bp, Homo sapiens
gcagagaaaggacct

SEQ ID NO: 31463 - DNA, 15 bp, Homo sapiens
tgcagagaaaggacc

SEQ ID NO: 31464 - DNA, 15 bp, Homo sapiens
atgcagagaaaggac

SEQ ID NO: 31465 - DNA, 15 bp, Homo sapiens
catgcagagaaagga

SEQ ID NO: 31466 - DNA, 15 bp, Homo sapiens
acatgcagagaaagg

SEQ ID NO: 31467 - DNA, 15 bp, Homo sapiens
cacatgcagagaaag

SEQ ID NO: 31468 - DNA, 15 bp, Homo sapiens
acacatgcagagaaa

SEQ ID NO: 31469 - DNA, 15 bp, Homo sapiens
tacacatgcagagaa

SEQ ID NO: 31470 - DNA, 15 bp, Homo sapiens
atacacatgcagaga

SEQ ID NO: 31471 - DNA, 15 bp, Homo sapiens
aatacacatgcagag

SEQ ID NO: 31472 - DNA, 15 bp, Homo sapiens
gaatacacatgcaga

SEQ ID NO: 31473 - DNA, 15 bp, Homo sapiens
tgaatacacatgcag

SEQ ID NO: 31474 - DNA, 15 bp, Homo sapiens
ctgaatacacatgca

SEQ ID NO: 31475 - DNA, 15 bp, Homo sapiens
cctgaatacacatgc

SEQ ID NO: 31476 - DNA, 15 bp, Homo sapiens
gcctgaatacacatg

SEQ ID NO: 31477 - DNA, 15 bp, Homo sapiens
tgcctgaatacacat

SEQ ID NO: 31478 - DNA, 15 bp, Homo sapiens
ttgcctgaatacaca

SEQ ID NO: 31479 - DNA, 15 bp, Homo sapiens
attgcctgaatacac

SEQ ID NO: 31480 - DNA, 15 bp, Homo sapiens
cattgcctgaataca

SEQ ID NO: 31481 - DNA, 15 bp, Homo sapiens
acattgcctgaatac

SEQ ID NO: 31482 - DNA, 15 bp, Homo sapiens
gacattgcctgaata

SEQ ID NO: 31483 - DNA, 15 bp, Homo sapiens
ggacattgcctgaat

SEQ ID NO: 31484 - DNA, 15 bp, Homo sapiens
gggacattgcctgaa

SEQ ID NO: 31485 - DNA, 15 bp, Homo sapiens
tgggacattgcctga

SEQ ID NO: 31486 - DNA, 15 bp, Homo sapiens
ctgggacattgcctg

SEQ ID NO: 31487 - DNA, 15 bp, Homo sapiens
cctgggacattgcct

SEQ ID NO: 31488 - DNA, 15 bp, Homo sapiens
ccctgggacattgcc

SEQ ID NO: 31489 - DNA, 15 bp, Homo sapiens
gccctgggacattgc

SEQ ID NO: 31490 - DNA, 15 bp, Homo sapiens
agccctgggacattg

SEQ ID NO: 31491 - DNA, 15 bp, Homo sapiens
cagccctgggacatt

SEQ ID NO: 31492 - DNA, 15 bp, Homo sapiens
ccagccctgggacat

SEQ ID NO: 31493 - DNA, 15 bp, Homo sapiens
cccagccctgggaca

SEQ ID NO: 31494 - DNA, 15 bp, Homo sapiens
gcccagccctgggac

SEQ ID NO: 31495 - DNA, 15 bp, Homo sapiens
cgcccagccctggga

SEQ ID NO: 31496 - DNA, 15 bp, Homo sapiens
ccgcccagccctggg

SEQ ID NO: 31497 - DNA, 15 bp, Homo sapiens
gccgcccagccctgg

SEQ ID NO: 31498 - DNA, 15 bp, Homo sapiens
agccgcccagccctg

SEQ ID NO: 31499 - DNA, 15 bp, Homo sapiens
aagccgcccagccct

SEQ ID NO: 31500 - DNA, 15 bp, Homo sapiens
gaagccgcccagccc

SEQ ID NO: 31501 - DNA, 15 bp, Homo sapiens
ggaagccgcccagcc

SEQ ID NO: 31502 - DNA, 15 bp, Homo sapiens
cggaagccgcccagc

SEQ ID NO: 31503 - DNA, 15 bp, Homo sapiens
gcggaagccgcccag

SEQ ID NO: 31504 - DNA, 15 bp, Homo sapiens
tgcggaagccgccca

SEQ ID NO: 31505 - DNA, 15 bp, Homo sapiens
atgcggaagccgccc

SEQ ID NO: 31506 - DNA, 15 bp, Homo sapiens
aatgcggaagccgcc

SEQ ID NO: 31507 - DNA, 15 bp, Homo sapiens
caatgcggaagccgc

SEQ ID NO: 31508 - DNA, 15 bp, Homo sapiens
gcaatgcggaagccg

SEQ ID NO: 31509 - DNA, 15 bp, Homo sapiens
agcaatgcggaagcc

SEQ ID NO: 31510 - DNA, 15 bp, Homo sapiens
aagcaatgcggaagc

SEQ ID NO: 31511 - DNA, 15 bp, Homo sapiens
caagcaatgcggaag

SEQ ID NO: 31512 - DNA, 15 bp, Homo sapiens
ccaagcaatgcggaa

SEQ ID NO: 31513 - DNA, 15 bp, Homo sapiens
tccaagcaatgcgga

SEQ ID NO: 31514 - DNA, 15 bp, Homo sapiens
atccaagcaatgcgg

SEQ ID NO: 31515 - DNA, 15 bp, Homo sapiens
tatccaagcaatgcg

SEQ ID NO: 31516 - DNA, 15 bp, Homo sapiens
atatccaagcaatgc

SEQ ID NO: 31517 - DNA, 15 bp, Homo sapiens
gatatccaagcaatg

SEQ ID NO: 31518 - DNA, 15 bp, Homo sapiens
cgatatccaagcaat

SEQ ID NO: 31519 - DNA, 15 bp, Homo sapiens
ccgatatccaagcaa

SEQ ID NO: 31520 - DNA, 15 bp, Homo sapiens
tccgatatccaagca

SEQ ID NO: 31521 - DNA, 15 bp, Homo sapiens
ttccgatatccaagc

SEQ ID NO: 31522 - DNA, 15 bp, Homo sapiens
tttccgatatccaag

SEQ ID NO: 31523 - DNA, 15 bp, Homo sapiens
ttttccgatatccaa

SEQ ID NO: 31524 - DNA, 15 bp, Homo sapiens
attttccgatatcca

SEQ ID NO: 31525 - DNA, 15 bp, Homo sapiens
cattttccgatatcc

SEQ ID NO: 31526 - DNA, 15 bp, Homo sapiens
gcattttccgatatc

SEQ ID NO: 31527 - DNA, 15 bp, Homo sapiens
tgcattttccgatat

SEQ ID NO: 31528 - DNA, 15 bp, Homo sapiens
ttgcattttccgata

SEQ ID NO: 31529 - DNA, 15 bp, Homo sapiens
tttgcattttccgat

SEQ ID NO: 31530 - DNA, 15 bp, Homo sapiens
ttttgcattttccga

SEQ ID NO: 31531 - DNA, 15 bp, Homo sapiens
tttttgcattttccg

SEQ ID NO: 31532 - DNA, 15 bp, Homo sapiens
atttttgcattttcc

SEQ ID NO: 31533 - DNA, 15 bp, Homo sapiens
catttttgcattttc

SEQ ID NO: 31534 - DNA, 15 bp, Homo sapiens
gcatttttgcatttt

SEQ ID NO: 31535 - DNA, 15 bp, Homo sapiens
ggcatttttgcattt

SEQ ID NO: 31536 - DNA, 15 bp, Homo sapiens
gggcatttttgcatt

SEQ ID NO: 31537 - DNA, 15 bp, Homo sapiens
ggggcatttttgcat

SEQ ID NO: 31538 - DNA, 15 bp, Homo sapiens
aggggcatttttgca

SEQ ID NO: 31539 - DNA, 15 bp, Homo sapiens
caggggcatttttgc

SEQ ID NO: 31540 - DNA, 15 bp, Homo sapiens
tcaggggcatttttg

SEQ ID NO: 31541 - DNA, 15 bp, Homo sapiens
ttcaggggcattttt

SEQ ID NO: 31542 - DNA, 15 bp, Homo sapiens
cttcaggggcatttt

SEQ ID NO: 31543 - DNA, 15 bp, Homo sapiens
tcttcaggggcattt

SEQ ID NO: 31544 - DNA, 15 bp, Homo sapiens
gtcttcaggggcatt

SEQ ID NO: 31545 - DNA, 15 bp, Homo sapiens
agtcttcaggggcat

SEQ ID NO: 31546 - DNA, 15 bp, Homo sapiens
cagtcttcaggggca

SEQ ID NO: 31547 - DNA, 15 bp, Homo sapiens
tcagtcttcaggggc

SEQ ID NO: 31548 - DNA, 15 bp, Homo sapiens
ctcagtcttcagggg

SEQ ID NO: 31549 - DNA, 15 bp, Homo sapiens
tctcagtcttcaggg

SEQ ID NO: 31550 - DNA, 15 bp, Homo sapiens
gtctcagtcttcagg

SEQ ID NO: 31551 - DNA, 15 bp, Homo sapiens
agtctcagtcttcag

SEQ ID NO: 31552 - DNA, 15 bp, Homo sapiens
aagtctcagtcttca

SEQ ID NO: 31553 - DNA, 15 bp, Homo sapiens
gaagtctcagtcttc

SEQ ID NO: 31554 - DNA, 15 bp, Homo sapiens
tgaagtctcagtctt

SEQ ID NO: 31555 - DNA, 15 bp, Homo sapiens
ctgaagtctcagtct

SEQ ID NO: 31556 - DNA, 15 bp, Homo sapiens
actgaagtctcagtc

SEQ ID NO: 31557 - DNA, 15 bp, Homo sapiens
gactgaagtctcagt

SEQ ID NO: 31558 - DNA, 15 bp, Homo sapiens
agactgaagtctcag

SEQ ID NO: 31559 - DNA, 15 bp, Homo sapiens
aagactgaagtctca

SEQ ID NO: 31560 - DNA, 15 bp, Homo sapiens
gaagactgaagtctc

SEQ ID NO: 31561 - DNA, 15 bp, Homo sapiens
tgaagactgaagtct

SEQ ID NO: 31562 - DNA, 15 bp, Homo sapiens
ttgaagactgaagtc

SEQ ID NO: 31563 - DNA, 15 bp, Homo sapiens
tttgaagactgaagt

SEQ ID NO: 31564 - DNA, 15 bp, Homo sapiens
ttttgaagactgaag

SEQ ID NO: 31565 - DNA, 15 bp, Homo sapiens
attttgaagactgaa

SEQ ID NO: 31566 - DNA, 15 bp, Homo sapiens
cattttgaagactga

SEQ ID NO: 31567 - DNA, 15 bp, Homo sapiens
tcattttgaagactg

SEQ ID NO: 31568 - DNA, 15 bp, Homo sapiens
ttcattttgaagact

SEQ ID NO: 31569 - DNA, 15 bp, Homo sapiens
attcattttgaagac

SEQ ID NO: 31570 - DNA, 15 bp, Homo sapiens
cattcattttgaaga

SEQ ID NO: 31571 - DNA, 15 bp, Homo sapiens
acattcattttgaag

SEQ ID NO: 31572 - DNA, 15 bp, Homo sapiens
aacattcattttgaa

SEQ ID NO: 31573 - DNA, 15 bp, Homo sapiens
aaacattcattttga

SEQ ID NO: 31574 - DNA, 15 bp, Homo sapiens
caaacattcattttg

SEQ ID NO: 31575 - DNA, 15 bp, Homo sapiens
ccaaacattcatttt

SEQ ID NO: 31576 - DNA, 15 bp, Homo sapiens
cccaaacattcattt

SEQ ID NO: 31577 - DNA, 15 bp, Homo sapiens
tcccaaacattcatt

SEQ ID NO: 31578 - DNA, 15 bp, Homo sapiens
ttcccaaacattcat

SEQ ID NO: 31579 - DNA, 15 bp, Homo sapiens
tttcccaaacattca

SEQ ID NO: 31580 - DNA, 15 bp, Homo sapiens
ctttcccaaacattc

SEQ ID NO: 31581 - DNA, 15 bp, Homo sapiens
tctttcccaaacatt

SEQ ID NO: 31582 - DNA, 15 bp, Homo sapiens
ttctttcccaaacat

SEQ ID NO: 31583 - DNA, 15 bp, Homo sapiens
tttctttcccaaaca

SEQ ID NO: 31584 - DNA, 15 bp, Homo sapiens
ctttctttcccaaac

SEQ ID NO: 31585 - DNA, 15 bp, Homo sapiens
actttctttcccaaa

SEQ ID NO: 31586 - DNA, 15 bp, Homo sapiens
aactttctttcccaa

SEQ ID NO: 31587 - DNA, 15 bp, Homo sapiens
taactttctttccca

SEQ ID NO: 31588 - DNA, 15 bp, Homo sapiens
ttaactttctttccc

SEQ ID NO: 31589 - DNA, 15 bp, Homo sapiens
gttaactttctttcc

SEQ ID NO: 31590 - DNA, 15 bp, Homo sapiens
cgttaactttctttc

SEQ ID NO: 31591 - DNA, 15 bp, Homo sapiens
ccgttaactttcttt

SEQ ID NO: 31592 - DNA, 15 bp, Homo sapiens
gccgttaactttctt

SEQ ID NO: 31593 - DNA, 15 bp, Homo sapiens
tgccgttaactttct

SEQ ID NO: 31594 - DNA, 15 bp, Homo sapiens
gtgccgttaactttc

SEQ ID NO: 31595 - DNA, 15 bp, Homo sapiens
agtgccgttaacttt

SEQ ID NO: 31596 - DNA, 15 bp, Homo sapiens
cagtgccgttaactt

SEQ ID NO: 31597 - DNA, 15 bp, Homo sapiens
gcagtgccgttaact

SEQ ID NO: 31598 - DNA, 15 bp, Homo sapiens
agcagtgccgttaac

SEQ ID NO: 31599 - DNA, 15 bp, Homo sapiens
cagcagtgccgttaa

SEQ ID NO: 31600 - DNA, 15 bp, Homo sapiens
acagcagtgccgtta

SEQ ID NO: 31601 - DNA, 15 bp, Homo sapiens
tacagcagtgccgtt

SEQ ID NO: 31602 - DNA, 15 bp, Homo sapiens
gtacagcagtgccgt

SEQ ID NO: 31603 - DNA, 15 bp, Homo sapiens
agtacagcagtgccg

SEQ ID NO: 31604 - DNA, 15 bp, Homo sapiens
aagtacagcagtgcc

SEQ ID NO: 31605 - DNA, 15 bp, Homo sapiens
caagtacagcagtgc

SEQ ID NO: 31606 - DNA, 15 bp, Homo sapiens
acaagtacagcagtg

SEQ ID NO: 31607 - DNA, 15 bp, Homo sapiens
cacaagtacagcagt

SEQ ID NO: 31608 - DNA, 15 bp, Homo sapiens
ccacaagtacagcag

SEQ ID NO: 31609 - DNA, 15 bp, Homo sapiens
accacaagtacagca

SEQ ID NO: 31610 - DNA, 15 bp, Homo sapiens
taccacaagtacagc

SEQ ID NO: 31611 - DNA, 15 bp, Homo sapiens
ataccacaagtacag

SEQ ID NO: 31612 - DNA, 15 bp, Homo sapiens
aataccacaagtaca

SEQ ID NO: 31613 - DNA, 15 bp, Homo sapiens
gaataccacaagtac

SEQ ID NO: 31614 - DNA, 15 bp, Homo sapiens
tgaataccacaagta

SEQ ID NO: 31615 - DNA, 15 bp, Homo sapiens
atgaataccacaagt

SEQ ID NO: 31616 - DNA, 15 bp, Homo sapiens
aatgaataccacaag

SEQ ID NO: 31617 - DNA, 15 bp, Homo sapiens
caatgaataccacaa

SEQ ID NO: 31618 - DNA, 15 bp, Homo sapiens
gcaatgaataccaca

SEQ ID NO: 31619 - DNA, 15 bp, Homo sapiens
tgcaatgaataccac

SEQ ID NO: 31620 - DNA, 15 bp, Homo sapiens
atgcaatgaatacca

SEQ ID NO: 31621 - DNA, 15 bp, Homo sapiens
aatgcaatgaatacc

SEQ ID NO: 31622 - DNA, 15 bp, Homo sapiens
taatgcaatgaatac

SEQ ID NO: 31623 - DNA, 15 bp, Homo sapiens
ataatgcaatgaata

SEQ ID NO: 31624 - DNA, 15 bp, Homo sapiens
aataatgcaatgaat

SEQ ID NO: 31625 - DNA, 15 bp, Homo sapiens
aaataatgcaatgaa

SEQ ID NO: 31626 - DNA, 15 bp, Homo sapiens
aaaataatgcaatga

SEQ ID NO: 31627 - DNA, 15 bp, Homo sapiens
taaaataatgcaatg

SEQ ID NO: 31628 - DNA, 15 bp, Homo sapiens
ataaaataatgcaat

SEQ ID NO: 31629 - DNA, 15 bp, Homo sapiens
aataaaataatgcaa

SEQ ID NO: 31630 - DNA, 15 bp, Homo sapiens
aaataaaataatgca

SEQ ID NO: 31631 - DNA, 15 bp, Homo sapiens
aaaataaaataatgc

SEQ ID NO: 31632 - DNA, 15 bp, Homo sapiens
caaaataaaataatg

SEQ ID NO: 31633 - DNA, 15 bp, Homo sapiens
ccaaaataaaataat

SEQ ID NO: 31634 - DNA, 15 bp, Homo sapiens
gccaaaataaaataa

SEQ ID NO: 31635 - DNA, 15 bp, Homo sapiens
agccaaaataaaata

SEQ ID NO: 31636 - DNA, 15 bp, Homo sapiens
aagccaaaataaaat

SEQ ID NO: 31637 - DNA, 15 bp, Homo sapiens
aaagccaaaataaaa

SEQ ID NO: 31638 - DNA, 15 bp, Homo sapiens
gaaagccaaaataaa

SEQ ID NO: 31639 - DNA, 15 bp, Homo sapiens
tgaaagccaaaataa

SEQ ID NO: 31640 - DNA, 15 bp, Homo sapiens
ctgaaagccaaaata

SEQ ID NO: 31641 - DNA, 15 bp, Homo sapiens
gctgaaagccaaaat

SEQ ID NO: 31642 - DNA, 15 bp, Homo sapiens
agctgaaagccaaaa

SEQ ID NO: 31643 - DNA, 15 bp, Homo sapiens
aagctgaaagccaaa

SEQ ID NO: 31644 - DNA, 15 bp, Homo sapiens
taagctgaaagccaa

SEQ ID NO: 31645 - DNA, 15 bp, Homo sapiens
ttaagctgaaagcca

SEQ ID NO: 31646 - DNA, 15 bp, Homo sapiens
tttaagctgaaagcc

SEQ ID NO: 31647 - DNA, 15 bp, Homo sapiens
ctttaagctgaaagc

SEQ ID NO: 31648 - DNA, 15 bp, Homo sapiens
tctttaagctgaaag

SEQ ID NO: 31649 - DNA, 15 bp, Homo sapiens
ctctttaagctgaaa

SEQ ID NO: 31650 - DNA, 15 bp, Homo sapiens
gctctttaagctgaa

SEQ ID NO: 31651 - DNA, 15 bp, Homo sapiens
tgctctttaagctga

SEQ ID NO: 31652 - DNA, 15 bp, Homo sapiens
ttgctctttaagctg

SEQ ID NO: 31653 - DNA, 15 bp, Homo sapiens
tttgctctttaagct

SEQ ID NO: 31654 - DNA, 15 bp, Homo sapiens
atttgctctttaagc

SEQ ID NO: 31655 - DNA, 15 bp, Homo sapiens
aatttgctctttaag

SEQ ID NO: 31656 - DNA, 15 bp, Homo sapiens
gaatttgctctttaa

SEQ ID NO: 31657 - DNA, 15 bp, Homo sapiens
agaatttgctcttta

SEQ ID NO: 31658 - DNA, 15 bp, Homo sapiens
cagaatttgctcttt

SEQ ID NO: 31659 - DNA, 15 bp, Homo sapiens
ccagaatttgctctt

SEQ ID NO: 31660 - DNA, 15 bp, Homo sapiens
cccagaatttgctct

SEQ ID NO: 31661 - DNA, 15 bp, Homo sapiens
acccagaatttgctc

SEQ ID NO: 31662 - DNA, 15 bp, Homo sapiens
gacccagaatttgct

SEQ ID NO: 31663 - DNA, 15 bp, Homo sapiens
tgacccagaatttgc

SEQ ID NO: 31664 - DNA, 15 bp, Homo sapiens
ttgacccagaatttg

SEQ ID NO: 31665 - DNA, 15 bp, Homo sapiens
attgacccagaattt

SEQ ID NO: 31666 - DNA, 15 bp, Homo sapiens
cattgacccagaatt

SEQ ID NO: 31667 - DNA, 15 bp, Homo sapiens
tcattgacccagaat

SEQ ID NO: 31668 - DNA, 15 bp, Homo sapiens
ttcattgacccagaa

SEQ ID NO: 31669 - DNA, 15 bp, Homo sapiens
gttcattgacccaga

SEQ ID NO: 31670 - DNA, 15 bp, Homo sapiens
tgttcattgacccag

SEQ ID NO: 31671 - DNA, 15 bp, Homo sapiens
ctgttcattgaccca

SEQ ID NO: 31672 - DNA, 15 bp, Homo sapiens
tctgttcattgaccc

SEQ ID NO: 31673 - DNA, 15 bp, Homo sapiens
ctctgttcattgacc

SEQ ID NO: 31674 - DNA, 15 bp, Homo sapiens
cctctgttcattgac

SEQ ID NO: 31675 - DNA, 15 bp, Homo sapiens
acctctgttcattga

SEQ ID NO: 31676 - DNA, 15 bp, Homo sapiens
tacctctgttcattg

SEQ ID NO: 31677 - DNA, 15 bp, Homo sapiens
ttacctctgttcatt

SEQ ID NO: 31678 - DNA, 15 bp, Homo sapiens
cttacctctgttcat

SEQ ID NO: 31679 - DNA, 15 bp, Homo sapiens
tcttacctctgttca

SEQ ID NO: 31680 - DNA, 15 bp, Homo sapiens
ttcttacctctgttc

SEQ ID NO: 31681 - DNA, 15 bp, Homo sapiens
tttcttacctctgtt

SEQ ID NO: 31682 - DNA, 15 bp, Homo sapiens
gtttcttacctctgt

SEQ ID NO: 31683 - DNA, 15 bp, Homo sapiens
agtttcttacctctg

SEQ ID NO: 31684 - DNA, 15 bp, Homo sapiens
tagtttcttacctct

SEQ ID NO: 31685 - DNA, 15 bp, Homo sapiens
atagtttcttacctc

SEQ ID NO: 31686 - DNA, 15 bp, Homo sapiens
aatagtttcttacct

SEQ ID NO: 31687 - DNA, 15 bp, Homo sapiens
aaatagtttcttacc

SEQ ID NO: 31688 - DNA, 15 bp, Homo sapiens
aaaatagtttcttac

SEQ ID NO: 31689 - DNA, 15 bp, Homo sapiens
aaaaatagtttctta

SEQ ID NO: 31690 - DNA, 15 bp, Homo sapiens
taaaaatagtttctt

SEQ ID NO: 31691 - DNA, 15 bp, Homo sapiens
ataaaaatagtttct

SEQ ID NO: 31692 - DNA, 15 bp, Homo sapiens
gataaaaatagtttc

SEQ ID NO: 31693 - DNA, 15 bp, Homo sapiens
tgataaaaatagttt

SEQ ID NO: 31694 - DNA, 15 bp, Homo sapiens
ctgataaaaatagtt

SEQ ID NO: 31695 - DNA, 15 bp, Homo sapiens
tctgataaaaatagt

SEQ ID NO: 31696 - DNA, 15 bp, Homo sapiens
ttctgataaaaatag

SEQ ID NO: 31697 - DNA, 15 bp, Homo sapiens
attctgataaaaata

SEQ ID NO: 31698 - DNA, 15 bp, Homo sapiens
aattctgataaaaat

SEQ ID NO: 31699 - DNA, 15 bp, Homo sapiens
taattctgataaaaa

SEQ ID NO: 31700 - DNA, 15 bp, Homo sapiens
ttaattctgataaaa

SEQ ID NO: 31701 - DNA, 15 bp, Homo sapiens
tttaattctgataaa

SEQ ID NO: 31702 - DNA, 15 bp, Homo sapiens
ttttaattctgataa

SEQ ID NO: 31703 - DNA, 15 bp, Homo sapiens
attttaattctgata

SEQ ID NO: 31704 - DNA, 15 bp, Homo sapiens
gattttaattctgat

SEQ ID NO: 31705 - DNA, 15 bp, Homo sapiens
agattttaattctga

SEQ ID NO: 31706 - DNA, 15 bp, Homo sapiens
gagattttaattctg

SEQ ID NO: 31707 - DNA, 15 bp, Homo sapiens
tgagattttaattct

SEQ ID NO: 31708 - DNA, 15 bp, Homo sapiens
ctgagattttaattc

SEQ ID NO: 31709 - DNA, 15 bp, Homo sapiens
tctgagattttaatt

SEQ ID NO: 31710 - DNA, 15 bp, Homo sapiens
atctgagattttaat

SEQ ID NO: 31711 - DNA, 15 bp, Homo sapiens
aatctgagattttaa

SEQ ID NO: 31712 - DNA, 15 bp, Homo sapiens
caatctgagatttta

SEQ ID NO: 31713 - DNA, 15 bp, Homo sapiens
tcaatctgagatttt

SEQ ID NO: 31714 - DNA, 15 bp, Homo sapiens
atcaatctgagattt

SEQ ID NO: 31715 - DNA, 15 bp, Homo sapiens
aatcaatctgagatt

SEQ ID NO: 31716 - DNA, 15 bp, Homo sapiens
gaatcaatctgagat

SEQ ID NO: 31717 - DNA, 15 bp, Homo sapiens
tgaatcaatctgaga

SEQ ID NO: 31718 - DNA, 15 bp, Homo sapiens
atgaatcaatctgag

SEQ ID NO: 31719 - DNA, 15 bp, Homo sapiens
aatgaatcaatctga

SEQ ID NO: 31720 - DNA, 15 bp, Homo sapiens
caatgaatcaatctg

SEQ ID NO: 31721 - DNA, 15 bp, Homo sapiens
acaatgaatcaatct

SEQ ID NO: 31722 - DNA, 15 bp, Homo sapiens
aacaatgaatcaatc

SEQ ID NO: 31723 - DNA, 15 bp, Homo sapiens
caacaatgaatcaat

SEQ ID NO: 31724 - DNA, 15 bp, Homo sapiens
tcaacaatgaatcaa

SEQ ID NO: 31725 - DNA, 15 bp, Homo sapiens
ttcaacaatgaatca

SEQ ID NO: 31726 - DNA, 15 bp, Homo sapiens
tttcaacaatgaatc

SEQ ID NO: 31727 - DNA, 15 bp, Homo sapiens
atttcaacaatgaat

SEQ ID NO: 31728 - DNA, 15 bp, Homo sapiens
tatttcaacaatgaa

SEQ ID NO: 31729 - DNA, 15 bp, Homo sapiens
ttatttcaacaatga

SEQ ID NO: 31730 - DNA, 15 bp, Homo sapiens
attatttcaacaatg

SEQ ID NO: 31731 - DNA, 15 bp, Homo sapiens
aattatttcaacaat

SEQ ID NO: 31732 - DNA, 15 bp, Homo sapiens
caattatttcaacaa

SEQ ID NO: 31733 - DNA, 15 bp, Homo sapiens
gcaattatttcaaca

SEQ ID NO: 31734 - DNA, 15 bp, Homo sapiens
tgcaattatttcaac

SEQ ID NO: 31735 - DNA, 15 bp, Homo sapiens
gtgcaattatttcaa

SEQ ID NO: 31736 - DNA, 15 bp, Homo sapiens
tgtgcaattatttca

SEQ ID NO: 31737 - DNA, 15 bp, Homo sapiens
gtgtgcaattatttc

SEQ ID NO: 31738 - DNA, 15 bp, Homo sapiens
agtgtgcaattattt

SEQ ID NO: 31739 - DNA, 15 bp, Homo sapiens
aagtgtgcaattatt

SEQ ID NO: 31740 - DNA, 15 bp, Homo sapiens
aaagtgtgcaattat

SEQ ID NO: 31741 - DNA, 15 bp, Homo sapiens
aaaagtgtgcaatta

SEQ ID NO: 31742 - DNA, 15 bp, Homo sapiens
taaaagtgtgcaatt

SEQ ID NO: 31743 - DNA, 15 bp, Homo sapiens
ttaaaagtgtgcaat

SEQ ID NO: 31744 - DNA, 15 bp, Homo sapiens
tttaaaagtgtgcaa

SEQ ID NO: 31745 - DNA, 15 bp, Homo sapiens
ttttaaaagtgtgca

SEQ ID NO: 31746 - DNA, 15 bp, Homo sapiens
cttttaaaagtgtgc

SEQ ID NO: 31747 - DNA, 15 bp, Homo sapiens
ccttttaaaagtgtg

SEQ ID NO: 31748 - DNA, 15 bp, Homo sapiens
gccttttaaaagtgt

SEQ ID NO: 31749 - DNA, 15 bp, Homo sapiens
tgccttttaaaagtg

SEQ ID NO: 31750 - DNA, 15 bp, Homo sapiens
gtgccttttaaaagt

SEQ ID NO: 31751 - DNA, 15 bp, Homo sapiens
tgtgccttttaaaag

SEQ ID NO: 31752 - DNA, 15 bp, Homo sapiens
gtgtgccttttaaaa

SEQ ID NO: 31753 - DNA, 15 bp, Homo sapiens
ggtgtgccttttaaa

SEQ ID NO: 31754 - DNA, 15 bp, Homo sapiens
aggtgtgccttttaa

SEQ ID NO: 31755 - DNA, 15 bp, Homo sapiens
gaggtgtgcctttta

SEQ ID NO: 31756 - DNA, 15 bp, Homo sapiens
tgaggtgtgcctttt

SEQ ID NO: 31757 - DNA, 15 bp, Homo sapiens
gtgaggtgtgccttt

SEQ ID NO: 31758 - DNA, 15 bp, Homo sapiens
tgtgaggtgtgcctt

SEQ ID NO: 31759 - DNA, 15 bp, Homo sapiens
ctgtgaggtgtgcct

SEQ ID NO: 31760 - DNA, 15 bp, Homo sapiens
gctgtgaggtgtgcc

SEQ ID NO: 31761 - DNA, 15 bp, Homo sapiens
ggctgtgaggtgtgc

SEQ ID NO: 31762 - DNA, 15 bp, Homo sapiens
tggctgtgaggtgtg

SEQ ID NO: 31763 - DNA, 15 bp, Homo sapiens
atggctgtgaggtgt

SEQ ID NO: 31764 - DNA, 15 bp, Homo sapiens
catggctgtgaggtg

SEQ ID NO: 31765 - DNA, 15 bp, Homo sapiens
tcatggctgtgaggt

SEQ ID NO: 31766 - DNA, 15 bp, Homo sapiens
ctcatggctgtgagg

SEQ ID NO: 31767 - DNA, 15 bp, Homo sapiens
cctcatggctgtgag

SEQ ID NO: 31768 - DNA, 15 bp, Homo sapiens
tcctcatggctgtga

SEQ ID NO: 31769 - DNA, 15 bp, Homo sapiens
ctcctcatggctgtg

SEQ ID NO: 31770 - DNA, 15 bp, Homo sapiens
cctcctcatggctgt

SEQ ID NO: 31771 - DNA, 15 bp, Homo sapiens
ccctcctcatggctg

SEQ ID NO: 31772 - DNA, 15 bp, Homo sapiens
cccctcctcatggct

SEQ ID NO: 31773 - DNA, 15 bp, Homo sapiens
gcccctcctcatggc

SEQ ID NO: 31774 - DNA, 15 bp, Homo sapiens
agcccctcctcatgg

SEQ ID NO: 31775 - DNA, 15 bp, Homo sapiens
cagcccctcctcatg

SEQ ID NO: 31776 - DNA, 15 bp, Homo sapiens
acagcccctcctcat

SEQ ID NO: 31777 - DNA, 15 bp, Homo sapiens
aacagcccctcctca

SEQ ID NO: 31778 - DNA, 15 bp, Homo sapiens
gaacagcccctcctc

SEQ ID NO: 31779 - DNA, 15 bp, Homo sapiens
agaacagcccctcct

SEQ ID NO: 31780 - DNA, 15 bp, Homo sapiens
cagaacagcccctcc

SEQ ID NO: 31781 - DNA, 15 bp, Homo sapiens
acagaacagcccctc

SEQ ID NO: 31782 - DNA, 15 bp, Homo sapiens
tacagaacagcccct

SEQ ID NO: 31783 - DNA, 15 bp, Homo sapiens
ctacagaacagcccc

SEQ ID NO: 31784 - DNA, 15 bp, Homo sapiens
cctacagaacagccc

SEQ ID NO: 31785 - DNA, 15 bp, Homo sapiens
acctacagaacagcc

SEQ ID NO: 31786 - DNA, 15 bp, Homo sapiens
cacctacagaacagc

SEQ ID NO: 31787 - DNA, 15 bp, Homo sapiens
gcacctacagaacag

SEQ ID NO: 31788 - DNA, 15 bp, Homo sapiens
agcacctacagaaca

SEQ ID NO: 31789 - DNA, 15 bp, Homo sapiens
gagcacctacagaac

SEQ ID NO: 31790 - DNA, 15 bp, Homo sapiens
tgagcacctacagaa

SEQ ID NO: 31791 - DNA, 15 bp, Homo sapiens
ctgagcacctacaga

SEQ ID NO: 31792 - DNA, 15 bp, Homo sapiens
cctgagcacctacag

SEQ ID NO: 31793 - DNA, 15 bp, Homo sapiens
tcctgagcacctaca

SEQ ID NO: 31794 - DNA, 15 bp, Homo sapiens
ttcctgagcacctac

SEQ ID NO: 31795 - DNA, 15 bp, Homo sapiens
cttcctgagcaccta

SEQ ID NO: 31796 - DNA, 15 bp, Homo sapiens
acttcctgagcacct

SEQ ID NO: 31797 - DNA, 15 bp, Homo sapiens
gacttcctgagcacc

SEQ ID NO: 31798 - DNA, 15 bp, Homo sapiens
tgacttcctgagcac

SEQ ID NO: 31799 - DNA, 15 bp, Homo sapiens
gtgacttcctgagca

SEQ ID NO: 31800 - DNA, 15 bp, Homo sapiens
tgtgacttcctgagc

SEQ ID NO: 31801 - DNA, 15 bp, Homo sapiens
ttgtgacttcctgag

SEQ ID NO: 31802 - DNA, 15 bp, Homo sapiens
cttgtgacttcctga

SEQ ID NO: 31803 - DNA, 15 bp, Homo sapiens
tcttgtgacttcctg

SEQ ID NO: 31804 - DNA, 15 bp, Homo sapiens
gtcttgtgacttcct

SEQ ID NO: 31805 - DNA, 15 bp, Homo sapiens
tgtcttgtgacttcc

SEQ ID NO: 31806 - DNA, 15 bp, Homo sapiens
gtgtcttgtgacttc

SEQ ID NO: 31807 - DNA, 15 bp, Homo sapiens
cgtgtcttgtgactt

SEQ ID NO: 31808 - DNA, 15 bp, Homo sapiens
acgtgtcttgtgact

SEQ ID NO: 31809 - DNA, 15 bp, Homo sapiens
gacgtgtcttgtgac

SEQ ID NO: 31810 - DNA, 15 bp, Homo sapiens
ggacgtgtcttgtga

SEQ ID NO: 31811 - DNA, 15 bp, Homo sapiens
aggacgtgtcttgtg

SEQ ID NO: 31812 - DNA, 15 bp, Homo sapiens
caggacgtgtcttgt

SEQ ID NO: 31813 - DNA, 15 bp, Homo sapiens
tcaggacgtgtcttg

SEQ ID NO: 31814 - DNA, 15 bp, Homo sapiens
ttcaggacgtgtctt

SEQ ID NO: 31815 - DNA, 15 bp, Homo sapiens
cttcaggacgtgtct

SEQ ID NO: 31816 - DNA, 15 bp, Homo sapiens
tcttcaggacgtgtc

SEQ ID NO: 31817 - DNA, 15 bp, Homo sapiens
ttcttcaggacgtgt

SEQ ID NO: 31818 - DNA, 15 bp, Homo sapiens
attcttcaggacgtg

SEQ ID NO: 31819 - DNA, 15 bp, Homo sapiens
tattcttcaggacgt

SEQ ID NO: 31820 - DNA, 15 bp, Homo sapiens
atattcttcaggacg

SEQ ID NO: 31821 - DNA, 15 bp, Homo sapiens
catattcttcaggac

SEQ ID NO: 31822 - DNA, 15 bp, Homo sapiens
acatattcttcagga

SEQ ID NO: 31823 - DNA, 15 bp, Homo sapiens
cacatattcttcagg

SEQ ID NO: 31824 - DNA, 15 bp, Homo sapiens
ccacatattcttcag

SEQ ID NO: 31825 - DNA, 15 bp, Homo sapiens
gccacatattcttca

SEQ ID NO: 31826 - DNA, 15 bp, Homo sapiens
agccacatattcttc

SEQ ID NO: 31827 - DNA, 15 bp, Homo sapiens
tagccacatattctt

SEQ ID NO: 31828 - DNA, 15 bp, Homo sapiens
ctagccacatattct

SEQ ID NO: 31829 - DNA, 15 bp, Homo sapiens
cctagccacatattc

SEQ ID NO: 31830 - DNA, 15 bp, Homo sapiens
ccctagccacatatt

SEQ ID NO: 31831 - DNA, 15 bp, Homo sapiens
tccctagccacatat

SEQ ID NO: 31832 - DNA, 15 bp, Homo sapiens
gtccctagccacata

SEQ ID NO: 31833 - DNA, 15 bp, Homo sapiens
tgtccctagccacat

SEQ ID NO: 31834 - DNA, 15 bp, Homo sapiens
atgtccctagccaca

SEQ ID NO: 31835 - DNA, 15 bp, Homo sapiens
gatgtccctagccac

SEQ ID NO: 31836 - DNA, 15 bp, Homo sapiens
ggatgtccctagcca

SEQ ID NO: 31837 - DNA, 15 bp, Homo sapiens
gggatgtccctagcc

SEQ ID NO: 31838 - DNA, 15 bp, Homo sapiens
tgggatgtccctagc

SEQ ID NO: 31839 - DNA, 15 bp, Homo sapiens
ctgggatgtccctag

SEQ ID NO: 31840 - DNA, 15 bp, Homo sapiens
tctgggatgtcccta

SEQ ID NO: 31841 - DNA, 15 bp, Homo sapiens
gtctgggatgtccct

SEQ ID NO: 31842 - DNA, 15 bp, Homo sapiens
agtctgggatgtccc

SEQ ID NO: 31843 - DNA, 15 bp, Homo sapiens
gagtctgggatgtcc

SEQ ID NO: 31844 - DNA, 15 bp, Homo sapiens
tgagtctgggatgtc

SEQ ID NO: 31845 - DNA, 15 bp, Homo sapiens
ctgagtctgggatgt

SEQ ID NO: 31846 - DNA, 15 bp, Homo sapiens
tctgagtctgggatg

SEQ ID NO: 31847 - DNA, 15 bp, Homo sapiens
ttctgagtctgggat

SEQ ID NO: 31848 - DNA, 15 bp, Homo sapiens
cttctgagtctggga

SEQ ID NO: 31849 - DNA, 15 bp, Homo sapiens
tcttctgagtctggg

SEQ ID NO: 31850 - DNA, 15 bp, Homo sapiens
gtcttctgagtctgg

SEQ ID NO: 31851 - DNA, 15 bp, Homo sapiens
tgtcttctgagtctg

SEQ ID NO: 31852 - DNA, 15 bp, Homo sapiens
gtgtcttctgagtct

SEQ ID NO: 31853 - DNA, 15 bp, Homo sapiens
agtgtcttctgagtc

SEQ ID NO: 31854 - DNA, 15 bp, Homo sapiens
gagtgtcttctgagt

SEQ ID NO: 31855 - DNA, 15 bp, Homo sapiens
tgagtgtcttctgag

SEQ ID NO: 31856 - DNA, 15 bp, Homo sapiens
ctgagtgtcttctga

SEQ ID NO: 31857 - DNA, 15 bp, Homo sapiens
actgagtgtcttctg

SEQ ID NO: 31858 - DNA, 15 bp, Homo sapiens
cactgagtgtcttct

SEQ ID NO: 31859 - DNA, 15 bp, Homo sapiens
ccactgagtgtcttc

SEQ ID NO: 31860 - DNA, 15 bp, Homo sapiens
accactgagtgtctt

SEQ ID NO: 31861 - DNA, 15 bp, Homo sapiens
caccactgagtgtct

SEQ ID NO: 31862 - DNA, 15 bp, Homo sapiens
gcaccactgagtgtc

SEQ ID NO: 31863 - DNA, 15 bp, Homo sapiens
ggcaccactgagtgt

SEQ ID NO: 31864 - DNA, 15 bp, Homo sapiens
aggcaccactgagtg

SEQ ID NO: 31865 - DNA, 15 bp, Homo sapiens
gaggcaccactgagt

SEQ ID NO: 31866 - DNA, 15 bp, Homo sapiens
agaggcaccactgag

SEQ ID NO: 31867 - DNA, 15 bp, Homo sapiens
aagaggcaccactga

SEQ ID NO: 31868 - DNA, 15 bp, Homo sapiens
gaagaggcaccactg

SEQ ID NO: 31869 - DNA, 15 bp, Homo sapiens
agaagaggcaccact

SEQ ID NO: 31870 - DNA, 15 bp, Homo sapiens
aagaagaggcaccac

SEQ ID NO: 31871 - DNA, 15 bp, Homo sapiens
caagaagaggcacca

SEQ ID NO: 31872 - DNA, 15 bp, Homo sapiens
ccaagaagaggcacc

SEQ ID NO: 31873 - DNA, 15 bp, Homo sapiens
tccaagaagaggcac

SEQ ID NO: 31874 - DNA, 15 bp, Homo sapiens
ctccaagaagaggca

SEQ ID NO: 31875 - DNA, 15 bp, Homo sapiens
cctccaagaagaggc

SEQ ID NO: 31876 - DNA, 15 bp, Homo sapiens
tcctccaagaagagg

SEQ ID NO: 31877 - DNA, 15 bp, Homo sapiens
gtcctccaagaagag

SEQ ID NO: 31878 - DNA, 15 bp, Homo sapiens
tgtcctccaagaaga

SEQ ID NO: 31879 - DNA, 15 bp, Homo sapiens
atgtcctccaagaag

SEQ ID NO: 31880 - DNA, 15 bp, Homo sapiens
tatgtcctccaagaa

SEQ ID NO: 31881 - DNA, 15 bp, Homo sapiens
ttatgtcctccaaga

SEQ ID NO: 31882 - DNA, 15 bp, Homo sapiens
cttatgtcctccaag

SEQ ID NO: 31883 - DNA, 15 bp, Homo sapiens
acttatgtcctccaa

SEQ ID NO: 31884 - DNA, 15 bp, Homo sapiens
cacttatgtcctcca

SEQ ID NO: 31885 - DNA, 15 bp, Homo sapiens
ccacttatgtcctcc

SEQ ID NO: 31886 - DNA, 15 bp, Homo sapiens
cccacttatgtcctc

SEQ ID NO: 31887 - DNA, 15 bp, Homo sapiens
ccccacttatgtcct

SEQ ID NO: 31888 - DNA, 15 bp, Homo sapiens
cccccacttatgtcc

SEQ ID NO: 31889 - DNA, 15 bp, Homo sapiens
acccccacttatgtc

SEQ ID NO: 31890 - DNA, 15 bp, Homo sapiens
cacccccacttatgt

SEQ ID NO: 31891 - DNA, 15 bp, Homo sapiens
ccacccccacttatg

SEQ ID NO: 31892 - DNA, 15 bp, Homo sapiens
gccacccccacttat

SEQ ID NO: 31893 - DNA, 15 bp, Homo sapiens
tgccacccccactta

SEQ ID NO: 31894 - DNA, 15 bp, Homo sapiens
atgccacccccactt

SEQ ID NO: 31895 - DNA, 15 bp, Homo sapiens
aatgccacccccact

SEQ ID NO: 31896 - DNA, 15 bp, Homo sapiens
gaatgccacccccac

SEQ ID NO: 31897 - DNA, 15 bp, Homo sapiens
ggaatgccaccccca

SEQ ID NO: 31898 - DNA, 15 bp, Homo sapiens
gggaatgccaccccc

SEQ ID NO: 31899 - DNA, 15 bp, Homo sapiens
agggaatgccacccc

SEQ ID NO: 31900 - DNA, 15 bp, Homo sapiens
cagggaatgccaccc

SEQ ID NO: 31901 - DNA, 15 bp, Homo sapiens
tcagggaatgccacc

SEQ ID NO: 31902 - DNA, 15 bp, Homo sapiens
atcagggaatgccac

SEQ ID NO: 31903 - DNA, 15 bp, Homo sapiens
catcagggaatgcca

SEQ ID NO: 31904 - DNA, 15 bp, Homo sapiens
acatcagggaatgcc

SEQ ID NO: 31905 - DNA, 15 bp, Homo sapiens
cacatcagggaatgc

SEQ ID NO: 31906 - DNA, 15 bp, Homo sapiens
ccacatcagggaatg

SEQ ID NO: 31907 - DNA, 15 bp, Homo sapiens
gccacatcagggaat

SEQ ID NO: 31908 - DNA, 15 bp, Homo sapiens
cgccacatcagggaa

SEQ ID NO: 31909 - DNA, 15 bp, Homo sapiens
acgccacatcaggga

SEQ ID NO: 31910 - DNA, 15 bp, Homo sapiens
aacgccacatcaggg

SEQ ID NO: 31911 - DNA, 15 bp, Homo sapiens
aaacgccacatcagg

SEQ ID NO: 31912 - DNA, 15 bp, Homo sapiens
gaaacgccacatcag

SEQ ID NO: 31913 - DNA, 15 bp, Homo sapiens
tgaaacgccacatca

SEQ ID NO: 31914 - DNA, 15 bp, Homo sapiens
ctgaaacgccacatc

SEQ ID NO: 31915 - DNA, 15 bp, Homo sapiens
tctgaaacgccacat

SEQ ID NO: 31916 - DNA, 15 bp, Homo sapiens
ctctgaaacgccaca

SEQ ID NO: 31917 - DNA, 15 bp, Homo sapiens
gctctgaaacgccac

SEQ ID NO: 31918 - DNA, 15 bp, Homo sapiens
tgctctgaaacgcca

SEQ ID NO: 31919 - DNA, 15 bp, Homo sapiens
atgctctgaaacgcc

SEQ ID NO: 31920 - DNA, 15 bp, Homo sapiens
aatgctctgaaacgc

SEQ ID NO: 31921 - DNA, 15 bp, Homo sapiens
gaatgctctgaaacg

SEQ ID NO: 31922 - DNA, 15 bp, Homo sapiens
agaatgctctgaaac

SEQ ID NO: 31923 - DNA, 15 bp, Homo sapiens
gagaatgctctgaaa

SEQ ID NO: 31924 - DNA, 15 bp, Homo sapiens
tgagaatgctctgaa

SEQ ID NO: 31925 - DNA, 15 bp, Homo sapiens
gtgagaatgctctga

SEQ ID NO: 31926 - DNA, 15 bp, Homo sapiens
ggtgagaatgctctg

SEQ ID NO: 31927 - DNA, 15 bp, Homo sapiens
gggtgagaatgctct

SEQ ID NO: 31928 - DNA, 15 bp, Homo sapiens
tgggtgagaatgctc

SEQ ID NO: 31929 - DNA, 15 bp, Homo sapiens
ttgggtgagaatgct

SEQ ID NO: 31930 - DNA, 15 bp, Homo sapiens
tttgggtgagaatgc

SEQ ID NO: 31931 - DNA, 15 bp, Homo sapiens
ttttgggtgagaatg

SEQ ID NO: 31932 - DNA, 15 bp, Homo sapiens
tttttgggtgagaat

SEQ ID NO: 31933 - DNA, 15 bp, Homo sapiens
ttttttgggtgagaa

SEQ ID NO: 31934 - DNA, 15 bp, Homo sapiens
tttttttgggtgaga

SEQ ID NO: 31935 - DNA, 15 bp, Homo sapiens
ctttttttgggtgag

SEQ ID NO: 31936 - DNA, 15 bp, Homo sapiens
gctttttttgggtga

SEQ ID NO: 31937 - DNA, 15 bp, Homo sapiens
agctttttttgggtg

SEQ ID NO: 31938 - DNA, 15 bp, Homo sapiens
aagctttttttgggt

SEQ ID NO: 31939 - DNA, 15 bp, Homo sapiens
gaagctttttttggg

SEQ ID NO: 31940 - DNA, 15 bp, Homo sapiens
agaagctttttttgg

SEQ ID NO: 31941 - DNA, 15 bp, Homo sapiens
tagaagctttttttg

SEQ ID NO: 31942 - DNA, 15 bp, Homo sapiens
ttagaagcttttttt

SEQ ID NO: 31943 - DNA, 15 bp, Homo sapiens
tttagaagctttttt

SEQ ID NO: 31944 - DNA, 15 bp, Homo sapiens
ttttagaagcttttt

SEQ ID NO: 31945 - DNA, 15 bp, Homo sapiens
gttttagaagctttt

SEQ ID NO: 31946 - DNA, 15 bp, Homo sapiens
ggttttagaagcttt

SEQ ID NO: 31947 - DNA, 15 bp, Homo sapiens
aggttttagaagctt

SEQ ID NO: 31948 - DNA, 15 bp, Homo sapiens
gaggttttagaagct

SEQ ID NO: 31949 - DNA, 15 bp, Homo sapiens
ggaggttttagaagc

SEQ ID NO: 31950 - DNA, 15 bp, Homo sapiens
tggaggttttagaag

SEQ ID NO: 31951 - DNA, 15 bp, Homo sapiens
ttggaggttttagaa

SEQ ID NO: 31952 - DNA, 15 bp, Homo sapiens
cttggaggttttaga

SEQ ID NO: 31953 - DNA, 15 bp, Homo sapiens
acttggaggttttag

SEQ ID NO: 31954 - DNA, 15 bp, Homo sapiens
tacttggaggtttta

SEQ ID NO: 31955 - DNA, 15 bp, Homo sapiens
atacttggaggtttt

SEQ ID NO: 31956 - DNA, 15 bp, Homo sapiens
tatacttggaggttt

SEQ ID NO: 31957 - DNA, 15 bp, Homo sapiens
atatacttggaggtt

SEQ ID NO: 31958 - DNA, 15 bp, Homo sapiens
tatatacttggaggt

SEQ ID NO: 31959 - DNA, 15 bp, Homo sapiens
ttatatacttggagg

SEQ ID NO: 31960 - DNA, 15 bp, Homo sapiens
gttatatacttggag

SEQ ID NO: 31961 - DNA, 15 bp, Homo sapiens
tgttatatacttgga

SEQ ID NO: 31962 - DNA, 15 bp, Homo sapiens
ctgttatatacttgg

SEQ ID NO: 31963 - DNA, 15 bp, Homo sapiens
actgttatatacttg

SEQ ID NO: 31964 - DNA, 15 bp, Homo sapiens
aactgttatatactt

SEQ ID NO: 31965 - DNA, 15 bp, Homo sapiens
aaactgttatatact

SEQ ID NO: 31966 - DNA, 15 bp, Homo sapiens
taaactgttatatac

SEQ ID NO: 31967 - DNA, 15 bp, Homo sapiens
ataaactgttatata

SEQ ID NO: 31968 - DNA, 15 bp, Homo sapiens
tataaactgttatat

SEQ ID NO: 31969 - DNA, 15 bp, Homo sapiens
ttataaactgttata

SEQ ID NO: 31970 - DNA, 15 bp, Homo sapiens
attataaactgttat

SEQ ID NO: 31971 - DNA, 15 bp, Homo sapiens
tattataaactgtta

SEQ ID NO: 31972 - DNA, 15 bp, Homo sapiens
gtattataaactgtt

SEQ ID NO: 31973 - DNA, 15 bp, Homo sapiens
agtattataaactgt

SEQ ID NO: 31974 - DNA, 15 bp, Homo sapiens
gagtattataaactg

SEQ ID NO: 31975 - DNA, 15 bp, Homo sapiens
ggagtattataaact

SEQ ID NO: 31976 - DNA, 15 bp, Homo sapiens
tggagtattataaac

SEQ ID NO: 31977 - DNA, 15 bp, Homo sapiens
ttggagtattataaa

SEQ ID NO: 31978 - DNA, 15 bp, Homo sapiens
gttggagtattataa

SEQ ID NO: 31979 - DNA, 15 bp, Homo sapiens
tgttggagtattata

SEQ ID NO: 31980 - DNA, 15 bp, Homo sapiens
ttgttggagtattat

SEQ ID NO: 31981 - DNA, 15 bp, Homo sapiens
cttgttggagtatta

SEQ ID NO: 31982 - DNA, 15 bp, Homo sapiens
tcttgttggagtatt

SEQ ID NO: 31983 - DNA, 15 bp, Homo sapiens
ctcttgttggagtat

SEQ ID NO: 31984 - DNA, 15 bp, Homo sapiens
cctcttgttggagta

SEQ ID NO: 31985 - DNA, 15 bp, Homo sapiens
ccctcttgttggagt

SEQ ID NO: 31986 - DNA, 15 bp, Homo sapiens
gccctcttgttggag

SEQ ID NO: 31987 - DNA, 15 bp, Homo sapiens
ggccctcttgttgga

SEQ ID NO: 31988 - DNA, 15 bp, Homo sapiens
aggccctcttgttgg

SEQ ID NO: 31989 - DNA, 15 bp, Homo sapiens
aaggccctcttgttg

SEQ ID NO: 31990 - DNA, 15 bp, Homo sapiens
caaggccctcttgtt

SEQ ID NO: 31991 - DNA, 15 bp, Homo sapiens
acaaggccctcttgt

SEQ ID NO: 31992 - DNA, 15 bp, Homo sapiens
tacaaggccctcttg

SEQ ID NO: 31993 - DNA, 15 bp, Homo sapiens
ctacaaggccctctt

SEQ ID NO: 31994 - DNA, 15 bp, Homo sapiens
gctacaaggccctct

SEQ ID NO: 31995 - DNA, 15 bp, Homo sapiens
ggctacaaggccctc

SEQ ID NO: 31996 - DNA, 15 bp, Homo sapiens
aggctacaaggccct

SEQ ID NO: 31997 - DNA, 15 bp, Homo sapiens
taggctacaaggccc

SEQ ID NO: 31998 - DNA, 15 bp, Homo sapiens
ttaggctacaaggcc

SEQ ID NO: 31999 - DNA, 15 bp, Homo sapiens
tttaggctacaaggc

SEQ ID NO: 32000 - DNA, 15 bp, Homo sapiens
gtttaggctacaagg

SEQ ID NO: 32001 - DNA, 15 bp, Homo sapiens
ggtttaggctacaag

SEQ ID NO: 32002 - DNA, 15 bp, Homo sapiens
gggtttaggctacaa

SEQ ID NO: 32003 - DNA, 15 bp, Homo sapiens
cgggtttaggctaca

SEQ ID NO: 32004 - DNA, 15 bp, Homo sapiens
ccgggtttaggctac

SEQ ID NO: 32005 - DNA, 15 bp, Homo sapiens
cccgggtttaggcta

SEQ ID NO: 32006 - DNA, 15 bp, Homo sapiens
tcccgggtttaggct

SEQ ID NO: 32007 - DNA, 15 bp, Homo sapiens
gtcccgggtttaggc

SEQ ID NO: 32008 - DNA, 15 bp, Homo sapiens
tgtcccgggtttagg

SEQ ID NO: 32009 - DNA, 15 bp, Homo sapiens
gtgtcccgggtttag

SEQ ID NO: 32010 - DNA, 15 bp, Homo sapiens
agtgtcccgggttta

SEQ ID NO: 32011 - DNA, 15 bp, Homo sapiens
gagtgtcccgggttt

SEQ ID NO: 32012 - DNA, 15 bp, Homo sapiens
ggagtgtcccgggtt

SEQ ID NO: 32013 - DNA, 15 bp, Homo sapiens
aggagtgtcccgggt

SEQ ID NO: 32014 - DNA, 15 bp, Homo sapiens
aaggagtgtcccggg

SEQ ID NO: 32015 - DNA, 15 bp, Homo sapiens
caaggagtgtcccgg

SEQ ID NO: 32016 - DNA, 15 bp, Homo sapiens
ccaaggagtgtcccg

SEQ ID NO: 32017 - DNA, 15 bp, Homo sapiens
gccaaggagtgtccc

SEQ ID NO: 32018 - DNA, 15 bp, Homo sapiens
ggccaaggagtgtcc

SEQ ID NO: 32019 - DNA, 15 bp, Homo sapiens
gggccaaggagtgtc

SEQ ID NO: 32020 - DNA, 15 bp, Homo sapiens
tgggccaaggagtgt

SEQ ID NO: 32021 - DNA, 15 bp, Homo sapiens
atgggccaaggagtg

SEQ ID NO: 32022 - DNA, 15 bp, Homo sapiens
aatgggccaaggagt

SEQ ID NO: 32023 - DNA, 15 bp, Homo sapiens
gaatgggccaaggag

SEQ ID NO: 32024 - DNA, 15 bp, Homo sapiens
ggaatgggccaagga

SEQ ID NO: 32025 - DNA, 15 bp, Homo sapiens
aggaatgggccaagg

SEQ ID NO: 32026 - DNA, 15 bp, Homo sapiens
aaggaatgggccaag

SEQ ID NO: 32027 - DNA, 15 bp, Homo sapiens
aaaggaatgggccaa

SEQ ID NO: 32028 - DNA, 15 bp, Homo sapiens
aaaaggaatgggcca

SEQ ID NO: 32029 - DNA, 15 bp, Homo sapiens
taaaaggaatgggcc

SEQ ID NO: 32030 - DNA, 15 bp, Homo sapiens
ttaaaaggaatgggc

SEQ ID NO: 32031 - DNA, 15 bp, Homo sapiens
cttaaaaggaatggg

SEQ ID NO: 32032 - DNA, 15 bp, Homo sapiens
gcttaaaaggaatgg

SEQ ID NO: 32033 - DNA, 15 bp, Homo sapiens
agcttaaaaggaatg

SEQ ID NO: 32034 - DNA, 15 bp, Homo sapiens
aagcttaaaaggaat

SEQ ID NO: 32035 - DNA, 15 bp, Homo sapiens
gaagcttaaaaggaa

SEQ ID NO: 32036 - DNA, 15 bp, Homo sapiens
tgaagcttaaaagga

SEQ ID NO: 32037 - DNA, 15 bp, Homo sapiens
ctgaagcttaaaagg

SEQ ID NO: 32038 - DNA, 15 bp, Homo sapiens
cctgaagcttaaaag

SEQ ID NO: 32039 - DNA, 15 bp, Homo sapiens
ccctgaagcttaaaa

SEQ ID NO: 32040 - DNA, 15 bp, Homo sapiens
tccctgaagcttaaa

SEQ ID NO: 32041 - DNA, 15 bp, Homo sapiens
ctccctgaagcttaa

SEQ ID NO: 32042 - DNA, 15 bp, Homo sapiens
actccctgaagctta

SEQ ID NO: 32043 - DNA, 15 bp, Homo sapiens
cactccctgaagctt

SEQ ID NO: 32044 - DNA, 15 bp, Homo sapiens
acactccctgaagct

SEQ ID NO: 32045 - DNA, 15 bp, Homo sapiens
cacactccctgaagc

SEQ ID NO: 32046 - DNA, 15 bp, Homo sapiens
ccacactccctgaag

SEQ ID NO: 32047 - DNA, 15 bp, Homo sapiens
cccacactccctgaa

SEQ ID NO: 32048 - DNA, 15 bp, Homo sapiens
gcccacactccctga

SEQ ID NO: 32049 - DNA, 15 bp, Homo sapiens
ggcccacactccctg

SEQ ID NO: 32050 - DNA, 15 bp, Homo sapiens
tggcccacactccct

SEQ ID NO: 32051 - DNA, 15 bp, Homo sapiens
ctggcccacactccc

SEQ ID NO: 32052 - DNA, 15 bp, Homo sapiens
gctggcccacactcc

SEQ ID NO: 32053 - DNA, 15 bp, Homo sapiens
ggctggcccacactc

SEQ ID NO: 32054 - DNA, 15 bp, Homo sapiens
gggctggcccacact

SEQ ID NO: 32055 - DNA, 15 bp, Homo sapiens
ggggctggcccacac

SEQ ID NO: 32056 - DNA, 15 bp, Homo sapiens
tggggctggcccaca

SEQ ID NO: 32057 - DNA, 15 bp, Homo sapiens
ctggggctggcccac

SEQ ID NO: 32058 - DNA, 15 bp, Homo sapiens
tctggggctggccca

SEQ ID NO: 32059 - DNA, 15 bp, Homo sapiens
gtctggggctggccc

SEQ ID NO: 32060 - DNA, 15 bp, Homo sapiens
agtctggggctggcc

SEQ ID NO: 32061 - DNA, 15 bp, Homo sapiens
gagtctggggctggc

SEQ ID NO: 32062 - DNA, 15 bp, Homo sapiens
tgagtctggggctgg

SEQ ID NO: 32063 - DNA, 15 bp, Homo sapiens
gtgagtctggggctg

SEQ ID NO: 32064 - DNA, 15 bp, Homo sapiens
ggtgagtctggggct

SEQ ID NO: 32065 - DNA, 15 bp, Homo sapiens
gggtgagtctggggc

SEQ ID NO: 32066 - DNA, 15 bp, Homo sapiens
ggggtgagtctgggg

SEQ ID NO: 32067 - DNA, 15 bp, Homo sapiens
tggggtgagtctggg

SEQ ID NO: 32068 - DNA, 15 bp, Homo sapiens
atggggtgagtctgg

SEQ ID NO: 32069 - DNA, 15 bp, Homo sapiens
aatggggtgagtctg

SEQ ID NO: 32070 - DNA, 15 bp, Homo sapiens
gaatggggtgagtct

SEQ ID NO: 32071 - DNA, 15 bp, Homo sapiens
ggaatggggtgagtc

SEQ ID NO: 32072 - DNA, 15 bp, Homo sapiens
aggaatggggtgagt

SEQ ID NO: 32073 - DNA, 15 bp, Homo sapiens
caggaatggggtgag

SEQ ID NO: 32074 - DNA, 15 bp, Homo sapiens
tcaggaatggggtga

SEQ ID NO: 32075 - DNA, 15 bp, Homo sapiens
ctcaggaatggggtg

SEQ ID NO: 32076 - DNA, 15 bp, Homo sapiens
cctcaggaatggggt

SEQ ID NO: 32077 - DNA, 15 bp, Homo sapiens
gcctcaggaatgggg

SEQ ID NO: 32078 - DNA, 15 bp, Homo sapiens
tgcctcaggaatggg

SEQ ID NO: 32079 - DNA, 15 bp, Homo sapiens
atgcctcaggaatgg

SEQ ID NO: 32080 - DNA, 15 bp, Homo sapiens
gatgcctcaggaatg

SEQ ID NO: 32081 - DNA, 15 bp, Homo sapiens
ggatgcctcaggaat

SEQ ID NO: 32082 - DNA, 15 bp, Homo sapiens
aggatgcctcaggaa

SEQ ID NO: 32083 - DNA, 15 bp, Homo sapiens
caggatgcctcagga

SEQ ID NO: 32084 - DNA, 15 bp, Homo sapiens
ccaggatgcctcagg

SEQ ID NO: 32085 - DNA, 15 bp, Homo sapiens
tccaggatgcctcag

SEQ ID NO: 32086 - DNA, 15 bp, Homo sapiens
ctccaggatgcctca

SEQ ID NO: 32087 - DNA, 15 bp, Homo sapiens
cctccaggatgcctc

SEQ ID NO: 32088 - DNA, 15 bp, Homo sapiens
acctccaggatgcct

SEQ ID NO: 32089 - DNA, 15 bp, Homo sapiens
aacctccaggatgcc

SEQ ID NO: 32090 - DNA, 15 bp, Homo sapiens
caacctccaggatgc

SEQ ID NO: 32091 - DNA, 15 bp, Homo sapiens
tcaacctccaggatg

SEQ ID NO: 32092 - DNA, 15 bp, Homo sapiens
ttcaacctccaggat

SEQ ID NO: 32093 - DNA, 15 bp, Homo sapiens
tttcaacctccagga

SEQ ID NO: 32094 - DNA, 15 bp, Homo sapiens
atttcaacctccagg

SEQ ID NO: 32095 - DNA, 15 bp, Homo sapiens
tatttcaacctccag

SEQ ID NO: 32096 - DNA, 15 bp, Homo sapiens
atatttcaacctcca

SEQ ID NO: 32097 - DNA, 15 bp, Homo sapiens
aatatttcaacctcc

SEQ ID NO: 32098 - DNA, 15 bp, Homo sapiens
aaatatttcaacctc

SEQ ID NO: 32099 - DNA, 15 bp, Homo sapiens
gaaatatttcaacct

SEQ ID NO: 32100 - DNA, 15 bp, Homo sapiens
ggaaatatttcaacc

SEQ ID NO: 32101 - DNA, 15 bp, Homo sapiens
tggaaatatttcaac

SEQ ID NO: 32102 - DNA, 15 bp, Homo sapiens
ctggaaatatttcaa

SEQ ID NO: 32103 - DNA, 15 bp, Homo sapiens
tctggaaatatttca

SEQ ID NO: 32104 - DNA, 15 bp, Homo sapiens
ctctggaaatatttc

SEQ ID NO: 32105 - DNA, 15 bp, Homo sapiens
cctctggaaatattt

SEQ ID NO: 32106 - DNA, 15 bp, Homo sapiens
acctctggaaatatt

SEQ ID NO: 32107 - DNA, 15 bp, Homo sapiens
aacctctggaaatat

SEQ ID NO: 32108 - DNA, 15 bp, Homo sapiens
aaacctctggaaata

SEQ ID NO: 32109 - DNA, 15 bp, Homo sapiens
taaacctctggaaat

SEQ ID NO: 32110 - DNA, 15 bp, Homo sapiens
ctaaacctctggaaa

SEQ ID NO: 32111 - DNA, 15 bp, Homo sapiens
tctaaacctctggaa

SEQ ID NO: 32112 - DNA, 15 bp, Homo sapiens
ttctaaacctctgga

SEQ ID NO: 32113 - DNA, 15 bp, Homo sapiens
gttctaaacctctgg

SEQ ID NO: 32114 - DNA, 15 bp, Homo sapiens
ggttctaaacctctg

SEQ ID NO: 32115 - DNA, 15 bp, Homo sapiens
aggttctaaacctct

SEQ ID NO: 32116 - DNA, 15 bp, Homo sapiens
gaggttctaaacctc

SEQ ID NO: 32117 - DNA, 15 bp, Homo sapiens
tgaggttctaaacct

SEQ ID NO: 32118 - DNA, 15 bp, Homo sapiens
gtgaggttctaaacc

SEQ ID NO: 32119 - DNA, 15 bp, Homo sapiens
ggtgaggttctaaac

SEQ ID NO: 32120 - DNA, 15 bp, Homo sapiens
tggtgaggttctaaa

SEQ ID NO: 32121 - DNA, 15 bp, Homo sapiens
ttggtgaggttctaa

SEQ ID NO: 32122 - DNA, 15 bp, Homo sapiens
cttggtgaggttcta

SEQ ID NO: 32123 - DNA, 15 bp, Homo sapiens
acttggtgaggttct

SEQ ID NO: 32124 - DNA, 15 bp, Homo sapiens
cacttggtgaggttc

SEQ ID NO: 32125 - DNA, 15 bp, Homo sapiens
ccacttggtgaggtt

SEQ ID NO: 32126 - DNA, 15 bp, Homo sapiens
cccacttggtgaggt

SEQ ID NO: 32127 - DNA, 15 bp, Homo sapiens
tcccacttggtgagg

SEQ ID NO: 32128 - DNA, 15 bp, Homo sapiens
gtcccacttggtgag

SEQ ID NO: 32129 - DNA, 15 bp, Homo sapiens
agtcccacttggtga

SEQ ID NO: 32130 - DNA, 15 bp, Homo sapiens
gagtcccacttggtg

SEQ ID NO: 32131 - DNA, 15 bp, Homo sapiens
agagtcccacttggt

SEQ ID NO: 32132 - DNA, 15 bp, Homo sapiens
tagagtcccacttgg

SEQ ID NO: 32133 - DNA, 15 bp, Homo sapiens
ctagagtcccacttg

SEQ ID NO: 32134 - DNA, 15 bp, Homo sapiens
cctagagtcccactt

SEQ ID NO: 32135 - DNA, 15 bp, Homo sapiens
tcctagagtcccact

SEQ ID NO: 32136 - DNA, 15 bp, Homo sapiens
ctcctagagtcccac

SEQ ID NO: 32137 - DNA, 15 bp, Homo sapiens
gctcctagagtccca

SEQ ID NO: 32138 - DNA, 15 bp, Homo sapiens
ggctcctagagtccc

SEQ ID NO: 32139 - DNA, 15 bp, Homo sapiens
aggctcctagagtcc

SEQ ID NO: 32140 - DNA, 15 bp, Homo sapiens
caggctcctagagtc

SEQ ID NO: 32141 - DNA, 15 bp, Homo sapiens
gcaggctcctagagt

SEQ ID NO: 32142 - DNA, 15 bp, Homo sapiens
agcaggctcctagag

SEQ ID NO: 32143 - DNA, 15 bp, Homo sapiens
cagcaggctcctaga

SEQ ID NO: 32144 - DNA, 15 bp, Homo sapiens
gcagcaggctcctag

SEQ ID NO: 32145 - DNA, 15 bp, Homo sapiens
ggcagcaggctccta

SEQ ID NO: 32146 - DNA, 15 bp, Homo sapiens
aggcagcaggctcct

SEQ ID NO: 32147 - DNA, 15 bp, Homo sapiens
gaggcagcaggctcc

SEQ ID NO: 32148 - DNA, 15 bp, Homo sapiens
ggaggcagcaggctc

SEQ ID NO: 32149 - DNA, 15 bp, Homo sapiens
gggaggcagcaggct

SEQ ID NO: 32150 - DNA, 15 bp, Homo sapiens
tgggaggcagcaggc

SEQ ID NO: 32151 - DNA, 15 bp, Homo sapiens
ctgggaggcagcagg

SEQ ID NO: 32152 - DNA, 15 bp, Homo sapiens
gctgggaggcagcag

SEQ ID NO: 32153 - DNA, 15 bp, Homo sapiens
ggctgggaggcagca

SEQ ID NO: 32154 - DNA, 15 bp, Homo sapiens
aggctgggaggcagc

SEQ ID NO: 32155 - DNA, 15 bp, Homo sapiens
gaggctgggaggcag

SEQ ID NO: 32156 - DNA, 15 bp, Homo sapiens
ggaggctgggaggca

SEQ ID NO: 32157 - DNA, 15 bp, Homo sapiens
gggaggctgggaggc

SEQ ID NO: 32158 - DNA, 15 bp, Homo sapiens
agggaggctgggagg

SEQ ID NO: 32159 - DNA, 15 bp, Homo sapiens
gagggaggctgggag

SEQ ID NO: 32160 - DNA, 15 bp, Homo sapiens
tgagggaggctggga

SEQ ID NO: 32161 - DNA, 15 bp, Homo sapiens
ctgagggaggctggg

SEQ ID NO: 32162 - DNA, 15 bp, Homo sapiens
cctgagggaggctgg

SEQ ID NO: 32163 - DNA, 15 bp, Homo sapiens
tcctgagggaggctg

SEQ ID NO: 32164 - DNA, 15 bp, Homo sapiens
ttcctgagggaggct

SEQ ID NO: 32165 - DNA, 15 bp, Homo sapiens
gttcctgagggaggc

SEQ ID NO: 32166 - DNA, 15 bp, Homo sapiens
agttcctgagggagg

SEQ ID NO: 32167 - DNA, 15 bp, Homo sapiens
cagttcctgagggag

SEQ ID NO: 32168 - DNA, 15 bp, Homo sapiens
gcagttcctgaggga

SEQ ID NO: 32169 - DNA, 15 bp, Homo sapiens
tgcagttcctgaggg

SEQ ID NO: 32170 - DNA, 15 bp, Homo sapiens
gtgcagttcctgagg

SEQ ID NO: 32171 - DNA, 15 bp, Homo sapiens
ggtgcagttcctgag

SEQ ID NO: 32172 - DNA, 15 bp, Homo sapiens
aggtgcagttcctga

SEQ ID NO: 32173 - DNA, 15 bp, Homo sapiens
gaggtgcagttcctg

SEQ ID NO: 32174 - DNA, 15 bp, Homo sapiens
ggaggtgcagttcct

SEQ ID NO: 32175 - DNA, 15 bp, Homo sapiens
tggaggtgcagttcc

SEQ ID NO: 32176 - DNA, 15 bp, Homo sapiens
ctggaggtgcagttc

SEQ ID NO: 32177 - DNA, 15 bp, Homo sapiens
tctggaggtgcagtt

SEQ ID NO: 32178 - DNA, 15 bp, Homo sapiens
ttctggaggtgcagt

SEQ ID NO: 32179 - DNA, 15 bp, Homo sapiens
gttctggaggtgcag

SEQ ID NO: 32180 - DNA, 15 bp, Homo sapiens
tgttctggaggtgca

SEQ ID NO: 32181 - DNA, 15 bp, Homo sapiens
ctgttctggaggtgc

SEQ ID NO: 32182 - DNA, 15 bp, Homo sapiens
cctgttctggaggtg

SEQ ID NO: 32183 - DNA, 15 bp, Homo sapiens
acctgttctggaggt

SEQ ID NO: 32184 - DNA, 15 bp, Homo sapiens
cacctgttctggagg

SEQ ID NO: 32185 - DNA, 15 bp, Homo sapiens
gcacctgttctggag

SEQ ID NO: 32186 - DNA, 15 bp, Homo sapiens
cgcacctgttctgga

SEQ ID NO: 32187 - DNA, 15 bp, Homo sapiens
ccgcacctgttctgg

SEQ ID NO: 32188 - DNA, 15 bp, Homo sapiens
cccgcacctgttctg

SEQ ID NO: 32189 - DNA, 15 bp, Homo sapiens
ccccgcacctgttct

SEQ ID NO: 32190 - DNA, 15 bp, Homo sapiens
gccccgcacctgttc

SEQ ID NO: 32191 - DNA, 15 bp, Homo sapiens
agccccgcacctgtt

SEQ ID NO: 32192 - DNA, 15 bp, Homo sapiens
cagccccgcacctgt

SEQ ID NO: 32193 - DNA, 15 bp, Homo sapiens
tcagccccgcacctg

SEQ ID NO: 32194 - DNA, 15 bp, Homo sapiens
gtcagccccgcacct

SEQ ID NO: 32195 - DNA, 15 bp, Homo sapiens
tgtcagccccgcacc

SEQ ID NO: 32196 - DNA, 15 bp, Homo sapiens
atgtcagccccgcac

SEQ ID NO: 32197 - DNA, 15 bp, Homo sapiens
catgtcagccccgca

SEQ ID NO: 32198 - DNA, 15 bp, Homo sapiens
acatgtcagccccgc

SEQ ID NO: 32199 - DNA, 15 bp, Homo sapiens
tacatgtcagccccg

SEQ ID NO: 32200 - DNA, 15 bp, Homo sapiens
atacatgtcagcccc

SEQ ID NO: 32201 - DNA, 15 bp, Homo sapiens
catacatgtcagccc

SEQ ID NO: 32202 - DNA, 15 bp, Homo sapiens
acatacatgtcagcc

SEQ ID NO: 32203 - DNA, 15 bp, Homo sapiens
cacatacatgtcagc

SEQ ID NO: 32204 - DNA, 15 bp, Homo sapiens
gcacatacatgtcag

SEQ ID NO: 32205 - DNA, 15 bp, Homo sapiens
agcacatacatgtca

SEQ ID NO: 32206 - DNA, 15 bp, Homo sapiens
aagcacatacatgtc

SEQ ID NO: 32207 - DNA, 15 bp, Homo sapiens
aaagcacatacatgt

SEQ ID NO: 32208 - DNA, 15 bp, Homo sapiens
gaaagcacatacatg

SEQ ID NO: 32209 - DNA, 15 bp, Homo sapiens
ggaaagcacatacat

SEQ ID NO: 32210 - DNA, 15 bp, Homo sapiens
aggaaagcacataca

SEQ ID NO: 32211 - DNA, 15 bp, Homo sapiens
caggaaagcacatac

SEQ ID NO: 32212 - DNA, 15 bp, Homo sapiens
ccaggaaagcacata

SEQ ID NO: 32213 - DNA, 15 bp, Homo sapiens
cccaggaaagcacat

SEQ ID NO: 32214 - DNA, 15 bp, Homo sapiens
gcccaggaaagcaca

SEQ ID NO: 32215 - DNA, 15 bp, Homo sapiens
tgcccaggaaagcac

SEQ ID NO: 32216 - DNA, 15 bp, Homo sapiens
ctgcccaggaaagca

SEQ ID NO: 32217 - DNA, 15 bp, Homo sapiens
tctgcccaggaaagc

SEQ ID NO: 32218 - DNA, 15 bp, Homo sapiens
atctgcccaggaaag

SEQ ID NO: 32219 - DNA, 15 bp, Homo sapiens
aatctgcccaggaaa

SEQ ID NO: 32220 - DNA, 15 bp, Homo sapiens
gaatctgcccaggaa

SEQ ID NO: 32221 - DNA, 15 bp, Homo sapiens
agaatctgcccagga

SEQ ID NO: 32222 - DNA, 15 bp, Homo sapiens
tagaatctgcccagg

SEQ ID NO: 32223 - DNA, 15 bp, Homo sapiens
ctagaatctgcccag

SEQ ID NO: 32224 - DNA, 15 bp, Homo sapiens
tctagaatctgccca

SEQ ID NO: 32225 - DNA, 15 bp, Homo sapiens
gtctagaatctgccc

SEQ ID NO: 32226 - DNA, 15 bp, Homo sapiens
ggtctagaatctgcc

SEQ ID NO: 32227 - DNA, 15 bp, Homo sapiens
cggtctagaatctgc

SEQ ID NO: 32228 - DNA, 15 bp, Homo sapiens
acggtctagaatctg

SEQ ID NO: 32229 - DNA, 15 bp, Homo sapiens
tacggtctagaatct

SEQ ID NO: 32230 - DNA, 15 bp, Homo sapiens
gtacggtctagaatc

SEQ ID NO: 32231 - DNA, 15 bp, Homo sapiens
tgtacggtctagaat

SEQ ID NO: 32232 - DNA, 15 bp, Homo sapiens
gtgtacggtctagaa

SEQ ID NO: 32233 - DNA, 15 bp, Homo sapiens
tgtgtacggtctaga

SEQ ID NO: 32234 - DNA, 15 bp, Homo sapiens
atgtgtacggtctag

SEQ ID NO: 32235 - DNA, 15 bp, Homo sapiens
catgtgtacggtcta

SEQ ID NO: 32236 - DNA, 15 bp, Homo sapiens
tcatgtgtacggtct

SEQ ID NO: 32237 - DNA, 15 bp, Homo sapiens
ttcatgtgtacggtc

SEQ ID NO: 32238 - DNA, 15 bp, Homo sapiens
tttcatgtgtacggt

SEQ ID NO: 32239 - DNA, 15 bp, Homo sapiens
atttcatgtgtacgg

SEQ ID NO: 32240 - DNA, 15 bp, Homo sapiens
gatttcatgtgtacg

SEQ ID NO: 32241 - DNA, 15 bp, Homo sapiens
agatttcatgtgtac

SEQ ID NO: 32242 - DNA, 15 bp, Homo sapiens
cagatttcatgtgta

SEQ ID NO: 32243 - DNA, 15 bp, Homo sapiens
ccagatttcatgtgt

SEQ ID NO: 32244 - DNA, 15 bp, Homo sapiens
gccagatttcatgtg

SEQ ID NO: 32245 - DNA, 15 bp, Homo sapiens
agccagatttcatgt

SEQ ID NO: 32246 - DNA, 15 bp, Homo sapiens
aagccagatttcatg

SEQ ID NO: 32247 - DNA, 15 bp, Homo sapiens
aaagccagatttcat

SEQ ID NO: 32248 - DNA, 15 bp, Homo sapiens
gaaagccagatttca

SEQ ID NO: 32249 - DNA, 15 bp, Homo sapiens
tgaaagccagatttc

SEQ ID NO: 32250 - DNA, 15 bp, Homo sapiens
ctgaaagccagattt

SEQ ID NO: 32251 - DNA, 15 bp, Homo sapiens
cctgaaagccagatt

SEQ ID NO: 32252 - DNA, 15 bp, Homo sapiens
tcctgaaagccagat

SEQ ID NO: 32253 - DNA, 15 bp, Homo sapiens
atcctgaaagccaga

SEQ ID NO: 32254 - DNA, 15 bp, Homo sapiens
aatcctgaaagccag

SEQ ID NO: 32255 - DNA, 15 bp, Homo sapiens
caatcctgaaagcca

SEQ ID NO: 32256 - DNA, 15 bp, Homo sapiens
gcaatcctgaaagcc

SEQ ID NO: 32257 - DNA, 15 bp, Homo sapiens
agcaatcctgaaagc

SEQ ID NO: 32258 - DNA, 15 bp, Homo sapiens
gagcaatcctgaaag

SEQ ID NO: 32259 - DNA, 15 bp, Homo sapiens
agagcaatcctgaaa

SEQ ID NO: 32260 - DNA, 15 bp, Homo sapiens
gagagcaatcctgaa

SEQ ID NO: 32261 - DNA, 15 bp, Homo sapiens
ggagagcaatcctga

SEQ ID NO: 32262 - DNA, 15 bp, Homo sapiens
tggagagcaatcctg

SEQ ID NO: 32263 - DNA, 15 bp, Homo sapiens
ctggagagcaatcct

SEQ ID NO: 32264 - DNA, 15 bp, Homo sapiens
tctggagagcaatcc

SEQ ID NO: 32265 - DNA, 15 bp, Homo sapiens
ctctggagagcaatc

SEQ ID NO: 32266 - DNA, 15 bp, Homo sapiens
cctctggagagcaat

SEQ ID NO: 32267 - DNA, 15 bp, Homo sapiens
ccctctggagagcaa

SEQ ID NO: 32268 - DNA, 15 bp, Homo sapiens
tccctctggagagca

SEQ ID NO: 32269 - DNA, 15 bp, Homo sapiens
gtccctctggagagc

SEQ ID NO: 32270 - DNA, 15 bp, Homo sapiens
ggtccctctggagag

SEQ ID NO: 32271 - DNA, 15 bp, Homo sapiens
aggtccctctggaga

SEQ ID NO: 32272 - DNA, 15 bp, Homo sapiens
caggtccctctggag

SEQ ID NO: 32273 - DNA, 15 bp, Homo sapiens
acaggtccctctgga

SEQ ID NO: 32274 - DNA, 15 bp, Homo sapiens
cacaggtccctctgg

SEQ ID NO: 32275 - DNA, 15 bp, Homo sapiens
ccacaggtccctctg

SEQ ID NO: 32276 - DNA, 15 bp, Homo sapiens
cccacaggtccctct

SEQ ID NO: 32277 - DNA, 15 bp, Homo sapiens
ccccacaggtccctc

SEQ ID NO: 32278 - DNA, 15 bp, Homo sapiens
gccccacaggtccct

SEQ ID NO: 32279 - DNA, 15 bp, Homo sapiens
ggccccacaggtccc

SEQ ID NO: 32280 - DNA, 15 bp, Homo sapiens
aggccccacaggtcc

SEQ ID NO: 32281 - DNA, 15 bp, Homo sapiens
gaggccccacaggtc

SEQ ID NO: 32282 - DNA, 15 bp, Homo sapiens
cgaggccccacaggt

SEQ ID NO: 32283 - DNA, 15 bp, Homo sapiens
ccgaggccccacagg

SEQ ID NO: 32284 - DNA, 15 bp, Homo sapiens
gccgaggccccacag

SEQ ID NO: 32285 - DNA, 15 bp, Homo sapiens
agccgaggccccaca

SEQ ID NO: 32286 - DNA, 15 bp, Homo sapiens
cagccgaggccccac

SEQ ID NO: 32287 - DNA, 15 bp, Homo sapiens
tcagccgaggcccca

SEQ ID NO: 32288 - DNA, 15 bp, Homo sapiens
ctcagccgaggcccc

SEQ ID NO: 32289 - DNA, 15 bp, Homo sapiens
tctcagccgaggccc

SEQ ID NO: 32290 - DNA, 15 bp, Homo sapiens
gtctcagccgaggcc

SEQ ID NO: 32291 - DNA, 15 bp, Homo sapiens
tgtctcagccgaggc

SEQ ID NO: 32292 - DNA, 15 bp, Homo sapiens
ctgtctcagccgagg

SEQ ID NO: 32293 - DNA, 15 bp, Homo sapiens
tctgtctcagccgag

SEQ ID NO: 32294 - DNA, 15 bp, Homo sapiens
ctctgtctcagccga

SEQ ID NO: 32295 - DNA, 15 bp, Homo sapiens
tctctgtctcagccg

SEQ ID NO: 32296 - DNA, 15 bp, Homo sapiens
ctctctgtctcagcc

SEQ ID NO: 32297 - DNA, 15 bp, Homo sapiens
actctctgtctcagc

SEQ ID NO: 32298 - DNA, 15 bp, Homo sapiens
tactctctgtctcag

SEQ ID NO: 32299 - DNA, 15 bp, Homo sapiens
ctactctctgtctca

SEQ ID NO: 32300 - DNA, 15 bp, Homo sapiens
cctactctctgtctc

SEQ ID NO: 32301 - DNA, 15 bp, Homo sapiens
tcctactctctgtct

SEQ ID NO: 32302 - DNA, 15 bp, Homo sapiens
ctcctactctctgtc

SEQ ID NO: 32303 - DNA, 15 bp, Homo sapiens
actcctactctctgt

SEQ ID NO: 32304 - DNA, 15 bp, Homo sapiens
cactcctactctctg

SEQ ID NO: 32305 - DNA, 15 bp, Homo sapiens
tcactcctactctct

SEQ ID NO: 32306 - DNA, 15 bp, Homo sapiens
ctcactcctactctc

SEQ ID NO: 32307 - DNA, 15 bp, Homo sapiens
cctcactcctactct

SEQ ID NO: 32308 - DNA, 15 bp, Homo sapiens
gcctcactcctactc

SEQ ID NO: 32309 - DNA, 15 bp, Homo sapiens
tgcctcactcctact

SEQ ID NO: 32310 - DNA, 15 bp, Homo sapiens
ctgcctcactcctac

SEQ ID NO: 32311 - DNA, 15 bp, Homo sapiens
actgcctcactccta

SEQ ID NO: 32312 - DNA, 15 bp, Homo sapiens
cactgcctcactcct

SEQ ID NO: 32313 - DNA, 15 bp, Homo sapiens
tcactgcctcactcc

SEQ ID NO: 32314 - DNA, 15 bp, Homo sapiens
atcactgcctcactc

SEQ ID NO: 32315 - DNA, 15 bp, Homo sapiens
aatcactgcctcact

SEQ ID NO: 32316 - DNA, 15 bp, Homo sapiens
gaatcactgcctcac

SEQ ID NO: 32317 - DNA, 15 bp, Homo sapiens
tgaatcactgcctca

SEQ ID NO: 32318 - DNA, 15 bp, Homo sapiens
ttgaatcactgcctc

SEQ ID NO: 32319 - DNA, 15 bp, Homo sapiens
cttgaatcactgcct

SEQ ID NO: 32320 - DNA, 15 bp, Homo sapiens
ccttgaatcactgcc

SEQ ID NO: 32321 - DNA, 15 bp, Homo sapiens
gccttgaatcactgc

SEQ ID NO: 32322 - DNA, 15 bp, Homo sapiens
ggccttgaatcactg

SEQ ID NO: 32323 - DNA, 15 bp, Homo sapiens
gggccttgaatcact

SEQ ID NO: 32324 - DNA, 15 bp, Homo sapiens
agggccttgaatcac

SEQ ID NO: 32325 - DNA, 15 bp, Homo sapiens
cagggccttgaatca

SEQ ID NO: 32326 - DNA, 15 bp, Homo sapiens
tcagggccttgaatc

SEQ ID NO: 32327 - DNA, 15 bp, Homo sapiens
ctcagggccttgaat

SEQ ID NO: 32328 - DNA, 15 bp, Homo sapiens
tctcagggccttgaa

SEQ ID NO: 32329 - DNA, 15 bp, Homo sapiens
ttctcagggccttga

SEQ ID NO: 32330 - DNA, 15 bp, Homo sapiens
tttctcagggccttg

SEQ ID NO: 32331 - DNA, 15 bp, Homo sapiens
ctttctcagggcctt

SEQ ID NO: 32332 - DNA, 15 bp, Homo sapiens
tctttctcagggcct

SEQ ID NO: 32333 - DNA, 15 bp, Homo sapiens
ctctttctcagggcc

SEQ ID NO: 32334 - DNA, 15 bp, Homo sapiens
gctctttctcagggc

SEQ ID NO: 32335 - DNA, 15 bp, Homo sapiens
agctctttctcaggg

SEQ ID NO: 32336 - DNA, 15 bp, Homo sapiens
gagctctttctcagg

SEQ ID NO: 32337 - DNA, 15 bp, Homo sapiens
ggagctctttctcag

SEQ ID NO: 32338 - DNA, 15 bp, Homo sapiens
aggagctctttctca

SEQ ID NO: 32339 - DNA, 15 bp, Homo sapiens
gaggagctctttctc

SEQ ID NO: 32340 - DNA, 15 bp, Homo sapiens
ggaggagctctttct

SEQ ID NO: 32341 - DNA, 15 bp, Homo sapiens
aggaggagctctttc

SEQ ID NO: 32342 - DNA, 15 bp, Homo sapiens
gaggaggagctcttt

SEQ ID NO: 32343 - DNA, 15 bp, Homo sapiens
agaggaggagctctt

SEQ ID NO: 32344 - DNA, 15 bp, Homo sapiens
cagaggaggagctct

SEQ ID NO: 32345 - DNA, 15 bp, Homo sapiens
gcagaggaggagctc

SEQ ID NO: 32346 - DNA, 15 bp, Homo sapiens
agcagaggaggagct

SEQ ID NO: 32347 - DNA, 15 bp, Homo sapiens
aagcagaggaggagc

SEQ ID NO: 32348 - DNA, 15 bp, Homo sapiens
caagcagaggaggag

SEQ ID NO: 32349 - DNA, 15 bp, Homo sapiens
ccaagcagaggagga

SEQ ID NO: 32350 - DNA, 15 bp, Homo sapiens
accaagcagaggagg

SEQ ID NO: 32351 - DNA, 15 bp, Homo sapiens
taccaagcagaggag

SEQ ID NO: 32352 - DNA, 15 bp, Homo sapiens
ataccaagcagagga

SEQ ID NO: 32353 - DNA, 15 bp, Homo sapiens
tataccaagcagagg

SEQ ID NO: 32354 - DNA, 15 bp, Homo sapiens
ttataccaagcagag

SEQ ID NO: 32355 - DNA, 15 bp, Homo sapiens
gttataccaagcaga

SEQ ID NO: 32356 - DNA, 15 bp, Homo sapiens
ggttataccaagcag

SEQ ID NO: 32357 - DNA, 15 bp, Homo sapiens
tggttataccaagca

SEQ ID NO: 32358 - DNA, 15 bp, Homo sapiens
ctggttataccaagc

SEQ ID NO: 32359 - DNA, 15 bp, Homo sapiens
gctggttataccaag

SEQ ID NO: 32360 - DNA, 15 bp, Homo sapiens
agctggttataccaa

SEQ ID NO: 32361 - DNA, 15 bp, Homo sapiens
tagctggttatacca

SEQ ID NO: 32362 - DNA, 15 bp, Homo sapiens
ttagctggttatacc

SEQ ID NO: 32363 - DNA, 15 bp, Homo sapiens
attagctggttatac

SEQ ID NO: 32364 - DNA, 15 bp, Homo sapiens
aattagctggttata

SEQ ID NO: 32365 - DNA, 15 bp, Homo sapiens
gaattagctggttat

SEQ ID NO: 32366 - DNA, 15 bp, Homo sapiens
tgaattagctggtta

SEQ ID NO: 32367 - DNA, 15 bp, Homo sapiens
atgaattagctggtt

SEQ ID NO: 32368 - DNA, 15 bp, Homo sapiens
aatgaattagctggt

SEQ ID NO: 32369 - DNA, 15 bp, Homo sapiens
gaatgaattagctgg

SEQ ID NO: 32370 - DNA, 15 bp, Homo sapiens
agaatgaattagctg

SEQ ID NO: 32371 - DNA, 15 bp, Homo sapiens
cagaatgaattagct

SEQ ID NO: 32372 - DNA, 15 bp, Homo sapiens
acagaatgaattagc

SEQ ID NO: 32373 - DNA, 15 bp, Homo sapiens
aacagaatgaattag

SEQ ID NO: 32374 - DNA, 15 bp, Homo sapiens
gaacagaatgaatta

SEQ ID NO: 32375 - DNA, 15 bp, Homo sapiens
agaacagaatgaatt

SEQ ID NO: 32376 - DNA, 15 bp, Homo sapiens
cagaacagaatgaat

SEQ ID NO: 32377 - DNA, 15 bp, Homo sapiens
acagaacagaatgaa

SEQ ID NO: 32378 - DNA, 15 bp, Homo sapiens
aacagaacagaatga

SEQ ID NO: 32379 - DNA, 15 bp, Homo sapiens
caacagaacagaatg

SEQ ID NO: 32380 - DNA, 15 bp, Homo sapiens
tcaacagaacagaat

SEQ ID NO: 32381 - DNA, 15 bp, Homo sapiens
gtcaacagaacagaa

SEQ ID NO: 32382 - DNA, 15 bp, Homo sapiens
agtcaacagaacaga

SEQ ID NO: 32383 - DNA, 15 bp, Homo sapiens
aagtcaacagaacag

SEQ ID NO: 32384 - DNA, 15 bp, Homo sapiens
aaagtcaacagaaca

SEQ ID NO: 32385 - DNA, 15 bp, Homo sapiens
caaagtcaacagaac

SEQ ID NO: 32386 - DNA, 15 bp, Homo sapiens
ccaaagtcaacagaa

SEQ ID NO: 32387 - DNA, 15 bp, Homo sapiens
gccaaagtcaacaga

SEQ ID NO: 32388 - DNA, 15 bp, Homo sapiens
agccaaagtcaacag

SEQ ID NO: 32389 - DNA, 15 bp, Homo sapiens
aagccaaagtcaaca

SEQ ID NO: 32390 - DNA, 15 bp, Homo sapiens
gaagccaaagtcaac

SEQ ID NO: 32391 - DNA, 15 bp, Homo sapiens
agaagccaaagtcaa

SEQ ID NO: 32392 - DNA, 15 bp, Homo sapiens
cagaagccaaagtca

SEQ ID NO: 32393 - DNA, 15 bp, Homo sapiens
gcagaagccaaagtc

SEQ ID NO: 32394 - DNA, 15 bp, Homo sapiens
ggcagaagccaaagt

SEQ ID NO: 32395 - DNA, 15 bp, Homo sapiens
gggcagaagccaaag

SEQ ID NO: 32396 - DNA, 15 bp, Homo sapiens
agggcagaagccaaa

SEQ ID NO: 32397 - DNA, 15 bp, Homo sapiens
cagggcagaagccaa

SEQ ID NO: 32398 - DNA, 15 bp, Homo sapiens
gcagggcagaagcca

SEQ ID NO: 32399 - DNA, 15 bp, Homo sapiens
ggcagggcagaagcc

SEQ ID NO: 32400 - DNA, 15 bp, Homo sapiens
aggcagggcagaagc

SEQ ID NO: 32401 - DNA, 15 bp, Homo sapiens
aaggcagggcagaag

SEQ ID NO: 32402 - DNA, 15 bp, Homo sapiens
aaaggcagggcagaa

SEQ ID NO: 32403 - DNA, 15 bp, Homo sapiens
caaaggcagggcaga

SEQ ID NO: 32404 - DNA, 15 bp, Homo sapiens
tcaaaggcagggcag

SEQ ID NO: 32405 - DNA, 15 bp, Homo sapiens
ttcaaaggcagggca

SEQ ID NO: 32406 - DNA, 15 bp, Homo sapiens
cttcaaaggcagggc

SEQ ID NO: 32407 - DNA, 15 bp, Homo sapiens
ccttcaaaggcaggg

SEQ ID NO: 32408 - DNA, 15 bp, Homo sapiens
cccttcaaaggcagg

SEQ ID NO: 32409 - DNA, 15 bp, Homo sapiens
acccttcaaaggcag

SEQ ID NO: 32410 - DNA, 15 bp, Homo sapiens
aacccttcaaaggca

SEQ ID NO: 32411 - DNA, 15 bp, Homo sapiens
aaacccttcaaaggc

SEQ ID NO: 32412 - DNA, 15 bp, Homo sapiens
caaacccttcaaagg

SEQ ID NO: 32413 - DNA, 15 bp, Homo sapiens
tcaaacccttcaaag

SEQ ID NO: 32414 - DNA, 15 bp, Homo sapiens
ctcaaacccttcaaa

SEQ ID NO: 32415 - DNA, 15 bp, Homo sapiens
cctcaaacccttcaa

SEQ ID NO: 32416 - DNA, 15 bp, Homo sapiens
gcctcaaacccttca

SEQ ID NO: 32417 - DNA, 15 bp, Homo sapiens
ggcctcaaacccttc

SEQ ID NO: 32418 - DNA, 15 bp, Homo sapiens
tggcctcaaaccctt

SEQ ID NO: 32419 - DNA, 15 bp, Homo sapiens
ctggcctcaaaccct

SEQ ID NO: 32420 - DNA, 15 bp, Homo sapiens
cctggcctcaaaccc

SEQ ID NO: 32421 - DNA, 15 bp, Homo sapiens
ccctggcctcaaacc

SEQ ID NO: 32422 - DNA, 15 bp, Homo sapiens
tccctggcctcaaac

SEQ ID NO: 32423 - DNA, 15 bp, Homo sapiens
ctccctggcctcaaa

SEQ ID NO: 32424 - DNA, 15 bp, Homo sapiens
actccctggcctcaa

SEQ ID NO: 32425 - DNA, 15 bp, Homo sapiens
cactccctggcctca

SEQ ID NO: 32426 - DNA, 15 bp, Homo sapiens
tcactccctggcctc

SEQ ID NO: 32427 - DNA, 15 bp, Homo sapiens
atcactccctggcct

SEQ ID NO: 32428 - DNA, 15 bp, Homo sapiens
catcactccctggcc

SEQ ID NO: 32429 - DNA, 15 bp, Homo sapiens
gcatcactccctggc

SEQ ID NO: 32430 - DNA, 15 bp, Homo sapiens
tgcatcactccctgg

SEQ ID NO: 32431 - DNA, 15 bp, Homo sapiens
gtgcatcactccctg

SEQ ID NO: 32432 - DNA, 15 bp, Homo sapiens
agtgcatcactccct

SEQ ID NO: 32433 - DNA, 15 bp, Homo sapiens
gagtgcatcactccc

SEQ ID NO: 32434 - DNA, 15 bp, Homo sapiens
tgagtgcatcactcc

SEQ ID NO: 32435 - DNA, 15 bp, Homo sapiens
ctgagtgcatcactc

SEQ ID NO: 32436 - DNA, 15 bp, Homo sapiens
tctgagtgcatcact

SEQ ID NO: 32437 - DNA, 15 bp, Homo sapiens
gtctgagtgcatcac

SEQ ID NO: 32438 - DNA, 15 bp, Homo sapiens
agtctgagtgcatca

SEQ ID NO: 32439 - DNA, 15 bp, Homo sapiens
cagtctgagtgcatc

SEQ ID NO: 32440 - DNA, 15 bp, Homo sapiens
ccagtctgagtgcat

SEQ ID NO: 32441 - DNA, 15 bp, Homo sapiens
accagtctgagtgca

SEQ ID NO: 32442 - DNA, 15 bp, Homo sapiens
caccagtctgagtgc

SEQ ID NO: 32443 - DNA, 15 bp, Homo sapiens
acaccagtctgagtg

SEQ ID NO: 32444 - DNA, 15 bp, Homo sapiens
aacaccagtctgagt

SEQ ID NO: 32445 - DNA, 15 bp, Homo sapiens
aaacaccagtctgag

SEQ ID NO: 32446 - DNA, 15 bp, Homo sapiens
gaaacaccagtctga

SEQ ID NO: 32447 - DNA, 15 bp, Homo sapiens
ggaaacaccagtctg

SEQ ID NO: 32448 - DNA, 15 bp, Homo sapiens
tggaaacaccagtct

SEQ ID NO: 32449 - DNA, 15 bp, Homo sapiens
gtggaaacaccagtc

SEQ ID NO: 32450 - DNA, 15 bp, Homo sapiens
tgtggaaacaccagt

SEQ ID NO: 32451 - DNA, 15 bp, Homo sapiens
gtgtggaaacaccag

SEQ ID NO: 32452 - DNA, 15 bp, Homo sapiens
tgtgtggaaacacca

SEQ ID NO: 32453 - DNA, 15 bp, Homo sapiens
ctgtgtggaaacacc

SEQ ID NO: 32454 - DNA, 15 bp, Homo sapiens
actgtgtggaaacac

SEQ ID NO: 32455 - DNA, 15 bp, Homo sapiens
gactgtgtggaaaca

SEQ ID NO: 32456 - DNA, 15 bp, Homo sapiens
tgactgtgtggaaac

SEQ ID NO: 32457 - DNA, 15 bp, Homo sapiens
gtgactgtgtggaaa

SEQ ID NO: 32458 - DNA, 15 bp, Homo sapiens
agtgactgtgtggaa

SEQ ID NO: 32459 - DNA, 15 bp, Homo sapiens
aagtgactgtgtgga

SEQ ID NO: 32460 - DNA, 15 bp, Homo sapiens
gaagtgactgtgtgg

SEQ ID NO: 32461 - DNA, 15 bp, Homo sapiens
tgaagtgactgtgtg

SEQ ID NO: 32462 - DNA, 15 bp, Homo sapiens
ctgaagtgactgtgt

SEQ ID NO: 32463 - DNA, 15 bp, Homo sapiens
tctgaagtgactgtg

SEQ ID NO: 32464 - DNA, 15 bp, Homo sapiens
gtctgaagtgactgt

SEQ ID NO: 32465 - DNA, 15 bp, Homo sapiens
agtctgaagtgactg

SEQ ID NO: 32466 - DNA, 15 bp, Homo sapiens
aagtctgaagtgact

SEQ ID NO: 32467 - DNA, 15 bp, Homo sapiens
gaagtctgaagtgac

SEQ ID NO: 32468 - DNA, 15 bp, Homo sapiens
ggaagtctgaagtga

SEQ ID NO: 32469 - DNA, 15 bp, Homo sapiens
tggaagtctgaagtg

SEQ ID NO: 32470 - DNA, 15 bp, Homo sapiens
ctggaagtctgaagt

SEQ ID NO: 32471 - DNA, 15 bp, Homo sapiens
cctggaagtctgaag

SEQ ID NO: 32472 - DNA, 15 bp, Homo sapiens
ccctggaagtctgaa

SEQ ID NO: 32473 - DNA, 15 bp, Homo sapiens
gccctggaagtctga

SEQ ID NO: 32474 - DNA, 15 bp, Homo sapiens
tgccctggaagtctg

SEQ ID NO: 32475 - DNA, 15 bp, Homo sapiens
ctgccctggaagtct

SEQ ID NO: 32476 - DNA, 15 bp, Homo sapiens
actgccctggaagtc

SEQ ID NO: 32477 - DNA, 15 bp, Homo sapiens
tactgccctggaagt

SEQ ID NO: 32478 - DNA, 15 bp, Homo sapiens
gtactgccctggaag

SEQ ID NO: 32479 - DNA, 15 bp, Homo sapiens
tgtactgccctggaa

SEQ ID NO: 32480 - DNA, 15 bp, Homo sapiens
ctgtactgccctgga

SEQ ID NO: 32481 - DNA, 15 bp, Homo sapiens
cctgtactgccctgg

SEQ ID NO: 32482 - DNA, 15 bp, Homo sapiens
tcctgtactgccctg

SEQ ID NO: 32483 - DNA, 15 bp, Homo sapiens
ctcctgtactgccct

SEQ ID NO: 32484 - DNA, 15 bp, Homo sapiens
tctcctgtactgccc

SEQ ID NO: 32485 - DNA, 15 bp, Homo sapiens
atctcctgtactgcc

SEQ ID NO: 32486 - DNA, 15 bp, Homo sapiens
tatctcctgtactgc

SEQ ID NO: 32487 - DNA, 15 bp, Homo sapiens
ctatctcctgtactg

SEQ ID NO: 32488 - DNA, 15 bp, Homo sapiens
tctatctcctgtact

SEQ ID NO: 32489 - DNA, 15 bp, Homo sapiens
atctatctcctgtac

SEQ ID NO: 32490 - DNA, 15 bp, Homo sapiens
gatctatctcctgta

SEQ ID NO: 32491 - DNA, 15 bp, Homo sapiens
ggatctatctcctgt

SEQ ID NO: 32492 - DNA, 15 bp, Homo sapiens
gggatctatctcctg

SEQ ID NO: 32493 - DNA, 15 bp, Homo sapiens
tgggatctatctcct

SEQ ID NO: 32494 - DNA, 15 bp, Homo sapiens
ctgggatctatctcc

SEQ ID NO: 32495 - DNA, 15 bp, Homo sapiens
cctgggatctatctc

SEQ ID NO: 32496 - DNA, 15 bp, Homo sapiens
ccctgggatctatct

SEQ ID NO: 32497 - DNA, 15 bp, Homo sapiens
gccctgggatctatc

SEQ ID NO: 32498 - DNA, 15 bp, Homo sapiens
ggccctgggatctat

SEQ ID NO: 32499 - DNA, 15 bp, Homo sapiens
tggccctgggatcta

SEQ ID NO: 32500 - DNA, 15 bp, Homo sapiens
ctggccctgggatct

SEQ ID NO: 32501 - DNA, 15 bp, Homo sapiens
actggccctgggatc

SEQ ID NO: 32502 - DNA, 15 bp, Homo sapiens
cactggccctgggat

SEQ ID NO: 32503 - DNA, 15 bp, Homo sapiens
tcactggccctggga

SEQ ID NO: 32504 - DNA, 15 bp, Homo sapiens
ttcactggccctggg

SEQ ID NO: 32505 - DNA, 15 bp, Homo sapiens
cttcactggccctgg

SEQ ID NO: 32506 - DNA, 15 bp, Homo sapiens
tcttcactggccctg

SEQ ID NO: 32507 - DNA, 15 bp, Homo sapiens
ttcttcactggccct

SEQ ID NO: 32508 - DNA, 15 bp, Homo sapiens
cttcttcactggccc

SEQ ID NO: 32509 - DNA, 15 bp, Homo sapiens
gcttcttcactggcc

SEQ ID NO: 32510 - DNA, 15 bp, Homo sapiens
tgcttcttcactggc

SEQ ID NO: 32511 - DNA, 15 bp, Homo sapiens
ctgcttcttcactgg

SEQ ID NO: 32512 - DNA, 15 bp, Homo sapiens
tctgcttcttcactg

SEQ ID NO: 32513 - DNA, 15 bp, Homo sapiens
ctctgcttcttcact

SEQ ID NO: 32514 - DNA, 15 bp, Homo sapiens
gctctgcttcttcac

SEQ ID NO: 32515 - DNA, 15 bp, Homo sapiens
tgctctgcttcttca

SEQ ID NO: 32516 - DNA, 15 bp, Homo sapiens
gtgctctgcttcttc

SEQ ID NO: 32517 - DNA, 15 bp, Homo sapiens
tgtgctctgcttctt

SEQ ID NO: 32518 - DNA, 15 bp, Homo sapiens
ttgtgctctgcttct

SEQ ID NO: 32519 - DNA, 15 bp, Homo sapiens
cttgtgctctgcttc

SEQ ID NO: 32520 - DNA, 15 bp, Homo sapiens
acttgtgctctgctt

SEQ ID NO: 32521 - DNA, 15 bp, Homo sapiens
gacttgtgctctgct

SEQ ID NO: 32522 - DNA, 15 bp, Homo sapiens
ggacttgtgctctgc

SEQ ID NO: 32523 - DNA, 15 bp, Homo sapiens
tggacttgtgctctg

SEQ ID NO: 32524 - DNA, 15 bp, Homo sapiens
ctggacttgtgctct

SEQ ID NO: 32525 - DNA, 15 bp, Homo sapiens
cctggacttgtgctc

SEQ ID NO: 32526 - DNA, 15 bp, Homo sapiens
gcctggacttgtgct

SEQ ID NO: 32527 - DNA, 15 bp, Homo sapiens
tgcctggacttgtgc

SEQ ID NO: 32528 - DNA, 15 bp, Homo sapiens
ctgcctggacttgtg

SEQ ID NO: 32529 - DNA, 15 bp, Homo sapiens
cctgcctggacttgt

SEQ ID NO: 32530 - DNA, 15 bp, Homo sapiens
tcctgcctggacttg

SEQ ID NO: 32531 - DNA, 15 bp, Homo sapiens
ctcctgcctggactt

SEQ ID NO: 32532 - DNA, 15 bp, Homo sapiens
tctcctgcctggact

SEQ ID NO: 32533 - DNA, 15 bp, Homo sapiens
ctctcctgcctggac

SEQ ID NO: 32534 - DNA, 15 bp, Homo sapiens
cctctcctgcctgga

SEQ ID NO: 32535 - DNA, 15 bp, Homo sapiens
gcctctcctgcctgg

SEQ ID NO: 32536 - DNA, 15 bp, Homo sapiens
agcctctcctgcctg

SEQ ID NO: 32537 - DNA, 15 bp, Homo sapiens
tagcctctcctgcct

SEQ ID NO: 32538 - DNA, 15 bp, Homo sapiens
ttagcctctcctgcc

SEQ ID NO: 32539 - DNA, 15 bp, Homo sapiens
cttagcctctcctgc

SEQ ID NO: 32540 - DNA, 15 bp, Homo sapiens
ccttagcctctcctg

SEQ ID NO: 32541 - DNA, 15 bp, Homo sapiens
cccttagcctctcct

SEQ ID NO: 32542 - DNA, 15 bp, Homo sapiens
gcccttagcctctcc

SEQ ID NO: 32543 - DNA, 15 bp, Homo sapiens
ggcccttagcctctc

SEQ ID NO: 32544 - DNA, 15 bp, Homo sapiens
aggcccttagcctct

SEQ ID NO: 32545 - DNA, 15 bp, Homo sapiens
gaggcccttagcctc

SEQ ID NO: 32546 - DNA, 15 bp, Homo sapiens
ggaggcccttagcct

SEQ ID NO: 32547 - DNA, 15 bp, Homo sapiens
gggaggcccttagcc

SEQ ID NO: 32548 - DNA, 15 bp, Homo sapiens
agggaggcccttagc

SEQ ID NO: 32549 - DNA, 15 bp, Homo sapiens
cagggaggcccttag

SEQ ID NO: 32550 - DNA, 15 bp, Homo sapiens
tcagggaggccctta

SEQ ID NO: 32551 - DNA, 15 bp, Homo sapiens
ttcagggaggccctt

SEQ ID NO: 32552 - DNA, 15 bp, Homo sapiens
gttcagggaggccct

SEQ ID NO: 32553 - DNA, 15 bp, Homo sapiens
tgttcagggaggccc

SEQ ID NO: 32554 - DNA, 15 bp, Homo sapiens
ctgttcagggaggcc

SEQ ID NO: 32555 - DNA, 15 bp, Homo sapiens
cctgttcagggaggc

SEQ ID NO: 32556 - DNA, 15 bp, Homo sapiens
acctgttcagggagg

SEQ ID NO: 32557 - DNA, 15 bp, Homo sapiens
cacctgttcagggag

SEQ ID NO: 32558 - DNA, 15 bp, Homo sapiens
acacctgttcaggga

SEQ ID NO: 32559 - DNA, 15 bp, Homo sapiens
cacacctgttcaggg

SEQ ID NO: 32560 - DNA, 15 bp, Homo sapiens
tcacacctgttcagg

SEQ ID NO: 32561 - DNA, 15 bp, Homo sapiens
ctcacacctgttcag

SEQ ID NO: 32562 - DNA, 15 bp, Homo sapiens
cctcacacctgttca

SEQ ID NO: 32563 - DNA, 15 bp, Homo sapiens
gcctcacacctgttc

SEQ ID NO: 32564 - DNA, 15 bp, Homo sapiens
tgcctcacacctgtt

SEQ ID NO: 32565 - DNA, 15 bp, Homo sapiens
gtgcctcacacctgt

SEQ ID NO: 32566 - DNA, 15 bp, Homo sapiens
tgtgcctcacacctg

SEQ ID NO: 32567 - DNA, 15 bp, Homo sapiens
ctgtgcctcacacct

SEQ ID NO: 32568 - DNA, 15 bp, Homo sapiens
tctgtgcctcacacc

SEQ ID NO: 32569 - DNA, 15 bp, Homo sapiens
ttctgtgcctcacac

SEQ ID NO: 32570 - DNA, 15 bp, Homo sapiens
cttctgtgcctcaca

SEQ ID NO: 32571 - DNA, 15 bp, Homo sapiens
gcttctgtgcctcac

SEQ ID NO: 32572 - DNA, 15 bp, Homo sapiens
ggcttctgtgcctca

SEQ ID NO: 32573 - DNA, 15 bp, Homo sapiens
gggcttctgtgcctc

SEQ ID NO: 32574 - DNA, 15 bp, Homo sapiens
ggggcttctgtgcct

SEQ ID NO: 32575 - DNA, 15 bp, Homo sapiens
cggggcttctgtgcc

SEQ ID NO: 32576 - DNA, 15 bp, Homo sapiens
tcggggcttctgtgc

SEQ ID NO: 32577 - DNA, 15 bp, Homo sapiens
ctcggggcttctgtg

SEQ ID NO: 32578 - DNA, 15 bp, Homo sapiens
tctcggggcttctgt

SEQ ID NO: 32579 - DNA, 15 bp, Homo sapiens
ctctcggggcttctg

SEQ ID NO: 32580 - DNA, 15 bp, Homo sapiens
cctctcggggcttct

SEQ ID NO: 32581 - DNA, 15 bp, Homo sapiens
acctctcggggcttc

SEQ ID NO: 32582 - DNA, 15 bp, Homo sapiens
tacctctcggggctt

SEQ ID NO: 32583 - DNA, 15 bp, Homo sapiens
ctacctctcggggct

SEQ ID NO: 32584 - DNA, 15 bp, Homo sapiens
cctacctctcggggc

SEQ ID NO: 32585 - DNA, 15 bp, Homo sapiens
ccctacctctcgggg

SEQ ID NO: 32586 - DNA, 15 bp, Homo sapiens
tccctacctctcggg

SEQ ID NO: 32587 - DNA, 15 bp, Homo sapiens
atccctacctctcgg

SEQ ID NO: 32588 - DNA, 15 bp, Homo sapiens
catccctacctctcg

SEQ ID NO: 32589 - DNA, 15 bp, Homo sapiens
tcatccctacctctc

SEQ ID NO: 32590 - DNA, 15 bp, Homo sapiens
gtcatccctacctct

SEQ ID NO: 32591 - DNA, 15 bp, Homo sapiens
tgtcatccctacctc

SEQ ID NO: 32592 - DNA, 15 bp, Homo sapiens
ctgtcatccctacct

SEQ ID NO: 32593 - DNA, 15 bp, Homo sapiens
cctgtcatccctacc

SEQ ID NO: 32594 - DNA, 15 bp, Homo sapiens
tcctgtcatccctac

SEQ ID NO: 32595 - DNA, 15 bp, Homo sapiens
atcctgtcatcccta

SEQ ID NO: 32596 - DNA, 15 bp, Homo sapiens
catcctgtcatccct

SEQ ID NO: 32597 - DNA, 15 bp, Homo sapiens
tcatcctgtcatccc

SEQ ID NO: 32598 - DNA, 15 bp, Homo sapiens
ttcatcctgtcatcc

SEQ ID NO: 32599 - DNA, 15 bp, Homo sapiens
cttcatcctgtcatc

SEQ ID NO: 32600 - DNA, 15 bp, Homo sapiens
tcttcatcctgtcat

SEQ ID NO: 32601 - DNA, 15 bp, Homo sapiens
atcttcatcctgtca

SEQ ID NO: 32602 - DNA, 15 bp, Homo sapiens
catcttcatcctgtc

SEQ ID NO: 32603 - DNA, 15 bp, Homo sapiens
ccatcttcatcctgt

SEQ ID NO: 32604 - DNA, 15 bp, Homo sapiens
cccatcttcatcctg

SEQ ID NO: 32605 - DNA, 15 bp, Homo sapiens
acccatcttcatcct

SEQ ID NO: 32606 - DNA, 15 bp, Homo sapiens
gacccatcttcatcc

SEQ ID NO: 32607 - DNA, 15 bp, Homo sapiens
ggacccatcttcatc

SEQ ID NO: 32608 - DNA, 15 bp, Homo sapiens
aggacccatcttcat

SEQ ID NO: 32609 - DNA, 15 bp, Homo sapiens
caggacccatcttca

SEQ ID NO: 32610 - DNA, 15 bp, Homo sapiens
acaggacccatcttc

SEQ ID NO: 32611 - DNA, 15 bp, Homo sapiens
cacaggacccatctt

SEQ ID NO: 32612 - DNA, 15 bp, Homo sapiens
gcacaggacccatct

SEQ ID NO: 32613 - DNA, 15 bp, Homo sapiens
agcacaggacccatc

SEQ ID NO: 32614 - DNA, 15 bp, Homo sapiens
cagcacaggacccat

SEQ ID NO: 32615 - DNA, 15 bp, Homo sapiens
gcagcacaggaccca

SEQ ID NO: 32616 - DNA, 15 bp, Homo sapiens
agcagcacaggaccc

SEQ ID NO: 32617 - DNA, 15 bp, Homo sapiens
tagcagcacaggacc

SEQ ID NO: 32618 - DNA, 15 bp, Homo sapiens
ctagcagcacaggac

SEQ ID NO: 32619 - DNA, 15 bp, Homo sapiens
tctagcagcacagga

SEQ ID NO: 32620 - DNA, 15 bp, Homo sapiens
ttctagcagcacagg

SEQ ID NO: 32621 - DNA, 15 bp, Homo sapiens
cttctagcagcacag

SEQ ID NO: 32622 - DNA, 15 bp, Homo sapiens
acttctagcagcaca

SEQ ID NO: 32623 - DNA, 15 bp, Homo sapiens
tacttctagcagcac

SEQ ID NO: 32624 - DNA, 15 bp, Homo sapiens
gtacttctagcagca

SEQ ID NO: 32625 - DNA, 15 bp, Homo sapiens
ggtacttctagcagc

SEQ ID NO: 32626 - DNA, 15 bp, Homo sapiens
aggtacttctagcag

SEQ ID NO: 32627 - DNA, 15 bp, Homo sapiens
caggtacttctagca

SEQ ID NO: 32628 - DNA, 15 bp, Homo sapiens
gcaggtacttctagc

SEQ ID NO: 32629 - DNA, 15 bp, Homo sapiens
tgcaggtacttctag

SEQ ID NO: 32630 - DNA, 15 bp, Homo sapiens
ttgcaggtacttcta

SEQ ID NO: 32631 - DNA, 15 bp, Homo sapiens
tttgcaggtacttct

SEQ ID NO: 32632 - DNA, 15 bp, Homo sapiens
ctttgcaggtacttc

SEQ ID NO: 32633 - DNA, 15 bp, Homo sapiens
gctttgcaggtactt

SEQ ID NO: 32634 - DNA, 15 bp, Homo sapiens
tgctttgcaggtact

SEQ ID NO: 32635 - DNA, 15 bp, Homo sapiens
gtgctttgcaggtac

SEQ ID NO: 32636 - DNA, 15 bp, Homo sapiens
tgtgctttgcaggta

SEQ ID NO: 32637 - DNA, 15 bp, Homo sapiens
ctgtgctttgcaggt

SEQ ID NO: 32638 - DNA, 15 bp, Homo sapiens
tctgtgctttgcagg

SEQ ID NO: 32639 - DNA, 15 bp, Homo sapiens
ctctgtgctttgcag

SEQ ID NO: 32640 - DNA, 15 bp, Homo sapiens
cctctgtgctttgca

SEQ ID NO: 32641 - DNA, 15 bp, Homo sapiens
acctctgtgctttgc

SEQ ID NO: 32642 - DNA, 15 bp, Homo sapiens
cacctctgtgctttg

SEQ ID NO: 32643 - DNA, 15 bp, Homo sapiens
ccacctctgtgcttt

SEQ ID NO: 32644 - DNA, 15 bp, Homo sapiens
gccacctctgtgctt

SEQ ID NO: 32645 - DNA, 15 bp, Homo sapiens
tgccacctctgtgct

SEQ ID NO: 32646 - DNA, 15 bp, Homo sapiens
gtgccacctctgtgc

SEQ ID NO: 32647 - DNA, 15 bp, Homo sapiens
tgtgccacctctgtg

SEQ ID NO: 32648 - DNA, 15 bp, Homo sapiens
ctgtgccacctctgt

SEQ ID NO: 32649 - DNA, 15 bp, Homo sapiens
tctgtgccacctctg

SEQ ID NO: 32650 - DNA, 15 bp, Homo sapiens
ttctgtgccacctct

SEQ ID NO: 32651 - DNA, 15 bp, Homo sapiens
tttctgtgccacctc

SEQ ID NO: 32652 - DNA, 15 bp, Homo sapiens
ttttctgtgccacct

SEQ ID NO: 32653 - DNA, 15 bp, Homo sapiens
cttttctgtgccacc

SEQ ID NO: 32654 - DNA, 15 bp, Homo sapiens
ccttttctgtgccac

SEQ ID NO: 32655 - DNA, 15 bp, Homo sapiens
tccttttctgtgcca

SEQ ID NO: 32656 - DNA, 15 bp, Homo sapiens
ctccttttctgtgcc

SEQ ID NO: 32657 - DNA, 15 bp, Homo sapiens
actccttttctgtgc

SEQ ID NO: 32658 - DNA, 15 bp, Homo sapiens
gactccttttctgtg

SEQ ID NO: 32659 - DNA, 15 bp, Homo sapiens
ggactccttttctgt

SEQ ID NO: 32660 - DNA, 15 bp, Homo sapiens
aggactccttttctg

SEQ ID NO: 32661 - DNA, 15 bp, Homo sapiens
aaggactccttttct

SEQ ID NO: 32662 - DNA, 15 bp, Homo sapiens
caaggactccttttc

SEQ ID NO: 32663 - DNA, 15 bp, Homo sapiens
ccaaggactcctttt

SEQ ID NO: 32664 - DNA, 15 bp, Homo sapiens
gccaaggactccttt

SEQ ID NO: 32665 - DNA, 15 bp, Homo sapiens
agccaaggactcctt

SEQ ID NO: 32666 - DNA, 15 bp, Homo sapiens
cagccaaggactcct

SEQ ID NO: 32667 - DNA, 15 bp, Homo sapiens
ccagccaaggactcc

SEQ ID NO: 32668 - DNA, 15 bp, Homo sapiens
cccagccaaggactc

SEQ ID NO: 32669 - DNA, 15 bp, Homo sapiens
tcccagccaaggact

SEQ ID NO: 32670 - DNA, 15 bp, Homo sapiens
atcccagccaaggac

SEQ ID NO: 32671 - DNA, 15 bp, Homo sapiens
catcccagccaagga

SEQ ID NO: 32672 - DNA, 15 bp, Homo sapiens
ccatcccagccaagg

SEQ ID NO: 32673 - DNA, 15 bp, Homo sapiens
cccatcccagccaag

SEQ ID NO: 32674 - DNA, 15 bp, Homo sapiens
tcccatcccagccaa

SEQ ID NO: 32675 - DNA, 15 bp, Homo sapiens
ctcccatcccagcca

SEQ ID NO: 32676 - DNA, 15 bp, Homo sapiens
cctcccatcccagcc

SEQ ID NO: 32677 - DNA, 15 bp, Homo sapiens
tcctcccatcccagc

SEQ ID NO: 32678 - DNA, 15 bp, Homo sapiens
ctcctcccatcccag

SEQ ID NO: 32679 - DNA, 15 bp, Homo sapiens
tctcctcccatccca

SEQ ID NO: 32680 - DNA, 15 bp, Homo sapiens
atctcctcccatccc

SEQ ID NO: 32681 - DNA, 15 bp, Homo sapiens
catctcctcccatcc

SEQ ID NO: 32682 - DNA, 15 bp, Homo sapiens
tcatctcctcccatc

SEQ ID NO: 32683 - DNA, 15 bp, Homo sapiens
gtcatctcctcccat

SEQ ID NO: 32684 - DNA, 15 bp, Homo sapiens
tgtcatctcctccca

SEQ ID NO: 32685 - DNA, 15 bp, Homo sapiens
atgtcatctcctccc

SEQ ID NO: 32686 - DNA, 15 bp, Homo sapiens
catgtcatctcctcc

SEQ ID NO: 32687 - DNA, 15 bp, Homo sapiens
acatgtcatctcctc

SEQ ID NO: 32688 - DNA, 15 bp, Homo sapiens
cacatgtcatctcct

SEQ ID NO: 32689 - DNA, 15 bp, Homo sapiens
tcacatgtcatctcc

SEQ ID NO: 32690 - DNA, 15 bp, Homo sapiens
gtcacatgtcatctc

SEQ ID NO: 32691 - DNA, 15 bp, Homo sapiens
tgtcacatgtcatct

SEQ ID NO: 32692 - DNA, 15 bp, Homo sapiens
atgtcacatgtcatc

SEQ ID NO: 32693 - DNA, 15 bp, Homo sapiens
catgtcacatgtcat

SEQ ID NO: 32694 - DNA, 15 bp, Homo sapiens
acatgtcacatgtca

SEQ ID NO: 32695 - DNA, 15 bp, Homo sapiens
cacatgtcacatgtc

SEQ ID NO: 32696 - DNA, 15 bp, Homo sapiens
tcacatgtcacatgt

SEQ ID NO: 32697 - DNA, 15 bp, Homo sapiens
ttcacatgtcacatg

SEQ ID NO: 32698 - DNA, 15 bp, Homo sapiens
tttcacatgtcacat

SEQ ID NO: 32699 - DNA, 15 bp, Homo sapiens
ctttcacatgtcaca

SEQ ID NO: 32700 - DNA, 15 bp, Homo sapiens
tctttcacatgtcac

SEQ ID NO: 32701 - DNA, 15 bp, Homo sapiens
ctctttcacatgtca

SEQ ID NO: 32702 - DNA, 15 bp, Homo sapiens
cctctttcacatgtc

SEQ ID NO: 32703 - DNA, 15 bp, Homo sapiens
tcctctttcacatgt

SEQ ID NO: 32704 - DNA, 15 bp, Homo sapiens
gtcctctttcacatg

SEQ ID NO: 32705 - DNA, 15 bp, Homo sapiens
ggtcctctttcacat

SEQ ID NO: 32706 - DNA, 15 bp, Homo sapiens
aggtcctctttcaca

SEQ ID NO: 32707 - DNA, 15 bp, Homo sapiens
caggtcctctttcac

SEQ ID NO: 32708 - DNA, 15 bp, Homo sapiens
ccaggtcctctttca

SEQ ID NO: 32709 - DNA, 15 bp, Homo sapiens
tccaggtcctctttc

SEQ ID NO: 32710 - DNA, 15 bp, Homo sapiens
ctccaggtcctcttt

SEQ ID NO: 32711 - DNA, 15 bp, Homo sapiens
actccaggtcctctt

SEQ ID NO: 32712 - DNA, 15 bp, Homo sapiens
aactccaggtcctct

SEQ ID NO: 32713 - DNA, 15 bp, Homo sapiens
caactccaggtcctc

SEQ ID NO: 32714 - DNA, 15 bp, Homo sapiens
ccaactccaggtcct

SEQ ID NO: 32715 - DNA, 15 bp, Homo sapiens
gccaactccaggtcc

SEQ ID NO: 32716 - DNA, 15 bp, Homo sapiens
agccaactccaggtc

SEQ ID NO: 32717 - DNA, 15 bp, Homo sapiens
gagccaactccaggt

SEQ ID NO: 32718 - DNA, 15 bp, Homo sapiens
cgagccaactccagg

SEQ ID NO: 32719 - DNA, 15 bp, Homo sapiens
tcgagccaactccag

SEQ ID NO: 32720 - DNA, 15 bp, Homo sapiens
atcgagccaactcca

SEQ ID NO: 32721 - DNA, 15 bp, Homo sapiens
catcgagccaactcc

SEQ ID NO: 32722 - DNA, 15 bp, Homo sapiens
gcatcgagccaactc

SEQ ID NO: 32723 - DNA, 15 bp, Homo sapiens
agcatcgagccaact

SEQ ID NO: 32724 - DNA, 15 bp, Homo sapiens
gagcatcgagccaac

SEQ ID NO: 32725 - DNA, 15 bp, Homo sapiens
ggagcatcgagccaa

SEQ ID NO: 32726 - DNA, 15 bp, Homo sapiens
gggagcatcgagcca

SEQ ID NO: 32727 - DNA, 15 bp, Homo sapiens
tgggagcatcgagcc

SEQ ID NO: 32728 - DNA, 15 bp, Homo sapiens
ttgggagcatcgagc

SEQ ID NO: 32729 - DNA, 15 bp, Homo sapiens
tttgggagcatcgag

SEQ ID NO: 32730 - DNA, 15 bp, Homo sapiens
ttttgggagcatcga

SEQ ID NO: 32731 - DNA, 15 bp, Homo sapiens
cttttgggagcatcg

SEQ ID NO: 32732 - DNA, 15 bp, Homo sapiens
ccttttgggagcatc

SEQ ID NO: 32733 - DNA, 15 bp, Homo sapiens
cccttttgggagcat

SEQ ID NO: 32734 - DNA, 15 bp, Homo sapiens
tcccttttgggagca

SEQ ID NO: 32735 - DNA, 15 bp, Homo sapiens
ttcccttttgggagc

SEQ ID NO: 32736 - DNA, 15 bp, Homo sapiens
tttcccttttgggag

SEQ ID NO: 32737 - DNA, 15 bp, Homo sapiens
ctttcccttttggga

SEQ ID NO: 32738 - DNA, 15 bp, Homo sapiens
cctttcccttttggg

SEQ ID NO: 32739 - DNA, 15 bp, Homo sapiens
acctttcccttttgg

SEQ ID NO: 32740 - DNA, 15 bp, Homo sapiens
cacctttcccttttg

SEQ ID NO: 32741 - DNA, 15 bp, Homo sapiens
gcacctttccctttt

SEQ ID NO: 32742 - DNA, 15 bp, Homo sapiens
ggcacctttcccttt

SEQ ID NO: 32743 - DNA, 15 bp, Homo sapiens
cggcacctttccctt

SEQ ID NO: 32744 - DNA, 15 bp, Homo sapiens
tcggcacctttccct

SEQ ID NO: 32745 - DNA, 15 bp, Homo sapiens
ctcggcacctttccc

SEQ ID NO: 32746 - DNA, 15 bp, Homo sapiens
cctcggcacctttcc

SEQ ID NO: 32747 - DNA, 15 bp, Homo sapiens
ccctcggcacctttc

SEQ ID NO: 32748 - DNA, 15 bp, Homo sapiens
cccctcggcaccttt

SEQ ID NO: 32749 - DNA, 15 bp, Homo sapiens
tcccctcggcacctt

SEQ ID NO: 32750 - DNA, 15 bp, Homo sapiens
ctcccctcggcacct

SEQ ID NO: 32751 - DNA, 15 bp, Homo sapiens
gctcccctcggcacc

SEQ ID NO: 32752 - DNA, 15 bp, Homo sapiens
agctcccctcggcac

SEQ ID NO: 32753 - DNA, 15 bp, Homo sapiens
tagctcccctcggca

SEQ ID NO: 32754 - DNA, 15 bp, Homo sapiens
ctagctcccctcggc

SEQ ID NO: 32755 - DNA, 15 bp, Homo sapiens
gctagctcccctcgg

SEQ ID NO: 32756 - DNA, 15 bp, Homo sapiens
tgctagctcccctcg

SEQ ID NO: 32757 - DNA, 15 bp, Homo sapiens
ctgctagctcccctc

SEQ ID NO: 32758 - DNA, 15 bp, Homo sapiens
gctgctagctcccct

SEQ ID NO: 32759 - DNA, 15 bp, Homo sapiens
ggctgctagctcccc

SEQ ID NO: 32760 - DNA, 15 bp, Homo sapiens
tggctgctagctccc

SEQ ID NO: 32761 - DNA, 15 bp, Homo sapiens
atggctgctagctcc

SEQ ID NO: 32762 - DNA, 15 bp, Homo sapiens
catggctgctagctc

SEQ ID NO: 32763 - DNA, 15 bp, Homo sapiens
gcatggctgctagct

SEQ ID NO: 32764 - DNA, 15 bp, Homo sapiens
tgcatggctgctagc

SEQ ID NO: 32765 - DNA, 15 bp, Homo sapiens
ttgcatggctgctag

SEQ ID NO: 32766 - DNA, 15 bp, Homo sapiens
tttgcatggctgcta

SEQ ID NO: 32767 - DNA, 15 bp, Homo sapiens
ctttgcatggctgct

SEQ ID NO: 32768 - DNA, 15 bp, Homo sapiens
cctttgcatggctgc

SEQ ID NO: 32769 - DNA, 15 bp, Homo sapiens
gcctttgcatggctg

SEQ ID NO: 32770 - DNA, 15 bp, Homo sapiens
tgcctttgcatggct

SEQ ID NO: 32771 - DNA, 15 bp, Homo sapiens
ctgcctttgcatggc

SEQ ID NO: 32772 - DNA, 15 bp, Homo sapiens
tctgcctttgcatgg

SEQ ID NO: 32773 - DNA, 15 bp, Homo sapiens
ctctgcctttgcatg

SEQ ID NO: 32774 - DNA, 15 bp, Homo sapiens
tctctgcctttgcat

SEQ ID NO: 32775 - DNA, 15 bp, Homo sapiens
gtctctgcctttgca

SEQ ID NO: 32776 - DNA, 15 bp, Homo sapiens
tgtctctgcctttgc

SEQ ID NO: 32777 - DNA, 15 bp, Homo sapiens
atgtctctgcctttg

SEQ ID NO: 32778 - DNA, 15 bp, Homo sapiens
catgtctctgccttt

SEQ ID NO: 32779 - DNA, 15 bp, Homo sapiens
gcatgtctctgcctt

SEQ ID NO: 32780 - DNA, 15 bp, Homo sapiens
tgcatgtctctgcct

SEQ ID NO: 32781 - DNA, 15 bp, Homo sapiens
ctgcatgtctctgcc

SEQ ID NO: 32782 - DNA, 15 bp, Homo sapiens
cctgcatgtctctgc

SEQ ID NO: 32783 - DNA, 15 bp, Homo sapiens
gcctgcatgtctctg

SEQ ID NO: 32784 - DNA, 15 bp, Homo sapiens
tgcctgcatgtctct

SEQ ID NO: 32785 - DNA, 15 bp, Homo sapiens
ctgcctgcatgtctc

SEQ ID NO: 32786 - DNA, 15 bp, Homo sapiens
actgcctgcatgtct

SEQ ID NO: 32787 - DNA, 15 bp, Homo sapiens
gactgcctgcatgtc

SEQ ID NO: 32788 - DNA, 15 bp, Homo sapiens
agactgcctgcatgt

SEQ ID NO: 32789 - DNA, 15 bp, Homo sapiens
cagactgcctgcatg

SEQ ID NO: 32790 - DNA, 15 bp, Homo sapiens
ccagactgcctgcat

SEQ ID NO: 32791 - DNA, 15 bp, Homo sapiens
cccagactgcctgca

SEQ ID NO: 32792 - DNA, 15 bp, Homo sapiens
gcccagactgcctgc

SEQ ID NO: 32793 - DNA, 15 bp, Homo sapiens
ggcccagactgcctg

SEQ ID NO: 32794 - DNA, 15 bp, Homo sapiens
tggcccagactgcct

SEQ ID NO: 32795 - DNA, 15 bp, Homo sapiens
atggcccagactgcc

SEQ ID NO: 32796 - DNA, 15 bp, Homo sapiens
catggcccagactgc

SEQ ID NO: 32797 - DNA, 15 bp, Homo sapiens
tcatggcccagactg

SEQ ID NO: 32798 - DNA, 15 bp, Homo sapiens
ctcatggcccagact

SEQ ID NO: 32799 - DNA, 15 bp, Homo sapiens
cctcatggcccagac

SEQ ID NO: 32800 - DNA, 15 bp, Homo sapiens
tcctcatggcccaga

SEQ ID NO: 32801 - DNA, 15 bp, Homo sapiens
ctcctcatggcccag

SEQ ID NO: 32802 - DNA, 15 bp, Homo sapiens
gctcctcatggccca

SEQ ID NO: 32803 - DNA, 15 bp, Homo sapiens
agctcctcatggccc

SEQ ID NO: 32804 - DNA, 15 bp, Homo sapiens
gagctcctcatggcc

SEQ ID NO: 32805 - DNA, 15 bp, Homo sapiens
agagctcctcatggc

SEQ ID NO: 32806 - DNA, 15 bp, Homo sapiens
cagagctcctcatgg

SEQ ID NO: 32807 - DNA, 15 bp, Homo sapiens
ccagagctcctcatg

SEQ ID NO: 32808 - DNA, 15 bp, Homo sapiens
tccagagctcctcat

SEQ ID NO: 32809 - DNA, 15 bp, Homo sapiens
ttccagagctcctca

SEQ ID NO: 32810 - DNA, 15 bp, Homo sapiens
cttccagagctcctc

SEQ ID NO: 32811 - DNA, 15 bp, Homo sapiens
acttccagagctcct

SEQ ID NO: 32812 - DNA, 15 bp, Homo sapiens
cacttccagagctcc

SEQ ID NO: 32813 - DNA, 15 bp, Homo sapiens
tcacttccagagctc

SEQ ID NO: 32814 - DNA, 15 bp, Homo sapiens
gtcacttccagagct

SEQ ID NO: 32815 - DNA, 15 bp, Homo sapiens
agtcacttccagagc

SEQ ID NO: 32816 - DNA, 15 bp, Homo sapiens
gagtcacttccagag

SEQ ID NO: 32817 - DNA, 15 bp, Homo sapiens
cgagtcacttccaga

SEQ ID NO: 32818 - DNA, 15 bp, Homo sapiens
tcgagtcacttccag

SEQ ID NO: 32819 - DNA, 15 bp, Homo sapiens
atcgagtcacttcca

SEQ ID NO: 32820 - DNA, 15 bp, Homo sapiens
tatcgagtcacttcc

SEQ ID NO: 32821 - DNA, 15 bp, Homo sapiens
atatcgagtcacttc

SEQ ID NO: 32822 - DNA, 15 bp, Homo sapiens
catatcgagtcactt

SEQ ID NO: 32823 - DNA, 15 bp, Homo sapiens
acatatcgagtcact

SEQ ID NO: 32824 - DNA, 15 bp, Homo sapiens
gacatatcgagtcac

SEQ ID NO: 32825 - DNA, 15 bp, Homo sapiens
ggacatatcgagtca

SEQ ID NO: 32826 - DNA, 15 bp, Homo sapiens
tggacatatcgagtc

SEQ ID NO: 32827 - DNA, 15 bp, Homo sapiens
ctggacatatcgagt

SEQ ID NO: 32828 - DNA, 15 bp, Homo sapiens
tctggacatatcgag

SEQ ID NO: 32829 - DNA, 15 bp, Homo sapiens
ttctggacatatcga

SEQ ID NO: 32830 - DNA, 15 bp, Homo sapiens
attctggacatatcg

SEQ ID NO: 32831 - DNA, 15 bp, Homo sapiens
tattctggacatatc

SEQ ID NO: 32832 - DNA, 15 bp, Homo sapiens
ctattctggacatat

SEQ ID NO: 32833 - DNA, 15 bp, Homo sapiens
cctattctggacata

SEQ ID NO: 32834 - DNA, 15 bp, Homo sapiens
gcctattctggacat

SEQ ID NO: 32835 - DNA, 15 bp, Homo sapiens
ggcctattctggaca

SEQ ID NO: 32836 - DNA, 15 bp, Homo sapiens
tggcctattctggac

SEQ ID NO: 32837 - DNA, 15 bp, Homo sapiens
gtggcctattctgga

SEQ ID NO: 32838 - DNA, 15 bp, Homo sapiens
agtggcctattctgg

SEQ ID NO: 32839 - DNA, 15 bp, Homo sapiens
gagtggcctattctg

SEQ ID NO: 32840 - DNA, 15 bp, Homo sapiens
ggagtggcctattct

SEQ ID NO: 32841 - DNA, 15 bp, Homo sapiens
tggagtggcctattc

SEQ ID NO: 32842 - DNA, 15 bp, Homo sapiens
ctggagtggcctatt

SEQ ID NO: 32843 - DNA, 15 bp, Homo sapiens
cctggagtggcctat

SEQ ID NO: 32844 - DNA, 15 bp, Homo sapiens
ccctggagtggccta

SEQ ID NO: 32845 - DNA, 15 bp, Homo sapiens
tccctggagtggcct

SEQ ID NO: 32846 - DNA, 15 bp, Homo sapiens
ttccctggagtggcc

SEQ ID NO: 32847 - DNA, 15 bp, Homo sapiens
cttccctggagtggc

SEQ ID NO: 32848 - DNA, 15 bp, Homo sapiens
ccttccctggagtgg

SEQ ID NO: 32849 - DNA, 15 bp, Homo sapiens
cccttccctggagtg

SEQ ID NO: 32850 - DNA, 15 bp, Homo sapiens
gcccttccctggagt

SEQ ID NO: 32851 - DNA, 15 bp, Homo sapiens
agcccttccctggag

SEQ ID NO: 32852 - DNA, 15 bp, Homo sapiens
cagcccttccctgga

SEQ ID NO: 32853 - DNA, 15 bp, Homo sapiens
tcagcccttccctgg

SEQ ID NO: 32854 - DNA, 15 bp, Homo sapiens
ctcagcccttccctg

SEQ ID NO: 32855 - DNA, 15 bp, Homo sapiens
cctcagcccttccct

SEQ ID NO: 32856 - DNA, 15 bp, Homo sapiens
tcctcagcccttccc

SEQ ID NO: 32857 - DNA, 15 bp, Homo sapiens
ttcctcagcccttcc

SEQ ID NO: 32858 - DNA, 15 bp, Homo sapiens
cttcctcagcccttc

SEQ ID NO: 32859 - DNA, 15 bp, Homo sapiens
ccttcctcagccctt

SEQ ID NO: 32860 - DNA, 15 bp, Homo sapiens
tccttcctcagccct

SEQ ID NO: 32861 - DNA, 15 bp, Homo sapiens
atccttcctcagccc

SEQ ID NO: 32862 - DNA, 15 bp, Homo sapiens
catccttcctcagcc

SEQ ID NO: 32863 - DNA, 15 bp, Homo sapiens
tcatccttcctcagc

SEQ ID NO: 32864 - DNA, 15 bp, Homo sapiens
ttcatccttcctcag

SEQ ID NO: 32865 - DNA, 15 bp, Homo sapiens
cttcatccttcctca

SEQ ID NO: 32866 - DNA, 15 bp, Homo sapiens
acttcatccttcctc

SEQ ID NO: 32867 - DNA, 15 bp, Homo sapiens
aacttcatccttcct

SEQ ID NO: 32868 - DNA, 15 bp, Homo sapiens
caacttcatccttcc

SEQ ID NO: 32869 - DNA, 15 bp, Homo sapiens
ccaacttcatccttc

SEQ ID NO: 32870 - DNA, 15 bp, Homo sapiens
tccaacttcatcctt

SEQ ID NO: 32871 - DNA, 15 bp, Homo sapiens
ctccaacttcatcct

SEQ ID NO: 32872 - DNA, 15 bp, Homo sapiens
tctccaacttcatcc

SEQ ID NO: 32873 - DNA, 15 bp, Homo sapiens
ctctccaacttcatc

SEQ ID NO: 32874 - DNA, 15 bp, Homo sapiens
cctctccaacttcat

SEQ ID NO: 32875 - DNA, 15 bp, Homo sapiens
ccctctccaacttca

SEQ ID NO: 32876 - DNA, 15 bp, Homo sapiens
cccctctccaacttc

SEQ ID NO: 32877 - DNA, 15 bp, Homo sapiens
gcccctctccaactt

SEQ ID NO: 32878 - DNA, 15 bp, Homo sapiens
tgcccctctccaact

SEQ ID NO: 32879 - DNA, 15 bp, Homo sapiens
gtgcccctctccaac

SEQ ID NO: 32880 - DNA, 15 bp, Homo sapiens
tgtgcccctctccaa

SEQ ID NO: 32881 - DNA, 15 bp, Homo sapiens
ctgtgcccctctcca

SEQ ID NO: 32882 - DNA, 15 bp, Homo sapiens
tctgtgcccctctcc

SEQ ID NO: 32883 - DNA, 15 bp, Homo sapiens
gtctgtgcccctctc

SEQ ID NO: 32884 - DNA, 15 bp, Homo sapiens
ggtctgtgcccctct

SEQ ID NO: 32885 - DNA, 15 bp, Homo sapiens
tggtctgtgcccctc

SEQ ID NO: 32886 - DNA, 15 bp, Homo sapiens
ctggtctgtgcccct

SEQ ID NO: 32887 - DNA, 15 bp, Homo sapiens
tctggtctgtgcccc

SEQ ID NO: 32888 - DNA, 15 bp, Homo sapiens
atctggtctgtgccc

SEQ ID NO: 32889 - DNA, 15 bp, Homo sapiens
catctggtctgtgcc

SEQ ID NO: 32890 - DNA, 15 bp, Homo sapiens
gcatctggtctgtgc

SEQ ID NO: 32891 - DNA, 15 bp, Homo sapiens
tgcatctggtctgtg

SEQ ID NO: 32892 - DNA, 15 bp, Homo sapiens
ctgcatctggtctgt

SEQ ID NO: 32893 - DNA, 15 bp, Homo sapiens
tctgcatctggtctg

SEQ ID NO: 32894 - DNA, 15 bp, Homo sapiens
ttctgcatctggtct

SEQ ID NO: 32895 - DNA, 15 bp, Homo sapiens
cttctgcatctggtc

SEQ ID NO: 32896 - DNA, 15 bp, Homo sapiens
ccttctgcatctggt

SEQ ID NO: 32897 - DNA, 15 bp, Homo sapiens
cccttctgcatctgg

SEQ ID NO: 32898 - DNA, 15 bp, Homo sapiens
gcccttctgcatctg

SEQ ID NO: 32899 - DNA, 15 bp, Homo sapiens
ggcccttctgcatct

SEQ ID NO: 32900 - DNA, 15 bp, Homo sapiens
aggcccttctgcatc

SEQ ID NO: 32901 - DNA, 15 bp, Homo sapiens
gaggcccttctgcat

SEQ ID NO: 32902 - DNA, 15 bp, Homo sapiens
tgaggcccttctgca

SEQ ID NO: 32903 - DNA, 15 bp, Homo sapiens
ctgaggcccttctgc

SEQ ID NO: 32904 - DNA, 15 bp, Homo sapiens
tctgaggcccttctg

SEQ ID NO: 32905 - DNA, 15 bp, Homo sapiens
ctctgaggcccttct

SEQ ID NO: 32906 - DNA, 15 bp, Homo sapiens
cctctgaggcccttc

SEQ ID NO: 32907 - DNA, 15 bp, Homo sapiens
gcctctgaggccctt

SEQ ID NO: 32908 - DNA, 15 bp, Homo sapiens
ggcctctgaggccct

SEQ ID NO: 32909 - DNA, 15 bp, Homo sapiens
tggcctctgaggccc

SEQ ID NO: 32910 - DNA, 15 bp, Homo sapiens
ctggcctctgaggcc

SEQ ID NO: 32911 - DNA, 15 bp, Homo sapiens
cctggcctctgaggc

SEQ ID NO: 32912 - DNA, 15 bp, Homo sapiens
tcctggcctctgagg

SEQ ID NO: 32913 - DNA, 15 bp, Homo sapiens
atcctggcctctgag

SEQ ID NO: 32914 - DNA, 15 bp, Homo sapiens
catcctggcctctga

SEQ ID NO: 32915 - DNA, 15 bp, Homo sapiens
tcatcctggcctctg

SEQ ID NO: 32916 - DNA, 15 bp, Homo sapiens
ctcatcctggcctct

SEQ ID NO: 32917 - DNA, 15 bp, Homo sapiens
cctcatcctggcctc

SEQ ID NO: 32918 - DNA, 15 bp, Homo sapiens
ccctcatcctggcct

SEQ ID NO: 32919 - DNA, 15 bp, Homo sapiens
accctcatcctggcc

SEQ ID NO: 32920 - DNA, 15 bp, Homo sapiens
aaccctcatcctggc

SEQ ID NO: 32921 - DNA, 15 bp, Homo sapiens
aaaccctcatcctgg

SEQ ID NO: 32922 - DNA, 15 bp, Homo sapiens
caaaccctcatcctg

SEQ ID NO: 32923 - DNA, 15 bp, Homo sapiens
ccaaaccctcatcct

SEQ ID NO: 32924 - DNA, 15 bp, Homo sapiens
tccaaaccctcatcc

SEQ ID NO: 32925 - DNA, 15 bp, Homo sapiens
gtccaaaccctcatc

SEQ ID NO: 32926 - DNA, 15 bp, Homo sapiens
agtccaaaccctcat

SEQ ID NO: 32927 - DNA, 15 bp, Homo sapiens
gagtccaaaccctca

SEQ ID NO: 32928 - DNA, 15 bp, Homo sapiens
ggagtccaaaccctc

SEQ ID NO: 32929 - DNA, 15 bp, Homo sapiens
aggagtccaaaccct

SEQ ID NO: 32930 - DNA, 15 bp, Homo sapiens
aaggagtccaaaccc

SEQ ID NO: 32931 - DNA, 15 bp, Homo sapiens
gaaggagtccaaacc

SEQ ID NO: 32932 - DNA, 15 bp, Homo sapiens
ggaaggagtccaaac

SEQ ID NO: 32933 - DNA, 15 bp, Homo sapiens
aggaaggagtccaaa

SEQ ID NO: 32934 - DNA, 15 bp, Homo sapiens
caggaaggagtccaa

SEQ ID NO: 32935 - DNA, 15 bp, Homo sapiens
ccaggaaggagtcca

SEQ ID NO: 32936 - DNA, 15 bp, Homo sapiens
tccaggaaggagtcc

SEQ ID NO: 32937 - DNA, 15 bp, Homo sapiens
ctccaggaaggagtc

SEQ ID NO: 32938 - DNA, 15 bp, Homo sapiens
cctccaggaaggagt

SEQ ID NO: 32939 - DNA, 15 bp, Homo sapiens
gcctccaggaaggag

SEQ ID NO: 32940 - DNA, 15 bp, Homo sapiens
tgcctccaggaagga

SEQ ID NO: 32941 - DNA, 15 bp, Homo sapiens
ctgcctccaggaagg

SEQ ID NO: 32942 - DNA, 15 bp, Homo sapiens
gctgcctccaggaag

SEQ ID NO: 32943 - DNA, 15 bp, Homo sapiens
tgctgcctccaggaa

SEQ ID NO: 32944 - DNA, 15 bp, Homo sapiens
ctgctgcctccagga

SEQ ID NO: 32945 - DNA, 15 bp, Homo sapiens
gctgctgcctccagg

SEQ ID NO: 32946 - DNA, 15 bp, Homo sapiens
tgctgctgcctccag

SEQ ID NO: 32947 - DNA, 15 bp, Homo sapiens
ctgctgctgcctcca

SEQ ID NO: 32948 - DNA, 15 bp, Homo sapiens
actgctgctgcctcc

SEQ ID NO: 32949 - DNA, 15 bp, Homo sapiens
cactgctgctgcctc

SEQ ID NO: 32950 - DNA, 15 bp, Homo sapiens
ccactgctgctgcct

SEQ ID NO: 32951 - DNA, 15 bp, Homo sapiens
cccactgctgctgcc

SEQ ID NO: 32952 - DNA, 15 bp, Homo sapiens
tcccactgctgctgc

SEQ ID NO: 32953 - DNA, 15 bp, Homo sapiens
ttcccactgctgctg

SEQ ID NO: 32954 - DNA, 15 bp, Homo sapiens
tttcccactgctgct

SEQ ID NO: 32955 - DNA, 15 bp, Homo sapiens
ttttcccactgctgc

SEQ ID NO: 32956 - DNA, 15 bp, Homo sapiens
cttttcccactgctg

SEQ ID NO: 32957 - DNA, 15 bp, Homo sapiens
tcttttcccactgct

SEQ ID NO: 32958 - DNA, 15 bp, Homo sapiens
ctcttttcccactgc

SEQ ID NO: 32959 - DNA, 15 bp, Homo sapiens
actcttttcccactg

SEQ ID NO: 32960 - DNA, 15 bp, Homo sapiens
aactcttttcccact

SEQ ID NO: 32961 - DNA, 15 bp, Homo sapiens
taactcttttcccac

SEQ ID NO: 32962 - DNA, 15 bp, Homo sapiens
ttaactcttttccca

SEQ ID NO: 32963 - DNA, 15 bp, Homo sapiens
tttaactcttttccc

SEQ ID NO: 32964 - DNA, 15 bp, Homo sapiens
ttttaactcttttcc

SEQ ID NO: 32965 - DNA, 15 bp, Homo sapiens
cttttaactcttttc

SEQ ID NO: 32966 - DNA, 15 bp, Homo sapiens
gcttttaactctttt

SEQ ID NO: 32967 - DNA, 15 bp, Homo sapiens
agcttttaactcttt

SEQ ID NO: 32968 - DNA, 15 bp, Homo sapiens
cagcttttaactctt

SEQ ID NO: 32969 - DNA, 15 bp, Homo sapiens
ccagcttttaactct

SEQ ID NO: 32970 - DNA, 15 bp, Homo sapiens
accagcttttaactc

SEQ ID NO: 32971 - DNA, 15 bp, Homo sapiens
aaccagcttttaact

SEQ ID NO: 32972 - DNA, 15 bp, Homo sapiens
aaaccagcttttaac

SEQ ID NO: 32973 - DNA, 15 bp, Homo sapiens
caaaccagcttttaa

SEQ ID NO: 32974 - DNA, 15 bp, Homo sapiens
acaaaccagctttta

SEQ ID NO: 32975 - DNA, 15 bp, Homo sapiens
tacaaaccagctttt

SEQ ID NO: 32976 - DNA, 15 bp, Homo sapiens
ttacaaaccagcttt

SEQ ID NO: 32977 - DNA, 15 bp, Homo sapiens
tttacaaaccagctt

SEQ ID NO: 32978 - DNA, 15 bp, Homo sapiens
ctttacaaaccagct

SEQ ID NO: 32979 - DNA, 15 bp, Homo sapiens
actttacaaaccagc

SEQ ID NO: 32980 - DNA, 15 bp, Homo sapiens
cactttacaaaccag

SEQ ID NO: 32981 - DNA, 15 bp, Homo sapiens
ccactttacaaacca

SEQ ID NO: 32982 - DNA, 15 bp, Homo sapiens
tccactttacaaacc

SEQ ID NO: 32983 - DNA, 15 bp, Homo sapiens
ctccactttacaaac

SEQ ID NO: 32984 - DNA, 15 bp, Homo sapiens
gctccactttacaaa

SEQ ID NO: 32985 - DNA, 15 bp, Homo sapiens
ggctccactttacaa

SEQ ID NO: 32986 - DNA, 15 bp, Homo sapiens
tggctccactttaca

SEQ ID NO: 32987 - DNA, 15 bp, Homo sapiens
atggctccactttac

SEQ ID NO: 32988 - DNA, 15 bp, Homo sapiens
catggctccacttta

SEQ ID NO: 32989 - DNA, 15 bp, Homo sapiens
acatggctccacttt

SEQ ID NO: 32990 - DNA, 15 bp, Homo sapiens
aacatggctccactt

SEQ ID NO: 32991 - DNA, 15 bp, Homo sapiens
caacatggctccact

SEQ ID NO: 32992 - DNA, 15 bp, Homo sapiens
gcaacatggctccac

SEQ ID NO: 32993 - DNA, 15 bp, Homo sapiens
agcaacatggctcca

SEQ ID NO: 32994 - DNA, 15 bp, Homo sapiens
gagcaacatggctcc

SEQ ID NO: 32995 - DNA, 15 bp, Homo sapiens
cgagcaacatggctc

SEQ ID NO: 32996 - DNA, 15 bp, Homo sapiens
gcgagcaacatggct

SEQ ID NO: 32997 - DNA, 15 bp, Homo sapiens
agcgagcaacatggc

SEQ ID NO: 32998 - DNA, 15 bp, Homo sapiens
cagcgagcaacatgg

SEQ ID NO: 32999 - DNA, 15 bp, Homo sapiens
ccagcgagcaacatg

SEQ ID NO: 33000 - DNA, 15 bp, Homo sapiens
accagcgagcaacat

SEQ ID NO: 33001 - DNA, 15 bp, Homo sapiens
gaccagcgagcaaca

SEQ ID NO: 33002 - DNA, 15 bp, Homo sapiens
ggaccagcgagcaac

SEQ ID NO: 33003 - DNA, 15 bp, Homo sapiens
tggaccagcgagcaa

SEQ ID NO: 33004 - DNA, 15 bp, Homo sapiens
ctggaccagcgagca

SEQ ID NO: 33005 - DNA, 15 bp, Homo sapiens
cctggaccagcgagc

SEQ ID NO: 33006 - DNA, 15 bp, Homo sapiens
gcctggaccagcgag

SEQ ID NO: 33007 - DNA, 15 bp, Homo sapiens
tgcctggaccagcga

SEQ ID NO: 33008 - DNA, 15 bp, Homo sapiens
ttgcctggaccagcg

SEQ ID NO: 33009 - DNA, 15 bp, Homo sapiens
attgcctggaccagc

SEQ ID NO: 33010 - DNA, 15 bp, Homo sapiens
aattgcctggaccag

SEQ ID NO: 33011 - DNA, 15 bp, Homo sapiens
gaattgcctggacca

SEQ ID NO: 33012 - DNA, 15 bp, Homo sapiens
ggaattgcctggacc

SEQ ID NO: 33013 - DNA, 15 bp, Homo sapiens
gggaattgcctggac

SEQ ID NO: 33014 - DNA, 15 bp, Homo sapiens
ggggaattgcctgga

SEQ ID NO: 33015 - DNA, 15 bp, Homo sapiens
gggggaattgcctgg

SEQ ID NO: 33016 - DNA, 15 bp, Homo sapiens
cgggggaattgcctg

SEQ ID NO: 33017 - DNA, 15 bp, Homo sapiens
tcgggggaattgcct

SEQ ID NO: 33018 - DNA, 15 bp, Homo sapiens
ttcgggggaattgcc

SEQ ID NO: 33019 - DNA, 15 bp, Homo sapiens
tttcgggggaattgc

SEQ ID NO: 33020 - DNA, 15 bp, Homo sapiens
ctttcgggggaattg

SEQ ID NO: 33021 - DNA, 15 bp, Homo sapiens
actttcgggggaatt

SEQ ID NO: 33022 - DNA, 15 bp, Homo sapiens
aactttcgggggaat

SEQ ID NO: 33023 - DNA, 15 bp, Homo sapiens
gaactttcgggggaa

SEQ ID NO: 33024 - DNA, 15 bp, Homo sapiens
tgaactttcggggga

SEQ ID NO: 33025 - DNA, 15 bp, Homo sapiens
atgaactttcggggg

SEQ ID NO: 33026 - DNA, 15 bp, Homo sapiens
catgaactttcgggg

SEQ ID NO: 33027 - DNA, 15 bp, Homo sapiens
acatgaactttcggg

SEQ ID NO: 33028 - DNA, 15 bp, Homo sapiens
aacatgaactttcgg

SEQ ID NO: 33029 - DNA, 15 bp, Homo sapiens
aaacatgaactttcg

SEQ ID NO: 33030 - DNA, 15 bp, Homo sapiens
gaaacatgaactttc

SEQ ID NO: 33031 - DNA, 15 bp, Homo sapiens
ggaaacatgaacttt

SEQ ID NO: 33032 - DNA, 15 bp, Homo sapiens
gggaaacatgaactt

SEQ ID NO: 33033 - DNA, 15 bp, Homo sapiens
agggaaacatgaact

SEQ ID NO: 33034 - DNA, 15 bp, Homo sapiens
tagggaaacatgaac

SEQ ID NO: 33035 - DNA, 15 bp, Homo sapiens
gtagggaaacatgaa

SEQ ID NO: 33036 - DNA, 15 bp, Homo sapiens
tgtagggaaacatga

SEQ ID NO: 33037 - DNA, 15 bp, Homo sapiens
ttgtagggaaacatg

SEQ ID NO: 33038 - DNA, 15 bp, Homo sapiens
tttgtagggaaacat

SEQ ID NO: 33039 - DNA, 15 bp, Homo sapiens
ttttgtagggaaaca

SEQ ID NO: 33040 - DNA, 15 bp, Homo sapiens
gttttgtagggaaac

SEQ ID NO: 33041 - DNA, 15 bp, Homo sapiens
ggttttgtagggaaa

SEQ ID NO: 33042 - DNA, 15 bp, Homo sapiens
gggttttgtagggaa

SEQ ID NO: 33043 - DNA, 15 bp, Homo sapiens
cgggttttgtaggga

SEQ ID NO: 33044 - DNA, 15 bp, Homo sapiens
tcgggttttgtaggg

SEQ ID NO: 33045 - DNA, 15 bp, Homo sapiens
ctcgggttttgtagg

SEQ ID NO: 33046 - DNA, 15 bp, Homo sapiens
tctcgggttttgtag

SEQ ID NO: 33047 - DNA, 15 bp, Homo sapiens
ctctcgggttttgta

SEQ ID NO: 33048 - DNA, 15 bp, Homo sapiens
tctctcgggttttgt

SEQ ID NO: 33049 - DNA, 15 bp, Homo sapiens
ctctctcgggttttg

SEQ ID NO: 33050 - DNA, 15 bp, Homo sapiens
gctctctcgggtttt

SEQ ID NO: 33051 - DNA, 15 bp, Homo sapiens
agctctctcgggttt

SEQ ID NO: 33052 - DNA, 15 bp, Homo sapiens
tagctctctcgggtt

SEQ ID NO: 33053 - DNA, 15 bp, Homo sapiens
gtagctctctcgggt

SEQ ID NO: 33054 - DNA, 15 bp, Homo sapiens
agtagctctctcggg

SEQ ID NO: 33055 - DNA, 15 bp, Homo sapiens
tagtagctctctcgg

SEQ ID NO: 33056 - DNA, 15 bp, Homo sapiens
ctagtagctctctcg

SEQ ID NO: 33057 - DNA, 15 bp, Homo sapiens
actagtagctctctc

SEQ ID NO: 33058 - DNA, 15 bp, Homo sapiens
tactagtagctctct

SEQ ID NO: 33059 - DNA, 15 bp, Homo sapiens
ctactagtagctctc

SEQ ID NO: 33060 - DNA, 15 bp, Homo sapiens
cctactagtagctct

SEQ ID NO: 33061 - DNA, 15 bp, Homo sapiens
gcctactagtagctc

SEQ ID NO: 33062 - DNA, 15 bp, Homo sapiens
cgcctactagtagct

SEQ ID NO: 33063 - DNA, 15 bp, Homo sapiens
acgcctactagtagc

SEQ ID NO: 33064 - DNA, 15 bp, Homo sapiens
cacgcctactagtag

SEQ ID NO: 33065 - DNA, 15 bp, Homo sapiens
tcacgcctactagta

SEQ ID NO: 33066 - DNA, 15 bp, Homo sapiens
ttcacgcctactagt

SEQ ID NO: 33067 - DNA, 15 bp, Homo sapiens
cttcacgcctactag

SEQ ID NO: 33068 - DNA, 15 bp, Homo sapiens
acttcacgcctacta

SEQ ID NO: 33069 - DNA, 15 bp, Homo sapiens
aacttcacgcctact

SEQ ID NO: 33070 - DNA, 15 bp, Homo sapiens
gaacttcacgcctac

SEQ ID NO: 33071 - DNA, 15 bp, Homo sapiens
cgaacttcacgccta

SEQ ID NO: 33072 - DNA, 15 bp, Homo sapiens
acgaacttcacgcct

SEQ ID NO: 33073 - DNA, 15 bp, Homo sapiens
cacgaacttcacgcc

SEQ ID NO: 33074 - DNA, 15 bp, Homo sapiens
ccacgaacttcacgc

SEQ ID NO: 33075 - DNA, 15 bp, Homo sapiens
gccacgaacttcacg

SEQ ID NO: 33076 - DNA, 15 bp, Homo sapiens
ggccacgaacttcac

SEQ ID NO: 33077 - DNA, 15 bp, Homo sapiens
gggccacgaacttca

SEQ ID NO: 33078 - DNA, 15 bp, Homo sapiens
agggccacgaacttc

SEQ ID NO: 33079 - DNA, 15 bp, Homo sapiens
cagggccacgaactt

SEQ ID NO: 33080 - DNA, 15 bp, Homo sapiens
ccagggccacgaact

SEQ ID NO: 33081 - DNA, 15 bp, Homo sapiens
accagggccacgaac

SEQ ID NO: 33082 - DNA, 15 bp, Homo sapiens
gaccagggccacgaa

SEQ ID NO: 33083 - DNA, 15 bp, Homo sapiens
agaccagggccacga

SEQ ID NO: 33084 - DNA, 15 bp, Homo sapiens
cagaccagggccacg

SEQ ID NO: 33085 - DNA, 15 bp, Homo sapiens
tcagaccagggccac

SEQ ID NO: 33086 - DNA, 15 bp, Homo sapiens
ctcagaccagggcca

SEQ ID NO: 33087 - DNA, 15 bp, Homo sapiens
cctcagaccagggcc

SEQ ID NO: 33088 - DNA, 15 bp, Homo sapiens
tcctcagaccagggc

SEQ ID NO: 33089 - DNA, 15 bp, Homo sapiens
atcctcagaccaggg

SEQ ID NO: 33090 - DNA, 15 bp, Homo sapiens
aatcctcagaccagg

SEQ ID NO: 33091 - DNA, 15 bp, Homo sapiens
aaatcctcagaccag

SEQ ID NO: 33092 - DNA, 15 bp, Homo sapiens
gaaatcctcagacca

SEQ ID NO: 33093 - DNA, 15 bp, Homo sapiens
ggaaatcctcagacc

SEQ ID NO: 33094 - DNA, 15 bp, Homo sapiens
aggaaatcctcagac

SEQ ID NO: 33095 - DNA, 15 bp, Homo sapiens
caggaaatcctcaga

SEQ ID NO: 33096 - DNA, 15 bp, Homo sapiens
acaggaaatcctcag

SEQ ID NO: 33097 - DNA, 15 bp, Homo sapiens
aacaggaaatcctca

SEQ ID NO: 33098 - DNA, 15 bp, Homo sapiens
aaacaggaaatcctc

SEQ ID NO: 33099 - DNA, 15 bp, Homo sapiens
gaaacaggaaatcct

SEQ ID NO: 33100 - DNA, 15 bp, Homo sapiens
ggaaacaggaaatcc

SEQ ID NO: 33101 - DNA, 15 bp, Homo sapiens
aggaaacaggaaatc

SEQ ID NO: 33102 - DNA, 15 bp, Homo sapiens
aaggaaacaggaaat

SEQ ID NO: 33103 - DNA, 15 bp, Homo sapiens
caaggaaacaggaaa

SEQ ID NO: 33104 - DNA, 15 bp, Homo sapiens
acaaggaaacaggaa

SEQ ID NO: 33105 - DNA, 15 bp, Homo sapiens
gacaaggaaacagga

SEQ ID NO: 33106 - DNA, 15 bp, Homo sapiens
tgacaaggaaacagg

SEQ ID NO: 33107 - DNA, 15 bp, Homo sapiens
ctgacaaggaaacag

SEQ ID NO: 33108 - DNA, 15 bp, Homo sapiens
cctgacaaggaaaca

SEQ ID NO: 33109 - DNA, 15 bp, Homo sapiens
acctgacaaggaaac

SEQ ID NO: 33110 - DNA, 15 bp, Homo sapiens
tacctgacaaggaaa

SEQ ID NO: 33111 - DNA, 15 bp, Homo sapiens
atacctgacaaggaa

SEQ ID NO: 33112 - DNA, 15 bp, Homo sapiens
catacctgacaagga

SEQ ID NO: 33113 - DNA, 15 bp, Homo sapiens
ccatacctgacaagg

SEQ ID NO: 33114 - DNA, 15 bp, Homo sapiens
tccatacctgacaag

SEQ ID NO: 33115 - DNA, 15 bp, Homo sapiens
ctccatacctgacaa

SEQ ID NO: 33116 - DNA, 15 bp, Homo sapiens
cctccatacctgaca

SEQ ID NO: 33117 - DNA, 15 bp, Homo sapiens
tcctccatacctgac

SEQ ID NO: 33118 - DNA, 15 bp, Homo sapiens
ttcctccatacctga

SEQ ID NO: 33119 - DNA, 15 bp, Homo sapiens
attcctccatacctg

SEQ ID NO: 33120 - DNA, 15 bp, Homo sapiens
aattcctccatacct

SEQ ID NO: 33121 - DNA, 15 bp, Homo sapiens
aaattcctccatacc

SEQ ID NO: 33122 - DNA, 15 bp, Homo sapiens
gaaattcctccatac

SEQ ID NO: 33123 - DNA, 15 bp, Homo sapiens
ggaaattcctccata

SEQ ID NO: 33124 - DNA, 15 bp, Homo sapiens
tggaaattcctccat

SEQ ID NO: 33125 - DNA, 15 bp, Homo sapiens
atggaaattcctcca

SEQ ID NO: 33126 - DNA, 15 bp, Homo sapiens
aatggaaattcctcc

SEQ ID NO: 33127 - DNA, 15 bp, Homo sapiens
caatggaaattcctc

SEQ ID NO: 33128 - DNA, 15 bp, Homo sapiens
ccaatggaaattcct

SEQ ID NO: 33129 - DNA, 15 bp, Homo sapiens
tccaatggaaattcc

SEQ ID NO: 33130 - DNA, 15 bp, Homo sapiens
ctccaatggaaattc

SEQ ID NO: 33131 - DNA, 15 bp, Homo sapiens
cctccaatggaaatt

SEQ ID NO: 33132 - DNA, 15 bp, Homo sapiens
tcctccaatggaaat

SEQ ID NO: 33133 - DNA, 15 bp, Homo sapiens
ttcctccaatggaaa

SEQ ID NO: 33134 - DNA, 15 bp, Homo sapiens
tttcctccaatggaa

SEQ ID NO: 33135 - DNA, 15 bp, Homo sapiens
ctttcctccaatgga

SEQ ID NO: 33136 - DNA, 15 bp, Homo sapiens
gctttcctccaatgg

SEQ ID NO: 33137 - DNA, 15 bp, Homo sapiens
agctttcctccaatg

SEQ ID NO: 33138 - DNA, 15 bp, Homo sapiens
gagctttcctccaat

SEQ ID NO: 33139 - DNA, 15 bp, Homo sapiens
ggagctttcctccaa

SEQ ID NO: 33140 - DNA, 15 bp, Homo sapiens
gggagctttcctcca

SEQ ID NO: 33141 - DNA, 15 bp, Homo sapiens
tgggagctttcctcc

SEQ ID NO: 33142 - DNA, 15 bp, Homo sapiens
ctgggagctttcctc

SEQ ID NO: 33143 - DNA, 15 bp, Homo sapiens
actgggagctttcct

SEQ ID NO: 33144 - DNA, 15 bp, Homo sapiens
gactgggagctttcc

SEQ ID NO: 33145 - DNA, 15 bp, Homo sapiens
cgactgggagctttc

SEQ ID NO: 33146 - DNA, 15 bp, Homo sapiens
acgactgggagcttt

SEQ ID NO: 33147 - DNA, 15 bp, Homo sapiens
gacgactgggagctt

SEQ ID NO: 33148 - DNA, 15 bp, Homo sapiens
ggacgactgggagct

SEQ ID NO: 33149 - DNA, 15 bp, Homo sapiens
gggacgactgggagc

SEQ ID NO: 33150 - DNA, 15 bp, Homo sapiens
ggggacgactgggag

SEQ ID NO: 33151 - DNA, 15 bp, Homo sapiens
tggggacgactggga

SEQ ID NO: 33152 - DNA, 15 bp, Homo sapiens
atggggacgactggg

SEQ ID NO: 33153 - DNA, 15 bp, Homo sapiens
gatggggacgactgg

SEQ ID NO: 33154 - DNA, 15 bp, Homo sapiens
tgatggggacgactg

SEQ ID NO: 33155 - DNA, 15 bp, Homo sapiens
gtgatggggacgact

SEQ ID NO: 33156 - DNA, 15 bp, Homo sapiens
cgtgatggggacgac

SEQ ID NO: 33157 - DNA, 15 bp, Homo sapiens
ccgtgatggggacga

SEQ ID NO: 33158 - DNA, 15 bp, Homo sapiens
cccgtgatggggacg

SEQ ID NO: 33159 - DNA, 15 bp, Homo sapiens
ccccgtgatggggac

SEQ ID NO: 33160 - DNA, 15 bp, Homo sapiens
cccccgtgatgggga

SEQ ID NO: 33161 - DNA, 15 bp, Homo sapiens
tcccccgtgatgggg

SEQ ID NO: 33162 - DNA, 15 bp, Homo sapiens
ttcccccgtgatggg

SEQ ID NO: 33163 - DNA, 15 bp, Homo sapiens
cttcccccgtgatgg

SEQ ID NO: 33164 - DNA, 15 bp, Homo sapiens
gcttcccccgtgatg

SEQ ID NO: 33165 - DNA, 15 bp, Homo sapiens
tgcttcccccgtgat

SEQ ID NO: 33166 - DNA, 15 bp, Homo sapiens
gtgcttcccccgtga

SEQ ID NO: 33167 - DNA, 15 bp, Homo sapiens
agtgcttcccccgtg

SEQ ID NO: 33168 - DNA, 15 bp, Homo sapiens
aagtgcttcccccgt

SEQ ID NO: 33169 - DNA, 15 bp, Homo sapiens
caagtgcttcccccg

SEQ ID NO: 33170 - DNA, 15 bp, Homo sapiens
acaagtgcttccccc

SEQ ID NO: 33171 - DNA, 15 bp, Homo sapiens
aacaagtgcttcccc

SEQ ID NO: 33172 - DNA, 15 bp, Homo sapiens
caacaagtgcttccc

SEQ ID NO: 33173 - DNA, 15 bp, Homo sapiens
ccaacaagtgcttcc

SEQ ID NO: 33174 - DNA, 15 bp, Homo sapiens
cccaacaagtgcttc

SEQ ID NO: 33175 - DNA, 15 bp, Homo sapiens
acccaacaagtgctt

SEQ ID NO: 33176 - DNA, 15 bp, Homo sapiens
aacccaacaagtgct

SEQ ID NO: 33177 - DNA, 15 bp, Homo sapiens
aaacccaacaagtgc

SEQ ID NO: 33178 - DNA, 15 bp, Homo sapiens
aaaacccaacaagtg

SEQ ID NO: 33179 - DNA, 15 bp, Homo sapiens
aaaaacccaacaagt

SEQ ID NO: 33180 - DNA, 15 bp, Homo sapiens
taaaaacccaacaag

SEQ ID NO: 33181 - DNA, 15 bp, Homo sapiens
ttaaaaacccaacaa

SEQ ID NO: 33182 - DNA, 15 bp, Homo sapiens
cttaaaaacccaaca

SEQ ID NO: 33183 - DNA, 15 bp, Homo sapiens
gcttaaaaacccaac

SEQ ID NO: 33184 - DNA, 15 bp, Homo sapiens
cgcttaaaaacccaa

SEQ ID NO: 33185 - DNA, 15 bp, Homo sapiens
tcgcttaaaaaccca

SEQ ID NO: 33186 - DNA, 15 bp, Homo sapiens
gtcgcttaaaaaccc

SEQ ID NO: 33187 - DNA, 15 bp, Homo sapiens
ggtcgcttaaaaacc

SEQ ID NO: 33188 - DNA, 15 bp, Homo sapiens
aggtcgcttaaaaac

SEQ ID NO: 33189 - DNA, 15 bp, Homo sapiens
aaggtcgcttaaaaa

SEQ ID NO: 33190 - DNA, 15 bp, Homo sapiens
caaggtcgcttaaaa

SEQ ID NO: 33191 - DNA, 15 bp, Homo sapiens
ccaaggtcgcttaaa

SEQ ID NO: 33192 - DNA, 15 bp, Homo sapiens
gccaaggtcgcttaa

SEQ ID NO: 33193 - DNA, 15 bp, Homo sapiens
ggccaaggtcgctta

SEQ ID NO: 33194 - DNA, 15 bp, Homo sapiens
cggccaaggtcgctt

SEQ ID NO: 33195 - DNA, 15 bp, Homo sapiens
ccggccaaggtcgct

SEQ ID NO: 33196 - DNA, 15 bp, Homo sapiens
tccggccaaggtcgc

SEQ ID NO: 33197 - DNA, 15 bp, Homo sapiens
atccggccaaggtcg

SEQ ID NO: 33198 - DNA, 15 bp, Homo sapiens
gatccggccaaggtc

SEQ ID NO: 33199 - DNA, 15 bp, Homo sapiens
tgatccggccaaggt

SEQ ID NO: 33200 - DNA, 15 bp, Homo sapiens
atgatccggccaagg

SEQ ID NO: 33201 - DNA, 15 bp, Homo sapiens
catgatccggccaag

SEQ ID NO: 33202 - DNA, 15 bp, Homo sapiens
tcatgatccggccaa

SEQ ID NO: 33203 - DNA, 15 bp, Homo sapiens
ttcatgatccggcca

SEQ ID NO: 33204 - DNA, 15 bp, Homo sapiens
attcatgatccggcc

SEQ ID NO: 33205 - DNA, 15 bp, Homo sapiens
cattcatgatccggc

SEQ ID NO: 33206 - DNA, 15 bp, Homo sapiens
acattcatgatccgg

SEQ ID NO: 33207 - DNA, 15 bp, Homo sapiens
cacattcatgatccg

SEQ ID NO: 33208 - DNA, 15 bp, Homo sapiens
tcacattcatgatcc

SEQ ID NO: 33209 - DNA, 15 bp, Homo sapiens
ctcacattcatgatc

SEQ ID NO: 33210 - DNA, 15 bp, Homo sapiens
gctcacattcatgat

SEQ ID NO: 33211 - DNA, 15 bp, Homo sapiens
cgctcacattcatga

SEQ ID NO: 33212 - DNA, 15 bp, Homo sapiens
ccgctcacattcatg

SEQ ID NO: 33213 - DNA, 15 bp, Homo sapiens
cccgctcacattcat

SEQ ID NO: 33214 - DNA, 15 bp, Homo sapiens
ccccgctcacattca

SEQ ID NO: 33215 - DNA, 15 bp, Homo sapiens
accccgctcacattc

SEQ ID NO: 33216 - DNA, 15 bp, Homo sapiens
taccccgctcacatt

SEQ ID NO: 33217 - DNA, 15 bp, Homo sapiens
ataccccgctcacat

SEQ ID NO: 33218 - DNA, 15 bp, Homo sapiens
cataccccgctcaca

SEQ ID NO: 33219 - DNA, 15 bp, Homo sapiens
acataccccgctcac

SEQ ID NO: 33220 - DNA, 15 bp, Homo sapiens
tacataccccgctca

SEQ ID NO: 33221 - DNA, 15 bp, Homo sapiens
ttacataccccgctc

SEQ ID NO: 33222 - DNA, 15 bp, Homo sapiens
tttacataccccgct

SEQ ID NO: 33223 - DNA, 15 bp, Homo sapiens
gtttacataccccgc

SEQ ID NO: 33224 - DNA, 15 bp, Homo sapiens
tgtttacataccccg

SEQ ID NO: 33225 - DNA, 15 bp, Homo sapiens
ctgtttacatacccc

SEQ ID NO: 33226 - DNA, 15 bp, Homo sapiens
tctgtttacataccc

SEQ ID NO: 33227 - DNA, 15 bp, Homo sapiens
gtctgtttacatacc

SEQ ID NO: 33228 - DNA, 15 bp, Homo sapiens
agtctgtttacatac

SEQ ID NO: 33229 - DNA, 15 bp, Homo sapiens
cagtctgtttacata

SEQ ID NO: 33230 - DNA, 15 bp, Homo sapiens
ccagtctgtttacat

SEQ ID NO: 33231 - DNA, 15 bp, Homo sapiens
tccagtctgtttaca

SEQ ID NO: 33232 - DNA, 15 bp, Homo sapiens
ctccagtctgtttac

SEQ ID NO: 33233 - DNA, 15 bp, Homo sapiens
tctccagtctgttta

SEQ ID NO: 33234 - DNA, 15 bp, Homo sapiens
atctccagtctgttt

SEQ ID NO: 33235 - DNA, 15 bp, Homo sapiens
aatctccagtctgtt

SEQ ID NO: 33236 - DNA, 15 bp, Homo sapiens
aaatctccagtctgt

SEQ ID NO: 33237 - DNA, 15 bp, Homo sapiens
caaatctccagtctg

SEQ ID NO: 33238 - DNA, 15 bp, Homo sapiens
tcaaatctccagtct

SEQ ID NO: 33239 - DNA, 15 bp, Homo sapiens
ctcaaatctccagtc

SEQ ID NO: 33240 - DNA, 15 bp, Homo sapiens
actcaaatctccagt

SEQ ID NO: 33241 - DNA, 15 bp, Homo sapiens
tactcaaatctccag

SEQ ID NO: 33242 - DNA, 15 bp, Homo sapiens
ctactcaaatctcca

SEQ ID NO: 33243 - DNA, 15 bp, Homo sapiens
cctactcaaatctcc

SEQ ID NO: 33244 - DNA, 15 bp, Homo sapiens
tcctactcaaatctc

SEQ ID NO: 33245 - DNA, 15 bp, Homo sapiens
atcctactcaaatct

SEQ ID NO: 33246 - DNA, 15 bp, Homo sapiens
aatcctactcaaatc

SEQ ID NO: 33247 - DNA, 15 bp, Homo sapiens
aaatcctactcaaat

SEQ ID NO: 33248 - DNA, 15 bp, Homo sapiens
aaaatcctactcaaa

SEQ ID NO: 33249 - DNA, 15 bp, Homo sapiens
aaaaatcctactcaa

SEQ ID NO: 33250 - DNA, 15 bp, Homo sapiens
caaaaatcctactca

SEQ ID NO: 33251 - DNA, 15 bp, Homo sapiens
tcaaaaatcctactc

SEQ ID NO: 33252 - DNA, 15 bp, Homo sapiens
gtcaaaaatcctact

SEQ ID NO: 33253 - DNA, 15 bp, Homo sapiens
agtcaaaaatcctac

SEQ ID NO: 33254 - DNA, 15 bp, Homo sapiens
aagtcaaaaatccta

SEQ ID NO: 33255 - DNA, 15 bp, Homo sapiens
caagtcaaaaatcct

SEQ ID NO: 33256 - DNA, 15 bp, Homo sapiens
gcaagtcaaaaatcc

SEQ ID NO: 33257 - DNA, 15 bp, Homo sapiens
agcaagtcaaaaatc

SEQ ID NO: 33258 - DNA, 15 bp, Homo sapiens
aagcaagtcaaaaat

SEQ ID NO: 33259 - DNA, 15 bp, Homo sapiens
taagcaagtcaaaaa

SEQ ID NO: 33260 - DNA, 15 bp, Homo sapiens
ttaagcaagtcaaaa

SEQ ID NO: 33261 - DNA, 15 bp, Homo sapiens
gttaagcaagtcaaa

SEQ ID NO: 33262 - DNA, 15 bp, Homo sapiens
agttaagcaagtcaa

SEQ ID NO: 33263 - DNA, 15 bp, Homo sapiens
tagttaagcaagtca

SEQ ID NO: 33264 - DNA, 15 bp, Homo sapiens
gtagttaagcaagtc

SEQ ID NO: 33265 - DNA, 15 bp, Homo sapiens
ggtagttaagcaagt

SEQ ID NO: 33266 - DNA, 15 bp, Homo sapiens
tggtagttaagcaag

SEQ ID NO: 33267 - DNA, 15 bp, Homo sapiens
atggtagttaagcaa

SEQ ID NO: 33268 - DNA, 15 bp, Homo sapiens
catggtagttaagca

SEQ ID NO: 33269 - DNA, 15 bp, Homo sapiens
tcatggtagttaagc

SEQ ID NO: 33270 - DNA, 15 bp, Homo sapiens
ttcatggtagttaag

SEQ ID NO: 33271 - DNA, 15 bp, Homo sapiens
attcatggtagttaa

SEQ ID NO: 33272 - DNA, 15 bp, Homo sapiens
cattcatggtagtta

SEQ ID NO: 33273 - DNA, 15 bp, Homo sapiens
tcattcatggtagtt

SEQ ID NO: 33274 - DNA, 15 bp, Homo sapiens
ctcattcatggtagt

SEQ ID NO: 33275 - DNA, 15 bp, Homo sapiens
tctcattcatggtag

SEQ ID NO: 33276 - DNA, 15 bp, Homo sapiens
ttctcattcatggta

SEQ ID NO: 33277 - DNA, 15 bp, Homo sapiens
tttctcattcatggt

SEQ ID NO: 33278 - DNA, 15 bp, Homo sapiens
gtttctcattcatgg

SEQ ID NO: 33279 - DNA, 15 bp, Homo sapiens
agtttctcattcatg

SEQ ID NO: 33280 - DNA, 15 bp, Homo sapiens
gagtttctcattcat

SEQ ID NO: 33281 - DNA, 15 bp, Homo sapiens
agagtttctcattca

SEQ ID NO: 33282 - DNA, 15 bp, Homo sapiens
gagagtttctcattc

SEQ ID NO: 33283 - DNA, 15 bp, Homo sapiens
tgagagtttctcatt

SEQ ID NO: 33284 - DNA, 15 bp, Homo sapiens
atgagagtttctcat

SEQ ID NO: 33285 - DNA, 15 bp, Homo sapiens
catgagagtttctca

SEQ ID NO: 33286 - DNA, 15 bp, Homo sapiens
tcatgagagtttctc

SEQ ID NO: 33287 - DNA, 15 bp, Homo sapiens
ctcatgagagtttct

SEQ ID NO: 33288 - DNA, 15 bp, Homo sapiens
actcatgagagtttc

SEQ ID NO: 33289 - DNA, 15 bp, Homo sapiens
cactcatgagagttt

SEQ ID NO: 33290 - DNA, 15 bp, Homo sapiens
tcactcatgagagtt

SEQ ID NO: 33291 - DNA, 15 bp, Homo sapiens
atcactcatgagagt

SEQ ID NO: 33292 - DNA, 15 bp, Homo sapiens
tatcactcatgagag

SEQ ID NO: 33293 - DNA, 15 bp, Homo sapiens
ttatcactcatgaga

SEQ ID NO: 33294 - DNA, 15 bp, Homo sapiens
gttatcactcatgag

SEQ ID NO: 33295 - DNA, 15 bp, Homo sapiens
tgttatcactcatga

SEQ ID NO: 33296 - DNA, 15 bp, Homo sapiens
ctgttatcactcatg

SEQ ID NO: 33297 - DNA, 15 bp, Homo sapiens
cctgttatcactcat

SEQ ID NO: 33298 - DNA, 15 bp, Homo sapiens
tcctgttatcactca

SEQ ID NO: 33299 - DNA, 15 bp, Homo sapiens
ttcctgttatcactc

SEQ ID NO: 33300 - DNA, 15 bp, Homo sapiens
tttcctgttatcact

SEQ ID NO: 33301 - DNA, 15 bp, Homo sapiens
ttttcctgttatcac

SEQ ID NO: 33302 - DNA, 15 bp, Homo sapiens
tttttcctgttatca

SEQ ID NO: 33303 - DNA, 15 bp, Homo sapiens
ttttttcctgttatc

SEQ ID NO: 33304 - DNA, 15 bp, Homo sapiens
tttttttcctgttat

SEQ ID NO: 33305 - DNA, 15 bp, Homo sapiens
ttttttttcctgtta

SEQ ID NO: 33306 - DNA, 15 bp, Homo sapiens
tttttttttcctgtt

SEQ ID NO: 33307 - DNA, 15 bp, Homo sapiens
atttttttttcctgt

SEQ ID NO: 33308 - DNA, 15 bp, Homo sapiens
aatttttttttcctg

SEQ ID NO: 33309 - DNA, 15 bp, Homo sapiens
taatttttttttcct

SEQ ID NO: 33310 - DNA, 15 bp, Homo sapiens
ttaatttttttttcc

SEQ ID NO: 33311 - DNA, 15 bp, Homo sapiens
tttaatttttttttc

SEQ ID NO: 33312 - DNA, 15 bp, Homo sapiens
ttttaattttttttt

SEQ ID NO: 33313 - DNA, 15 bp, Homo sapiens
gttttaatttttttt

SEQ ID NO: 33314 - DNA, 15 bp, Homo sapiens
ggttttaattttttt

SEQ ID NO: 33315 - DNA, 15 bp, Homo sapiens
cggttttaatttttt

SEQ ID NO: 33316 - DNA, 15 bp, Homo sapiens
acggttttaattttt

SEQ ID NO: 33317 - DNA, 15 bp, Homo sapiens
gacggttttaatttt

SEQ ID NO: 33318 - DNA, 15 bp, Homo sapiens
agacggttttaattt

SEQ ID NO: 33319 - DNA, 15 bp, Homo sapiens
aagacggttttaatt

SEQ ID NO: 33320 - DNA, 15 bp, Homo sapiens
caagacggttttaat

SEQ ID NO: 33321 - DNA, 15 bp, Homo sapiens
acaagacggttttaa

SEQ ID NO: 33322 - DNA, 15 bp, Homo sapiens
aacaagacggtttta

SEQ ID NO: 33323 - DNA, 15 bp, Homo sapiens
aaacaagacggtttt

SEQ ID NO: 33324 - DNA, 15 bp, Homo sapiens
caaacaagacggttt

SEQ ID NO: 33325 - DNA, 15 bp, Homo sapiens
acaaacaagacggtt

SEQ ID NO: 33326 - DNA, 15 bp, Homo sapiens
aacaaacaagacggt

SEQ ID NO: 33327 - DNA, 15 bp, Homo sapiens
aaacaaacaagacgg

SEQ ID NO: 33328 - DNA, 15 bp, Homo sapiens
caaacaaacaagacg

SEQ ID NO: 33329 - DNA, 15 bp, Homo sapiens
acaaacaaacaagac

SEQ ID NO: 33330 - DNA, 15 bp, Homo sapiens
aacaaacaaacaaga

SEQ ID NO: 33331 - DNA, 15 bp, Homo sapiens
aaacaaacaaacaag

SEQ ID NO: 33332 - DNA, 15 bp, Homo sapiens
taaacaaacaaacaa

SEQ ID NO: 33333 - DNA, 15 bp, Homo sapiens
gtaaacaaacaaaca

SEQ ID NO: 33334 - DNA, 15 bp, Homo sapiens
tgtaaacaaacaaac

SEQ ID NO: 33335 - DNA, 15 bp, Homo sapiens
atgtaaacaaacaaa

SEQ ID NO: 33336 - DNA, 15 bp, Homo sapiens
catgtaaacaaacaa

SEQ ID NO: 33337 - DNA, 15 bp, Homo sapiens
ccatgtaaacaaaca

SEQ ID NO: 33338 - DNA, 15 bp, Homo sapiens
accatgtaaacaaac

SEQ ID NO: 33339 - DNA, 15 bp, Homo sapiens
aaccatgtaaacaaa

SEQ ID NO: 33340 - DNA, 15 bp, Homo sapiens
aaaccatgtaaacaa

SEQ ID NO: 33341 - DNA, 15 bp, Homo sapiens
aaaaccatgtaaaca

SEQ ID NO: 33342 - DNA, 15 bp, Homo sapiens
aaaaaccatgtaaac

SEQ ID NO: 33343 - DNA, 15 bp, Homo sapiens
taaaaaccatgtaaa

SEQ ID NO: 33344 - DNA, 15 bp, Homo sapiens
ctaaaaaccatgtaa

SEQ ID NO: 33345 - DNA, 15 bp, Homo sapiens
cctaaaaaccatgta

SEQ ID NO: 33346 - DNA, 15 bp, Homo sapiens
ccctaaaaaccatgt

SEQ ID NO: 33347 - DNA, 15 bp, Homo sapiens
gccctaaaaaccatg

SEQ ID NO: 33348 - DNA, 15 bp, Homo sapiens
ggccctaaaaaccat

SEQ ID NO: 33349 - DNA, 15 bp, Homo sapiens
gggccctaaaaacca

SEQ ID NO: 33350 - DNA, 15 bp, Homo sapiens
agggccctaaaaacc

SEQ ID NO: 33351 - DNA, 15 bp, Homo sapiens
tagggccctaaaaac

SEQ ID NO: 33352 - DNA, 15 bp, Homo sapiens
atagggccctaaaaa

SEQ ID NO: 33353 - DNA, 15 bp, Homo sapiens
gatagggccctaaaa

SEQ ID NO: 33354 - DNA, 15 bp, Homo sapiens
tgatagggccctaaa

SEQ ID NO: 33355 - DNA, 15 bp, Homo sapiens
gtgatagggccctaa

SEQ ID NO: 33356 - DNA, 15 bp, Homo sapiens
agtgatagggcccta

SEQ ID NO: 33357 - DNA, 15 bp, Homo sapiens
tagtgatagggccct

SEQ ID NO: 33358 - DNA, 15 bp, Homo sapiens
ctagtgatagggccc

SEQ ID NO: 33359 - DNA, 15 bp, Homo sapiens
tctagtgatagggcc

SEQ ID NO: 33360 - DNA, 15 bp, Homo sapiens
ctctagtgatagggc

SEQ ID NO: 33361 - DNA, 15 bp, Homo sapiens
tctctagtgataggg

SEQ ID NO: 33362 - DNA, 15 bp, Homo sapiens
ctctctagtgatagg

SEQ ID NO: 33363 - DNA, 15 bp, Homo sapiens
cctctctagtgatag

SEQ ID NO: 33364 - DNA, 15 bp, Homo sapiens
gcctctctagtgata

SEQ ID NO: 33365 - DNA, 15 bp, Homo sapiens
ggcctctctagtgat

SEQ ID NO: 33366 - DNA, 15 bp, Homo sapiens
aggcctctctagtga

SEQ ID NO: 33367 - DNA, 15 bp, Homo sapiens
gaggcctctctagtg

SEQ ID NO: 33368 - DNA, 15 bp, Homo sapiens
agaggcctctctagt

SEQ ID NO: 33369 - DNA, 15 bp, Homo sapiens
tagaggcctctctag

SEQ ID NO: 33370 - DNA, 15 bp, Homo sapiens
ttagaggcctctcta

SEQ ID NO: 33371 - DNA, 15 bp, Homo sapiens
tttagaggcctctct

SEQ ID NO: 33372 - DNA, 15 bp, Homo sapiens
ctttagaggcctctc

SEQ ID NO: 33373 - DNA, 15 bp, Homo sapiens
tctttagaggcctct

SEQ ID NO: 33374 - DNA, 15 bp, Homo sapiens
ttctttagaggcctc

SEQ ID NO: 33375 - DNA, 15 bp, Homo sapiens
tttctttagaggcct

SEQ ID NO: 33376 - DNA, 15 bp, Homo sapiens
atttctttagaggcc

SEQ ID NO: 33377 - DNA, 15 bp, Homo sapiens
tatttctttagaggc

SEQ ID NO: 33378 - DNA, 15 bp, Homo sapiens
gtatttctttagagg

SEQ ID NO: 33379 - DNA, 15 bp, Homo sapiens
ggtatttctttagag

SEQ ID NO: 33380 - DNA, 15 bp, Homo sapiens
aggtatttctttaga

SEQ ID NO: 33381 - DNA, 15 bp, Homo sapiens
caggtatttctttag

SEQ ID NO: 33382 - DNA, 15 bp, Homo sapiens
tcaggtatttcttta

SEQ ID NO: 33383 - DNA, 15 bp, Homo sapiens
atcaggtatttcttt

SEQ ID NO: 33384 - DNA, 15 bp, Homo sapiens
aatcaggtatttctt

SEQ ID NO: 33385 - DNA, 15 bp, Homo sapiens
aaatcaggtatttct

SEQ ID NO: 33386 - DNA, 15 bp, Homo sapiens
gaaatcaggtatttc

SEQ ID NO: 33387 - DNA, 15 bp, Homo sapiens
ggaaatcaggtattt

SEQ ID NO: 33388 - DNA, 15 bp, Homo sapiens
aggaaatcaggtatt

SEQ ID NO: 33389 - DNA, 15 bp, Homo sapiens
aaggaaatcaggtat

SEQ ID NO: 33390 - DNA, 15 bp, Homo sapiens
taaggaaatcaggta

SEQ ID NO: 33391 - DNA, 15 bp, Homo sapiens
ttaaggaaatcaggt

SEQ ID NO: 33392 - DNA, 15 bp, Homo sapiens
tttaaggaaatcagg

SEQ ID NO: 33393 - DNA, 15 bp, Homo sapiens
gtttaaggaaatcag

SEQ ID NO: 33394 - DNA, 15 bp, Homo sapiens
tgtttaaggaaatca

SEQ ID NO: 33395 - DNA, 15 bp, Homo sapiens
atgtttaaggaaatc

SEQ ID NO: 33396 - DNA, 15 bp, Homo sapiens
gatgtttaaggaaat

SEQ ID NO: 33397 - DNA, 15 bp, Homo sapiens
agatgtttaaggaaa

SEQ ID NO: 33398 - DNA, 15 bp, Homo sapiens
tagatgtttaaggaa

SEQ ID NO: 33399 - DNA, 15 bp, Homo sapiens
ctagatgtttaagga

SEQ ID NO: 33400 - DNA, 15 bp, Homo sapiens
tctagatgtttaagg

SEQ ID NO: 33401 - DNA, 15 bp, Homo sapiens
ttctagatgtttaag

SEQ ID NO: 33402 - DNA, 15 bp, Homo sapiens
tttctagatgtttaa

SEQ ID NO: 33403 - DNA, 15 bp, Homo sapiens
gtttctagatgttta

SEQ ID NO: 33404 - DNA, 15 bp, Homo sapiens
agtttctagatgttt

SEQ ID NO: 33405 - DNA, 15 bp, Homo sapiens
cagtttctagatgtt

SEQ ID NO: 33406 - DNA, 15 bp, Homo sapiens
tcagtttctagatgt

SEQ ID NO: 33407 - DNA, 15 bp, Homo sapiens
ttcagtttctagatg

SEQ ID NO: 33408 - DNA, 15 bp, Homo sapiens
cttcagtttctagat

SEQ ID NO: 33409 - DNA, 15 bp, Homo sapiens
tcttcagtttctaga

SEQ ID NO: 33410 - DNA, 15 bp, Homo sapiens
gtcttcagtttctag

SEQ ID NO: 33411 - DNA, 15 bp, Homo sapiens
tgtcttcagtttcta

SEQ ID NO: 33412 - DNA, 15 bp, Homo sapiens
ttgtcttcagtttct

SEQ ID NO: 33413 - DNA, 15 bp, Homo sapiens
gttgtcttcagtttc

SEQ ID NO: 33414 - DNA, 15 bp, Homo sapiens
tgttgtcttcagttt

SEQ ID NO: 33415 - DNA, 15 bp, Homo sapiens
atgttgtcttcagtt

SEQ ID NO: 33416 - DNA, 15 bp, Homo sapiens
aatgttgtcttcagt

SEQ ID NO: 33417 - DNA, 15 bp, Homo sapiens
taatgttgtcttcag

SEQ ID NO: 33418 - DNA, 15 bp, Homo sapiens
ttaatgttgtcttca

SEQ ID NO: 33419 - DNA, 15 bp, Homo sapiens
cttaatgttgtcttc

SEQ ID NO: 33420 - DNA, 15 bp, Homo sapiens
ccttaatgttgtctt

SEQ ID NO: 33421 - DNA, 15 bp, Homo sapiens
accttaatgttgtct

SEQ ID NO: 33422 - DNA, 15 bp, Homo sapiens
taccttaatgttgtc

SEQ ID NO: 33423 - DNA, 15 bp, Homo sapiens
gtaccttaatgttgt

SEQ ID NO: 33424 - DNA, 15 bp, Homo sapiens
agtaccttaatgttg

SEQ ID NO: 33425 - DNA, 15 bp, Homo sapiens
aagtaccttaatgtt

SEQ ID NO: 33426 - DNA, 15 bp, Homo sapiens
caagtaccttaatgt

SEQ ID NO: 33427 - DNA, 15 bp, Homo sapiens
tcaagtaccttaatg

SEQ ID NO: 33428 - DNA, 15 bp, Homo sapiens
gtcaagtaccttaat

SEQ ID NO: 33429 - DNA, 15 bp, Homo sapiens
ggtcaagtaccttaa

SEQ ID NO: 33430 - DNA, 15 bp, Homo sapiens
aggtcaagtacctta

SEQ ID NO: 33431 - DNA, 15 bp, Homo sapiens
taggtcaagtacctt

SEQ ID NO: 33432 - DNA, 15 bp, Homo sapiens
ataggtcaagtacct

SEQ ID NO: 33433 - DNA, 15 bp, Homo sapiens
cataggtcaagtacc

SEQ ID NO: 33434 - DNA, 15 bp, Homo sapiens
acataggtcaagtac

SEQ ID NO: 33435 - DNA, 15 bp, Homo sapiens
tacataggtcaagta

SEQ ID NO: 33436 - DNA, 15 bp, Homo sapiens
atacataggtcaagt

SEQ ID NO: 33437 - DNA, 15 bp, Homo sapiens
tatacataggtcaag

SEQ ID NO: 33438 - DNA, 15 bp, Homo sapiens
ttatacataggtcaa

SEQ ID NO: 33439 - DNA, 15 bp, Homo sapiens
attatacataggtca

SEQ ID NO: 33440 - DNA, 15 bp, Homo sapiens
gattatacataggtc

SEQ ID NO: 33441 - DNA, 15 bp, Homo sapiens
agattatacataggt

SEQ ID NO: 33442 - DNA, 15 bp, Homo sapiens
cagattatacatagg

SEQ ID NO: 33443 - DNA, 15 bp, Homo sapiens
gcagattatacatag

SEQ ID NO: 33444 - DNA, 15 bp, Homo sapiens
agcagattatacata

SEQ ID NO: 33445 - DNA, 15 bp, Homo sapiens
gagcagattatacat

SEQ ID NO: 33446 - DNA, 15 bp, Homo sapiens
agagcagattataca

SEQ ID NO: 33447 - DNA, 15 bp, Homo sapiens
cagagcagattatac

SEQ ID NO: 33448 - DNA, 15 bp, Homo sapiens
ccagagcagattata

SEQ ID NO: 33449 - DNA, 15 bp, Homo sapiens
tccagagcagattat

SEQ ID NO: 33450 - DNA, 15 bp, Homo sapiens
ctccagagcagatta

SEQ ID NO: 33451 - DNA, 15 bp, Homo sapiens
gctccagagcagatt

SEQ ID NO: 33452 - DNA, 15 bp, Homo sapiens
agctccagagcagat

SEQ ID NO: 33453 - DNA, 15 bp, Homo sapiens
tagctccagagcaga

SEQ ID NO: 33454 - DNA, 15 bp, Homo sapiens
ttagctccagagcag

SEQ ID NO: 33455 - DNA, 15 bp, Homo sapiens
tttagctccagagca

SEQ ID NO: 33456 - DNA, 15 bp, Homo sapiens
ttttagctccagagc

SEQ ID NO: 33457 - DNA, 15 bp, Homo sapiens
tttttagctccagag

SEQ ID NO: 33458 - DNA, 15 bp, Homo sapiens
atttttagctccaga

SEQ ID NO: 33459 - DNA, 15 bp, Homo sapiens
aatttttagctccag

SEQ ID NO: 33460 - DNA, 15 bp, Homo sapiens
aaatttttagctcca

SEQ ID NO: 33461 - DNA, 15 bp, Homo sapiens
taaatttttagctcc

SEQ ID NO: 33462 - DNA, 15 bp, Homo sapiens
gtaaatttttagctc

SEQ ID NO: 33463 - DNA, 15 bp, Homo sapiens
ggtaaatttttagct

SEQ ID NO: 33464 - DNA, 15 bp, Homo sapiens
aggtaaatttttagc

SEQ ID NO: 33465 - DNA, 15 bp, Homo sapiens
caggtaaatttttag

SEQ ID NO: 33466 - DNA, 15 bp, Homo sapiens
tcaggtaaattttta

SEQ ID NO: 33467 - DNA, 15 bp, Homo sapiens
ctcaggtaaattttt

SEQ ID NO: 33468 - DNA, 15 bp, Homo sapiens
gctcaggtaaatttt

SEQ ID NO: 33469 - DNA, 15 bp, Homo sapiens
agctcaggtaaattt

SEQ ID NO: 33470 - DNA, 15 bp, Homo sapiens
cagctcaggtaaatt

SEQ ID NO: 33471 - DNA, 15 bp, Homo sapiens
ccagctcaggtaaat

SEQ ID NO: 33472 - DNA, 15 bp, Homo sapiens
accagctcaggtaaa

SEQ ID NO: 33473 - DNA, 15 bp, Homo sapiens
aaccagctcaggtaa

SEQ ID NO: 33474 - DNA, 15 bp, Homo sapiens
taaccagctcaggta

SEQ ID NO: 33475 - DNA, 15 bp, Homo sapiens
ataaccagctcaggt

SEQ ID NO: 33476 - DNA, 15 bp, Homo sapiens
aataaccagctcagg

SEQ ID NO: 33477 - DNA, 15 bp, Homo sapiens
aaataaccagctcag

SEQ ID NO: 33478 - DNA, 15 bp, Homo sapiens
aaaataaccagctca

SEQ ID NO: 33479 - DNA, 15 bp, Homo sapiens
taaaataaccagctc

SEQ ID NO: 33480 - DNA, 15 bp, Homo sapiens
ataaaataaccagct

SEQ ID NO: 33481 - DNA, 15 bp, Homo sapiens
aataaaataaccagc

SEQ ID NO: 33482 - DNA, 15 bp, Homo sapiens
aaataaaataaccag

SEQ ID NO: 33483 - DNA, 15 bp, Homo sapiens
aaaataaaataacca

SEQ ID NO: 33484 - DNA, 15 bp, Homo sapiens
aaaaataaaataacc

SEQ ID NO: 33485 - DNA, 15 bp, Homo sapiens
taaaaataaaataac

SEQ ID NO: 33486 - DNA, 15 bp, Homo sapiens
gtaaaaataaaataa

SEQ ID NO: 33487 - DNA, 15 bp, Homo sapiens
agtaaaaataaaata

SEQ ID NO: 33488 - DNA, 15 bp, Homo sapiens
aagtaaaaataaaat

SEQ ID NO: 33489 - DNA, 15 bp, Homo sapiens
aaagtaaaaataaaa

SEQ ID NO: 33490 - DNA, 15 bp, Homo sapiens
gaaagtaaaaataaa

SEQ ID NO: 33491 - DNA, 15 bp, Homo sapiens
ggaaagtaaaaataa

SEQ ID NO: 33492 - DNA, 15 bp, Homo sapiens
aggaaagtaaaaata

SEQ ID NO: 33493 - DNA, 15 bp, Homo sapiens
taggaaagtaaaaat

SEQ ID NO: 33494 - DNA, 15 bp, Homo sapiens
gtaggaaagtaaaaa

SEQ ID NO: 33495 - DNA, 15 bp, Homo sapiens
ggtaggaaagtaaaa

SEQ ID NO: 33496 - DNA, 15 bp, Homo sapiens
aggtaggaaagtaaa

SEQ ID NO: 33497 - DNA, 15 bp, Homo sapiens
aaggtaggaaagtaa

SEQ ID NO: 33498 - DNA, 15 bp, Homo sapiens
gaaggtaggaaagta

SEQ ID NO: 33499 - DNA, 15 bp, Homo sapiens
tgaaggtaggaaagt

SEQ ID NO: 33500 - DNA, 15 bp, Homo sapiens
atgaaggtaggaaag

SEQ ID NO: 33501 - DNA, 15 bp, Homo sapiens
aatgaaggtaggaaa

SEQ ID NO: 33502 - DNA, 15 bp, Homo sapiens
taatgaaggtaggaa

SEQ ID NO: 33503 - DNA, 15 bp, Homo sapiens
ttaatgaaggtagga

SEQ ID NO: 33504 - DNA, 15 bp, Homo sapiens
tttaatgaaggtagg

SEQ ID NO: 33505 - DNA, 15 bp, Homo sapiens
atttaatgaaggtag

SEQ ID NO: 33506 - DNA, 15 bp, Homo sapiens
aatttaatgaaggta

SEQ ID NO: 33507 - DNA, 15 bp, Homo sapiens
gaatttaatgaaggt

SEQ ID NO: 33508 - DNA, 15 bp, Homo sapiens
ggaatttaatgaagg

SEQ ID NO: 33509 - DNA, 15 bp, Homo sapiens
tggaatttaatgaag

SEQ ID NO: 33510 - DNA, 15 bp, Homo sapiens
atggaatttaatgaa

SEQ ID NO: 33511 - DNA, 15 bp, Homo sapiens
gatggaatttaatga

SEQ ID NO: 33512 - DNA, 15 bp, Homo sapiens
ggatggaatttaatg

SEQ ID NO: 33513 - DNA, 15 bp, Homo sapiens
gggatggaatttaat

SEQ ID NO: 33514 - DNA, 15 bp, Homo sapiens
agggatggaatttaa

SEQ ID NO: 33515 - DNA, 15 bp, Homo sapiens
gagggatggaattta

SEQ ID NO: 33516 - DNA, 15 bp, Homo sapiens
ggagggatggaattt

SEQ ID NO: 33517 - DNA, 15 bp, Homo sapiens
aggagggatggaatt

SEQ ID NO: 33518 - DNA, 15 bp, Homo sapiens
gaggagggatggaat

SEQ ID NO: 33519 - DNA, 15 bp, Homo sapiens
ggaggagggatggaa

SEQ ID NO: 33520 - DNA, 15 bp, Homo sapiens
aggaggagggatgga

SEQ ID NO: 33521 - DNA, 15 bp, Homo sapiens
caggaggagggatgg

SEQ ID NO: 33522 - DNA, 15 bp, Homo sapiens
gcaggaggagggatg

SEQ ID NO: 33523 - DNA, 15 bp, Homo sapiens
agcaggaggagggat

SEQ ID NO: 33524 - DNA, 15 bp, Homo sapiens
cagcaggaggaggga

SEQ ID NO: 33525 - DNA, 15 bp, Homo sapiens
tcagcaggaggaggg

SEQ ID NO: 33526 - DNA, 15 bp, Homo sapiens
ttcagcaggaggagg

SEQ ID NO: 33527 - DNA, 15 bp, Homo sapiens
tttcagcaggaggag

SEQ ID NO: 33528 - DNA, 15 bp, Homo sapiens
atttcagcaggagga

SEQ ID NO: 33529 - DNA, 15 bp, Homo sapiens
gatttcagcaggagg

SEQ ID NO: 33530 - DNA, 15 bp, Homo sapiens
agatttcagcaggag

SEQ ID NO: 33531 - DNA, 15 bp, Homo sapiens
tagatttcagcagga

SEQ ID NO: 33532 - DNA, 15 bp, Homo sapiens
ctagatttcagcagg

SEQ ID NO: 33533 - DNA, 15 bp, Homo sapiens
gctagatttcagcag

SEQ ID NO: 33534 - DNA, 15 bp, Homo sapiens
tgctagatttcagca

SEQ ID NO: 33535 - DNA, 15 bp, Homo sapiens
ttgctagatttcagc

SEQ ID NO: 33536 - DNA, 15 bp, Homo sapiens
cttgctagatttcag

SEQ ID NO: 33537 - DNA, 15 bp, Homo sapiens
ccttgctagatttca

SEQ ID NO: 33538 - DNA, 15 bp, Homo sapiens
tccttgctagatttc

SEQ ID NO: 33539 - DNA, 15 bp, Homo sapiens
ttccttgctagattt

SEQ ID NO: 33540 - DNA, 15 bp, Homo sapiens
attccttgctagatt

SEQ ID NO: 33541 - DNA, 15 bp, Homo sapiens
cattccttgctagat

SEQ ID NO: 33542 - DNA, 15 bp, Homo sapiens
acattccttgctaga

SEQ ID NO: 33543 - DNA, 15 bp, Homo sapiens
gacattccttgctag

SEQ ID NO: 33544 - DNA, 15 bp, Homo sapiens
agacattccttgcta

SEQ ID NO: 33545 - DNA, 15 bp, Homo sapiens
aagacattccttgct

SEQ ID NO: 33546 - DNA, 15 bp, Homo sapiens
gaagacattccttgc

SEQ ID NO: 33547 - DNA, 15 bp, Homo sapiens
ggaagacattccttg

SEQ ID NO: 33548 - DNA, 15 bp, Homo sapiens
tggaagacattcctt

SEQ ID NO: 33549 - DNA, 15 bp, Homo sapiens
ctggaagacattcct

SEQ ID NO: 33550 - DNA, 15 bp, Homo sapiens
gctggaagacattcc

SEQ ID NO: 33551 - DNA, 15 bp, Homo sapiens
agctggaagacattc

SEQ ID NO: 33552 - DNA, 15 bp, Homo sapiens
tagctggaagacatt

SEQ ID NO: 33553 - DNA, 15 bp, Homo sapiens
gtagctggaagacat

SEQ ID NO: 33554 - DNA, 15 bp, Homo sapiens
ggtagctggaagaca

SEQ ID NO: 33555 - DNA, 15 bp, Homo sapiens
tggtagctggaagac

SEQ ID NO: 33556 - DNA, 15 bp, Homo sapiens
ttggtagctggaaga

SEQ ID NO: 33557 - DNA, 15 bp, Homo sapiens
tttggtagctggaag

SEQ ID NO: 33558 - DNA, 15 bp, Homo sapiens
gtttggtagctggaa

SEQ ID NO: 33559 - DNA, 15 bp, Homo sapiens
ggtttggtagctgga

SEQ ID NO: 33560 - DNA, 15 bp, Homo sapiens
gggtttggtagctgg

SEQ ID NO: 33561 - DNA, 15 bp, Homo sapiens
agggtttggtagctg

SEQ ID NO: 33562 - DNA, 15 bp, Homo sapiens
aagggtttggtagct

SEQ ID NO: 33563 - DNA, 15 bp, Homo sapiens
gaagggtttggtagc

SEQ ID NO: 33564 - DNA, 15 bp, Homo sapiens
ggaagggtttggtag

SEQ ID NO: 33565 - DNA, 15 bp, Homo sapiens
aggaagggtttggta

SEQ ID NO: 33566 - DNA, 15 bp, Homo sapiens
caggaagggtttggt

SEQ ID NO: 33567 - DNA, 15 bp, Homo sapiens
gcaggaagggtttgg

SEQ ID NO: 33568 - DNA, 15 bp, Homo sapiens
agcaggaagggtttg

SEQ ID NO: 33569 - DNA, 15 bp, Homo sapiens
aagcaggaagggttt

SEQ ID NO: 33570 - DNA, 15 bp, Homo sapiens
gaagcaggaagggtt

SEQ ID NO: 33571 - DNA, 15 bp, Homo sapiens
agaagcaggaagggt

SEQ ID NO: 33572 - DNA, 15 bp, Homo sapiens
gagaagcaggaaggg

SEQ ID NO: 33573 - DNA, 15 bp, Homo sapiens
tgagaagcaggaagg

SEQ ID NO: 33574 - DNA, 15 bp, Homo sapiens
ttgagaagcaggaag

SEQ ID NO: 33575 - DNA, 15 bp, Homo sapiens
tttgagaagcaggaa

SEQ ID NO: 33576 - DNA, 15 bp, Homo sapiens
atttgagaagcagga

SEQ ID NO: 33577 - DNA, 15 bp, Homo sapiens
aatttgagaagcagg

SEQ ID NO: 33578 - DNA, 15 bp, Homo sapiens
aaatttgagaagcag

SEQ ID NO: 33579 - DNA, 15 bp, Homo sapiens
gaaatttgagaagca

SEQ ID NO: 33580 - DNA, 15 bp, Homo sapiens
ggaaatttgagaagc

SEQ ID NO: 33581 - DNA, 15 bp, Homo sapiens
aggaaatttgagaag

SEQ ID NO: 33582 - DNA, 15 bp, Homo sapiens
aaggaaatttgagaa

SEQ ID NO: 33583 - DNA, 15 bp, Homo sapiens
aaaggaaatttgaga

SEQ ID NO: 33584 - DNA, 15 bp, Homo sapiens
gaaaggaaatttgag

SEQ ID NO: 33585 - DNA, 15 bp, Homo sapiens
ggaaaggaaatttga

SEQ ID NO: 33586 - DNA, 15 bp, Homo sapiens
aggaaaggaaatttg

SEQ ID NO: 33587 - DNA, 15 bp, Homo sapiens
aaggaaaggaaattt

SEQ ID NO: 33588 - DNA, 15 bp, Homo sapiens
gaaggaaaggaaatt

SEQ ID NO: 33589 - DNA, 15 bp, Homo sapiens
tgaaggaaaggaaat

SEQ ID NO: 33590 - DNA, 15 bp, Homo sapiens
gtgaaggaaaggaaa

SEQ ID NO: 33591 - DNA, 15 bp, Homo sapiens
agtgaaggaaaggaa

SEQ ID NO: 33592 - DNA, 15 bp, Homo sapiens
cagtgaaggaaagga

SEQ ID NO: 33593 - DNA, 15 bp, Homo sapiens
tcagtgaaggaaagg

SEQ ID NO: 33594 - DNA, 15 bp, Homo sapiens
atcagtgaaggaaag

SEQ ID NO: 33595 - DNA, 15 bp, Homo sapiens
aatcagtgaaggaaa

SEQ ID NO: 33596 - DNA, 15 bp, Homo sapiens
aaatcagtgaaggaa

SEQ ID NO: 33597 - DNA, 15 bp, Homo sapiens
gaaatcagtgaagga

SEQ ID NO: 33598 - DNA, 15 bp, Homo sapiens
agaaatcagtgaagg

SEQ ID NO: 33599 - DNA, 15 bp, Homo sapiens
cagaaatcagtgaag

SEQ ID NO: 33600 - DNA, 15 bp, Homo sapiens
gcagaaatcagtgaa

SEQ ID NO: 33601 - DNA, 15 bp, Homo sapiens
agcagaaatcagtga

SEQ ID NO: 33602 - DNA, 15 bp, Homo sapiens
aagcagaaatcagtg

SEQ ID NO: 33603 - DNA, 15 bp, Homo sapiens
aaagcagaaatcagt

SEQ ID NO: 33604 - DNA, 15 bp, Homo sapiens
taaagcagaaatcag

SEQ ID NO: 33605 - DNA, 15 bp, Homo sapiens
ttaaagcagaaatca

SEQ ID NO: 33606 - DNA, 15 bp, Homo sapiens
gttaaagcagaaatc

SEQ ID NO: 33607 - DNA, 15 bp, Homo sapiens
agttaaagcagaaat

SEQ ID NO: 33608 - DNA, 15 bp, Homo sapiens
tagttaaagcagaaa

SEQ ID NO: 33609 - DNA, 15 bp, Homo sapiens
ctagttaaagcagaa

SEQ ID NO: 33610 - DNA, 15 bp, Homo sapiens
gctagttaaagcaga

SEQ ID NO: 33611 - DNA, 15 bp, Homo sapiens
agctagttaaagcag

SEQ ID NO: 33612 - DNA, 15 bp, Homo sapiens
cagctagttaaagca

SEQ ID NO: 33613 - DNA, 15 bp, Homo sapiens
acagctagttaaagc

SEQ ID NO: 33614 - DNA, 15 bp, Homo sapiens
aacagctagttaaag

SEQ ID NO: 33615 - DNA, 15 bp, Homo sapiens
taacagctagttaaa

SEQ ID NO: 33616 - DNA, 15 bp, Homo sapiens
ctaacagctagttaa

SEQ ID NO: 33617 - DNA, 15 bp, Homo sapiens
actaacagctagtta

SEQ ID NO: 33618 - DNA, 15 bp, Homo sapiens
cactaacagctagtt

SEQ ID NO: 33619 - DNA, 15 bp, Homo sapiens
gcactaacagctagt

SEQ ID NO: 33620 - DNA, 15 bp, Homo sapiens
tgcactaacagctag

SEQ ID NO: 33621 - DNA, 15 bp, Homo sapiens
ctgcactaacagcta

SEQ ID NO: 33622 - DNA, 15 bp, Homo sapiens
gctgcactaacagct

SEQ ID NO: 33623 - DNA, 15 bp, Homo sapiens
cgctgcactaacagc

SEQ ID NO: 33624 - DNA, 15 bp, Homo sapiens
acgctgcactaacag

SEQ ID NO: 33625 - DNA, 15 bp, Homo sapiens
gacgctgcactaaca

SEQ ID NO: 33626 - DNA, 15 bp, Homo sapiens
agacgctgcactaac

SEQ ID NO: 33627 - DNA, 15 bp, Homo sapiens
gagacgctgcactaa

SEQ ID NO: 33628 - DNA, 15 bp, Homo sapiens
tgagacgctgcacta

SEQ ID NO: 33629 - DNA, 15 bp, Homo sapiens
ctgagacgctgcact

SEQ ID NO: 33630 - DNA, 15 bp, Homo sapiens
tctgagacgctgcac

SEQ ID NO: 33631 - DNA, 15 bp, Homo sapiens
atctgagacgctgca

SEQ ID NO: 33632 - DNA, 15 bp, Homo sapiens
catctgagacgctgc

SEQ ID NO: 33633 - DNA, 15 bp, Homo sapiens
acatctgagacgctg

SEQ ID NO: 33634 - DNA, 15 bp, Homo sapiens
gacatctgagacgct

SEQ ID NO: 33635 - DNA, 15 bp, Homo sapiens
ggacatctgagacgc

SEQ ID NO: 33636 - DNA, 15 bp, Homo sapiens
aggacatctgagacg

SEQ ID NO: 33637 - DNA, 15 bp, Homo sapiens
gaggacatctgagac

SEQ ID NO: 33638 - DNA, 15 bp, Homo sapiens
agaggacatctgaga

SEQ ID NO: 33639 - DNA, 15 bp, Homo sapiens
gagaggacatctgag

SEQ ID NO: 33640 - DNA, 15 bp, Homo sapiens
ggagaggacatctga

SEQ ID NO: 33641 - DNA, 15 bp, Homo sapiens
tggagaggacatctg

SEQ ID NO: 33642 - DNA, 15 bp, Homo sapiens
gtggagaggacatct

SEQ ID NO: 33643 - DNA, 15 bp, Homo sapiens
ggtggagaggacatc

SEQ ID NO: 33644 - DNA, 15 bp, Homo sapiens
gggtggagaggacat

SEQ ID NO: 33645 - DNA, 15 bp, Homo sapiens
agggtggagaggaca

SEQ ID NO: 33646 - DNA, 15 bp, Homo sapiens
gagggtggagaggac

SEQ ID NO: 33647 - DNA, 15 bp, Homo sapiens
agagggtggagagga

SEQ ID NO: 33648 - DNA, 15 bp, Homo sapiens
tagagggtggagagg

SEQ ID NO: 33649 - DNA, 15 bp, Homo sapiens
ctagagggtggagag

SEQ ID NO: 33650 - DNA, 15 bp, Homo sapiens
cctagagggtggaga

SEQ ID NO: 33651 - DNA, 15 bp, Homo sapiens
acctagagggtggag

SEQ ID NO: 33652 - DNA, 15 bp, Homo sapiens
cacctagagggtgga

SEQ ID NO: 33653 - DNA, 15 bp, Homo sapiens
acacctagagggtgg

SEQ ID NO: 33654 - DNA, 15 bp, Homo sapiens
cacacctagagggtg

SEQ ID NO: 33655 - DNA, 15 bp, Homo sapiens
ccacacctagagggt

SEQ ID NO: 33656 - DNA, 15 bp, Homo sapiens
accacacctagaggg

SEQ ID NO: 33657 - DNA, 15 bp, Homo sapiens
aaccacacctagagg

SEQ ID NO: 33658 - DNA, 15 bp, Homo sapiens
aaaccacacctagag

SEQ ID NO: 33659 - DNA, 15 bp, Homo sapiens
taaaccacacctaga

SEQ ID NO: 33660 - DNA, 15 bp, Homo sapiens
ttaaaccacacctag

SEQ ID NO: 33661 - DNA, 15 bp, Homo sapiens
attaaaccacaccta

SEQ ID NO: 33662 - DNA, 15 bp, Homo sapiens
tattaaaccacacct

SEQ ID NO: 33663 - DNA, 15 bp, Homo sapiens
ttattaaaccacacc

SEQ ID NO: 33664 - DNA, 15 bp, Homo sapiens
gttattaaaccacac

SEQ ID NO: 33665 - DNA, 15 bp, Homo sapiens
tgttattaaaccaca

SEQ ID NO: 33666 - DNA, 15 bp, Homo sapiens
ttgttattaaaccac

SEQ ID NO: 33667 - DNA, 15 bp, Homo sapiens
tttgttattaaacca

SEQ ID NO: 33668 - DNA, 15 bp, Homo sapiens
ctttgttattaaacc

SEQ ID NO: 33669 - DNA, 15 bp, Homo sapiens
cctttgttattaaac

SEQ ID NO: 33670 - DNA, 15 bp, Homo sapiens
gcctttgttattaaa

SEQ ID NO: 33671 - DNA, 15 bp, Homo sapiens
agcctttgttattaa

SEQ ID NO: 33672 - DNA, 15 bp, Homo sapiens
cagcctttgttatta

SEQ ID NO: 33673 - DNA, 15 bp, Homo sapiens
ccagcctttgttatt

SEQ ID NO: 33674 - DNA, 15 bp, Homo sapiens
gccagcctttgttat

SEQ ID NO: 33675 - DNA, 15 bp, Homo sapiens
tgccagcctttgtta

SEQ ID NO: 33676 - DNA, 15 bp, Homo sapiens
atgccagcctttgtt

SEQ ID NO: 33677 - DNA, 15 bp, Homo sapiens
catgccagcctttgt

SEQ ID NO: 33678 - DNA, 15 bp, Homo sapiens
gcatgccagcctttg

SEQ ID NO: 33679 - DNA, 15 bp, Homo sapiens
ggcatgccagccttt

SEQ ID NO: 33680 - DNA, 15 bp, Homo sapiens
gggcatgccagcctt

SEQ ID NO: 33681 - DNA, 15 bp, Homo sapiens
agggcatgccagcct

SEQ ID NO: 33682 - DNA, 15 bp, Homo sapiens
cagggcatgccagcc

SEQ ID NO: 33683 - DNA, 15 bp, Homo sapiens
ccagggcatgccagc

SEQ ID NO: 33684 - DNA, 15 bp, Homo sapiens
accagggcatgccag

SEQ ID NO: 33685 - DNA, 15 bp, Homo sapiens
gaccagggcatgcca

SEQ ID NO: 33686 - DNA, 15 bp, Homo sapiens
tgaccagggcatgcc

SEQ ID NO: 33687 - DNA, 15 bp, Homo sapiens
ctgaccagggcatgc

SEQ ID NO: 33688 - DNA, 15 bp, Homo sapiens
gctgaccagggcatg

SEQ ID NO: 33689 - DNA, 15 bp, Homo sapiens
agctgaccagggcat

SEQ ID NO: 33690 - DNA, 15 bp, Homo sapiens
aagctgaccagggca

SEQ ID NO: 33691 - DNA, 15 bp, Homo sapiens
aaagctgaccagggc

SEQ ID NO: 33692 - DNA, 15 bp, Homo sapiens
gaaagctgaccaggg

SEQ ID NO: 33693 - DNA, 15 bp, Homo sapiens
agaaagctgaccagg

SEQ ID NO: 33694 - DNA, 15 bp, Homo sapiens
gagaaagctgaccag

SEQ ID NO: 33695 - DNA, 15 bp, Homo sapiens
tgagaaagctgacca

SEQ ID NO: 33696 - DNA, 15 bp, Homo sapiens
ttgagaaagctgacc

SEQ ID NO: 33697 - DNA, 15 bp, Homo sapiens
attgagaaagctgac

SEQ ID NO: 33698 - DNA, 15 bp, Homo sapiens
cattgagaaagctga

SEQ ID NO: 33699 - DNA, 15 bp, Homo sapiens
acattgagaaagctg

SEQ ID NO: 33700 - DNA, 15 bp, Homo sapiens
cacattgagaaagct

SEQ ID NO: 33701 - DNA, 15 bp, Homo sapiens
ccacattgagaaagc

SEQ ID NO: 33702 - DNA, 15 bp, Homo sapiens
gccacattgagaaag

SEQ ID NO: 33703 - DNA, 15 bp, Homo sapiens
ggccacattgagaaa

SEQ ID NO: 33704 - DNA, 15 bp, Homo sapiens
gggccacattgagaa

SEQ ID NO: 33705 - DNA, 15 bp, Homo sapiens
tgggccacattgaga

SEQ ID NO: 33706 - DNA, 15 bp, Homo sapiens
gtgggccacattgag

SEQ ID NO: 33707 - DNA, 15 bp, Homo sapiens
tgtgggccacattga

SEQ ID NO: 33708 - DNA, 15 bp, Homo sapiens
ttgtgggccacattg

SEQ ID NO: 33709 - DNA, 15 bp, Homo sapiens
gttgtgggccacatt

SEQ ID NO: 33710 - DNA, 15 bp, Homo sapiens
cgttgtgggccacat

SEQ ID NO: 33711 - DNA, 15 bp, Homo sapiens
gcgttgtgggccaca

SEQ ID NO: 33712 - DNA, 15 bp, Homo sapiens
ggcgttgtgggccac

SEQ ID NO: 33713 - DNA, 15 bp, Homo sapiens
tggcgttgtgggcca

SEQ ID NO: 33714 - DNA, 15 bp, Homo sapiens
atggcgttgtgggcc

SEQ ID NO: 33715 - DNA, 15 bp, Homo sapiens
gatggcgttgtgggc

SEQ ID NO: 33716 - DNA, 15 bp, Homo sapiens
agatggcgttgtggg

SEQ ID NO: 33717 - DNA, 15 bp, Homo sapiens
aagatggcgttgtgg

SEQ ID NO: 33718 - DNA, 15 bp, Homo sapiens
taagatggcgttgtg

SEQ ID NO: 33719 - DNA, 15 bp, Homo sapiens
gtaagatggcgttgt

SEQ ID NO: 33720 - DNA, 15 bp, Homo sapiens
cgtaagatggcgttg

SEQ ID NO: 33721 - DNA, 15 bp, Homo sapiens
ccgtaagatggcgtt

SEQ ID NO: 33722 - DNA, 15 bp, Homo sapiens
cccgtaagatggcgt

SEQ ID NO: 33723 - DNA, 15 bp, Homo sapiens
gcccgtaagatggcg

SEQ ID NO: 33724 - DNA, 15 bp, Homo sapiens
ggcccgtaagatggc

SEQ ID NO: 33725 - DNA, 15 bp, Homo sapiens
tggcccgtaagatgg

SEQ ID NO: 33726 - DNA, 15 bp, Homo sapiens
ctggcccgtaagatg

SEQ ID NO: 33727 - DNA, 15 bp, Homo sapiens
gctggcccgtaagat

SEQ ID NO: 33728 - DNA, 15 bp, Homo sapiens
ggctggcccgtaaga

SEQ ID NO: 33729 - DNA, 15 bp, Homo sapiens
aggctggcccgtaag

SEQ ID NO: 33730 - DNA, 15 bp, Homo sapiens
caggctggcccgtaa

SEQ ID NO: 33731 - DNA, 15 bp, Homo sapiens
gcaggctggcccgta

SEQ ID NO: 33732 - DNA, 15 bp, Homo sapiens
ggcaggctggcccgt

SEQ ID NO: 33733 - DNA, 15 bp, Homo sapiens
aggcaggctggcccg

SEQ ID NO: 33734 - DNA, 15 bp, Homo sapiens
taggcaggctggccc

SEQ ID NO: 33735 - DNA, 15 bp, Homo sapiens
ttaggcaggctggcc

SEQ ID NO: 33736 - DNA, 15 bp, Homo sapiens
cttaggcaggctggc

SEQ ID NO: 33737 - DNA, 15 bp, Homo sapiens
ccttaggcaggctgg

SEQ ID NO: 33738 - DNA, 15 bp, Homo sapiens
tccttaggcaggctg

SEQ ID NO: 33739 - DNA, 15 bp, Homo sapiens
gtccttaggcaggct

SEQ ID NO: 33740 - DNA, 15 bp, Homo sapiens
tgtccttaggcaggc

SEQ ID NO: 33741 - DNA, 15 bp, Homo sapiens
ctgtccttaggcagg

SEQ ID NO: 33742 - DNA, 15 bp, Homo sapiens
cctgtccttaggcag

SEQ ID NO: 33743 - DNA, 15 bp, Homo sapiens
tcctgtccttaggca

SEQ ID NO: 33744 - DNA, 15 bp, Homo sapiens
ctcctgtccttaggc

SEQ ID NO: 33745 - DNA, 15 bp, Homo sapiens
gctcctgtccttagg

SEQ ID NO: 33746 - DNA, 15 bp, Homo sapiens
ggctcctgtccttag

SEQ ID NO: 33747 - DNA, 15 bp, Homo sapiens
gggctcctgtcctta

SEQ ID NO: 33748 - DNA, 15 bp, Homo sapiens
ggggctcctgtcctt

SEQ ID NO: 33749 - DNA, 15 bp, Homo sapiens
cggggctcctgtcct

SEQ ID NO: 33750 - DNA, 15 bp, Homo sapiens
tcggggctcctgtcc

SEQ ID NO: 33751 - DNA, 15 bp, Homo sapiens
ctcggggctcctgtc

SEQ ID NO: 33752 - DNA, 15 bp, Homo sapiens
cctcggggctcctgt

SEQ ID NO: 33753 - DNA, 15 bp, Homo sapiens
tcctcggggctcctg

SEQ ID NO: 33754 - DNA, 15 bp, Homo sapiens
ctcctcggggctcct

SEQ ID NO: 33755 - DNA, 15 bp, Homo sapiens
actcctcggggctcc

SEQ ID NO: 33756 - DNA, 15 bp, Homo sapiens
tactcctcggggctc

SEQ ID NO: 33757 - DNA, 15 bp, Homo sapiens
atactcctcggggct

SEQ ID NO: 33758 - DNA, 15 bp, Homo sapiens
catactcctcggggc

SEQ ID NO: 33759 - DNA, 15 bp, Homo sapiens
ccatactcctcgggg

SEQ ID NO: 33760 - DNA, 15 bp, Homo sapiens
tccatactcctcggg

SEQ ID NO: 33761 - DNA, 15 bp, Homo sapiens
ttccatactcctcgg

SEQ ID NO: 33762 - DNA, 15 bp, Homo sapiens
attccatactcctcg

SEQ ID NO: 33763 - DNA, 15 bp, Homo sapiens
gattccatactcctc

SEQ ID NO: 33764 - DNA, 15 bp, Homo sapiens
tgattccatactcct

SEQ ID NO: 33765 - DNA, 15 bp, Homo sapiens
gtgattccatactcc

SEQ ID NO: 33766 - DNA, 15 bp, Homo sapiens
ggtgattccatactc

SEQ ID NO: 33767 - DNA, 15 bp, Homo sapiens
cggtgattccatact

SEQ ID NO: 33768 - DNA, 15 bp, Homo sapiens
acggtgattccatac

SEQ ID NO: 33769 - DNA, 15 bp, Homo sapiens
gacggtgattccata

SEQ ID NO: 33770 - DNA, 15 bp, Homo sapiens
tgacggtgattccat

SEQ ID NO: 33771 - DNA, 15 bp, Homo sapiens
atgacggtgattcca

SEQ ID NO: 33772 - DNA, 15 bp, Homo sapiens
aatgacggtgattcc

SEQ ID NO: 33773 - DNA, 15 bp, Homo sapiens
taatgacggtgattc

SEQ ID NO: 33774 - DNA, 15 bp, Homo sapiens
ctaatgacggtgatt

SEQ ID NO: 33775 - DNA, 15 bp, Homo sapiens
gctaatgacggtgat

SEQ ID NO: 33776 - DNA, 15 bp, Homo sapiens
ggctaatgacggtga

SEQ ID NO: 33777 - DNA, 15 bp, Homo sapiens
tggctaatgacggtg

SEQ ID NO: 33778 - DNA, 15 bp, Homo sapiens
ttggctaatgacggt

SEQ ID NO: 33779 - DNA, 15 bp, Homo sapiens
gttggctaatgacgg

SEQ ID NO: 33780 - DNA, 15 bp, Homo sapiens
ggttggctaatgacg

SEQ ID NO: 33781 - DNA, 15 bp, Homo sapiens
gggttggctaatgac

SEQ ID NO: 33782 - DNA, 15 bp, Homo sapiens
ggggttggctaatga

SEQ ID NO: 33783 - DNA, 15 bp, Homo sapiens
aggggttggctaatg

SEQ ID NO: 33784 - DNA, 15 bp, Homo sapiens
caggggttggctaat

SEQ ID NO: 33785 - DNA, 15 bp, Homo sapiens
tcaggggttggctaa

SEQ ID NO: 33786 - DNA, 15 bp, Homo sapiens
ttcaggggttggcta

SEQ ID NO: 33787 - DNA, 15 bp, Homo sapiens
gttcaggggttggct

SEQ ID NO: 33788 - DNA, 15 bp, Homo sapiens
ggttcaggggttggc

SEQ ID NO: 33789 - DNA, 15 bp, Homo sapiens
aggttcaggggttgg

SEQ ID NO: 33790 - DNA, 15 bp, Homo sapiens
caggttcaggggttg

SEQ ID NO: 33791 - DNA, 15 bp, Homo sapiens
tcaggttcaggggtt

SEQ ID NO: 33792 - DNA, 15 bp, Homo sapiens
gtcaggttcaggggt

SEQ ID NO: 33793 - DNA, 15 bp, Homo sapiens
ggtcaggttcagggg

SEQ ID NO: 33794 - DNA, 15 bp, Homo sapiens
tggtcaggttcaggg

SEQ ID NO: 33795 - DNA, 15 bp, Homo sapiens
ttggtcaggttcagg

SEQ ID NO: 33796 - DNA, 15 bp, Homo sapiens
cttggtcaggttcag

SEQ ID NO: 33797 - DNA, 15 bp, Homo sapiens
ccttggtcaggttca

SEQ ID NO: 33798 - DNA, 15 bp, Homo sapiens
tccttggtcaggttc

SEQ ID NO: 33799 - DNA, 15 bp, Homo sapiens
ctccttggtcaggtt

SEQ ID NO: 33800 - DNA, 15 bp, Homo sapiens
gctccttggtcaggt

SEQ ID NO: 33801 - DNA, 15 bp, Homo sapiens
tgctccttggtcagg

SEQ ID NO: 33802 - DNA, 15 bp, Homo sapiens
ctgctccttggtcag

SEQ ID NO: 33803 - DNA, 15 bp, Homo sapiens
gctgctccttggtca

SEQ ID NO: 33804 - DNA, 15 bp, Homo sapiens
agctgctccttggtc

SEQ ID NO: 33805 - DNA, 15 bp, Homo sapiens
gagctgctccttggt

SEQ ID NO: 33806 - DNA, 15 bp, Homo sapiens
agagctgctccttgg

SEQ ID NO: 33807 - DNA, 15 bp, Homo sapiens
gagagctgctccttg

SEQ ID NO: 33808 - DNA, 15 bp, Homo sapiens
tgagagctgctcctt

SEQ ID NO: 33809 - DNA, 15 bp, Homo sapiens
ctgagagctgctcct

SEQ ID NO: 33810 - DNA, 15 bp, Homo sapiens
tctgagagctgctcc

SEQ ID NO: 33811 - DNA, 15 bp, Homo sapiens
ctctgagagctgctc

SEQ ID NO: 33812 - DNA, 15 bp, Homo sapiens
tctctgagagctgct

SEQ ID NO: 33813 - DNA, 15 bp, Homo sapiens
atctctgagagctgc

SEQ ID NO: 33814 - DNA, 15 bp, Homo sapiens
aatctctgagagctg

SEQ ID NO: 33815 - DNA, 15 bp, Homo sapiens
taatctctgagagct

SEQ ID NO: 33816 - DNA, 15 bp, Homo sapiens
gtaatctctgagagc

SEQ ID NO: 33817 - DNA, 15 bp, Homo sapiens
tgtaatctctgagag

SEQ ID NO: 33818 - DNA, 15 bp, Homo sapiens
ctgtaatctctgaga

SEQ ID NO: 33819 - DNA, 15 bp, Homo sapiens
actgtaatctctgag

SEQ ID NO: 33820 - DNA, 15 bp, Homo sapiens
cactgtaatctctga

SEQ ID NO: 33821 - DNA, 15 bp, Homo sapiens
acactgtaatctctg

SEQ ID NO: 33822 - DNA, 15 bp, Homo sapiens
tacactgtaatctct

SEQ ID NO: 33823 - DNA, 15 bp, Homo sapiens
ttacactgtaatctc

SEQ ID NO: 33824 - DNA, 15 bp, Homo sapiens
cttacactgtaatct

SEQ ID NO: 33825 - DNA, 15 bp, Homo sapiens
gcttacactgtaatc

SEQ ID NO: 33826 - DNA, 15 bp, Homo sapiens
ggcttacactgtaat

SEQ ID NO: 33827 - DNA, 15 bp, Homo sapiens
tggcttacactgtaa

SEQ ID NO: 33828 - DNA, 15 bp, Homo sapiens
gtggcttacactgta

SEQ ID NO: 33829 - DNA, 15 bp, Homo sapiens
ggtggcttacactgt

SEQ ID NO: 33830 - DNA, 15 bp, Homo sapiens
tggtggcttacactg

SEQ ID NO: 33831 - DNA, 15 bp, Homo sapiens
gtggtggcttacact

SEQ ID NO: 33832 - DNA, 15 bp, Homo sapiens
tgtggtggcttacac

SEQ ID NO: 33833 - DNA, 15 bp, Homo sapiens
ctgtggtggcttaca

SEQ ID NO: 33834 - DNA, 15 bp, Homo sapiens
gctgtggtggcttac

SEQ ID NO: 33835 - DNA, 15 bp, Homo sapiens
ggctgtggtggctta

SEQ ID NO: 33836 - DNA, 15 bp, Homo sapiens
gggctgtggtggctt

SEQ ID NO: 33837 - DNA, 15 bp, Homo sapiens
ggggctgtggtggct

SEQ ID NO: 33838 - DNA, 15 bp, Homo sapiens
tggggctgtggtggc

SEQ ID NO: 33839 - DNA, 15 bp, Homo sapiens
ctggggctgtggtgg

SEQ ID NO: 33840 - DNA, 15 bp, Homo sapiens
gctggggctgtggtg

SEQ ID NO: 33841 - DNA, 15 bp, Homo sapiens
ggctggggctgtggt

SEQ ID NO: 33842 - DNA, 15 bp, Homo sapiens
aggctggggctgtgg

SEQ ID NO: 33843 - DNA, 15 bp, Homo sapiens
gaggctggggctgtg

SEQ ID NO: 33844 - DNA, 15 bp, Homo sapiens
tgaggctggggctgt

SEQ ID NO: 33845 - DNA, 15 bp, Homo sapiens
gtgaggctggggctg

SEQ ID NO: 33846 - DNA, 15 bp, Homo sapiens
ggtgaggctggggct

SEQ ID NO: 33847 - DNA, 15 bp, Homo sapiens
tggtgaggctggggc

SEQ ID NO: 33848 - DNA, 15 bp, Homo sapiens
gtggtgaggctgggg

SEQ ID NO: 33849 - DNA, 15 bp, Homo sapiens
agtggtgaggctggg

SEQ ID NO: 33850 - DNA, 15 bp, Homo sapiens
aagtggtgaggctgg

SEQ ID NO: 33851 - DNA, 15 bp, Homo sapiens
aaagtggtgaggctg

SEQ ID NO: 33852 - DNA, 15 bp, Homo sapiens
gaaagtggtgaggct

SEQ ID NO: 33853 - DNA, 15 bp, Homo sapiens
agaaagtggtgaggc

SEQ ID NO: 33854 - DNA, 15 bp, Homo sapiens
aagaaagtggtgagg

SEQ ID NO: 33855 - DNA, 15 bp, Homo sapiens
caagaaagtggtgag

SEQ ID NO: 33856 - DNA, 15 bp, Homo sapiens
acaagaaagtggtga

SEQ ID NO: 33857 - DNA, 15 bp, Homo sapiens
gacaagaaagtggtg

SEQ ID NO: 33858 - DNA, 15 bp, Homo sapiens
tgacaagaaagtggt

SEQ ID NO: 33859 - DNA, 15 bp, Homo sapiens
gtgacaagaaagtgg

SEQ ID NO: 33860 - DNA, 15 bp, Homo sapiens
ggtgacaagaaagtg

SEQ ID NO: 33861 - DNA, 15 bp, Homo sapiens
aggtgacaagaaagt

SEQ ID NO: 33862 - DNA, 15 bp, Homo sapiens
aaggtgacaagaaag

SEQ ID NO: 33863 - DNA, 15 bp, Homo sapiens
gaaggtgacaagaaa

SEQ ID NO: 33864 - DNA, 15 bp, Homo sapiens
agaaggtgacaagaa

SEQ ID NO: 33865 - DNA, 15 bp, Homo sapiens
gagaaggtgacaaga

SEQ ID NO: 33866 - DNA, 15 bp, Homo sapiens
ggagaaggtgacaag

SEQ ID NO: 33867 - DNA, 15 bp, Homo sapiens
tggagaaggtgacaa

SEQ ID NO: 33868 - DNA, 15 bp, Homo sapiens
gtggagaaggtgaca

SEQ ID NO: 33869 - DNA, 15 bp, Homo sapiens
agtggagaaggtgac

SEQ ID NO: 33870 - DNA, 15 bp, Homo sapiens
gagtggagaaggtga

SEQ ID NO: 33871 - DNA, 15 bp, Homo sapiens
agagtggagaaggtg

SEQ ID NO: 33872 - DNA, 15 bp, Homo sapiens
aagagtggagaaggt

SEQ ID NO: 33873 - DNA, 15 bp, Homo sapiens
aaagagtggagaagg

SEQ ID NO: 33874 - DNA, 15 bp, Homo sapiens
caaagagtggagaag

SEQ ID NO: 33875 - DNA, 15 bp, Homo sapiens
tcaaagagtggagaa

SEQ ID NO: 33876 - DNA, 15 bp, Homo sapiens
ttcaaagagtggaga

SEQ ID NO: 33877 - DNA, 15 bp, Homo sapiens
gttcaaagagtggag

SEQ ID NO: 33878 - DNA, 15 bp, Homo sapiens
tgttcaaagagtgga

SEQ ID NO: 33879 - DNA, 15 bp, Homo sapiens
atgttcaaagagtgg

SEQ ID NO: 33880 - DNA, 15 bp, Homo sapiens
gatgttcaaagagtg

SEQ ID NO: 33881 - DNA, 15 bp, Homo sapiens
ggatgttcaaagagt

SEQ ID NO: 33882 - DNA, 15 bp, Homo sapiens
aggatgttcaaagag

SEQ ID NO: 33883 - DNA, 15 bp, Homo sapiens
caggatgttcaaaga

SEQ ID NO: 33884 - DNA, 15 bp, Homo sapiens
tcaggatgttcaaag

SEQ ID NO: 33885 - DNA, 15 bp, Homo sapiens
ctcaggatgttcaaa

SEQ ID NO: 33886 - DNA, 15 bp, Homo sapiens
tctcaggatgttcaa

SEQ ID NO: 33887 - DNA, 15 bp, Homo sapiens
ctctcaggatgttca

SEQ ID NO: 33888 - DNA, 15 bp, Homo sapiens
cctctcaggatgttc

SEQ ID NO: 33889 - DNA, 15 bp, Homo sapiens
tcctctcaggatgtt

SEQ ID NO: 33890 - DNA, 15 bp, Homo sapiens
atcctctcaggatgt

SEQ ID NO: 33891 - DNA, 15 bp, Homo sapiens
aatcctctcaggatg

SEQ ID NO: 33892 - DNA, 15 bp, Homo sapiens
gaatcctctcaggat

SEQ ID NO: 33893 - DNA, 15 bp, Homo sapiens
agaatcctctcagga

SEQ ID NO: 33894 - DNA, 15 bp, Homo sapiens
gagaatcctctcagg

SEQ ID NO: 33895 - DNA, 15 bp, Homo sapiens
tgagaatcctctcag

SEQ ID NO: 33896 - DNA, 15 bp, Homo sapiens
gtgagaatcctctca

SEQ ID NO: 33897 - DNA, 15 bp, Homo sapiens
ggtgagaatcctctc

SEQ ID NO: 33898 - DNA, 15 bp, Homo sapiens
tggtgagaatcctct

SEQ ID NO: 33899 - DNA, 15 bp, Homo sapiens
gtggtgagaatcctc

SEQ ID NO: 33900 - DNA, 15 bp, Homo sapiens
ggtggtgagaatcct

SEQ ID NO: 33901 - DNA, 15 bp, Homo sapiens
cggtggtgagaatcc

SEQ ID NO: 33902 - DNA, 15 bp, Homo sapiens
gcggtggtgagaatc

SEQ ID NO: 33903 - DNA, 15 bp, Homo sapiens
cgcggtggtgagaat

SEQ ID NO: 33904 - DNA, 15 bp, Homo sapiens
tcgcggtggtgagaa

SEQ ID NO: 33905 - DNA, 15 bp, Homo sapiens
ttcgcggtggtgaga

SEQ ID NO: 33906 - DNA, 15 bp, Homo sapiens
cttcgcggtggtgag

SEQ ID NO: 33907 - DNA, 15 bp, Homo sapiens
acttcgcggtggtga

SEQ ID NO: 33908 - DNA, 15 bp, Homo sapiens
cacttcgcggtggtg

SEQ ID NO: 33909 - DNA, 15 bp, Homo sapiens
gcacttcgcggtggt

SEQ ID NO: 33910 - DNA, 15 bp, Homo sapiens
agcacttcgcggtgg

SEQ ID NO: 33911 - DNA, 15 bp, Homo sapiens
gtggtcacttgcagg

SEQ ID NO: 33912 - DNA, 15 bp, Homo sapiens
cgtggtcacttgcag

SEQ ID NO: 33913 - DNA, 15 bp, Homo sapiens
gcgtggtcacttgca

SEQ ID NO: 33914 - DNA, 15 bp, Homo sapiens
tgcgtggtcacttgc

SEQ ID NO: 33915 - DNA, 15 bp, Homo sapiens
ctgcgtggtcacttg

SEQ ID NO: 33916 - DNA, 15 bp, Homo sapiens
cctgcgtggtcactt

SEQ ID NO: 33917 - DNA, 15 bp, Homo sapiens
acctgcgtggtcact

SEQ ID NO: 33918 - DNA, 15 bp, Homo sapiens
cacctgcgtggtcac

SEQ ID NO: 33919 - DNA, 15 bp, Homo sapiens
tcacctgcgtggtca

SEQ ID NO: 33920 - DNA, 15 bp, Homo sapiens
gtcacctgcgtggtc

SEQ ID NO: 33921 - DNA, 15 bp, Homo sapiens
agtcacctgcgtggt

SEQ ID NO: 33922 - DNA, 15 bp, Homo sapiens
aagtcacctgcgtgg

SEQ ID NO: 33923 - DNA, 15 bp, Homo sapiens
gaagtcacctgcgtg

SEQ ID NO: 33924 - DNA, 15 bp, Homo sapiens
ggaagtcacctgcgt

SEQ ID NO: 33925 - DNA, 15 bp, Homo sapiens
aggaagtcacctgcg

SEQ ID NO: 33926 - DNA, 15 bp, Homo sapiens
gaggaagtcacctgc

SEQ ID NO: 33927 - DNA, 15 bp, Homo sapiens
tgaggaagtcacctg

SEQ ID NO: 33928 - DNA, 15 bp, Homo sapiens
atgaggaagtcacct

SEQ ID NO: 33929 - DNA, 15 bp, Homo sapiens
catgaggaagtcacc

SEQ ID NO: 33930 - DNA, 15 bp, Homo sapiens
ccatgaggaagtcac

SEQ ID NO: 33931 - DNA, 15 bp, Homo sapiens
accatgaggaagtca

SEQ ID NO: 33932 - DNA, 15 bp, Homo sapiens
caccatgaggaagtc

SEQ ID NO: 33933 - DNA, 15 bp, Homo sapiens
tcaccatgaggaagt

SEQ ID NO: 33934 - DNA, 15 bp, Homo sapiens
gtcaccatgaggaag

SEQ ID NO: 33935 - DNA, 15 bp, Homo sapiens
tgtcaccatgaggaa

SEQ ID NO: 33936 - DNA, 15 bp, Homo sapiens
ttgtcaccatgagga

SEQ ID NO: 33937 - DNA, 15 bp, Homo sapiens
tttgtcaccatgagg

SEQ ID NO: 33938 - DNA, 15 bp, Homo sapiens
ttttgtcaccatgag

SEQ ID NO: 33939 - DNA, 15 bp, Homo sapiens
cttttgtcaccatga

SEQ ID NO: 33940 - DNA, 15 bp, Homo sapiens
ccttttgtcaccatg

SEQ ID NO: 33941 - DNA, 15 bp, Homo sapiens
tccttttgtcaccat

SEQ ID NO: 33942 - DNA, 15 bp, Homo sapiens
ctccttttgtcacca

SEQ ID NO: 33943 - DNA, 15 bp, Homo sapiens
actccttttgtcacc

SEQ ID NO: 33944 - DNA, 15 bp, Homo sapiens
gactccttttgtcac

SEQ ID NO: 33945 - DNA, 15 bp, Homo sapiens
tgactccttttgtca

SEQ ID NO: 33946 - DNA, 15 bp, Homo sapiens
atgactccttttgtc

SEQ ID NO: 33947 - DNA, 15 bp, Homo sapiens
catgactccttttgt

SEQ ID NO: 33948 - DNA, 15 bp, Homo sapiens
ccatgactccttttg

SEQ ID NO: 33949 - DNA, 15 bp, Homo sapiens
gccatgactcctttt

SEQ ID NO: 33950 - DNA, 15 bp, Homo sapiens
tgccatgactccttt

SEQ ID NO: 33951 - DNA, 15 bp, Homo sapiens
ctgccatgactcctt

SEQ ID NO: 33952 - DNA, 15 bp, Homo sapiens
cctgccatgactcct

SEQ ID NO: 33953 - DNA, 15 bp, Homo sapiens
ccctgccatgactcc

SEQ ID NO: 33954 - DNA, 15 bp, Homo sapiens
accctgccatgactc

SEQ ID NO: 33955 - DNA, 15 bp, Homo sapiens
taccctgccatgact

SEQ ID NO: 33956 - DNA, 15 bp, Homo sapiens
ctaccctgccatgac

SEQ ID NO: 33957 - DNA, 15 bp, Homo sapiens
tctaccctgccatga

SEQ ID NO: 33958 - DNA, 15 bp, Homo sapiens
ctctaccctgccatg

SEQ ID NO: 33959 - DNA, 15 bp, Homo sapiens
tctctaccctgccat

SEQ ID NO: 33960 - DNA, 15 bp, Homo sapiens
atctctaccctgcca

SEQ ID NO: 33961 - DNA, 15 bp, Homo sapiens
tatctctaccctgcc

SEQ ID NO: 33962 - DNA, 15 bp, Homo sapiens
atatctctaccctgc

SEQ ID NO: 33963 - DNA, 15 bp, Homo sapiens
gatatctctaccctg

SEQ ID NO: 33964 - DNA, 15 bp, Homo sapiens
tgatatctctaccct

SEQ ID NO: 33965 - DNA, 15 bp, Homo sapiens
atgatatctctaccc

SEQ ID NO: 33966 - DNA, 15 bp, Homo sapiens
tatgatatctctacc

SEQ ID NO: 33967 - DNA, 15 bp, Homo sapiens
gtatgatatctctac

SEQ ID NO: 33968 - DNA, 15 bp, Homo sapiens
ggtatgatatctcta

SEQ ID NO: 33969 - DNA, 15 bp, Homo sapiens
tggtatgatatctct

SEQ ID NO: 33970 - DNA, 15 bp, Homo sapiens
atggtatgatatctc

SEQ ID NO: 33971 - DNA, 15 bp, Homo sapiens
catggtatgatatct

SEQ ID NO: 33972 - DNA, 15 bp, Homo sapiens
ccatggtatgatatc

SEQ ID NO: 33973 - DNA, 15 bp, Homo sapiens
gccatggtatgatat

SEQ ID NO: 33974 - DNA, 15 bp, Homo sapiens
tgccatggtatgata

SEQ ID NO: 33975 - DNA, 15 bp, Homo sapiens
ctgccatggtatgat

SEQ ID NO: 33976 - DNA, 15 bp, Homo sapiens
cctgccatggtatga

SEQ ID NO: 33977 - DNA, 15 bp, Homo sapiens
ccctgccatggtatg

SEQ ID NO: 33978 - DNA, 15 bp, Homo sapiens
cccctgccatggtat

SEQ ID NO: 33979 - DNA, 15 bp, Homo sapiens
tcccctgccatggta

SEQ ID NO: 33980 - DNA, 15 bp, Homo sapiens
ttcccctgccatggt

SEQ ID NO: 33981 - DNA, 15 bp, Homo sapiens
tttcccctgccatgg

SEQ ID NO: 33982 - DNA, 15 bp, Homo sapiens
ctttcccctgccatg

SEQ ID NO: 33983 - DNA, 15 bp, Homo sapiens
tctttcccctgccat

SEQ ID NO: 33984 - DNA, 15 bp, Homo sapiens
atctttcccctgcca

SEQ ID NO: 33985 - DNA, 15 bp, Homo sapiens
tatctttcccctgcc

SEQ ID NO: 33986 - DNA, 15 bp, Homo sapiens
atatctttcccctgc

SEQ ID NO: 33987 - DNA, 15 bp, Homo sapiens
gatatctttcccctg

SEQ ID NO: 33988 - DNA, 15 bp, Homo sapiens
tgatatctttcccct

SEQ ID NO: 33989 - DNA, 15 bp, Homo sapiens
atgatatctttcccc

SEQ ID NO: 33990 - DNA, 15 bp, Homo sapiens
tatgatatctttccc

SEQ ID NO: 33991 - DNA, 15 bp, Homo sapiens
ctatgatatctttcc

SEQ ID NO: 33992 - DNA, 15 bp, Homo sapiens
tctatgatatctttc

SEQ ID NO: 33993 - DNA, 15 bp, Homo sapiens
ttctatgatatcttt

SEQ ID NO: 33994 - DNA, 15 bp, Homo sapiens
attctatgatatctt

SEQ ID NO: 33995 - DNA, 15 bp, Homo sapiens
aattctatgatatct

SEQ ID NO: 33996 - DNA, 15 bp, Homo sapiens
aaattctatgatatc

SEQ ID NO: 33997 - DNA, 15 bp, Homo sapiens
aaaattctatgatat

SEQ ID NO: 33998 - DNA, 15 bp, Homo sapiens
gaaaattctatgata

SEQ ID NO: 33999 - DNA, 15 bp, Homo sapiens
ggaaaattctatgat

SEQ ID NO: 34000 - DNA, 15 bp, Homo sapiens
tggaaaattctatga

SEQ ID NO: 34001 - DNA, 15 bp, Homo sapiens
atggaaaattctatg

SEQ ID NO: 34002 - DNA, 15 bp, Homo sapiens
catggaaaattctat

SEQ ID NO: 34003 - DNA, 15 bp, Homo sapiens
tcatggaaaattcta

SEQ ID NO: 34004 - DNA, 15 bp, Homo sapiens
ctcatggaaaattct

SEQ ID NO: 34005 - DNA, 15 bp, Homo sapiens
gctcatggaaaattc

SEQ ID NO: 34006 - DNA, 15 bp, Homo sapiens
tgctcatggaaaatt

SEQ ID NO: 34007 - DNA, 15 bp, Homo sapiens
gtgctcatggaaaat

SEQ ID NO: 34008 - DNA, 15 bp, Homo sapiens
tgtgctcatggaaaa

SEQ ID NO: 34009 - DNA, 15 bp, Homo sapiens
atgtgctcatggaaa

SEQ ID NO: 34010 - DNA, 15 bp, Homo sapiens
aatgtgctcatggaa

SEQ ID NO: 34011 - DNA, 15 bp, Homo sapiens
aaatgtgctcatgga

SEQ ID NO: 34012 - DNA, 15 bp, Homo sapiens
taaatgtgctcatgg

SEQ ID NO: 34013 - DNA, 15 bp, Homo sapiens
ataaatgtgctcatg

SEQ ID NO: 34014 - DNA, 15 bp, Homo sapiens
cataaatgtgctcat

SEQ ID NO: 34015 - DNA, 15 bp, Homo sapiens
tcataaatgtgctca

SEQ ID NO: 34016 - DNA, 15 bp, Homo sapiens
ctcataaatgtgctc

SEQ ID NO: 34017 - DNA, 15 bp, Homo sapiens
tctcataaatgtgct

SEQ ID NO: 34018 - DNA, 15 bp, Homo sapiens
gtctcataaatgtgc

SEQ ID NO: 34019 - DNA, 15 bp, Homo sapiens
tgtctcataaatgtg

SEQ ID NO: 34020 - DNA, 15 bp, Homo sapiens
atgtctcataaatgt

SEQ ID NO: 34021 - DNA, 15 bp, Homo sapiens
gatgtctcataaatg

SEQ ID NO: 34022 - DNA, 15 bp, Homo sapiens
tgatgtctcataaat

SEQ ID NO: 34023 - DNA, 15 bp, Homo sapiens
ttgatgtctcataaa

SEQ ID NO: 34024 - DNA, 15 bp, Homo sapiens
cttgatgtctcataa

SEQ ID NO: 34025 - DNA, 15 bp, Homo sapiens
acttgatgtctcata

SEQ ID NO: 34026 - DNA, 15 bp, Homo sapiens
aacttgatgtctcat

SEQ ID NO: 34027 - DNA, 15 bp, Homo sapiens
taacttgatgtctca

SEQ ID NO: 34028 - DNA, 15 bp, Homo sapiens
gtaacttgatgtctc

SEQ ID NO: 34029 - DNA, 15 bp, Homo sapiens
tgtaacttgatgtct

SEQ ID NO: 34030 - DNA, 15 bp, Homo sapiens
ttgtaacttgatgtc

SEQ ID NO: 34031 - DNA, 15 bp, Homo sapiens
gttgtaacttgatgt

SEQ ID NO: 34032 - DNA, 15 bp, Homo sapiens
agttgtaacttgatg

SEQ ID NO: 34033 - DNA, 15 bp, Homo sapiens
cagttgtaacttgat

SEQ ID NO: 34034 - DNA, 15 bp, Homo sapiens
acagttgtaacttga

SEQ ID NO: 34035 - DNA, 15 bp, Homo sapiens
cacagttgtaacttg

SEQ ID NO: 34036 - DNA, 15 bp, Homo sapiens
acacagttgtaactt

SEQ ID NO: 34037 - DNA, 15 bp, Homo sapiens
gacacagttgtaact

SEQ ID NO: 34038 - DNA, 15 bp, Homo sapiens
ggacacagttgtaac

SEQ ID NO: 34039 - DNA, 15 bp, Homo sapiens
tggacacagttgtaa

SEQ ID NO: 34040 - DNA, 15 bp, Homo sapiens
ttggacacagttgta

SEQ ID NO: 34041 - DNA, 15 bp, Homo sapiens
cttggacacagttgt

SEQ ID NO: 34042 - DNA, 15 bp, Homo sapiens
acttggacacagttg

SEQ ID NO: 34043 - DNA, 15 bp, Homo sapiens
cacttggacacagtt

SEQ ID NO: 34044 - DNA, 15 bp, Homo sapiens
tcacttggacacagt

SEQ ID NO: 34045 - DNA, 15 bp, Homo sapiens
ctcacttggacacag

SEQ ID NO: 34046 - DNA, 15 bp, Homo sapiens
cctcacttggacaca

SEQ ID NO: 34047 - DNA, 15 bp, Homo sapiens
gcctcacttggacac

SEQ ID NO: 34048 - DNA, 15 bp, Homo sapiens
tgcctcacttggaca

SEQ ID NO: 34049 - DNA, 15 bp, Homo sapiens
gtgcctcacttggac

SEQ ID NO: 34050 - DNA, 15 bp, Homo sapiens
tgtgcctcacttgga

SEQ ID NO: 34051 - DNA, 15 bp, Homo sapiens
ctgtgcctcacttgg

SEQ ID NO: 34052 - DNA, 15 bp, Homo sapiens
actgtgcctcacttg

SEQ ID NO: 34053 - DNA, 15 bp, Homo sapiens
gactgtgcctcactt

SEQ ID NO: 34054 - DNA, 15 bp, Homo sapiens
agactgtgcctcact

SEQ ID NO: 34055 - DNA, 15 bp, Homo sapiens
cagactgtgcctcac

SEQ ID NO: 34056 - DNA, 15 bp, Homo sapiens
tcagactgtgcctca

SEQ ID NO: 34057 - DNA, 15 bp, Homo sapiens
gtcagactgtgcctc

SEQ ID NO: 34058 - DNA, 15 bp, Homo sapiens
tgtcagactgtgcct

SEQ ID NO: 34059 - DNA, 15 bp, Homo sapiens
atgtcagactgtgcc

SEQ ID NO: 34060 - DNA, 15 bp, Homo sapiens
gatgtcagactgtgc

SEQ ID NO: 34061 - DNA, 15 bp, Homo sapiens
ggatgtcagactgtg

SEQ ID NO: 34062 - DNA, 15 bp, Homo sapiens
tggatgtcagactgt

SEQ ID NO: 34063 - DNA, 15 bp, Homo sapiens
ctggatgtcagactg

SEQ ID NO: 34064 - DNA, 15 bp, Homo sapiens
tctggatgtcagact

SEQ ID NO: 34065 - DNA, 15 bp, Homo sapiens
ttctggatgtcagac

SEQ ID NO: 34066 - DNA, 15 bp, Homo sapiens
cttctggatgtcaga

SEQ ID NO: 34067 - DNA, 15 bp, Homo sapiens
ccttctggatgtcag

SEQ ID NO: 34068 - DNA, 15 bp, Homo sapiens
accttctggatgtca

SEQ ID NO: 34069 - DNA, 15 bp, Homo sapiens
taccttctggatgtc

SEQ ID NO: 34070 - DNA, 15 bp, Homo sapiens
ttaccttctggatgt

SEQ ID NO: 34071 - DNA, 15 bp, Homo sapiens
tttaccttctggatg

SEQ ID NO: 34072 - DNA, 15 bp, Homo sapiens
ttttaccttctggat

SEQ ID NO: 34073 - DNA, 15 bp, Homo sapiens
gttttaccttctgga

SEQ ID NO: 34074 - DNA, 15 bp, Homo sapiens
agttttaccttctgg

SEQ ID NO: 34075 - DNA, 15 bp, Homo sapiens
cagttttaccttctg

SEQ ID NO: 34076 - DNA, 15 bp, Homo sapiens
tcagttttaccttct

SEQ ID NO: 34077 - DNA, 15 bp, Homo sapiens
ctcagttttaccttc

SEQ ID NO: 34078 - DNA, 15 bp, Homo sapiens
gctcagttttacctt

SEQ ID NO: 34079 - DNA, 15 bp, Homo sapiens
agctcagttttacct

SEQ ID NO: 34080 - DNA, 15 bp, Homo sapiens
cagctcagttttacc

SEQ ID NO: 34081 - DNA, 15 bp, Homo sapiens
ccagctcagttttac

SEQ ID NO: 34082 - DNA, 15 bp, Homo sapiens
tccagctcagtttta

SEQ ID NO: 34083 - DNA, 15 bp, Homo sapiens
gtccagctcagtttt

SEQ ID NO: 34084 - DNA, 15 bp, Homo sapiens
cgtccagctcagttt

SEQ ID NO: 34085 - DNA, 15 bp, Homo sapiens
gcgtccagctcagtt

SEQ ID NO: 34086 - DNA, 15 bp, Homo sapiens
agcgtccagctcagt

SEQ ID NO: 34087 - DNA, 15 bp, Homo sapiens
tagcgtccagctcag

SEQ ID NO: 34088 - DNA, 15 bp, Homo sapiens
ctagcgtccagctca

SEQ ID NO: 34089 - DNA, 15 bp, Homo sapiens
tctagcgtccagctc

SEQ ID NO: 34090 - DNA, 15 bp, Homo sapiens
ttctagcgtccagct

SEQ ID NO: 34091 - DNA, 15 bp, Homo sapiens
tttctagcgtccagc

SEQ ID NO: 34092 - DNA, 15 bp, Homo sapiens
ctttctagcgtccag

SEQ ID NO: 34093 - DNA, 15 bp, Homo sapiens
tctttctagcgtcca

SEQ ID NO: 34094 - DNA, 15 bp, Homo sapiens
ttctttctagcgtcc

SEQ ID NO: 34095 - DNA, 15 bp, Homo sapiens
tttctttctagcgtc

SEQ ID NO: 34096 - DNA, 15 bp, Homo sapiens
gtttctttctagcgt

SEQ ID NO: 34097 - DNA, 15 bp, Homo sapiens
agtttctttctagcg

SEQ ID NO: 34098 - DNA, 15 bp, Homo sapiens
tagtttctttctagc

SEQ ID NO: 34099 - DNA, 15 bp, Homo sapiens
atagtttctttctag

SEQ ID NO: 34100 - DNA, 15 bp, Homo sapiens
tatagtttctttcta

SEQ ID NO: 34101 - DNA, 15 bp, Homo sapiens
ctatagtttctttct

SEQ ID NO: 34102 - DNA, 15 bp, Homo sapiens
cctatagtttctttc

SEQ ID NO: 34103 - DNA, 15 bp, Homo sapiens
gcctatagtttcttt

SEQ ID NO: 34104 - DNA, 15 bp, Homo sapiens
agcctatagtttctt

SEQ ID NO: 34105 - DNA, 15 bp, Homo sapiens
aagcctatagtttct

SEQ ID NO: 34106 - DNA, 15 bp, Homo sapiens
taagcctatagtttc

SEQ ID NO: 34107 - DNA, 15 bp, Homo sapiens
ttaagcctatagttt

SEQ ID NO: 34108 - DNA, 15 bp, Homo sapiens
cttaagcctatagtt

SEQ ID NO: 34109 - DNA, 15 bp, Homo sapiens
tcttaagcctatagt

SEQ ID NO: 34110 - DNA, 15 bp, Homo sapiens
gtcttaagcctatag

SEQ ID NO: 34111 - DNA, 15 bp, Homo sapiens
tgtcttaagcctata

SEQ ID NO: 34112 - DNA, 15 bp, Homo sapiens
gtgtcttaagcctat

SEQ ID NO: 34113 - DNA, 15 bp, Homo sapiens
tgtgtcttaagccta

SEQ ID NO: 34114 - DNA, 15 bp, Homo sapiens
ctgtgtcttaagcct

SEQ ID NO: 34115 - DNA, 15 bp, Homo sapiens
tctgtgtcttaagcc

SEQ ID NO: 34116 - DNA, 15 bp, Homo sapiens
ttctgtgtcttaagc

SEQ ID NO: 34117 - DNA, 15 bp, Homo sapiens
attctgtgtcttaag

SEQ ID NO: 34118 - DNA, 15 bp, Homo sapiens
aattctgtgtcttaa

SEQ ID NO: 34119 - DNA, 15 bp, Homo sapiens
caattctgtgtctta

SEQ ID NO: 34120 - DNA, 15 bp, Homo sapiens
ccaattctgtgtctt

SEQ ID NO: 34121 - DNA, 15 bp, Homo sapiens
cccaattctgtgtct

SEQ ID NO: 34122 - DNA, 15 bp, Homo sapiens
tcccaattctgtgtc

SEQ ID NO: 34123 - DNA, 15 bp, Homo sapiens
atcccaattctgtgt

SEQ ID NO: 34124 - DNA, 15 bp, Homo sapiens
aatcccaattctgtg

SEQ ID NO: 34125 - DNA, 15 bp, Homo sapiens
taatcccaattctgt

SEQ ID NO: 34126 - DNA, 15 bp, Homo sapiens
ataatcccaattctg

SEQ ID NO: 34127 - DNA, 15 bp, Homo sapiens
tataatcccaattct

SEQ ID NO: 34128 - DNA, 15 bp, Homo sapiens
atataatcccaattc

SEQ ID NO: 34129 - DNA, 15 bp, Homo sapiens
catataatcccaatt

SEQ ID NO: 34130 - DNA, 15 bp, Homo sapiens
ccatataatcccaat

SEQ ID NO: 34131 - DNA, 15 bp, Homo sapiens
accatataatcccaa

SEQ ID NO: 34132 - DNA, 15 bp, Homo sapiens
taccatataatccca

SEQ ID NO: 34133 - DNA, 15 bp, Homo sapiens
ctaccatataatccc

SEQ ID NO: 34134 - DNA, 15 bp, Homo sapiens
cctaccatataatcc

SEQ ID NO: 34135 - DNA, 15 bp, Homo sapiens
ccctaccatataatc

SEQ ID NO: 34136 - DNA, 15 bp, Homo sapiens
accctaccatataat

SEQ ID NO: 34137 - DNA, 15 bp, Homo sapiens
taccctaccatataa

SEQ ID NO: 34138 - DNA, 15 bp, Homo sapiens
ctaccctaccatata

SEQ ID NO: 34139 - DNA, 15 bp, Homo sapiens
gctaccctaccatat

SEQ ID NO: 34140 - DNA, 15 bp, Homo sapiens
agctaccctaccata

SEQ ID NO: 34141 - DNA, 15 bp, Homo sapiens
gagctaccctaccat

SEQ ID NO: 34142 - DNA, 15 bp, Homo sapiens
ggagctaccctacca

SEQ ID NO: 34143 - DNA, 15 bp, Homo sapiens
gggagctaccctacc

SEQ ID NO: 34144 - DNA, 15 bp, Homo sapiens
tgggagctaccctac

SEQ ID NO: 34145 - DNA, 15 bp, Homo sapiens
gtgggagctacccta

SEQ ID NO: 34146 - DNA, 15 bp, Homo sapiens
agtgggagctaccct

SEQ ID NO: 34147 - DNA, 15 bp, Homo sapiens
tagtgggagctaccc

SEQ ID NO: 34148 - DNA, 15 bp, Homo sapiens
ttagtgggagctacc

SEQ ID NO: 34149 - DNA, 15 bp, Homo sapiens
attagtgggagctac

SEQ ID NO: 34150 - DNA, 15 bp, Homo sapiens
aattagtgggagcta

SEQ ID NO: 34151 - DNA, 15 bp, Homo sapiens
aaattagtgggagct

SEQ ID NO: 34152 - DNA, 15 bp, Homo sapiens
caaattagtgggagc

SEQ ID NO: 34153 - DNA, 15 bp, Homo sapiens
ccaaattagtgggag

SEQ ID NO: 34154 - DNA, 15 bp, Homo sapiens
tccaaattagtggga

SEQ ID NO: 34155 - DNA, 15 bp, Homo sapiens
ttccaaattagtggg

SEQ ID NO: 34156 - DNA, 15 bp, Homo sapiens
tttccaaattagtgg

SEQ ID NO: 34157 - DNA, 15 bp, Homo sapiens
gtttccaaattagtg

SEQ ID NO: 34158 - DNA, 15 bp, Homo sapiens
cgtttccaaattagt

SEQ ID NO: 34159 - DNA, 15 bp, Homo sapiens
acgtttccaaattag

SEQ ID NO: 34160 - DNA, 15 bp, Homo sapiens
tacgtttccaaatta

SEQ ID NO: 34161 - DNA, 15 bp, Homo sapiens
gtacgtttccaaatt

SEQ ID NO: 34162 - DNA, 15 bp, Homo sapiens
ggtacgtttccaaat

SEQ ID NO: 34163 - DNA, 15 bp, Homo sapiens
gggtacgtttccaaa

SEQ ID NO: 34164 - DNA, 15 bp, Homo sapiens
agggtacgtttccaa

SEQ ID NO: 34165 - DNA, 15 bp, Homo sapiens
tagggtacgtttcca

SEQ ID NO: 34166 - DNA, 15 bp, Homo sapiens
gtagggtacgtttcc

SEQ ID NO: 34167 - DNA, 15 bp, Homo sapiens
agtagggtacgtttc

SEQ ID NO: 34168 - DNA, 15 bp, Homo sapiens
aagtagggtacgttt

SEQ ID NO: 34169 - DNA, 15 bp, Homo sapiens
caagtagggtacgtt

SEQ ID NO: 34170 - DNA, 15 bp, Homo sapiens
gcaagtagggtacgt

SEQ ID NO: 34171 - DNA, 15 bp, Homo sapiens
agcaagtagggtacg

SEQ ID NO: 34172 - DNA, 15 bp, Homo sapiens
aagcaagtagggtac

SEQ ID NO: 34173 - DNA, 15 bp, Homo sapiens
gaagcaagtagggta

SEQ ID NO: 34174 - DNA, 15 bp, Homo sapiens
ggaagcaagtagggt

SEQ ID NO: 34175 - DNA, 15 bp, Homo sapiens
gggaagcaagtaggg

SEQ ID NO: 34176 - DNA, 15 bp, Homo sapiens
agggaagcaagtagg

SEQ ID NO: 34177 - DNA, 15 bp, Homo sapiens
cagggaagcaagtag

SEQ ID NO: 34178 - DNA, 15 bp, Homo sapiens
tcagggaagcaagta

SEQ ID NO: 34179 - DNA, 15 bp, Homo sapiens
ctcagggaagcaagt

SEQ ID NO: 34180 - DNA, 15 bp, Homo sapiens
actcagggaagcaag

SEQ ID NO: 34181 - DNA, 15 bp, Homo sapiens
tactcagggaagcaa

SEQ ID NO: 34182 - DNA, 15 bp, Homo sapiens
ctactcagggaagca

SEQ ID NO: 34183 - DNA, 15 bp, Homo sapiens
actactcagggaagc

SEQ ID NO: 34184 - DNA, 15 bp, Homo sapiens
aactactcagggaag

SEQ ID NO: 34185 - DNA, 15 bp, Homo sapiens
aaactactcagggaa

SEQ ID NO: 34186 - DNA, 15 bp, Homo sapiens
aaaactactcaggga

SEQ ID NO: 34187 - DNA, 15 bp, Homo sapiens
taaaactactcaggg

SEQ ID NO: 34188 - DNA, 15 bp, Homo sapiens
ttaaaactactcagg

SEQ ID NO: 34189 - DNA, 15 bp, Homo sapiens
attaaaactactcag

SEQ ID NO: 34190 - DNA, 15 bp, Homo sapiens
aattaaaactactca

SEQ ID NO: 34191 - DNA, 15 bp, Homo sapiens
caattaaaactactc

SEQ ID NO: 34192 - DNA, 15 bp, Homo sapiens
ccaattaaaactact

SEQ ID NO: 34193 - DNA, 15 bp, Homo sapiens
gccaattaaaactac

SEQ ID NO: 34194 - DNA, 15 bp, Homo sapiens
ggccaattaaaacta

SEQ ID NO: 34195 - DNA, 15 bp, Homo sapiens
gggccaattaaaact

SEQ ID NO: 34196 - DNA, 15 bp, Homo sapiens
tgggccaattaaaac

SEQ ID NO: 34197 - DNA, 15 bp, Homo sapiens
ctgggccaattaaaa

SEQ ID NO: 34198 - DNA, 15 bp, Homo sapiens
gctgggccaattaaa

SEQ ID NO: 34199 - DNA, 15 bp, Homo sapiens
ggctgggccaattaa

SEQ ID NO: 34200 - DNA, 15 bp, Homo sapiens
tggctgggccaatta

SEQ ID NO: 34201 - DNA, 15 bp, Homo sapiens
atggctgggccaatt

SEQ ID NO: 34202 - DNA, 15 bp, Homo sapiens
catggctgggccaat

SEQ ID NO: 34203 - DNA, 15 bp, Homo sapiens
gcatggctgggccaa

SEQ ID NO: 34204 - DNA, 15 bp, Homo sapiens
ggcatggctgggcca

SEQ ID NO: 34205 - DNA, 15 bp, Homo sapiens
aggcatggctgggcc

SEQ ID NO: 34206 - DNA, 15 bp, Homo sapiens
aaggcatggctgggc

SEQ ID NO: 34207 - DNA, 15 bp, Homo sapiens
aaaggcatggctggg

SEQ ID NO: 34208 - DNA, 15 bp, Homo sapiens
caaaggcatggctgg

SEQ ID NO: 34209 - DNA, 15 bp, Homo sapiens
ccaaaggcatggctg

SEQ ID NO: 34210 - DNA, 15 bp, Homo sapiens
accaaaggcatggct

SEQ ID NO: 34211 - DNA, 15 bp, Homo sapiens
caccaaaggcatggc

SEQ ID NO: 34212 - DNA, 15 bp, Homo sapiens
ccaccaaaggcatgg

SEQ ID NO: 34213 - DNA, 15 bp, Homo sapiens
gccaccaaaggcatg

SEQ ID NO: 34214 - DNA, 15 bp, Homo sapiens
agccaccaaaggcat

SEQ ID NO: 34215 - DNA, 15 bp, Homo sapiens
aagccaccaaaggca

SEQ ID NO: 34216 - DNA, 15 bp, Homo sapiens
aaagccaccaaaggc

SEQ ID NO: 34217 - DNA, 15 bp, Homo sapiens
aaaagccaccaaagg

SEQ ID NO: 34218 - DNA, 15 bp, Homo sapiens
caaaagccaccaaag

SEQ ID NO: 34219 - DNA, 15 bp, Homo sapiens
acaaaagccaccaaa

SEQ ID NO: 34220 - DNA, 15 bp, Homo sapiens
gacaaaagccaccaa

SEQ ID NO: 34221 - DNA, 15 bp, Homo sapiens
tgacaaaagccacca

SEQ ID NO: 34222 - DNA, 15 bp, Homo sapiens
atgacaaaagccacc

SEQ ID NO: 34223 - DNA, 15 bp, Homo sapiens
aatgacaaaagccac

SEQ ID NO: 34224 - DNA, 15 bp, Homo sapiens
caatgacaaaagcca

SEQ ID NO: 34225 - DNA, 15 bp, Homo sapiens
acaatgacaaaagcc

SEQ ID NO: 34226 - DNA, 15 bp, Homo sapiens
cacaatgacaaaagc

SEQ ID NO: 34227 - DNA, 15 bp, Homo sapiens
ccacaatgacaaaag

SEQ ID NO: 34228 - DNA, 15 bp, Homo sapiens
cccacaatgacaaaa

SEQ ID NO: 34229 - DNA, 15 bp, Homo sapiens
ccccacaatgacaaa

SEQ ID NO: 34230 - DNA, 15 bp, Homo sapiens
tccccacaatgacaa

SEQ ID NO: 34231 - DNA, 15 bp, Homo sapiens
ttccccacaatgaca

SEQ ID NO: 34232 - DNA, 15 bp, Homo sapiens
gttccccacaatgac

SEQ ID NO: 34233 - DNA, 15 bp, Homo sapiens
agttccccacaatga

SEQ ID NO: 34234 - DNA, 15 bp, Homo sapiens
cagttccccacaatg

SEQ ID NO: 34235 - DNA, 15 bp, Homo sapiens
acagttccccacaat

SEQ ID NO: 34236 - DNA, 15 bp, Homo sapiens
tacagttccccacaa

SEQ ID NO: 34237 - DNA, 15 bp, Homo sapiens
ttacagttccccaca

SEQ ID NO: 34238 - DNA, 15 bp, Homo sapiens
attacagttccccac

SEQ ID NO: 34239 - DNA, 15 bp, Homo sapiens
cattacagttcccca

SEQ ID NO: 34240 - DNA, 15 bp, Homo sapiens
ccattacagttcccc

SEQ ID NO: 34241 - DNA, 15 bp, Homo sapiens
accattacagttccc

SEQ ID NO: 34242 - DNA, 15 bp, Homo sapiens
gaccattacagttcc

SEQ ID NO: 34243 - DNA, 15 bp, Homo sapiens
agaccattacagttc

SEQ ID NO: 34244 - DNA, 15 bp, Homo sapiens
gagaccattacagtt

SEQ ID NO: 34245 - DNA, 15 bp, Homo sapiens
agagaccattacagt

SEQ ID NO: 34246 - DNA, 15 bp, Homo sapiens
gagagaccattacag

SEQ ID NO: 34247 - DNA, 15 bp, Homo sapiens
agagagaccattaca

SEQ ID NO: 34248 - DNA, 15 bp, Homo sapiens
cagagagaccattac

SEQ ID NO: 34249 - DNA, 15 bp, Homo sapiens
acagagagaccatta

SEQ ID NO: 34250 - DNA, 15 bp, Homo sapiens
tacagagagaccatt

SEQ ID NO: 34251 - DNA, 15 bp, Homo sapiens
gtacagagagaccat

SEQ ID NO: 34252 - DNA, 15 bp, Homo sapiens
ggtacagagagacca

SEQ ID NO: 34253 - DNA, 15 bp, Homo sapiens
tggtacagagagacc

SEQ ID NO: 34254 - DNA, 15 bp, Homo sapiens
atggtacagagagac

SEQ ID NO: 34255 - DNA, 15 bp, Homo sapiens
gatggtacagagaga

SEQ ID NO: 34256 - DNA, 15 bp, Homo sapiens
ggatggtacagagag

SEQ ID NO: 34257 - DNA, 15 bp, Homo sapiens
aggatggtacagaga

SEQ ID NO: 34258 - DNA, 15 bp, Homo sapiens
taggatggtacagag

SEQ ID NO: 34259 - DNA, 15 bp, Homo sapiens
ataggatggtacaga

SEQ ID NO: 34260 - DNA, 15 bp, Homo sapiens
tataggatggtacag

SEQ ID NO: 34261 - DNA, 15 bp, Homo sapiens
atataggatggtaca

SEQ ID NO: 34262 - DNA, 15 bp, Homo sapiens
gatataggatggtac

SEQ ID NO: 34263 - DNA, 15 bp, Homo sapiens
tgatataggatggta

SEQ ID NO: 34264 - DNA, 15 bp, Homo sapiens
atgatataggatggt

SEQ ID NO: 34265 - DNA, 15 bp, Homo sapiens
gatgatataggatgg

SEQ ID NO: 34266 - DNA, 15 bp, Homo sapiens
ggatgatataggatg

SEQ ID NO: 34267 - DNA, 15 bp, Homo sapiens
tggatgatataggat

SEQ ID NO: 34268 - DNA, 15 bp, Homo sapiens
atggatgatatagga

SEQ ID NO: 34269 - DNA, 15 bp, Homo sapiens
gatggatgatatagg

SEQ ID NO: 34270 - DNA, 15 bp, Homo sapiens
ggatggatgatatag

SEQ ID NO: 34271 - DNA, 15 bp, Homo sapiens
aggatggatgatata

SEQ ID NO: 34272 - DNA, 15 bp, Homo sapiens
aaggatggatgatat

SEQ ID NO: 34273 - DNA, 15 bp, Homo sapiens
aaaggatggatgata

SEQ ID NO: 34274 - DNA, 15 bp, Homo sapiens
taaaggatggatgat

SEQ ID NO: 34275 - DNA, 15 bp, Homo sapiens
ataaaggatggatga

SEQ ID NO: 34276 - DNA, 15 bp, Homo sapiens
aataaaggatggatg

SEQ ID NO: 34277 - DNA, 15 bp, Homo sapiens
gaataaaggatggat

SEQ ID NO: 34278 - DNA, 15 bp, Homo sapiens
tgaataaaggatgga

SEQ ID NO: 34279 - DNA, 15 bp, Homo sapiens
atgaataaaggatgg

SEQ ID NO: 34280 - DNA, 15 bp, Homo sapiens
tatgaataaaggatg

SEQ ID NO: 34281 - DNA, 15 bp, Homo sapiens
ctatgaataaaggat

SEQ ID NO: 34282 - DNA, 15 bp, Homo sapiens
tctatgaataaagga

SEQ ID NO: 34283 - DNA, 15 bp, Homo sapiens
gtctatgaataaagg

SEQ ID NO: 34284 - DNA, 15 bp, Homo sapiens
ggtctatgaataaag

SEQ ID NO: 34285 - DNA, 15 bp, Homo sapiens
gggtctatgaataaa

SEQ ID NO: 34286 - DNA, 15 bp, Homo sapiens
agggtctatgaataa

SEQ ID NO: 34287 - DNA, 15 bp, Homo sapiens
tagggtctatgaata

SEQ ID NO: 34288 - DNA, 15 bp, Homo sapiens
ttagggtctatgaat

SEQ ID NO: 34289 - DNA, 15 bp, Homo sapiens
cttagggtctatgaa

SEQ ID NO: 34290 - DNA, 15 bp, Homo sapiens
gcttagggtctatga

SEQ ID NO: 34291 - DNA, 15 bp, Homo sapiens
agcttagggtctatg

SEQ ID NO: 34292 - DNA, 15 bp, Homo sapiens
tagcttagggtctat

SEQ ID NO: 34293 - DNA, 15 bp, Homo sapiens
atagcttagggtcta

SEQ ID NO: 34294 - DNA, 15 bp, Homo sapiens
tatagcttagggtct

SEQ ID NO: 34295 - DNA, 15 bp, Homo sapiens
ttatagcttagggtc

SEQ ID NO: 34296 - DNA, 15 bp, Homo sapiens
cttatagcttagggt

SEQ ID NO: 34297 - DNA, 15 bp, Homo sapiens
tcttatagcttaggg

SEQ ID NO: 34298 - DNA, 15 bp, Homo sapiens
ttcttatagcttagg

SEQ ID NO: 34299 - DNA, 15 bp, Homo sapiens
cttcttatagcttag

SEQ ID NO: 34300 - DNA, 15 bp, Homo sapiens
tcttcttatagctta

SEQ ID NO: 34301 - DNA, 15 bp, Homo sapiens
ttcttcttatagctt

SEQ ID NO: 34302 - DNA, 15 bp, Homo sapiens
tttcttcttatagct

SEQ ID NO: 34303 - DNA, 15 bp, Homo sapiens
ttttcttcttatagc

SEQ ID NO: 34304 - DNA, 15 bp, Homo sapiens
cttttcttcttatag

SEQ ID NO: 34305 - DNA, 15 bp, Homo sapiens
ccttttcttcttata

SEQ ID NO: 34306 - DNA, 15 bp, Homo sapiens
tccttttcttcttat

SEQ ID NO: 34307 - DNA, 15 bp, Homo sapiens
atccttttcttctta

SEQ ID NO: 34308 - DNA, 15 bp, Homo sapiens
catccttttcttctt

SEQ ID NO: 34309 - DNA, 15 bp, Homo sapiens
tcatccttttcttct

SEQ ID NO: 34310 - DNA, 15 bp, Homo sapiens
ctcatccttttcttc

SEQ ID NO: 34311 - DNA, 15 bp, Homo sapiens
tctcatccttttctt

SEQ ID NO: 34312 - DNA, 15 bp, Homo sapiens
atctcatccttttct

SEQ ID NO: 34313 - DNA, 15 bp, Homo sapiens
aatctcatccttttc

SEQ ID NO: 34314 - DNA, 15 bp, Homo sapiens
taatctcatcctttt

SEQ ID NO: 34315 - DNA, 15 bp, Homo sapiens
ctaatctcatccttt

SEQ ID NO: 34316 - DNA, 15 bp, Homo sapiens
tctaatctcatcctt

SEQ ID NO: 34317 - DNA, 15 bp, Homo sapiens
gtctaatctcatcct

SEQ ID NO: 34318 - DNA, 15 bp, Homo sapiens
agtctaatctcatcc

SEQ ID NO: 34319 - DNA, 15 bp, Homo sapiens
tagtctaatctcatc

SEQ ID NO: 34320 - DNA, 15 bp, Homo sapiens
ttagtctaatctcat

SEQ ID NO: 34321 - DNA, 15 bp, Homo sapiens
tttagtctaatctca

SEQ ID NO: 34322 - DNA, 15 bp, Homo sapiens
atttagtctaatctc

SEQ ID NO: 34323 - DNA, 15 bp, Homo sapiens
catttagtctaatct

SEQ ID NO: 34324 - DNA, 15 bp, Homo sapiens
acatttagtctaatc

SEQ ID NO: 34325 - DNA, 15 bp, Homo sapiens
gacatttagtctaat

SEQ ID NO: 34326 - DNA, 15 bp, Homo sapiens
agacatttagtctaa

SEQ ID NO: 34327 - DNA, 15 bp, Homo sapiens
tagacatttagtcta

SEQ ID NO: 34328 - DNA, 15 bp, Homo sapiens
atagacatttagtct

SEQ ID NO: 34329 - DNA, 15 bp, Homo sapiens
catagacatttagtc

SEQ ID NO: 34330 - DNA, 15 bp, Homo sapiens
acatagacatttagt

SEQ ID NO: 34331 - DNA, 15 bp, Homo sapiens
tacatagacatttag

SEQ ID NO: 34332 - DNA, 15 bp, Homo sapiens
atacatagacattta

SEQ ID NO: 34333 - DNA, 15 bp, Homo sapiens
tatacatagacattt

SEQ ID NO: 34334 - DNA, 15 bp, Homo sapiens
ctatacatagacatt

SEQ ID NO: 34335 - DNA, 15 bp, Homo sapiens
actatacatagacat

SEQ ID NO: 34336 - DNA, 15 bp, Homo sapiens
aactatacatagaca

SEQ ID NO: 34337 - DNA, 15 bp, Homo sapiens
aaactatacatagac

SEQ ID NO: 34338 - DNA, 15 bp, Homo sapiens
taaactatacataga

SEQ ID NO: 34339 - DNA, 15 bp, Homo sapiens
ataaactatacatag

SEQ ID NO: 34340 - DNA, 15 bp, Homo sapiens
aataaactatacata

SEQ ID NO: 34341 - DNA, 15 bp, Homo sapiens
aaataaactatacat

SEQ ID NO: 34342 - DNA, 15 bp, Homo sapiens
aaaataaactataca

SEQ ID NO: 34343 - DNA, 15 bp, Homo sapiens
gaaaataaactatac

SEQ ID NO: 34344 - DNA, 15 bp, Homo sapiens
ggaaaataaactata

SEQ ID NO: 34345 - DNA, 15 bp, Homo sapiens
tggaaaataaactat

SEQ ID NO: 34346 - DNA, 15 bp, Homo sapiens
atggaaaataaacta

SEQ ID NO: 34347 - DNA, 15 bp, Homo sapiens
gatggaaaataaact

SEQ ID NO: 34348 - DNA, 15 bp, Homo sapiens
agatggaaaataaac

SEQ ID NO: 34349 - DNA, 15 bp, Homo sapiens
aagatggaaaataaa

SEQ ID NO: 34350 - DNA, 15 bp, Homo sapiens
caagatggaaaataa

SEQ ID NO: 34351 - DNA, 15 bp, Homo sapiens
ccaagatggaaaata

SEQ ID NO: 34352 - DNA, 15 bp, Homo sapiens
gccaagatggaaaat

SEQ ID NO: 34353 - DNA, 15 bp, Homo sapiens
tgccaagatggaaaa

SEQ ID NO: 34354 - DNA, 15 bp, Homo sapiens
ttgccaagatggaaa

SEQ ID NO: 34355 - DNA, 15 bp, Homo sapiens
attgccaagatggaa

SEQ ID NO: 34356 - DNA, 15 bp, Homo sapiens
tattgccaagatgga

SEQ ID NO: 34357 - DNA, 15 bp, Homo sapiens
atattgccaagatgg

SEQ ID NO: 34358 - DNA, 15 bp, Homo sapiens
tatattgccaagatg

SEQ ID NO: 34359 - DNA, 15 bp, Homo sapiens
atatattgccaagat

SEQ ID NO: 34360 - DNA, 15 bp, Homo sapiens
aatatattgccaaga

SEQ ID NO: 34361 - DNA, 15 bp, Homo sapiens
aaatatattgccaag

SEQ ID NO: 34362 - DNA, 15 bp, Homo sapiens
aaaatatattgccaa

SEQ ID NO: 34363 - DNA, 15 bp, Homo sapiens
aaaaatatattgcca

SEQ ID NO: 34364 - DNA, 15 bp, Homo sapiens
aaaaaatatattgcc

SEQ ID NO: 34365 - DNA, 15 bp, Homo sapiens
taaaaaatatattgc

SEQ ID NO: 34366 - DNA, 15 bp, Homo sapiens
ctaaaaaatatattg

SEQ ID NO: 34367 - DNA, 15 bp, Homo sapiens
actaaaaaatatatt

SEQ ID NO: 34368 - DNA, 15 bp, Homo sapiens
cactaaaaaatatat

SEQ ID NO: 34369 - DNA, 15 bp, Homo sapiens
ccactaaaaaatata

SEQ ID NO: 34370 - DNA, 15 bp, Homo sapiens
cccactaaaaaatat

SEQ ID NO: 34371 - DNA, 15 bp, Homo sapiens
ccccactaaaaaata

SEQ ID NO: 34372 - DNA, 15 bp, Homo sapiens
cccccactaaaaaat

SEQ ID NO: 34373 - DNA, 15 bp, Homo sapiens
acccccactaaaaaa

SEQ ID NO: 34374 - DNA, 15 bp, Homo sapiens
cacccccactaaaaa

SEQ ID NO: 34375 - DNA, 15 bp, Homo sapiens
tcacccccactaaaa

SEQ ID NO: 34376 - DNA, 15 bp, Homo sapiens
ttcacccccactaaa

SEQ ID NO: 34377 - DNA, 15 bp, Homo sapiens
attcacccccactaa

SEQ ID NO: 34378 - DNA, 15 bp, Homo sapiens
tattcacccccacta

SEQ ID NO: 34379 - DNA, 15 bp, Homo sapiens
atattcacccccact

SEQ ID NO: 34380 - DNA, 15 bp, Homo sapiens
tatattcacccccac

SEQ ID NO: 34381 - DNA, 15 bp, Homo sapiens
atatattcaccccca

SEQ ID NO: 34382 - DNA, 15 bp, Homo sapiens
aatatattcaccccc

SEQ ID NO: 34383 - DNA, 15 bp, Homo sapiens
taatatattcacccc

SEQ ID NO: 34384 - DNA, 15 bp, Homo sapiens
ctaatatattcaccc

SEQ ID NO: 34385 - DNA, 15 bp, Homo sapiens
gctaatatattcacc

SEQ ID NO: 34386 - DNA, 15 bp, Homo sapiens
ggctaatatattcac

SEQ ID NO: 34387 - DNA, 15 bp, Homo sapiens
tggctaatatattca

SEQ ID NO: 34388 - DNA, 15 bp, Homo sapiens
ttggctaatatattc

SEQ ID NO: 34389 - DNA, 15 bp, Homo sapiens
tttggctaatatatt

SEQ ID NO: 34390 - DNA, 15 bp, Homo sapiens
ctttggctaatatat

SEQ ID NO: 34391 - DNA, 15 bp, Homo sapiens
cctttggctaatata

SEQ ID NO: 34392 - DNA, 15 bp, Homo sapiens
ccctttggctaatat

SEQ ID NO: 34393 - DNA, 15 bp, Homo sapiens
tccctttggctaata

SEQ ID NO: 34394 - DNA, 15 bp, Homo sapiens
ctccctttggctaat

SEQ ID NO: 34395 - DNA, 15 bp, Homo sapiens
actccctttggctaa

SEQ ID NO: 34396 - DNA, 15 bp, Homo sapiens
aactccctttggcta

SEQ ID NO: 34397 - DNA, 15 bp, Homo sapiens
caactccctttggct

SEQ ID NO: 34398 - DNA, 15 bp, Homo sapiens
ccaactccctttggc

SEQ ID NO: 34399 - DNA, 15 bp, Homo sapiens
accaactccctttgg

SEQ ID NO: 34400 - DNA, 15 bp, Homo sapiens
caccaactccctttg

SEQ ID NO: 34401 - DNA, 15 bp, Homo sapiens
ccaccaactcccttt

SEQ ID NO: 34402 - DNA, 15 bp, Homo sapiens
tccaccaactccctt

SEQ ID NO: 34403 - DNA, 15 bp, Homo sapiens
ttccaccaactccct

SEQ ID NO: 34404 - DNA, 15 bp, Homo sapiens
gttccaccaactccc

SEQ ID NO: 34405 - DNA, 15 bp, Homo sapiens
ggttccaccaactcc

SEQ ID NO: 34406 - DNA, 15 bp, Homo sapiens
gggttccaccaactc

SEQ ID NO: 34407 - DNA, 15 bp, Homo sapiens
tgggttccaccaact

SEQ ID NO: 34408 - DNA, 15 bp, Homo sapiens
ttgggttccaccaac

SEQ ID NO: 34409 - DNA, 15 bp, Homo sapiens
gttgggttccaccaa

SEQ ID NO: 34410 - DNA, 15 bp, Homo sapiens
agttgggttccacca

SEQ ID NO: 34411 - DNA, 15 bp, Homo sapiens
gagttgggttccacc

SEQ ID NO: 34412 - DNA, 15 bp, Homo sapiens
tgagttgggttccac

SEQ ID NO: 34413 - DNA, 15 bp, Homo sapiens
gtgagttgggttcca

SEQ ID NO: 34414 - DNA, 15 bp, Homo sapiens
agtgagttgggttcc

SEQ ID NO: 34415 - DNA, 15 bp, Homo sapiens
gagtgagttgggttc

SEQ ID NO: 34416 - DNA, 15 bp, Homo sapiens
agagtgagttgggtt

SEQ ID NO: 34417 - DNA, 15 bp, Homo sapiens
tagagtgagttgggt

SEQ ID NO: 34418 - DNA, 15 bp, Homo sapiens
gtagagtgagttggg

SEQ ID NO: 34419 - DNA, 15 bp, Homo sapiens
ggtagagtgagttgg

SEQ ID NO: 34420 - DNA, 15 bp, Homo sapiens
gggtagagtgagttg

SEQ ID NO: 34421 - DNA, 15 bp, Homo sapiens
ggggtagagtgagtt

SEQ ID NO: 34422 - DNA, 15 bp, Homo sapiens
aggggtagagtgagt

SEQ ID NO: 34423 - DNA, 15 bp, Homo sapiens
caggggtagagtgag

SEQ ID NO: 34424 - DNA, 15 bp, Homo sapiens
gcaggggtagagtga

SEQ ID NO: 34425 - DNA, 15 bp, Homo sapiens
agcaggggtagagtg

SEQ ID NO: 34426 - DNA, 15 bp, Homo sapiens
gagcaggggtagagt

SEQ ID NO: 34427 - DNA, 15 bp, Homo sapiens
ggagcaggggtagag

SEQ ID NO: 34428 - DNA, 15 bp, Homo sapiens
gggagcaggggtaga

SEQ ID NO: 34429 - DNA, 15 bp, Homo sapiens
agggagcaggggtag

SEQ ID NO: 34430 - DNA, 15 bp, Homo sapiens
cagggagcaggggta

SEQ ID NO: 34431 - DNA, 15 bp, Homo sapiens
gcagggagcaggggt

SEQ ID NO: 34432 - DNA, 15 bp, Homo sapiens
tgcagggagcagggg

SEQ ID NO: 34433 - DNA, 15 bp, Homo sapiens
ctgcagggagcaggg

SEQ ID NO: 34434 - DNA, 15 bp, Homo sapiens
cctgcagggagcagg

SEQ ID NO: 34435 - DNA, 15 bp, Homo sapiens
gcctgcagggagcag

SEQ ID NO: 34436 - DNA, 15 bp, Homo sapiens
ggcctgcagggagca

SEQ ID NO: 34437 - DNA, 15 bp, Homo sapiens
aggcctgcagggagc

SEQ ID NO: 34438 - DNA, 15 bp, Homo sapiens
gaggcctgcagggag

SEQ ID NO: 34439 - DNA, 15 bp, Homo sapiens
agaggcctgcaggga

SEQ ID NO: 34440 - DNA, 15 bp, Homo sapiens
gagaggcctgcaggg

SEQ ID NO: 34441 - DNA, 15 bp, Homo sapiens
cgagaggcctgcagg

SEQ ID NO: 34442 - DNA, 15 bp, Homo sapiens
gcgagaggcctgcag

SEQ ID NO: 34443 - DNA, 15 bp, Homo sapiens
agcgagaggcctgca

SEQ ID NO: 34444 - DNA, 15 bp, Homo sapiens
cagcgagaggcctgc

SEQ ID NO: 34445 - DNA, 15 bp, Homo sapiens
acagcgagaggcctg

SEQ ID NO: 34446 - DNA, 15 bp, Homo sapiens
cacagcgagaggcct

SEQ ID NO: 34447 - DNA, 15 bp, Homo sapiens
ccacagcgagaggcc

SEQ ID NO: 34448 - DNA, 15 bp, Homo sapiens
cccacagcgagaggc

SEQ ID NO: 34449 - DNA, 15 bp, Homo sapiens
acccacagcgagagg

SEQ ID NO: 34450 - DNA, 15 bp, Homo sapiens
tacccacagcgagag

SEQ ID NO: 34451 - DNA, 15 bp, Homo sapiens
ctacccacagcgaga

SEQ ID NO: 34452 - DNA, 15 bp, Homo sapiens
actacccacagcgag

SEQ ID NO: 34453 - DNA, 15 bp, Homo sapiens
aactacccacagcga

SEQ ID NO: 34454 - DNA, 15 bp, Homo sapiens
taactacccacagcg

SEQ ID NO: 34455 - DNA, 15 bp, Homo sapiens
ataactacccacagc

SEQ ID NO: 34456 - DNA, 15 bp, Homo sapiens
gataactacccacag

SEQ ID NO: 34457 - DNA, 15 bp, Homo sapiens
agataactacccaca

SEQ ID NO: 34458 - DNA, 15 bp, Homo sapiens
cagataactacccac

SEQ ID NO: 34459 - DNA, 15 bp, Homo sapiens
tcagataactaccca

SEQ ID NO: 34460 - DNA, 15 bp, Homo sapiens
gtcagataactaccc

SEQ ID NO: 34461 - DNA, 15 bp, Homo sapiens
agtcagataactacc

SEQ ID NO: 34462 - DNA, 15 bp, Homo sapiens
cagtcagataactac

SEQ ID NO: 34463 - DNA, 15 bp, Homo sapiens
ccagtcagataacta

SEQ ID NO: 34464 - DNA, 15 bp, Homo sapiens
gccagtcagataact

SEQ ID NO: 34465 - DNA, 15 bp, Homo sapiens
agccagtcagataac

SEQ ID NO: 34466 - DNA, 15 bp, Homo sapiens
gagccagtcagataa

SEQ ID NO: 34467 - DNA, 15 bp, Homo sapiens
ggagccagtcagata

SEQ ID NO: 34468 - DNA, 15 bp, Homo sapiens
aggagccagtcagat

SEQ ID NO: 34469 - DNA, 15 bp, Homo sapiens
gaggagccagtcaga

SEQ ID NO: 34470 - DNA, 15 bp, Homo sapiens
agaggagccagtcag

SEQ ID NO: 34471 - DNA, 15 bp, Homo sapiens
aagaggagccagtca

SEQ ID NO: 34472 - DNA, 15 bp, Homo sapiens
aaagaggagccagtc

SEQ ID NO: 34473 - DNA, 15 bp, Homo sapiens
gaaagaggagccagt

SEQ ID NO: 34474 - DNA, 15 bp, Homo sapiens
tgaaagaggagccag

SEQ ID NO: 34475 - DNA, 15 bp, Homo sapiens
atgaaagaggagcca

SEQ ID NO: 34476 - DNA, 15 bp, Homo sapiens
aatgaaagaggagcc

SEQ ID NO: 34477 - DNA, 15 bp, Homo sapiens
caatgaaagaggagc

SEQ ID NO: 34478 - DNA, 15 bp, Homo sapiens
gcaatgaaagaggag

SEQ ID NO: 34479 - DNA, 15 bp, Homo sapiens
agcaatgaaagagga

SEQ ID NO: 34480 - DNA, 15 bp, Homo sapiens
tagcaatgaaagagg

SEQ ID NO: 34481 - DNA, 15 bp, Homo sapiens
atagcaatgaaagag

SEQ ID NO: 34482 - DNA, 15 bp, Homo sapiens
gatagcaatgaaaga

SEQ ID NO: 34483 - DNA, 15 bp, Homo sapiens
agatagcaatgaaag

SEQ ID NO: 34484 - DNA, 15 bp, Homo sapiens
aagatagcaatgaaa

SEQ ID NO: 34485 - DNA, 15 bp, Homo sapiens
aaagatagcaatgaa

SEQ ID NO: 34486 - DNA, 15 bp, Homo sapiens
caaagatagcaatga

SEQ ID NO: 34487 - DNA, 15 bp, Homo sapiens
gcaaagatagcaatg

SEQ ID NO: 34488 - DNA, 15 bp, Homo sapiens
ggcaaagatagcaat

SEQ ID NO: 34489 - DNA, 15 bp, Homo sapiens
tggcaaagatagcaa

SEQ ID NO: 34490 - DNA, 15 bp, Homo sapiens
ttggcaaagatagca

SEQ ID NO: 34491 - DNA, 15 bp, Homo sapiens
attggcaaagatagc

SEQ ID NO: 34492 - DNA, 15 bp, Homo sapiens
tattggcaaagatag

SEQ ID NO: 34493 - DNA, 15 bp, Homo sapiens
ttattggcaaagata

SEQ ID NO: 34494 - DNA, 15 bp, Homo sapiens
tttattggcaaagat

SEQ ID NO: 34495 - DNA, 15 bp, Homo sapiens
atttattggcaaaga

SEQ ID NO: 34496 - DNA, 15 bp, Homo sapiens
tatttattggcaaag

SEQ ID NO: 34497 - DNA, 15 bp, Homo sapiens
gtatttattggcaaa

SEQ ID NO: 34498 - DNA, 15 bp, Homo sapiens
tgtatttattggcaa

SEQ ID NO: 34499 - DNA, 15 bp, Homo sapiens
ctgtatttattggca

SEQ ID NO: 34500 - DNA, 15 bp, Homo sapiens
tctgtatttattggc

SEQ ID NO: 34501 - DNA, 15 bp, Homo sapiens
atctgtatttattgg

SEQ ID NO: 34502 - DNA, 15 bp, Homo sapiens
tatctgtatttattg

SEQ ID NO: 34503 - DNA, 15 bp, Homo sapiens
ctatctgtatttatt

SEQ ID NO: 34504 - DNA, 15 bp, Homo sapiens
tctatctgtatttat

SEQ ID NO: 34505 - DNA, 15 bp, Homo sapiens
ctctatctgtattta

SEQ ID NO: 34506 - DNA, 15 bp, Homo sapiens
tctctatctgtattt

SEQ ID NO: 34507 - DNA, 15 bp, Homo sapiens
ttctctatctgtatt

SEQ ID NO: 34508 - DNA, 15 bp, Homo sapiens
cttctctatctgtat

SEQ ID NO: 34509 - DNA, 15 bp, Homo sapiens
acttctctatctgta

SEQ ID NO: 34510 - DNA, 15 bp, Homo sapiens
aacttctctatctgt

SEQ ID NO: 34511 - DNA, 15 bp, Homo sapiens
aaacttctctatctg

SEQ ID NO: 34512 - DNA, 15 bp, Homo sapiens
taaacttctctatct

SEQ ID NO: 34513 - DNA, 15 bp, Homo sapiens
gtaaacttctctatc

SEQ ID NO: 34514 - DNA, 15 bp, Homo sapiens
agtaaacttctctat

SEQ ID NO: 34515 - DNA, 15 bp, Homo sapiens
aagtaaacttctcta

SEQ ID NO: 34516 - DNA, 15 bp, Homo sapiens
gaagtaaacttctct

SEQ ID NO: 34517 - DNA, 15 bp, Homo sapiens
ggaagtaaacttctc

SEQ ID NO: 34518 - DNA, 15 bp, Homo sapiens
tggaagtaaacttct

SEQ ID NO: 34519 - DNA, 15 bp, Homo sapiens
atggaagtaaacttc

SEQ ID NO: 34520 - DNA, 15 bp, Homo sapiens
gatggaagtaaactt

SEQ ID NO: 34521 - DNA, 15 bp, Homo sapiens
cgatggaagtaaact

SEQ ID NO: 34522 - DNA, 15 bp, Homo sapiens
ccgatggaagtaaac

SEQ ID NO: 34523 - DNA, 15 bp, Homo sapiens
cccgatggaagtaaa

SEQ ID NO: 34524 - DNA, 15 bp, Homo sapiens
tcccgatggaagtaa

SEQ ID NO: 34525 - DNA, 15 bp, Homo sapiens
gtcccgatggaagta

SEQ ID NO: 34526 - DNA, 15 bp, Homo sapiens
tgtcccgatggaagt

SEQ ID NO: 34527 - DNA, 15 bp, Homo sapiens
gtgtcccgatggaag

SEQ ID NO: 34528 - DNA, 15 bp, Homo sapiens
tgtgtcccgatggaa

SEQ ID NO: 34529 - DNA, 15 bp, Homo sapiens
atgtgtcccgatgga

SEQ ID NO: 34530 - DNA, 15 bp, Homo sapiens
catgtgtcccgatgg

SEQ ID NO: 34531 - DNA, 15 bp, Homo sapiens
gcatgtgtcccgatg

SEQ ID NO: 34532 - DNA, 15 bp, Homo sapiens
tgcatgtgtcccgat

SEQ ID NO: 34533 - DNA, 15 bp, Homo sapiens
atgcatgtgtcccga

SEQ ID NO: 34534 - DNA, 15 bp, Homo sapiens
gatgcatgtgtcccg

SEQ ID NO: 34535 - DNA, 15 bp, Homo sapiens
agatgcatgtgtccc

SEQ ID NO: 34536 - DNA, 15 bp, Homo sapiens
aagatgcatgtgtcc

SEQ ID NO: 34537 - DNA, 15 bp, Homo sapiens
aaagatgcatgtgtc

SEQ ID NO: 34538 - DNA, 15 bp, Homo sapiens
aaaagatgcatgtgt

SEQ ID NO: 34539 - DNA, 15 bp, Homo sapiens
gaaaagatgcatgtg

SEQ ID NO: 34540 - DNA, 15 bp, Homo sapiens
agaaaagatgcatgt

SEQ ID NO: 34541 - DNA, 15 bp, Homo sapiens
tagaaaagatgcatg

SEQ ID NO: 34542 - DNA, 15 bp, Homo sapiens
ctagaaaagatgcat

SEQ ID NO: 34543 - DNA, 15 bp, Homo sapiens
actagaaaagatgca

SEQ ID NO: 34544 - DNA, 15 bp, Homo sapiens
aactagaaaagatgc

SEQ ID NO: 34545 - DNA, 15 bp, Homo sapiens
taactagaaaagatg

SEQ ID NO: 34546 - DNA, 15 bp, Homo sapiens
gtaactagaaaagat

SEQ ID NO: 34547 - DNA, 15 bp, Homo sapiens
agtaactagaaaaga

SEQ ID NO: 34548 - DNA, 15 bp, Homo sapiens
aagtaactagaaaag

SEQ ID NO: 34549 - DNA, 15 bp, Homo sapiens
gaagtaactagaaaa

SEQ ID NO: 34550 - DNA, 15 bp, Homo sapiens
ggaagtaactagaaa

SEQ ID NO: 34551 - DNA, 15 bp, Homo sapiens
gggaagtaactagaa

SEQ ID NO: 34552 - DNA, 15 bp, Homo sapiens
tgggaagtaactaga

SEQ ID NO: 34553 - DNA, 15 bp, Homo sapiens
ttgggaagtaactag

SEQ ID NO: 34554 - DNA, 15 bp, Homo sapiens
tttgggaagtaacta

SEQ ID NO: 34555 - DNA, 15 bp, Homo sapiens
atttgggaagtaact

SEQ ID NO: 34556 - DNA, 15 bp, Homo sapiens
catttgggaagtaac

SEQ ID NO: 34557 - DNA, 15 bp, Homo sapiens
acatttgggaagtaa

SEQ ID NO: 34558 - DNA, 15 bp, Homo sapiens
gacatttgggaagta

SEQ ID NO: 34559 - DNA, 15 bp, Homo sapiens
agacatttgggaagt

SEQ ID NO: 34560 - DNA, 15 bp, Homo sapiens
cagacatttgggaag

SEQ ID NO: 34561 - DNA, 15 bp, Homo sapiens
tcagacatttgggaa

SEQ ID NO: 34562 - DNA, 15 bp, Homo sapiens
ttcagacatttggga

SEQ ID NO: 34563 - DNA, 15 bp, Homo sapiens
tttcagacatttggg

SEQ ID NO: 34564 - DNA, 15 bp, Homo sapiens
ttttcagacatttgg

SEQ ID NO: 34565 - DNA, 15 bp, Homo sapiens
attttcagacatttg

SEQ ID NO: 34566 - DNA, 15 bp, Homo sapiens
aattttcagacattt

SEQ ID NO: 34567 - DNA, 15 bp, Homo sapiens
taattttcagacatt

SEQ ID NO: 34568 - DNA, 15 bp, Homo sapiens
ataattttcagacat

SEQ ID NO: 34569 - DNA, 15 bp, Homo sapiens
aataattttcagaca

SEQ ID NO: 34570 - DNA, 15 bp, Homo sapiens
caataattttcagac

SEQ ID NO: 34571 - DNA, 15 bp, Homo sapiens
tcaataattttcaga

SEQ ID NO: 34572 - DNA, 15 bp, Homo sapiens
atcaataattttcag

SEQ ID NO: 34573 - DNA, 15 bp, Homo sapiens
tatcaataattttca

SEQ ID NO: 34574 - DNA, 15 bp, Homo sapiens
ttatcaataattttc

SEQ ID NO: 34575 - DNA, 15 bp, Homo sapiens
tttatcaataatttt

SEQ ID NO: 34576 - DNA, 15 bp, Homo sapiens
atttatcaataattt

SEQ ID NO: 34577 - DNA, 15 bp, Homo sapiens
gatttatcaataatt

SEQ ID NO: 34578 - DNA, 15 bp, Homo sapiens
tgatttatcaataat

SEQ ID NO: 34579 - DNA, 15 bp, Homo sapiens
atgatttatcaataa

SEQ ID NO: 34580 - DNA, 15 bp, Homo sapiens
catgatttatcaata

SEQ ID NO: 34581 - DNA, 15 bp, Homo sapiens
tcatgatttatcaat

SEQ ID NO: 34582 - DNA, 15 bp, Homo sapiens
ttcatgatttatcaa

SEQ ID NO: 34583 - DNA, 15 bp, Homo sapiens
attcatgatttatca

SEQ ID NO: 34584 - DNA, 15 bp, Homo sapiens
gattcatgatttatc

SEQ ID NO: 34585 - DNA, 15 bp, Homo sapiens
tgattcatgatttat

SEQ ID NO: 34586 - DNA, 15 bp, Homo sapiens
atgattcatgattta

SEQ ID NO: 34587 - DNA, 15 bp, Homo sapiens
aatgattcatgattt

SEQ ID NO: 34588 - DNA, 15 bp, Homo sapiens
aaatgattcatgatt

SEQ ID NO: 34589 - DNA, 15 bp, Homo sapiens
aaaatgattcatgat

SEQ ID NO: 34590 - DNA, 15 bp, Homo sapiens
gaaaatgattcatga

SEQ ID NO: 34591 - DNA, 15 bp, Homo sapiens
agaaaatgattcatg

SEQ ID NO: 34592 - DNA, 15 bp, Homo sapiens
aagaaaatgattcat

SEQ ID NO: 34593 - DNA, 15 bp, Homo sapiens
taagaaaatgattca

SEQ ID NO: 34594 - DNA, 15 bp, Homo sapiens
ttaagaaaatgattc

SEQ ID NO: 34595 - DNA, 15 bp, Homo sapiens
tttaagaaaatgatt

SEQ ID NO: 34596 - DNA, 15 bp, Homo sapiens
gtttaagaaaatgat

SEQ ID NO: 34597 - DNA, 15 bp, Homo sapiens
ggtttaagaaaatga

SEQ ID NO: 34598 - DNA, 15 bp, Homo sapiens
aggtttaagaaaatg

SEQ ID NO: 34599 - DNA, 15 bp, Homo sapiens
caggtttaagaaaat

SEQ ID NO: 34600 - DNA, 15 bp, Homo sapiens
tcaggtttaagaaaa

SEQ ID NO: 34601 - DNA, 15 bp, Homo sapiens
atcaggtttaagaaa

SEQ ID NO: 34602 - DNA, 15 bp, Homo sapiens
gatcaggtttaagaa

SEQ ID NO: 34603 - DNA, 15 bp, Homo sapiens
agatcaggtttaaga

SEQ ID NO: 34604 - DNA, 15 bp, Homo sapiens
aagatcaggtttaag

SEQ ID NO: 34605 - DNA, 15 bp, Homo sapiens
gaagatcaggtttaa

SEQ ID NO: 34606 - DNA, 15 bp, Homo sapiens
ggaagatcaggttta

SEQ ID NO: 34607 - DNA, 15 bp, Homo sapiens
gggaagatcaggttt

SEQ ID NO: 34608 - DNA, 15 bp, Homo sapiens
agggaagatcaggtt

SEQ ID NO: 34609 - DNA, 15 bp, Homo sapiens
gagggaagatcaggt

SEQ ID NO: 34610 - DNA, 15 bp, Homo sapiens
agagggaagatcagg

SEQ ID NO: 34611 - DNA, 15 bp, Homo sapiens
cagagggaagatcag

SEQ ID NO: 34612 - DNA, 15 bp, Homo sapiens
acagagggaagatca

SEQ ID NO: 34613 - DNA, 15 bp, Homo sapiens
aacagagggaagatc

SEQ ID NO: 34614 - DNA, 15 bp, Homo sapiens
aaacagagggaagat

SEQ ID NO: 34615 - DNA, 15 bp, Homo sapiens
aaaacagagggaaga

SEQ ID NO: 34616 - DNA, 15 bp, Homo sapiens
aaaaacagagggaag

SEQ ID NO: 34617 - DNA, 15 bp, Homo sapiens
taaaaacagagggaa

SEQ ID NO: 34618 - DNA, 15 bp, Homo sapiens
ttaaaaacagaggga

SEQ ID NO: 34619 - DNA, 15 bp, Homo sapiens
tttaaaaacagaggg

SEQ ID NO: 34620 - DNA, 15 bp, Homo sapiens
gtttaaaaacagagg

SEQ ID NO: 34621 - DNA, 15 bp, Homo sapiens
agtttaaaaacagag

SEQ ID NO: 34622 - DNA, 15 bp, Homo sapiens
gagtttaaaaacaga

SEQ ID NO: 34623 - DNA, 15 bp, Homo sapiens
tgagtttaaaaacag

SEQ ID NO: 34624 - DNA, 15 bp, Homo sapiens
gtgagtttaaaaaca

SEQ ID NO: 34625 - DNA, 15 bp, Homo sapiens
tgtgagtttaaaaac

SEQ ID NO: 34626 - DNA, 15 bp, Homo sapiens
atgtgagtttaaaaa

SEQ ID NO: 34627 - DNA, 15 bp, Homo sapiens
catgtgagtttaaaa

SEQ ID NO: 34628 - DNA, 15 bp, Homo sapiens
acatgtgagtttaaa

SEQ ID NO: 34629 - DNA, 15 bp, Homo sapiens
cacatgtgagtttaa

SEQ ID NO: 34630 - DNA, 15 bp, Homo sapiens
tcacatgtgagttta

SEQ ID NO: 34631 - DNA, 15 bp, Homo sapiens
ctcacatgtgagttt

SEQ ID NO: 34632 - DNA, 15 bp, Homo sapiens
cctcacatgtgagtt

SEQ ID NO: 34633 - DNA, 15 bp, Homo sapiens
acctcacatgtgagt

SEQ ID NO: 34634 - DNA, 15 bp, Homo sapiens
cacctcacatgtgag

SEQ ID NO: 34635 - DNA, 15 bp, Homo sapiens
tcacctcacatgtga

SEQ ID NO: 34636 - DNA, 15 bp, Homo sapiens
atcacctcacatgtg

SEQ ID NO: 34637 - DNA, 15 bp, Homo sapiens
gatcacctcacatgt

SEQ ID NO: 34638 - DNA, 15 bp, Homo sapiens
agatcacctcacatg

SEQ ID NO: 34639 - DNA, 15 bp, Homo sapiens
cagatcacctcacat

SEQ ID NO: 34640 - DNA, 15 bp, Homo sapiens
tcagatcacctcaca

SEQ ID NO: 34641 - DNA, 15 bp, Homo sapiens
atcagatcacctcac

SEQ ID NO: 34642 - DNA, 15 bp, Homo sapiens
gatcagatcacctca

SEQ ID NO: 34643 - DNA, 15 bp, Homo sapiens
ggatcagatcacctc

SEQ ID NO: 34644 - DNA, 15 bp, Homo sapiens
tggatcagatcacct

SEQ ID NO: 34645 - DNA, 15 bp, Homo sapiens
ttggatcagatcacc

SEQ ID NO: 34646 - DNA, 15 bp, Homo sapiens
tttggatcagatcac

SEQ ID NO: 34647 - DNA, 15 bp, Homo sapiens
ttttggatcagatca

SEQ ID NO: 34648 - DNA, 15 bp, Homo sapiens
attttggatcagatc

SEQ ID NO: 34649 - DNA, 15 bp, Homo sapiens
cattttggatcagat

SEQ ID NO: 34650 - DNA, 15 bp, Homo sapiens
tcattttggatcaga

SEQ ID NO: 34651 - DNA, 15 bp, Homo sapiens
ttcattttggatcag

SEQ ID NO: 34652 - DNA, 15 bp, Homo sapiens
tttcattttggatca

SEQ ID NO: 34653 - DNA, 15 bp, Homo sapiens
ctttcattttggatc

SEQ ID NO: 34654 - DNA, 15 bp, Homo sapiens
gctttcattttggat

SEQ ID NO: 34655 - DNA, 15 bp, Homo sapiens
agctttcattttgga

SEQ ID NO: 34656 - DNA, 15 bp, Homo sapiens
cagctttcattttgg

SEQ ID NO: 34657 - DNA, 15 bp, Homo sapiens
tcagctttcattttg

SEQ ID NO: 34658 - DNA, 15 bp, Homo sapiens
gtcagctttcatttt

SEQ ID NO: 34659 - DNA, 15 bp, Homo sapiens
agtcagctttcattt

SEQ ID NO: 34660 - DNA, 15 bp, Homo sapiens
aagtcagctttcatt

SEQ ID NO: 34661 - DNA, 15 bp, Homo sapiens
aaagtcagctttcat

SEQ ID NO: 34662 - DNA, 15 bp, Homo sapiens
aaaagtcagctttca

SEQ ID NO: 34663 - DNA, 15 bp, Homo sapiens
caaaagtcagctttc

SEQ ID NO: 34664 - DNA, 15 bp, Homo sapiens
ccaaaagtcagcttt

SEQ ID NO: 34665 - DNA, 15 bp, Homo sapiens
gccaaaagtcagctt

SEQ ID NO: 34666 - DNA, 15 bp, Homo sapiens
cgccaaaagtcagct

SEQ ID NO: 34667 - DNA, 15 bp, Homo sapiens
acgccaaaagtcagc

SEQ ID NO: 34668 - DNA, 15 bp, Homo sapiens
tacgccaaaagtcag

SEQ ID NO: 34669 - DNA, 15 bp, Homo sapiens
ttacgccaaaagtca

SEQ ID NO: 34670 - DNA, 15 bp, Homo sapiens
gttacgccaaaagtc

SEQ ID NO: 34671 - DNA, 15 bp, Homo sapiens
tgttacgccaaaagt

SEQ ID NO: 34672 - DNA, 15 bp, Homo sapiens
ctgttacgccaaaag

SEQ ID NO: 34673 - DNA, 15 bp, Homo sapiens
cctgttacgccaaaa

SEQ ID NO: 34674 - DNA, 15 bp, Homo sapiens
ccctgttacgccaaa

SEQ ID NO: 34675 - DNA, 15 bp, Homo sapiens
tccctgttacgccaa

SEQ ID NO: 34676 - DNA, 15 bp, Homo sapiens
atccctgttacgcca

SEQ ID NO: 34677 - DNA, 15 bp, Homo sapiens
aatccctgttacgcc

SEQ ID NO: 34678 - DNA, 15 bp, Homo sapiens
gaatccctgttacgc

SEQ ID NO: 34679 - DNA, 15 bp, Homo sapiens
tgaatccctgttacg

SEQ ID NO: 34680 - DNA, 15 bp, Homo sapiens
ttgaatccctgttac

SEQ ID NO: 34681 - DNA, 15 bp, Homo sapiens
attgaatccctgtta

SEQ ID NO: 34682 - DNA, 15 bp, Homo sapiens
aattgaatccctgtt

SEQ ID NO: 34683 - DNA, 15 bp, Homo sapiens
taattgaatccctgt

SEQ ID NO: 34684 - DNA, 15 bp, Homo sapiens
ttaattgaatccctg

SEQ ID NO: 34685 - DNA, 15 bp, Homo sapiens
attaattgaatccct

SEQ ID NO: 34686 - DNA, 15 bp, Homo sapiens
gattaattgaatccc

SEQ ID NO: 34687 - DNA, 15 bp, Homo sapiens
ggattaattgaatcc

SEQ ID NO: 34688 - DNA, 15 bp, Homo sapiens
aggattaattgaatc

SEQ ID NO: 34689 - DNA, 15 bp, Homo sapiens
taggattaattgaat

SEQ ID NO: 34690 - DNA, 15 bp, Homo sapiens
ctaggattaattgaa

SEQ ID NO: 34691 - DNA, 15 bp, Homo sapiens
tctaggattaattga

SEQ ID NO: 34692 - DNA, 15 bp, Homo sapiens
gtctaggattaattg

SEQ ID NO: 34693 - DNA, 15 bp, Homo sapiens
tgtctaggattaatt

SEQ ID NO: 34694 - DNA, 15 bp, Homo sapiens
atgtctaggattaat

SEQ ID NO: 34695 - DNA, 15 bp, Homo sapiens
catgtctaggattaa

SEQ ID NO: 34696 - DNA, 15 bp, Homo sapiens
ccatgtctaggatta

SEQ ID NO: 34697 - DNA, 15 bp, Homo sapiens
tccatgtctaggatt

SEQ ID NO: 34698 - DNA, 15 bp, Homo sapiens
ttccatgtctaggat

SEQ ID NO: 34699 - DNA, 15 bp, Homo sapiens
tttccatgtctagga

SEQ ID NO: 34700 - DNA, 15 bp, Homo sapiens
gtttccatgtctagg

SEQ ID NO: 34701 - DNA, 15 bp, Homo sapiens
tgtttccatgtctag

SEQ ID NO: 34702 - DNA, 15 bp, Homo sapiens
atgtttccatgtcta

SEQ ID NO: 34703 - DNA, 15 bp, Homo sapiens
catgtttccatgtct

SEQ ID NO: 34704 - DNA, 15 bp, Homo sapiens
ccatgtttccatgtc

SEQ ID NO: 34705 - DNA, 15 bp, Homo sapiens
tccatgtttccatgt

SEQ ID NO: 34706 - DNA, 15 bp, Homo sapiens
ttccatgtttccatg

SEQ ID NO: 34707 - DNA, 15 bp, Homo sapiens
cttccatgtttccat

SEQ ID NO: 34708 - DNA, 15 bp, Homo sapiens
tcttccatgtttcca

SEQ ID NO: 34709 - DNA, 15 bp, Homo sapiens
ttcttccatgtttcc

SEQ ID NO: 34710 - DNA, 15 bp, Homo sapiens
attcttccatgtttc

SEQ ID NO: 34711 - DNA, 15 bp, Homo sapiens
gattcttccatgttt

SEQ ID NO: 34712 - DNA, 15 bp, Homo sapiens
agattcttccatgtt

SEQ ID NO: 34713 - DNA, 15 bp, Homo sapiens
cagattcttccatgt

SEQ ID NO: 34714 - DNA, 15 bp, Homo sapiens
tcagattcttccatg

SEQ ID NO: 34715 - DNA, 15 bp, Homo sapiens
gtcagattcttccat

SEQ ID NO: 34716 - DNA, 15 bp, Homo sapiens
tgtcagattcttcca

SEQ ID NO: 34717 - DNA, 15 bp, Homo sapiens
ctgtcagattcttcc

SEQ ID NO: 34718 - DNA, 15 bp, Homo sapiens
cctgtcagattcttc

SEQ ID NO: 34719 - DNA, 15 bp, Homo sapiens
tcctgtcagattctt

SEQ ID NO: 34720 - DNA, 15 bp, Homo sapiens
atcctgtcagattct

SEQ ID NO: 34721 - DNA, 15 bp, Homo sapiens
aatcctgtcagattc

SEQ ID NO: 34722 - DNA, 15 bp, Homo sapiens
gaatcctgtcagatt

SEQ ID NO: 34723 - DNA, 15 bp, Homo sapiens
tgaatcctgtcagat

SEQ ID NO: 34724 - DNA, 15 bp, Homo sapiens
ctgaatcctgtcaga

SEQ ID NO: 34725 - DNA, 15 bp, Homo sapiens
actgaatcctgtcag

SEQ ID NO: 34726 - DNA, 15 bp, Homo sapiens
aactgaatcctgtca

SEQ ID NO: 34727 - DNA, 15 bp, Homo sapiens
aaactgaatcctgtc

SEQ ID NO: 34728 - DNA, 15 bp, Homo sapiens
gaaactgaatcctgt

SEQ ID NO: 34729 - DNA, 15 bp, Homo sapiens
agaaactgaatcctg

SEQ ID NO: 34730 - DNA, 15 bp, Homo sapiens
tagaaactgaatcct

SEQ ID NO: 34731 - DNA, 15 bp, Homo sapiens
ttagaaactgaatcc

SEQ ID NO: 34732 - DNA, 15 bp, Homo sapiens
gttagaaactgaatc

SEQ ID NO: 34733 - DNA, 15 bp, Homo sapiens
ggttagaaactgaat

SEQ ID NO: 34734 - DNA, 15 bp, Homo sapiens
cggttagaaactgaa

SEQ ID NO: 34735 - DNA, 15 bp, Homo sapiens
tcggttagaaactga

SEQ ID NO: 34736 - DNA, 15 bp, Homo sapiens
ttcggttagaaactg

SEQ ID NO: 34737 - DNA, 15 bp, Homo sapiens
cttcggttagaaact

SEQ ID NO: 34738 - DNA, 15 bp, Homo sapiens
ccttcggttagaaac

SEQ ID NO: 34739 - DNA, 15 bp, Homo sapiens
cccttcggttagaaa

SEQ ID NO: 34740 - DNA, 15 bp, Homo sapiens
gcccttcggttagaa

SEQ ID NO: 34741 - DNA, 15 bp, Homo sapiens
ggcccttcggttaga

SEQ ID NO: 34742 - DNA, 15 bp, Homo sapiens
gggcccttcggttag

SEQ ID NO: 34743 - DNA, 15 bp, Homo sapiens
ggggcccttcggtta

SEQ ID NO: 34744 - DNA, 15 bp, Homo sapiens
aggggcccttcggtt

SEQ ID NO: 34745 - DNA, 15 bp, Homo sapiens
caggggcccttcggt

SEQ ID NO: 34746 - DNA, 15 bp, Homo sapiens
acaggggcccttcgg

SEQ ID NO: 34747 - DNA, 15 bp, Homo sapiens
aacaggggcccttcg

SEQ ID NO: 34748 - DNA, 15 bp, Homo sapiens
aaacaggggcccttc

SEQ ID NO: 34749 - DNA, 15 bp, Homo sapiens
aaaacaggggccctt

SEQ ID NO: 34750 - DNA, 15 bp, Homo sapiens
caaaacaggggccct

SEQ ID NO: 34751 - DNA, 15 bp, Homo sapiens
tcaaaacaggggccc

SEQ ID NO: 34752 - DNA, 15 bp, Homo sapiens
atcaaaacaggggcc

SEQ ID NO: 34753 - DNA, 15 bp, Homo sapiens
aatcaaaacaggggc

SEQ ID NO: 34754 - DNA, 15 bp, Homo sapiens
gaatcaaaacagggg

SEQ ID NO: 34755 - DNA, 15 bp, Homo sapiens
ggaatcaaaacaggg

SEQ ID NO: 34756 - DNA, 15 bp, Homo sapiens
gggaatcaaaacagg

SEQ ID NO: 34757 - DNA, 15 bp, Homo sapiens
tgggaatcaaaacag

SEQ ID NO: 34758 - DNA, 15 bp, Homo sapiens
ttgggaatcaaaaca

SEQ ID NO: 34759 - DNA, 15 bp, Homo sapiens
tttgggaatcaaaac

SEQ ID NO: 34760 - DNA, 15 bp, Homo sapiens
atttgggaatcaaaa

SEQ ID NO: 34761 - DNA, 15 bp, Homo sapiens
tatttgggaatcaaa

SEQ ID NO: 34762 - DNA, 15 bp, Homo sapiens
atatttgggaatcaa

SEQ ID NO: 34763 - DNA, 15 bp, Homo sapiens
gatatttgggaatca

SEQ ID NO: 34764 - DNA, 15 bp, Homo sapiens
ggatatttgggaatc

SEQ ID NO: 34765 - DNA, 15 bp, Homo sapiens
gggatatttgggaat

SEQ ID NO: 34766 - DNA, 15 bp, Homo sapiens
tgggatatttgggaa

SEQ ID NO: 34767 - DNA, 15 bp, Homo sapiens
atgggatatttggga

SEQ ID NO: 34768 - DNA, 15 bp, Homo sapiens
catgggatatttggg

SEQ ID NO: 34769 - DNA, 15 bp, Homo sapiens
gcatgggatatttgg

SEQ ID NO: 34770 - DNA, 15 bp, Homo sapiens
tgcatgggatatttg

SEQ ID NO: 34771 - DNA, 15 bp, Homo sapiens
atgcatgggatattt

SEQ ID NO: 34772 - DNA, 15 bp, Homo sapiens
aatgcatgggatatt

SEQ ID NO: 34773 - DNA, 15 bp, Homo sapiens
aaatgcatgggatat

SEQ ID NO: 34774 - DNA, 15 bp, Homo sapiens
gaaatgcatgggata

SEQ ID NO: 34775 - DNA, 15 bp, Homo sapiens
agaaatgcatgggat

SEQ ID NO: 34776 - DNA, 15 bp, Homo sapiens
cagaaatgcatggga

SEQ ID NO: 34777 - DNA, 15 bp, Homo sapiens
tcagaaatgcatggg

SEQ ID NO: 34778 - DNA, 15 bp, Homo sapiens
ttcagaaatgcatgg

SEQ ID NO: 34779 - DNA, 15 bp, Homo sapiens
cttcagaaatgcatg

SEQ ID NO: 34780 - DNA, 15 bp, Homo sapiens
gcttcagaaatgcat

SEQ ID NO: 34781 - DNA, 15 bp, Homo sapiens
ggcttcagaaatgca

SEQ ID NO: 34782 - DNA, 15 bp, Homo sapiens
tggcttcagaaatgc

SEQ ID NO: 34783 - DNA, 15 bp, Homo sapiens
ttggcttcagaaatg

SEQ ID NO: 34784 - DNA, 15 bp, Homo sapiens
tttggcttcagaaat

SEQ ID NO: 34785 - DNA, 15 bp, Homo sapiens
atttggcttcagaaa

SEQ ID NO: 34786 - DNA, 15 bp, Homo sapiens
tatttggcttcagaa

SEQ ID NO: 34787 - DNA, 15 bp, Homo sapiens
ctatttggcttcaga

SEQ ID NO: 34788 - DNA, 15 bp, Homo sapiens
cctatttggcttcag

SEQ ID NO: 34789 - DNA, 15 bp, Homo sapiens
tcctatttggcttca

SEQ ID NO: 34790 - DNA, 15 bp, Homo sapiens
ctcctatttggcttc

SEQ ID NO: 34791 - DNA, 15 bp, Homo sapiens
tctcctatttggctt

SEQ ID NO: 34792 - DNA, 15 bp, Homo sapiens
ttctcctatttggct

SEQ ID NO: 34793 - DNA, 15 bp, Homo sapiens
cttctcctatttggc

SEQ ID NO: 34794 - DNA, 15 bp, Homo sapiens
tcttctcctatttgg

SEQ ID NO: 34795 - DNA, 15 bp, Homo sapiens
ctcttctcctatttg

SEQ ID NO: 34796 - DNA, 15 bp, Homo sapiens
tctcttctcctattt

SEQ ID NO: 34797 - DNA, 15 bp, Homo sapiens
ttctcttctcctatt

SEQ ID NO: 34798 - DNA, 15 bp, Homo sapiens
cttctcttctcctat

SEQ ID NO: 34799 - DNA, 15 bp, Homo sapiens
tcttctcttctccta

SEQ ID NO: 34800 - DNA, 15 bp, Homo sapiens
ttcttctcttctcct

SEQ ID NO: 34801 - DNA, 15 bp, Homo sapiens
cttcttctcttctcc

SEQ ID NO: 34802 - DNA, 15 bp, Homo sapiens
gcttcttctcttctc

SEQ ID NO: 34803 - DNA, 15 bp, Homo sapiens
tgcttcttctcttct

SEQ ID NO: 34804 - DNA, 15 bp, Homo sapiens
ctgcttcttctcttc

SEQ ID NO: 34805 - DNA, 15 bp, Homo sapiens
gctgcttcttctctt

SEQ ID NO: 34806 - DNA, 15 bp, Homo sapiens
agctgcttcttctct

SEQ ID NO: 34807 - DNA, 15 bp, Homo sapiens
aagctgcttcttctc

SEQ ID NO: 34808 - DNA, 15 bp, Homo sapiens
gaagctgcttcttct

SEQ ID NO: 34809 - DNA, 15 bp, Homo sapiens
ggaagctgcttcttc

SEQ ID NO: 34810 - DNA, 15 bp, Homo sapiens
aggaagctgcttctt

SEQ ID NO: 34811 - DNA, 15 bp, Homo sapiens
aaggaagctgcttct

SEQ ID NO: 34812 - DNA, 15 bp, Homo sapiens
aaaggaagctgcttc

SEQ ID NO: 34813 - DNA, 15 bp, Homo sapiens
aaaaggaagctgctt

SEQ ID NO: 34814 - DNA, 15 bp, Homo sapiens
gaaaaggaagctgct

SEQ ID NO: 34815 - DNA, 15 bp, Homo sapiens
ggaaaaggaagctgc

SEQ ID NO: 34816 - DNA, 15 bp, Homo sapiens
gggaaaaggaagctg

SEQ ID NO: 34817 - DNA, 15 bp, Homo sapiens
cgggaaaaggaagct

SEQ ID NO: 34818 - DNA, 15 bp, Homo sapiens
acgggaaaaggaagc

SEQ ID NO: 34819 - DNA, 15 bp, Homo sapiens
aacgggaaaaggaag

SEQ ID NO: 34820 - DNA, 15 bp, Homo sapiens
caacgggaaaaggaa

SEQ ID NO: 34821 - DNA, 15 bp, Homo sapiens
ccaacgggaaaagga

SEQ ID NO: 34822 - DNA, 15 bp, Homo sapiens
gccaacgggaaaagg

SEQ ID NO: 34823 - DNA, 15 bp, Homo sapiens
tgccaacgggaaaag

SEQ ID NO: 34824 - DNA, 15 bp, Homo sapiens
ctgccaacgggaaaa

SEQ ID NO: 34825 - DNA, 15 bp, Homo sapiens
tctgccaacgggaaa

SEQ ID NO: 34826 - DNA, 15 bp, Homo sapiens
ttctgccaacgggaa

SEQ ID NO: 34827 - DNA, 15 bp, Homo sapiens
cttctgccaacggga

SEQ ID NO: 34828 - DNA, 15 bp, Homo sapiens
gcttctgccaacggg

SEQ ID NO: 34829 - DNA, 15 bp, Homo sapiens
agcttctgccaacgg

SEQ ID NO: 34830 - DNA, 15 bp, Homo sapiens
aagcttctgccaacg

SEQ ID NO: 34831 - DNA, 15 bp, Homo sapiens
gaagcttctgccaac

SEQ ID NO: 34832 - DNA, 15 bp, Homo sapiens
agaagcttctgccaa

SEQ ID NO: 34833 - DNA, 15 bp, Homo sapiens
gagaagcttctgcca

SEQ ID NO: 34834 - DNA, 15 bp, Homo sapiens
ggagaagcttctgcc

SEQ ID NO: 34835 - DNA, 15 bp, Homo sapiens
tggagaagcttctgc

SEQ ID NO: 34836 - DNA, 15 bp, Homo sapiens
ctggagaagcttctg

SEQ ID NO: 34837 - DNA, 15 bp, Homo sapiens
gctggagaagcttct

SEQ ID NO: 34838 - DNA, 15 bp, Homo sapiens
ggctggagaagcttc

SEQ ID NO: 34839 - DNA, 15 bp, Homo sapiens
gggctggagaagctt

SEQ ID NO: 34840 - DNA, 15 bp, Homo sapiens
agggctggagaagct

SEQ ID NO: 34841 - DNA, 15 bp, Homo sapiens
tagggctggagaagc

SEQ ID NO: 34842 - DNA, 15 bp, Homo sapiens
ctagggctggagaag

SEQ ID NO: 34843 - DNA, 15 bp, Homo sapiens
gctagggctggagaa

SEQ ID NO: 34844 - DNA, 15 bp, Homo sapiens
agctagggctggaga

SEQ ID NO: 34845 - DNA, 15 bp, Homo sapiens
gagctagggctggag

SEQ ID NO: 34846 - DNA, 15 bp, Homo sapiens
agagctagggctgga

SEQ ID NO: 34847 - DNA, 15 bp, Homo sapiens
tagagctagggctgg

SEQ ID NO: 34848 - DNA, 15 bp, Homo sapiens
atagagctagggctg

SEQ ID NO: 34849 - DNA, 15 bp, Homo sapiens
catagagctagggct

SEQ ID NO: 34850 - DNA, 15 bp, Homo sapiens
ccatagagctagggc

SEQ ID NO: 34851 - DNA, 15 bp, Homo sapiens
accatagagctaggg

SEQ ID NO: 34852 - DNA, 15 bp, Homo sapiens
gaccatagagctagg

SEQ ID NO: 34853 - DNA, 15 bp, Homo sapiens
tgaccatagagctag

SEQ ID NO: 34854 - DNA, 15 bp, Homo sapiens
atgaccatagagcta

SEQ ID NO: 34855 - DNA, 15 bp, Homo sapiens
gatgaccatagagct

SEQ ID NO: 34856 - DNA, 15 bp, Homo sapiens
ggatgaccatagagc

SEQ ID NO: 34857 - DNA, 15 bp, Homo sapiens
gggatgaccatagag

SEQ ID NO: 34858 - DNA, 15 bp, Homo sapiens
agggatgaccataga

SEQ ID NO: 34859 - DNA, 15 bp, Homo sapiens
gagggatgaccatag

SEQ ID NO: 34860 - DNA, 15 bp, Homo sapiens
ggagggatgaccata

SEQ ID NO: 34861 - DNA, 15 bp, Homo sapiens
tggagggatgaccat

SEQ ID NO: 34862 - DNA, 15 bp, Homo sapiens
gtggagggatgacca

SEQ ID NO: 34863 - DNA, 15 bp, Homo sapiens
agtggagggatgacc

SEQ ID NO: 34864 - DNA, 15 bp, Homo sapiens
gagtggagggatgac

SEQ ID NO: 34865 - DNA, 15 bp, Homo sapiens
ggagtggagggatga

SEQ ID NO: 34866 - DNA, 15 bp, Homo sapiens
aggagtggagggatg

SEQ ID NO: 34867 - DNA, 15 bp, Homo sapiens
aaggagtggagggat

SEQ ID NO: 34868 - DNA, 15 bp, Homo sapiens
caaggagtggaggga

SEQ ID NO: 34869 - DNA, 15 bp, Homo sapiens
tcaaggagtggaggg

SEQ ID NO: 34870 - DNA, 15 bp, Homo sapiens
ttcaaggagtggagg

SEQ ID NO: 34871 - DNA, 15 bp, Homo sapiens
cttcaaggagtggag

SEQ ID NO: 34872 - DNA, 15 bp, Homo sapiens
ccttcaaggagtgga

SEQ ID NO: 34873 - DNA, 15 bp, Homo sapiens
tccttcaaggagtgg

SEQ ID NO: 34874 - DNA, 15 bp, Homo sapiens
atccttcaaggagtg

SEQ ID NO: 34875 - DNA, 15 bp, Homo sapiens
tatccttcaaggagt

SEQ ID NO: 34876 - DNA, 15 bp, Homo sapiens
gtatccttcaaggag

SEQ ID NO: 34877 - DNA, 15 bp, Homo sapiens
agtatccttcaagga

SEQ ID NO: 34878 - DNA, 15 bp, Homo sapiens
gagtatccttcaagg

SEQ ID NO: 34879 - DNA, 15 bp, Homo sapiens
tgagtatccttcaag

SEQ ID NO: 34880 - DNA, 15 bp, Homo sapiens
ctgagtatccttcaa

SEQ ID NO: 34881 - DNA, 15 bp, Homo sapiens
actgagtatccttca

SEQ ID NO: 34882 - DNA, 15 bp, Homo sapiens
tactgagtatccttc

SEQ ID NO: 34883 - DNA, 15 bp, Homo sapiens
ttactgagtatcctt

SEQ ID NO: 34884 - DNA, 15 bp, Homo sapiens
attactgagtatcct

SEQ ID NO: 34885 - DNA, 15 bp, Homo sapiens
aattactgagtatcc

SEQ ID NO: 34886 - DNA, 15 bp, Homo sapiens
caattactgagtatc

SEQ ID NO: 34887 - DNA, 15 bp, Homo sapiens
gcaattactgagtat

SEQ ID NO: 34888 - DNA, 15 bp, Homo sapiens
agcaattactgagta

SEQ ID NO: 34889 - DNA, 15 bp, Homo sapiens
aagcaattactgagt

SEQ ID NO: 34890 - DNA, 15 bp, Homo sapiens
aaagcaattactgag

SEQ ID NO: 34891 - DNA, 15 bp, Homo sapiens
aaaagcaattactga

SEQ ID NO: 34892 - DNA, 15 bp, Homo sapiens
aaaaagcaattactg

SEQ ID NO: 34893 - DNA, 15 bp, Homo sapiens
aaaaaagcaattact

SEQ ID NO: 34894 - DNA, 15 bp, Homo sapiens
aaaaaaagcaattac

SEQ ID NO: 34895 - DNA, 15 bp, Homo sapiens
gaaaaaaagcaatta

SEQ ID NO: 34896 - DNA, 15 bp, Homo sapiens
agaaaaaaagcaatt

SEQ ID NO: 34897 - DNA, 15 bp, Homo sapiens
aagaaaaaaagcaat

SEQ ID NO: 34898 - DNA, 15 bp, Homo sapiens
caagaaaaaaagcaa

SEQ ID NO: 34899 - DNA, 15 bp, Homo sapiens
gcaagaaaaaaagca

SEQ ID NO: 34900 - DNA, 15 bp, Homo sapiens
tgcaagaaaaaaagc

SEQ ID NO: 34901 - DNA, 15 bp, Homo sapiens
ctgcaagaaaaaaag

SEQ ID NO: 34902 - DNA, 15 bp, Homo sapiens
actgcaagaaaaaaa

SEQ ID NO: 34903 - DNA, 15 bp, Homo sapiens
tactgcaagaaaaaa

SEQ ID NO: 34904 - DNA, 15 bp, Homo sapiens
atactgcaagaaaaa

SEQ ID NO: 34905 - DNA, 15 bp, Homo sapiens
aatactgcaagaaaa

SEQ ID NO: 34906 - DNA, 15 bp, Homo sapiens
aaatactgcaagaaa

SEQ ID NO: 34907 - DNA, 15 bp, Homo sapiens
aaaatactgcaagaa

SEQ ID NO: 34908 - DNA, 15 bp, Homo sapiens
taaaatactgcaaga

SEQ ID NO: 34909 - DNA, 15 bp, Homo sapiens
ttaaaatactgcaag

SEQ ID NO: 34910 - DNA, 15 bp, Homo sapiens
gttaaaatactgcaa

SEQ ID NO: 34911 - DNA, 15 bp, Homo sapiens
ggttaaaatactgca

SEQ ID NO: 34912 - DNA, 15 bp, Homo sapiens
tggttaaaatactgc

SEQ ID NO: 34913 - DNA, 15 bp, Homo sapiens
ttggttaaaatactg

SEQ ID NO: 34914 - DNA, 15 bp, Homo sapiens
attggttaaaatact

SEQ ID NO: 34915 - DNA, 15 bp, Homo sapiens
tattggttaaaatac

SEQ ID NO: 34916 - DNA, 15 bp, Homo sapiens
atattggttaaaata

SEQ ID NO: 34917 - DNA, 15 bp, Homo sapiens
aatattggttaaaat

SEQ ID NO: 34918 - DNA, 15 bp, Homo sapiens
aaatattggttaaaa

SEQ ID NO: 34919 - DNA, 15 bp, Homo sapiens
gaaatattggttaaa

SEQ ID NO: 34920 - DNA, 15 bp, Homo sapiens
agaaatattggttaa

SEQ ID NO: 34921 - DNA, 15 bp, Homo sapiens
cagaaatattggtta

SEQ ID NO: 34922 - DNA, 15 bp, Homo sapiens
tcagaaatattggtt

SEQ ID NO: 34923 - DNA, 15 bp, Homo sapiens
ttcagaaatattggt

SEQ ID NO: 34924 - DNA, 15 bp, Homo sapiens
cttcagaaatattgg

SEQ ID NO: 34925 - DNA, 15 bp, Homo sapiens
acttcagaaatattg

SEQ ID NO: 34926 - DNA, 15 bp, Homo sapiens
gacttcagaaatatt

SEQ ID NO: 34927 - DNA, 15 bp, Homo sapiens
ggacttcagaaatat

SEQ ID NO: 34928 - DNA, 15 bp, Homo sapiens
tggacttcagaaata

SEQ ID NO: 34929 - DNA, 15 bp, Homo sapiens
atggacttcagaaat

SEQ ID NO: 34930 - DNA, 15 bp, Homo sapiens
gatggacttcagaaa

SEQ ID NO: 34931 - DNA, 15 bp, Homo sapiens
tgatggacttcagaa

SEQ ID NO: 34932 - DNA, 15 bp, Homo sapiens
ttgatggacttcaga

SEQ ID NO: 34933 - DNA, 15 bp, Homo sapiens
tttgatggacttcag

SEQ ID NO: 34934 - DNA, 15 bp, Homo sapiens
ttttgatggacttca

SEQ ID NO: 34935 - DNA, 15 bp, Homo sapiens
attttgatggacttc

SEQ ID NO: 34936 - DNA, 15 bp, Homo sapiens
tattttgatggactt

SEQ ID NO: 34937 - DNA, 15 bp, Homo sapiens
atattttgatggact

SEQ ID NO: 34938 - DNA, 15 bp, Homo sapiens
catattttgatggac

SEQ ID NO: 34939 - DNA, 15 bp, Homo sapiens
ccatattttgatgga

SEQ ID NO: 34940 - DNA, 15 bp, Homo sapiens
cccatattttgatgg

SEQ ID NO: 34941 - DNA, 15 bp, Homo sapiens
gcccatattttgatg

SEQ ID NO: 34942 - DNA, 15 bp, Homo sapiens
agcccatattttgat

SEQ ID NO: 34943 - DNA, 15 bp, Homo sapiens
tagcccatattttga

SEQ ID NO: 34944 - DNA, 15 bp, Homo sapiens
gtagcccatattttg

SEQ ID NO: 34945 - DNA, 15 bp, Homo sapiens
agtagcccatatttt

SEQ ID NO: 34946 - DNA, 15 bp, Homo sapiens
cagtagcccatattt

SEQ ID NO: 34947 - DNA, 15 bp, Homo sapiens
acagtagcccatatt

SEQ ID NO: 34948 - DNA, 15 bp, Homo sapiens
gacagtagcccatat

SEQ ID NO: 34949 - DNA, 15 bp, Homo sapiens
ggacagtagcccata

SEQ ID NO: 34950 - DNA, 15 bp, Homo sapiens
aggacagtagcccat

SEQ ID NO: 34951 - DNA, 15 bp, Homo sapiens
gaggacagtagccca

SEQ ID NO: 34952 - DNA, 15 bp, Homo sapiens
tgaggacagtagccc

SEQ ID NO: 34953 - DNA, 15 bp, Homo sapiens
ctgaggacagtagcc

SEQ ID NO: 34954 - DNA, 15 bp, Homo sapiens
actgaggacagtagc

SEQ ID NO: 34955 - DNA, 15 bp, Homo sapiens
aactgaggacagtag

SEQ ID NO: 34956 - DNA, 15 bp, Homo sapiens
aaactgaggacagta

SEQ ID NO: 34957 - DNA, 15 bp, Homo sapiens
caaactgaggacagt

SEQ ID NO: 34958 - DNA, 15 bp, Homo sapiens
tcaaactgaggacag

SEQ ID NO: 34959 - DNA, 15 bp, Homo sapiens
atcaaactgaggaca

SEQ ID NO: 34960 - DNA, 15 bp, Homo sapiens
catcaaactgaggac

SEQ ID NO: 34961 - DNA, 15 bp, Homo sapiens
gcatcaaactgagga

SEQ ID NO: 34962 - DNA, 15 bp, Homo sapiens
tgcatcaaactgagg

SEQ ID NO: 34963 - DNA, 15 bp, Homo sapiens
ttgcatcaaactgag

SEQ ID NO: 34964 - DNA, 15 bp, Homo sapiens
attgcatcaaactga

SEQ ID NO: 34965 - DNA, 15 bp, Homo sapiens
aattgcatcaaactg

SEQ ID NO: 34966 - DNA, 15 bp, Homo sapiens
caattgcatcaaact

SEQ ID NO: 34967 - DNA, 15 bp, Homo sapiens
tcaattgcatcaaac

SEQ ID NO: 34968 - DNA, 15 bp, Homo sapiens
atcaattgcatcaaa

SEQ ID NO: 34969 - DNA, 15 bp, Homo sapiens
catcaattgcatcaa

SEQ ID NO: 34970 - DNA, 15 bp, Homo sapiens
tcatcaattgcatca

SEQ ID NO: 34971 - DNA, 15 bp, Homo sapiens
ctcatcaattgcatc

SEQ ID NO: 34972 - DNA, 15 bp, Homo sapiens
gctcatcaattgcat

SEQ ID NO: 34973 - DNA, 15 bp, Homo sapiens
agctcatcaattgca

SEQ ID NO: 34974 - DNA, 15 bp, Homo sapiens
cagctcatcaattgc

SEQ ID NO: 34975 - DNA, 15 bp, Homo sapiens
gcagctcatcaattg

SEQ ID NO: 34976 - DNA, 15 bp, Homo sapiens
agcagctcatcaatt

SEQ ID NO: 34977 - DNA, 15 bp, Homo sapiens
gagcagctcatcaat

SEQ ID NO: 34978 - DNA, 15 bp, Homo sapiens
tgagcagctcatcaa

SEQ ID NO: 34979 - DNA, 15 bp, Homo sapiens
gtgagcagctcatca

SEQ ID NO: 34980 - DNA, 15 bp, Homo sapiens
tgtgagcagctcatc

SEQ ID NO: 34981 - DNA, 15 bp, Homo sapiens
ctgtgagcagctcat

SEQ ID NO: 34982 - DNA, 15 bp, Homo sapiens
cctgtgagcagctca

SEQ ID NO: 34983 - DNA, 15 bp, Homo sapiens
tcctgtgagcagctc

SEQ ID NO: 34984 - DNA, 15 bp, Homo sapiens
gtcctgtgagcagct

SEQ ID NO: 34985 - DNA, 15 bp, Homo sapiens
cgtcctgtgagcagc

SEQ ID NO: 34986 - DNA, 15 bp, Homo sapiens
tcgtcctgtgagcag

SEQ ID NO: 34987 - DNA, 15 bp, Homo sapiens
ctcgtcctgtgagca

SEQ ID NO: 34988 - DNA, 15 bp, Homo sapiens
tctcgtcctgtgagc

SEQ ID NO: 34989 - DNA, 15 bp, Homo sapiens
ttctcgtcctgtgag

SEQ ID NO: 34990 - DNA, 15 bp, Homo sapiens
gttctcgtcctgtga

SEQ ID NO: 34991 - DNA, 15 bp, Homo sapiens
tgttctcgtcctgtg

SEQ ID NO: 34992 - DNA, 15 bp, Homo sapiens
atgttctcgtcctgt

SEQ ID NO: 34993 - DNA, 15 bp, Homo sapiens
gatgttctcgtcctg

SEQ ID NO: 34994 - DNA, 15 bp, Homo sapiens
agatgttctcgtcct

SEQ ID NO: 34995 - DNA, 15 bp, Homo sapiens
aagatgttctcgtcc

SEQ ID NO: 34996 - DNA, 15 bp, Homo sapiens
aaagatgttctcgtc

SEQ ID NO: 34997 - DNA, 15 bp, Homo sapiens
taaagatgttctcgt

SEQ ID NO: 34998 - DNA, 15 bp, Homo sapiens
gtaaagatgttctcg

SEQ ID NO: 34999 - DNA, 15 bp, Homo sapiens
ggtaaagatgttctc

SEQ ID NO: 35000 - DNA, 15 bp, Homo sapiens
aggtaaagatgttct

SEQ ID NO: 35001 - DNA, 15 bp, Homo sapiens
aaggtaaagatgttc

SEQ ID NO: 35002 - DNA, 15 bp, Homo sapiens
aaaggtaaagatgtt

SEQ ID NO: 35003 - DNA, 15 bp, Homo sapiens
taaaggtaaagatgt

SEQ ID NO: 35004 - DNA, 15 bp, Homo sapiens
ataaaggtaaagatg

SEQ ID NO: 35005 - DNA, 15 bp, Homo sapiens
cataaaggtaaagat

SEQ ID NO: 35006 - DNA, 15 bp, Homo sapiens
gcataaaggtaaaga

SEQ ID NO: 35007 - DNA, 15 bp, Homo sapiens
ggcataaaggtaaag

SEQ ID NO: 35008 - DNA, 15 bp, Homo sapiens
gggcataaaggtaaa

SEQ ID NO: 35009 - DNA, 15 bp, Homo sapiens
cgggcataaaggtaa

SEQ ID NO: 35010 - DNA, 15 bp, Homo sapiens
ccgggcataaaggta

SEQ ID NO: 35011 - DNA, 15 bp, Homo sapiens
gccgggcataaaggt

SEQ ID NO: 35012 - DNA, 15 bp, Homo sapiens
agccgggcataaagg

SEQ ID NO: 35013 - DNA, 15 bp, Homo sapiens
aagccgggcataaag

SEQ ID NO: 35014 - DNA, 15 bp, Homo sapiens
gaagccgggcataaa

SEQ ID NO: 35015 - DNA, 15 bp, Homo sapiens
cgaagccgggcataa

SEQ ID NO: 35016 - DNA, 15 bp, Homo sapiens
tcgaagccgggcata

SEQ ID NO: 35017 - DNA, 15 bp, Homo sapiens
ctcgaagccgggcat

SEQ ID NO: 35018 - DNA, 15 bp, Homo sapiens
cctcgaagccgggca

SEQ ID NO: 35019 - DNA, 15 bp, Homo sapiens
acctcgaagccgggc

SEQ ID NO: 35020 - DNA, 15 bp, Homo sapiens
cacctcgaagccggg

SEQ ID NO: 35021 - DNA, 15 bp, Homo sapiens
acacctcgaagccgg

SEQ ID NO: 35022 - DNA, 15 bp, Homo sapiens
tacacctcgaagccg

SEQ ID NO: 35023 - DNA, 15 bp, Homo sapiens
gtacacctcgaagcc

SEQ ID NO: 35024 - DNA, 15 bp, Homo sapiens
ggtacacctcgaagc

SEQ ID NO: 35025 - DNA, 15 bp, Homo sapiens
tggtacacctcgaag

SEQ ID NO: 35026 - DNA, 15 bp, Homo sapiens
ctggtacacctcgaa

SEQ ID NO: 35027 - DNA, 15 bp, Homo sapiens
gctggtacacctcga

SEQ ID NO: 35028 - DNA, 15 bp, Homo sapiens
tgctggtacacctcg

SEQ ID NO: 35029 - DNA, 15 bp, Homo sapiens
ctgctggtacacctc

SEQ ID NO: 35030 - DNA, 15 bp, Homo sapiens
tctgctggtacacct

SEQ ID NO: 35031 - DNA, 15 bp, Homo sapiens
ttctgctggtacacc

SEQ ID NO: 35032 - DNA, 15 bp, Homo sapiens
cttctgctggtacac

SEQ ID NO: 35033 - DNA, 15 bp, Homo sapiens
tcttctgctggtaca

SEQ ID NO: 35034 - DNA, 15 bp, Homo sapiens
ttcttctgctggtac

SEQ ID NO: 35035 - DNA, 15 bp, Homo sapiens
tttcttctgctggta

SEQ ID NO: 35036 - DNA, 15 bp, Homo sapiens
atttcttctgctggt

SEQ ID NO: 35037 - DNA, 15 bp, Homo sapiens
gatttcttctgctgg

SEQ ID NO: 35038 - DNA, 15 bp, Homo sapiens
cgatttcttctgctg

SEQ ID NO: 35039 - DNA, 15 bp, Homo sapiens
tcgatttcttctgct

SEQ ID NO: 35040 - DNA, 15 bp, Homo sapiens
ttcgatttcttctgc

SEQ ID NO: 35041 - DNA, 15 bp, Homo sapiens
tttcgatttcttctg

SEQ ID NO: 35042 - DNA, 15 bp, Homo sapiens
ttttcgatttcttct

SEQ ID NO: 35043 - DNA, 15 bp, Homo sapiens
cttttcgatttcttc

SEQ ID NO: 35044 - DNA, 15 bp, Homo sapiens
ccttttcgatttctt

SEQ ID NO: 35045 - DNA, 15 bp, Homo sapiens
accttttcgatttct

SEQ ID NO: 35046 - DNA, 15 bp, Homo sapiens
caccttttcgatttc

SEQ ID NO: 35047 - DNA, 15 bp, Homo sapiens
tcaccttttcgattt

SEQ ID NO: 35048 - DNA, 15 bp, Homo sapiens
ttcaccttttcgatt

SEQ ID NO: 35049 - DNA, 15 bp, Homo sapiens
tttcaccttttcgat

SEQ ID NO: 35050 - DNA, 15 bp, Homo sapiens
ttttcaccttttcga

SEQ ID NO: 35051 - DNA, 15 bp, Homo sapiens
tttttcaccttttcg

SEQ ID NO: 35052 - DNA, 15 bp, Homo sapiens
atttttcaccttttc

SEQ ID NO: 35053 - DNA, 15 bp, Homo sapiens
catttttcacctttt

SEQ ID NO: 35054 - DNA, 15 bp, Homo sapiens
acatttttcaccttt

SEQ ID NO: 35055 - DNA, 15 bp, Homo sapiens
aacatttttcacctt

SEQ ID NO: 35056 - DNA, 15 bp, Homo sapiens
aaacatttttcacct

SEQ ID NO: 35057 - DNA, 15 bp, Homo sapiens
aaaacatttttcacc

SEQ ID NO: 35058 - DNA, 15 bp, Homo sapiens
caaaacatttttcac

SEQ ID NO: 35059 - DNA, 15 bp, Homo sapiens
acaaaacatttttca

SEQ ID NO: 35060 - DNA, 15 bp, Homo sapiens
aacaaaacatttttc

SEQ ID NO: 35061 - DNA, 15 bp, Homo sapiens
caacaaaacattttt

SEQ ID NO: 35062 - DNA, 15 bp, Homo sapiens
acaacaaaacatttt

SEQ ID NO: 35063 - DNA, 15 bp, Homo sapiens
cacaacaaaacattt

SEQ ID NO: 35064 - DNA, 15 bp, Homo sapiens
ccacaacaaaacatt

SEQ ID NO: 35065 - DNA, 15 bp, Homo sapiens
gccacaacaaaacat

SEQ ID NO: 35066 - DNA, 15 bp, Homo sapiens
ggccacaacaaaaca

SEQ ID NO: 35067 - DNA, 15 bp, Homo sapiens
tggccacaacaaaac

SEQ ID NO: 35068 - DNA, 15 bp, Homo sapiens
gtggccacaacaaaa

SEQ ID NO: 35069 - DNA, 15 bp, Homo sapiens
tgtggccacaacaaa

SEQ ID NO: 35070 - DNA, 15 bp, Homo sapiens
atgtggccacaacaa

SEQ ID NO: 35071 - DNA, 15 bp, Homo sapiens
tatgtggccacaaca

SEQ ID NO: 35072 - DNA, 15 bp, Homo sapiens
ctatgtggccacaac

SEQ ID NO: 35073 - DNA, 15 bp, Homo sapiens
cctatgtggccacaa

SEQ ID NO: 35074 - DNA, 15 bp, Homo sapiens
tcctatgtggccaca

SEQ ID NO: 35075 - DNA, 15 bp, Homo sapiens
ctcctatgtggccac

SEQ ID NO: 35076 - DNA, 15 bp, Homo sapiens
actcctatgtggcca

SEQ ID NO: 35077 - DNA, 15 bp, Homo sapiens
gactcctatgtggcc

SEQ ID NO: 35078 - DNA, 15 bp, Homo sapiens
agactcctatgtggc

SEQ ID NO: 35079 - DNA, 15 bp, Homo sapiens
cagactcctatgtgg

SEQ ID NO: 35080 - DNA, 15 bp, Homo sapiens
ccagactcctatgtg

SEQ ID NO: 35081 - DNA, 15 bp, Homo sapiens
accagactcctatgt

SEQ ID NO: 35082 - DNA, 15 bp, Homo sapiens
aaccagactcctatg

SEQ ID NO: 35083 - DNA, 15 bp, Homo sapiens
taaccagactcctat

SEQ ID NO: 35084 - DNA, 15 bp, Homo sapiens
ttaaccagactccta

SEQ ID NO: 35085 - DNA, 15 bp, Homo sapiens
attaaccagactcct

SEQ ID NO: 35086 - DNA, 15 bp, Homo sapiens
aattaaccagactcc

SEQ ID NO: 35087 - DNA, 15 bp, Homo sapiens
taattaaccagactc

SEQ ID NO: 35088 - DNA, 15 bp, Homo sapiens
gtaattaaccagact

SEQ ID NO: 35089 - DNA, 15 bp, Homo sapiens
tgtaattaaccagac

SEQ ID NO: 35090 - DNA, 15 bp, Homo sapiens
ttgtaattaaccaga

SEQ ID NO: 35091 - DNA, 15 bp, Homo sapiens
cttgtaattaaccag

SEQ ID NO: 35092 - DNA, 15 bp, Homo sapiens
gcttgtaattaacca

SEQ ID NO: 35093 - DNA, 15 bp, Homo sapiens
ggcttgtaattaacc

SEQ ID NO: 35094 - DNA, 15 bp, Homo sapiens
aggcttgtaattaac

SEQ ID NO: 35095 - DNA, 15 bp, Homo sapiens
caggcttgtaattaa

SEQ ID NO: 35096 - DNA, 15 bp, Homo sapiens
acaggcttgtaatta

SEQ ID NO: 35097 - DNA, 15 bp, Homo sapiens
aacaggcttgtaatt

SEQ ID NO: 35098 - DNA, 15 bp, Homo sapiens
aaacaggcttgtaat

SEQ ID NO: 35099 - DNA, 15 bp, Homo sapiens
gaaacaggcttgtaa

SEQ ID NO: 35100 - DNA, 15 bp, Homo sapiens
tgaaacaggcttgta

SEQ ID NO: 35101 - DNA, 15 bp, Homo sapiens
atgaaacaggcttgt

SEQ ID NO: 35102 - DNA, 15 bp, Homo sapiens
catgaaacaggcttg

SEQ ID NO: 35103 - DNA, 15 bp, Homo sapiens
tcatgaaacaggctt

SEQ ID NO: 35104 - DNA, 15 bp, Homo sapiens
ctcatgaaacaggct

SEQ ID NO: 35105 - DNA, 15 bp, Homo sapiens
tctcatgaaacaggc

SEQ ID NO: 35106 - DNA, 15 bp, Homo sapiens
ctctcatgaaacagg

SEQ ID NO: 35107 - DNA, 15 bp, Homo sapiens
actctcatgaaacag

SEQ ID NO: 35108 - DNA, 15 bp, Homo sapiens
cactctcatgaaaca

SEQ ID NO: 35109 - DNA, 15 bp, Homo sapiens
gcactctcatgaaac

SEQ ID NO: 35110 - DNA, 15 bp, Homo sapiens
tgcactctcatgaaa

SEQ ID NO: 35111 - DNA, 15 bp, Homo sapiens
atgcactctcatgaa

SEQ ID NO: 35112 - DNA, 15 bp, Homo sapiens
aatgcactctcatga

SEQ ID NO: 35113 - DNA, 15 bp, Homo sapiens
gaatgcactctcatg

SEQ ID NO: 35114 - DNA, 15 bp, Homo sapiens
agaatgcactctcat

SEQ ID NO: 35115 - DNA, 15 bp, Homo sapiens
gagaatgcactctca

SEQ ID NO: 35116 - DNA, 15 bp, Homo sapiens
agagaatgcactctc

SEQ ID NO: 35117 - DNA, 15 bp, Homo sapiens
aagagaatgcactct

SEQ ID NO: 35118 - DNA, 15 bp, Homo sapiens
caagagaatgcactc

SEQ ID NO: 35119 - DNA, 15 bp, Homo sapiens
ccaagagaatgcact

SEQ ID NO: 35120 - DNA, 15 bp, Homo sapiens
tccaagagaatgcac

SEQ ID NO: 35121 - DNA, 15 bp, Homo sapiens
ctccaagagaatgca

SEQ ID NO: 35122 - DNA, 15 bp, Homo sapiens
tctccaagagaatgc

SEQ ID NO: 35123 - DNA, 15 bp, Homo sapiens
atctccaagagaatg

SEQ ID NO: 35124 - DNA, 15 bp, Homo sapiens
catctccaagagaat

SEQ ID NO: 35125 - DNA, 15 bp, Homo sapiens
tcatctccaagagaa

SEQ ID NO: 35126 - DNA, 15 bp, Homo sapiens
ctcatctccaagaga

SEQ ID NO: 35127 - DNA, 15 bp, Homo sapiens
tctcatctccaagag

SEQ ID NO: 35128 - DNA, 15 bp, Homo sapiens
ttctcatctccaaga

SEQ ID NO: 35129 - DNA, 15 bp, Homo sapiens
tttctcatctccaag

SEQ ID NO: 35130 - DNA, 15 bp, Homo sapiens
gtttctcatctccaa

SEQ ID NO: 35131 - DNA, 15 bp, Homo sapiens
agtttctcatctcca

SEQ ID NO: 35132 - DNA, 15 bp, Homo sapiens
cagtttctcatctcc

SEQ ID NO: 35133 - DNA, 15 bp, Homo sapiens
tcagtttctcatctc

SEQ ID NO: 35134 - DNA, 15 bp, Homo sapiens
ttcagtttctcatct

SEQ ID NO: 35135 - DNA, 15 bp, Homo sapiens
cttcagtttctcatc

SEQ ID NO: 35136 - DNA, 15 bp, Homo sapiens
gcttcagtttctcat

SEQ ID NO: 35137 - DNA, 15 bp, Homo sapiens
cgcttcagtttctca

SEQ ID NO: 35138 - DNA, 15 bp, Homo sapiens
acgcttcagtttctc

SEQ ID NO: 35139 - DNA, 15 bp, Homo sapiens
cacgcttcagtttct

SEQ ID NO: 35140 - DNA, 15 bp, Homo sapiens
gcacgcttcagtttc

SEQ ID NO: 35141 - DNA, 15 bp, Homo sapiens
agcacgcttcagttt

SEQ ID NO: 35142 - DNA, 15 bp, Homo sapiens
tagcacgcttcagtt

SEQ ID NO: 35143 - DNA, 15 bp, Homo sapiens
atagcacgcttcagt

SEQ ID NO: 35144 - DNA, 15 bp, Homo sapiens
aatagcacgcttcag

SEQ ID NO: 35145 - DNA, 15 bp, Homo sapiens
gaatagcacgcttca

SEQ ID NO: 35146 - DNA, 15 bp, Homo sapiens
tgaatagcacgcttc

SEQ ID NO: 35147 - DNA, 15 bp, Homo sapiens
atgaatagcacgctt

SEQ ID NO: 35148 - DNA, 15 bp, Homo sapiens
aatgaatagcacgct

SEQ ID NO: 35149 - DNA, 15 bp, Homo sapiens
gaatgaatagcacgc

SEQ ID NO: 35150 - DNA, 15 bp, Homo sapiens
tgaatgaatagcacg

SEQ ID NO: 35151 - DNA, 15 bp, Homo sapiens
atgaatgaatagcac

SEQ ID NO: 35152 - DNA, 15 bp, Homo sapiens
aatgaatgaatagca

SEQ ID NO: 35153 - DNA, 15 bp, Homo sapiens
gaatgaatgaatagc

SEQ ID NO: 35154 - DNA, 15 bp, Homo sapiens
tgaatgaatgaatag

SEQ ID NO: 35155 - DNA, 15 bp, Homo sapiens
atgaatgaatgaata

SEQ ID NO: 35156 - DNA, 15 bp, Homo sapiens
aatgaatgaatgaat

SEQ ID NO: 35157 - DNA, 15 bp, Homo sapiens
gaatgaatgaatgaa

SEQ ID NO: 35158 - DNA, 15 bp, Homo sapiens
ggaatgaatgaatga

SEQ ID NO: 35159 - DNA, 15 bp, Homo sapiens
tggaatgaatgaatg

SEQ ID NO: 35160 - DNA, 15 bp, Homo sapiens
ttggaatgaatgaat

SEQ ID NO: 35161 - DNA, 15 bp, Homo sapiens
gttggaatgaatgaa

SEQ ID NO: 35162 - DNA, 15 bp, Homo sapiens
tgttggaatgaatga

SEQ ID NO: 35163 - DNA, 15 bp, Homo sapiens
ttgttggaatgaatg

SEQ ID NO: 35164 - DNA, 15 bp, Homo sapiens
tttgttggaatgaat

SEQ ID NO: 35165 - DNA, 15 bp, Homo sapiens
atttgttggaatgaa

SEQ ID NO: 35166 - DNA, 15 bp, Homo sapiens
catttgttggaatga

SEQ ID NO: 35167 - DNA, 15 bp, Homo sapiens
acatttgttggaatg

SEQ ID NO: 35168 - DNA, 15 bp, Homo sapiens
aacatttgttggaat

SEQ ID NO: 35169 - DNA, 15 bp, Homo sapiens
aaacatttgttggaa

SEQ ID NO: 35170 - DNA, 15 bp, Homo sapiens
taaacatttgttgga

SEQ ID NO: 35171 - DNA, 15 bp, Homo sapiens
gtaaacatttgttgg

SEQ ID NO: 35172 - DNA, 15 bp, Homo sapiens
agtaaacatttgttg

SEQ ID NO: 35173 - DNA, 15 bp, Homo sapiens
tagtaaacatttgtt

SEQ ID NO: 35174 - DNA, 15 bp, Homo sapiens
atagtaaacatttgt

SEQ ID NO: 35175 - DNA, 15 bp, Homo sapiens
catagtaaacatttg

SEQ ID NO: 35176 - DNA, 15 bp, Homo sapiens
acatagtaaacattt

SEQ ID NO: 35177 - DNA, 15 bp, Homo sapiens
cacatagtaaacatt

SEQ ID NO: 35178 - DNA, 15 bp, Homo sapiens
acacatagtaaacat

SEQ ID NO: 35179 - DNA, 15 bp, Homo sapiens
gacacatagtaaaca

SEQ ID NO: 35180 - DNA, 15 bp, Homo sapiens
agacacatagtaaac

SEQ ID NO: 35181 - DNA, 15 bp, Homo sapiens
tagacacatagtaaa

SEQ ID NO: 35182 - DNA, 15 bp, Homo sapiens
gtagacacatagtaa

SEQ ID NO: 35183 - DNA, 15 bp, Homo sapiens
agtagacacatagta

SEQ ID NO: 35184 - DNA, 15 bp, Homo sapiens
cagtagacacatagt

SEQ ID NO: 35185 - DNA, 15 bp, Homo sapiens
acagtagacacatag

SEQ ID NO: 35186 - DNA, 15 bp, Homo sapiens
cacagtagacacata

SEQ ID NO: 35187 - DNA, 15 bp, Homo sapiens
acacagtagacacat

SEQ ID NO: 35188 - DNA, 15 bp, Homo sapiens
cacacagtagacaca

SEQ ID NO: 35189 - DNA, 15 bp, Homo sapiens
gcacacagtagacac

SEQ ID NO: 35190 - DNA, 15 bp, Homo sapiens
ggcacacagtagaca

SEQ ID NO: 35191 - DNA, 15 bp, Homo sapiens
tggcacacagtagac

SEQ ID NO: 35192 - DNA, 15 bp, Homo sapiens
ttggcacacagtaga

SEQ ID NO: 35193 - DNA, 15 bp, Homo sapiens
cttggcacacagtag

SEQ ID NO: 35194 - DNA, 15 bp, Homo sapiens
acttggcacacagta

SEQ ID NO: 35195 - DNA, 15 bp, Homo sapiens
tacttggcacacagt

SEQ ID NO: 35196 - DNA, 15 bp, Homo sapiens
gtacttggcacacag

SEQ ID NO: 35197 - DNA, 15 bp, Homo sapiens
agtacttggcacaca

SEQ ID NO: 35198 - DNA, 15 bp, Homo sapiens
cagtacttggcacac

SEQ ID NO: 35199 - DNA, 15 bp, Homo sapiens
acagtacttggcaca

SEQ ID NO: 35200 - DNA, 15 bp, Homo sapiens
aacagtacttggcac

SEQ ID NO: 35201 - DNA, 15 bp, Homo sapiens
gaacagtacttggca

SEQ ID NO: 35202 - DNA, 15 bp, Homo sapiens
agaacagtacttggc

SEQ ID NO: 35203 - DNA, 15 bp, Homo sapiens
tagaacagtacttgg

SEQ ID NO: 35204 - DNA, 15 bp, Homo sapiens
ctagaacagtacttg

SEQ ID NO: 35205 - DNA, 15 bp, Homo sapiens
tctagaacagtactt

SEQ ID NO: 35206 - DNA, 15 bp, Homo sapiens
ttctagaacagtact

SEQ ID NO: 35207 - DNA, 15 bp, Homo sapiens
tttctagaacagtac

SEQ ID NO: 35208 - DNA, 15 bp, Homo sapiens
gtttctagaacagta

SEQ ID NO: 35209 - DNA, 15 bp, Homo sapiens
ggtttctagaacagt

SEQ ID NO: 35210 - DNA, 15 bp, Homo sapiens
tggtttctagaacag

SEQ ID NO: 35211 - DNA, 15 bp, Homo sapiens
ctggtttctagaaca

SEQ ID NO: 35212 - DNA, 15 bp, Homo sapiens
cctggtttctagaac

SEQ ID NO: 35213 - DNA, 15 bp, Homo sapiens
tcctggtttctagaa

SEQ ID NO: 35214 - DNA, 15 bp, Homo sapiens
ctcctggtttctaga

SEQ ID NO: 35215 - DNA, 15 bp, Homo sapiens
actcctggtttctag

SEQ ID NO: 35216 - DNA, 15 bp, Homo sapiens
tactcctggtttcta

SEQ ID NO: 35217 - DNA, 15 bp, Homo sapiens
atactcctggtttct

SEQ ID NO: 35218 - DNA, 15 bp, Homo sapiens
tatactcctggtttc

SEQ ID NO: 35219 - DNA, 15 bp, Homo sapiens
ctatactcctggttt

SEQ ID NO: 35220 - DNA, 15 bp, Homo sapiens
gctatactcctggtt

SEQ ID NO: 35221 - DNA, 15 bp, Homo sapiens
tgctatactcctggt

SEQ ID NO: 35222 - DNA, 15 bp, Homo sapiens
ctgctatactcctgg

SEQ ID NO: 35223 - DNA, 15 bp, Homo sapiens
actgctatactcctg

SEQ ID NO: 35224 - DNA, 15 bp, Homo sapiens
cactgctatactcct

SEQ ID NO: 35225 - DNA, 15 bp, Homo sapiens
tcactgctatactcc

SEQ ID NO: 35226 - DNA, 15 bp, Homo sapiens
ttcactgctatactc

SEQ ID NO: 35227 - DNA, 15 bp, Homo sapiens
gttcactgctatact

SEQ ID NO: 35228 - DNA, 15 bp, Homo sapiens
tgttcactgctatac

SEQ ID NO: 35229 - DNA, 15 bp, Homo sapiens
ttgttcactgctata

SEQ ID NO: 35230 - DNA, 15 bp, Homo sapiens
cttgttcactgctat

SEQ ID NO: 35231 - DNA, 15 bp, Homo sapiens
tcttgttcactgcta

SEQ ID NO: 35232 - DNA, 15 bp, Homo sapiens
gtcttgttcactgct

SEQ ID NO: 35233 - DNA, 15 bp, Homo sapiens
tgtcttgttcactgc

SEQ ID NO: 35234 - DNA, 15 bp, Homo sapiens
ctgtcttgttcactg

SEQ ID NO: 35235 - DNA, 15 bp, Homo sapiens
tctgtcttgttcact

SEQ ID NO: 35236 - DNA, 15 bp, Homo sapiens
gtctgtcttgttcac

SEQ ID NO: 35237 - DNA, 15 bp, Homo sapiens
tgtctgtcttgttca

SEQ ID NO: 35238 - DNA, 15 bp, Homo sapiens
ttgtctgtcttgttc

SEQ ID NO: 35239 - DNA, 15 bp, Homo sapiens
tttgtctgtcttgtt

SEQ ID NO: 35240 - DNA, 15 bp, Homo sapiens
ttttgtctgtcttgt

SEQ ID NO: 35241 - DNA, 15 bp, Homo sapiens
tttttgtctgtcttg

SEQ ID NO: 35242 - DNA, 15 bp, Homo sapiens
ttttttgtctgtctt

SEQ ID NO: 35243 - DNA, 15 bp, Homo sapiens
tttttttgtctgtct

SEQ ID NO: 35244 - DNA, 15 bp, Homo sapiens
ttttttttgtctgtc

SEQ ID NO: 35245 - DNA, 15 bp, Homo sapiens
tttttttttgtctgt

SEQ ID NO: 35246 - DNA, 15 bp, Homo sapiens
atttttttttgtctg

SEQ ID NO: 35247 - DNA, 15 bp, Homo sapiens
gatttttttttgtct

SEQ ID NO: 35248 - DNA, 15 bp, Homo sapiens
ggatttttttttgtc

SEQ ID NO: 35249 - DNA, 15 bp, Homo sapiens
gggatttttttttgt

SEQ ID NO: 35250 - DNA, 15 bp, Homo sapiens
ggggatttttttttg

SEQ ID NO: 35251 - DNA, 15 bp, Homo sapiens
tggggattttttttt

SEQ ID NO: 35252 - DNA, 15 bp, Homo sapiens
gtggggatttttttt

SEQ ID NO: 35253 - DNA, 15 bp, Homo sapiens
agtggggattttttt

SEQ ID NO: 35254 - DNA, 15 bp, Homo sapiens
gagtggggatttttt

SEQ ID NO: 35255 - DNA, 15 bp, Homo sapiens
agagtggggattttt

SEQ ID NO: 35256 - DNA, 15 bp, Homo sapiens
gagagtggggatttt

SEQ ID NO: 35257 - DNA, 15 bp, Homo sapiens
tgagagtggggattt

SEQ ID NO: 35258 - DNA, 15 bp, Homo sapiens
atgagagtggggatt

SEQ ID NO: 35259 - DNA, 15 bp, Homo sapiens
tatgagagtggggat

SEQ ID NO: 35260 - DNA, 15 bp, Homo sapiens
atatgagagtgggga

SEQ ID NO: 35261 - DNA, 15 bp, Homo sapiens
gatatgagagtgggg

SEQ ID NO: 35262 - DNA, 15 bp, Homo sapiens
agatatgagagtggg

SEQ ID NO: 35263 - DNA, 15 bp, Homo sapiens
tagatatgagagtgg

SEQ ID NO: 35264 - DNA, 15 bp, Homo sapiens
ttagatatgagagtg

SEQ ID NO: 35265 - DNA, 15 bp, Homo sapiens
gttagatatgagagt

SEQ ID NO: 35266 - DNA, 15 bp, Homo sapiens
tgttagatatgagag

SEQ ID NO: 35267 - DNA, 15 bp, Homo sapiens
ttgttagatatgaga

SEQ ID NO: 35268 - DNA, 15 bp, Homo sapiens
tttgttagatatgag

SEQ ID NO: 35269 - DNA, 15 bp, Homo sapiens
ttttgttagatatga

SEQ ID NO: 35270 - DNA, 15 bp, Homo sapiens
attttgttagatatg

SEQ ID NO: 35271 - DNA, 15 bp, Homo sapiens
cattttgttagatat

SEQ ID NO: 35272 - DNA, 15 bp, Homo sapiens
acattttgttagata

SEQ ID NO: 35273 - DNA, 15 bp, Homo sapiens
aacattttgttagat

SEQ ID NO: 35274 - DNA, 15 bp, Homo sapiens
caacattttgttaga

SEQ ID NO: 35275 - DNA, 15 bp, Homo sapiens
acaacattttgttag

SEQ ID NO: 35276 - DNA, 15 bp, Homo sapiens
tacaacattttgtta

SEQ ID NO: 35277 - DNA, 15 bp, Homo sapiens
atacaacattttgtt

SEQ ID NO: 35278 - DNA, 15 bp, Homo sapiens
catacaacattttgt

SEQ ID NO: 35279 - DNA, 15 bp, Homo sapiens
gcatacaacattttg

SEQ ID NO: 35280 - DNA, 15 bp, Homo sapiens
tgcatacaacatttt

SEQ ID NO: 35281 - DNA, 15 bp, Homo sapiens
atgcatacaacattt

SEQ ID NO: 35282 - DNA, 15 bp, Homo sapiens
aatgcatacaacatt

SEQ ID NO: 35283 - DNA, 15 bp, Homo sapiens
aaatgcatacaacat

SEQ ID NO: 35284 - DNA, 15 bp, Homo sapiens
taaatgcatacaaca

SEQ ID NO: 35285 - DNA, 15 bp, Homo sapiens
ataaatgcatacaac

SEQ ID NO: 35286 - DNA, 15 bp, Homo sapiens
gataaatgcatacaa

SEQ ID NO: 35287 - DNA, 15 bp, Homo sapiens
ggataaatgcataca

SEQ ID NO: 35288 - DNA, 15 bp, Homo sapiens
aggataaatgcatac

SEQ ID NO: 35289 - DNA, 15 bp, Homo sapiens
gaggataaatgcata

SEQ ID NO: 35290 - DNA, 15 bp, Homo sapiens
agaggataaatgcat

SEQ ID NO: 35291 - DNA, 15 bp, Homo sapiens
cagaggataaatgca

SEQ ID NO: 35292 - DNA, 15 bp, Homo sapiens
tcagaggataaatgc

SEQ ID NO: 35293 - DNA, 15 bp, Homo sapiens
gtcagaggataaatg

SEQ ID NO: 35294 - DNA, 15 bp, Homo sapiens
agtcagaggataaat

SEQ ID NO: 35295 - DNA, 15 bp, Homo sapiens
gagtcagaggataaa

SEQ ID NO: 35296 - DNA, 15 bp, Homo sapiens
tgagtcagaggataa

SEQ ID NO: 35297 - DNA, 15 bp, Homo sapiens
ctgagtcagaggata

SEQ ID NO: 35298 - DNA, 15 bp, Homo sapiens
gctgagtcagaggat

SEQ ID NO: 35299 - DNA, 15 bp, Homo sapiens
tgctgagtcagagga

SEQ ID NO: 35300 - DNA, 15 bp, Homo sapiens
ttgctgagtcagagg

SEQ ID NO: 35301 - DNA, 15 bp, Homo sapiens
attgctgagtcagag

SEQ ID NO: 35302 - DNA, 15 bp, Homo sapiens
gattgctgagtcaga

SEQ ID NO: 35303 - DNA, 15 bp, Homo sapiens
tgattgctgagtcag

SEQ ID NO: 35304 - DNA, 15 bp, Homo sapiens
gtgattgctgagtca

SEQ ID NO: 35305 - DNA, 15 bp, Homo sapiens
tgtgattgctgagtc

SEQ ID NO: 35306 - DNA, 15 bp, Homo sapiens
gtgtgattgctgagt

SEQ ID NO: 35307 - DNA, 15 bp, Homo sapiens
cgtgtgattgctgag

SEQ ID NO: 35308 - DNA, 15 bp, Homo sapiens
acgtgtgattgctga

SEQ ID NO: 35309 - DNA, 15 bp, Homo sapiens
gacgtgtgattgctg

SEQ ID NO: 35310 - DNA, 15 bp, Homo sapiens
agacgtgtgattgct

SEQ ID NO: 35311 - DNA, 15 bp, Homo sapiens
tagacgtgtgattgc

SEQ ID NO: 35312 - DNA, 15 bp, Homo sapiens
ttagacgtgtgattg

SEQ ID NO: 35313 - DNA, 15 bp, Homo sapiens
cttagacgtgtgatt

SEQ ID NO: 35314 - DNA, 15 bp, Homo sapiens
tcttagacgtgtgat

SEQ ID NO: 35315 - DNA, 15 bp, Homo sapiens
ctcttagacgtgtga

SEQ ID NO: 35316 - DNA, 15 bp, Homo sapiens
actcttagacgtgtg

SEQ ID NO: 35317 - DNA, 15 bp, Homo sapiens
aactcttagacgtgt

SEQ ID NO: 35318 - DNA, 15 bp, Homo sapiens
aaactcttagacgtg

SEQ ID NO: 35319 - DNA, 15 bp, Homo sapiens
taaactcttagacgt

SEQ ID NO: 35320 - DNA, 15 bp, Homo sapiens
ataaactcttagacg

SEQ ID NO: 35321 - DNA, 15 bp, Homo sapiens
gataaactcttagac

SEQ ID NO: 35322 - DNA, 15 bp, Homo sapiens
ggataaactcttaga

SEQ ID NO: 35323 - DNA, 15 bp, Homo sapiens
aggataaactcttag

SEQ ID NO: 35324 - DNA, 15 bp, Homo sapiens
caggataaactctta

SEQ ID NO: 35325 - DNA, 15 bp, Homo sapiens
tcaggataaactctt

SEQ ID NO: 35326 - DNA, 15 bp, Homo sapiens
ttcaggataaactct

SEQ ID NO: 35327 - DNA, 15 bp, Homo sapiens
cttcaggataaactc

SEQ ID NO: 35328 - DNA, 15 bp, Homo sapiens
tcttcaggataaact

SEQ ID NO: 35329 - DNA, 15 bp, Homo sapiens
atcttcaggataaac

SEQ ID NO: 35330 - DNA, 15 bp, Homo sapiens
catcttcaggataaa

SEQ ID NO: 35331 - DNA, 15 bp, Homo sapiens
gcatcttcaggataa

SEQ ID NO: 35332 - DNA, 15 bp, Homo sapiens
tgcatcttcaggata

SEQ ID NO: 35333 - DNA, 15 bp, Homo sapiens
atgcatcttcaggat

SEQ ID NO: 35334 - DNA, 15 bp, Homo sapiens
gatgcatcttcagga

SEQ ID NO: 35335 - DNA, 15 bp, Homo sapiens
agatgcatcttcagg

SEQ ID NO: 35336 - DNA, 15 bp, Homo sapiens
gagatgcatcttcag

SEQ ID NO: 35337 - DNA, 15 bp, Homo sapiens
ggagatgcatcttca

SEQ ID NO: 35338 - DNA, 15 bp, Homo sapiens
gggagatgcatcttc

SEQ ID NO: 35339 - DNA, 15 bp, Homo sapiens
tgggagatgcatctt

SEQ ID NO: 35340 - DNA, 15 bp, Homo sapiens
gtgggagatgcatct

SEQ ID NO: 35341 - DNA, 15 bp, Homo sapiens
tgtgggagatgcatc

SEQ ID NO: 35342 - DNA, 15 bp, Homo sapiens
ctgtgggagatgcat

SEQ ID NO: 35343 - DNA, 15 bp, Homo sapiens
actgtgggagatgca

SEQ ID NO: 35344 - DNA, 15 bp, Homo sapiens
cactgtgggagatgc

SEQ ID NO: 35345 - DNA, 15 bp, Homo sapiens
gcactgtgggagatg

SEQ ID NO: 35346 - DNA, 15 bp, Homo sapiens
tgcactgtgggagat

SEQ ID NO: 35347 - DNA, 15 bp, Homo sapiens
ttgcactgtgggaga

SEQ ID NO: 35348 - DNA, 15 bp, Homo sapiens
tttgcactgtgggag

SEQ ID NO: 35349 - DNA, 15 bp, Homo sapiens
ttttgcactgtggga

SEQ ID NO: 35350 - DNA, 15 bp, Homo sapiens
attttgcactgtggg

SEQ ID NO: 35351 - DNA, 15 bp, Homo sapiens
cattttgcactgtgg

SEQ ID NO: 35352 - DNA, 15 bp, Homo sapiens
tcattttgcactgtg

SEQ ID NO: 35353 - DNA, 15 bp, Homo sapiens
ttcattttgcactgt

SEQ ID NO: 35354 - DNA, 15 bp, Homo sapiens
attcattttgcactg

SEQ ID NO: 35355 - DNA, 15 bp, Homo sapiens
tattcattttgcact

SEQ ID NO: 35356 - DNA, 15 bp, Homo sapiens
atattcattttgcac

SEQ ID NO: 35357 - DNA, 15 bp, Homo sapiens
catattcattttgca

SEQ ID NO: 35358 - DNA, 15 bp, Homo sapiens
acatattcattttgc

SEQ ID NO: 35359 - DNA, 15 bp, Homo sapiens
tacatattcattttg

SEQ ID NO: 35360 - DNA, 15 bp, Homo sapiens
atacatattcatttt

SEQ ID NO: 35361 - DNA, 15 bp, Homo sapiens
tatacatattcattt

SEQ ID NO: 35362 - DNA, 15 bp, Homo sapiens
ttatacatattcatt

SEQ ID NO: 35363 - DNA, 15 bp, Homo sapiens
cttatacatattcat

SEQ ID NO: 35364 - DNA, 15 bp, Homo sapiens
ccttatacatattca

SEQ ID NO: 35365 - DNA, 15 bp, Homo sapiens
accttatacatattc

SEQ ID NO: 35366 - DNA, 15 bp, Homo sapiens
caccttatacatatt

SEQ ID NO: 35367 - DNA, 15 bp, Homo sapiens
tcaccttatacatat

SEQ ID NO: 35368 - DNA, 15 bp, Homo sapiens
atcaccttatacata

SEQ ID NO: 35369 - DNA, 15 bp, Homo sapiens
gatcaccttatacat

SEQ ID NO: 35370 - DNA, 15 bp, Homo sapiens
ggatcaccttataca

SEQ ID NO: 35371 - DNA, 15 bp, Homo sapiens
tggatcaccttatac

SEQ ID NO: 35372 - DNA, 15 bp, Homo sapiens
atggatcaccttata

SEQ ID NO: 35373 - DNA, 15 bp, Homo sapiens
aatggatcaccttat

SEQ ID NO: 35374 - DNA, 15 bp, Homo sapiens
caatggatcacctta

SEQ ID NO: 35375 - DNA, 15 bp, Homo sapiens
gcaatggatcacctt

SEQ ID NO: 35376 - DNA, 15 bp, Homo sapiens
tgcaatggatcacct

SEQ ID NO: 35377 - DNA, 15 bp, Homo sapiens
atgcaatggatcacc

SEQ ID NO: 35378 - DNA, 15 bp, Homo sapiens
aatgcaatggatcac

SEQ ID NO: 35379 - DNA, 15 bp, Homo sapiens
aaatgcaatggatca

SEQ ID NO: 35380 - DNA, 15 bp, Homo sapiens
caaatgcaatggatc

SEQ ID NO: 35381 - DNA, 15 bp, Homo sapiens
acaaatgcaatggat

SEQ ID NO: 35382 - DNA, 15 bp, Homo sapiens
tacaaatgcaatgga

SEQ ID NO: 35383 - DNA, 15 bp, Homo sapiens
ttacaaatgcaatgg

SEQ ID NO: 35384 - DNA, 15 bp, Homo sapiens
attacaaatgcaatg

SEQ ID NO: 35385 - DNA, 15 bp, Homo sapiens
aattacaaatgcaat

SEQ ID NO: 35386 - DNA, 15 bp, Homo sapiens
caattacaaatgcaa

SEQ ID NO: 35387 - DNA, 15 bp, Homo sapiens
gcaattacaaatgca

SEQ ID NO: 35388 - DNA, 15 bp, Homo sapiens
tgcaattacaaatgc

SEQ ID NO: 35389 - DNA, 15 bp, Homo sapiens
ttgcaattacaaatg

SEQ ID NO: 35390 - DNA, 15 bp, Homo sapiens
tttgcaattacaaat

SEQ ID NO: 35391 - DNA, 15 bp, Homo sapiens
ttttgcaattacaaa

SEQ ID NO: 35392 - DNA, 15 bp, Homo sapiens
attttgcaattacaa

SEQ ID NO: 35393 - DNA, 15 bp, Homo sapiens
cattttgcaattaca

SEQ ID NO: 35394 - DNA, 15 bp, Homo sapiens
gcattttgcaattac

SEQ ID NO: 35395 - DNA, 15 bp, Homo sapiens
agcattttgcaatta

SEQ ID NO: 35396 - DNA, 15 bp, Homo sapiens
cagcattttgcaatt

SEQ ID NO: 35397 - DNA, 15 bp, Homo sapiens
ccagcattttgcaat

SEQ ID NO: 35398 - DNA, 15 bp, Homo sapiens
tccagcattttgcaa

SEQ ID NO: 35399 - DNA, 15 bp, Homo sapiens
ttccagcattttgca

SEQ ID NO: 35400 - DNA, 15 bp, Homo sapiens
cttccagcattttgc

SEQ ID NO: 35401 - DNA, 15 bp, Homo sapiens
acttccagcattttg

SEQ ID NO: 35402 - DNA, 15 bp, Homo sapiens
aacttccagcatttt

SEQ ID NO: 35403 - DNA, 15 bp, Homo sapiens
taacttccagcattt

SEQ ID NO: 35404 - DNA, 15 bp, Homo sapiens
gtaacttccagcatt

SEQ ID NO: 35405 - DNA, 15 bp, Homo sapiens
ggtaacttccagcat

SEQ ID NO: 35406 - DNA, 15 bp, Homo sapiens
aggtaacttccagca

SEQ ID NO: 35407 - DNA, 15 bp, Homo sapiens
taggtaacttccagc

SEQ ID NO: 35408 - DNA, 15 bp, Homo sapiens
ttaggtaacttccag

SEQ ID NO: 35409 - DNA, 15 bp, Homo sapiens
tttaggtaacttcca

SEQ ID NO: 35410 - DNA, 15 bp, Homo sapiens
atttaggtaacttcc

SEQ ID NO: 35411 - DNA, 15 bp, Homo sapiens
catttaggtaacttc

SEQ ID NO: 35412 - DNA, 15 bp, Homo sapiens
acatttaggtaactt

SEQ ID NO: 35413 - DNA, 15 bp, Homo sapiens
aacatttaggtaact

SEQ ID NO: 35414 - DNA, 15 bp, Homo sapiens
aaacatttaggtaac

SEQ ID NO: 35415 - DNA, 15 bp, Homo sapiens
taaacatttaggtaa

SEQ ID NO: 35416 - DNA, 15 bp, Homo sapiens
ctaaacatttaggta

SEQ ID NO: 35417 - DNA, 15 bp, Homo sapiens
actaaacatttaggt

SEQ ID NO: 35418 - DNA, 15 bp, Homo sapiens
gactaaacatttagg

SEQ ID NO: 35419 - DNA, 15 bp, Homo sapiens
tgactaaacatttag

SEQ ID NO: 35420 - DNA, 15 bp, Homo sapiens
atgactaaacattta

SEQ ID NO: 35421 - DNA, 15 bp, Homo sapiens
aatgactaaacattt

SEQ ID NO: 35422 - DNA, 15 bp, Homo sapiens
caatgactaaacatt

SEQ ID NO: 35423 - DNA, 15 bp, Homo sapiens
acaatgactaaacat

SEQ ID NO: 35424 - DNA, 15 bp, Homo sapiens
tacaatgactaaaca

SEQ ID NO: 35425 - DNA, 15 bp, Homo sapiens
ctacaatgactaaac

SEQ ID NO: 35426 - DNA, 15 bp, Homo sapiens
tctacaatgactaaa

SEQ ID NO: 35427 - DNA, 15 bp, Homo sapiens
atctacaatgactaa

SEQ ID NO: 35428 - DNA, 15 bp, Homo sapiens
aatctacaatgacta

SEQ ID NO: 35429 - DNA, 15 bp, Homo sapiens
caatctacaatgact

SEQ ID NO: 35430 - DNA, 15 bp, Homo sapiens
ccaatctacaatgac

SEQ ID NO: 35431 - DNA, 15 bp, Homo sapiens
gccaatctacaatga

SEQ ID NO: 35432 - DNA, 15 bp, Homo sapiens
agccaatctacaatg

SEQ ID NO: 35433 - DNA, 15 bp, Homo sapiens
cagccaatctacaat

SEQ ID NO: 35434 - DNA, 15 bp, Homo sapiens
tcagccaatctacaa

SEQ ID NO: 35435 - DNA, 15 bp, Homo sapiens
ttcagccaatctaca

SEQ ID NO: 35436 - DNA, 15 bp, Homo sapiens
attcagccaatctac

SEQ ID NO: 35437 - DNA, 15 bp, Homo sapiens
tattcagccaatcta

SEQ ID NO: 35438 - DNA, 15 bp, Homo sapiens
ttattcagccaatct

SEQ ID NO: 35439 - DNA, 15 bp, Homo sapiens
attattcagccaatc

SEQ ID NO: 35440 - DNA, 15 bp, Homo sapiens
aattattcagccaat

SEQ ID NO: 35441 - DNA, 15 bp, Homo sapiens
aaattattcagccaa

SEQ ID NO: 35442 - DNA, 15 bp, Homo sapiens
taaattattcagcca

SEQ ID NO: 35443 - DNA, 15 bp, Homo sapiens
ataaattattcagcc

SEQ ID NO: 35444 - DNA, 15 bp, Homo sapiens
cataaattattcagc

SEQ ID NO: 35445 - DNA, 15 bp, Homo sapiens
ccataaattattcag

SEQ ID NO: 35446 - DNA, 15 bp, Homo sapiens
accataaattattca

SEQ ID NO: 35447 - DNA, 15 bp, Homo sapiens
taccataaattattc

SEQ ID NO: 35448 - DNA, 15 bp, Homo sapiens
gtaccataaattatt

SEQ ID NO: 35449 - DNA, 15 bp, Homo sapiens
tgtaccataaattat

SEQ ID NO: 35450 - DNA, 15 bp, Homo sapiens
ctgtaccataaatta

SEQ ID NO: 35451 - DNA, 15 bp, Homo sapiens
tctgtaccataaatt

SEQ ID NO: 35452 - DNA, 15 bp, Homo sapiens
gtctgtaccataaat

SEQ ID NO: 35453 - DNA, 15 bp, Homo sapiens
tgtctgtaccataaa

SEQ ID NO: 35454 - DNA, 15 bp, Homo sapiens
gtgtctgtaccataa

SEQ ID NO: 35455 - DNA, 15 bp, Homo sapiens
tgtgtctgtaccata

SEQ ID NO: 35456 - DNA, 15 bp, Homo sapiens
gtgtgtctgtaccat

SEQ ID NO: 35457 - DNA, 15 bp, Homo sapiens
tgtgtgtctgtacca

SEQ ID NO: 35458 - DNA, 15 bp, Homo sapiens
ttgtgtgtctgtacc

SEQ ID NO: 35459 - DNA, 15 bp, Homo sapiens
attgtgtgtctgtac

SEQ ID NO: 35460 - DNA, 15 bp, Homo sapiens
tattgtgtgtctgta

SEQ ID NO: 35461 - DNA, 15 bp, Homo sapiens
ttattgtgtgtctgt

SEQ ID NO: 35462 - DNA, 15 bp, Homo sapiens
tttattgtgtgtctg

SEQ ID NO: 35463 - DNA, 15 bp, Homo sapiens
ctttattgtgtgtct

SEQ ID NO: 35464 - DNA, 15 bp, Homo sapiens
actttattgtgtgtc

SEQ ID NO: 35465 - DNA, 15 bp, Homo sapiens
gactttattgtgtgt

SEQ ID NO: 35466 - DNA, 15 bp, Homo sapiens
agactttattgtgtg

SEQ ID NO: 35467 - DNA, 15 bp, Homo sapiens
aagactttattgtgt

SEQ ID NO: 35468 - DNA, 15 bp, Homo sapiens
taagactttattgtg

SEQ ID NO: 35469 - DNA, 15 bp, Homo sapiens
gtaagactttattgt

SEQ ID NO: 35470 - DNA, 15 bp, Homo sapiens
cgtaagactttattg

SEQ ID NO: 35471 - DNA, 15 bp, Homo sapiens
gcgtaagactttatt

SEQ ID NO: 35472 - DNA, 15 bp, Homo sapiens
tgcgtaagactttat

SEQ ID NO: 35473 - DNA, 15 bp, Homo sapiens
ttgcgtaagacttta

SEQ ID NO: 35474 - DNA, 15 bp, Homo sapiens
gttgcgtaagacttt

SEQ ID NO: 35475 - DNA, 15 bp, Homo sapiens
agttgcgtaagactt

SEQ ID NO: 35476 - DNA, 15 bp, Homo sapiens
tagttgcgtaagact

SEQ ID NO: 35477 - DNA, 15 bp, Homo sapiens
atagttgcgtaagac

SEQ ID NO: 35478 - DNA, 15 bp, Homo sapiens
tatagttgcgtaaga

SEQ ID NO: 35479 - DNA, 15 bp, Homo sapiens
ttatagttgcgtaag

SEQ ID NO: 35480 - DNA, 15 bp, Homo sapiens
tttatagttgcgtaa

SEQ ID NO: 35481 - DNA, 15 bp, Homo sapiens
ttttatagttgcgta

SEQ ID NO: 35482 - DNA, 15 bp, Homo sapiens
tttttatagttgcgt

SEQ ID NO: 35483 - DNA, 15 bp, Homo sapiens
ttttttatagttgcg

SEQ ID NO: 35484 - DNA, 15 bp, Homo sapiens
cttttttatagttgc

SEQ ID NO: 35485 - DNA, 15 bp, Homo sapiens
tcttttttatagttg

SEQ ID NO: 35486 - DNA, 15 bp, Homo sapiens
ttcttttttatagtt

SEQ ID NO: 35487 - DNA, 15 bp, Homo sapiens
cttcttttttatagt

SEQ ID NO: 35488 - DNA, 15 bp, Homo sapiens
tcttcttttttatag

SEQ ID NO: 35489 - DNA, 15 bp, Homo sapiens
ttcttcttttttata

SEQ ID NO: 35490 - DNA, 15 bp, Homo sapiens
cttcttcttttttat

SEQ ID NO: 35491 - DNA, 15 bp, Homo sapiens
tcttcttctttttta

SEQ ID NO: 35492 - DNA, 15 bp, Homo sapiens
ttcttcttctttttt

SEQ ID NO: 35493 - DNA, 15 bp, Homo sapiens
tttcttcttcttttt

SEQ ID NO: 35494 - DNA, 15 bp, Homo sapiens
ttttcttcttctttt

SEQ ID NO: 35495 - DNA, 15 bp, Homo sapiens
cttttcttcttcttt

SEQ ID NO: 35496 - DNA, 15 bp, Homo sapiens
acttttcttcttctt

SEQ ID NO: 35497 - DNA, 15 bp, Homo sapiens
gacttttcttcttct

SEQ ID NO: 35498 - DNA, 15 bp, Homo sapiens
agacttttcttcttc

SEQ ID NO: 35499 - DNA, 15 bp, Homo sapiens
gagacttttcttctt

SEQ ID NO: 35500 - DNA, 15 bp, Homo sapiens
tgagacttttcttct

SEQ ID NO: 35501 - DNA, 15 bp, Homo sapiens
ctgagacttttcttc

SEQ ID NO: 35502 - DNA, 15 bp, Homo sapiens
actgagacttttctt

SEQ ID NO: 35503 - DNA, 15 bp, Homo sapiens
tactgagacttttct

SEQ ID NO: 35504 - DNA, 15 bp, Homo sapiens
ttactgagacttttc

SEQ ID NO: 35505 - DNA, 15 bp, Homo sapiens
tttactgagactttt

SEQ ID NO: 35506 - DNA, 15 bp, Homo sapiens
gtttactgagacttt

SEQ ID NO: 35507 - DNA, 15 bp, Homo sapiens
agtttactgagactt

SEQ ID NO: 35508 - DNA, 15 bp, Homo sapiens
cagtttactgagact

SEQ ID NO: 35509 - DNA, 15 bp, Homo sapiens
tcagtttactgagac

SEQ ID NO: 35510 - DNA, 15 bp, Homo sapiens
atcagtttactgaga

SEQ ID NO: 35511 - DNA, 15 bp, Homo sapiens
tatcagtttactgag

SEQ ID NO: 35512 - DNA, 15 bp, Homo sapiens
atatcagtttactga

SEQ ID NO: 35513 - DNA, 15 bp, Homo sapiens
catatcagtttactg

SEQ ID NO: 35514 - DNA, 15 bp, Homo sapiens
ccatatcagtttact

SEQ ID NO: 35515 - DNA, 15 bp, Homo sapiens
tccatatcagtttac

SEQ ID NO: 35516 - DNA, 15 bp, Homo sapiens
ctccatatcagttta

SEQ ID NO: 35517 - DNA, 15 bp, Homo sapiens
tctccatatcagttt

SEQ ID NO: 35518 - DNA, 15 bp, Homo sapiens
atctccatatcagtt

SEQ ID NO: 35519 - DNA, 15 bp, Homo sapiens
tatctccatatcagt

SEQ ID NO: 35520 - DNA, 15 bp, Homo sapiens
atatctccatatcag

SEQ ID NO: 35521 - DNA, 15 bp, Homo sapiens
aatatctccatatca

SEQ ID NO: 35522 - DNA, 15 bp, Homo sapiens
aaatatctccatatc

SEQ ID NO: 35523 - DNA, 15 bp, Homo sapiens
gaaatatctccatat

SEQ ID NO: 35524 - DNA, 15 bp, Homo sapiens
ggaaatatctccata

SEQ ID NO: 35525 - DNA, 15 bp, Homo sapiens
tggaaatatctccat

SEQ ID NO: 35526 - DNA, 15 bp, Homo sapiens
ctggaaatatctcca

SEQ ID NO: 35527 - DNA, 15 bp, Homo sapiens
actggaaatatctcc

SEQ ID NO: 35528 - DNA, 15 bp, Homo sapiens
tactggaaatatctc

SEQ ID NO: 35529 - DNA, 15 bp, Homo sapiens
ttactggaaatatct

SEQ ID NO: 35530 - DNA, 15 bp, Homo sapiens
tttactggaaatatc

SEQ ID NO: 35531 - DNA, 15 bp, Homo sapiens
atttactggaaatat

SEQ ID NO: 35532 - DNA, 15 bp, Homo sapiens
tatttactggaaata

SEQ ID NO: 35533 - DNA, 15 bp, Homo sapiens
gtatttactggaaat

SEQ ID NO: 35534 - DNA, 15 bp, Homo sapiens
agtatttactggaaa

SEQ ID NO: 35535 - DNA, 15 bp, Homo sapiens
cagtatttactggaa

SEQ ID NO: 35536 - DNA, 15 bp, Homo sapiens
acagtatttactgga

SEQ ID NO: 35537 - DNA, 15 bp, Homo sapiens
aacagtatttactgg

SEQ ID NO: 35538 - DNA, 15 bp, Homo sapiens
taacagtatttactg

SEQ ID NO: 35539 - DNA, 15 bp, Homo sapiens
ttaacagtatttact

SEQ ID NO: 35540 - DNA, 15 bp, Homo sapiens
tttaacagtatttac

SEQ ID NO: 35541 - DNA, 15 bp, Homo sapiens
atttaacagtattta

SEQ ID NO: 35542 - DNA, 15 bp, Homo sapiens
catttaacagtattt

SEQ ID NO: 35543 - DNA, 15 bp, Homo sapiens
tcatttaacagtatt

SEQ ID NO: 35544 - DNA, 15 bp, Homo sapiens
atcatttaacagtat

SEQ ID NO: 35545 - DNA, 15 bp, Homo sapiens
tatcatttaacagta

SEQ ID NO: 35546 - DNA, 15 bp, Homo sapiens
ttatcatttaacagt

SEQ ID NO: 35547 - DNA, 15 bp, Homo sapiens
tttatcatttaacag

SEQ ID NO: 35548 - DNA, 15 bp, Homo sapiens
ttttatcatttaaca

SEQ ID NO: 35549 - DNA, 15 bp, Homo sapiens
tttttatcatttaac

SEQ ID NO: 35550 - DNA, 15 bp, Homo sapiens
ctttttatcatttaa

SEQ ID NO: 35551 - DNA, 15 bp, Homo sapiens
gctttttatcattta

SEQ ID NO: 35552 - DNA, 15 bp, Homo sapiens
tgctttttatcattt

SEQ ID NO: 35553 - DNA, 15 bp, Homo sapiens
ttgctttttatcatt

SEQ ID NO: 35554 - DNA, 15 bp, Homo sapiens
tttgctttttatcat

SEQ ID NO: 35555 - DNA, 15 bp, Homo sapiens
ctttgctttttatca

SEQ ID NO: 35556 - DNA, 15 bp, Homo sapiens
actttgctttttatc

SEQ ID NO: 35557 - DNA, 15 bp, Homo sapiens
cactttgctttttat

SEQ ID NO: 35558 - DNA, 15 bp, Homo sapiens
ccactttgcttttta

SEQ ID NO: 35559 - DNA, 15 bp, Homo sapiens
tccactttgcttttt

SEQ ID NO: 35560 - DNA, 15 bp, Homo sapiens
ttccactttgctttt

SEQ ID NO: 35561 - DNA, 15 bp, Homo sapiens
tttccactttgcttt

SEQ ID NO: 35562 - DNA, 15 bp, Homo sapiens
ttttccactttgctt

SEQ ID NO: 35563 - DNA, 15 bp, Homo sapiens
gttttccactttgct

SEQ ID NO: 35564 - DNA, 15 bp, Homo sapiens
tgttttccactttgc

SEQ ID NO: 35565 - DNA, 15 bp, Homo sapiens
ctgttttccactttg

SEQ ID NO: 35566 - DNA, 15 bp, Homo sapiens
tctgttttccacttt

SEQ ID NO: 35567 - DNA, 15 bp, Homo sapiens
ttctgttttccactt

SEQ ID NO: 35568 - DNA, 15 bp, Homo sapiens
gttctgttttccact

SEQ ID NO: 35569 - DNA, 15 bp, Homo sapiens
tgttctgttttccac

SEQ ID NO: 35570 - DNA, 15 bp, Homo sapiens
atgttctgttttcca

SEQ ID NO: 35571 - DNA, 15 bp, Homo sapiens
tatgttctgttttcc

SEQ ID NO: 35572 - DNA, 15 bp, Homo sapiens
ctatgttctgttttc

SEQ ID NO: 35573 - DNA, 15 bp, Homo sapiens
tctatgttctgtttt

SEQ ID NO: 35574 - DNA, 15 bp, Homo sapiens
ctctatgttctgttt

SEQ ID NO: 35575 - DNA, 15 bp, Homo sapiens
tctctatgttctgtt

SEQ ID NO: 35576 - DNA, 15 bp, Homo sapiens
ttctctatgttctgt

SEQ ID NO: 35577 - DNA, 15 bp, Homo sapiens
gttctctatgttctg

SEQ ID NO: 35578 - DNA, 15 bp, Homo sapiens
cgttctctatgttct

SEQ ID NO: 35579 - DNA, 15 bp, Homo sapiens
gcgttctctatgttc

SEQ ID NO: 35580 - DNA, 15 bp, Homo sapiens
agcgttctctatgtt

SEQ ID NO: 35581 - DNA, 15 bp, Homo sapiens
tagcgttctctatgt

SEQ ID NO: 35582 - DNA, 15 bp, Homo sapiens
gtagcgttctctatg

SEQ ID NO: 35583 - DNA, 15 bp, Homo sapiens
agtagcgttctctat

SEQ ID NO: 35584 - DNA, 15 bp, Homo sapiens
aagtagcgttctcta

SEQ ID NO: 35585 - DNA, 15 bp, Homo sapiens
aaagtagcgttctct

SEQ ID NO: 35586 - DNA, 15 bp, Homo sapiens
caaagtagcgttctc

SEQ ID NO: 35587 - DNA, 15 bp, Homo sapiens
acaaagtagcgttct

SEQ ID NO: 35588 - DNA, 15 bp, Homo sapiens
tacaaagtagcgttc

SEQ ID NO: 35589 - DNA, 15 bp, Homo sapiens
atacaaagtagcgtt

SEQ ID NO: 35590 - DNA, 15 bp, Homo sapiens
catacaaagtagcgt

SEQ ID NO: 35591 - DNA, 15 bp, Homo sapiens
acatacaaagtagcg

SEQ ID NO: 35592 - DNA, 15 bp, Homo sapiens
tacatacaaagtagc

SEQ ID NO: 35593 - DNA, 15 bp, Homo sapiens
ttacatacaaagtag

SEQ ID NO: 35594 - DNA, 15 bp, Homo sapiens
cttacatacaaagta

SEQ ID NO: 35595 - DNA, 15 bp, Homo sapiens
tcttacatacaaagt

SEQ ID NO: 35596 - DNA, 15 bp, Homo sapiens
ttcttacatacaaag

SEQ ID NO: 35597 - DNA, 15 bp, Homo sapiens
tttcttacatacaaa

SEQ ID NO: 35598 - DNA, 15 bp, Homo sapiens
ctttcttacatacaa

SEQ ID NO: 35599 - DNA, 15 bp, Homo sapiens
tctttcttacataca

SEQ ID NO: 35600 - DNA, 15 bp, Homo sapiens
ttctttcttacatac

SEQ ID NO: 35601 - DNA, 15 bp, Homo sapiens
cttctttcttacata

SEQ ID NO: 35602 - DNA, 15 bp, Homo sapiens
ccttctttcttacat

SEQ ID NO: 35603 - DNA, 15 bp, Homo sapiens
tccttctttcttaca

SEQ ID NO: 35604 - DNA, 15 bp, Homo sapiens
ttccttctttcttac

SEQ ID NO: 35605 - DNA, 15 bp, Homo sapiens
tttccttctttctta

SEQ ID NO: 35606 - DNA, 15 bp, Homo sapiens
ttttccttctttctt

SEQ ID NO: 35607 - DNA, 15 bp, Homo sapiens
tttttccttctttct

SEQ ID NO: 35608 - DNA, 15 bp, Homo sapiens
gtttttccttctttc

SEQ ID NO: 35609 - DNA, 15 bp, Homo sapiens
tgtttttccttcttt

SEQ ID NO: 35610 - DNA, 15 bp, Homo sapiens
ttgtttttccttctt

SEQ ID NO: 35611 - DNA, 15 bp, Homo sapiens
cttgtttttccttct

SEQ ID NO: 35612 - DNA, 15 bp, Homo sapiens
tcttgtttttccttc

SEQ ID NO: 35613 - DNA, 15 bp, Homo sapiens
ttcttgtttttcctt

SEQ ID NO: 35614 - DNA, 15 bp, Homo sapiens
tttcttgtttttcct

SEQ ID NO: 35615 - DNA, 15 bp, Homo sapiens
ctttcttgtttttcc

SEQ ID NO: 35616 - DNA, 15 bp, Homo sapiens
actttcttgtttttc

SEQ ID NO: 35617 - DNA, 15 bp, Homo sapiens
tactttcttgttttt

SEQ ID NO: 35618 - DNA, 15 bp, Homo sapiens
ttactttcttgtttt

SEQ ID NO: 35619 - DNA, 15 bp, Homo sapiens
tttactttcttgttt

SEQ ID NO: 35620 - DNA, 15 bp, Homo sapiens
gtttactttcttgtt

SEQ ID NO: 35621 - DNA, 15 bp, Homo sapiens
cgtttactttcttgt

SEQ ID NO: 35622 - DNA, 15 bp, Homo sapiens
acgtttactttcttg

SEQ ID NO: 35623 - DNA, 15 bp, Homo sapiens
tacgtttactttctt

SEQ ID NO: 35624 - DNA, 15 bp, Homo sapiens
atacgtttactttct

SEQ ID NO: 35625 - DNA, 15 bp, Homo sapiens
catacgtttactttc

SEQ ID NO: 35626 - DNA, 15 bp, Homo sapiens
acatacgtttacttt

SEQ ID NO: 35627 - DNA, 15 bp, Homo sapiens
gacatacgtttactt

SEQ ID NO: 35628 - DNA, 15 bp, Homo sapiens
agacatacgtttact

SEQ ID NO: 35629 - DNA, 15 bp, Homo sapiens
cagacatacgtttac

SEQ ID NO: 35630 - DNA, 15 bp, Homo sapiens
gcagacatacgttta

SEQ ID NO: 35631 - DNA, 15 bp, Homo sapiens
agcagacatacgttt

SEQ ID NO: 35632 - DNA, 15 bp, Homo sapiens
aagcagacatacgtt

SEQ ID NO: 35633 - DNA, 15 bp, Homo sapiens
taagcagacatacgt

SEQ ID NO: 35634 - DNA, 15 bp, Homo sapiens
gtaagcagacatacg

SEQ ID NO: 35635 - DNA, 15 bp, Homo sapiens
ggtaagcagacatac

SEQ ID NO: 35636 - DNA, 15 bp, Homo sapiens
aggtaagcagacata

SEQ ID NO: 35637 - DNA, 15 bp, Homo sapiens
aaggtaagcagacat

SEQ ID NO: 35638 - DNA, 15 bp, Homo sapiens
aaaggtaagcagaca

SEQ ID NO: 35639 - DNA, 15 bp, Homo sapiens
caaaggtaagcagac

SEQ ID NO: 35640 - DNA, 15 bp, Homo sapiens
gcaaaggtaagcaga

SEQ ID NO: 35641 - DNA, 15 bp, Homo sapiens
tgcaaaggtaagcag

SEQ ID NO: 35642 - DNA, 15 bp, Homo sapiens
ttgcaaaggtaagca

SEQ ID NO: 35643 - DNA, 15 bp, Homo sapiens
tttgcaaaggtaagc

SEQ ID NO: 35644 - DNA, 15 bp, Homo sapiens
atttgcaaaggtaag

SEQ ID NO: 35645 - DNA, 15 bp, Homo sapiens
tatttgcaaaggtaa

SEQ ID NO: 35646 - DNA, 15 bp, Homo sapiens
ctatttgcaaaggta

SEQ ID NO: 35647 - DNA, 15 bp, Homo sapiens
tctatttgcaaaggt

SEQ ID NO: 35648 - DNA, 15 bp, Homo sapiens
ttctatttgcaaagg

SEQ ID NO: 35649 - DNA, 15 bp, Homo sapiens
gttctatttgcaaag

SEQ ID NO: 35650 - DNA, 15 bp, Homo sapiens
cgttctatttgcaaa

SEQ ID NO: 35651 - DNA, 15 bp, Homo sapiens
acgttctatttgcaa

SEQ ID NO: 35652 - DNA, 15 bp, Homo sapiens
tacgttctatttgca

SEQ ID NO: 35653 - DNA, 15 bp, Homo sapiens
ctacgttctatttgc

SEQ ID NO: 35654 - DNA, 15 bp, Homo sapiens
tctacgttctatttg

SEQ ID NO: 35655 - DNA, 15 bp, Homo sapiens
ttctacgttctattt

SEQ ID NO: 35656 - DNA, 15 bp, Homo sapiens
tttctacgttctatt

SEQ ID NO: 35657 - DNA, 15 bp, Homo sapiens
ctttctacgttctat

SEQ ID NO: 35658 - DNA, 15 bp, Homo sapiens
cctttctacgttcta

SEQ ID NO: 35659 - DNA, 15 bp, Homo sapiens
tcctttctacgttct

SEQ ID NO: 35660 - DNA, 15 bp, Homo sapiens
atcctttctacgttc

SEQ ID NO: 35661 - DNA, 15 bp, Homo sapiens
tatcctttctacgtt

SEQ ID NO: 35662 - DNA, 15 bp, Homo sapiens
ttatcctttctacgt

SEQ ID NO: 35663 - DNA, 15 bp, Homo sapiens
tttatcctttctacg

SEQ ID NO: 35664 - DNA, 15 bp, Homo sapiens
gtttatcctttctac

SEQ ID NO: 35665 - DNA, 15 bp, Homo sapiens
ggtttatcctttcta

SEQ ID NO: 35666 - DNA, 15 bp, Homo sapiens
tggtttatcctttct

SEQ ID NO: 35667 - DNA, 15 bp, Homo sapiens
ctggtttatcctttc

SEQ ID NO: 35668 - DNA, 15 bp, Homo sapiens
tctggtttatccttt

SEQ ID NO: 35669 - DNA, 15 bp, Homo sapiens
ttctggtttatcctt

SEQ ID NO: 35670 - DNA, 15 bp, Homo sapiens
tttctggtttatcct

SEQ ID NO: 35671 - DNA, 15 bp, Homo sapiens
ttttctggtttatcc

SEQ ID NO: 35672 - DNA, 15 bp, Homo sapiens
gttttctggtttatc

SEQ ID NO: 35673 - DNA, 15 bp, Homo sapiens
tgttttctggtttat

SEQ ID NO: 35674 - DNA, 15 bp, Homo sapiens
ttgttttctggttta

SEQ ID NO: 35675 - DNA, 15 bp, Homo sapiens
attgttttctggttt

SEQ ID NO: 35676 - DNA, 15 bp, Homo sapiens
cattgttttctggtt

SEQ ID NO: 35677 - DNA, 15 bp, Homo sapiens
tcattgttttctggt

SEQ ID NO: 35678 - DNA, 15 bp, Homo sapiens
ttcattgttttctgg

SEQ ID NO: 35679 - DNA, 15 bp, Homo sapiens
attcattgttttctg

SEQ ID NO: 35680 - DNA, 15 bp, Homo sapiens
aattcattgttttct

SEQ ID NO: 35681 - DNA, 15 bp, Homo sapiens
aaattcattgttttc

SEQ ID NO: 35682 - DNA, 15 bp, Homo sapiens
caaattcattgtttt

SEQ ID NO: 35683 - DNA, 15 bp, Homo sapiens
ccaaattcattgttt

SEQ ID NO: 35684 - DNA, 15 bp, Homo sapiens
accaaattcattgtt

SEQ ID NO: 35685 - DNA, 15 bp, Homo sapiens
caccaaattcattgt

SEQ ID NO: 35686 - DNA, 15 bp, Homo sapiens
tcaccaaattcattg

SEQ ID NO: 35687 - DNA, 15 bp, Homo sapiens
atcaccaaattcatt

SEQ ID NO: 35688 - DNA, 15 bp, Homo sapiens
gatcaccaaattcat

SEQ ID NO: 35689 - DNA, 15 bp, Homo sapiens
tgatcaccaaattca

SEQ ID NO: 35690 - DNA, 15 bp, Homo sapiens
ttgatcaccaaattc

SEQ ID NO: 35691 - DNA, 15 bp, Homo sapiens
gttgatcaccaaatt

SEQ ID NO: 35692 - DNA, 15 bp, Homo sapiens
tgttgatcaccaaat

SEQ ID NO: 35693 - DNA, 15 bp, Homo sapiens
ttgttgatcaccaaa

SEQ ID NO: 35694 - DNA, 15 bp, Homo sapiens
cttgttgatcaccaa

SEQ ID NO: 35695 - DNA, 15 bp, Homo sapiens
tcttgttgatcacca

SEQ ID NO: 35696 - DNA, 15 bp, Homo sapiens
ttcttgttgatcacc

SEQ ID NO: 35697 - DNA, 15 bp, Homo sapiens
cttcttgttgatcac

SEQ ID NO: 35698 - DNA, 15 bp, Homo sapiens
tcttcttgttgatca

SEQ ID NO: 35699 - DNA, 15 bp, Homo sapiens
ttcttcttgttgatc

SEQ ID NO: 35700 - DNA, 15 bp, Homo sapiens
tttcttcttgttgat

SEQ ID NO: 35701 - DNA, 15 bp, Homo sapiens
ttttcttcttgttga

SEQ ID NO: 35702 - DNA, 15 bp, Homo sapiens
attttcttcttgttg

SEQ ID NO: 35703 - DNA, 15 bp, Homo sapiens
cattttcttcttgtt

SEQ ID NO: 35704 - DNA, 15 bp, Homo sapiens
ccattttcttcttgt

SEQ ID NO: 35705 - DNA, 15 bp, Homo sapiens
cccattttcttcttg

SEQ ID NO: 35706 - DNA, 15 bp, Homo sapiens
tcccattttcttctt

SEQ ID NO: 35707 - DNA, 15 bp, Homo sapiens
ttcccattttcttct

SEQ ID NO: 35708 - DNA, 15 bp, Homo sapiens
cttcccattttcttc

SEQ ID NO: 35709 - DNA, 15 bp, Homo sapiens
tcttcccattttctt

SEQ ID NO: 35710 - DNA, 15 bp, Homo sapiens
ttcttcccattttct

SEQ ID NO: 35711 - DNA, 15 bp, Homo sapiens
tttcttcccattttc

SEQ ID NO: 35712 - DNA, 15 bp, Homo sapiens
ctttcttcccatttt

SEQ ID NO: 35713 - DNA, 15 bp, Homo sapiens
tctttcttcccattt

SEQ ID NO: 35714 - DNA, 15 bp, Homo sapiens
ttctttcttcccatt

SEQ ID NO: 35715 - DNA, 15 bp, Homo sapiens
tttctttcttcccat

SEQ ID NO: 35716 - DNA, 15 bp, Homo sapiens
ttttctttcttccca

SEQ ID NO: 35717 - DNA, 15 bp, Homo sapiens
tttttctttcttccc

SEQ ID NO: 35718 - DNA, 15 bp, Homo sapiens
atttttctttcttcc

SEQ ID NO: 35719 - DNA, 15 bp, Homo sapiens
catttttctttcttc

SEQ ID NO: 35720 - DNA, 15 bp, Homo sapiens
ccatttttctttctt

SEQ ID NO: 35721 - DNA, 15 bp, Homo sapiens
cccatttttctttct

SEQ ID NO: 35722 - DNA, 15 bp, Homo sapiens
tcccatttttctttc

SEQ ID NO: 35723 - DNA, 15 bp, Homo sapiens
ctcccatttttcttt

SEQ ID NO: 35724 - DNA, 15 bp, Homo sapiens
cctcccatttttctt

SEQ ID NO: 35725 - DNA, 15 bp, Homo sapiens
tcctcccatttttct

SEQ ID NO: 35726 - DNA, 15 bp, Homo sapiens
ttcctcccatttttc

SEQ ID NO: 35727 - DNA, 15 bp, Homo sapiens
tttcctcccattttt

SEQ ID NO: 35728 - DNA, 15 bp, Homo sapiens
gtttcctcccatttt

SEQ ID NO: 35729 - DNA, 15 bp, Homo sapiens
tgtttcctcccattt

SEQ ID NO: 35730 - DNA, 15 bp, Homo sapiens
ctgtttcctcccatt

SEQ ID NO: 35731 - DNA, 15 bp, Homo sapiens
actgtttcctcccat

SEQ ID NO: 35732 - DNA, 15 bp, Homo sapiens
tactgtttcctccca

SEQ ID NO: 35733 - DNA, 15 bp, Homo sapiens
gtactgtttcctccc

SEQ ID NO: 35734 - DNA, 15 bp, Homo sapiens
agtactgtttcctcc

SEQ ID NO: 35735 - DNA, 15 bp, Homo sapiens
aagtactgtttcctc

SEQ ID NO: 35736 - DNA, 15 bp, Homo sapiens
gaagtactgtttcct

SEQ ID NO: 35737 - DNA, 15 bp, Homo sapiens
agaagtactgtttcc

SEQ ID NO: 35738 - DNA, 15 bp, Homo sapiens
cagaagtactgtttc

SEQ ID NO: 35739 - DNA, 15 bp, Homo sapiens
ccagaagtactgttt

SEQ ID NO: 35740 - DNA, 15 bp, Homo sapiens
cccagaagtactgtt

SEQ ID NO: 35741 - DNA, 15 bp, Homo sapiens
ccccagaagtactgt

SEQ ID NO: 35742 - DNA, 15 bp, Homo sapiens
tccccagaagtactg

SEQ ID NO: 35743 - DNA, 15 bp, Homo sapiens
atccccagaagtact

SEQ ID NO: 35744 - DNA, 15 bp, Homo sapiens
tatccccagaagtac

SEQ ID NO: 35745 - DNA, 15 bp, Homo sapiens
atatccccagaagta

SEQ ID NO: 35746 - DNA, 15 bp, Homo sapiens
tatatccccagaagt

SEQ ID NO: 35747 - DNA, 15 bp, Homo sapiens
atatatccccagaag

SEQ ID NO: 35748 - DNA, 15 bp, Homo sapiens
aatatatccccagaa

SEQ ID NO: 35749 - DNA, 15 bp, Homo sapiens
aaatatatccccaga

SEQ ID NO: 35750 - DNA, 15 bp, Homo sapiens
aaaatatatccccag

SEQ ID NO: 35751 - DNA, 15 bp, Homo sapiens
aaaaatatatcccca

SEQ ID NO: 35752 - DNA, 15 bp, Homo sapiens
caaaaatatatcccc

SEQ ID NO: 35753 - DNA, 15 bp, Homo sapiens
acaaaaatatatccc

SEQ ID NO: 35754 - DNA, 15 bp, Homo sapiens
tacaaaaatatatcc

SEQ ID NO: 35755 - DNA, 15 bp, Homo sapiens
atacaaaaatatatc

SEQ ID NO: 35756 - DNA, 15 bp, Homo sapiens
tatacaaaaatatat

SEQ ID NO: 35757 - DNA, 15 bp, Homo sapiens
ctatacaaaaatata

SEQ ID NO: 35758 - DNA, 15 bp, Homo sapiens
actatacaaaaatat

SEQ ID NO: 35759 - DNA, 15 bp, Homo sapiens
aactatacaaaaata

SEQ ID NO: 35760 - DNA, 15 bp, Homo sapiens
aaactatacaaaaat

SEQ ID NO: 35761 - DNA, 15 bp, Homo sapiens
aaaactatacaaaaa

SEQ ID NO: 35762 - DNA, 15 bp, Homo sapiens
taaaactatacaaaa

SEQ ID NO: 35763 - DNA, 15 bp, Homo sapiens
ttaaaactatacaaa

SEQ ID NO: 35764 - DNA, 15 bp, Homo sapiens
attaaaactatacaa

SEQ ID NO: 35765 - DNA, 15 bp, Homo sapiens
aattaaaactataca

SEQ ID NO: 35766 - DNA, 15 bp, Homo sapiens
aaattaaaactatac

SEQ ID NO: 35767 - DNA, 15 bp, Homo sapiens
aaaattaaaactata

SEQ ID NO: 35768 - DNA, 15 bp, Homo sapiens
aaaaattaaaactat

SEQ ID NO: 35769 - DNA, 15 bp, Homo sapiens
caaaaattaaaacta

SEQ ID NO: 35770 - DNA, 15 bp, Homo sapiens
ccaaaaattaaaact

SEQ ID NO: 35771 - DNA, 15 bp, Homo sapiens
tccaaaaattaaaac

SEQ ID NO: 35772 - DNA, 15 bp, Homo sapiens
ttccaaaaattaaaa

SEQ ID NO: 35773 - DNA, 15 bp, Homo sapiens
cttccaaaaattaaa

SEQ ID NO: 35774 - DNA, 15 bp, Homo sapiens
gcttccaaaaattaa

SEQ ID NO: 35775 - DNA, 15 bp, Homo sapiens
tgcttccaaaaatta

SEQ ID NO: 35776 - DNA, 15 bp, Homo sapiens
atgcttccaaaaatt

SEQ ID NO: 35777 - DNA, 15 bp, Homo sapiens
catgcttccaaaaat

SEQ ID NO: 35778 - DNA, 15 bp, Homo sapiens
acatgcttccaaaaa

SEQ ID NO: 35779 - DNA, 15 bp, Homo sapiens
aacatgcttccaaaa

SEQ ID NO: 35780 - DNA, 15 bp, Homo sapiens
taacatgcttccaaa

SEQ ID NO: 35781 - DNA, 15 bp, Homo sapiens
ttaacatgcttccaa

SEQ ID NO: 35782 - DNA, 15 bp, Homo sapiens
attaacatgcttcca

SEQ ID NO: 35783 - DNA, 15 bp, Homo sapiens
cattaacatgcttcc

SEQ ID NO: 35784 - DNA, 15 bp, Homo sapiens
acattaacatgcttc

SEQ ID NO: 35785 - DNA, 15 bp, Homo sapiens
aacattaacatgctt

SEQ ID NO: 35786 - DNA, 15 bp, Homo sapiens
gaacattaacatgct

SEQ ID NO: 35787 - DNA, 15 bp, Homo sapiens
ggaacattaacatgc

SEQ ID NO: 35788 - DNA, 15 bp, Homo sapiens
tggaacattaacatg

SEQ ID NO: 35789 - DNA, 15 bp, Homo sapiens
gtggaacattaacat

SEQ ID NO: 35790 - DNA, 15 bp, Homo sapiens
tgtggaacattaaca

SEQ ID NO: 35791 - DNA, 15 bp, Homo sapiens
atgtggaacattaac

SEQ ID NO: 35792 - DNA, 15 bp, Homo sapiens
tatgtggaacattaa

SEQ ID NO: 35793 - DNA, 15 bp, Homo sapiens
atatgtggaacatta

SEQ ID NO: 35794 - DNA, 15 bp, Homo sapiens
aatatgtggaacatt

SEQ ID NO: 35795 - DNA, 15 bp, Homo sapiens
gaatatgtggaacat

SEQ ID NO: 35796 - DNA, 15 bp, Homo sapiens
tgaatatgtggaaca

SEQ ID NO: 35797 - DNA, 15 bp, Homo sapiens
ttgaatatgtggaac

SEQ ID NO: 35798 - DNA, 15 bp, Homo sapiens
tttgaatatgtggaa

SEQ ID NO: 35799 - DNA, 15 bp, Homo sapiens
ttttgaatatgtgga

SEQ ID NO: 35800 - DNA, 15 bp, Homo sapiens
tttttgaatatgtgg

SEQ ID NO: 35801 - DNA, 15 bp, Homo sapiens
ttttttgaatatgtg

SEQ ID NO: 35802 - DNA, 15 bp, Homo sapiens
tttttttgaatatgt

SEQ ID NO: 35803 - DNA, 15 bp, Homo sapiens
ttttttttgaatatg

SEQ ID NO: 35804 - DNA, 15 bp, Homo sapiens
attttttttgaatat

SEQ ID NO: 35805 - DNA, 15 bp, Homo sapiens
gattttttttgaata

SEQ ID NO: 35806 - DNA, 15 bp, Homo sapiens
tgattttttttgaat

SEQ ID NO: 35807 - DNA, 15 bp, Homo sapiens
ctgattttttttgaa

SEQ ID NO: 35808 - DNA, 15 bp, Homo sapiens
actgattttttttga

SEQ ID NO: 35809 - DNA, 15 bp, Homo sapiens
tactgattttttttg

SEQ ID NO: 35810 - DNA, 15 bp, Homo sapiens
ttactgatttttttt

SEQ ID NO: 35811 - DNA, 15 bp, Homo sapiens
cttactgattttttt

SEQ ID NO: 35812 - DNA, 15 bp, Homo sapiens
tcttactgatttttt

SEQ ID NO: 35813 - DNA, 15 bp, Homo sapiens
ttcttactgattttt

SEQ ID NO: 35814 - DNA, 15 bp, Homo sapiens
attcttactgatttt

SEQ ID NO: 35815 - DNA, 15 bp, Homo sapiens
cattcttactgattt

SEQ ID NO: 35816 - DNA, 15 bp, Homo sapiens
ccattcttactgatt

SEQ ID NO: 35817 - DNA, 15 bp, Homo sapiens
cccattcttactgat

SEQ ID NO: 35818 - DNA, 15 bp, Homo sapiens
tcccattcttactga

SEQ ID NO: 35819 - DNA, 15 bp, Homo sapiens
ttcccattcttactg

SEQ ID NO: 35820 - DNA, 15 bp, Homo sapiens
cttcccattcttact

SEQ ID NO: 35821 - DNA, 15 bp, Homo sapiens
acttcccattcttac

SEQ ID NO: 35822 - DNA, 15 bp, Homo sapiens
tacttcccattctta

SEQ ID NO: 35823 - DNA, 15 bp, Homo sapiens
ctacttcccattctt

SEQ ID NO: 35824 - DNA, 15 bp, Homo sapiens
cctacttcccattct

SEQ ID NO: 35825 - DNA, 15 bp, Homo sapiens
gcctacttcccattc

SEQ ID NO: 35826 - DNA, 15 bp, Homo sapiens
tgcctacttcccatt

SEQ ID NO: 35827 - DNA, 15 bp, Homo sapiens
ttgcctacttcccat

SEQ ID NO: 35828 - DNA, 15 bp, Homo sapiens
tttgcctacttccca

SEQ ID NO: 35829 - DNA, 15 bp, Homo sapiens
ttttgcctacttccc

SEQ ID NO: 35830 - DNA, 15 bp, Homo sapiens
tttttgcctacttcc

SEQ ID NO: 35831 - DNA, 15 bp, Homo sapiens
atttttgcctacttc

SEQ ID NO: 35832 - DNA, 15 bp, Homo sapiens
catttttgcctactt

SEQ ID NO: 35833 - DNA, 15 bp, Homo sapiens
tcatttttgcctact

SEQ ID NO: 35834 - DNA, 15 bp, Homo sapiens
ttcatttttgcctac

SEQ ID NO: 35835 - DNA, 15 bp, Homo sapiens
tttcatttttgccta

SEQ ID NO: 35836 - DNA, 15 bp, Homo sapiens
ttttcatttttgcct

SEQ ID NO: 35837 - DNA, 15 bp, Homo sapiens
gttttcatttttgcc

SEQ ID NO: 35838 - DNA, 15 bp, Homo sapiens
tgttttcatttttgc

SEQ ID NO: 35839 - DNA, 15 bp, Homo sapiens
ttgttttcatttttg

SEQ ID NO: 35840 - DNA, 15 bp, Homo sapiens
tttgttttcattttt

SEQ ID NO: 35841 - DNA, 15 bp, Homo sapiens
ttttgttttcatttt

SEQ ID NO: 35842 - DNA, 15 bp, Homo sapiens
tttttgttttcattt

SEQ ID NO: 35843 - DNA, 15 bp, Homo sapiens
ctttttgttttcatt

SEQ ID NO: 35844 - DNA, 15 bp, Homo sapiens
tctttttgttttcat

SEQ ID NO: 35845 - DNA, 15 bp, Homo sapiens
ttctttttgttttca

SEQ ID NO: 35846 - DNA, 15 bp, Homo sapiens
tttctttttgttttc

SEQ ID NO: 35847 - DNA, 15 bp, Homo sapiens
ttttctttttgtttt

SEQ ID NO: 35848 - DNA, 15 bp, Homo sapiens
gttttctttttgttt

SEQ ID NO: 35849 - DNA, 15 bp, Homo sapiens
ggttttctttttgtt

SEQ ID NO: 35850 - DNA, 15 bp, Homo sapiens
aggttttctttttgt

SEQ ID NO: 35851 - DNA, 15 bp, Homo sapiens
taggttttctttttg

SEQ ID NO: 35852 - DNA, 15 bp, Homo sapiens
ttaggttttcttttt

SEQ ID NO: 35853 - DNA, 15 bp, Homo sapiens
gttaggttttctttt

SEQ ID NO: 35854 - DNA, 15 bp, Homo sapiens
tgttaggttttcttt

SEQ ID NO: 35855 - DNA, 15 bp, Homo sapiens
gtgttaggttttctt

SEQ ID NO: 35856 - DNA, 15 bp, Homo sapiens
agtgttaggttttct

SEQ ID NO: 35857 - DNA, 15 bp, Homo sapiens
cagtgttaggttttc

SEQ ID NO: 35858 - DNA, 15 bp, Homo sapiens
tcagtgttaggtttt

SEQ ID NO: 35859 - DNA, 15 bp, Homo sapiens
gtcagtgttaggttt

SEQ ID NO: 35860 - DNA, 15 bp, Homo sapiens
tgtcagtgttaggtt

SEQ ID NO: 35861 - DNA, 15 bp, Homo sapiens
ctgtcagtgttaggt

SEQ ID NO: 35862 - DNA, 15 bp, Homo sapiens
gctgtcagtgttagg

SEQ ID NO: 35863 - DNA, 15 bp, Homo sapiens
tgctgtcagtgttag

SEQ ID NO: 35864 - DNA, 15 bp, Homo sapiens
ttgctgtcagtgtta

SEQ ID NO: 35865 - DNA, 15 bp, Homo sapiens
tttgctgtcagtgtt

SEQ ID NO: 35866 - DNA, 15 bp, Homo sapiens
gtttgctgtcagtgt

SEQ ID NO: 35867 - DNA, 15 bp, Homo sapiens
agtttgctgtcagtg

SEQ ID NO: 35868 - DNA, 15 bp, Homo sapiens
tagtttgctgtcagt

SEQ ID NO: 35869 - DNA, 15 bp, Homo sapiens
ttagtttgctgtcag

SEQ ID NO: 35870 - DNA, 15 bp, Homo sapiens
tttagtttgctgtca

SEQ ID NO: 35871 - DNA, 15 bp, Homo sapiens
atttagtttgctgtc

SEQ ID NO: 35872 - DNA, 15 bp, Homo sapiens
tatttagtttgctgt

SEQ ID NO: 35873 - DNA, 15 bp, Homo sapiens
ttatttagtttgctg

SEQ ID NO: 35874 - DNA, 15 bp, Homo sapiens
tttatttagtttgct

SEQ ID NO: 35875 - DNA, 15 bp, Homo sapiens
ctttatttagtttgc

SEQ ID NO: 35876 - DNA, 15 bp, Homo sapiens
actttatttagtttg

SEQ ID NO: 35877 - DNA, 15 bp, Homo sapiens
tactttatttagttt

SEQ ID NO: 35878 - DNA, 15 bp, Homo sapiens
ttactttatttagtt

SEQ ID NO: 35879 - DNA, 15 bp, Homo sapiens
gttactttatttagt

SEQ ID NO: 35880 - DNA, 15 bp, Homo sapiens
ggttactttatttag

SEQ ID NO: 35881 - DNA, 15 bp, Homo sapiens
gggttactttattta

SEQ ID NO: 35882 - DNA, 15 bp, Homo sapiens
tgggttactttattt

SEQ ID NO: 35883 - DNA, 15 bp, Homo sapiens
ttgggttactttatt

SEQ ID NO: 35884 - DNA, 15 bp, Homo sapiens
attgggttactttat

SEQ ID NO: 35885 - DNA, 15 bp, Homo sapiens
aattgggttacttta

SEQ ID NO: 35886 - DNA, 15 bp, Homo sapiens
aaattgggttacttt

SEQ ID NO: 35887 - DNA, 15 bp, Homo sapiens
aaaattgggttactt

SEQ ID NO: 35888 - DNA, 15 bp, Homo sapiens
taaaattgggttact

SEQ ID NO: 35889 - DNA, 15 bp, Homo sapiens
ataaaattgggttac

SEQ ID NO: 35890 - DNA, 15 bp, Homo sapiens
aataaaattgggtta

SEQ ID NO: 35891 - DNA, 15 bp, Homo sapiens
aaataaaattgggtt

SEQ ID NO: 35892 - DNA, 15 bp, Homo sapiens
gaaataaaattgggt

SEQ ID NO: 35893 - DNA, 15 bp, Homo sapiens
tgaaataaaattggg

SEQ ID NO: 35894 - DNA, 15 bp, Homo sapiens
ttgaaataaaattgg

SEQ ID NO: 35895 - DNA, 15 bp, Homo sapiens
tttgaaataaaattg

SEQ ID NO: 35896 - DNA, 15 bp, Homo sapiens
atttgaaataaaatt

SEQ ID NO: 35897 - DNA, 15 bp, Homo sapiens
tatttgaaataaaat

SEQ ID NO: 35898 - DNA, 15 bp, Homo sapiens
ttatttgaaataaaa

SEQ ID NO: 35899 - DNA, 15 bp, Homo sapiens
tttatttgaaataaa

SEQ ID NO: 35900 - DNA, 15 bp, Homo sapiens
atttatttgaaataa

SEQ ID NO: 35901 - DNA, 15 bp, Homo sapiens
tatttatttgaaata

SEQ ID NO: 35902 - DNA, 15 bp, Homo sapiens
atatttatttgaaat

SEQ ID NO: 35903 - DNA, 15 bp, Homo sapiens
gatatttatttgaaa

SEQ ID NO: 35904 - DNA, 15 bp, Homo sapiens
tgatatttatttgaa

SEQ ID NO: 35905 - DNA, 15 bp, Homo sapiens
atgatatttatttga

SEQ ID NO: 35906 - DNA, 15 bp, Homo sapiens
tatgatatttatttg

SEQ ID NO: 35907 - DNA, 15 bp, Homo sapiens
ttatgatatttattt

SEQ ID NO: 35908 - DNA, 15 bp, Homo sapiens
attatgatatttatt

SEQ ID NO: 35909 - DNA, 15 bp, Homo sapiens
gattatgatatttat

SEQ ID NO: 35910 - DNA, 15 bp, Homo sapiens
agattatgatattta

SEQ ID NO: 35911 - DNA, 15 bp, Homo sapiens
aagattatgatattt

SEQ ID NO: 35912 - DNA, 15 bp, Homo sapiens
caagattatgatatt

SEQ ID NO: 35913 - DNA, 15 bp, Homo sapiens
gcaagattatgatat

SEQ ID NO: 35914 - DNA, 15 bp, Homo sapiens
tgcaagattatgata

SEQ ID NO: 35915 - DNA, 15 bp, Homo sapiens
ttgcaagattatgat

SEQ ID NO: 35916 - DNA, 15 bp, Homo sapiens
tttgcaagattatga

SEQ ID NO: 35917 - DNA, 15 bp, Homo sapiens
ttttgcaagattatg

SEQ ID NO: 35918 - DNA, 15 bp, Homo sapiens
cttttgcaagattat

SEQ ID NO: 35919 - DNA, 15 bp, Homo sapiens
ccttttgcaagatta

SEQ ID NO: 35920 - DNA, 15 bp, Homo sapiens
cccttttgcaagatt

SEQ ID NO: 35921 - DNA, 15 bp, Homo sapiens
ccccttttgcaagat

SEQ ID NO: 35922 - DNA, 15 bp, Homo sapiens
cccccttttgcaaga

SEQ ID NO: 35923 - DNA, 15 bp, Homo sapiens
tcccccttttgcaag

SEQ ID NO: 35924 - DNA, 15 bp, Homo sapiens
atcccccttttgcaa

SEQ ID NO: 35925 - DNA, 15 bp, Homo sapiens
tatcccccttttgca

SEQ ID NO: 35926 - DNA, 15 bp, Homo sapiens
ctatcccccttttgc

SEQ ID NO: 35927 - DNA, 15 bp, Homo sapiens
tctatcccccttttg

SEQ ID NO: 35928 - DNA, 15 bp, Homo sapiens
ctctatccccctttt

SEQ ID NO: 35929 - DNA, 15 bp, Homo sapiens
gctctatcccccttt

SEQ ID NO: 35930 - DNA, 15 bp, Homo sapiens
agctctatccccctt

SEQ ID NO: 35931 - DNA, 15 bp, Homo sapiens
tagctctatccccct

SEQ ID NO: 35932 - DNA, 15 bp, Homo sapiens
ttagctctatccccc

SEQ ID NO: 35933 - DNA, 15 bp, Homo sapiens
gttagctctatcccc

SEQ ID NO: 35934 - DNA, 15 bp, Homo sapiens
tgttagctctatccc

SEQ ID NO: 35935 - DNA, 15 bp, Homo sapiens
gtgttagctctatcc

SEQ ID NO: 35936 - DNA, 15 bp, Homo sapiens
tgtgttagctctatc

SEQ ID NO: 35937 - DNA, 15 bp, Homo sapiens
ttgtgttagctctat

SEQ ID NO: 35938 - DNA, 15 bp, Homo sapiens
tttgtgttagctcta

SEQ ID NO: 35939 - DNA, 15 bp, Homo sapiens
gtttgtgttagctct

SEQ ID NO: 35940 - DNA, 15 bp, Homo sapiens
tgtttgtgttagctc

SEQ ID NO: 35941 - DNA, 15 bp, Homo sapiens
ttgtttgtgttagct

SEQ ID NO: 35942 - DNA, 15 bp, Homo sapiens
gttgtttgtgttagc

SEQ ID NO: 35943 - DNA, 15 bp, Homo sapiens
agttgtttgtgttag

SEQ ID NO: 35944 - DNA, 15 bp, Homo sapiens
cagttgtttgtgtta

SEQ ID NO: 35945 - DNA, 15 bp, Homo sapiens
gcagttgtttgtgtt

SEQ ID NO: 35946 - DNA, 15 bp, Homo sapiens
agcagttgtttgtgt

SEQ ID NO: 35947 - DNA, 15 bp, Homo sapiens
cagcagttgtttgtg

SEQ ID NO: 35948 - DNA, 15 bp, Homo sapiens
tcagcagttgtttgt

SEQ ID NO: 35949 - DNA, 15 bp, Homo sapiens
ttcagcagttgtttg

SEQ ID NO: 35950 - DNA, 15 bp, Homo sapiens
gttcagcagttgttt

SEQ ID NO: 35951 - DNA, 15 bp, Homo sapiens
tgttcagcagttgtt

SEQ ID NO: 35952 - DNA, 15 bp, Homo sapiens
gtgttcagcagttgt

SEQ ID NO: 35953 - DNA, 15 bp, Homo sapiens
tgtgttcagcagttg

SEQ ID NO: 35954 - DNA, 15 bp, Homo sapiens
ctgtgttcagcagtt

SEQ ID NO: 35955 - DNA, 15 bp, Homo sapiens
actgtgttcagcagt

SEQ ID NO: 35956 - DNA, 15 bp, Homo sapiens
cactgtgttcagcag

SEQ ID NO: 35957 - DNA, 15 bp, Homo sapiens
acactgtgttcagca

SEQ ID NO: 35958 - DNA, 15 bp, Homo sapiens
aacactgtgttcagc

SEQ ID NO: 35959 - DNA, 15 bp, Homo sapiens
aaacactgtgttcag

SEQ ID NO: 35960 - DNA, 15 bp, Homo sapiens
caaacactgtgttca

SEQ ID NO: 35961 - DNA, 15 bp, Homo sapiens
tcaaacactgtgttc

SEQ ID NO: 35962 - DNA, 15 bp, Homo sapiens
gtcaaacactgtgtt

SEQ ID NO: 35963 - DNA, 15 bp, Homo sapiens
agtcaaacactgtgt

SEQ ID NO: 35964 - DNA, 15 bp, Homo sapiens
gagtcaaacactgtg

SEQ ID NO: 35965 - DNA, 15 bp, Homo sapiens
agagtcaaacactgt

SEQ ID NO: 35966 - DNA, 15 bp, Homo sapiens
tagagtcaaacactg

SEQ ID NO: 35967 - DNA, 15 bp, Homo sapiens
atagagtcaaacact

SEQ ID NO: 35968 - DNA, 15 bp, Homo sapiens
tatagagtcaaacac

SEQ ID NO: 35969 - DNA, 15 bp, Homo sapiens
atatagagtcaaaca

SEQ ID NO: 35970 - DNA, 15 bp, Homo sapiens
gatatagagtcaaac

SEQ ID NO: 35971 - DNA, 15 bp, Homo sapiens
ggatatagagtcaaa

SEQ ID NO: 35972 - DNA, 15 bp, Homo sapiens
aggatatagagtcaa

SEQ ID NO: 35973 - DNA, 15 bp, Homo sapiens
gaggatatagagtca

SEQ ID NO: 35974 - DNA, 15 bp, Homo sapiens
tgaggatatagagtc

SEQ ID NO: 35975 - DNA, 15 bp, Homo sapiens
atgaggatatagagt

SEQ ID NO: 35976 - DNA, 15 bp, Homo sapiens
aatgaggatatagag

SEQ ID NO: 35977 - DNA, 15 bp, Homo sapiens
gaatgaggatataga

SEQ ID NO: 35978 - DNA, 15 bp, Homo sapiens
agaatgaggatatag

SEQ ID NO: 35979 - DNA, 15 bp, Homo sapiens
aagaatgaggatata

SEQ ID NO: 35980 - DNA, 15 bp, Homo sapiens
caagaatgaggatat

SEQ ID NO: 35981 - DNA, 15 bp, Homo sapiens
ccaagaatgaggata

SEQ ID NO: 35982 - DNA, 15 bp, Homo sapiens
cccaagaatgaggat

SEQ ID NO: 35983 - DNA, 15 bp, Homo sapiens
gcccaagaatgagga

SEQ ID NO: 35984 - DNA, 15 bp, Homo sapiens
tgcccaagaatgagg

SEQ ID NO: 35985 - DNA, 15 bp, Homo sapiens
ctgcccaagaatgag

SEQ ID NO: 35986 - DNA, 15 bp, Homo sapiens
cctgcccaagaatga

SEQ ID NO: 35987 - DNA, 15 bp, Homo sapiens
ccctgcccaagaatg

SEQ ID NO: 35988 - DNA, 15 bp, Homo sapiens
accctgcccaagaat

SEQ ID NO: 35989 - DNA, 15 bp, Homo sapiens
caccctgcccaagaa

SEQ ID NO: 35990 - DNA, 15 bp, Homo sapiens
ccaccctgcccaaga

SEQ ID NO: 35991 - DNA, 15 bp, Homo sapiens
tccaccctgcccaag

SEQ ID NO: 35992 - DNA, 15 bp, Homo sapiens
ctccaccctgcccaa

SEQ ID NO: 35993 - DNA, 15 bp, Homo sapiens
gctccaccctgccca

SEQ ID NO: 35994 - DNA, 15 bp, Homo sapiens
cgctccaccctgccc

SEQ ID NO: 35995 - DNA, 15 bp, Homo sapiens
ccgctccaccctgcc

SEQ ID NO: 35996 - DNA, 15 bp, Homo sapiens
cccgctccaccctgc

SEQ ID NO: 35997 - DNA, 15 bp, Homo sapiens
ccccgctccaccctg

SEQ ID NO: 35998 - DNA, 15 bp, Homo sapiens
cccccgctccaccct

SEQ ID NO: 35999 - DNA, 15 bp, Homo sapiens
tcccccgctccaccc

SEQ ID NO: 36000 - DNA, 15 bp, Homo sapiens
ctcccccgctccacc

SEQ ID NO: 36001 - DNA, 15 bp, Homo sapiens
tctcccccgctccac

SEQ ID NO: 36002 - DNA, 15 bp, Homo sapiens
ttctcccccgctcca

SEQ ID NO: 36003 - DNA, 15 bp, Homo sapiens
cttctcccccgctcc

SEQ ID NO: 36004 - DNA, 15 bp, Homo sapiens
tcttctcccccgctc

SEQ ID NO: 36005 - DNA, 15 bp, Homo sapiens
ttcttctcccccgct

SEQ ID NO: 36006 - DNA, 15 bp, Homo sapiens
gttcttctcccccgc

SEQ ID NO: 36007 - DNA, 15 bp, Homo sapiens
agttcttctcccccg

SEQ ID NO: 36008 - DNA, 15 bp, Homo sapiens
tagttcttctccccc

SEQ ID NO: 36009 - DNA, 15 bp, Homo sapiens
gtagttcttctcccc

SEQ ID NO: 36010 - DNA, 15 bp, Homo sapiens
tgtagttcttctccc

SEQ ID NO: 36011 - DNA, 15 bp, Homo sapiens
ttgtagttcttctcc

SEQ ID NO: 36012 - DNA, 15 bp, Homo sapiens
tttgtagttcttctc

SEQ ID NO: 36013 - DNA, 15 bp, Homo sapiens
atttgtagttcttct

SEQ ID NO: 36014 - DNA, 15 bp, Homo sapiens
tatttgtagttcttc

SEQ ID NO: 36015 - DNA, 15 bp, Homo sapiens
ttatttgtagttctt

SEQ ID NO: 36016 - DNA, 15 bp, Homo sapiens
attatttgtagttct

SEQ ID NO: 36017 - DNA, 15 bp, Homo sapiens
aattatttgtagttc

SEQ ID NO: 36018 - DNA, 15 bp, Homo sapiens
aaattatttgtagtt

SEQ ID NO: 36019 - DNA, 15 bp, Homo sapiens
gaaattatttgtagt

SEQ ID NO: 36020 - DNA, 15 bp, Homo sapiens
agaaattatttgtag

SEQ ID NO: 36021 - DNA, 15 bp, Homo sapiens
cagaaattatttgta

SEQ ID NO: 36022 - DNA, 15 bp, Homo sapiens
tcagaaattatttgt

SEQ ID NO: 36023 - DNA, 15 bp, Homo sapiens
ctcagaaattatttg

SEQ ID NO: 36024 - DNA, 15 bp, Homo sapiens
actcagaaattattt

SEQ ID NO: 36025 - DNA, 15 bp, Homo sapiens
aactcagaaattatt

SEQ ID NO: 36026 - DNA, 15 bp, Homo sapiens
gaactcagaaattat

SEQ ID NO: 36027 - DNA, 15 bp, Homo sapiens
agaactcagaaatta

SEQ ID NO: 36028 - DNA, 15 bp, Homo sapiens
aagaactcagaaatt

SEQ ID NO: 36029 - DNA, 15 bp, Homo sapiens
aaagaactcagaaat

SEQ ID NO: 36030 - DNA, 15 bp, Homo sapiens
aaaagaactcagaaa

SEQ ID NO: 36031 - DNA, 15 bp, Homo sapiens
aaaaagaactcagaa

SEQ ID NO: 36032 - DNA, 15 bp, Homo sapiens
taaaaagaactcaga

SEQ ID NO: 36033 - DNA, 15 bp, Homo sapiens
ctaaaaagaactcag

SEQ ID NO: 36034 - DNA, 15 bp, Homo sapiens
actaaaaagaactca

SEQ ID NO: 36035 - DNA, 15 bp, Homo sapiens
aactaaaaagaactc

SEQ ID NO: 36036 - DNA, 15 bp, Homo sapiens
aaactaaaaagaact

SEQ ID NO: 36037 - DNA, 15 bp, Homo sapiens
caaactaaaaagaac

SEQ ID NO: 36038 - DNA, 15 bp, Homo sapiens
acaaactaaaaagaa

SEQ ID NO: 36039 - DNA, 15 bp, Homo sapiens
aacaaactaaaaaga

SEQ ID NO: 36040 - DNA, 15 bp, Homo sapiens
aaacaaactaaaaag

SEQ ID NO: 36041 - DNA, 15 bp, Homo sapiens
aaaacaaactaaaaa

SEQ ID NO: 36042 - DNA, 15 bp, Homo sapiens
aaaaacaaactaaaa

SEQ ID NO: 36043 - DNA, 15 bp, Homo sapiens
aaaaaacaaactaaa

SEQ ID NO: 36044 - DNA, 15 bp, Homo sapiens
taaaaaacaaactaa

SEQ ID NO: 36045 - DNA, 15 bp, Homo sapiens
ataaaaaacaaacta

SEQ ID NO: 36046 - DNA, 15 bp, Homo sapiens
tataaaaaacaaact

SEQ ID NO: 36047 - DNA, 15 bp, Homo sapiens
ctataaaaaacaaac

SEQ ID NO: 36048 - DNA, 15 bp, Homo sapiens
actataaaaaacaaa

SEQ ID NO: 36049 - DNA, 15 bp, Homo sapiens
cactataaaaaacaa

SEQ ID NO: 36050 - DNA, 15 bp, Homo sapiens
ccactataaaaaaca

SEQ ID NO: 36051 - DNA, 15 bp, Homo sapiens
accactataaaaaac

SEQ ID NO: 36052 - DNA, 15 bp, Homo sapiens
taccactataaaaaa

SEQ ID NO: 36053 - DNA, 15 bp, Homo sapiens
ataccactataaaaa

SEQ ID NO: 36054 - DNA, 15 bp, Homo sapiens
tataccactataaaa

SEQ ID NO: 36055 - DNA, 15 bp, Homo sapiens
ctataccactataaa

SEQ ID NO: 36056 - DNA, 15 bp, Homo sapiens
cctataccactataa

SEQ ID NO: 36057 - DNA, 15 bp, Homo sapiens
gcctataccactata

SEQ ID NO: 36058 - DNA, 15 bp, Homo sapiens
tgcctataccactat

SEQ ID NO: 36059 - DNA, 15 bp, Homo sapiens
ttgcctataccacta

SEQ ID NO: 36060 - DNA, 15 bp, Homo sapiens
tttgcctataccact

SEQ ID NO: 36061 - DNA, 15 bp, Homo sapiens
ctttgcctataccac

SEQ ID NO: 36062 - DNA, 15 bp, Homo sapiens
actttgcctatacca

SEQ ID NO: 36063 - DNA, 15 bp, Homo sapiens
cactttgcctatacc

SEQ ID NO: 36064 - DNA, 15 bp, Homo sapiens
tcactttgcctatac

SEQ ID NO: 36065 - DNA, 15 bp, Homo sapiens
atcactttgcctata

SEQ ID NO: 36066 - DNA, 15 bp, Homo sapiens
aatcactttgcctat

SEQ ID NO: 36067 - DNA, 15 bp, Homo sapiens
gaatcactttgccta

SEQ ID NO: 36068 - DNA, 15 bp, Homo sapiens
agaatcactttgcct

SEQ ID NO: 36069 - DNA, 15 bp, Homo sapiens
cagaatcactttgcc

SEQ ID NO: 36070 - DNA, 15 bp, Homo sapiens
tcagaatcactttgc

SEQ ID NO: 36071 - DNA, 15 bp, Homo sapiens
ttcagaatcactttg

SEQ ID NO: 36072 - DNA, 15 bp, Homo sapiens
tttcagaatcacttt

SEQ ID NO: 36073 - DNA, 15 bp, Homo sapiens
ttttcagaatcactt

SEQ ID NO: 36074 - DNA, 15 bp, Homo sapiens
attttcagaatcact

SEQ ID NO: 36075 - DNA, 15 bp, Homo sapiens
aattttcagaatcac

SEQ ID NO: 36076 - DNA, 15 bp, Homo sapiens
aaattttcagaatca

SEQ ID NO: 36077 - DNA, 15 bp, Homo sapiens
aaaattttcagaatc

SEQ ID NO: 36078 - DNA, 15 bp, Homo sapiens
taaaattttcagaat

SEQ ID NO: 36079 - DNA, 15 bp, Homo sapiens
ctaaaattttcagaa

SEQ ID NO: 36080 - DNA, 15 bp, Homo sapiens
tctaaaattttcaga

SEQ ID NO: 36081 - DNA, 15 bp, Homo sapiens
atctaaaattttcag

SEQ ID NO: 36082 - DNA, 15 bp, Homo sapiens
catctaaaattttca

SEQ ID NO: 36083 - DNA, 15 bp, Homo sapiens
acatctaaaattttc

SEQ ID NO: 36084 - DNA, 15 bp, Homo sapiens
cacatctaaaatttt

SEQ ID NO: 36085 - DNA, 15 bp, Homo sapiens
acacatctaaaattt

SEQ ID NO: 36086 - DNA, 15 bp, Homo sapiens
aacacatctaaaatt

SEQ ID NO: 36087 - DNA, 15 bp, Homo sapiens
taacacatctaaaat

SEQ ID NO: 36088 - DNA, 15 bp, Homo sapiens
gtaacacatctaaaa

SEQ ID NO: 36089 - DNA, 15 bp, Homo sapiens
tgtaacacatctaaa

SEQ ID NO: 36090 - DNA, 15 bp, Homo sapiens
ctgtaacacatctaa

SEQ ID NO: 36091 - DNA, 15 bp, Homo sapiens
cctgtaacacatcta

SEQ ID NO: 36092 - DNA, 15 bp, Homo sapiens
tcctgtaacacatct

SEQ ID NO: 36093 - DNA, 15 bp, Homo sapiens
atcctgtaacacatc

SEQ ID NO: 36094 - DNA, 15 bp, Homo sapiens
aatcctgtaacacat

SEQ ID NO: 36095 - DNA, 15 bp, Homo sapiens
taatcctgtaacaca

SEQ ID NO: 36096 - DNA, 15 bp, Homo sapiens
ttaatcctgtaacac

SEQ ID NO: 36097 - DNA, 15 bp, Homo sapiens
tttaatcctgtaaca

SEQ ID NO: 36098 - DNA, 15 bp, Homo sapiens
atttaatcctgtaac

SEQ ID NO: 36099 - DNA, 15 bp, Homo sapiens
tatttaatcctgtaa

SEQ ID NO: 36100 - DNA, 15 bp, Homo sapiens
ttatttaatcctgta

SEQ ID NO: 36101 - DNA, 15 bp, Homo sapiens
tttatttaatcctgt

SEQ ID NO: 36102 - DNA, 15 bp, Homo sapiens
atttatttaatcctg

SEQ ID NO: 36103 - DNA, 15 bp, Homo sapiens
aatttatttaatcct

SEQ ID NO: 36104 - DNA, 15 bp, Homo sapiens
taatttatttaatcc

SEQ ID NO: 36105 - DNA, 15 bp, Homo sapiens
ttaatttatttaatc

SEQ ID NO: 36106 - DNA, 15 bp, Homo sapiens
attaatttatttaat

SEQ ID NO: 36107 - DNA, 15 bp, Homo sapiens
tattaatttatttaa

SEQ ID NO: 36108 - DNA, 15 bp, Homo sapiens
ttattaatttattta

SEQ ID NO: 36109 - DNA, 15 bp, Homo sapiens
tttattaatttattt

SEQ ID NO: 36110 - DNA, 15 bp, Homo sapiens
atttattaatttatt

SEQ ID NO: 36111 - DNA, 15 bp, Homo sapiens
catttattaatttat

SEQ ID NO: 36112 - DNA, 15 bp, Homo sapiens
acatttattaattta

SEQ ID NO: 36113 - DNA, 15 bp, Homo sapiens
aacatttattaattt

SEQ ID NO: 36114 - DNA, 15 bp, Homo sapiens
aaacatttattaatt

SEQ ID NO: 36115 - DNA, 15 bp, Homo sapiens
aaaacatttattaat

SEQ ID NO: 36116 - DNA, 15 bp, Homo sapiens
caaaacatttattaa

SEQ ID NO: 36117 - DNA, 15 bp, Homo sapiens
tcaaaacatttatta

SEQ ID NO: 36118 - DNA, 15 bp, Homo sapiens
atcaaaacatttatt

SEQ ID NO: 36119 - DNA, 15 bp, Homo sapiens
catcaaaacatttat

SEQ ID NO: 36120 - DNA, 15 bp, Homo sapiens
acatcaaaacattta

SEQ ID NO: 36121 - DNA, 15 bp, Homo sapiens
aacatcaaaacattt

SEQ ID NO: 36122 - DNA, 15 bp, Homo sapiens
taacatcaaaacatt

SEQ ID NO: 36123 - DNA, 15 bp, Homo sapiens
ataacatcaaaacat

SEQ ID NO: 36124 - DNA, 15 bp, Homo sapiens
aataacatcaaaaca

SEQ ID NO: 36125 - DNA, 15 bp, Homo sapiens
caataacatcaaaac

SEQ ID NO: 36126 - DNA, 15 bp, Homo sapiens
ccaataacatcaaaa

SEQ ID NO: 36127 - DNA, 15 bp, Homo sapiens
cccaataacatcaaa

SEQ ID NO: 36128 - DNA, 15 bp, Homo sapiens
tcccaataacatcaa

SEQ ID NO: 36129 - DNA, 15 bp, Homo sapiens
gtcccaataacatca

SEQ ID NO: 36130 - DNA, 15 bp, Homo sapiens
ggtcccaataacatc

SEQ ID NO: 36131 - DNA, 15 bp, Homo sapiens
gggtcccaataacat

SEQ ID NO: 36132 - DNA, 15 bp, Homo sapiens
tgggtcccaataaca

SEQ ID NO: 36133 - DNA, 15 bp, Homo sapiens
ctgggtcccaataac

SEQ ID NO: 36134 - DNA, 15 bp, Homo sapiens
tctgggtcccaataa

SEQ ID NO: 36135 - DNA, 15 bp, Homo sapiens
ttctgggtcccaata

SEQ ID NO: 36136 - DNA, 15 bp, Homo sapiens
attctgggtcccaat

SEQ ID NO: 36137 - DNA, 15 bp, Homo sapiens
aattctgggtcccaa

SEQ ID NO: 36138 - DNA, 15 bp, Homo sapiens
gaattctgggtccca

SEQ ID NO: 36139 - DNA, 15 bp, Homo sapiens
agaattctgggtccc

SEQ ID NO: 36140 - DNA, 15 bp, Homo sapiens
gagaattctgggtcc

SEQ ID NO: 36141 - DNA, 15 bp, Homo sapiens
tgagaattctgggtc

SEQ ID NO: 36142 - DNA, 15 bp, Homo sapiens
gtgagaattctgggt

SEQ ID NO: 36143 - DNA, 15 bp, Homo sapiens
ggtgagaattctggg

SEQ ID NO: 36144 - DNA, 15 bp, Homo sapiens
cggtgagaattctgg

SEQ ID NO: 36145 - DNA, 15 bp, Homo sapiens
acggtgagaattctg

SEQ ID NO: 36146 - DNA, 15 bp, Homo sapiens
cacggtgagaattct

SEQ ID NO: 36147 - DNA, 15 bp, Homo sapiens
ccacggtgagaattc

SEQ ID NO: 36148 - DNA, 15 bp, Homo sapiens
tccacggtgagaatt

SEQ ID NO: 36149 - DNA, 15 bp, Homo sapiens
ttccacggtgagaat

SEQ ID NO: 36150 - DNA, 15 bp, Homo sapiens
cttccacggtgagaa

SEQ ID NO: 36151 - DNA, 15 bp, Homo sapiens
tcttccacggtgaga

SEQ ID NO: 36152 - DNA, 15 bp, Homo sapiens
ttcttccacggtgag

SEQ ID NO: 36153 - DNA, 15 bp, Homo sapiens
cttcttccacggtga

SEQ ID NO: 36154 - DNA, 15 bp, Homo sapiens
ccttcttccacggtg

SEQ ID NO: 36155 - DNA, 15 bp, Homo sapiens
cccttcttccacggt

SEQ ID NO: 36156 - DNA, 15 bp, Homo sapiens
tcccttcttccacgg

SEQ ID NO: 36157 - DNA, 15 bp, Homo sapiens
gtcccttcttccacg

SEQ ID NO: 36158 - DNA, 15 bp, Homo sapiens
agtcccttcttccac

SEQ ID NO: 36159 - DNA, 15 bp, Homo sapiens
aagtcccttcttcca

SEQ ID NO: 36160 - DNA, 15 bp, Homo sapiens
taagtcccttcttcc

SEQ ID NO: 36161 - DNA, 15 bp, Homo sapiens
gtaagtcccttcttc

SEQ ID NO: 36162 - DNA, 15 bp, Homo sapiens
tgtaagtcccttctt

SEQ ID NO: 36163 - DNA, 15 bp, Homo sapiens
ttgtaagtcccttct

SEQ ID NO: 36164 - DNA, 15 bp, Homo sapiens
tttgtaagtcccttc

SEQ ID NO: 36165 - DNA, 15 bp, Homo sapiens
atttgtaagtccctt

SEQ ID NO: 36166 - DNA, 15 bp, Homo sapiens
tatttgtaagtccct

SEQ ID NO: 36167 - DNA, 15 bp, Homo sapiens
atatttgtaagtccc

SEQ ID NO: 36168 - DNA, 15 bp, Homo sapiens
catatttgtaagtcc

SEQ ID NO: 36169 - DNA, 15 bp, Homo sapiens
ccatatttgtaagtc

SEQ ID NO: 36170 - DNA, 15 bp, Homo sapiens
tccatatttgtaagt

SEQ ID NO: 36171 - DNA, 15 bp, Homo sapiens
ttccatatttgtaag

SEQ ID NO: 36172 - DNA, 15 bp, Homo sapiens
tttccatatttgtaa

SEQ ID NO: 36173 - DNA, 15 bp, Homo sapiens
ttttccatatttgta

SEQ ID NO: 36174 - DNA, 15 bp, Homo sapiens
cttttccatatttgt

SEQ ID NO: 36175 - DNA, 15 bp, Homo sapiens
ccttttccatatttg

SEQ ID NO: 36176 - DNA, 15 bp, Homo sapiens
cccttttccatattt

SEQ ID NO: 36177 - DNA, 15 bp, Homo sapiens
tcccttttccatatt

SEQ ID NO: 36178 - DNA, 15 bp, Homo sapiens
ttcccttttccatat

SEQ ID NO: 36179 - DNA, 15 bp, Homo sapiens
tttcccttttccata

SEQ ID NO: 36180 - DNA, 15 bp, Homo sapiens
ttttcccttttccat

SEQ ID NO: 36181 - DNA, 15 bp, Homo sapiens
cttttcccttttcca

SEQ ID NO: 36182 - DNA, 15 bp, Homo sapiens
gcttttcccttttcc

SEQ ID NO: 36183 - DNA, 15 bp, Homo sapiens
tgcttttcccttttc

SEQ ID NO: 36184 - DNA, 15 bp, Homo sapiens
ttgcttttccctttt

SEQ ID NO: 36185 - DNA, 15 bp, Homo sapiens
cttgcttttcccttt

SEQ ID NO: 36186 - DNA, 15 bp, Homo sapiens
tcttgcttttccctt

SEQ ID NO: 36187 - DNA, 15 bp, Homo sapiens
ttcttgcttttccct

SEQ ID NO: 36188 - DNA, 15 bp, Homo sapiens
tttcttgcttttccc

SEQ ID NO: 36189 - DNA, 15 bp, Homo sapiens
ctttcttgcttttcc

SEQ ID NO: 36190 - DNA, 15 bp, Homo sapiens
tctttcttgcttttc

SEQ ID NO: 36191 - DNA, 15 bp, Homo sapiens
ttctttcttgctttt

SEQ ID NO: 36192 - DNA, 15 bp, Homo sapiens
gttctttcttgcttt

SEQ ID NO: 36193 - DNA, 15 bp, Homo sapiens
agttctttcttgctt

SEQ ID NO: 36194 - DNA, 15 bp, Homo sapiens
cagttctttcttgct

SEQ ID NO: 36195 - DNA, 15 bp, Homo sapiens
acagttctttcttgc

SEQ ID NO: 36196 - DNA, 15 bp, Homo sapiens
cacagttctttcttg

SEQ ID NO: 36197 - DNA, 15 bp, Homo sapiens
tcacagttctttctt

SEQ ID NO: 36198 - DNA, 15 bp, Homo sapiens
ctcacagttctttct

SEQ ID NO: 36199 - DNA, 15 bp, Homo sapiens
cctcacagttctttc

SEQ ID NO: 36200 - DNA, 15 bp, Homo sapiens
acctcacagttcttt

SEQ ID NO: 36201 - DNA, 15 bp, Homo sapiens
gacctcacagttctt

SEQ ID NO: 36202 - DNA, 15 bp, Homo sapiens
tgacctcacagttct

SEQ ID NO: 36203 - DNA, 15 bp, Homo sapiens
atgacctcacagttc

SEQ ID NO: 36204 - DNA, 15 bp, Homo sapiens
catgacctcacagtt

SEQ ID NO: 36205 - DNA, 15 bp, Homo sapiens
ccatgacctcacagt

SEQ ID NO: 36206 - DNA, 15 bp, Homo sapiens
tccatgacctcacag

SEQ ID NO: 36207 - DNA, 15 bp, Homo sapiens
atccatgacctcaca

SEQ ID NO: 36208 - DNA, 15 bp, Homo sapiens
tatccatgacctcac

SEQ ID NO: 36209 - DNA, 15 bp, Homo sapiens
ctatccatgacctca

SEQ ID NO: 36210 - DNA, 15 bp, Homo sapiens
cctatccatgacctc

SEQ ID NO: 36211 - DNA, 15 bp, Homo sapiens
tcctatccatgacct

SEQ ID NO: 36212 - DNA, 15 bp, Homo sapiens
ttcctatccatgacc

SEQ ID NO: 36213 - DNA, 15 bp, Homo sapiens
gttcctatccatgac

SEQ ID NO: 36214 - DNA, 15 bp, Homo sapiens
ggttcctatccatga

SEQ ID NO: 36215 - DNA, 15 bp, Homo sapiens
cggttcctatccatg

SEQ ID NO: 36216 - DNA, 15 bp, Homo sapiens
ccggttcctatccat

SEQ ID NO: 36217 - DNA, 15 bp, Homo sapiens
tccggttcctatcca

SEQ ID NO: 36218 - DNA, 15 bp, Homo sapiens
ctccggttcctatcc

SEQ ID NO: 36219 - DNA, 15 bp, Homo sapiens
cctccggttcctatc

SEQ ID NO: 36220 - DNA, 15 bp, Homo sapiens
acctccggttcctat

SEQ ID NO: 36221 - DNA, 15 bp, Homo sapiens
tacctccggttccta

SEQ ID NO: 36222 - DNA, 15 bp, Homo sapiens
ctacctccggttcct

SEQ ID NO: 36223 - DNA, 15 bp, Homo sapiens
gctacctccggttcc

SEQ ID NO: 36224 - DNA, 15 bp, Homo sapiens
tgctacctccggttc

SEQ ID NO: 36225 - DNA, 15 bp, Homo sapiens
gtgctacctccggtt

SEQ ID NO: 36226 - DNA, 15 bp, Homo sapiens
agtgctacctccggt

SEQ ID NO: 36227 - DNA, 15 bp, Homo sapiens
cagtgctacctccgg

SEQ ID NO: 36228 - DNA, 15 bp, Homo sapiens
ccagtgctacctccg

SEQ ID NO: 36229 - DNA, 15 bp, Homo sapiens
cccagtgctacctcc

SEQ ID NO: 36230 - DNA, 15 bp, Homo sapiens
tcccagtgctacctc

SEQ ID NO: 36231 - DNA, 15 bp, Homo sapiens
ttcccagtgctacct

SEQ ID NO: 36232 - DNA, 15 bp, Homo sapiens
attcccagtgctacc

SEQ ID NO: 36233 - DNA, 15 bp, Homo sapiens
aattcccagtgctac

SEQ ID NO: 36234 - DNA, 15 bp, Homo sapiens
gaattcccagtgcta

SEQ ID NO: 36235 - DNA, 15 bp, Homo sapiens
tgaattcccagtgct

SEQ ID NO: 36236 - DNA, 15 bp, Homo sapiens
ctgaattcccagtgc

SEQ ID NO: 36237 - DNA, 15 bp, Homo sapiens
cctgaattcccagtg

SEQ ID NO: 36238 - DNA, 15 bp, Homo sapiens
tcctgaattcccagt

SEQ ID NO: 36239 - DNA, 15 bp, Homo sapiens
ttcctgaattcccag

SEQ ID NO: 36240 - DNA, 15 bp, Homo sapiens
attcctgaattccca

SEQ ID NO: 36241 - DNA, 15 bp, Homo sapiens
tattcctgaattccc

SEQ ID NO: 36242 - DNA, 15 bp, Homo sapiens
atattcctgaattcc

SEQ ID NO: 36243 - DNA, 15 bp, Homo sapiens
aatattcctgaattc

SEQ ID NO: 36244 - DNA, 15 bp, Homo sapiens
aaatattcctgaatt

SEQ ID NO: 36245 - DNA, 15 bp, Homo sapiens
taaatattcctgaat

SEQ ID NO: 36246 - DNA, 15 bp, Homo sapiens
ataaatattcctgaa

SEQ ID NO: 36247 - DNA, 15 bp, Homo sapiens
tataaatattcctga

SEQ ID NO: 36248 - DNA, 15 bp, Homo sapiens
atataaatattcctg

SEQ ID NO: 36249 - DNA, 15 bp, Homo sapiens
catataaatattcct

SEQ ID NO: 36250 - DNA, 15 bp, Homo sapiens
gcatataaatattcc

SEQ ID NO: 36251 - DNA, 15 bp, Homo sapiens
agcatataaatattc

SEQ ID NO: 36252 - DNA, 15 bp, Homo sapiens
aagcatataaatatt

SEQ ID NO: 36253 - DNA, 15 bp, Homo sapiens
caagcatataaatat

SEQ ID NO: 36254 - DNA, 15 bp, Homo sapiens
acaagcatataaata

SEQ ID NO: 36255 - DNA, 15 bp, Homo sapiens
cacaagcatataaat

SEQ ID NO: 36256 - DNA, 15 bp, Homo sapiens
acacaagcatataaa

SEQ ID NO: 36257 - DNA, 15 bp, Homo sapiens
aacacaagcatataa

SEQ ID NO: 36258 - DNA, 15 bp, Homo sapiens
aaacacaagcatata

SEQ ID NO: 36259 - DNA, 15 bp, Homo sapiens
caaacacaagcatat

SEQ ID NO: 36260 - DNA, 15 bp, Homo sapiens
acaaacacaagcata

SEQ ID NO: 36261 - DNA, 15 bp, Homo sapiens
cacaaacacaagcat

SEQ ID NO: 36262 - DNA, 15 bp, Homo sapiens
ccacaaacacaagca

SEQ ID NO: 36263 - DNA, 15 bp, Homo sapiens
cccacaaacacaagc

SEQ ID NO: 36264 - DNA, 15 bp, Homo sapiens
acccacaaacacaag

SEQ ID NO: 36265 - DNA, 15 bp, Homo sapiens
cacccacaaacacaa

SEQ ID NO: 36266 - DNA, 15 bp, Homo sapiens
gcacccacaaacaca

SEQ ID NO: 36267 - DNA, 15 bp, Homo sapiens
tgcacccacaaacac

SEQ ID NO: 36268 - DNA, 15 bp, Homo sapiens
atgcacccacaaaca

SEQ ID NO: 36269 - DNA, 15 bp, Homo sapiens
catgcacccacaaac

SEQ ID NO: 36270 - DNA, 15 bp, Homo sapiens
gcatgcacccacaaa

SEQ ID NO: 36271 - DNA, 15 bp, Homo sapiens
tgcatgcacccacaa

SEQ ID NO: 36272 - DNA, 15 bp, Homo sapiens
ctgcatgcacccaca

SEQ ID NO: 36273 - DNA, 15 bp, Homo sapiens
tctgcatgcacccac

SEQ ID NO: 36274 - DNA, 15 bp, Homo sapiens
atctgcatgcaccca

SEQ ID NO: 36275 - DNA, 15 bp, Homo sapiens
catctgcatgcaccc

SEQ ID NO: 36276 - DNA, 15 bp, Homo sapiens
acatctgcatgcacc

SEQ ID NO: 36277 - DNA, 15 bp, Homo sapiens
cacatctgcatgcac

SEQ ID NO: 36278 - DNA, 15 bp, Homo sapiens
acacatctgcatgca

SEQ ID NO: 36279 - DNA, 15 bp, Homo sapiens
aacacatctgcatgc

SEQ ID NO: 36280 - DNA, 15 bp, Homo sapiens
gaacacatctgcatg

SEQ ID NO: 36281 - DNA, 15 bp, Homo sapiens
tgaacacatctgcat

SEQ ID NO: 36282 - DNA, 15 bp, Homo sapiens
atgaacacatctgca

SEQ ID NO: 36283 - DNA, 15 bp, Homo sapiens
catgaacacatctgc

SEQ ID NO: 36284 - DNA, 15 bp, Homo sapiens
acatgaacacatctg

SEQ ID NO: 36285 - DNA, 15 bp, Homo sapiens
aacatgaacacatct

SEQ ID NO: 36286 - DNA, 15 bp, Homo sapiens
aaacatgaacacatc

SEQ ID NO: 36287 - DNA, 15 bp, Homo sapiens
gaaacatgaacacat

SEQ ID NO: 36288 - DNA, 15 bp, Homo sapiens
tgaaacatgaacaca

SEQ ID NO: 36289 - DNA, 15 bp, Homo sapiens
atgaaacatgaacac

SEQ ID NO: 36290 - DNA, 15 bp, Homo sapiens
catgaaacatgaaca

SEQ ID NO: 36291 - DNA, 15 bp, Homo sapiens
gcatgaaacatgaac

SEQ ID NO: 36292 - DNA, 15 bp, Homo sapiens
tgcatgaaacatgaa

SEQ ID NO: 36293 - DNA, 15 bp, Homo sapiens
gtgcatgaaacatga

SEQ ID NO: 36294 - DNA, 15 bp, Homo sapiens
tgtgcatgaaacatg

SEQ ID NO: 36295 - DNA, 15 bp, Homo sapiens
atgtgcatgaaacat

SEQ ID NO: 36296 - DNA, 15 bp, Homo sapiens
tatgtgcatgaaaca

SEQ ID NO: 36297 - DNA, 15 bp, Homo sapiens
ctatgtgcatgaaac

SEQ ID NO: 36298 - DNA, 15 bp, Homo sapiens
cctatgtgcatgaaa

SEQ ID NO: 36299 - DNA, 15 bp, Homo sapiens
gcctatgtgcatgaa

SEQ ID NO: 36300 - DNA, 15 bp, Homo sapiens
tgcctatgtgcatga

SEQ ID NO: 36301 - DNA, 15 bp, Homo sapiens
atgcctatgtgcatg

SEQ ID NO: 36302 - DNA, 15 bp, Homo sapiens
catgcctatgtgcat

SEQ ID NO: 36303 - DNA, 15 bp, Homo sapiens
acatgcctatgtgca

SEQ ID NO: 36304 - DNA, 15 bp, Homo sapiens
tacatgcctatgtgc

SEQ ID NO: 36305 - DNA, 15 bp, Homo sapiens
atacatgcctatgtg

SEQ ID NO: 36306 - DNA, 15 bp, Homo sapiens
tatacatgcctatgt

SEQ ID NO: 36307 - DNA, 15 bp, Homo sapiens
atatacatgcctatg

SEQ ID NO: 36308 - DNA, 15 bp, Homo sapiens
tatatacatgcctat

SEQ ID NO: 36309 - DNA, 15 bp, Homo sapiens
atatatacatgccta

SEQ ID NO: 36310 - DNA, 15 bp, Homo sapiens
tatatatacatgcct

SEQ ID NO: 36311 - DNA, 15 bp, Homo sapiens
ctatatatacatgcc

SEQ ID NO: 36312 - DNA, 15 bp, Homo sapiens
tctatatatacatgc

SEQ ID NO: 36313 - DNA, 15 bp, Homo sapiens
gtctatatatacatg

SEQ ID NO: 36314 - DNA, 15 bp, Homo sapiens
tgtctatatatacat

SEQ ID NO: 36315 - DNA, 15 bp, Homo sapiens
atgtctatatataca

SEQ ID NO: 36316 - DNA, 15 bp, Homo sapiens
tatgtctatatatac

SEQ ID NO: 36317 - DNA, 15 bp, Homo sapiens
atatgtctatatata

SEQ ID NO: 36318 - DNA, 15 bp, Homo sapiens
tatatgtctatatat

SEQ ID NO: 36319 - DNA, 15 bp, Homo sapiens
atatatgtctatata

SEQ ID NO: 36320 - DNA, 15 bp, Homo sapiens
aatatatgtctatat

SEQ ID NO: 36321 - DNA, 15 bp, Homo sapiens
aaatatatgtctata

SEQ ID NO: 36322 - DNA, 15 bp, Homo sapiens
caaatatatgtctat

SEQ ID NO: 36323 - DNA, 15 bp, Homo sapiens
gcaaatatatgtcta

SEQ ID NO: 36324 - DNA, 15 bp, Homo sapiens
tgcaaatatatgtct

SEQ ID NO: 36325 - DNA, 15 bp, Homo sapiens
atgcaaatatatgtc

SEQ ID NO: 36326 - DNA, 15 bp, Homo sapiens
catgcaaatatatgt

SEQ ID NO: 36327 - DNA, 15 bp, Homo sapiens
acatgcaaatatatg

SEQ ID NO: 36328 - DNA, 15 bp, Homo sapiens
cacatgcaaatatat

SEQ ID NO: 36329 - DNA, 15 bp, Homo sapiens
acacatgcaaatata

SEQ ID NO: 36330 - DNA, 15 bp, Homo sapiens
cacacatgcaaatat

SEQ ID NO: 36331 - DNA, 15 bp, Homo sapiens
acacacatgcaaata

SEQ ID NO: 36332 - DNA, 15 bp, Homo sapiens
tacacacatgcaaat

SEQ ID NO: 36333 - DNA, 15 bp, Homo sapiens
atacacacatgcaaa

SEQ ID NO: 36334 - DNA, 15 bp, Homo sapiens
gatacacacatgcaa

SEQ ID NO: 36335 - DNA, 15 bp, Homo sapiens
agatacacacatgca

SEQ ID NO: 36336 - DNA, 15 bp, Homo sapiens
cagatacacacatgc

SEQ ID NO: 36337 - DNA, 15 bp, Homo sapiens
acagatacacacatg

SEQ ID NO: 36338 - DNA, 15 bp, Homo sapiens
gacagatacacacat

SEQ ID NO: 36339 - DNA, 15 bp, Homo sapiens
agacagatacacaca

SEQ ID NO: 36340 - DNA, 15 bp, Homo sapiens
aagacagatacacac

SEQ ID NO: 36341 - DNA, 15 bp, Homo sapiens
gaagacagatacaca

SEQ ID NO: 36342 - DNA, 15 bp, Homo sapiens
ggaagacagatacac

SEQ ID NO: 36343 - DNA, 15 bp, Homo sapiens
cggaagacagataca

SEQ ID NO: 36344 - DNA, 15 bp, Homo sapiens
tcggaagacagatac

SEQ ID NO: 36345 - DNA, 15 bp, Homo sapiens
ttcggaagacagata

SEQ ID NO: 36346 - DNA, 15 bp, Homo sapiens
tttcggaagacagat

SEQ ID NO: 36347 - DNA, 15 bp, Homo sapiens
ctttcggaagacaga

SEQ ID NO: 36348 - DNA, 15 bp, Homo sapiens
cctttcggaagacag

SEQ ID NO: 36349 - DNA, 15 bp, Homo sapiens
gcctttcggaagaca

SEQ ID NO: 36350 - DNA, 15 bp, Homo sapiens
agcctttcggaagac

SEQ ID NO: 36351 - DNA, 15 bp, Homo sapiens
gagcctttcggaaga

SEQ ID NO: 36352 - DNA, 15 bp, Homo sapiens
tgagcctttcggaag

SEQ ID NO: 36353 - DNA, 15 bp, Homo sapiens
ttgagcctttcggaa

SEQ ID NO: 36354 - DNA, 15 bp, Homo sapiens
cttgagcctttcgga

SEQ ID NO: 36355 - DNA, 15 bp, Homo sapiens
tcttgagcctttcgg

SEQ ID NO: 36356 - DNA, 15 bp, Homo sapiens
ttcttgagcctttcg

SEQ ID NO: 36357 - DNA, 15 bp, Homo sapiens
cttcttgagcctttc

SEQ ID NO: 36358 - DNA, 15 bp, Homo sapiens
gcttcttgagccttt

SEQ ID NO: 36359 - DNA, 15 bp, Homo sapiens
tgcttcttgagcctt

SEQ ID NO: 36360 - DNA, 15 bp, Homo sapiens
ttgcttcttgagcct

SEQ ID NO: 36361 - DNA, 15 bp, Homo sapiens
tttgcttcttgagcc

SEQ ID NO: 36362 - DNA, 15 bp, Homo sapiens
ttttgcttcttgagc

SEQ ID NO: 36363 - DNA, 15 bp, Homo sapiens
tttttgcttcttgag

SEQ ID NO: 36364 - DNA, 15 bp, Homo sapiens
gtttttgcttcttga

SEQ ID NO: 36365 - DNA, 15 bp, Homo sapiens
tgtttttgcttcttg

SEQ ID NO: 36366 - DNA, 15 bp, Homo sapiens
gtgtttttgcttctt

SEQ ID NO: 36367 - DNA, 15 bp, Homo sapiens
ggtgtttttgcttct

SEQ ID NO: 36368 - DNA, 15 bp, Homo sapiens
gggtgtttttgcttc

SEQ ID NO: 36369 - DNA, 15 bp, Homo sapiens
ggggtgtttttgctt

SEQ ID NO: 36370 - DNA, 15 bp, Homo sapiens
tggggtgtttttgct

SEQ ID NO: 36371 - DNA, 15 bp, Homo sapiens
ctggggtgtttttgc

SEQ ID NO: 36372 - DNA, 15 bp, Homo sapiens
actggggtgtttttg

SEQ ID NO: 36373 - DNA, 15 bp, Homo sapiens
tactggggtgttttt

SEQ ID NO: 36374 - DNA, 15 bp, Homo sapiens
ctactggggtgtttt

SEQ ID NO: 36375 - DNA, 15 bp, Homo sapiens
gctactggggtgttt

SEQ ID NO: 36376 - DNA, 15 bp, Homo sapiens
ggctactggggtgtt

SEQ ID NO: 36377 - DNA, 15 bp, Homo sapiens
tggctactggggtgt

SEQ ID NO: 36378 - DNA, 15 bp, Homo sapiens
atggctactggggtg

SEQ ID NO: 36379 - DNA, 15 bp, Homo sapiens
catggctactggggt

SEQ ID NO: 36380 - DNA, 15 bp, Homo sapiens
tcatggctactgggg

SEQ ID NO: 36381 - DNA, 15 bp, Homo sapiens
ctcatggctactggg

SEQ ID NO: 36382 - DNA, 15 bp, Homo sapiens
gctcatggctactgg

SEQ ID NO: 36383 - DNA, 15 bp, Homo sapiens
tgctcatggctactg

SEQ ID NO: 36384 - DNA, 15 bp, Homo sapiens
gtgctcatggctact

SEQ ID NO: 36385 - DNA, 15 bp, Homo sapiens
tgtgctcatggctac

SEQ ID NO: 36386 - DNA, 15 bp, Homo sapiens
gtgtgctcatggcta

SEQ ID NO: 36387 - DNA, 15 bp, Homo sapiens
agtgtgctcatggct

SEQ ID NO: 36388 - DNA, 15 bp, Homo sapiens
aagtgtgctcatggc

SEQ ID NO: 36389 - DNA, 15 bp, Homo sapiens
taagtgtgctcatgg

SEQ ID NO: 36390 - DNA, 15 bp, Homo sapiens
ctaagtgtgctcatg

SEQ ID NO: 36391 - DNA, 15 bp, Homo sapiens
gctaagtgtgctcat

SEQ ID NO: 36392 - DNA, 15 bp, Homo sapiens
tgctaagtgtgctca

SEQ ID NO: 36393 - DNA, 15 bp, Homo sapiens
gtgctaagtgtgctc

SEQ ID NO: 36394 - DNA, 15 bp, Homo sapiens
agtgctaagtgtgct

SEQ ID NO: 36395 - DNA, 15 bp, Homo sapiens
gagtgctaagtgtgc

SEQ ID NO: 36396 - DNA, 15 bp, Homo sapiens
tgagtgctaagtgtg

SEQ ID NO: 36397 - DNA, 15 bp, Homo sapiens
ctgagtgctaagtgt

SEQ ID NO: 36398 - DNA, 15 bp, Homo sapiens
cctgagtgctaagtg

SEQ ID NO: 36399 - DNA, 15 bp, Homo sapiens
gcctgagtgctaagt

SEQ ID NO: 36400 - DNA, 15 bp, Homo sapiens
agcctgagtgctaag

SEQ ID NO: 36401 - DNA, 15 bp, Homo sapiens
aagcctgagtgctaa

SEQ ID NO: 36402 - DNA, 15 bp, Homo sapiens
aaagcctgagtgcta

SEQ ID NO: 36403 - DNA, 15 bp, Homo sapiens
aaaagcctgagtgct

SEQ ID NO: 36404 - DNA, 15 bp, Homo sapiens
caaaagcctgagtgc

SEQ ID NO: 36405 - DNA, 15 bp, Homo sapiens
acaaaagcctgagtg

SEQ ID NO: 36406 - DNA, 15 bp, Homo sapiens
gacaaaagcctgagt

SEQ ID NO: 36407 - DNA, 15 bp, Homo sapiens
agacaaaagcctgag

SEQ ID NO: 36408 - DNA, 15 bp, Homo sapiens
aagacaaaagcctga

SEQ ID NO: 36409 - DNA, 15 bp, Homo sapiens
taagacaaaagcctg

SEQ ID NO: 36410 - DNA, 15 bp, Homo sapiens
ttaagacaaaagcct

SEQ ID NO: 36411 - DNA, 15 bp, Homo sapiens
attaagacaaaagcc

SEQ ID NO: 36412 - DNA, 15 bp, Homo sapiens
tattaagacaaaagc

SEQ ID NO: 36413 - DNA, 15 bp, Homo sapiens
ttattaagacaaaag

SEQ ID NO: 36414 - DNA, 15 bp, Homo sapiens
gttattaagacaaaa

SEQ ID NO: 36415 - DNA, 15 bp, Homo sapiens
tgttattaagacaaa

SEQ ID NO: 36416 - DNA, 15 bp, Homo sapiens
atgttattaagacaa

SEQ ID NO: 36417 - DNA, 15 bp, Homo sapiens
aatgttattaagaca

SEQ ID NO: 36418 - DNA, 15 bp, Homo sapiens
gaatgttattaagac

SEQ ID NO: 36419 - DNA, 15 bp, Homo sapiens
ggaatgttattaaga

SEQ ID NO: 36420 - DNA, 15 bp, Homo sapiens
gggaatgttattaag

SEQ ID NO: 36421 - DNA, 15 bp, Homo sapiens
ggggaatgttattaa

SEQ ID NO: 36422 - DNA, 15 bp, Homo sapiens
tggggaatgttatta

SEQ ID NO: 36423 - DNA, 15 bp, Homo sapiens
gtggggaatgttatt

SEQ ID NO: 36424 - DNA, 15 bp, Homo sapiens
agtggggaatgttat

SEQ ID NO: 36425 - DNA, 15 bp, Homo sapiens
tagtggggaatgtta

SEQ ID NO: 36426 - DNA, 15 bp, Homo sapiens
ttagtggggaatgtt

SEQ ID NO: 36427 - DNA, 15 bp, Homo sapiens
tttagtggggaatgt

SEQ ID NO: 36428 - DNA, 15 bp, Homo sapiens
ttttagtggggaatg

SEQ ID NO: 36429 - DNA, 15 bp, Homo sapiens
cttttagtggggaat

SEQ ID NO: 36430 - DNA, 15 bp, Homo sapiens
acttttagtggggaa

SEQ ID NO: 36431 - DNA, 15 bp, Homo sapiens
tacttttagtgggga

SEQ ID NO: 36432 - DNA, 15 bp, Homo sapiens
ttacttttagtgggg

SEQ ID NO: 36433 - DNA, 15 bp, Homo sapiens
gttacttttagtggg

SEQ ID NO: 36434 - DNA, 15 bp, Homo sapiens
ggttacttttagtgg

SEQ ID NO: 36435 - DNA, 15 bp, Homo sapiens
gggttacttttagtg

SEQ ID NO: 36436 - DNA, 15 bp, Homo sapiens
agggttacttttagt

SEQ ID NO: 36437 - DNA, 15 bp, Homo sapiens
cagggttacttttag

SEQ ID NO: 36438 - DNA, 15 bp, Homo sapiens
tcagggttactttta

SEQ ID NO: 36439 - DNA, 15 bp, Homo sapiens
atcagggttactttt

SEQ ID NO: 36440 - DNA, 15 bp, Homo sapiens
aatcagggttacttt

SEQ ID NO: 36441 - DNA, 15 bp, Homo sapiens
gaatcagggttactt

SEQ ID NO: 36442 - DNA, 15 bp, Homo sapiens
ggaatcagggttact

SEQ ID NO: 36443 - DNA, 15 bp, Homo sapiens
aggaatcagggttac

SEQ ID NO: 36444 - DNA, 15 bp, Homo sapiens
gaggaatcagggtta

SEQ ID NO: 36445 - DNA, 15 bp, Homo sapiens
ggaggaatcagggtt

SEQ ID NO: 36446 - DNA, 15 bp, Homo sapiens
tggaggaatcagggt

SEQ ID NO: 36447 - DNA, 15 bp, Homo sapiens
ttggaggaatcaggg

SEQ ID NO: 36448 - DNA, 15 bp, Homo sapiens
attggaggaatcagg

SEQ ID NO: 36449 - DNA, 15 bp, Homo sapiens
tattggaggaatcag

SEQ ID NO: 36450 - DNA, 15 bp, Homo sapiens
ttattggaggaatca

SEQ ID NO: 36451 - DNA, 15 bp, Homo sapiens
tttattggaggaatc

SEQ ID NO: 36452 - DNA, 15 bp, Homo sapiens
atttattggaggaat

SEQ ID NO: 36453 - DNA, 15 bp, Homo sapiens
catttattggaggaa

SEQ ID NO: 36454 - DNA, 15 bp, Homo sapiens
tcatttattggagga

SEQ ID NO: 36455 - DNA, 15 bp, Homo sapiens
atcatttattggagg

SEQ ID NO: 36456 - DNA, 15 bp, Homo sapiens
tatcatttattggag

SEQ ID NO: 36457 - DNA, 15 bp, Homo sapiens
ttatcatttattgga

SEQ ID NO: 36458 - DNA, 15 bp, Homo sapiens
cttatcatttattgg

SEQ ID NO: 36459 - DNA, 15 bp, Homo sapiens
acttatcatttattg

SEQ ID NO: 36460 - DNA, 15 bp, Homo sapiens
aacttatcatttatt

SEQ ID NO: 36461 - DNA, 15 bp, Homo sapiens
gaacttatcatttat

SEQ ID NO: 36462 - DNA, 15 bp, Homo sapiens
ggaacttatcattta

SEQ ID NO: 36463 - DNA, 15 bp, Homo sapiens
tggaacttatcattt

SEQ ID NO: 36464 - DNA, 15 bp, Homo sapiens
ctggaacttatcatt

SEQ ID NO: 36465 - DNA, 15 bp, Homo sapiens
cctggaacttatcat

SEQ ID NO: 36466 - DNA, 15 bp, Homo sapiens
ccctggaacttatca

SEQ ID NO: 36467 - DNA, 15 bp, Homo sapiens
gccctggaacttatc

SEQ ID NO: 36468 - DNA, 15 bp, Homo sapiens
agccctggaacttat

SEQ ID NO: 36469 - DNA, 15 bp, Homo sapiens
cagccctggaactta

SEQ ID NO: 36470 - DNA, 15 bp, Homo sapiens
ccagccctggaactt

SEQ ID NO: 36471 - DNA, 15 bp, Homo sapiens
tccagccctggaact

SEQ ID NO: 36472 - DNA, 15 bp, Homo sapiens
ttccagccctggaac

SEQ ID NO: 36473 - DNA, 15 bp, Homo sapiens
attccagccctggaa

SEQ ID NO: 36474 - DNA, 15 bp, Homo sapiens
cattccagccctgga

SEQ ID NO: 36475 - DNA, 15 bp, Homo sapiens
ccattccagccctgg

SEQ ID NO: 36476 - DNA, 15 bp, Homo sapiens
gccattccagccctg

SEQ ID NO: 36477 - DNA, 15 bp, Homo sapiens
tgccattccagccct

SEQ ID NO: 36478 - DNA, 15 bp, Homo sapiens
atgccattccagccc

SEQ ID NO: 36479 - DNA, 15 bp, Homo sapiens
tatgccattccagcc

SEQ ID NO: 36480 - DNA, 15 bp, Homo sapiens
ctatgccattccagc

SEQ ID NO: 36481 - DNA, 15 bp, Homo sapiens
cctatgccattccag

SEQ ID NO: 36482 - DNA, 15 bp, Homo sapiens
acctatgccattcca

SEQ ID NO: 36483 - DNA, 15 bp, Homo sapiens
tacctatgccattcc

SEQ ID NO: 36484 - DNA, 15 bp, Homo sapiens
atacctatgccattc

SEQ ID NO: 36485 - DNA, 15 bp, Homo sapiens
tatacctatgccatt

SEQ ID NO: 36486 - DNA, 15 bp, Homo sapiens
ttatacctatgccat

SEQ ID NO: 36487 - DNA, 15 bp, Homo sapiens
tttatacctatgcca

SEQ ID NO: 36488 - DNA, 15 bp, Homo sapiens
ttttatacctatgcc

SEQ ID NO: 36489 - DNA, 15 bp, Homo sapiens
attttatacctatgc

SEQ ID NO: 36490 - DNA, 15 bp, Homo sapiens
cattttatacctatg

SEQ ID NO: 36491 - DNA, 15 bp, Homo sapiens
tcattttatacctat

SEQ ID NO: 36492 - DNA, 15 bp, Homo sapiens
ttcattttataccta

SEQ ID NO: 36493 - DNA, 15 bp, Homo sapiens
gttcattttatacct

SEQ ID NO: 36494 - DNA, 15 bp, Homo sapiens
ggttcattttatacc

SEQ ID NO: 36495 - DNA, 15 bp, Homo sapiens
aggttcattttatac

SEQ ID NO: 36496 - DNA, 15 bp, Homo sapiens
caggttcattttata

SEQ ID NO: 36497 - DNA, 15 bp, Homo sapiens
ccaggttcattttat

SEQ ID NO: 36498 - DNA, 15 bp, Homo sapiens
tccaggttcatttta

SEQ ID NO: 36499 - DNA, 15 bp, Homo sapiens
ttccaggttcatttt

SEQ ID NO: 36500 - DNA, 15 bp, Homo sapiens
attccaggttcattt

SEQ ID NO: 36501 - DNA, 15 bp, Homo sapiens
tattccaggttcatt

SEQ ID NO: 36502 - DNA, 15 bp, Homo sapiens
atattccaggttcat

SEQ ID NO: 36503 - DNA, 15 bp, Homo sapiens
gatattccaggttca

SEQ ID NO: 36504 - DNA, 15 bp, Homo sapiens
agatattccaggttc

SEQ ID NO: 36505 - DNA, 15 bp, Homo sapiens
aagatattccaggtt

SEQ ID NO: 36506 - DNA, 15 bp, Homo sapiens
taagatattccaggt

SEQ ID NO: 36507 - DNA, 15 bp, Homo sapiens
ataagatattccagg

SEQ ID NO: 36508 - DNA, 15 bp, Homo sapiens
cataagatattccag

SEQ ID NO: 36509 - DNA, 15 bp, Homo sapiens
gcataagatattcca

SEQ ID NO: 36510 - DNA, 15 bp, Homo sapiens
ggcataagatattcc

SEQ ID NO: 36511 - DNA, 15 bp, Homo sapiens
tggcataagatattc

SEQ ID NO: 36512 - DNA, 15 bp, Homo sapiens
ctggcataagatatt

SEQ ID NO: 36513 - DNA, 15 bp, Homo sapiens
tctggcataagatat

SEQ ID NO: 36514 - DNA, 15 bp, Homo sapiens
ttctggcataagata

SEQ ID NO: 36515 - DNA, 15 bp, Homo sapiens
tttctggcataagat

SEQ ID NO: 36516 - DNA, 15 bp, Homo sapiens
ctttctggcataaga

SEQ ID NO: 36517 - DNA, 15 bp, Homo sapiens
actttctggcataag

SEQ ID NO: 36518 - DNA, 15 bp, Homo sapiens
tactttctggcataa

SEQ ID NO: 36519 - DNA, 15 bp, Homo sapiens
ttactttctggcata

SEQ ID NO: 36520 - DNA, 15 bp, Homo sapiens
cttactttctggcat

SEQ ID NO: 36521 - DNA, 15 bp, Homo sapiens
ccttactttctggca

SEQ ID NO: 36522 - DNA, 15 bp, Homo sapiens
tccttactttctggc

SEQ ID NO: 36523 - DNA, 15 bp, Homo sapiens
ttccttactttctgg

SEQ ID NO: 36524 - DNA, 15 bp, Homo sapiens
cttccttactttctg

SEQ ID NO: 36525 - DNA, 15 bp, Homo sapiens
acttccttactttct

SEQ ID NO: 36526 - DNA, 15 bp, Homo sapiens
cacttccttactttc

SEQ ID NO: 36527 - DNA, 15 bp, Homo sapiens
gcacttccttacttt

SEQ ID NO: 36528 - DNA, 15 bp, Homo sapiens
agcacttccttactt

SEQ ID NO: 36529 - DNA, 15 bp, Homo sapiens
aagcacttccttact

SEQ ID NO: 36530 - DNA, 15 bp, Homo sapiens
aaagcacttccttac

SEQ ID NO: 36531 - DNA, 15 bp, Homo sapiens
aaaagcacttcctta

SEQ ID NO: 36532 - DNA, 15 bp, Homo sapiens
taaaagcacttcctt

SEQ ID NO: 36533 - DNA, 15 bp, Homo sapiens
ttaaaagcacttcct

SEQ ID NO: 36534 - DNA, 15 bp, Homo sapiens
tttaaaagcacttcc

SEQ ID NO: 36535 - DNA, 15 bp, Homo sapiens
ttttaaaagcacttc

SEQ ID NO: 36536 - DNA, 15 bp, Homo sapiens
tttttaaaagcactt

SEQ ID NO: 36537 - DNA, 15 bp, Homo sapiens
ttttttaaaagcact

SEQ ID NO: 36538 - DNA, 15 bp, Homo sapiens
tttttttaaaagcac

SEQ ID NO: 36539 - DNA, 15 bp, Homo sapiens
ttttttttaaaagca

SEQ ID NO: 36540 - DNA, 15 bp, Homo sapiens
tttttttttaaaagc

SEQ ID NO: 36541 - DNA, 15 bp, Homo sapiens
ttttttttttaaaag

SEQ ID NO: 36542 - DNA, 15 bp, Homo sapiens
attttttttttaaaa

SEQ ID NO: 36543 - DNA, 15 bp, Homo sapiens
tattttttttttaaa

SEQ ID NO: 36544 - DNA, 15 bp, Homo sapiens
ttattttttttttaa

SEQ ID NO: 36545 - DNA, 15 bp, Homo sapiens
cttatttttttttta

SEQ ID NO: 36546 - DNA, 15 bp, Homo sapiens
ccttatttttttttt

SEQ ID NO: 36547 - DNA, 15 bp, Homo sapiens
cccttattttttttt

SEQ ID NO: 36548 - DNA, 15 bp, Homo sapiens
ccccttatttttttt

SEQ ID NO: 36549 - DNA, 15 bp, Homo sapiens
gccccttattttttt

SEQ ID NO: 36550 - DNA, 15 bp, Homo sapiens
agccccttatttttt

SEQ ID NO: 36551 - DNA, 15 bp, Homo sapiens
cagccccttattttt

SEQ ID NO: 36552 - DNA, 15 bp, Homo sapiens
ccagccccttatttt

SEQ ID NO: 36553 - DNA, 15 bp, Homo sapiens
cccagccccttattt

SEQ ID NO: 36554 - DNA, 15 bp, Homo sapiens
gcccagccccttatt

SEQ ID NO: 36555 - DNA, 15 bp, Homo sapiens
tgcccagccccttat

SEQ ID NO: 36556 - DNA, 15 bp, Homo sapiens
atgcccagcccctta

SEQ ID NO: 36557 - DNA, 15 bp, Homo sapiens
catgcccagcccctt

SEQ ID NO: 36558 - DNA, 15 bp, Homo sapiens
ccatgcccagcccct

SEQ ID NO: 36559 - DNA, 15 bp, Homo sapiens
accatgcccagcccc

SEQ ID NO: 36560 - DNA, 15 bp, Homo sapiens
caccatgcccagccc

SEQ ID NO: 36561 - DNA, 15 bp, Homo sapiens
ccaccatgcccagcc

SEQ ID NO: 36562 - DNA, 15 bp, Homo sapiens
gccaccatgcccagc

SEQ ID NO: 36563 - DNA, 15 bp, Homo sapiens
agccaccatgcccag

SEQ ID NO: 36564 - DNA, 15 bp, Homo sapiens
gagccaccatgccca

SEQ ID NO: 36565 - DNA, 15 bp, Homo sapiens
tgagccaccatgccc

SEQ ID NO: 36566 - DNA, 15 bp, Homo sapiens
gtgagccaccatgcc

SEQ ID NO: 36567 - DNA, 15 bp, Homo sapiens
tgtgagccaccatgc

SEQ ID NO: 36568 - DNA, 15 bp, Homo sapiens
gtgtgagccaccatg

SEQ ID NO: 36569 - DNA, 15 bp, Homo sapiens
ggtgtgagccaccat

SEQ ID NO: 36570 - DNA, 15 bp, Homo sapiens
aggtgtgagccacca

SEQ ID NO: 36571 - DNA, 15 bp, Homo sapiens
gattacaggtgtgag

SEQ ID NO: 36572 - DNA, 15 bp, Homo sapiens
cgattacaggtgtga

SEQ ID NO: 36573 - DNA, 15 bp, Homo sapiens
gcgattacaggtgtg

SEQ ID NO: 36574 - DNA, 15 bp, Homo sapiens
tgcgattacaggtgt

SEQ ID NO: 36575 - DNA, 15 bp, Homo sapiens
ctgcgattacaggtg

SEQ ID NO: 36576 - DNA, 15 bp, Homo sapiens
gctgcgattacaggt

SEQ ID NO: 36577 - DNA, 15 bp, Homo sapiens
tgctgcgattacagg

SEQ ID NO: 36578 - DNA, 15 bp, Homo sapiens
gtgctgcgattacag

SEQ ID NO: 36579 - DNA, 15 bp, Homo sapiens
agtgctgcgattaca

SEQ ID NO: 36580 - DNA, 15 bp, Homo sapiens
aagtgctgcgattac

SEQ ID NO: 36581 - DNA, 15 bp, Homo sapiens
aaagtgctgcgatta

SEQ ID NO: 36582 - DNA, 15 bp, Homo sapiens
caaagtgctgcgatt

SEQ ID NO: 36583 - DNA, 15 bp, Homo sapiens
ccaaagtgctgcgat

SEQ ID NO: 36584 - DNA, 15 bp, Homo sapiens
cccaaagtgctgcga

SEQ ID NO: 36585 - DNA, 15 bp, Homo sapiens
tcccaaagtgctgcg

SEQ ID NO: 36586 - DNA, 15 bp, Homo sapiens
ctcccaaagtgctgc

SEQ ID NO: 36587 - DNA, 15 bp, Homo sapiens
accttggcctcccaa

SEQ ID NO: 36588 - DNA, 15 bp, Homo sapiens
taccttggcctccca

SEQ ID NO: 36589 - DNA, 15 bp, Homo sapiens
ctaccttggcctccc

SEQ ID NO: 36590 - DNA, 15 bp, Homo sapiens
cctaccttggcctcc

SEQ ID NO: 36591 - DNA, 15 bp, Homo sapiens
tcctaccttggcctc

SEQ ID NO: 36592 - DNA, 15 bp, Homo sapiens
ttcctaccttggcct

SEQ ID NO: 36593 - DNA, 15 bp, Homo sapiens
cttcctaccttggcc

SEQ ID NO: 36594 - DNA, 15 bp, Homo sapiens
tcttcctaccttggc

SEQ ID NO: 36595 - DNA, 15 bp, Homo sapiens
atcttcctaccttgg

SEQ ID NO: 36596 - DNA, 15 bp, Homo sapiens
gatcttcctaccttg

SEQ ID NO: 36597 - DNA, 15 bp, Homo sapiens
cgatcttcctacctt

SEQ ID NO: 36598 - DNA, 15 bp, Homo sapiens
gcgatcttcctacct

SEQ ID NO: 36599 - DNA, 15 bp, Homo sapiens
agcgatcttcctacc

SEQ ID NO: 36600 - DNA, 15 bp, Homo sapiens
aagcgatcttcctac

SEQ ID NO: 36601 - DNA, 15 bp, Homo sapiens
caagcgatcttccta

SEQ ID NO: 36602 - DNA, 15 bp, Homo sapiens
tcaagcgatcttcct

SEQ ID NO: 36603 - DNA, 15 bp, Homo sapiens
ctcaagcgatcttcc

SEQ ID NO: 36604 - DNA, 15 bp, Homo sapiens
gctcaagcgatcttc

SEQ ID NO: 36605 - DNA, 15 bp, Homo sapiens
ggctcaagcgatctt

SEQ ID NO: 36606 - DNA, 15 bp, Homo sapiens
gggctcaagcgatct

SEQ ID NO: 36607 - DNA, 15 bp, Homo sapiens
tgggctcaagcgatc

SEQ ID NO: 36608 - DNA, 15 bp, Homo sapiens
ctgggctcaagcgat

SEQ ID NO: 36609 - DNA, 15 bp, Homo sapiens
cctgggctcaagcga

SEQ ID NO: 36610 - DNA, 15 bp, Homo sapiens
tcctgggctcaagcg

SEQ ID NO: 36611 - DNA, 15 bp, Homo sapiens
ctcctgggctcaagc

SEQ ID NO: 36612 - DNA, 15 bp, Homo sapiens
actcctgggctcaag

SEQ ID NO: 36613 - DNA, 15 bp, Homo sapiens
aactcctgggctcaa

SEQ ID NO: 36614 - DNA, 15 bp, Homo sapiens
gaactcctgggctca

SEQ ID NO: 36615 - DNA, 15 bp, Homo sapiens
ggaactcctgggctc

SEQ ID NO: 36616 - DNA, 15 bp, Homo sapiens
tggaactcctgggct

SEQ ID NO: 36617 - DNA, 15 bp, Homo sapiens
ctggaactcctgggc

SEQ ID NO: 36618 - DNA, 15 bp, Homo sapiens
tctggaactcctggg

SEQ ID NO: 36619 - DNA, 15 bp, Homo sapiens
atctggaactcctgg

SEQ ID NO: 36620 - DNA, 15 bp, Homo sapiens
aatctggaactcctg

SEQ ID NO: 36621 - DNA, 15 bp, Homo sapiens
taatctggaactcct

SEQ ID NO: 36622 - DNA, 15 bp, Homo sapiens
ctaatctggaactcc

SEQ ID NO: 36623 - DNA, 15 bp, Homo sapiens
gctaatctggaactc

SEQ ID NO: 36624 - DNA, 15 bp, Homo sapiens
ggctaatctggaact

SEQ ID NO: 36625 - DNA, 15 bp, Homo sapiens
aggctaatctggaac

SEQ ID NO: 36626 - DNA, 15 bp, Homo sapiens
caggctaatctggaa

SEQ ID NO: 36627 - DNA, 15 bp, Homo sapiens
acaggctaatctgga

SEQ ID NO: 36628 - DNA, 15 bp, Homo sapiens
cacaggctaatctgg

SEQ ID NO: 36629 - DNA, 15 bp, Homo sapiens
gcacaggctaatctg

SEQ ID NO: 36630 - DNA, 15 bp, Homo sapiens
tgcacaggctaatct

SEQ ID NO: 36631 - DNA, 15 bp, Homo sapiens
ttgcacaggctaatc

SEQ ID NO: 36632 - DNA, 15 bp, Homo sapiens
gttgcacaggctaat

SEQ ID NO: 36633 - DNA, 15 bp, Homo sapiens
tgttgcacaggctaa

SEQ ID NO: 36634 - DNA, 15 bp, Homo sapiens
atgttgcacaggcta

SEQ ID NO: 36635 - DNA, 15 bp, Homo sapiens
tatgttgcacaggct

SEQ ID NO: 36636 - DNA, 15 bp, Homo sapiens
ctatgttgcacaggc

SEQ ID NO: 36637 - DNA, 15 bp, Homo sapiens
cctatgttgcacagg

SEQ ID NO: 36638 - DNA, 15 bp, Homo sapiens
ccctatgttgcacag

SEQ ID NO: 36639 - DNA, 15 bp, Homo sapiens
tccctatgttgcaca

SEQ ID NO: 36640 - DNA, 15 bp, Homo sapiens
ctccctatgttgcac

SEQ ID NO: 36641 - DNA, 15 bp, Homo sapiens
tctccctatgttgca

SEQ ID NO: 36642 - DNA, 15 bp, Homo sapiens
gtctccctatgttgc

SEQ ID NO: 36643 - DNA, 15 bp, Homo sapiens
ggtctccctatgttg

SEQ ID NO: 36644 - DNA, 15 bp, Homo sapiens
gggtctccctatgtt

SEQ ID NO: 36645 - DNA, 15 bp, Homo sapiens
agggtctccctatgt

SEQ ID NO: 36646 - DNA, 15 bp, Homo sapiens
cagggtctccctatg

SEQ ID NO: 36647 - DNA, 15 bp, Homo sapiens
acagggtctccctat

SEQ ID NO: 36648 - DNA, 15 bp, Homo sapiens
gacagggtctcccta

SEQ ID NO: 36649 - DNA, 15 bp, Homo sapiens
agacagggtctccct

SEQ ID NO: 36650 - DNA, 15 bp, Homo sapiens
gagacagggtctccc

SEQ ID NO: 36651 - DNA, 15 bp, Homo sapiens
agagacagggtctcc

SEQ ID NO: 36652 - DNA, 15 bp, Homo sapiens
tagagacagggtctc

SEQ ID NO: 36653 - DNA, 15 bp, Homo sapiens
gtagagacagggtct

SEQ ID NO: 36654 - DNA, 15 bp, Homo sapiens
tgtagagacagggtc

SEQ ID NO: 36655 - DNA, 15 bp, Homo sapiens
ttgtagagacagggt

SEQ ID NO: 36656 - DNA, 15 bp, Homo sapiens
tttgtagagacaggg

SEQ ID NO: 36657 - DNA, 15 bp, Homo sapiens
ttttgtagagacagg

SEQ ID NO: 36658 - DNA, 15 bp, Homo sapiens
tttttgtagagacag

SEQ ID NO: 36659 - DNA, 15 bp, Homo sapiens
ttttttgtagagaca

SEQ ID NO: 36660 - DNA, 15 bp, Homo sapiens
attttttgtagagac

SEQ ID NO: 36661 - DNA, 15 bp, Homo sapiens
aattttttgtagaga

SEQ ID NO: 36662 - DNA, 15 bp, Homo sapiens
taattttttgtagag

SEQ ID NO: 36663 - DNA, 15 bp, Homo sapiens
ctaattttttgtaga

SEQ ID NO: 36664 - DNA, 15 bp, Homo sapiens
gctaattttttgtag

SEQ ID NO: 36665 - DNA, 15 bp, Homo sapiens
tgctaattttttgta

SEQ ID NO: 36666 - DNA, 15 bp, Homo sapiens
ttgctaattttttgt

SEQ ID NO: 36667 - DNA, 15 bp, Homo sapiens
tttgctaattttttg

SEQ ID NO: 36668 - DNA, 15 bp, Homo sapiens
gtttgctaatttttt

SEQ ID NO: 36669 - DNA, 15 bp, Homo sapiens
tgtttgctaattttt

SEQ ID NO: 36670 - DNA, 15 bp, Homo sapiens
ttgtttgctaatttt

SEQ ID NO: 36671 - DNA, 15 bp, Homo sapiens
tttgtttgctaattt

SEQ ID NO: 36672 - DNA, 15 bp, Homo sapiens
atttgtttgctaatt

SEQ ID NO: 36673 - DNA, 15 bp, Homo sapiens
aatttgtttgctaat

SEQ ID NO: 36674 - DNA, 15 bp, Homo sapiens
taatttgtttgctaa

SEQ ID NO: 36675 - DNA, 15 bp, Homo sapiens
ctaatttgtttgcta

SEQ ID NO: 36676 - DNA, 15 bp, Homo sapiens
gctaatttgtttgct

SEQ ID NO: 36677 - DNA, 15 bp, Homo sapiens
agctaatttgtttgc

SEQ ID NO: 36678 - DNA, 15 bp, Homo sapiens
cagctaatttgtttg

SEQ ID NO: 36679 - DNA, 15 bp, Homo sapiens
ccagctaatttgttt

SEQ ID NO: 36680 - DNA, 15 bp, Homo sapiens
cccagctaatttgtt

SEQ ID NO: 36681 - DNA, 15 bp, Homo sapiens
gcccagctaatttgt

SEQ ID NO: 36682 - DNA, 15 bp, Homo sapiens
ggcccagctaatttg

SEQ ID NO: 36683 - DNA, 15 bp, Homo sapiens
aggcccagctaattt

SEQ ID NO: 36684 - DNA, 15 bp, Homo sapiens
caggcccagctaatt

SEQ ID NO: 36685 - DNA, 15 bp, Homo sapiens
ccaggcccagctaat

SEQ ID NO: 36686 - DNA, 15 bp, Homo sapiens
accaggcccagctaa

SEQ ID NO: 36687 - DNA, 15 bp, Homo sapiens
caccaggcccagcta

SEQ ID NO: 36688 - DNA, 15 bp, Homo sapiens
ccaccaggcccagct

SEQ ID NO: 36689 - DNA, 15 bp, Homo sapiens
accaccaggcccagc

SEQ ID NO: 36690 - DNA, 15 bp, Homo sapiens
caccaccaggcccag

SEQ ID NO: 36691 - DNA, 15 bp, Homo sapiens
gcaccaccaggccca

SEQ ID NO: 36692 - DNA, 15 bp, Homo sapiens
tgcaccaccaggccc

SEQ ID NO: 36693 - DNA, 15 bp, Homo sapiens
gtgcaccaccaggcc

SEQ ID NO: 36694 - DNA, 15 bp, Homo sapiens
cgtgcaccaccaggc

SEQ ID NO: 36695 - DNA, 15 bp, Homo sapiens
gcgtgcaccaccagg

SEQ ID NO: 36696 - DNA, 15 bp, Homo sapiens
ggcgtgcaccaccag

SEQ ID NO: 36697 - DNA, 15 bp, Homo sapiens
aggcgtgcaccacca

SEQ ID NO: 36698 - DNA, 15 bp, Homo sapiens
taggcgtgcaccacc

SEQ ID NO: 36699 - DNA, 15 bp, Homo sapiens
ataggcgtgcaccac

SEQ ID NO: 36700 - DNA, 15 bp, Homo sapiens
tataggcgtgcacca

SEQ ID NO: 36701 - DNA, 15 bp, Homo sapiens
ctataggcgtgcacc

SEQ ID NO: 36702 - DNA, 15 bp, Homo sapiens
actataggcgtgcac

SEQ ID NO: 36703 - DNA, 15 bp, Homo sapiens
gactataggcgtgca

SEQ ID NO: 36704 - DNA, 15 bp, Homo sapiens
ggactataggcgtgc

SEQ ID NO: 36705 - DNA, 15 bp, Homo sapiens
gggactataggcgtg

SEQ ID NO: 36706 - DNA, 15 bp, Homo sapiens
tgggactataggcgt

SEQ ID NO: 36707 - DNA, 15 bp, Homo sapiens
ctgggactataggcg

SEQ ID NO: 36708 - DNA, 15 bp, Homo sapiens
gctgggactataggc

SEQ ID NO: 36709 - DNA, 15 bp, Homo sapiens
agctgggactatagg

SEQ ID NO: 36710 - DNA, 15 bp, Homo sapiens
tagctgggactatag

SEQ ID NO: 36711 - DNA, 15 bp, Homo sapiens
gtagctgggactata

SEQ ID NO: 36712 - DNA, 15 bp, Homo sapiens
agtagctgggactat

SEQ ID NO: 36713 - DNA, 15 bp, Homo sapiens
acctgagtagctggg

SEQ ID NO: 36714 - DNA, 15 bp, Homo sapiens
cacctgagtagctgg

SEQ ID NO: 36715 - DNA, 15 bp, Homo sapiens
ccacctgagtagctg

SEQ ID NO: 36716 - DNA, 15 bp, Homo sapiens
gccacctgagtagct

SEQ ID NO: 36717 - DNA, 15 bp, Homo sapiens
agccacctgagtagc

SEQ ID NO: 36718 - DNA, 15 bp, Homo sapiens
cagccacctgagtag

SEQ ID NO: 36719 - DNA, 15 bp, Homo sapiens
tcagccacctgagta

SEQ ID NO: 36720 - DNA, 15 bp, Homo sapiens
ctcagccacctgagt

SEQ ID NO: 36721 - DNA, 15 bp, Homo sapiens
cctcagccacctgag

SEQ ID NO: 36722 - DNA, 15 bp, Homo sapiens
acctcagccacctga

SEQ ID NO: 36723 - DNA, 15 bp, Homo sapiens
cacctcagccacctg

SEQ ID NO: 36724 - DNA, 15 bp, Homo sapiens
ccacctcagccacct

SEQ ID NO: 36725 - DNA, 15 bp, Homo sapiens
cccacctcagccacc

SEQ ID NO: 36726 - DNA, 15 bp, Homo sapiens
tcccacctcagccac

SEQ ID NO: 36727 - DNA, 15 bp, Homo sapiens
ctcccacctcagcca

SEQ ID NO: 36728 - DNA, 15 bp, Homo sapiens
cctcccacctcagcc

SEQ ID NO: 36729 - DNA, 15 bp, Homo sapiens
tcctcccacctcagc

SEQ ID NO: 36730 - DNA, 15 bp, Homo sapiens
ttcctcccacctcag

SEQ ID NO: 36731 - DNA, 15 bp, Homo sapiens
attcctcccacctca

SEQ ID NO: 36732 - DNA, 15 bp, Homo sapiens
cattcctcccacctc

SEQ ID NO: 36733 - DNA, 15 bp, Homo sapiens
gcattcctcccacct

SEQ ID NO: 36734 - DNA, 15 bp, Homo sapiens
agcattcctcccacc

SEQ ID NO: 36735 - DNA, 15 bp, Homo sapiens
aagcattcctcccac

SEQ ID NO: 36736 - DNA, 15 bp, Homo sapiens
caagcattcctccca

SEQ ID NO: 36737 - DNA, 15 bp, Homo sapiens
tcaagcattcctccc

SEQ ID NO: 36738 - DNA, 15 bp, Homo sapiens
ctcaagcattcctcc

SEQ ID NO: 36739 - DNA, 15 bp, Homo sapiens
gctcaagcattcctc

SEQ ID NO: 36740 - DNA, 15 bp, Homo sapiens
ggctcaagcattcct

SEQ ID NO: 36741 - DNA, 15 bp, Homo sapiens
gggctcaagcattcc

SEQ ID NO: 36742 - DNA, 15 bp, Homo sapiens
tgggctcaagcattc

SEQ ID NO: 36743 - DNA, 15 bp, Homo sapiens
ctgggctcaagcatt

SEQ ID NO: 36744 - DNA, 15 bp, Homo sapiens
cctgggctcaagcat

SEQ ID NO: 36745 - DNA, 15 bp, Homo sapiens
tcctgggctcaagca

SEQ ID NO: 36746 - DNA, 15 bp, Homo sapiens
cctcctgggctcaag

SEQ ID NO: 36747 - DNA, 15 bp, Homo sapiens
acctcctgggctcaa

SEQ ID NO: 36748 - DNA, 15 bp, Homo sapiens
aacctcctgggctca

SEQ ID NO: 36749 - DNA, 15 bp, Homo sapiens
caacctcctgggctc

SEQ ID NO: 36750 - DNA, 15 bp, Homo sapiens
tcaacctcctgggct

SEQ ID NO: 36751 - DNA, 15 bp, Homo sapiens
ctcaacctcctgggc

SEQ ID NO: 36752 - DNA, 15 bp, Homo sapiens
cctcaacctcctggg

SEQ ID NO: 36753 - DNA, 15 bp, Homo sapiens
gcctcaacctcctgg

SEQ ID NO: 36754 - DNA, 15 bp, Homo sapiens
agcctcaacctcctg

SEQ ID NO: 36755 - DNA, 15 bp, Homo sapiens
cagcctcaacctcct

SEQ ID NO: 36756 - DNA, 15 bp, Homo sapiens
gcagcctcaacctcc

SEQ ID NO: 36757 - DNA, 15 bp, Homo sapiens
tgcagcctcaacctc

SEQ ID NO: 36758 - DNA, 15 bp, Homo sapiens
ctgcagcctcaacct

SEQ ID NO: 36759 - DNA, 15 bp, Homo sapiens
actgcagcctcaacc

SEQ ID NO: 36760 - DNA, 15 bp, Homo sapiens
cactgcagcctcaac

SEQ ID NO: 36761 - DNA, 15 bp, Homo sapiens
tcactgcagcctcaa

SEQ ID NO: 36762 - DNA, 15 bp, Homo sapiens
ctcactgcagcctca

SEQ ID NO: 36763 - DNA, 15 bp, Homo sapiens
gctcactgcagcctc

SEQ ID NO: 36764 - DNA, 15 bp, Homo sapiens
agctcactgcagcct

SEQ ID NO: 36765 - DNA, 15 bp, Homo sapiens
cagctcactgcagcc

SEQ ID NO: 36766 - DNA, 15 bp, Homo sapiens
acagctcactgcagc

SEQ ID NO: 36767 - DNA, 15 bp, Homo sapiens
cacagctcactgcag

SEQ ID NO: 36768 - DNA, 15 bp, Homo sapiens
tcacagctcactgca

SEQ ID NO: 36769 - DNA, 15 bp, Homo sapiens
atcacagctcactgc

SEQ ID NO: 36770 - DNA, 15 bp, Homo sapiens
gatcacagctcactg

SEQ ID NO: 36771 - DNA, 15 bp, Homo sapiens
tgatcacagctcact

SEQ ID NO: 36772 - DNA, 15 bp, Homo sapiens
ttgatcacagctcac

SEQ ID NO: 36773 - DNA, 15 bp, Homo sapiens
cttgatcacagctca

SEQ ID NO: 36774 - DNA, 15 bp, Homo sapiens
gcttgatcacagctc

SEQ ID NO: 36775 - DNA, 15 bp, Homo sapiens
ggcttgatcacagct

SEQ ID NO: 36776 - DNA, 15 bp, Homo sapiens
tggcttgatcacagc

SEQ ID NO: 36777 - DNA, 15 bp, Homo sapiens
gtggcttgatcacag

SEQ ID NO: 36778 - DNA, 15 bp, Homo sapiens
agtggcttgatcaca

SEQ ID NO: 36779 - DNA, 15 bp, Homo sapiens
cagtggcttgatcac

SEQ ID NO: 36780 - DNA, 15 bp, Homo sapiens
gcagtggcttgatca

SEQ ID NO: 36781 - DNA, 15 bp, Homo sapiens
agcagtggcttgatc

SEQ ID NO: 36782 - DNA, 15 bp, Homo sapiens
gagcagtggcttgat

SEQ ID NO: 36783 - DNA, 15 bp, Homo sapiens
agagcagtggcttga

SEQ ID NO: 36784 - DNA, 15 bp, Homo sapiens
gagagcagtggcttg

SEQ ID NO: 36785 - DNA, 15 bp, Homo sapiens
ggagagcagtggctt

SEQ ID NO: 36786 - DNA, 15 bp, Homo sapiens
tggagagcagtggct

SEQ ID NO: 36787 - DNA, 15 bp, Homo sapiens
ctggagagcagtggc

SEQ ID NO: 36788 - DNA, 15 bp, Homo sapiens
gctggagagcagtgg

SEQ ID NO: 36789 - DNA, 15 bp, Homo sapiens
ggctggagagcagtg

SEQ ID NO: 36790 - DNA, 15 bp, Homo sapiens
aggctggagagcagt

SEQ ID NO: 36791 - DNA, 15 bp, Homo sapiens
caggctggagagcag

SEQ ID NO: 36792 - DNA, 15 bp, Homo sapiens
ccaggctggagagca

SEQ ID NO: 36793 - DNA, 15 bp, Homo sapiens
cccaggctggagagc

SEQ ID NO: 36794 - DNA, 15 bp, Homo sapiens
tcccaggctggagag

SEQ ID NO: 36795 - DNA, 15 bp, Homo sapiens
ttcccaggctggaga

SEQ ID NO: 36796 - DNA, 15 bp, Homo sapiens
tttcccaggctggag

SEQ ID NO: 36797 - DNA, 15 bp, Homo sapiens
gtttcccaggctgga

SEQ ID NO: 36798 - DNA, 15 bp, Homo sapiens
tgtttcccaggctgg

SEQ ID NO: 36799 - DNA, 15 bp, Homo sapiens
ctgtttcccaggctg

SEQ ID NO: 36800 - DNA, 15 bp, Homo sapiens
tctgtttcccaggct

SEQ ID NO: 36801 - DNA, 15 bp, Homo sapiens
ctctgtttcccaggc

SEQ ID NO: 36802 - DNA, 15 bp, Homo sapiens
gctctgtttcccagg

SEQ ID NO: 36803 - DNA, 15 bp, Homo sapiens
tgctctgtttcccag

SEQ ID NO: 36804 - DNA, 15 bp, Homo sapiens
ttgctctgtttccca

SEQ ID NO: 36805 - DNA, 15 bp, Homo sapiens
cttgctctgtttccc

SEQ ID NO: 36806 - DNA, 15 bp, Homo sapiens
tcttgctctgtttcc

SEQ ID NO: 36807 - DNA, 15 bp, Homo sapiens
gtcttgctctgtttc

SEQ ID NO: 36808 - DNA, 15 bp, Homo sapiens
agtcttgctctgttt

SEQ ID NO: 36809 - DNA, 15 bp, Homo sapiens
gagacagagtcttgc

SEQ ID NO: 36810 - DNA, 15 bp, Homo sapiens
agagacagagtcttg

SEQ ID NO: 36811 - DNA, 15 bp, Homo sapiens
aagagacagagtctt

SEQ ID NO: 36812 - DNA, 15 bp, Homo sapiens
taagagacagagtct

SEQ ID NO: 36813 - DNA, 15 bp, Homo sapiens
ttaagagacagagtc

SEQ ID NO: 36814 - DNA, 15 bp, Homo sapiens
tttaagagacagagt

SEQ ID NO: 36815 - DNA, 15 bp, Homo sapiens
ttttaagagacagag

SEQ ID NO: 36816 - DNA, 15 bp, Homo sapiens
attttaagagacaga

SEQ ID NO: 36817 - DNA, 15 bp, Homo sapiens
tattttaagagacag

SEQ ID NO: 36818 - DNA, 15 bp, Homo sapiens
ttattttaagagaca

SEQ ID NO: 36819 - DNA, 15 bp, Homo sapiens
attattttaagagac

SEQ ID NO: 36820 - DNA, 15 bp, Homo sapiens
tattattttaagaga

SEQ ID NO: 36821 - DNA, 15 bp, Homo sapiens
ttattattttaagag

SEQ ID NO: 36822 - DNA, 15 bp, Homo sapiens
attattattttaaga

SEQ ID NO: 36823 - DNA, 15 bp, Homo sapiens
tattattattttaag

SEQ ID NO: 36824 - DNA, 15 bp, Homo sapiens
ttattattattttaa

SEQ ID NO: 36825 - DNA, 15 bp, Homo sapiens
attattattatttta

SEQ ID NO: 36826 - DNA, 15 bp, Homo sapiens
tattattattatttt

SEQ ID NO: 36827 - DNA, 15 bp, Homo sapiens
atattattattattt

SEQ ID NO: 36828 - DNA, 15 bp, Homo sapiens
tatattattattatt

SEQ ID NO: 36829 - DNA, 15 bp, Homo sapiens
ttatattattattat

SEQ ID NO: 36830 - DNA, 15 bp, Homo sapiens
attatattattatta

SEQ ID NO: 36831 - DNA, 15 bp, Homo sapiens
aattatattattatt

SEQ ID NO: 36832 - DNA, 15 bp, Homo sapiens
aaattatattattat

SEQ ID NO: 36833 - DNA, 15 bp, Homo sapiens
aaaattatattatta

SEQ ID NO: 36834 - DNA, 15 bp, Homo sapiens
taaaattatattatt

SEQ ID NO: 36835 - DNA, 15 bp, Homo sapiens
ttaaaattatattat

SEQ ID NO: 36836 - DNA, 15 bp, Homo sapiens
tttaaaattatatta

SEQ ID NO: 36837 - DNA, 15 bp, Homo sapiens
ctttaaaattatatt

SEQ ID NO: 36838 - DNA, 15 bp, Homo sapiens
tctttaaaattatat

SEQ ID NO: 36839 - DNA, 15 bp, Homo sapiens
ttctttaaaattata

SEQ ID NO: 36840 - DNA, 15 bp, Homo sapiens
tttctttaaaattat

SEQ ID NO: 36841 - DNA, 15 bp, Homo sapiens
atttctttaaaatta

SEQ ID NO: 36842 - DNA, 15 bp, Homo sapiens
tatttctttaaaatt

SEQ ID NO: 36843 - DNA, 15 bp, Homo sapiens
ttatttctttaaaat

SEQ ID NO: 36844 - DNA, 15 bp, Homo sapiens
tttatttctttaaaa

SEQ ID NO: 36845 - DNA, 15 bp, Homo sapiens
ttttatttctttaaa

SEQ ID NO: 36846 - DNA, 15 bp, Homo sapiens
cttttatttctttaa

SEQ ID NO: 36847 - DNA, 15 bp, Homo sapiens
acttttatttcttta

SEQ ID NO: 36848 - DNA, 15 bp, Homo sapiens
tacttttatttcttt

SEQ ID NO: 36849 - DNA, 15 bp, Homo sapiens
ttacttttatttctt

SEQ ID NO: 36850 - DNA, 15 bp, Homo sapiens
gttacttttatttct

SEQ ID NO: 36851 - DNA, 15 bp, Homo sapiens
agttacttttatttc

SEQ ID NO: 36852 - DNA, 15 bp, Homo sapiens
gagttacttttattt

SEQ ID NO: 36853 - DNA, 15 bp, Homo sapiens
agagttacttttatt

SEQ ID NO: 36854 - DNA, 15 bp, Homo sapiens
cagagttacttttat

SEQ ID NO: 36855 - DNA, 15 bp, Homo sapiens
acagagttactttta

SEQ ID NO: 36856 - DNA, 15 bp, Homo sapiens
tacagagttactttt

SEQ ID NO: 36857 - DNA, 15 bp, Homo sapiens
gtacagagttacttt

SEQ ID NO: 36858 - DNA, 15 bp, Homo sapiens
tgtacagagttactt

SEQ ID NO: 36859 - DNA, 15 bp, Homo sapiens
ctgtacagagttact

SEQ ID NO: 36860 - DNA, 15 bp, Homo sapiens
tctgtacagagttac

SEQ ID NO: 36861 - DNA, 15 bp, Homo sapiens
atctgtacagagtta

SEQ ID NO: 36862 - DNA, 15 bp, Homo sapiens
aatctgtacagagtt

SEQ ID NO: 36863 - DNA, 15 bp, Homo sapiens
caatctgtacagagt

SEQ ID NO: 36864 - DNA, 15 bp, Homo sapiens
gcaatctgtacagag

SEQ ID NO: 36865 - DNA, 15 bp, Homo sapiens
agcaatctgtacaga

SEQ ID NO: 36866 - DNA, 15 bp, Homo sapiens
aagcaatctgtacag

SEQ ID NO: 36867 - DNA, 15 bp, Homo sapiens
taagcaatctgtaca

SEQ ID NO: 36868 - DNA, 15 bp, Homo sapiens
ataagcaatctgtac

SEQ ID NO: 36869 - DNA, 15 bp, Homo sapiens
aataagcaatctgta

SEQ ID NO: 36870 - DNA, 15 bp, Homo sapiens
caataagcaatctgt

SEQ ID NO: 36871 - DNA, 15 bp, Homo sapiens
ccaataagcaatctg

SEQ ID NO: 36872 - DNA, 15 bp, Homo sapiens
accaataagcaatct

SEQ ID NO: 36873 - DNA, 15 bp, Homo sapiens
aaccaataagcaatc

SEQ ID NO: 36874 - DNA, 15 bp, Homo sapiens
taaccaataagcaat

SEQ ID NO: 36875 - DNA, 15 bp, Homo sapiens
gtaaccaataagcaa

SEQ ID NO: 36876 - DNA, 15 bp, Homo sapiens
tgtaaccaataagca

SEQ ID NO: 36877 - DNA, 15 bp, Homo sapiens
atgtaaccaataagc

SEQ ID NO: 36878 - DNA, 15 bp, Homo sapiens
catgtaaccaataag

SEQ ID NO: 36879 - DNA, 15 bp, Homo sapiens
ccatgtaaccaataa

SEQ ID NO: 36880 - DNA, 15 bp, Homo sapiens
cccatgtaaccaata

SEQ ID NO: 36881 - DNA, 15 bp, Homo sapiens
tcccatgtaaccaat

SEQ ID NO: 36882 - DNA, 15 bp, Homo sapiens
ctcccatgtaaccaa

SEQ ID NO: 36883 - DNA, 15 bp, Homo sapiens
tctcccatgtaacca

SEQ ID NO: 36884 - DNA, 15 bp, Homo sapiens
ttctcccatgtaacc

SEQ ID NO: 36885 - DNA, 15 bp, Homo sapiens
tttctcccatgtaac

SEQ ID NO: 36886 - DNA, 15 bp, Homo sapiens
gtttctcccatgtaa

SEQ ID NO: 36887 - DNA, 15 bp, Homo sapiens
tgtttctcccatgta

SEQ ID NO: 36888 - DNA, 15 bp, Homo sapiens
atgtttctcccatgt

SEQ ID NO: 36889 - DNA, 15 bp, Homo sapiens
tatgtttctcccatg

SEQ ID NO: 36890 - DNA, 15 bp, Homo sapiens
ttatgtttctcccat

SEQ ID NO: 36891 - DNA, 15 bp, Homo sapiens
attatgtttctccca

SEQ ID NO: 36892 - DNA, 15 bp, Homo sapiens
tattatgtttctccc

SEQ ID NO: 36893 - DNA, 15 bp, Homo sapiens
ttattatgtttctcc

SEQ ID NO: 36894 - DNA, 15 bp, Homo sapiens
attattatgtttctc

SEQ ID NO: 36895 - DNA, 15 bp, Homo sapiens
aattattatgtttct

SEQ ID NO: 36896 - DNA, 15 bp, Homo sapiens
aaattattatgtttc

SEQ ID NO: 36897 - DNA, 15 bp, Homo sapiens
aaaattattatgttt

SEQ ID NO: 36898 - DNA, 15 bp, Homo sapiens
taaaattattatgtt

SEQ ID NO: 36899 - DNA, 15 bp, Homo sapiens
gtaaaattattatgt

SEQ ID NO: 36900 - DNA, 15 bp, Homo sapiens
tgtaaaattattatg

SEQ ID NO: 36901 - DNA, 15 bp, Homo sapiens
ttgtaaaattattat

SEQ ID NO: 36902 - DNA, 15 bp, Homo sapiens
attgtaaaattatta

SEQ ID NO: 36903 - DNA, 15 bp, Homo sapiens
cattgtaaaattatt

SEQ ID NO: 36904 - DNA, 15 bp, Homo sapiens
ccattgtaaaattat

SEQ ID NO: 36905 - DNA, 15 bp, Homo sapiens
tccattgtaaaatta

SEQ ID NO: 36906 - DNA, 15 bp, Homo sapiens
ctccattgtaaaatt

SEQ ID NO: 36907 - DNA, 15 bp, Homo sapiens
tctccattgtaaaat

SEQ ID NO: 36908 - DNA, 15 bp, Homo sapiens
ttctccattgtaaaa

SEQ ID NO: 36909 - DNA, 15 bp, Homo sapiens
tttctccattgtaaa

SEQ ID NO: 36910 - DNA, 15 bp, Homo sapiens
atttctccattgtaa

SEQ ID NO: 36911 - DNA, 15 bp, Homo sapiens
aatttctccattgta

SEQ ID NO: 36912 - DNA, 15 bp, Homo sapiens
taatttctccattgt

SEQ ID NO: 36913 - DNA, 15 bp, Homo sapiens
ctaatttctccattg

SEQ ID NO: 36914 - DNA, 15 bp, Homo sapiens
tctaatttctccatt

SEQ ID NO: 36915 - DNA, 15 bp, Homo sapiens
gtctaatttctccat

SEQ ID NO: 36916 - DNA, 15 bp, Homo sapiens
tgtctaatttctcca

SEQ ID NO: 36917 - DNA, 15 bp, Homo sapiens
ctgtctaatttctcc

SEQ ID NO: 36918 - DNA, 15 bp, Homo sapiens
gctgtctaatttctc

SEQ ID NO: 36919 - DNA, 15 bp, Homo sapiens
tgctgtctaatttct

SEQ ID NO: 36920 - DNA, 15 bp, Homo sapiens
gtgctgtctaatttc

SEQ ID NO: 36921 - DNA, 15 bp, Homo sapiens
ggtgctgtctaattt

SEQ ID NO: 36922 - DNA, 15 bp, Homo sapiens
aggtgctgtctaatt

SEQ ID NO: 36923 - DNA, 15 bp, Homo sapiens
aaggtgctgtctaat

SEQ ID NO: 36924 - DNA, 15 bp, Homo sapiens
taaggtgctgtctaa

SEQ ID NO: 36925 - DNA, 15 bp, Homo sapiens
ttaaggtgctgtcta

SEQ ID NO: 36926 - DNA, 15 bp, Homo sapiens
gttaaggtgctgtct

SEQ ID NO: 36927 - DNA, 15 bp, Homo sapiens
agttaaggtgctgtc

SEQ ID NO: 36928 - DNA, 15 bp, Homo sapiens
cagttaaggtgctgt

SEQ ID NO: 36929 - DNA, 15 bp, Homo sapiens
ccagttaaggtgctg

SEQ ID NO: 36930 - DNA, 15 bp, Homo sapiens
cccagttaaggtgct

SEQ ID NO: 36931 - DNA, 15 bp, Homo sapiens
acccagttaaggtgc

SEQ ID NO: 36932 - DNA, 15 bp, Homo sapiens
cacccagttaaggtg

SEQ ID NO: 36933 - DNA, 15 bp, Homo sapiens
tcacccagttaaggt

SEQ ID NO: 36934 - DNA, 15 bp, Homo sapiens
atcacccagttaagg

SEQ ID NO: 36935 - DNA, 15 bp, Homo sapiens
gatcacccagttaag

SEQ ID NO: 36936 - DNA, 15 bp, Homo sapiens
tgatcacccagttaa

SEQ ID NO: 36937 - DNA, 15 bp, Homo sapiens
ttgatcacccagtta

SEQ ID NO: 36938 - DNA, 15 bp, Homo sapiens
tttgatcacccagtt

SEQ ID NO: 36939 - DNA, 15 bp, Homo sapiens
ttttgatcacccagt

SEQ ID NO: 36940 - DNA, 15 bp, Homo sapiens
attttgatcacccag

SEQ ID NO: 36941 - DNA, 15 bp, Homo sapiens
aattttgatcaccca

SEQ ID NO: 36942 - DNA, 15 bp, Homo sapiens
taattttgatcaccc

SEQ ID NO: 36943 - DNA, 15 bp, Homo sapiens
ttaattttgatcacc

SEQ ID NO: 36944 - DNA, 15 bp, Homo sapiens
gttaattttgatcac

SEQ ID NO: 36945 - DNA, 15 bp, Homo sapiens
ggttaattttgatca

SEQ ID NO: 36946 - DNA, 15 bp, Homo sapiens
tggttaattttgatc

SEQ ID NO: 36947 - DNA, 15 bp, Homo sapiens
atggttaattttgat

SEQ ID NO: 36948 - DNA, 15 bp, Homo sapiens
tatggttaattttga

SEQ ID NO: 36949 - DNA, 15 bp, Homo sapiens
ttatggttaattttg

SEQ ID NO: 36950 - DNA, 15 bp, Homo sapiens
cttatggttaatttt

SEQ ID NO: 36951 - DNA, 15 bp, Homo sapiens
ccttatggttaattt

SEQ ID NO: 36952 - DNA, 15 bp, Homo sapiens
cccttatggttaatt

SEQ ID NO: 36953 - DNA, 15 bp, Homo sapiens
ccccttatggttaat

SEQ ID NO: 36954 - DNA, 15 bp, Homo sapiens
gccccttatggttaa

SEQ ID NO: 36955 - DNA, 15 bp, Homo sapiens
tgccccttatggtta

SEQ ID NO: 36956 - DNA, 15 bp, Homo sapiens
ctgccccttatggtt

SEQ ID NO: 36957 - DNA, 15 bp, Homo sapiens
tctgccccttatggt

SEQ ID NO: 36958 - DNA, 15 bp, Homo sapiens
atctgccccttatgg

SEQ ID NO: 36959 - DNA, 15 bp, Homo sapiens
catctgccccttatg

SEQ ID NO: 36960 - DNA, 15 bp, Homo sapiens
ccatctgccccttat

SEQ ID NO: 36961 - DNA, 15 bp, Homo sapiens
tccatctgcccctta

SEQ ID NO: 36962 - DNA, 15 bp, Homo sapiens
gtccatctgcccctt

SEQ ID NO: 36963 - DNA, 15 bp, Homo sapiens
tgtccatctgcccct

SEQ ID NO: 36964 - DNA, 15 bp, Homo sapiens
atgtccatctgcccc

SEQ ID NO: 36965 - DNA, 15 bp, Homo sapiens
gatgtccatctgccc

SEQ ID NO: 36966 - DNA, 15 bp, Homo sapiens
agatgtccatctgcc

SEQ ID NO: 36967 - DNA, 15 bp, Homo sapiens
gagatgtccatctgc

SEQ ID NO: 36968 - DNA, 15 bp, Homo sapiens
tgagatgtccatctg

SEQ ID NO: 36969 - DNA, 15 bp, Homo sapiens
atgagatgtccatct

SEQ ID NO: 36970 - DNA, 15 bp, Homo sapiens
catgagatgtccatc

SEQ ID NO: 36971 - DNA, 15 bp, Homo sapiens
gcatgagatgtccat

SEQ ID NO: 36972 - DNA, 15 bp, Homo sapiens
ggcatgagatgtcca

SEQ ID NO: 36973 - DNA, 15 bp, Homo sapiens
gggcatgagatgtcc

SEQ ID NO: 36974 - DNA, 15 bp, Homo sapiens
ggggcatgagatgtc

SEQ ID NO: 36975 - DNA, 15 bp, Homo sapiens
cggggcatgagatgt

SEQ ID NO: 36976 - DNA, 15 bp, Homo sapiens
tcggggcatgagatg

SEQ ID NO: 36977 - DNA, 15 bp, Homo sapiens
ctcggggcatgagat

SEQ ID NO: 36978 - DNA, 15 bp, Homo sapiens
tctcggggcatgaga

SEQ ID NO: 36979 - DNA, 15 bp, Homo sapiens
atctcggggcatgag

SEQ ID NO: 36980 - DNA, 15 bp, Homo sapiens
catctcggggcatga

SEQ ID NO: 36981 - DNA, 15 bp, Homo sapiens
acatctcggggcatg

SEQ ID NO: 36982 - DNA, 15 bp, Homo sapiens
cacatctcggggcat

SEQ ID NO: 36983 - DNA, 15 bp, Homo sapiens
tcacatctcggggca

SEQ ID NO: 36984 - DNA, 15 bp, Homo sapiens
atcacatctcggggc

SEQ ID NO: 36985 - DNA, 15 bp, Homo sapiens
tatcacatctcgggg

SEQ ID NO: 36986 - DNA, 15 bp, Homo sapiens
gtatcacatctcggg

SEQ ID NO: 36987 - DNA, 15 bp, Homo sapiens
ggtatcacatctcgg

SEQ ID NO: 36988 - DNA, 15 bp, Homo sapiens
gggtatcacatctcg

SEQ ID NO: 36989 - DNA, 15 bp, Homo sapiens
agggtatcacatctc

SEQ ID NO: 36990 - DNA, 15 bp, Homo sapiens
cagggtatcacatct

SEQ ID NO: 36991 - DNA, 15 bp, Homo sapiens
acagggtatcacatc

SEQ ID NO: 36992 - DNA, 15 bp, Homo sapiens
cacagggtatcacat

SEQ ID NO: 36993 - DNA, 15 bp, Homo sapiens
tcacagggtatcaca

SEQ ID NO: 36994 - DNA, 15 bp, Homo sapiens
ttcacagggtatcac

SEQ ID NO: 36995 - DNA, 15 bp, Homo sapiens
cttcacagggtatca

SEQ ID NO: 36996 - DNA, 15 bp, Homo sapiens
ccttcacagggtatc

SEQ ID NO: 36997 - DNA, 15 bp, Homo sapiens
tccttcacagggtat

SEQ ID NO: 36998 - DNA, 15 bp, Homo sapiens
gtccttcacagggta

SEQ ID NO: 36999 - DNA, 15 bp, Homo sapiens
tgtccttcacagggt

SEQ ID NO: 37000 - DNA, 15 bp, Homo sapiens
gtgtccttcacaggg

SEQ ID NO: 37001 - DNA, 15 bp, Homo sapiens
tgtgtccttcacagg

SEQ ID NO: 37002 - DNA, 15 bp, Homo sapiens
ttgtgtccttcacag

SEQ ID NO: 37003 - DNA, 15 bp, Homo sapiens
attgtgtccttcaca

SEQ ID NO: 37004 - DNA, 15 bp, Homo sapiens
aattgtgtccttcac

SEQ ID NO: 37005 - DNA, 15 bp, Homo sapiens
aaattgtgtccttca

SEQ ID NO: 37006 - DNA, 15 bp, Homo sapiens
gaaattgtgtccttc

SEQ ID NO: 37007 - DNA, 15 bp, Homo sapiens
tgaaattgtgtcctt

SEQ ID NO: 37008 - DNA, 15 bp, Homo sapiens
gtgaaattgtgtcct

SEQ ID NO: 37009 - DNA, 15 bp, Homo sapiens
agtgaaattgtgtcc

SEQ ID NO: 37010 - DNA, 15 bp, Homo sapiens
aagtgaaattgtgtc

SEQ ID NO: 37011 - DNA, 15 bp, Homo sapiens
taagtgaaattgtgt

SEQ ID NO: 37012 - DNA, 15 bp, Homo sapiens
ataagtgaaattgtg

SEQ ID NO: 37013 - DNA, 15 bp, Homo sapiens
cataagtgaaattgt

SEQ ID NO: 37014 - DNA, 15 bp, Homo sapiens
acataagtgaaattg

SEQ ID NO: 37015 - DNA, 15 bp, Homo sapiens
tacataagtgaaatt

SEQ ID NO: 37016 - DNA, 15 bp, Homo sapiens
ctacataagtgaaat

SEQ ID NO: 37017 - DNA, 15 bp, Homo sapiens
tctacataagtgaaa

SEQ ID NO: 37018 - DNA, 15 bp, Homo sapiens
ttctacataagtgaa

SEQ ID NO: 37019 - DNA, 15 bp, Homo sapiens
attctacataagtga

SEQ ID NO: 37020 - DNA, 15 bp, Homo sapiens
gattctacataagtg

SEQ ID NO: 37021 - DNA, 15 bp, Homo sapiens
ggattctacataagt

SEQ ID NO: 37022 - DNA, 15 bp, Homo sapiens
tggattctacataag

SEQ ID NO: 37023 - DNA, 15 bp, Homo sapiens
ctggattctacataa

SEQ ID NO: 37024 - DNA, 15 bp, Homo sapiens
tctggattctacata

SEQ ID NO: 37025 - DNA, 15 bp, Homo sapiens
atctggattctacat

SEQ ID NO: 37026 - DNA, 15 bp, Homo sapiens
aatctggattctaca

SEQ ID NO: 37027 - DNA, 15 bp, Homo sapiens
caatctggattctac

SEQ ID NO: 37028 - DNA, 15 bp, Homo sapiens
ccaatctggattcta

SEQ ID NO: 37029 - DNA, 15 bp, Homo sapiens
tccaatctggattct

SEQ ID NO: 37030 - DNA, 15 bp, Homo sapiens
ctccaatctggattc

SEQ ID NO: 37031 - DNA, 15 bp, Homo sapiens
tctccaatctggatt

SEQ ID NO: 37032 - DNA, 15 bp, Homo sapiens
atctccaatctggat

SEQ ID NO: 37033 - DNA, 15 bp, Homo sapiens
tatctccaatctgga

SEQ ID NO: 37034 - DNA, 15 bp, Homo sapiens
atatctccaatctgg

SEQ ID NO: 37035 - DNA, 15 bp, Homo sapiens
catatctccaatctg

SEQ ID NO: 37036 - DNA, 15 bp, Homo sapiens
acatatctccaatct

SEQ ID NO: 37037 - DNA, 15 bp, Homo sapiens
tacatatctccaatc

SEQ ID NO: 37038 - DNA, 15 bp, Homo sapiens
ttacatatctccaat

SEQ ID NO: 37039 - DNA, 15 bp, Homo sapiens
gttacatatctccaa

SEQ ID NO: 37040 - DNA, 15 bp, Homo sapiens
ggttacatatctcca

SEQ ID NO: 37041 - DNA, 15 bp, Homo sapiens
aggttacatatctcc

SEQ ID NO: 37042 - DNA, 15 bp, Homo sapiens
caggttacatatctc

SEQ ID NO: 37043 - DNA, 15 bp, Homo sapiens
tcaggttacatatct

SEQ ID NO: 37044 - DNA, 15 bp, Homo sapiens
ttcaggttacatatc

SEQ ID NO: 37045 - DNA, 15 bp, Homo sapiens
attcaggttacatat

SEQ ID NO: 37046 - DNA, 15 bp, Homo sapiens
gattcaggttacata

SEQ ID NO: 37047 - DNA, 15 bp, Homo sapiens
agattcaggttacat

SEQ ID NO: 37048 - DNA, 15 bp, Homo sapiens
aagattcaggttaca

SEQ ID NO: 37049 - DNA, 15 bp, Homo sapiens
taagattcaggttac

SEQ ID NO: 37050 - DNA, 15 bp, Homo sapiens
ataagattcaggtta

SEQ ID NO: 37051 - DNA, 15 bp, Homo sapiens
gataagattcaggtt

SEQ ID NO: 37052 - DNA, 15 bp, Homo sapiens
tgataagattcaggt

SEQ ID NO: 37053 - DNA, 15 bp, Homo sapiens
atgataagattcagg

SEQ ID NO: 37054 - DNA, 15 bp, Homo sapiens
catgataagattcag

SEQ ID NO: 37055 - DNA, 15 bp, Homo sapiens
tcatgataagattca

SEQ ID NO: 37056 - DNA, 15 bp, Homo sapiens
ctcatgataagattc

SEQ ID NO: 37057 - DNA, 15 bp, Homo sapiens
cctcatgataagatt

SEQ ID NO: 37058 - DNA, 15 bp, Homo sapiens
tcctcatgataagat

SEQ ID NO: 37059 - DNA, 15 bp, Homo sapiens
ttcctcatgataaga

SEQ ID NO: 37060 - DNA, 15 bp, Homo sapiens
tttcctcatgataag

SEQ ID NO: 37061 - DNA, 15 bp, Homo sapiens
gtttcctcatgataa

SEQ ID NO: 37062 - DNA, 15 bp, Homo sapiens
tgtttcctcatgata

SEQ ID NO: 37063 - DNA, 15 bp, Homo sapiens
atgtttcctcatgat

SEQ ID NO: 37064 - DNA, 15 bp, Homo sapiens
gatgtttcctcatga

SEQ ID NO: 37065 - DNA, 15 bp, Homo sapiens
agatgtttcctcatg

SEQ ID NO: 37066 - DNA, 15 bp, Homo sapiens
cagatgtttcctcat

SEQ ID NO: 37067 - DNA, 15 bp, Homo sapiens
tcagatgtttcctca

SEQ ID NO: 37068 - DNA, 15 bp, Homo sapiens
gtcagatgtttcctc

SEQ ID NO: 37069 - DNA, 15 bp, Homo sapiens
tgtcagatgtttcct

SEQ ID NO: 37070 - DNA, 15 bp, Homo sapiens
ttgtcagatgtttcc

SEQ ID NO: 37071 - DNA, 15 bp, Homo sapiens
cttgtcagatgtttc

SEQ ID NO: 37072 - DNA, 15 bp, Homo sapiens
gcttgtcagatgttt

SEQ ID NO: 37073 - DNA, 15 bp, Homo sapiens
agcttgtcagatgtt

SEQ ID NO: 37074 - DNA, 15 bp, Homo sapiens
gagcttgtcagatgt

SEQ ID NO: 37075 - DNA, 15 bp, Homo sapiens
ggagcttgtcagatg

SEQ ID NO: 37076 - DNA, 15 bp, Homo sapiens
tggagcttgtcagat

SEQ ID NO: 37077 - DNA, 15 bp, Homo sapiens
ttggagcttgtcaga

SEQ ID NO: 37078 - DNA, 15 bp, Homo sapiens
tttggagcttgtcag

SEQ ID NO: 37079 - DNA, 15 bp, Homo sapiens
ctttggagcttgtca

SEQ ID NO: 37080 - DNA, 15 bp, Homo sapiens
tctttggagcttgtc

SEQ ID NO: 37081 - DNA, 15 bp, Homo sapiens
ttctttggagcttgt

SEQ ID NO: 37082 - DNA, 15 bp, Homo sapiens
cttctttggagcttg

SEQ ID NO: 37083 - DNA, 15 bp, Homo sapiens
ccttctttggagctt

SEQ ID NO: 37084 - DNA, 15 bp, Homo sapiens
tccttctttggagct

SEQ ID NO: 37085 - DNA, 15 bp, Homo sapiens
ttccttctttggagc

SEQ ID NO: 37086 - DNA, 15 bp, Homo sapiens
attccttctttggag

SEQ ID NO: 37087 - DNA, 15 bp, Homo sapiens
tattccttctttgga

SEQ ID NO: 37088 - DNA, 15 bp, Homo sapiens
atattccttctttgg

SEQ ID NO: 37089 - DNA, 15 bp, Homo sapiens
aatattccttctttg

SEQ ID NO: 37090 - DNA, 15 bp, Homo sapiens
gaatattccttcttt

SEQ ID NO: 37091 - DNA, 15 bp, Homo sapiens
ggaatattccttctt

SEQ ID NO: 37092 - DNA, 15 bp, Homo sapiens
aggaatattccttct

SEQ ID NO: 37093 - DNA, 15 bp, Homo sapiens
aaggaatattccttc

SEQ ID NO: 37094 - DNA, 15 bp, Homo sapiens
taaggaatattcctt

SEQ ID NO: 37095 - DNA, 15 bp, Homo sapiens
ttaaggaatattcct

SEQ ID NO: 37096 - DNA, 15 bp, Homo sapiens
tttaaggaatattcc

SEQ ID NO: 37097 - DNA, 15 bp, Homo sapiens
ttttaaggaatattc

SEQ ID NO: 37098 - DNA, 15 bp, Homo sapiens
tttttaaggaatatt

SEQ ID NO: 37099 - DNA, 15 bp, Homo sapiens
ttttttaaggaatat

SEQ ID NO: 37100 - DNA, 15 bp, Homo sapiens
tttttttaaggaata

SEQ ID NO: 37101 - DNA, 15 bp, Homo sapiens
ttttttttaaggaat

SEQ ID NO: 37102 - DNA, 15 bp, Homo sapiens
tttttttttaaggaa

SEQ ID NO: 37103 - DNA, 15 bp, Homo sapiens
ttttttttttaagga

SEQ ID NO: 37104 - DNA, 15 bp, Homo sapiens
tttttttttttaagg

SEQ ID NO: 37105 - DNA, 15 bp, Homo sapiens
cttttttttttttta

SEQ ID NO: 37106 - DNA, 15 bp, Homo sapiens
ccttttttttttttt

SEQ ID NO: 37107 - DNA, 15 bp, Homo sapiens
tcctttttttttttt

SEQ ID NO: 37108 - DNA, 15 bp, Homo sapiens
ctccttttttttttt

SEQ ID NO: 37109 - DNA, 15 bp, Homo sapiens
tctcctttttttttt

SEQ ID NO: 37110 - DNA, 15 bp, Homo sapiens
gtctccttttttttt

SEQ ID NO: 37111 - DNA, 15 bp, Homo sapiens
agtctcctttttttt

SEQ ID NO: 37112 - DNA, 15 bp, Homo sapiens
cagtctccttttttt

SEQ ID NO: 37113 - DNA, 15 bp, Homo sapiens
acagtctcctttttt

SEQ ID NO: 37114 - DNA, 15 bp, Homo sapiens
tacagtctccttttt

SEQ ID NO: 37115 - DNA, 15 bp, Homo sapiens
atacagtctcctttt

SEQ ID NO: 37116 - DNA, 15 bp, Homo sapiens
aatacagtctccttt

SEQ ID NO: 37117 - DNA, 15 bp, Homo sapiens
gaatacagtctcctt

SEQ ID NO: 37118 - DNA, 15 bp, Homo sapiens
agaatacagtctcct

SEQ ID NO: 37119 - DNA, 15 bp, Homo sapiens
aagaatacagtctcc

SEQ ID NO: 37120 - DNA, 15 bp, Homo sapiens
gaagaatacagtctc

SEQ ID NO: 37121 - DNA, 15 bp, Homo sapiens
tgaagaatacagtct

SEQ ID NO: 37122 - DNA, 15 bp, Homo sapiens
ttgaagaatacagtc

SEQ ID NO: 37123 - DNA, 15 bp, Homo sapiens
tttgaagaatacagt

SEQ ID NO: 37124 - DNA, 15 bp, Homo sapiens
ttttgaagaatacag

SEQ ID NO: 37125 - DNA, 15 bp, Homo sapiens
tttttgaagaataca

SEQ ID NO: 37126 - DNA, 15 bp, Homo sapiens
gtttttgaagaatac

SEQ ID NO: 37127 - DNA, 15 bp, Homo sapiens
tgtttttgaagaata

SEQ ID NO: 37128 - DNA, 15 bp, Homo sapiens
atgtttttgaagaat

SEQ ID NO: 37129 - DNA, 15 bp, Homo sapiens
tatgtttttgaagaa

SEQ ID NO: 37130 - DNA, 15 bp, Homo sapiens
ttatgtttttgaaga

SEQ ID NO: 37131 - DNA, 15 bp, Homo sapiens
cttatgtttttgaag

SEQ ID NO: 37132 - DNA, 15 bp, Homo sapiens
tcttatgtttttgaa

SEQ ID NO: 37133 - DNA, 15 bp, Homo sapiens
ctcttatgtttttga

SEQ ID NO: 37134 - DNA, 15 bp, Homo sapiens
actcttatgtttttg

SEQ ID NO: 37135 - DNA, 15 bp, Homo sapiens
gactcttatgttttt

SEQ ID NO: 37136 - DNA, 15 bp, Homo sapiens
tgactcttatgtttt

SEQ ID NO: 37137 - DNA, 15 bp, Homo sapiens
atgactcttatgttt

SEQ ID NO: 37138 - DNA, 15 bp, Homo sapiens
tatgactcttatgtt

SEQ ID NO: 37139 - DNA, 15 bp, Homo sapiens
ttatgactcttatgt

SEQ ID NO: 37140 - DNA, 15 bp, Homo sapiens
tttatgactcttatg

SEQ ID NO: 37141 - DNA, 15 bp, Homo sapiens
ttttatgactcttat

SEQ ID NO: 37142 - DNA, 15 bp, Homo sapiens
cttttatgactctta

SEQ ID NO: 37143 - DNA, 15 bp, Homo sapiens
tcttttatgactctt

SEQ ID NO: 37144 - DNA, 15 bp, Homo sapiens
gtcttttatgactct

SEQ ID NO: 37145 - DNA, 15 bp, Homo sapiens
tgtcttttatgactc

SEQ ID NO: 37146 - DNA, 15 bp, Homo sapiens
ttgtcttttatgact

SEQ ID NO: 37147 - DNA, 15 bp, Homo sapiens
tttgtcttttatgac

SEQ ID NO: 37148 - DNA, 15 bp, Homo sapiens
ctttgtcttttatga

SEQ ID NO: 37149 - DNA, 15 bp, Homo sapiens
tctttgtcttttatg

SEQ ID NO: 37150 - DNA, 15 bp, Homo sapiens
ttctttgtcttttat

SEQ ID NO: 37151 - DNA, 15 bp, Homo sapiens
tttctttgtctttta

SEQ ID NO: 37152 - DNA, 15 bp, Homo sapiens
ctttctttgtctttt

SEQ ID NO: 37153 - DNA, 15 bp, Homo sapiens
tctttctttgtcttt

SEQ ID NO: 37154 - DNA, 15 bp, Homo sapiens
ctctttctttgtctt

SEQ ID NO: 37155 - DNA, 15 bp, Homo sapiens
gctctttctttgtct

SEQ ID NO: 37156 - DNA, 15 bp, Homo sapiens
agctctttctttgtc

SEQ ID NO: 37157 - DNA, 15 bp, Homo sapiens
tagctctttctttgt

SEQ ID NO: 37158 - DNA, 15 bp, Homo sapiens
atagctctttctttg

SEQ ID NO: 37159 - DNA, 15 bp, Homo sapiens
catagctctttcttt

SEQ ID NO: 37160 - DNA, 15 bp, Homo sapiens
ccatagctctttctt

SEQ ID NO: 37161 - DNA, 15 bp, Homo sapiens
tccatagctctttct

SEQ ID NO: 37162 - DNA, 15 bp, Homo sapiens
ttccatagctctttc

SEQ ID NO: 37163 - DNA, 15 bp, Homo sapiens
tttccatagctcttt

SEQ ID NO: 37164 - DNA, 15 bp, Homo sapiens
atttccatagctctt

SEQ ID NO: 37165 - DNA, 15 bp, Homo sapiens
tatttccatagctct

SEQ ID NO: 37166 - DNA, 15 bp, Homo sapiens
atatttccatagctc

SEQ ID NO: 37167 - DNA, 15 bp, Homo sapiens
gatatttccatagct

SEQ ID NO: 37168 - DNA, 15 bp, Homo sapiens
agatatttccatagc

SEQ ID NO: 37169 - DNA, 15 bp, Homo sapiens
gagatatttccatag

SEQ ID NO: 37170 - DNA, 15 bp, Homo sapiens
agagatatttccata

SEQ ID NO: 37171 - DNA, 15 bp, Homo sapiens
cagagatatttccat

SEQ ID NO: 37172 - DNA, 15 bp, Homo sapiens
tcagagatatttcca

SEQ ID NO: 37173 - DNA, 15 bp, Homo sapiens
atcagagatatttcc

SEQ ID NO: 37174 - DNA, 15 bp, Homo sapiens
gatcagagatatttc

SEQ ID NO: 37175 - DNA, 15 bp, Homo sapiens
cgatcagagatattt

SEQ ID NO: 37176 - DNA, 15 bp, Homo sapiens
gcgatcagagatatt

SEQ ID NO: 37177 - DNA, 15 bp, Homo sapiens
tgcgatcagagatat

SEQ ID NO: 37178 - DNA, 15 bp, Homo sapiens
ctgcgatcagagata

SEQ ID NO: 37179 - DNA, 15 bp, Homo sapiens
cctgcgatcagagat

SEQ ID NO: 37180 - DNA, 15 bp, Homo sapiens
tcctgcgatcagaga

SEQ ID NO: 37181 - DNA, 15 bp, Homo sapiens
ctcctgcgatcagag

SEQ ID NO: 37182 - DNA, 15 bp, Homo sapiens
cctcctgcgatcaga

SEQ ID NO: 37183 - DNA, 15 bp, Homo sapiens
gcctcctgcgatcag

SEQ ID NO: 37184 - DNA, 15 bp, Homo sapiens
agcctcctgcgatca

SEQ ID NO: 37185 - DNA, 15 bp, Homo sapiens
tagcctcctgcgatc

SEQ ID NO: 37186 - DNA, 15 bp, Homo sapiens
ttagcctcctgcgat

SEQ ID NO: 37187 - DNA, 15 bp, Homo sapiens
tttagcctcctgcga

SEQ ID NO: 37188 - DNA, 15 bp, Homo sapiens
gtttagcctcctgcg

SEQ ID NO: 37189 - DNA, 15 bp, Homo sapiens
tgtttagcctcctgc

SEQ ID NO: 37190 - DNA, 15 bp, Homo sapiens
ctgtttagcctcctg

SEQ ID NO: 37191 - DNA, 15 bp, Homo sapiens
cctgtttagcctcct

SEQ ID NO: 37192 - DNA, 15 bp, Homo sapiens
gcctgtttagcctcc

SEQ ID NO: 37193 - DNA, 15 bp, Homo sapiens
tgcctgtttagcctc

SEQ ID NO: 37194 - DNA, 15 bp, Homo sapiens
atgcctgtttagcct

SEQ ID NO: 37195 - DNA, 15 bp, Homo sapiens
tatgcctgtttagcc

SEQ ID NO: 37196 - DNA, 15 bp, Homo sapiens
ttatgcctgtttagc

SEQ ID NO: 37197 - DNA, 15 bp, Homo sapiens
attatgcctgtttag

SEQ ID NO: 37198 - DNA, 15 bp, Homo sapiens
cattatgcctgttta

SEQ ID NO: 37199 - DNA, 15 bp, Homo sapiens
tcattatgcctgttt

SEQ ID NO: 37200 - DNA, 15 bp, Homo sapiens
gtcattatgcctgtt

SEQ ID NO: 37201 - DNA, 15 bp, Homo sapiens
agtcattatgcctgt

SEQ ID NO: 37202 - DNA, 15 bp, Homo sapiens
cagtcattatgcctg

SEQ ID NO: 37203 - DNA, 15 bp, Homo sapiens
tcagtcattatgcct

SEQ ID NO: 37204 - DNA, 15 bp, Homo sapiens
ttcagtcattatgcc

SEQ ID NO: 37205 - DNA, 15 bp, Homo sapiens
attcagtcattatgc

SEQ ID NO: 37206 - DNA, 15 bp, Homo sapiens
tattcagtcattatg

SEQ ID NO: 37207 - DNA, 15 bp, Homo sapiens
ctattcagtcattat

SEQ ID NO: 37208 - DNA, 15 bp, Homo sapiens
gctattcagtcatta

SEQ ID NO: 37209 - DNA, 15 bp, Homo sapiens
tgctattcagtcatt

SEQ ID NO: 37210 - DNA, 15 bp, Homo sapiens
ctgctattcagtcat

SEQ ID NO: 37211 - DNA, 15 bp, Homo sapiens
tctgctattcagtca

SEQ ID NO: 37212 - DNA, 15 bp, Homo sapiens
gtctgctattcagtc

SEQ ID NO: 37213 - DNA, 15 bp, Homo sapiens
tgtctgctattcagt

SEQ ID NO: 37214 - DNA, 15 bp, Homo sapiens
ttgtctgctattcag

SEQ ID NO: 37215 - DNA, 15 bp, Homo sapiens
attgtctgctattca

SEQ ID NO: 37216 - DNA, 15 bp, Homo sapiens
tattgtctgctattc

SEQ ID NO: 37217 - DNA, 15 bp, Homo sapiens
ctattgtctgctatt

SEQ ID NO: 37218 - DNA, 15 bp, Homo sapiens
tctattgtctgctat

SEQ ID NO: 37219 - DNA, 15 bp, Homo sapiens
gtctattgtctgcta

SEQ ID NO: 37220 - DNA, 15 bp, Homo sapiens
agtctattgtctgct

SEQ ID NO: 37221 - DNA, 15 bp, Homo sapiens
tagtctattgtctgc

SEQ ID NO: 37222 - DNA, 15 bp, Homo sapiens
gtagtctattgtctg

SEQ ID NO: 37223 - DNA, 15 bp, Homo sapiens
tgtagtctattgtct

SEQ ID NO: 37224 - DNA, 15 bp, Homo sapiens
atgtagtctattgtc

SEQ ID NO: 37225 - DNA, 15 bp, Homo sapiens
gatgtagtctattgt

SEQ ID NO: 37226 - DNA, 15 bp, Homo sapiens
agatgtagtctattg

SEQ ID NO: 37227 - DNA, 15 bp, Homo sapiens
aagatgtagtctatt

SEQ ID NO: 37228 - DNA, 15 bp, Homo sapiens
caagatgtagtctat

SEQ ID NO: 37229 - DNA, 15 bp, Homo sapiens
acaagatgtagtcta

SEQ ID NO: 37230 - DNA, 15 bp, Homo sapiens
cacaagatgtagtct

SEQ ID NO: 37231 - DNA, 15 bp, Homo sapiens
gcacaagatgtagtc

SEQ ID NO: 37232 - DNA, 15 bp, Homo sapiens
tgcacaagatgtagt

SEQ ID NO: 37233 - DNA, 15 bp, Homo sapiens
ctgcacaagatgtag

SEQ ID NO: 37234 - DNA, 15 bp, Homo sapiens
tctgcacaagatgta

SEQ ID NO: 37235 - DNA, 15 bp, Homo sapiens
ttctgcacaagatgt

SEQ ID NO: 37236 - DNA, 15 bp, Homo sapiens
cttctgcacaagatg

SEQ ID NO: 37237 - DNA, 15 bp, Homo sapiens
tcttctgcacaagat

SEQ ID NO: 37238 - DNA, 15 bp, Homo sapiens
ctcttctgcacaaga

SEQ ID NO: 37239 - DNA, 15 bp, Homo sapiens
tctcttctgcacaag

SEQ ID NO: 37240 - DNA, 15 bp, Homo sapiens
ttctcttctgcacaa

SEQ ID NO: 37241 - DNA, 15 bp, Homo sapiens
tttctcttctgcaca

SEQ ID NO: 37242 - DNA, 15 bp, Homo sapiens
ttttctcttctgcac

SEQ ID NO: 37243 - DNA, 15 bp, Homo sapiens
tttttctcttctgca

SEQ ID NO: 37244 - DNA, 15 bp, Homo sapiens
ttttttctcttctgc

SEQ ID NO: 37245 - DNA, 15 bp, Homo sapiens
tttttttctcttctg

SEQ ID NO: 37246 - DNA, 15 bp, Homo sapiens
ttttttttctcttct

SEQ ID NO: 37247 - DNA, 15 bp, Homo sapiens
attttttttctcttc

SEQ ID NO: 37248 - DNA, 15 bp, Homo sapiens
cattttttttctctt

SEQ ID NO: 37249 - DNA, 15 bp, Homo sapiens
tcattttttttctct

SEQ ID NO: 37250 - DNA, 15 bp, Homo sapiens
atcattttttttctc

SEQ ID NO: 37251 - DNA, 15 bp, Homo sapiens
tatcattttttttct

SEQ ID NO: 37252 - DNA, 15 bp, Homo sapiens
ctatcattttttttc

SEQ ID NO: 37253 - DNA, 15 bp, Homo sapiens
tctatcatttttttt

SEQ ID NO: 37254 - DNA, 15 bp, Homo sapiens
ttctatcattttttt

SEQ ID NO: 37255 - DNA, 15 bp, Homo sapiens
cttctatcatttttt

SEQ ID NO: 37256 - DNA, 15 bp, Homo sapiens
ccttctatcattttt

SEQ ID NO: 37257 - DNA, 15 bp, Homo sapiens
tccttctatcatttt

SEQ ID NO: 37258 - DNA, 15 bp, Homo sapiens
atccttctatcattt

SEQ ID NO: 37259 - DNA, 15 bp, Homo sapiens
tatccttctatcatt

SEQ ID NO: 37260 - DNA, 15 bp, Homo sapiens
atatccttctatcat

SEQ ID NO: 37261 - DNA, 15 bp, Homo sapiens
aatatccttctatca

SEQ ID NO: 37262 - DNA, 15 bp, Homo sapiens
taatatccttctatc

SEQ ID NO: 37263 - DNA, 15 bp, Homo sapiens
ataatatccttctat

SEQ ID NO: 37264 - DNA, 15 bp, Homo sapiens
aataatatccttcta

SEQ ID NO: 37265 - DNA, 15 bp, Homo sapiens
caataatatccttct

SEQ ID NO: 37266 - DNA, 15 bp, Homo sapiens
ccaataatatccttc

SEQ ID NO: 37267 - DNA, 15 bp, Homo sapiens
tccaataatatcctt

SEQ ID NO: 37268 - DNA, 15 bp, Homo sapiens
gtccaataatatcct

SEQ ID NO: 37269 - DNA, 15 bp, Homo sapiens
ggtccaataatatcc

SEQ ID NO: 37270 - DNA, 15 bp, Homo sapiens
tggtccaataatatc

SEQ ID NO: 37271 - DNA, 15 bp, Homo sapiens
ttggtccaataatat

SEQ ID NO: 37272 - DNA, 15 bp, Homo sapiens
gttggtccaataata

SEQ ID NO: 37273 - DNA, 15 bp, Homo sapiens
agttggtccaataat

SEQ ID NO: 37274 - DNA, 15 bp, Homo sapiens
cagttggtccaataa

SEQ ID NO: 37275 - DNA, 15 bp, Homo sapiens
tcagttggtccaata

SEQ ID NO: 37276 - DNA, 15 bp, Homo sapiens
gtcagttggtccaat

SEQ ID NO: 37277 - DNA, 15 bp, Homo sapiens
tgtcagttggtccaa

SEQ ID NO: 37278 - DNA, 15 bp, Homo sapiens
ttgtcagttggtcca

SEQ ID NO: 37279 - DNA, 15 bp, Homo sapiens
tttgtcagttggtcc

SEQ ID NO: 37280 - DNA, 15 bp, Homo sapiens
ttttgtcagttggtc

SEQ ID NO: 37281 - DNA, 15 bp, Homo sapiens
gttttgtcagttggt

SEQ ID NO: 37282 - DNA, 15 bp, Homo sapiens
agttttgtcagttgg

SEQ ID NO: 37283 - DNA, 15 bp, Homo sapiens
cagttttgtcagttg

SEQ ID NO: 37284 - DNA, 15 bp, Homo sapiens
tcagttttgtcagtt

SEQ ID NO: 37285 - DNA, 15 bp, Homo sapiens
ttcagttttgtcagt

SEQ ID NO: 37286 - DNA, 15 bp, Homo sapiens
gttcagttttgtcag

SEQ ID NO: 37287 - DNA, 15 bp, Homo sapiens
agttcagttttgtca

SEQ ID NO: 37288 - DNA, 15 bp, Homo sapiens
tagttcagttttgtc

SEQ ID NO: 37289 - DNA, 15 bp, Homo sapiens
atagttcagttttgt

SEQ ID NO: 37290 - DNA, 15 bp, Homo sapiens
catagttcagttttg

SEQ ID NO: 37291 - DNA, 15 bp, Homo sapiens
tcatagttcagtttt

SEQ ID NO: 37292 - DNA, 15 bp, Homo sapiens
ttcatagttcagttt

SEQ ID NO: 37293 - DNA, 15 bp, Homo sapiens
gttcatagttcagtt

SEQ ID NO: 37294 - DNA, 15 bp, Homo sapiens
tgttcatagttcagt

SEQ ID NO: 37295 - DNA, 15 bp, Homo sapiens
ctgttcatagttcag

SEQ ID NO: 37296 - DNA, 15 bp, Homo sapiens
actgttcatagttca

SEQ ID NO: 37297 - DNA, 15 bp, Homo sapiens
tactgttcatagttc

SEQ ID NO: 37298 - DNA, 15 bp, Homo sapiens
ctactgttcatagtt

SEQ ID NO: 37299 - DNA, 15 bp, Homo sapiens
tctactgttcatagt

SEQ ID NO: 37300 - DNA, 15 bp, Homo sapiens
atctactgttcatag

SEQ ID NO: 37301 - DNA, 15 bp, Homo sapiens
aatctactgttcata

SEQ ID NO: 37302 - DNA, 15 bp, Homo sapiens
taatctactgttcat

SEQ ID NO: 37303 - DNA, 15 bp, Homo sapiens
ctaatctactgttca

SEQ ID NO: 37304 - DNA, 15 bp, Homo sapiens
cctaatctactgttc

SEQ ID NO: 37305 - DNA, 15 bp, Homo sapiens
acctaatctactgtt

SEQ ID NO: 37306 - DNA, 15 bp, Homo sapiens
tacctaatctactgt

SEQ ID NO: 37307 - DNA, 15 bp, Homo sapiens
ttacctaatctactg

SEQ ID NO: 37308 - DNA, 15 bp, Homo sapiens
tttacctaatctact

SEQ ID NO: 37309 - DNA, 15 bp, Homo sapiens
atttacctaatctac

SEQ ID NO: 37310 - DNA, 15 bp, Homo sapiens
catttacctaatcta

SEQ ID NO: 37311 - DNA, 15 bp, Homo sapiens
acatttacctaatct

SEQ ID NO: 37312 - DNA, 15 bp, Homo sapiens
tacatttacctaatc

SEQ ID NO: 37313 - DNA, 15 bp, Homo sapiens
atacatttacctaat

SEQ ID NO: 37314 - DNA, 15 bp, Homo sapiens
gatacatttacctaa

SEQ ID NO: 37315 - DNA, 15 bp, Homo sapiens
tgatacatttaccta

SEQ ID NO: 37316 - DNA, 15 bp, Homo sapiens
atgatacatttacct

SEQ ID NO: 37317 - DNA, 15 bp, Homo sapiens
tatgatacatttacc

SEQ ID NO: 37318 - DNA, 15 bp, Homo sapiens
ttatgatacatttac

SEQ ID NO: 37319 - DNA, 15 bp, Homo sapiens
gttatgatacattta

SEQ ID NO: 37320 - DNA, 15 bp, Homo sapiens
tgttatgatacattt

SEQ ID NO: 37321 - DNA, 15 bp, Homo sapiens
atgttatgatacatt

SEQ ID NO: 37322 - DNA, 15 bp, Homo sapiens
aatgttatgatacat

SEQ ID NO: 37323 - DNA, 15 bp, Homo sapiens
taatgttatgataca

SEQ ID NO: 37324 - DNA, 15 bp, Homo sapiens
ttaatgttatgatac

SEQ ID NO: 37325 - DNA, 15 bp, Homo sapiens
cttaatgttatgata

SEQ ID NO: 37326 - DNA, 15 bp, Homo sapiens
acttaatgttatgat

SEQ ID NO: 37327 - DNA, 15 bp, Homo sapiens
aacttaatgttatga

SEQ ID NO: 37328 - DNA, 15 bp, Homo sapiens
aaacttaatgttatg

SEQ ID NO: 37329 - DNA, 15 bp, Homo sapiens
taaacttaatgttat

SEQ ID NO: 37330 - DNA, 15 bp, Homo sapiens
gtaaacttaatgtta

SEQ ID NO: 37331 - DNA, 15 bp, Homo sapiens
agtaaacttaatgtt

SEQ ID NO: 37332 - DNA, 15 bp, Homo sapiens
cagtaaacttaatgt

SEQ ID NO: 37333 - DNA, 15 bp, Homo sapiens
tcagtaaacttaatg

SEQ ID NO: 37334 - DNA, 15 bp, Homo sapiens
gtcagtaaacttaat

SEQ ID NO: 37335 - DNA, 15 bp, Homo sapiens
tgtcagtaaacttaa

SEQ ID NO: 37336 - DNA, 15 bp, Homo sapiens
atgtcagtaaactta

SEQ ID NO: 37337 - DNA, 15 bp, Homo sapiens
aatgtcagtaaactt

SEQ ID NO: 37338 - DNA, 15 bp, Homo sapiens
caatgtcagtaaact

SEQ ID NO: 37339 - DNA, 15 bp, Homo sapiens
tcaatgtcagtaaac

SEQ ID NO: 37340 - DNA, 15 bp, Homo sapiens
atcaatgtcagtaaa

SEQ ID NO: 37341 - DNA, 15 bp, Homo sapiens
tatcaatgtcagtaa

SEQ ID NO: 37342 - DNA, 15 bp, Homo sapiens
ttatcaatgtcagta

SEQ ID NO: 37343 - DNA, 15 bp, Homo sapiens
attatcaatgtcagt

SEQ ID NO: 37344 - DNA, 15 bp, Homo sapiens
cattatcaatgtcag

SEQ ID NO: 37345 - DNA, 15 bp, Homo sapiens
acattatcaatgtca

SEQ ID NO: 37346 - DNA, 15 bp, Homo sapiens
tacattatcaatgtc

SEQ ID NO: 37347 - DNA, 15 bp, Homo sapiens
gtacattatcaatgt

SEQ ID NO: 37348 - DNA, 15 bp, Homo sapiens
agtacattatcaatg

SEQ ID NO: 37349 - DNA, 15 bp, Homo sapiens
cagtacattatcaat

SEQ ID NO: 37350 - DNA, 15 bp, Homo sapiens
acagtacattatcaa

SEQ ID NO: 37351 - DNA, 15 bp, Homo sapiens
cacagtacattatca

SEQ ID NO: 37352 - DNA, 15 bp, Homo sapiens
ccacagtacattatc

SEQ ID NO: 37353 - DNA, 15 bp, Homo sapiens
accacagtacattat

SEQ ID NO: 37354 - DNA, 15 bp, Homo sapiens
aaccacagtacatta

SEQ ID NO: 37355 - DNA, 15 bp, Homo sapiens
taaccacagtacatt

SEQ ID NO: 37356 - DNA, 15 bp, Homo sapiens
ataaccacagtacat

SEQ ID NO: 37357 - DNA, 15 bp, Homo sapiens
cataaccacagtaca

SEQ ID NO: 37358 - DNA, 15 bp, Homo sapiens
acataaccacagtac

SEQ ID NO: 37359 - DNA, 15 bp, Homo sapiens
tacataaccacagta

SEQ ID NO: 37360 - DNA, 15 bp, Homo sapiens
ttacataaccacagt

SEQ ID NO: 37361 - DNA, 15 bp, Homo sapiens
cttacataaccacag

SEQ ID NO: 37362 - DNA, 15 bp, Homo sapiens
tcttacataaccaca

SEQ ID NO: 37363 - DNA, 15 bp, Homo sapiens
ctcttacataaccac

SEQ ID NO: 37364 - DNA, 15 bp, Homo sapiens
tctcttacataacca

SEQ ID NO: 37365 - DNA, 15 bp, Homo sapiens
ttctcttacataacc

SEQ ID NO: 37366 - DNA, 15 bp, Homo sapiens
cttctcttacataac

SEQ ID NO: 37367 - DNA, 15 bp, Homo sapiens
tcttctcttacataa

SEQ ID NO: 37368 - DNA, 15 bp, Homo sapiens
atcttctcttacata

SEQ ID NO: 37369 - DNA, 15 bp, Homo sapiens
gatcttctcttacat

SEQ ID NO: 37370 - DNA, 15 bp, Homo sapiens
agatcttctcttaca

SEQ ID NO: 37371 - DNA, 15 bp, Homo sapiens
gagatcttctcttac

SEQ ID NO: 37372 - DNA, 15 bp, Homo sapiens
agagatcttctctta

SEQ ID NO: 37373 - DNA, 15 bp, Homo sapiens
tagagatcttctctt

SEQ ID NO: 37374 - DNA, 15 bp, Homo sapiens
atagagatcttctct

SEQ ID NO: 37375 - DNA, 15 bp, Homo sapiens
aatagagatcttctc

SEQ ID NO: 37376 - DNA, 15 bp, Homo sapiens
gaatagagatcttct

SEQ ID NO: 37377 - DNA, 15 bp, Homo sapiens
agaatagagatcttc

SEQ ID NO: 37378 - DNA, 15 bp, Homo sapiens
aagaatagagatctt

SEQ ID NO: 37379 - DNA, 15 bp, Homo sapiens
taagaatagagatct

SEQ ID NO: 37380 - DNA, 15 bp, Homo sapiens
ctaagaatagagatc

SEQ ID NO: 37381 - DNA, 15 bp, Homo sapiens
cctaagaatagagat

SEQ ID NO: 37382 - DNA, 15 bp, Homo sapiens
tcctaagaatagaga

SEQ ID NO: 37383 - DNA, 15 bp, Homo sapiens
ttcctaagaatagag

SEQ ID NO: 37384 - DNA, 15 bp, Homo sapiens
tttcctaagaataga

SEQ ID NO: 37385 - DNA, 15 bp, Homo sapiens
atttcctaagaatag

SEQ ID NO: 37386 - DNA, 15 bp, Homo sapiens
tatttcctaagaata

SEQ ID NO: 37387 - DNA, 15 bp, Homo sapiens
atatttcctaagaat

SEQ ID NO: 37388 - DNA, 15 bp, Homo sapiens
catatttcctaagaa

SEQ ID NO: 37389 - DNA, 15 bp, Homo sapiens
gcatatttcctaaga

SEQ ID NO: 37390 - DNA, 15 bp, Homo sapiens
ggcatatttcctaag

SEQ ID NO: 37391 - DNA, 15 bp, Homo sapiens
gggcatatttcctaa

SEQ ID NO: 37392 - DNA, 15 bp, Homo sapiens
agggcatatttccta

SEQ ID NO: 37393 - DNA, 15 bp, Homo sapiens
cagggcatatttcct

SEQ ID NO: 37394 - DNA, 15 bp, Homo sapiens
tcagggcatatttcc

SEQ ID NO: 37395 - DNA, 15 bp, Homo sapiens
ttcagggcatatttc

SEQ ID NO: 37396 - DNA, 15 bp, Homo sapiens
cttcagggcatattt

SEQ ID NO: 37397 - DNA, 15 bp, Homo sapiens
acttcagggcatatt

SEQ ID NO: 37398 - DNA, 15 bp, Homo sapiens
tacttcagggcatat

SEQ ID NO: 37399 - DNA, 15 bp, Homo sapiens
atacttcagggcata

SEQ ID NO: 37400 - DNA, 15 bp, Homo sapiens
aatacttcagggcat

SEQ ID NO: 37401 - DNA, 15 bp, Homo sapiens
aaatacttcagggca

SEQ ID NO: 37402 - DNA, 15 bp, Homo sapiens
taaatacttcagggc

SEQ ID NO: 37403 - DNA, 15 bp, Homo sapiens
ctaaatacttcaggg

SEQ ID NO: 37404 - DNA, 15 bp, Homo sapiens
cctaaatacttcagg

SEQ ID NO: 37405 - DNA, 15 bp, Homo sapiens
tcctaaatacttcag

SEQ ID NO: 37406 - DNA, 15 bp, Homo sapiens
ctcctaaatacttca

SEQ ID NO: 37407 - DNA, 15 bp, Homo sapiens
actcctaaatacttc

SEQ ID NO: 37408 - DNA, 15 bp, Homo sapiens
cactcctaaatactt

SEQ ID NO: 37409 - DNA, 15 bp, Homo sapiens
tcactcctaaatact

SEQ ID NO: 37410 - DNA, 15 bp, Homo sapiens
ttcactcctaaatac

SEQ ID NO: 37411 - DNA, 15 bp, Homo sapiens
cttcactcctaaata

SEQ ID NO: 37412 - DNA, 15 bp, Homo sapiens
ccttcactcctaaat

SEQ ID NO: 37413 - DNA, 15 bp, Homo sapiens
cccttcactcctaaa

SEQ ID NO: 37414 - DNA, 15 bp, Homo sapiens
gcccttcactcctaa

SEQ ID NO: 37415 - DNA, 15 bp, Homo sapiens
agcccttcactccta

SEQ ID NO: 37416 - DNA, 15 bp, Homo sapiens
cagcccttcactcct

SEQ ID NO: 37417 - DNA, 15 bp, Homo sapiens
acagcccttcactcc

SEQ ID NO: 37418 - DNA, 15 bp, Homo sapiens
cacagcccttcactc

SEQ ID NO: 37419 - DNA, 15 bp, Homo sapiens
tcacagcccttcact

SEQ ID NO: 37420 - DNA, 15 bp, Homo sapiens
atcacagcccttcac

SEQ ID NO: 37421 - DNA, 15 bp, Homo sapiens
catcacagcccttca

SEQ ID NO: 37422 - DNA, 15 bp, Homo sapiens
tcatcacagcccttc

SEQ ID NO: 37423 - DNA, 15 bp, Homo sapiens
ctcatcacagccctt

SEQ ID NO: 37424 - DNA, 15 bp, Homo sapiens
actcatcacagccct

SEQ ID NO: 37425 - DNA, 15 bp, Homo sapiens
tactcatcacagccc

SEQ ID NO: 37426 - DNA, 15 bp, Homo sapiens
ttactcatcacagcc

SEQ ID NO: 37427 - DNA, 15 bp, Homo sapiens
attactcatcacagc

SEQ ID NO: 37428 - DNA, 15 bp, Homo sapiens
aattactcatcacag

SEQ ID NO: 37429 - DNA, 15 bp, Homo sapiens
aaattactcatcaca

SEQ ID NO: 37430 - DNA, 15 bp, Homo sapiens
taaattactcatcac

SEQ ID NO: 37431 - DNA, 15 bp, Homo sapiens
gtaaattactcatca

SEQ ID NO: 37432 - DNA, 15 bp, Homo sapiens
ggtaaattactcatc

SEQ ID NO: 37433 - DNA, 15 bp, Homo sapiens
gggtaaattactcat

SEQ ID NO: 37434 - DNA, 15 bp, Homo sapiens
agggtaaattactca

SEQ ID NO: 37435 - DNA, 15 bp, Homo sapiens
gagggtaaattactc

SEQ ID NO: 37436 - DNA, 15 bp, Homo sapiens
tgagggtaaattact

SEQ ID NO: 37437 - DNA, 15 bp, Homo sapiens
ttgagggtaaattac

SEQ ID NO: 37438 - DNA, 15 bp, Homo sapiens
aaaaaagaatcaatg

SEQ ID NO: 37439 - DNA, 15 bp, Homo sapiens
aaaaaaagaatcaat

SEQ ID NO: 37440 - DNA, 15 bp, Homo sapiens
aaaaaaaagaatcaa

SEQ ID NO: 37441 - DNA, 15 bp, Homo sapiens
gtaaaaaaaagaatc

SEQ ID NO: 37442 - DNA, 15 bp, Homo sapiens
tgtaaaaaaaagaat

SEQ ID NO: 37443 - DNA, 15 bp, Homo sapiens
atgtaaaaaaaagaa

SEQ ID NO: 37444 - DNA, 15 bp, Homo sapiens
aatgtaaaaaaaaga

SEQ ID NO: 37445 - DNA, 15 bp, Homo sapiens
aaatgtaaaaaaaag

SEQ ID NO: 37446 - DNA, 15 bp, Homo sapiens
aaaatgtaaaaaaaa

SEQ ID NO: 37447 - DNA, 15 bp, Homo sapiens
gaaaatgtaaaaaaa

SEQ ID NO: 37448 - DNA, 15 bp, Homo sapiens
ggaaaatgtaaaaaa

SEQ ID NO: 37449 - DNA, 15 bp, Homo sapiens
aggaaaatgtaaaaa

SEQ ID NO: 37450 - DNA, 15 bp, Homo sapiens
aaggaaaatgtaaaa

SEQ ID NO: 37451 - DNA, 15 bp, Homo sapiens
gaaggaaaatgtaaa

SEQ ID NO: 37452 - DNA, 15 bp, Homo sapiens
ggaaggaaaatgtaa

SEQ ID NO: 37453 - DNA, 15 bp, Homo sapiens
gggaaggaaaatgta

SEQ ID NO: 37454 - DNA, 15 bp, Homo sapiens
agggaaggaaaatgt

SEQ ID NO: 37455 - DNA, 15 bp, Homo sapiens
cagggaaggaaaatg

SEQ ID NO: 37456 - DNA, 15 bp, Homo sapiens
acagggaaggaaaat

SEQ ID NO: 37457 - DNA, 15 bp, Homo sapiens
cacagggaaggaaaa

SEQ ID NO: 37458 - DNA, 15 bp, Homo sapiens
tcacagggaaggaaa

SEQ ID NO: 37459 - DNA, 15 bp, Homo sapiens
atcacagggaaggaa

SEQ ID NO: 37460 - DNA, 15 bp, Homo sapiens
catcacagggaagga

SEQ ID NO: 37461 - DNA, 15 bp, Homo sapiens
gcatcacagggaagg

SEQ ID NO: 37462 - DNA, 15 bp, Homo sapiens
agcatcacagggaag

SEQ ID NO: 37463 - DNA, 15 bp, Homo sapiens
tagcatcacagggaa

SEQ ID NO: 37464 - DNA, 15 bp, Homo sapiens
atagcatcacaggga

SEQ ID NO: 37465 - DNA, 15 bp, Homo sapiens
catagcatcacaggg

SEQ ID NO: 37466 - DNA, 15 bp, Homo sapiens
ccatagcatcacagg

SEQ ID NO: 37467 - DNA, 15 bp, Homo sapiens
accatagcatcacag

SEQ ID NO: 37468 - DNA, 15 bp, Homo sapiens
caccatagcatcaca

SEQ ID NO: 37469 - DNA, 15 bp, Homo sapiens
acaccatagcatcac

SEQ ID NO: 37470 - DNA, 15 bp, Homo sapiens
cacaccatagcatca

SEQ ID NO: 37471 - DNA, 15 bp, Homo sapiens
acacaccatagcatc

SEQ ID NO: 37472 - DNA, 15 bp, Homo sapiens
aacacaccatagcat

SEQ ID NO: 37473 - DNA, 15 bp, Homo sapiens
taacacaccatagca

SEQ ID NO: 37474 - DNA, 15 bp, Homo sapiens
ataacacaccatagc

SEQ ID NO: 37475 - DNA, 15 bp, Homo sapiens
aataacacaccatag

SEQ ID NO: 37476 - DNA, 15 bp, Homo sapiens
aaataacacaccata

SEQ ID NO: 37477 - DNA, 15 bp, Homo sapiens
gaaataacacaccat

SEQ ID NO: 37478 - DNA, 15 bp, Homo sapiens
tgaaataacacacca

SEQ ID NO: 37479 - DNA, 15 bp, Homo sapiens
atgaaataacacacc

SEQ ID NO: 37480 - DNA, 15 bp, Homo sapiens
aatgaaataacacac

SEQ ID NO: 37481 - DNA, 15 bp, Homo sapiens
gaatgaaataacaca

SEQ ID NO: 37482 - DNA, 15 bp, Homo sapiens
agaatgaaataacac

SEQ ID NO: 37483 - DNA, 15 bp, Homo sapiens
aagaatgaaataaca

SEQ ID NO: 37484 - DNA, 15 bp, Homo sapiens
caagaatgaaataac

SEQ ID NO: 37485 - DNA, 15 bp, Homo sapiens
gcaagaatgaaataa

SEQ ID NO: 37486 - DNA, 15 bp, Homo sapiens
agcaagaatgaaata

SEQ ID NO: 37487 - DNA, 15 bp, Homo sapiens
gagcaagaatgaaat

SEQ ID NO: 37488 - DNA, 15 bp, Homo sapiens
cgagcaagaatgaaa

SEQ ID NO: 37489 - DNA, 15 bp, Homo sapiens
acgagcaagaatgaa

SEQ ID NO: 37490 - DNA, 15 bp, Homo sapiens
aacgagcaagaatga

SEQ ID NO: 37491 - DNA, 15 bp, Homo sapiens
aaacgagcaagaatg

SEQ ID NO: 37492 - DNA, 15 bp, Homo sapiens
caaacgagcaagaat

SEQ ID NO: 37493 - DNA, 15 bp, Homo sapiens
acaaacgagcaagaa

SEQ ID NO: 37494 - DNA, 15 bp, Homo sapiens
cacaaacgagcaaga

SEQ ID NO: 37495 - DNA, 15 bp, Homo sapiens
ccacaaacgagcaag

SEQ ID NO: 37496 - DNA, 15 bp, Homo sapiens
accacaaacgagcaa

SEQ ID NO: 37497 - DNA, 15 bp, Homo sapiens
caccacaaacgagca

SEQ ID NO: 37498 - DNA, 15 bp, Homo sapiens
ccaccacaaacgagc

SEQ ID NO: 37499 - DNA, 15 bp, Homo sapiens
accaccacaaacgag

SEQ ID NO: 37500 - DNA, 15 bp, Homo sapiens
caccaccacaaacga

SEQ ID NO: 37501 - DNA, 15 bp, Homo sapiens
ccaccaccacaaacg

SEQ ID NO: 37502 - DNA, 15 bp, Homo sapiens
accaccaccacaaac

SEQ ID NO: 37503 - DNA, 15 bp, Homo sapiens
aaccaccaccacaaa

SEQ ID NO: 37504 - DNA, 15 bp, Homo sapiens
aaaccaccaccacaa

SEQ ID NO: 37505 - DNA, 15 bp, Homo sapiens
aaaaccaccaccaca

SEQ ID NO: 37506 - DNA, 15 bp, Homo sapiens
aaaaaccaccaccac

SEQ ID NO: 37507 - DNA, 15 bp, Homo sapiens
gaaaaaccaccacca

SEQ ID NO: 37508 - DNA, 15 bp, Homo sapiens
ggaaaaaccaccacc

SEQ ID NO: 37509 - DNA, 15 bp, Homo sapiens
aggaaaaaccaccac

SEQ ID NO: 37510 - DNA, 15 bp, Homo sapiens
aaggaaaaaccacca

SEQ ID NO: 37511 - DNA, 15 bp, Homo sapiens
gaaggaaaaaccacc

SEQ ID NO: 37512 - DNA, 15 bp, Homo sapiens
tgaaggaaaaaccac

SEQ ID NO: 37513 - DNA, 15 bp, Homo sapiens
ttgaaggaaaaacca

SEQ ID NO: 37514 - DNA, 15 bp, Homo sapiens
tttgaaggaaaaacc

SEQ ID NO: 37515 - DNA, 15 bp, Homo sapiens
atttgaaggaaaaac

SEQ ID NO: 37516 - DNA, 15 bp, Homo sapiens
gatttgaaggaaaaa

SEQ ID NO: 37517 - DNA, 15 bp, Homo sapiens
tgatttgaaggaaaa

SEQ ID NO: 37518 - DNA, 15 bp, Homo sapiens
ctgatttgaaggaaa

SEQ ID NO: 37519 - DNA, 15 bp, Homo sapiens
gctgatttgaaggaa

SEQ ID NO: 37520 - DNA, 15 bp, Homo sapiens
agctgatttgaagga

SEQ ID NO: 37521 - DNA, 15 bp, Homo sapiens
aagctgatttgaagg

SEQ ID NO: 37522 - DNA, 15 bp, Homo sapiens
aaagctgatttgaag

SEQ ID NO: 37523 - DNA, 15 bp, Homo sapiens
taaagctgatttgaa

SEQ ID NO: 37524 - DNA, 15 bp, Homo sapiens
ataaagctgatttga

SEQ ID NO: 37525 - DNA, 15 bp, Homo sapiens
aataaagctgatttg

SEQ ID NO: 37526 - DNA, 15 bp, Homo sapiens
caataaagctgattt

SEQ ID NO: 37527 - DNA, 15 bp, Homo sapiens
tcaataaagctgatt

SEQ ID NO: 37528 - DNA, 15 bp, Homo sapiens
atcaataaagctgat

SEQ ID NO: 37529 - DNA, 15 bp, Homo sapiens
catcaataaagctga

SEQ ID NO: 37530 - DNA, 15 bp, Homo sapiens
acatcaataaagctg

SEQ ID NO: 37531 - DNA, 15 bp, Homo sapiens
cacatcaataaagct

SEQ ID NO: 37532 - DNA, 15 bp, Homo sapiens
acacatcaataaagc

SEQ ID NO: 37533 - DNA, 15 bp, Homo sapiens
tacacatcaataaag

SEQ ID NO: 37534 - DNA, 15 bp, Homo sapiens
ttacacatcaataaa

SEQ ID NO: 37535 - DNA, 15 bp, Homo sapiens
attacacatcaataa

SEQ ID NO: 37536 - DNA, 15 bp, Homo sapiens
aattacacatcaata

SEQ ID NO: 37537 - DNA, 15 bp, Homo sapiens
taattacacatcaat

SEQ ID NO: 37538 - DNA, 15 bp, Homo sapiens
ttaattacacatcaa

SEQ ID NO: 37539 - DNA, 15 bp, Homo sapiens
gttaattacacatca

SEQ ID NO: 37540 - DNA, 15 bp, Homo sapiens
tgttaattacacatc

SEQ ID NO: 37541 - DNA, 15 bp, Homo sapiens
atgttaattacacat

SEQ ID NO: 37542 - DNA, 15 bp, Homo sapiens
tatgttaattacaca

SEQ ID NO: 37543 - DNA, 15 bp, Homo sapiens
gtatgttaattacac

SEQ ID NO: 37544 - DNA, 15 bp, Homo sapiens
cgtatgttaattaca

SEQ ID NO: 37545 - DNA, 15 bp, Homo sapiens
tcgtatgttaattac

SEQ ID NO: 37546 - DNA, 15 bp, Homo sapiens
atcgtatgttaatta

SEQ ID NO: 37547 - DNA, 15 bp, Homo sapiens
catcgtatgttaatt

SEQ ID NO: 37548 - DNA, 15 bp, Homo sapiens
tcatcgtatgttaat

SEQ ID NO: 37549 - DNA, 15 bp, Homo sapiens
ttcatcgtatgttaa

SEQ ID NO: 37550 - DNA, 15 bp, Homo sapiens
tttcatcgtatgtta

SEQ ID NO: 37551 - DNA, 15 bp, Homo sapiens
gtttcatcgtatgtt

SEQ ID NO: 37552 - DNA, 15 bp, Homo sapiens
tgtttcatcgtatgt

SEQ ID NO: 37553 - DNA, 15 bp, Homo sapiens
gtgtttcatcgtatg

SEQ ID NO: 37554 - DNA, 15 bp, Homo sapiens
tgtgtttcatcgtat

SEQ ID NO: 37555 - DNA, 15 bp, Homo sapiens
ctgtgtttcatcgta

SEQ ID NO: 37556 - DNA, 15 bp, Homo sapiens
cctgtgtttcatcgt

SEQ ID NO: 37557 - DNA, 15 bp, Homo sapiens
acctgtgtttcatcg

SEQ ID NO: 37558 - DNA, 15 bp, Homo sapiens
aacctgtgtttcatc

SEQ ID NO: 37559 - DNA, 15 bp, Homo sapiens
gaacctgtgtttcat

SEQ ID NO: 37560 - DNA, 15 bp, Homo sapiens
agaacctgtgtttca

SEQ ID NO: 37561 - DNA, 15 bp, Homo sapiens
aagaacctgtgtttc

SEQ ID NO: 37562 - DNA, 15 bp, Homo sapiens
aaagaacctgtgttt

SEQ ID NO: 37563 - DNA, 15 bp, Homo sapiens
caaagaacctgtgtt

SEQ ID NO: 37564 - DNA, 15 bp, Homo sapiens
ccaaagaacctgtgt

SEQ ID NO: 37565 - DNA, 15 bp, Homo sapiens
cccaaagaacctgtg

SEQ ID NO: 37566 - DNA, 15 bp, Homo sapiens
tcccaaagaacctgt

SEQ ID NO: 37567 - DNA, 15 bp, Homo sapiens
ctcccaaagaacctg

SEQ ID NO: 37568 - DNA, 15 bp, Homo sapiens
cctcccaaagaacct

SEQ ID NO: 37569 - DNA, 15 bp, Homo sapiens
gcctcccaaagaacc

SEQ ID NO: 37570 - DNA, 15 bp, Homo sapiens
ggcctcccaaagaac

SEQ ID NO: 37571 - DNA, 15 bp, Homo sapiens
tggcctcccaaagaa

SEQ ID NO: 37572 - DNA, 15 bp, Homo sapiens
ttggcctcccaaaga

SEQ ID NO: 37573 - DNA, 15 bp, Homo sapiens
tcctgccttggcctc

SEQ ID NO: 37574 - DNA, 15 bp, Homo sapiens
ctcctgccttggcct

SEQ ID NO: 37575 - DNA, 15 bp, Homo sapiens
cctcctgccttggcc

SEQ ID NO: 37576 - DNA, 15 bp, Homo sapiens
tcctcctgccttggc

SEQ ID NO: 37577 - DNA, 15 bp, Homo sapiens
atcctcctgccttgg

SEQ ID NO: 37578 - DNA, 15 bp, Homo sapiens
gatcctcctgccttg

SEQ ID NO: 37579 - DNA, 15 bp, Homo sapiens
tgatcctcctgcctt

SEQ ID NO: 37580 - DNA, 15 bp, Homo sapiens
gtgatcctcctgcct

SEQ ID NO: 37581 - DNA, 15 bp, Homo sapiens
agtgatcctcctgcc

SEQ ID NO: 37582 - DNA, 15 bp, Homo sapiens
aagtgatcctcctgc

SEQ ID NO: 37583 - DNA, 15 bp, Homo sapiens
caagtgatcctcctg

SEQ ID NO: 37584 - DNA, 15 bp, Homo sapiens
tcaagtgatcctcct

SEQ ID NO: 37585 - DNA, 15 bp, Homo sapiens
ctcaagtgatcctcc

SEQ ID NO: 37586 - DNA, 15 bp, Homo sapiens
gctcaagtgatcctc

SEQ ID NO: 37587 - DNA, 15 bp, Homo sapiens
ggctcaagtgatcct

SEQ ID NO: 37588 - DNA, 15 bp, Homo sapiens
gggctcaagtgatcc

SEQ ID NO: 37589 - DNA, 15 bp, Homo sapiens
tgggctcaagtgatc

SEQ ID NO: 37590 - DNA, 15 bp, Homo sapiens
ctgggctcaagtgat

SEQ ID NO: 37591 - DNA, 15 bp, Homo sapiens
cctgggctcaagtga

SEQ ID NO: 37592 - DNA, 15 bp, Homo sapiens
tcctgggctcaagtg

SEQ ID NO: 37593 - DNA, 15 bp, Homo sapiens
ctcctgggctcaagt

SEQ ID NO: 37594 - DNA, 15 bp, Homo sapiens
aaactcctgggctca

SEQ ID NO: 37595 - DNA, 15 bp, Homo sapiens
taaactcctgggctc

SEQ ID NO: 37596 - DNA, 15 bp, Homo sapiens
ttaaactcctgggct

SEQ ID NO: 37597 - DNA, 15 bp, Homo sapiens
cttaaactcctgggc

SEQ ID NO: 37598 - DNA, 15 bp, Homo sapiens
tcttaaactcctggg

SEQ ID NO: 37599 - DNA, 15 bp, Homo sapiens
gtcttaaactcctgg

SEQ ID NO: 37600 - DNA, 15 bp, Homo sapiens
tgtcttaaactcctg

SEQ ID NO: 37601 - DNA, 15 bp, Homo sapiens
ctgtcttaaactcct

SEQ ID NO: 37602 - DNA, 15 bp, Homo sapiens
cctgtcttaaactcc

SEQ ID NO: 37603 - DNA, 15 bp, Homo sapiens
gcctgtcttaaactc

SEQ ID NO: 37604 - DNA, 15 bp, Homo sapiens
ggcctgtcttaaact

SEQ ID NO: 37605 - DNA, 15 bp, Homo sapiens
gggcctgtcttaaac

SEQ ID NO: 37606 - DNA, 15 bp, Homo sapiens
tgggcctgtcttaaa

SEQ ID NO: 37607 - DNA, 15 bp, Homo sapiens
atgggcctgtcttaa

SEQ ID NO: 37608 - DNA, 15 bp, Homo sapiens
catgggcctgtctta

SEQ ID NO: 37609 - DNA, 15 bp, Homo sapiens
acatgggcctgtctt

SEQ ID NO: 37610 - DNA, 15 bp, Homo sapiens
tacatgggcctgtct

SEQ ID NO: 37611 - DNA, 15 bp, Homo sapiens
ttacatgggcctgtc

SEQ ID NO: 37612 - DNA, 15 bp, Homo sapiens
gttacatgggcctgt

SEQ ID NO: 37613 - DNA, 15 bp, Homo sapiens
tgttacatgggcctg

SEQ ID NO: 37614 - DNA, 15 bp, Homo sapiens
ttgttacatgggcct

SEQ ID NO: 37615 - DNA, 15 bp, Homo sapiens
tttgttacatgggcc

SEQ ID NO: 37616 - DNA, 15 bp, Homo sapiens
ctttgttacatgggc

SEQ ID NO: 37617 - DNA, 15 bp, Homo sapiens
actttgttacatggg

SEQ ID NO: 37618 - DNA, 15 bp, Homo sapiens
cactttgttacatgg

SEQ ID NO: 37619 - DNA, 15 bp, Homo sapiens
tcactttgttacatg

SEQ ID NO: 37620 - DNA, 15 bp, Homo sapiens
ctcactttgttacat

SEQ ID NO: 37621 - DNA, 15 bp, Homo sapiens
tctcactttgttaca

SEQ ID NO: 37622 - DNA, 15 bp, Homo sapiens
gtctcactttgttac

SEQ ID NO: 37623 - DNA, 15 bp, Homo sapiens
agtctcactttgtta

SEQ ID NO: 37624 - DNA, 15 bp, Homo sapiens
aagtctcactttgtt

SEQ ID NO: 37625 - DNA, 15 bp, Homo sapiens
aaagtctcactttgt

SEQ ID NO: 37626 - DNA, 15 bp, Homo sapiens
caaagtctcactttg

SEQ ID NO: 37627 - DNA, 15 bp, Homo sapiens
acaaagtctcacttt

SEQ ID NO: 37628 - DNA, 15 bp, Homo sapiens
gacaaagtctcactt

SEQ ID NO: 37629 - DNA, 15 bp, Homo sapiens
agacaaagtctcact

SEQ ID NO: 37630 - DNA, 15 bp, Homo sapiens
gagacaaagtctcac

SEQ ID NO: 37631 - DNA, 15 bp, Homo sapiens
agagacaaagtctca

SEQ ID NO: 37632 - DNA, 15 bp, Homo sapiens
tagagacaaagtctc

SEQ ID NO: 37633 - DNA, 15 bp, Homo sapiens
gtagagacaaagtct

SEQ ID NO: 37634 - DNA, 15 bp, Homo sapiens
tgtagagacaaagtc

SEQ ID NO: 37635 - DNA, 15 bp, Homo sapiens
ctgtagagacaaagt

SEQ ID NO: 37636 - DNA, 15 bp, Homo sapiens
tctgtagagacaaag

SEQ ID NO: 37637 - DNA, 15 bp, Homo sapiens
ttctgtagagacaaa

SEQ ID NO: 37638 - DNA, 15 bp, Homo sapiens
tttctgtagagacaa

SEQ ID NO: 37639 - DNA, 15 bp, Homo sapiens
ttttctgtagagaca

SEQ ID NO: 37640 - DNA, 15 bp, Homo sapiens
tttttctgtagagac

SEQ ID NO: 37641 - DNA, 15 bp, Homo sapiens
ttttttctgtagaga

SEQ ID NO: 37642 - DNA, 15 bp, Homo sapiens
tttttttctgtagag

SEQ ID NO: 37643 - DNA, 15 bp, Homo sapiens
ttttttttctgtaga

SEQ ID NO: 37644 - DNA, 15 bp, Homo sapiens
tttttttttctgtag

SEQ ID NO: 37645 - DNA, 15 bp, Homo sapiens
ttttttttttctgta

SEQ ID NO: 37646 - DNA, 15 bp, Homo sapiens
tttttttttttctgt

SEQ ID NO: 37647 - DNA, 15 bp, Homo sapiens
ttttttttttttctg

SEQ ID NO: 37648 - DNA, 15 bp, Homo sapiens
tttttttttttttct

SEQ ID NO: 37649 - DNA, 15 bp, Homo sapiens
ttttttttttttttc

SEQ ID NO: 37650 - DNA, 15 bp, Homo sapiens
gattttttttttttt

SEQ ID NO: 37651 - DNA, 15 bp, Homo sapiens
tgatttttttttttt

SEQ ID NO: 37652 - DNA, 15 bp, Homo sapiens
ctgattttttttttt

SEQ ID NO: 37653 - DNA, 15 bp, Homo sapiens
tctgatttttttttt

SEQ ID NO: 37654 - DNA, 15 bp, Homo sapiens
ttctgattttttttt

SEQ ID NO: 37655 - DNA, 15 bp, Homo sapiens
tttctgatttttttt

SEQ ID NO: 37656 - DNA, 15 bp, Homo sapiens
ttttctgattttttt

SEQ ID NO: 37657 - DNA, 15 bp, Homo sapiens
attttctgatttttt

SEQ ID NO: 37658 - DNA, 15 bp, Homo sapiens
aattttctgattttt

SEQ ID NO: 37659 - DNA, 15 bp, Homo sapiens
taattttctgatttt

SEQ ID NO: 37660 - DNA, 15 bp, Homo sapiens
ctaattttctgattt

SEQ ID NO: 37661 - DNA, 15 bp, Homo sapiens
gctaattttctgatt

SEQ ID NO: 37662 - DNA, 15 bp, Homo sapiens
ggctaattttctgat

SEQ ID NO: 37663 - DNA, 15 bp, Homo sapiens
tggctaattttctga

SEQ ID NO: 37664 - DNA, 15 bp, Homo sapiens
ctggctaattttctg

SEQ ID NO: 37665 - DNA, 15 bp, Homo sapiens
cctggctaattttct

SEQ ID NO: 37666 - DNA, 15 bp, Homo sapiens
gcctggctaattttc

SEQ ID NO: 37667 - DNA, 15 bp, Homo sapiens
cgcctggctaatttt

SEQ ID NO: 37668 - DNA, 15 bp, Homo sapiens
acgcctggctaattt

SEQ ID NO: 37669 - DNA, 15 bp, Homo sapiens
cacgcctggctaatt

SEQ ID NO: 37670 - DNA, 15 bp, Homo sapiens
ccacgcctggctaat

SEQ ID NO: 37671 - DNA, 15 bp, Homo sapiens
accacgcctggctaa

SEQ ID NO: 37672 - DNA, 15 bp, Homo sapiens
caccacgcctggcta

SEQ ID NO: 37673 - DNA, 15 bp, Homo sapiens
ccaccacgcctggct

SEQ ID NO: 37674 - DNA, 15 bp, Homo sapiens
accaccacgcctggc

SEQ ID NO: 37675 - DNA, 15 bp, Homo sapiens
caccaccacgcctgg

SEQ ID NO: 37676 - DNA, 15 bp, Homo sapiens
gcaccaccacgcctg

SEQ ID NO: 37677 - DNA, 15 bp, Homo sapiens
tgcaccaccacgcct

SEQ ID NO: 37678 - DNA, 15 bp, Homo sapiens
atgcaccaccacgcc

SEQ ID NO: 37679 - DNA, 15 bp, Homo sapiens
catgcaccaccacgc

SEQ ID NO: 37680 - DNA, 15 bp, Homo sapiens
gcatgcaccaccacg

SEQ ID NO: 37681 - DNA, 15 bp, Homo sapiens
ggcatgcaccaccac

SEQ ID NO: 37682 - DNA, 15 bp, Homo sapiens
aggcatgcaccacca

SEQ ID NO: 37683 - DNA, 15 bp, Homo sapiens
caggcatgcaccacc

SEQ ID NO: 37684 - DNA, 15 bp, Homo sapiens
acaggcatgcaccac

SEQ ID NO: 37685 - DNA, 15 bp, Homo sapiens
cacaggcatgcacca

SEQ ID NO: 37686 - DNA, 15 bp, Homo sapiens
ccacaggcatgcacc

SEQ ID NO: 37687 - DNA, 15 bp, Homo sapiens
accacaggcatgcac

SEQ ID NO: 37688 - DNA, 15 bp, Homo sapiens
gaccacaggcatgca

SEQ ID NO: 37689 - DNA, 15 bp, Homo sapiens
ggaccacaggcatgc

SEQ ID NO: 37690 - DNA, 15 bp, Homo sapiens
gggaccacaggcatg

SEQ ID NO: 37691 - DNA, 15 bp, Homo sapiens
tgggaccacaggcat

SEQ ID NO: 37692 - DNA, 15 bp, Homo sapiens
atgggaccacaggca

SEQ ID NO: 37693 - DNA, 15 bp, Homo sapiens
gatgggaccacaggc

SEQ ID NO: 37694 - DNA, 15 bp, Homo sapiens
agatgggaccacagg

SEQ ID NO: 37695 - DNA, 15 bp, Homo sapiens
tagatgggaccacag

SEQ ID NO: 37696 - DNA, 15 bp, Homo sapiens
gtagatgggaccaca

SEQ ID NO: 37697 - DNA, 15 bp, Homo sapiens
tgtagatgggaccac

SEQ ID NO: 37698 - DNA, 15 bp, Homo sapiens
atgtagatgggacca

SEQ ID NO: 37699 - DNA, 15 bp, Homo sapiens
catgtagatgggacc

SEQ ID NO: 37700 - DNA, 15 bp, Homo sapiens
ccatgtagatgggac

SEQ ID NO: 37701 - DNA, 15 bp, Homo sapiens
cccatgtagatggga

SEQ ID NO: 37702 - DNA, 15 bp, Homo sapiens
tcccatgtagatggg

SEQ ID NO: 37703 - DNA, 15 bp, Homo sapiens
ctcccatgtagatgg

SEQ ID NO: 37704 - DNA, 15 bp, Homo sapiens
cctcccatgtagatg

SEQ ID NO: 37705 - DNA, 15 bp, Homo sapiens
acctcccatgtagat

SEQ ID NO: 37706 - DNA, 15 bp, Homo sapiens
aacctcccatgtaga

SEQ ID NO: 37707 - DNA, 15 bp, Homo sapiens
caacctcccatgtag

SEQ ID NO: 37708 - DNA, 15 bp, Homo sapiens
tcaacctcccatgta

SEQ ID NO: 37709 - DNA, 15 bp, Homo sapiens
ctcaacctcccatgt

SEQ ID NO: 37710 - DNA, 15 bp, Homo sapiens
cctcaacctcccatg

SEQ ID NO: 37711 - DNA, 15 bp, Homo sapiens
tcctcaacctcccat

SEQ ID NO: 37712 - DNA, 15 bp, Homo sapiens
ttcctcaacctccca

SEQ ID NO: 37713 - DNA, 15 bp, Homo sapiens
cttcctcaacctccc

SEQ ID NO: 37714 - DNA, 15 bp, Homo sapiens
ccttcctcaacctcc

SEQ ID NO: 37715 - DNA, 15 bp, Homo sapiens
tccttcctcaacctc

SEQ ID NO: 37716 - DNA, 15 bp, Homo sapiens
ttccttcctcaacct

SEQ ID NO: 37717 - DNA, 15 bp, Homo sapiens
cttccttcctcaacc

SEQ ID NO: 37718 - DNA, 15 bp, Homo sapiens
tcttccttcctcaac

SEQ ID NO: 37719 - DNA, 15 bp, Homo sapiens
atcttccttcctcaa

SEQ ID NO: 37720 - DNA, 15 bp, Homo sapiens
aatcttccttcctca

SEQ ID NO: 37721 - DNA, 15 bp, Homo sapiens
caatcttccttcctc

SEQ ID NO: 37722 - DNA, 15 bp, Homo sapiens
gcaatcttccttcct

SEQ ID NO: 37723 - DNA, 15 bp, Homo sapiens
agcaatcttccttcc

SEQ ID NO: 37724 - DNA, 15 bp, Homo sapiens
cagcaatcttccttc

SEQ ID NO: 37725 - DNA, 15 bp, Homo sapiens
ccagcaatcttcctt

SEQ ID NO: 37726 - DNA, 15 bp, Homo sapiens
tccagcaatcttcct

SEQ ID NO: 37727 - DNA, 15 bp, Homo sapiens
ctccagcaatcttcc

SEQ ID NO: 37728 - DNA, 15 bp, Homo sapiens
gctccagcaatcttc

SEQ ID NO: 37729 - DNA, 15 bp, Homo sapiens
ggctccagcaatctt

SEQ ID NO: 37730 - DNA, 15 bp, Homo sapiens
gggctccagcaatct

SEQ ID NO: 37731 - DNA, 15 bp, Homo sapiens
tgggctccagcaatc

SEQ ID NO: 37732 - DNA, 15 bp, Homo sapiens
ctgggctccagcaat

SEQ ID NO: 37733 - DNA, 15 bp, Homo sapiens
cctgggctccagcaa

SEQ ID NO: 37734 - DNA, 15 bp, Homo sapiens
tcctgggctccagca

SEQ ID NO: 37735 - DNA, 15 bp, Homo sapiens
ctcctgggctccagc

SEQ ID NO: 37736 - DNA, 15 bp, Homo sapiens
cctcctgggctccag

SEQ ID NO: 37737 - DNA, 15 bp, Homo sapiens
acctcctgggctcca

SEQ ID NO: 37738 - DNA, 15 bp, Homo sapiens
gacctcctgggctcc

SEQ ID NO: 37739 - DNA, 15 bp, Homo sapiens
tgacctcctgggctc

SEQ ID NO: 37740 - DNA, 15 bp, Homo sapiens
ttgacctcctgggct

SEQ ID NO: 37741 - DNA, 15 bp, Homo sapiens
cttgacctcctgggc

SEQ ID NO: 37742 - DNA, 15 bp, Homo sapiens
ccttgacctcctggg

SEQ ID NO: 37743 - DNA, 15 bp, Homo sapiens
gccttgacctcctgg

SEQ ID NO: 37744 - DNA, 15 bp, Homo sapiens
agccttgacctcctg

SEQ ID NO: 37745 - DNA, 15 bp, Homo sapiens
cagccttgacctcct

SEQ ID NO: 37746 - DNA, 15 bp, Homo sapiens
gcagccttgacctcc

SEQ ID NO: 37747 - DNA, 15 bp, Homo sapiens
tgcagccttgacctc

SEQ ID NO: 37748 - DNA, 15 bp, Homo sapiens
ttgcagccttgacct

SEQ ID NO: 37749 - DNA, 15 bp, Homo sapiens
attgcagccttgacc

SEQ ID NO: 37750 - DNA, 15 bp, Homo sapiens
cattgcagccttgac

SEQ ID NO: 37751 - DNA, 15 bp, Homo sapiens
tcattgcagccttga

SEQ ID NO: 37752 - DNA, 15 bp, Homo sapiens
ctcattgcagccttg

SEQ ID NO: 37753 - DNA, 15 bp, Homo sapiens
gctcattgcagcctt

SEQ ID NO: 37754 - DNA, 15 bp, Homo sapiens
agctcattgcagcct

SEQ ID NO: 37755 - DNA, 15 bp, Homo sapiens
cagctcattgcagcc

SEQ ID NO: 37756 - DNA, 15 bp, Homo sapiens
acagctcattgcagc

SEQ ID NO: 37757 - DNA, 15 bp, Homo sapiens
cacagctcattgcag

SEQ ID NO: 37758 - DNA, 15 bp, Homo sapiens
acacagctcattgca

SEQ ID NO: 37759 - DNA, 15 bp, Homo sapiens
aacacagctcattgc

SEQ ID NO: 37760 - DNA, 15 bp, Homo sapiens
gaacacagctcattg

SEQ ID NO: 37761 - DNA, 15 bp, Homo sapiens
tgaacacagctcatt

SEQ ID NO: 37762 - DNA, 15 bp, Homo sapiens
atgaacacagctcat

SEQ ID NO: 37763 - DNA, 15 bp, Homo sapiens
tatgaacacagctca

SEQ ID NO: 37764 - DNA, 15 bp, Homo sapiens
gtatgaacacagctc

SEQ ID NO: 37765 - DNA, 15 bp, Homo sapiens
ggtatgaacacagct

SEQ ID NO: 37766 - DNA, 15 bp, Homo sapiens
tggtatgaacacagc

SEQ ID NO: 37767 - DNA, 15 bp, Homo sapiens
gtggtatgaacacag

SEQ ID NO: 37768 - DNA, 15 bp, Homo sapiens
agtggtatgaacaca

SEQ ID NO: 37769 - DNA, 15 bp, Homo sapiens
cagtggtatgaacac

SEQ ID NO: 37770 - DNA, 15 bp, Homo sapiens
gcagtggtatgaaca

SEQ ID NO: 37771 - DNA, 15 bp, Homo sapiens
tgcagtggtatgaac

SEQ ID NO: 37772 - DNA, 15 bp, Homo sapiens
gtgcagtggtatgaa

SEQ ID NO: 37773 - DNA, 15 bp, Homo sapiens
agtgcagtggtatga

SEQ ID NO: 37774 - DNA, 15 bp, Homo sapiens
gagtgcagtggtatg

SEQ ID NO: 37775 - DNA, 15 bp, Homo sapiens
agagtgcagtggtat

SEQ ID NO: 37776 - DNA, 15 bp, Homo sapiens
tagagtgcagtggta

SEQ ID NO: 37777 - DNA, 15 bp, Homo sapiens
ctagagtgcagtggt

SEQ ID NO: 37778 - DNA, 15 bp, Homo sapiens
actagagtgcagtgg

SEQ ID NO: 37779 - DNA, 15 bp, Homo sapiens
gactagagtgcagtg

SEQ ID NO: 37780 - DNA, 15 bp, Homo sapiens
agactagagtgcagt

SEQ ID NO: 37781 - DNA, 15 bp, Homo sapiens
cagactagagtgcag

SEQ ID NO: 37782 - DNA, 15 bp, Homo sapiens
ccagactagagtgca

SEQ ID NO: 37783 - DNA, 15 bp, Homo sapiens
cccagactagagtgc

SEQ ID NO: 37784 - DNA, 15 bp, Homo sapiens
acccagactagagtg

SEQ ID NO: 37785 - DNA, 15 bp, Homo sapiens
cacccagactagagt

SEQ ID NO: 37786 - DNA, 15 bp, Homo sapiens
tcacccagactagag

SEQ ID NO: 37787 - DNA, 15 bp, Homo sapiens
gtcacccagactaga

SEQ ID NO: 37788 - DNA, 15 bp, Homo sapiens
tgtcacccagactag

SEQ ID NO: 37789 - DNA, 15 bp, Homo sapiens
ctgtcacccagacta

SEQ ID NO: 37790 - DNA, 15 bp, Homo sapiens
tctgtcacccagact

SEQ ID NO: 37791 - DNA, 15 bp, Homo sapiens
ctctgtcacccagac

SEQ ID NO: 37792 - DNA, 15 bp, Homo sapiens
gctctgtcacccaga

SEQ ID NO: 37793 - DNA, 15 bp, Homo sapiens
gcttgctctgtcacc

SEQ ID NO: 37794 - DNA, 15 bp, Homo sapiens
ggcttgctctgtcac

SEQ ID NO: 37795 - DNA, 15 bp, Homo sapiens
gggcttgctctgtca

SEQ ID NO: 37796 - DNA, 15 bp, Homo sapiens
ggggcttgctctgtc

SEQ ID NO: 37797 - DNA, 15 bp, Homo sapiens
aggggcttgctctgt

SEQ ID NO: 37798 - DNA, 15 bp, Homo sapiens
caggggcttgctctg

SEQ ID NO: 37799 - DNA, 15 bp, Homo sapiens
acaggggcttgctct

SEQ ID NO: 37800 - DNA, 15 bp, Homo sapiens
gacaggggcttgctc

SEQ ID NO: 37801 - DNA, 15 bp, Homo sapiens
agacaggggcttgct

SEQ ID NO: 37802 - DNA, 15 bp, Homo sapiens
gagacaggggcttgc

SEQ ID NO: 37803 - DNA, 15 bp, Homo sapiens
tgagacaggggcttg

SEQ ID NO: 37804 - DNA, 15 bp, Homo sapiens
ttgagacaggggctt

SEQ ID NO: 37805 - DNA, 15 bp, Homo sapiens
tttgagacaggggct

SEQ ID NO: 37806 - DNA, 15 bp, Homo sapiens
ttttgagacaggggc

SEQ ID NO: 37807 - DNA, 15 bp, Homo sapiens
tttttgagacagggg

SEQ ID NO: 37808 - DNA, 15 bp, Homo sapiens
ttttttgagacaggg

SEQ ID NO: 37809 - DNA, 15 bp, Homo sapiens
cttttttgagacagg

SEQ ID NO: 37810 - DNA, 15 bp, Homo sapiens
gcttttttgagacag

SEQ ID NO: 37811 - DNA, 15 bp, Homo sapiens
tgcttttttgagaca

SEQ ID NO: 37812 - DNA, 15 bp, Homo sapiens
ttgcttttttgagac

SEQ ID NO: 37813 - DNA, 15 bp, Homo sapiens
tttgcttttttgaga

SEQ ID NO: 37814 - DNA, 15 bp, Homo sapiens
ttttgcttttttgag

SEQ ID NO: 37815 - DNA, 15 bp, Homo sapiens
gttttgcttttttga

SEQ ID NO: 37816 - DNA, 15 bp, Homo sapiens
tgttttgcttttttg

SEQ ID NO: 37817 - DNA, 15 bp, Homo sapiens
ttgttttgctttttt

SEQ ID NO: 37818 - DNA, 15 bp, Homo sapiens
tttgttttgcttttt

SEQ ID NO: 37819 - DNA, 15 bp, Homo sapiens
ttttgttttgctttt

SEQ ID NO: 37820 - DNA, 15 bp, Homo sapiens
gttttgttttgcttt

SEQ ID NO: 37821 - DNA, 15 bp, Homo sapiens
tgttttgttttgctt

SEQ ID NO: 37822 - DNA, 15 bp, Homo sapiens
ttgttttgttttgct

SEQ ID NO: 37823 - DNA, 15 bp, Homo sapiens
tttgttttgttttgc

SEQ ID NO: 37824 - DNA, 15 bp, Homo sapiens
ttttgttttgttttg

SEQ ID NO: 37825 - DNA, 15 bp, Homo sapiens
tttttgttttgtttt

SEQ ID NO: 37826 - DNA, 15 bp, Homo sapiens
gtttttgttttgttt

SEQ ID NO: 37827 - DNA, 15 bp, Homo sapiens
tgtttttgttttgtt

SEQ ID NO: 37828 - DNA, 15 bp, Homo sapiens
gtgtttttgttttgt

SEQ ID NO: 37829 - DNA, 15 bp, Homo sapiens
ggtgtttttgttttg

SEQ ID NO: 37830 - DNA, 15 bp, Homo sapiens
aggtgtttttgtttt

SEQ ID NO: 37831 - DNA, 15 bp, Homo sapiens
taggtgtttttgttt

SEQ ID NO: 37832 - DNA, 15 bp, Homo sapiens
ataggtgtttttgtt

SEQ ID NO: 37833 - DNA, 15 bp, Homo sapiens
aataggtgtttttgt

SEQ ID NO: 37834 - DNA, 15 bp, Homo sapiens
aaataggtgtttttg

SEQ ID NO: 37835 - DNA, 15 bp, Homo sapiens
aaaataggtgttttt

SEQ ID NO: 37836 - DNA, 15 bp, Homo sapiens
taaaataggtgtttt

SEQ ID NO: 37837 - DNA, 15 bp, Homo sapiens
ttaaaataggtgttt

SEQ ID NO: 37838 - DNA, 15 bp, Homo sapiens
tttaaaataggtgtt

SEQ ID NO: 37839 - DNA, 15 bp, Homo sapiens
atttaaaataggtgt

SEQ ID NO: 37840 - DNA, 15 bp, Homo sapiens
catttaaaataggtg

SEQ ID NO: 37841 - DNA, 15 bp, Homo sapiens
acatttaaaataggt

SEQ ID NO: 37842 - DNA, 15 bp, Homo sapiens
tacatttaaaatagg

SEQ ID NO: 37843 - DNA, 15 bp, Homo sapiens
gtacatttaaaatag

SEQ ID NO: 37844 - DNA, 15 bp, Homo sapiens
tgtacatttaaaata

SEQ ID NO: 37845 - DNA, 15 bp, Homo sapiens
ctgtacatttaaaat

SEQ ID NO: 37846 - DNA, 15 bp, Homo sapiens
actgtacatttaaaa

SEQ ID NO: 37847 - DNA, 15 bp, Homo sapiens
aactgtacatttaaa

SEQ ID NO: 37848 - DNA, 15 bp, Homo sapiens
aaactgtacatttaa

SEQ ID NO: 37849 - DNA, 15 bp, Homo sapiens
taaactgtacattta

SEQ ID NO: 37850 - DNA, 15 bp, Homo sapiens
ctaaactgtacattt

SEQ ID NO: 37851 - DNA, 15 bp, Homo sapiens
actaaactgtacatt

SEQ ID NO: 37852 - DNA, 15 bp, Homo sapiens
cactaaactgtacat

SEQ ID NO: 37853 - DNA, 15 bp, Homo sapiens
tcactaaactgtaca

SEQ ID NO: 37854 - DNA, 15 bp, Homo sapiens
ctcactaaactgtac

SEQ ID NO: 37855 - DNA, 15 bp, Homo sapiens
actcactaaactgta

SEQ ID NO: 37856 - DNA, 15 bp, Homo sapiens
aactcactaaactgt

SEQ ID NO: 37857 - DNA, 15 bp, Homo sapiens
aaactcactaaactg

SEQ ID NO: 37858 - DNA, 15 bp, Homo sapiens
aaaactcactaaact

SEQ ID NO: 37859 - DNA, 15 bp, Homo sapiens
caaaactcactaaac

SEQ ID NO: 37860 - DNA, 15 bp, Homo sapiens
tcaaaactcactaaa

SEQ ID NO: 37861 - DNA, 15 bp, Homo sapiens
atcaaaactcactaa

SEQ ID NO: 37862 - DNA, 15 bp, Homo sapiens
tatcaaaactcacta

SEQ ID NO: 37863 - DNA, 15 bp, Homo sapiens
ttatcaaaactcact

SEQ ID NO: 37864 - DNA, 15 bp, Homo sapiens
tttatcaaaactcac

SEQ ID NO: 37865 - DNA, 15 bp, Homo sapiens
gtttatcaaaactca

SEQ ID NO: 37866 - DNA, 15 bp, Homo sapiens
cgtttatcaaaactc

SEQ ID NO: 37867 - DNA, 15 bp, Homo sapiens
acgtttatcaaaact

SEQ ID NO: 37868 - DNA, 15 bp, Homo sapiens
cacgtttatcaaaac

SEQ ID NO: 37869 - DNA, 15 bp, Homo sapiens
gcacgtttatcaaaa

SEQ ID NO: 37870 - DNA, 15 bp, Homo sapiens
tgcacgtttatcaaa

SEQ ID NO: 37871 - DNA, 15 bp, Homo sapiens
atgcacgtttatcaa

SEQ ID NO: 37872 - DNA, 15 bp, Homo sapiens
aatgcacgtttatca

SEQ ID NO: 37873 - DNA, 15 bp, Homo sapiens
gaatgcacgtttatc

SEQ ID NO: 37874 - DNA, 15 bp, Homo sapiens
ggaatgcacgtttat

SEQ ID NO: 37875 - DNA, 15 bp, Homo sapiens
tggaatgcacgttta

SEQ ID NO: 37876 - DNA, 15 bp, Homo sapiens
atggaatgcacgttt

SEQ ID NO: 37877 - DNA, 15 bp, Homo sapiens
catggaatgcacgtt

SEQ ID NO: 37878 - DNA, 15 bp, Homo sapiens
acatggaatgcacgt

SEQ ID NO: 37879 - DNA, 15 bp, Homo sapiens
cacatggaatgcacg

SEQ ID NO: 37880 - DNA, 15 bp, Homo sapiens
acacatggaatgcac

SEQ ID NO: 37881 - DNA, 15 bp, Homo sapiens
cacacatggaatgca

SEQ ID NO: 37882 - DNA, 15 bp, Homo sapiens
ccacacatggaatgc

SEQ ID NO: 37883 - DNA, 15 bp, Homo sapiens
accacacatggaatg

SEQ ID NO: 37884 - DNA, 15 bp, Homo sapiens
aaccacacatggaat

SEQ ID NO: 37885 - DNA, 15 bp, Homo sapiens
aaaccacacatggaa

SEQ ID NO: 37886 - DNA, 15 bp, Homo sapiens
aaaaccacacatgga

SEQ ID NO: 37887 - DNA, 15 bp, Homo sapiens
aaaaaccacacatgg

SEQ ID NO: 37888 - DNA, 15 bp, Homo sapiens
taaaaaccacacatg

SEQ ID NO: 37889 - DNA, 15 bp, Homo sapiens
ttaaaaaccacacat

SEQ ID NO: 37890 - DNA, 15 bp, Homo sapiens
tttaaaaaccacaca

SEQ ID NO: 37891 - DNA, 15 bp, Homo sapiens
ttttaaaaaccacac

SEQ ID NO: 37892 - DNA, 15 bp, Homo sapiens
tttttaaaaaccaca

SEQ ID NO: 37893 - DNA, 15 bp, Homo sapiens
atttttaaaaaccac

SEQ ID NO: 37894 - DNA, 15 bp, Homo sapiens
catttttaaaaacca

SEQ ID NO: 37895 - DNA, 15 bp, Homo sapiens
acatttttaaaaacc

SEQ ID NO: 37896 - DNA, 15 bp, Homo sapiens
tacatttttaaaaac

SEQ ID NO: 37897 - DNA, 15 bp, Homo sapiens
ttacatttttaaaaa

SEQ ID NO: 37898 - DNA, 15 bp, Homo sapiens
attacatttttaaaa

SEQ ID NO: 37899 - DNA, 15 bp, Homo sapiens
gattacatttttaaa

SEQ ID NO: 37900 - DNA, 15 bp, Homo sapiens
tgattacatttttaa

SEQ ID NO: 37901 - DNA, 15 bp, Homo sapiens
gtgattacattttta

SEQ ID NO: 37902 - DNA, 15 bp, Homo sapiens
tgtgattacattttt

SEQ ID NO: 37903 - DNA, 15 bp, Homo sapiens
atgtgattacatttt

SEQ ID NO: 37904 - DNA, 15 bp, Homo sapiens
aatgtgattacattt

SEQ ID NO: 37905 - DNA, 15 bp, Homo sapiens
aaatgtgattacatt

SEQ ID NO: 37906 - DNA, 15 bp, Homo sapiens
aaaatgtgattacat

SEQ ID NO: 37907 - DNA, 15 bp, Homo sapiens
aaaaatgtgattaca

SEQ ID NO: 37908 - DNA, 15 bp, Homo sapiens
aaaaaatgtgattac

SEQ ID NO: 37909 - DNA, 15 bp, Homo sapiens
taaaaaatgtgatta

SEQ ID NO: 37910 - DNA, 15 bp, Homo sapiens
ataaaaaatgtgatt

SEQ ID NO: 37911 - DNA, 15 bp, Homo sapiens
aataaaaaatgtgat

SEQ ID NO: 37912 - DNA, 15 bp, Homo sapiens
caataaaaaatgtga

SEQ ID NO: 37913 - DNA, 15 bp, Homo sapiens
gcaataaaaaatgtg

SEQ ID NO: 37914 - DNA, 15 bp, Homo sapiens
cgcaataaaaaatgt

SEQ ID NO: 37915 - DNA, 15 bp, Homo sapiens
ccgcaataaaaaatg

SEQ ID NO: 37916 - DNA, 15 bp, Homo sapiens
accgcaataaaaaat

SEQ ID NO: 37917 - DNA, 15 bp, Homo sapiens
taccgcaataaaaaa

SEQ ID NO: 37918 - DNA, 15 bp, Homo sapiens
ttaccgcaataaaaa

SEQ ID NO: 37919 - DNA, 15 bp, Homo sapiens
tttaccgcaataaaa

SEQ ID NO: 37920 - DNA, 15 bp, Homo sapiens
ttttaccgcaataaa

SEQ ID NO: 37921 - DNA, 15 bp, Homo sapiens
attttaccgcaataa

SEQ ID NO: 37922 - DNA, 15 bp, Homo sapiens
tattttaccgcaata

SEQ ID NO: 37923 - DNA, 15 bp, Homo sapiens
atattttaccgcaat

SEQ ID NO: 37924 - DNA, 15 bp, Homo sapiens
tatattttaccgcaa

SEQ ID NO: 37925 - DNA, 15 bp, Homo sapiens
ttatattttaccgca

SEQ ID NO: 37926 - DNA, 15 bp, Homo sapiens
attatattttaccgc

SEQ ID NO: 37927 - DNA, 15 bp, Homo sapiens
tattatattttaccg

SEQ ID NO: 37928 - DNA, 15 bp, Homo sapiens
ttattatattttacc

SEQ ID NO: 37929 - DNA, 15 bp, Homo sapiens
gttattatattttac

SEQ ID NO: 37930 - DNA, 15 bp, Homo sapiens
tgttattatatttta

SEQ ID NO: 37931 - DNA, 15 bp, Homo sapiens
atgttattatatttt

SEQ ID NO: 37932 - DNA, 15 bp, Homo sapiens
tatgttattatattt

SEQ ID NO: 37933 - DNA, 15 bp, Homo sapiens
ttatgttattatatt

SEQ ID NO: 37934 - DNA, 15 bp, Homo sapiens
tttatgttattatat

SEQ ID NO: 37935 - DNA, 15 bp, Homo sapiens
ttttatgttattata

SEQ ID NO: 37936 - DNA, 15 bp, Homo sapiens
attttatgttattat

SEQ ID NO: 37937 - DNA, 15 bp, Homo sapiens
aattttatgttatta

SEQ ID NO: 37938 - DNA, 15 bp, Homo sapiens
caattttatgttatt

SEQ ID NO: 37939 - DNA, 15 bp, Homo sapiens
tcaattttatgttat

SEQ ID NO: 37940 - DNA, 15 bp, Homo sapiens
gtcaattttatgtta

SEQ ID NO: 37941 - DNA, 15 bp, Homo sapiens
ggtcaattttatgtt

SEQ ID NO: 37942 - DNA, 15 bp, Homo sapiens
tggtcaattttatgt

SEQ ID NO: 37943 - DNA, 15 bp, Homo sapiens
atggtcaattttatg

SEQ ID NO: 37944 - DNA, 15 bp, Homo sapiens
catggtcaattttat

SEQ ID NO: 37945 - DNA, 15 bp, Homo sapiens
gcatggtcaatttta

SEQ ID NO: 37946 - DNA, 15 bp, Homo sapiens
ggcatggtcaatttt

SEQ ID NO: 37947 - DNA, 15 bp, Homo sapiens
tggcatggtcaattt

SEQ ID NO: 37948 - DNA, 15 bp, Homo sapiens
ttggcatggtcaatt

SEQ ID NO: 37949 - DNA, 15 bp, Homo sapiens
gttggcatggtcaat

SEQ ID NO: 37950 - DNA, 15 bp, Homo sapiens
ggttggcatggtcaa

SEQ ID NO: 37951 - DNA, 15 bp, Homo sapiens
tggttggcatggtca

SEQ ID NO: 37952 - DNA, 15 bp, Homo sapiens
atggttggcatggtc

SEQ ID NO: 37953 - DNA, 15 bp, Homo sapiens
catggttggcatggt

SEQ ID NO: 37954 - DNA, 15 bp, Homo sapiens
acatggttggcatgg

SEQ ID NO: 37955 - DNA, 15 bp, Homo sapiens
aacatggttggcatg

SEQ ID NO: 37956 - DNA, 15 bp, Homo sapiens
aaacatggttggcat

SEQ ID NO: 37957 - DNA, 15 bp, Homo sapiens
taaacatggttggca

SEQ ID NO: 37958 - DNA, 15 bp, Homo sapiens
ttaaacatggttggc

SEQ ID NO: 37959 - DNA, 15 bp, Homo sapiens
cttaaacatggttgg

SEQ ID NO: 37960 - DNA, 15 bp, Homo sapiens
acttaaacatggttg

SEQ ID NO: 37961 - DNA, 15 bp, Homo sapiens
cacttaaacatggtt

SEQ ID NO: 37962 - DNA, 15 bp, Homo sapiens
gcacttaaacatggt

SEQ ID NO: 37963 - DNA, 15 bp, Homo sapiens
tgcacttaaacatgg

SEQ ID NO: 37964 - DNA, 15 bp, Homo sapiens
gtgcacttaaacatg

SEQ ID NO: 37965 - DNA, 15 bp, Homo sapiens
tgtgcacttaaacat

SEQ ID NO: 37966 - DNA, 15 bp, Homo sapiens
ctgtgcacttaaaca

SEQ ID NO: 37967 - DNA, 15 bp, Homo sapiens
actgtgcacttaaac

SEQ ID NO: 37968 - DNA, 15 bp, Homo sapiens
cactgtgcacttaaa

SEQ ID NO: 37969 - DNA, 15 bp, Homo sapiens
gcactgtgcacttaa

SEQ ID NO: 37970 - DNA, 15 bp, Homo sapiens
tgcactgtgcactta

SEQ ID NO: 37971 - DNA, 15 bp, Homo sapiens
ctgcactgtgcactt

SEQ ID NO: 37972 - DNA, 15 bp, Homo sapiens
actgcactgtgcact

SEQ ID NO: 37973 - DNA, 15 bp, Homo sapiens
cactgcactgtgcac

SEQ ID NO: 37974 - DNA, 15 bp, Homo sapiens
ccactgcactgtgca

SEQ ID NO: 37975 - DNA, 15 bp, Homo sapiens
gccactgcactgtgc

SEQ ID NO: 37976 - DNA, 15 bp, Homo sapiens
tgccactgcactgtg

SEQ ID NO: 37977 - DNA, 15 bp, Homo sapiens
gtgccactgcactgt

SEQ ID NO: 37978 - DNA, 15 bp, Homo sapiens
agtgccactgcactg

SEQ ID NO: 37979 - DNA, 15 bp, Homo sapiens
ttagtgccactgcac

SEQ ID NO: 37980 - DNA, 15 bp, Homo sapiens
cttagtgccactgca

SEQ ID NO: 37981 - DNA, 15 bp, Homo sapiens
acttagtgccactgc

SEQ ID NO: 37982 - DNA, 15 bp, Homo sapiens
tacttagtgccactg

SEQ ID NO: 37983 - DNA, 15 bp, Homo sapiens
gtacttagtgccact

SEQ ID NO: 37984 - DNA, 15 bp, Homo sapiens
tgtacttagtgccac

SEQ ID NO: 37985 - DNA, 15 bp, Homo sapiens
atgtacttagtgcca

SEQ ID NO: 37986 - DNA, 15 bp, Homo sapiens
aatgtacttagtgcc

SEQ ID NO: 37987 - DNA, 15 bp, Homo sapiens
aaatgtacttagtgc

SEQ ID NO: 37988 - DNA, 15 bp, Homo sapiens
taaatgtacttagtg

SEQ ID NO: 37989 - DNA, 15 bp, Homo sapiens
gtaaatgtacttagt

SEQ ID NO: 37990 - DNA, 15 bp, Homo sapiens
tgtaaatgtacttag

SEQ ID NO: 37991 - DNA, 15 bp, Homo sapiens
atgtaaatgtactta

SEQ ID NO: 37992 - DNA, 15 bp, Homo sapiens
aatgtaaatgtactt

SEQ ID NO: 37993 - DNA, 15 bp, Homo sapiens
caatgtaaatgtact

SEQ ID NO: 37994 - DNA, 15 bp, Homo sapiens
acaatgtaaatgtac

SEQ ID NO: 37995 - DNA, 15 bp, Homo sapiens
aacaatgtaaatgta

SEQ ID NO: 37996 - DNA, 15 bp, Homo sapiens
caacaatgtaaatgt

SEQ ID NO: 37997 - DNA, 15 bp, Homo sapiens
acaacaatgtaaatg

SEQ ID NO: 37998 - DNA, 15 bp, Homo sapiens
cacaacaatgtaaat

SEQ ID NO: 37999 - DNA, 15 bp, Homo sapiens
gcacaacaatgtaaa

SEQ ID NO: 38000 - DNA, 15 bp, Homo sapiens
tgcacaacaatgtaa

SEQ ID NO: 38001 - DNA, 15 bp, Homo sapiens
ttgcacaacaatgta

SEQ ID NO: 38002 - DNA, 15 bp, Homo sapiens
gttgcacaacaatgt

SEQ ID NO: 38003 - DNA, 15 bp, Homo sapiens
ggttgcacaacaatg

SEQ ID NO: 38004 - DNA, 15 bp, Homo sapiens
cggttgcacaacaat

SEQ ID NO: 38005 - DNA, 15 bp, Homo sapiens
acggttgcacaacaa

SEQ ID NO: 38006 - DNA, 15 bp, Homo sapiens
aacggttgcacaaca

SEQ ID NO: 38007 - DNA, 15 bp, Homo sapiens
taacggttgcacaac

SEQ ID NO: 38008 - DNA, 15 bp, Homo sapiens
gtaacggttgcacaa

SEQ ID NO: 38009 - DNA, 15 bp, Homo sapiens
ggtaacggttgcaca

SEQ ID NO: 38010 - DNA, 15 bp, Homo sapiens
tggtaacggttgcac

SEQ ID NO: 38011 - DNA, 15 bp, Homo sapiens
gtggtaacggttgca

SEQ ID NO: 38012 - DNA, 15 bp, Homo sapiens
ggtggtaacggttgc

SEQ ID NO: 38013 - DNA, 15 bp, Homo sapiens
tggtggtaacggttg

SEQ ID NO: 38014 - DNA, 15 bp, Homo sapiens
atggtggtaacggtt

SEQ ID NO: 38015 - DNA, 15 bp, Homo sapiens
gatggtggtaacggt

SEQ ID NO: 38016 - DNA, 15 bp, Homo sapiens
ggatggtggtaacgg

SEQ ID NO: 38017 - DNA, 15 bp, Homo sapiens
gggatggtggtaacg

SEQ ID NO: 38018 - DNA, 15 bp, Homo sapiens
ggggatggtggtaac

SEQ ID NO: 38019 - DNA, 15 bp, Homo sapiens
cggggatggtggtaa

SEQ ID NO: 38020 - DNA, 15 bp, Homo sapiens
tcggggatggtggta

SEQ ID NO: 38021 - DNA, 15 bp, Homo sapiens
atcggggatggtggt

SEQ ID NO: 38022 - DNA, 15 bp, Homo sapiens
tatcggggatggtgg

SEQ ID NO: 38023 - DNA, 15 bp, Homo sapiens
ctatcggggatggtg

SEQ ID NO: 38024 - DNA, 15 bp, Homo sapiens
tctatcggggatggt

SEQ ID NO: 38025 - DNA, 15 bp, Homo sapiens
ttctatcggggatgg

SEQ ID NO: 38026 - DNA, 15 bp, Homo sapiens
gttctatcggggatg

SEQ ID NO: 38027 - DNA, 15 bp, Homo sapiens
agttctatcggggat

SEQ ID NO: 38028 - DNA, 15 bp, Homo sapiens
gagttctatcgggga

SEQ ID NO: 38029 - DNA, 15 bp, Homo sapiens
agagttctatcgggg

SEQ ID NO: 38030 - DNA, 15 bp, Homo sapiens
aagagttctatcggg

SEQ ID NO: 38031 - DNA, 15 bp, Homo sapiens
aaagagttctatcgg

SEQ ID NO: 38032 - DNA, 15 bp, Homo sapiens
gaaagagttctatcg

SEQ ID NO: 38033 - DNA, 15 bp, Homo sapiens
tgaaagagttctatc

SEQ ID NO: 38034 - DNA, 15 bp, Homo sapiens
atgaaagagttctat

SEQ ID NO: 38035 - DNA, 15 bp, Homo sapiens
gatgaaagagttcta

SEQ ID NO: 38036 - DNA, 15 bp, Homo sapiens
agatgaaagagttct

SEQ ID NO: 38037 - DNA, 15 bp, Homo sapiens
aagatgaaagagttc

SEQ ID NO: 38038 - DNA, 15 bp, Homo sapiens
caagatgaaagagtt

SEQ ID NO: 38039 - DNA, 15 bp, Homo sapiens
gcaagatgaaagagt

SEQ ID NO: 38040 - DNA, 15 bp, Homo sapiens
agcaagatgaaagag

SEQ ID NO: 38041 - DNA, 15 bp, Homo sapiens
aagcaagatgaaaga

SEQ ID NO: 38042 - DNA, 15 bp, Homo sapiens
gaagcaagatgaaag

SEQ ID NO: 38043 - DNA, 15 bp, Homo sapiens
tgaagcaagatgaaa

SEQ ID NO: 38044 - DNA, 15 bp, Homo sapiens
ctgaagcaagatgaa

SEQ ID NO: 38045 - DNA, 15 bp, Homo sapiens
actgaagcaagatga

SEQ ID NO: 38046 - DNA, 15 bp, Homo sapiens
cactgaagcaagatg

SEQ ID NO: 38047 - DNA, 15 bp, Homo sapiens
tcactgaagcaagat

SEQ ID NO: 38048 - DNA, 15 bp, Homo sapiens
ttcactgaagcaaga

SEQ ID NO: 38049 - DNA, 15 bp, Homo sapiens
tttcactgaagcaag

SEQ ID NO: 38050 - DNA, 15 bp, Homo sapiens
ttttcactgaagcaa

SEQ ID NO: 38051 - DNA, 15 bp, Homo sapiens
attttcactgaagca

SEQ ID NO: 38052 - DNA, 15 bp, Homo sapiens
gattttcactgaagc

SEQ ID NO: 38053 - DNA, 15 bp, Homo sapiens
agattttcactgaag

SEQ ID NO: 38054 - DNA, 15 bp, Homo sapiens
cagattttcactgaa

SEQ ID NO: 38055 - DNA, 15 bp, Homo sapiens
acagattttcactga

SEQ ID NO: 38056 - DNA, 15 bp, Homo sapiens
cacagattttcactg

SEQ ID NO: 38057 - DNA, 15 bp, Homo sapiens
gcacagattttcact

SEQ ID NO: 38058 - DNA, 15 bp, Homo sapiens
ggcacagattttcac

SEQ ID NO: 38059 - DNA, 15 bp, Homo sapiens
gggcacagattttca

SEQ ID NO: 38060 - DNA, 15 bp, Homo sapiens
tgggcacagattttc

SEQ ID NO: 38061 - DNA, 15 bp, Homo sapiens
atgggcacagatttt

SEQ ID NO: 38062 - DNA, 15 bp, Homo sapiens
aatgggcacagattt

SEQ ID NO: 38063 - DNA, 15 bp, Homo sapiens
taatgggcacagatt

SEQ ID NO: 38064 - DNA, 15 bp, Homo sapiens
ttaatgggcacagat

SEQ ID NO: 38065 - DNA, 15 bp, Homo sapiens
tttaatgggcacaga

SEQ ID NO: 38066 - DNA, 15 bp, Homo sapiens
gtttaatgggcacag

SEQ ID NO: 38067 - DNA, 15 bp, Homo sapiens
tgtttaatgggcaca

SEQ ID NO: 38068 - DNA, 15 bp, Homo sapiens
gtgtttaatgggcac

SEQ ID NO: 38069 - DNA, 15 bp, Homo sapiens
agtgtttaatgggca

SEQ ID NO: 38070 - DNA, 15 bp, Homo sapiens
tagtgtttaatgggc

SEQ ID NO: 38071 - DNA, 15 bp, Homo sapiens
ttagtgtttaatggg

SEQ ID NO: 38072 - DNA, 15 bp, Homo sapiens
gttagtgtttaatgg

SEQ ID NO: 38073 - DNA, 15 bp, Homo sapiens
agttagtgtttaatg

SEQ ID NO: 38074 - DNA, 15 bp, Homo sapiens
gagttagtgtttaat

SEQ ID NO: 38075 - DNA, 15 bp, Homo sapiens
tgagttagtgtttaa

SEQ ID NO: 38076 - DNA, 15 bp, Homo sapiens
gtgagttagtgttta

SEQ ID NO: 38077 - DNA, 15 bp, Homo sapiens
ggtgagttagtgttt

SEQ ID NO: 38078 - DNA, 15 bp, Homo sapiens
tggtgagttagtgtt

SEQ ID NO: 38079 - DNA, 15 bp, Homo sapiens
gtggtgagttagtgt

SEQ ID NO: 38080 - DNA, 15 bp, Homo sapiens
agtggtgagttagtg

SEQ ID NO: 38081 - DNA, 15 bp, Homo sapiens
aagtggtgagttagt

SEQ ID NO: 38082 - DNA, 15 bp, Homo sapiens
taagtggtgagttag

SEQ ID NO: 38083 - DNA, 15 bp, Homo sapiens
gtaagtggtgagtta

SEQ ID NO: 38084 - DNA, 15 bp, Homo sapiens
agtaagtggtgagtt

SEQ ID NO: 38085 - DNA, 15 bp, Homo sapiens
cagtaagtggtgagt

SEQ ID NO: 38086 - DNA, 15 bp, Homo sapiens
gcagtaagtggtgag

SEQ ID NO: 38087 - DNA, 15 bp, Homo sapiens
ggcagtaagtggtga

SEQ ID NO: 38088 - DNA, 15 bp, Homo sapiens
gggcagtaagtggtg

SEQ ID NO: 38089 - DNA, 15 bp, Homo sapiens
ggggcagtaagtggt

SEQ ID NO: 38090 - DNA, 15 bp, Homo sapiens
gggggcagtaagtgg

SEQ ID NO: 38091 - DNA, 15 bp, Homo sapiens
ggggggcagtaagtg

SEQ ID NO: 38092 - DNA, 15 bp, Homo sapiens
aggggggcagtaagt

SEQ ID NO: 38093 - DNA, 15 bp, Homo sapiens
gaggggggcagtaag

SEQ ID NO: 38094 - DNA, 15 bp, Homo sapiens
cgaggggggcagtaa

SEQ ID NO: 38095 - DNA, 15 bp, Homo sapiens
gcgaggggggcagta

SEQ ID NO: 38096 - DNA, 15 bp, Homo sapiens
ggcgaggggggcagt

SEQ ID NO: 38097 - DNA, 15 bp, Homo sapiens
gggcgaggggggcag

SEQ ID NO: 38098 - DNA, 15 bp, Homo sapiens
agggcgaggggggca

SEQ ID NO: 38099 - DNA, 15 bp, Homo sapiens
aagggcgaggggggc

SEQ ID NO: 38100 - DNA, 15 bp, Homo sapiens
caagggcgagggggg

SEQ ID NO: 38101 - DNA, 15 bp, Homo sapiens
ccaagggcgaggggg

SEQ ID NO: 38102 - DNA, 15 bp, Homo sapiens
gccaagggcgagggg

SEQ ID NO: 38103 - DNA, 15 bp, Homo sapiens
tgccaagggcgaggg

SEQ ID NO: 38104 - DNA, 15 bp, Homo sapiens
ttgccaagggcgagg

SEQ ID NO: 38105 - DNA, 15 bp, Homo sapiens
gttgccaagggcgag

SEQ ID NO: 38106 - DNA, 15 bp, Homo sapiens
agttgccaagggcga

SEQ ID NO: 38107 - DNA, 15 bp, Homo sapiens
tagttgccaagggcg

SEQ ID NO: 38108 - DNA, 15 bp, Homo sapiens
gtagttgccaagggc

SEQ ID NO: 38109 - DNA, 15 bp, Homo sapiens
agtagttgccaaggg

SEQ ID NO: 38110 - DNA, 15 bp, Homo sapiens
cagtagttgccaagg

SEQ ID NO: 38111 - DNA, 15 bp, Homo sapiens
acagtagttgccaag

SEQ ID NO: 38112 - DNA, 15 bp, Homo sapiens
aacagtagttgccaa

SEQ ID NO: 38113 - DNA, 15 bp, Homo sapiens
gaacagtagttgcca

SEQ ID NO: 38114 - DNA, 15 bp, Homo sapiens
agaacagtagttgcc

SEQ ID NO: 38115 - DNA, 15 bp, Homo sapiens
tagaacagtagttgc

SEQ ID NO: 38116 - DNA, 15 bp, Homo sapiens
gtagaacagtagttg

SEQ ID NO: 38117 - DNA, 15 bp, Homo sapiens
agtagaacagtagtt

SEQ ID NO: 38118 - DNA, 15 bp, Homo sapiens
aagtagaacagtagt

SEQ ID NO: 38119 - DNA, 15 bp, Homo sapiens
aaagtagaacagtag

SEQ ID NO: 38120 - DNA, 15 bp, Homo sapiens
gaaagtagaacagta

SEQ ID NO: 38121 - DNA, 15 bp, Homo sapiens
agaaagtagaacagt

SEQ ID NO: 38122 - DNA, 15 bp, Homo sapiens
cagaaagtagaacag

SEQ ID NO: 38123 - DNA, 15 bp, Homo sapiens
acagaaagtagaaca

SEQ ID NO: 38124 - DNA, 15 bp, Homo sapiens
gacagaaagtagaac

SEQ ID NO: 38125 - DNA, 15 bp, Homo sapiens
agacagaaagtagaa

SEQ ID NO: 38126 - DNA, 15 bp, Homo sapiens
gagacagaaagtaga

SEQ ID NO: 38127 - DNA, 15 bp, Homo sapiens
agagacagaaagtag

SEQ ID NO: 38128 - DNA, 15 bp, Homo sapiens
tagagacagaaagta

SEQ ID NO: 38129 - DNA, 15 bp, Homo sapiens
ttagagacagaaagt

SEQ ID NO: 38130 - DNA, 15 bp, Homo sapiens
cttagagacagaaag

SEQ ID NO: 38131 - DNA, 15 bp, Homo sapiens
ccttagagacagaaa

SEQ ID NO: 38132 - DNA, 15 bp, Homo sapiens
gccttagagacagaa

SEQ ID NO: 38133 - DNA, 15 bp, Homo sapiens
agccttagagacaga

SEQ ID NO: 38134 - DNA, 15 bp, Homo sapiens
gagccttagagacag

SEQ ID NO: 38135 - DNA, 15 bp, Homo sapiens
agagccttagagaca

SEQ ID NO: 38136 - DNA, 15 bp, Homo sapiens
cagagccttagagac

SEQ ID NO: 38137 - DNA, 15 bp, Homo sapiens
tcagagccttagaga

SEQ ID NO: 38138 - DNA, 15 bp, Homo sapiens
gtcagagccttagag

SEQ ID NO: 38139 - DNA, 15 bp, Homo sapiens
agtcagagccttaga

SEQ ID NO: 38140 - DNA, 15 bp, Homo sapiens
tagtcagagccttag

SEQ ID NO: 38141 - DNA, 15 bp, Homo sapiens
gtagtcagagcctta

SEQ ID NO: 38142 - DNA, 15 bp, Homo sapiens
agtagtcagagcctt

SEQ ID NO: 38143 - DNA, 15 bp, Homo sapiens
tagtagtcagagcct

SEQ ID NO: 38144 - DNA, 15 bp, Homo sapiens
atagtagtcagagcc

SEQ ID NO: 38145 - DNA, 15 bp, Homo sapiens
tatagtagtcagagc

SEQ ID NO: 38146 - DNA, 15 bp, Homo sapiens
ctatagtagtcagag

SEQ ID NO: 38147 - DNA, 15 bp, Homo sapiens
tctatagtagtcaga

SEQ ID NO: 38148 - DNA, 15 bp, Homo sapiens
atctatagtagtcag

SEQ ID NO: 38149 - DNA, 15 bp, Homo sapiens
tatctatagtagtca

SEQ ID NO: 38150 - DNA, 15 bp, Homo sapiens
gtatctatagtagtc

SEQ ID NO: 38151 - DNA, 15 bp, Homo sapiens
ggtatctatagtagt

SEQ ID NO: 38152 - DNA, 15 bp, Homo sapiens
aggtatctatagtag

SEQ ID NO: 38153 - DNA, 15 bp, Homo sapiens
gaggtatctatagta

SEQ ID NO: 38154 - DNA, 15 bp, Homo sapiens
tgaggtatctatagt

SEQ ID NO: 38155 - DNA, 15 bp, Homo sapiens
atgaggtatctatag

SEQ ID NO: 38156 - DNA, 15 bp, Homo sapiens
tatgaggtatctata

SEQ ID NO: 38157 - DNA, 15 bp, Homo sapiens
atatgaggtatctat

SEQ ID NO: 38158 - DNA, 15 bp, Homo sapiens
tatatgaggtatcta

SEQ ID NO: 38159 - DNA, 15 bp, Homo sapiens
ttatatgaggtatct

SEQ ID NO: 38160 - DNA, 15 bp, Homo sapiens
cttatatgaggtatc

SEQ ID NO: 38161 - DNA, 15 bp, Homo sapiens
acttatatgaggtat

SEQ ID NO: 38162 - DNA, 15 bp, Homo sapiens
cacttatatgaggta

SEQ ID NO: 38163 - DNA, 15 bp, Homo sapiens
ccacttatatgaggt

SEQ ID NO: 38164 - DNA, 15 bp, Homo sapiens
tccacttatatgagg

SEQ ID NO: 38165 - DNA, 15 bp, Homo sapiens
ttccacttatatgag

SEQ ID NO: 38166 - DNA, 15 bp, Homo sapiens
attccacttatatga

SEQ ID NO: 38167 - DNA, 15 bp, Homo sapiens
gattccacttatatg

SEQ ID NO: 38168 - DNA, 15 bp, Homo sapiens
tgattccacttatat

SEQ ID NO: 38169 - DNA, 15 bp, Homo sapiens
atgattccacttata

SEQ ID NO: 38170 - DNA, 15 bp, Homo sapiens
tatgattccacttat

SEQ ID NO: 38171 - DNA, 15 bp, Homo sapiens
gtatgattccactta

SEQ ID NO: 38172 - DNA, 15 bp, Homo sapiens
tgtatgattccactt

SEQ ID NO: 38173 - DNA, 15 bp, Homo sapiens
ctgtatgattccact

SEQ ID NO: 38174 - DNA, 15 bp, Homo sapiens
actgtatgattccac

SEQ ID NO: 38175 - DNA, 15 bp, Homo sapiens
cactgtatgattcca

SEQ ID NO: 38176 - DNA, 15 bp, Homo sapiens
acactgtatgattcc

SEQ ID NO: 38177 - DNA, 15 bp, Homo sapiens
aacactgtatgattc

SEQ ID NO: 38178 - DNA, 15 bp, Homo sapiens
aaacactgtatgatt

SEQ ID NO: 38179 - DNA, 15 bp, Homo sapiens
caaacactgtatgat

SEQ ID NO: 38180 - DNA, 15 bp, Homo sapiens
acaaacactgtatga

SEQ ID NO: 38181 - DNA, 15 bp, Homo sapiens
gacaaacactgtatg

SEQ ID NO: 38182 - DNA, 15 bp, Homo sapiens
ggacaaacactgtat

SEQ ID NO: 38183 - DNA, 15 bp, Homo sapiens
aggacaaacactgta

SEQ ID NO: 38184 - DNA, 15 bp, Homo sapiens
aaggacaaacactgt

SEQ ID NO: 38185 - DNA, 15 bp, Homo sapiens
aaaggacaaacactg

SEQ ID NO: 38186 - DNA, 15 bp, Homo sapiens
aaaaggacaaacact

SEQ ID NO: 38187 - DNA, 15 bp, Homo sapiens
caaaaggacaaacac

SEQ ID NO: 38188 - DNA, 15 bp, Homo sapiens
acaaaaggacaaaca

SEQ ID NO: 38189 - DNA, 15 bp, Homo sapiens
cacaaaaggacaaac

SEQ ID NO: 38190 - DNA, 15 bp, Homo sapiens
acacaaaaggacaaa

SEQ ID NO: 38191 - DNA, 15 bp, Homo sapiens
gacacaaaaggacaa

SEQ ID NO: 38192 - DNA, 15 bp, Homo sapiens
agacacaaaaggaca

SEQ ID NO: 38193 - DNA, 15 bp, Homo sapiens
cagacacaaaaggac

SEQ ID NO: 38194 - DNA, 15 bp, Homo sapiens
ccagacacaaaagga

SEQ ID NO: 38195 - DNA, 15 bp, Homo sapiens
gccagacacaaaagg

SEQ ID NO: 38196 - DNA, 15 bp, Homo sapiens
agccagacacaaaag

SEQ ID NO: 38197 - DNA, 15 bp, Homo sapiens
aagccagacacaaaa

SEQ ID NO: 38198 - DNA, 15 bp, Homo sapiens
taagccagacacaaa

SEQ ID NO: 38199 - DNA, 15 bp, Homo sapiens
ataagccagacacaa

SEQ ID NO: 38200 - DNA, 15 bp, Homo sapiens
aataagccagacaca

SEQ ID NO: 38201 - DNA, 15 bp, Homo sapiens
taataagccagacac

SEQ ID NO: 38202 - DNA, 15 bp, Homo sapiens
ataataagccagaca

SEQ ID NO: 38203 - DNA, 15 bp, Homo sapiens
cataataagccagac

SEQ ID NO: 38204 - DNA, 15 bp, Homo sapiens
gcataataagccaga

SEQ ID NO: 38205 - DNA, 15 bp, Homo sapiens
cgcataataagccag

SEQ ID NO: 38206 - DNA, 15 bp, Homo sapiens
tcgcataataagcca

SEQ ID NO: 38207 - DNA, 15 bp, Homo sapiens
ctcgcataataagcc

SEQ ID NO: 38208 - DNA, 15 bp, Homo sapiens
cctcgcataataagc

SEQ ID NO: 38209 - DNA, 15 bp, Homo sapiens
tcctcgcataataag

SEQ ID NO: 38210 - DNA, 15 bp, Homo sapiens
gtcctcgcataataa

SEQ ID NO: 38211 - DNA, 15 bp, Homo sapiens
agtcctcgcataata

SEQ ID NO: 38212 - DNA, 15 bp, Homo sapiens
aagtcctcgcataat

SEQ ID NO: 38213 - DNA, 15 bp, Homo sapiens
taagtcctcgcataa

SEQ ID NO: 38214 - DNA, 15 bp, Homo sapiens
ctaagtcctcgcata

SEQ ID NO: 38215 - DNA, 15 bp, Homo sapiens
gctaagtcctcgcat

SEQ ID NO: 38216 - DNA, 15 bp, Homo sapiens
tgctaagtcctcgca

SEQ ID NO: 38217 - DNA, 15 bp, Homo sapiens
atgctaagtcctcgc

SEQ ID NO: 38218 - DNA, 15 bp, Homo sapiens
tatgctaagtcctcg

SEQ ID NO: 38219 - DNA, 15 bp, Homo sapiens
ttatgctaagtcctc

SEQ ID NO: 38220 - DNA, 15 bp, Homo sapiens
attatgctaagtcct

SEQ ID NO: 38221 - DNA, 15 bp, Homo sapiens
cattatgctaagtcc

SEQ ID NO: 38222 - DNA, 15 bp, Homo sapiens
acattatgctaagtc

SEQ ID NO: 38223 - DNA, 15 bp, Homo sapiens
gacattatgctaagt

SEQ ID NO: 38224 - DNA, 15 bp, Homo sapiens
ggacattatgctaag

SEQ ID NO: 38225 - DNA, 15 bp, Homo sapiens
aggacattatgctaa

SEQ ID NO: 38226 - DNA, 15 bp, Homo sapiens
gaggacattatgcta

SEQ ID NO: 38227 - DNA, 15 bp, Homo sapiens
tgaggacattatgct

SEQ ID NO: 38228 - DNA, 15 bp, Homo sapiens
ttgaggacattatgc

SEQ ID NO: 38229 - DNA, 15 bp, Homo sapiens
cttgaggacattatg

SEQ ID NO: 38230 - DNA, 15 bp, Homo sapiens
ccttgaggacattat

SEQ ID NO: 38231 - DNA, 15 bp, Homo sapiens
accttgaggacatta

SEQ ID NO: 38232 - DNA, 15 bp, Homo sapiens
aaccttgaggacatt

SEQ ID NO: 38233 - DNA, 15 bp, Homo sapiens
gaaccttgaggacat

SEQ ID NO: 38234 - DNA, 15 bp, Homo sapiens
tgaaccttgaggaca

SEQ ID NO: 38235 - DNA, 15 bp, Homo sapiens
atgaaccttgaggac

SEQ ID NO: 38236 - DNA, 15 bp, Homo sapiens
gatgaaccttgagga

SEQ ID NO: 38237 - DNA, 15 bp, Homo sapiens
ggatgaaccttgagg

SEQ ID NO: 38238 - DNA, 15 bp, Homo sapiens
cggatgaaccttgag

SEQ ID NO: 38239 - DNA, 15 bp, Homo sapiens
acggatgaaccttga

SEQ ID NO: 38240 - DNA, 15 bp, Homo sapiens
cacggatgaaccttg

SEQ ID NO: 38241 - DNA, 15 bp, Homo sapiens
acacggatgaacctt

SEQ ID NO: 38242 - DNA, 15 bp, Homo sapiens
aacacggatgaacct

SEQ ID NO: 38243 - DNA, 15 bp, Homo sapiens
caacacggatgaacc

SEQ ID NO: 38244 - DNA, 15 bp, Homo sapiens
acaacacggatgaac

SEQ ID NO: 38245 - DNA, 15 bp, Homo sapiens
tacaacacggatgaa

SEQ ID NO: 38246 - DNA, 15 bp, Homo sapiens
atacaacacggatga

SEQ ID NO: 38247 - DNA, 15 bp, Homo sapiens
gatacaacacggatg

SEQ ID NO: 38248 - DNA, 15 bp, Homo sapiens
tgatacaacacggat

SEQ ID NO: 38249 - DNA, 15 bp, Homo sapiens
atgatacaacacgga

SEQ ID NO: 38250 - DNA, 15 bp, Homo sapiens
catgatacaacacgg

SEQ ID NO: 38251 - DNA, 15 bp, Homo sapiens
acatgatacaacacg

SEQ ID NO: 38252 - DNA, 15 bp, Homo sapiens
cacatgatacaacac

SEQ ID NO: 38253 - DNA, 15 bp, Homo sapiens
gcacatgatacaaca

SEQ ID NO: 38254 - DNA, 15 bp, Homo sapiens
ggcacatgatacaac

SEQ ID NO: 38255 - DNA, 15 bp, Homo sapiens
tggcacatgatacaa

SEQ ID NO: 38256 - DNA, 15 bp, Homo sapiens
ctggcacatgataca

SEQ ID NO: 38257 - DNA, 15 bp, Homo sapiens
tctggcacatgatac

SEQ ID NO: 38258 - DNA, 15 bp, Homo sapiens
ttctggcacatgata

SEQ ID NO: 38259 - DNA, 15 bp, Homo sapiens
attctggcacatgat

SEQ ID NO: 38260 - DNA, 15 bp, Homo sapiens
aattctggcacatga

SEQ ID NO: 38261 - DNA, 15 bp, Homo sapiens
aaattctggcacatg

SEQ ID NO: 38262 - DNA, 15 bp, Homo sapiens
gaaattctggcacat

SEQ ID NO: 38263 - DNA, 15 bp, Homo sapiens
ggaaattctggcaca

SEQ ID NO: 38264 - DNA, 15 bp, Homo sapiens
aggaaattctggcac

SEQ ID NO: 38265 - DNA, 15 bp, Homo sapiens
aaggaaattctggca

SEQ ID NO: 38266 - DNA, 15 bp, Homo sapiens
gaaggaaattctggc

SEQ ID NO: 38267 - DNA, 15 bp, Homo sapiens
ggaaggaaattctgg

SEQ ID NO: 38268 - DNA, 15 bp, Homo sapiens
aggaaggaaattctg

SEQ ID NO: 38269 - DNA, 15 bp, Homo sapiens
aaggaaggaaattct

SEQ ID NO: 38270 - DNA, 15 bp, Homo sapiens
aaaggaaggaaattc

SEQ ID NO: 38271 - DNA, 15 bp, Homo sapiens
aaaaggaaggaaatt

SEQ ID NO: 38272 - DNA, 15 bp, Homo sapiens
aaaaaggaaggaaat

SEQ ID NO: 38273 - DNA, 15 bp, Homo sapiens
gaaaaaggaaggaaa

SEQ ID NO: 38274 - DNA, 15 bp, Homo sapiens
ctgaaaaaggaagga

SEQ ID NO: 38275 - DNA, 15 bp, Homo sapiens
cctgaaaaaggaagg

SEQ ID NO: 38276 - DNA, 15 bp, Homo sapiens
gcctgaaaaaggaag

SEQ ID NO: 38277 - DNA, 15 bp, Homo sapiens
ggcctgaaaaaggaa

SEQ ID NO: 38278 - DNA, 15 bp, Homo sapiens
cggcctgaaaaagga

SEQ ID NO: 38279 - DNA, 15 bp, Homo sapiens
tcggcctgaaaaagg

SEQ ID NO: 38280 - DNA, 15 bp, Homo sapiens
ttcggcctgaaaaag

SEQ ID NO: 38281 - DNA, 15 bp, Homo sapiens
attcggcctgaaaaa

SEQ ID NO: 38282 - DNA, 15 bp, Homo sapiens
tattcggcctgaaaa

SEQ ID NO: 38283 - DNA, 15 bp, Homo sapiens
ttattcggcctgaaa

SEQ ID NO: 38284 - DNA, 15 bp, Homo sapiens
attattcggcctgaa

SEQ ID NO: 38285 - DNA, 15 bp, Homo sapiens
tattattcggcctga

SEQ ID NO: 38286 - DNA, 15 bp, Homo sapiens
atattattcggcctg

SEQ ID NO: 38287 - DNA, 15 bp, Homo sapiens
aatattattcggcct

SEQ ID NO: 38288 - DNA, 15 bp, Homo sapiens
gaatattattcggcc

SEQ ID NO: 38289 - DNA, 15 bp, Homo sapiens
ggaatattattcggc

SEQ ID NO: 38290 - DNA, 15 bp, Homo sapiens
aggaatattattcgg

SEQ ID NO: 38291 - DNA, 15 bp, Homo sapiens
aaggaatattattcg

SEQ ID NO: 38292 - DNA, 15 bp, Homo sapiens
aaaggaatattattc

SEQ ID NO: 38293 - DNA, 15 bp, Homo sapiens
caaaggaatattatt

SEQ ID NO: 38294 - DNA, 15 bp, Homo sapiens
acaaaggaatattat

SEQ ID NO: 38295 - DNA, 15 bp, Homo sapiens
tacaaaggaatatta

SEQ ID NO: 38296 - DNA, 15 bp, Homo sapiens
gtacaaaggaatatt

SEQ ID NO: 38297 - DNA, 15 bp, Homo sapiens
cgtacaaaggaatat

SEQ ID NO: 38298 - DNA, 15 bp, Homo sapiens
acgtacaaaggaata

SEQ ID NO: 38299 - DNA, 15 bp, Homo sapiens
tacgtacaaaggaat

SEQ ID NO: 38300 - DNA, 15 bp, Homo sapiens
atacgtacaaaggaa

SEQ ID NO: 38301 - DNA, 15 bp, Homo sapiens
tatacgtacaaagga

SEQ ID NO: 38302 - DNA, 15 bp, Homo sapiens
atatacgtacaaagg

SEQ ID NO: 38303 - DNA, 15 bp, Homo sapiens
catatacgtacaaag

SEQ ID NO: 38304 - DNA, 15 bp, Homo sapiens
acatatacgtacaaa

SEQ ID NO: 38305 - DNA, 15 bp, Homo sapiens
cacatatacgtacaa

SEQ ID NO: 38306 - DNA, 15 bp, Homo sapiens
gcacatatacgtaca

SEQ ID NO: 38307 - DNA, 15 bp, Homo sapiens
agcacatatacgtac

SEQ ID NO: 38308 - DNA, 15 bp, Homo sapiens
tagcacatatacgta

SEQ ID NO: 38309 - DNA, 15 bp, Homo sapiens
gtagcacatatacgt

SEQ ID NO: 38310 - DNA, 15 bp, Homo sapiens
tgtagcacatatacg

SEQ ID NO: 38311 - DNA, 15 bp, Homo sapiens
atgtagcacatatac

SEQ ID NO: 38312 - DNA, 15 bp, Homo sapiens
aatgtagcacatata

SEQ ID NO: 38313 - DNA, 15 bp, Homo sapiens
aaatgtagcacatat

SEQ ID NO: 38314 - DNA, 15 bp, Homo sapiens
aaaatgtagcacata

SEQ ID NO: 38315 - DNA, 15 bp, Homo sapiens
caaaatgtagcacat

SEQ ID NO: 38316 - DNA, 15 bp, Homo sapiens
acaaaatgtagcaca

SEQ ID NO: 38317 - DNA, 15 bp, Homo sapiens
aacaaaatgtagcac

SEQ ID NO: 38318 - DNA, 15 bp, Homo sapiens
gaacaaaatgtagca

SEQ ID NO: 38319 - DNA, 15 bp, Homo sapiens
tgaacaaaatgtagc

SEQ ID NO: 38320 - DNA, 15 bp, Homo sapiens
atgaacaaaatgtag

SEQ ID NO: 38321 - DNA, 15 bp, Homo sapiens
gatgaacaaaatgta

SEQ ID NO: 38322 - DNA, 15 bp, Homo sapiens
ggatgaacaaaatgt

SEQ ID NO: 38323 - DNA, 15 bp, Homo sapiens
tggatgaacaaaatg

SEQ ID NO: 38324 - DNA, 15 bp, Homo sapiens
atggatgaacaaaat

SEQ ID NO: 38325 - DNA, 15 bp, Homo sapiens
gatggatgaacaaaa

SEQ ID NO: 38326 - DNA, 15 bp, Homo sapiens
agatggatgaacaaa

SEQ ID NO: 38327 - DNA, 15 bp, Homo sapiens
tagatggatgaacaa

SEQ ID NO: 38328 - DNA, 15 bp, Homo sapiens
atagatggatgaaca

SEQ ID NO: 38329 - DNA, 15 bp, Homo sapiens
aatagatggatgaac

SEQ ID NO: 38330 - DNA, 15 bp, Homo sapiens
gaatagatggatgaa

SEQ ID NO: 38331 - DNA, 15 bp, Homo sapiens
tgaatagatggatga

SEQ ID NO: 38332 - DNA, 15 bp, Homo sapiens
atgaatagatggatg

SEQ ID NO: 38333 - DNA, 15 bp, Homo sapiens
aatgaatagatggat

SEQ ID NO: 38334 - DNA, 15 bp, Homo sapiens
gaatgaatagatgga

SEQ ID NO: 38335 - DNA, 15 bp, Homo sapiens
tgaatgaatagatgg

SEQ ID NO: 38336 - DNA, 15 bp, Homo sapiens
atgaatgaatagatg

SEQ ID NO: 38337 - DNA, 15 bp, Homo sapiens
aatgaatgaatagat

SEQ ID NO: 38338 - DNA, 15 bp, Homo sapiens
caatgaatgaataga

SEQ ID NO: 38339 - DNA, 15 bp, Homo sapiens
tcaatgaatgaatag

SEQ ID NO: 38340 - DNA, 15 bp, Homo sapiens
atcaatgaatgaata

SEQ ID NO: 38341 - DNA, 15 bp, Homo sapiens
tatcaatgaatgaat

SEQ ID NO: 38342 - DNA, 15 bp, Homo sapiens
ctatcaatgaatgaa

SEQ ID NO: 38343 - DNA, 15 bp, Homo sapiens
tctatcaatgaatga

SEQ ID NO: 38344 - DNA, 15 bp, Homo sapiens
gtctatcaatgaatg

SEQ ID NO: 38345 - DNA, 15 bp, Homo sapiens
tgtctatcaatgaat

SEQ ID NO: 38346 - DNA, 15 bp, Homo sapiens
atgtctatcaatgaa

SEQ ID NO: 38347 - DNA, 15 bp, Homo sapiens
aatgtctatcaatga

SEQ ID NO: 38348 - DNA, 15 bp, Homo sapiens
aaatgtctatcaatg

SEQ ID NO: 38349 - DNA, 15 bp, Homo sapiens
caaatgtctatcaat

SEQ ID NO: 38350 - DNA, 15 bp, Homo sapiens
ccaaatgtctatcaa

SEQ ID NO: 38351 - DNA, 15 bp, Homo sapiens
cccaaatgtctatca

SEQ ID NO: 38352 - DNA, 15 bp, Homo sapiens
acccaaatgtctatc

SEQ ID NO: 38353 - DNA, 15 bp, Homo sapiens
aacccaaatgtctat

SEQ ID NO: 38354 - DNA, 15 bp, Homo sapiens
caacccaaatgtcta

SEQ ID NO: 38355 - DNA, 15 bp, Homo sapiens
acaacccaaatgtct

SEQ ID NO: 38356 - DNA, 15 bp, Homo sapiens
aacaacccaaatgtc

SEQ ID NO: 38357 - DNA, 15 bp, Homo sapiens
aaacaacccaaatgt

SEQ ID NO: 38358 - DNA, 15 bp, Homo sapiens
gaaacaacccaaatg

SEQ ID NO: 38359 - DNA, 15 bp, Homo sapiens
agaaacaacccaaat

SEQ ID NO: 38360 - DNA, 15 bp, Homo sapiens
cagaaacaacccaaa

SEQ ID NO: 38361 - DNA, 15 bp, Homo sapiens
ccagaaacaacccaa

SEQ ID NO: 38362 - DNA, 15 bp, Homo sapiens
cccagaaacaaccca

SEQ ID NO: 38363 - DNA, 15 bp, Homo sapiens
acccagaaacaaccc

SEQ ID NO: 38364 - DNA, 15 bp, Homo sapiens
aacccagaaacaacc

SEQ ID NO: 38365 - DNA, 15 bp, Homo sapiens
aaacccagaaacaac

SEQ ID NO: 38366 - DNA, 15 bp, Homo sapiens
aaaacccagaaacaa

SEQ ID NO: 38367 - DNA, 15 bp, Homo sapiens
caaaacccagaaaca

SEQ ID NO: 38368 - DNA, 15 bp, Homo sapiens
acaaaacccagaaac

SEQ ID NO: 38369 - DNA, 15 bp, Homo sapiens
cacaaaacccagaaa

SEQ ID NO: 38370 - DNA, 15 bp, Homo sapiens
acacaaaacccagaa

SEQ ID NO: 38371 - DNA, 15 bp, Homo sapiens
aacacaaaacccaga

SEQ ID NO: 38372 - DNA, 15 bp, Homo sapiens
aaacacaaaacccag

SEQ ID NO: 38373 - DNA, 15 bp, Homo sapiens
aaaacacaaaaccca

SEQ ID NO: 38374 - DNA, 15 bp, Homo sapiens
aaaaacacaaaaccc

SEQ ID NO: 38375 - DNA, 15 bp, Homo sapiens
taaaaacacaaaacc

SEQ ID NO: 38376 - DNA, 15 bp, Homo sapiens
ataaaaacacaaaac

SEQ ID NO: 38377 - DNA, 15 bp, Homo sapiens
tataaaaacacaaaa

SEQ ID NO: 38378 - DNA, 15 bp, Homo sapiens
atataaaaacacaaa

SEQ ID NO: 38379 - DNA, 15 bp, Homo sapiens
tatataaaaacacaa

SEQ ID NO: 38380 - DNA, 15 bp, Homo sapiens
atatataaaaacaca

SEQ ID NO: 38381 - DNA, 15 bp, Homo sapiens
catatataaaaacac

SEQ ID NO: 38382 - DNA, 15 bp, Homo sapiens
acatatataaaaaca

SEQ ID NO: 38383 - DNA, 15 bp, Homo sapiens
aacatatataaaaac

SEQ ID NO: 38384 - DNA, 15 bp, Homo sapiens
aaacatatataaaaa

SEQ ID NO: 38385 - DNA, 15 bp, Homo sapiens
aaaacatatataaaa

SEQ ID NO: 38386 - DNA, 15 bp, Homo sapiens
aaaaacatatataaa

SEQ ID NO: 38387 - DNA, 15 bp, Homo sapiens
aaaaaacatatataa

SEQ ID NO: 38388 - DNA, 15 bp, Homo sapiens
aaaaaaacatatata

SEQ ID NO: 38389 - DNA, 15 bp, Homo sapiens
taaaaaaacatatat

SEQ ID NO: 38390 - DNA, 15 bp, Homo sapiens
ttaaaaaaacatata

SEQ ID NO: 38391 - DNA, 15 bp, Homo sapiens
tttaaaaaaacatat

SEQ ID NO: 38392 - DNA, 15 bp, Homo sapiens
ttttaaaaaaacata

SEQ ID NO: 38393 - DNA, 15 bp, Homo sapiens
tttttaaaaaaacat

SEQ ID NO: 38394 - DNA, 15 bp, Homo sapiens
atttttaaaaaaaca

SEQ ID NO: 38395 - DNA, 15 bp, Homo sapiens
tatttttaaaaaaac

SEQ ID NO: 38396 - DNA, 15 bp, Homo sapiens
ttatttttaaaaaaa

SEQ ID NO: 38397 - DNA, 15 bp, Homo sapiens
tttatttttaaaaaa

SEQ ID NO: 38398 - DNA, 15 bp, Homo sapiens
gtttatttttaaaaa

SEQ ID NO: 38399 - DNA, 15 bp, Homo sapiens
tgtttatttttaaaa

SEQ ID NO: 38400 - DNA, 15 bp, Homo sapiens
atgtttatttttaaa

SEQ ID NO: 38401 - DNA, 15 bp, Homo sapiens
gatgtttatttttaa

SEQ ID NO: 38402 - DNA, 15 bp, Homo sapiens
agatgtttattttta

SEQ ID NO: 38403 - DNA, 15 bp, Homo sapiens
aagatgtttattttt

SEQ ID NO: 38404 - DNA, 15 bp, Homo sapiens
aaagatgtttatttt

SEQ ID NO: 38405 - DNA, 15 bp, Homo sapiens
taaagatgtttattt

SEQ ID NO: 38406 - DNA, 15 bp, Homo sapiens
ctaaagatgtttatt

SEQ ID NO: 38407 - DNA, 15 bp, Homo sapiens
tctaaagatgtttat

SEQ ID NO: 38408 - DNA, 15 bp, Homo sapiens
ctctaaagatgttta

SEQ ID NO: 38409 - DNA, 15 bp, Homo sapiens
tctctaaagatgttt

SEQ ID NO: 38410 - DNA, 15 bp, Homo sapiens
gtctctaaagatgtt

SEQ ID NO: 38411 - DNA, 15 bp, Homo sapiens
tgtctctaaagatgt

SEQ ID NO: 38412 - DNA, 15 bp, Homo sapiens
ctgtctctaaagatg

SEQ ID NO: 38413 - DNA, 15 bp, Homo sapiens
actgtctctaaagat

SEQ ID NO: 38414 - DNA, 15 bp, Homo sapiens
aactgtctctaaaga

SEQ ID NO: 38415 - DNA, 15 bp, Homo sapiens
gaactgtctctaaag

SEQ ID NO: 38416 - DNA, 15 bp, Homo sapiens
tgaactgtctctaaa

SEQ ID NO: 38417 - DNA, 15 bp, Homo sapiens
ctgaactgtctctaa

SEQ ID NO: 38418 - DNA, 15 bp, Homo sapiens
actgaactgtctcta

SEQ ID NO: 38419 - DNA, 15 bp, Homo sapiens
tactgaactgtctct

SEQ ID NO: 38420 - DNA, 15 bp, Homo sapiens
ttactgaactgtctc

SEQ ID NO: 38421 - DNA, 15 bp, Homo sapiens
tttactgaactgtct

SEQ ID NO: 38422 - DNA, 15 bp, Homo sapiens
ctttactgaactgtc

SEQ ID NO: 38423 - DNA, 15 bp, Homo sapiens
gctttactgaactgt

SEQ ID NO: 38424 - DNA, 15 bp, Homo sapiens
tgctttactgaactg

SEQ ID NO: 38425 - DNA, 15 bp, Homo sapiens
ctgctttactgaact

SEQ ID NO: 38426 - DNA, 15 bp, Homo sapiens
actgctttactgaac

SEQ ID NO: 38427 - DNA, 15 bp, Homo sapiens
cactgctttactgaa

SEQ ID NO: 38428 - DNA, 15 bp, Homo sapiens
ccactgctttactga

SEQ ID NO: 38429 - DNA, 15 bp, Homo sapiens
tccactgctttactg

SEQ ID NO: 38430 - DNA, 15 bp, Homo sapiens
ttccactgctttact

SEQ ID NO: 38431 - DNA, 15 bp, Homo sapiens
tttccactgctttac

SEQ ID NO: 38432 - DNA, 15 bp, Homo sapiens
gtttccactgcttta

SEQ ID NO: 38433 - DNA, 15 bp, Homo sapiens
tgtttccactgcttt

SEQ ID NO: 38434 - DNA, 15 bp, Homo sapiens
ctgtttccactgctt

SEQ ID NO: 38435 - DNA, 15 bp, Homo sapiens
cctgtttccactgct

SEQ ID NO: 38436 - DNA, 15 bp, Homo sapiens
ccctgtttccactgc

SEQ ID NO: 38437 - DNA, 15 bp, Homo sapiens
tccctgtttccactg

SEQ ID NO: 38438 - DNA, 15 bp, Homo sapiens
ttccctgtttccact

SEQ ID NO: 38439 - DNA, 15 bp, Homo sapiens
cttccctgtttccac

SEQ ID NO: 38440 - DNA, 15 bp, Homo sapiens
acttccctgtttcca

SEQ ID NO: 38441 - DNA, 15 bp, Homo sapiens
gacttccctgtttcc

SEQ ID NO: 38442 - DNA, 15 bp, Homo sapiens
agacttccctgtttc

SEQ ID NO: 38443 - DNA, 15 bp, Homo sapiens
gagacttccctgttt

SEQ ID NO: 38444 - DNA, 15 bp, Homo sapiens
ggagacttccctgtt

SEQ ID NO: 38445 - DNA, 15 bp, Homo sapiens
tggagacttccctgt

SEQ ID NO: 38446 - DNA, 15 bp, Homo sapiens
atggagacttccctg

SEQ ID NO: 38447 - DNA, 15 bp, Homo sapiens
aatggagacttccct

SEQ ID NO: 38448 - DNA, 15 bp, Homo sapiens
aaatggagacttccc

SEQ ID NO: 38449 - DNA, 15 bp, Homo sapiens
taaatggagacttcc

SEQ ID NO: 38450 - DNA, 15 bp, Homo sapiens
ttaaatggagacttc

SEQ ID NO: 38451 - DNA, 15 bp, Homo sapiens
gttaaatggagactt

SEQ ID NO: 38452 - DNA, 15 bp, Homo sapiens
ggttaaatggagact

SEQ ID NO: 38453 - DNA, 15 bp, Homo sapiens
gggttaaatggagac

SEQ ID NO: 38454 - DNA, 15 bp, Homo sapiens
ggggttaaatggaga

SEQ ID NO: 38455 - DNA, 15 bp, Homo sapiens
aggggttaaatggag

SEQ ID NO: 38456 - DNA, 15 bp, Homo sapiens
caggggttaaatgga

SEQ ID NO: 38457 - DNA, 15 bp, Homo sapiens
tcaggggttaaatgg

SEQ ID NO: 38458 - DNA, 15 bp, Homo sapiens
ctcaggggttaaatg

SEQ ID NO: 38459 - DNA, 15 bp, Homo sapiens
cctcaggggttaaat

SEQ ID NO: 38460 - DNA, 15 bp, Homo sapiens
tcctcaggggttaaa

SEQ ID NO: 38461 - DNA, 15 bp, Homo sapiens
atcctcaggggttaa

SEQ ID NO: 38462 - DNA, 15 bp, Homo sapiens
gatcctcaggggtta

SEQ ID NO: 38463 - DNA, 15 bp, Homo sapiens
agatcctcaggggtt

SEQ ID NO: 38464 - DNA, 15 bp, Homo sapiens
cagatcctcaggggt

SEQ ID NO: 38465 - DNA, 15 bp, Homo sapiens
ccagatcctcagggg

SEQ ID NO: 38466 - DNA, 15 bp, Homo sapiens
gccagatcctcaggg

SEQ ID NO: 38467 - DNA, 15 bp, Homo sapiens
agccagatcctcagg

SEQ ID NO: 38468 - DNA, 15 bp, Homo sapiens
gagccagatcctcag

SEQ ID NO: 38469 - DNA, 15 bp, Homo sapiens
tgagccagatcctca

SEQ ID NO: 38470 - DNA, 15 bp, Homo sapiens
gtgagccagatcctc

SEQ ID NO: 38471 - DNA, 15 bp, Homo sapiens
ggtgagccagatcct

SEQ ID NO: 38472 - DNA, 15 bp, Homo sapiens
aggtgagccagatcc

SEQ ID NO: 38473 - DNA, 15 bp, Homo sapiens
caggtgagccagatc

SEQ ID NO: 38474 - DNA, 15 bp, Homo sapiens
gcaggtgagccagat

SEQ ID NO: 38475 - DNA, 15 bp, Homo sapiens
tgcaggtgagccaga

SEQ ID NO: 38476 - DNA, 15 bp, Homo sapiens
gtgcaggtgagccag

SEQ ID NO: 38477 - DNA, 15 bp, Homo sapiens
ggtgcaggtgagcca

SEQ ID NO: 38478 - DNA, 15 bp, Homo sapiens
aggtgcaggtgagcc

SEQ ID NO: 38479 - DNA, 15 bp, Homo sapiens
aaggtgcaggtgagc

SEQ ID NO: 38480 - DNA, 15 bp, Homo sapiens
gaaggtgcaggtgag

SEQ ID NO: 38481 - DNA, 15 bp, Homo sapiens
agaaggtgcaggtga

SEQ ID NO: 38482 - DNA, 15 bp, Homo sapiens
gagaaggtgcaggtg

SEQ ID NO: 38483 - DNA, 15 bp, Homo sapiens
tgagaaggtgcaggt

SEQ ID NO: 38484 - DNA, 15 bp, Homo sapiens
atgagaaggtgcagg

SEQ ID NO: 38485 - DNA, 15 bp, Homo sapiens
gatgagaaggtgcag

SEQ ID NO: 38486 - DNA, 15 bp, Homo sapiens
tgatgagaaggtgca

SEQ ID NO: 38487 - DNA, 15 bp, Homo sapiens
ctgatgagaaggtgc

SEQ ID NO: 38488 - DNA, 15 bp, Homo sapiens
gctgatgagaaggtg

SEQ ID NO: 38489 - DNA, 15 bp, Homo sapiens
tgctgatgagaaggt

SEQ ID NO: 38490 - DNA, 15 bp, Homo sapiens
atgctgatgagaagg

SEQ ID NO: 38491 - DNA, 15 bp, Homo sapiens
aatgctgatgagaag

SEQ ID NO: 38492 - DNA, 15 bp, Homo sapiens
taatgctgatgagaa

SEQ ID NO: 38493 - DNA, 15 bp, Homo sapiens
ttaatgctgatgaga

SEQ ID NO: 38494 - DNA, 15 bp, Homo sapiens
cttaatgctgatgag

SEQ ID NO: 38495 - DNA, 15 bp, Homo sapiens
gcttaatgctgatga

SEQ ID NO: 38496 - DNA, 15 bp, Homo sapiens
tgcttaatgctgatg

SEQ ID NO: 38497 - DNA, 15 bp, Homo sapiens
ctgcttaatgctgat

SEQ ID NO: 38498 - DNA, 15 bp, Homo sapiens
tctgcttaatgctga

SEQ ID NO: 38499 - DNA, 15 bp, Homo sapiens
ctctgcttaatgctg

SEQ ID NO: 38500 - DNA, 15 bp, Homo sapiens
cctctgcttaatgct

SEQ ID NO: 38501 - DNA, 15 bp, Homo sapiens
ccctctgcttaatgc

SEQ ID NO: 38502 - DNA, 15 bp, Homo sapiens
tccctctgcttaatg

SEQ ID NO: 38503 - DNA, 15 bp, Homo sapiens
ctccctctgcttaat

SEQ ID NO: 38504 - DNA, 15 bp, Homo sapiens
cctccctctgcttaa

SEQ ID NO: 38505 - DNA, 15 bp, Homo sapiens
gcctccctctgctta

SEQ ID NO: 38506 - DNA, 15 bp, Homo sapiens
tgcctccctctgctt

SEQ ID NO: 38507 - DNA, 15 bp, Homo sapiens
gtgcctccctctgct

SEQ ID NO: 38508 - DNA, 15 bp, Homo sapiens
cgtgcctccctctgc

SEQ ID NO: 38509 - DNA, 15 bp, Homo sapiens
tcgtgcctccctctg

SEQ ID NO: 38510 - DNA, 15 bp, Homo sapiens
ctcgtgcctccctct

SEQ ID NO: 38511 - DNA, 15 bp, Homo sapiens
gctcgtgcctccctc

SEQ ID NO: 38512 - DNA, 15 bp, Homo sapiens
tgctcgtgcctccct

SEQ ID NO: 38513 - DNA, 15 bp, Homo sapiens
ctgctcgtgcctccc

SEQ ID NO: 38514 - DNA, 15 bp, Homo sapiens
cctgctcgtgcctcc

SEQ ID NO: 38515 - DNA, 15 bp, Homo sapiens
tcctgctcgtgcctc

SEQ ID NO: 38516 - DNA, 15 bp, Homo sapiens
ctcctgctcgtgcct

SEQ ID NO: 38517 - DNA, 15 bp, Homo sapiens
gctcctgctcgtgcc

SEQ ID NO: 38518 - DNA, 15 bp, Homo sapiens
ggctcctgctcgtgc

SEQ ID NO: 38519 - DNA, 15 bp, Homo sapiens
tggctcctgctcgtg

SEQ ID NO: 38520 - DNA, 15 bp, Homo sapiens
gtggctcctgctcgt

SEQ ID NO: 38521 - DNA, 15 bp, Homo sapiens
ggtggctcctgctcg

SEQ ID NO: 38522 - DNA, 15 bp, Homo sapiens
aggtggctcctgctc

SEQ ID NO: 38523 - DNA, 15 bp, Homo sapiens
caggtggctcctgct

SEQ ID NO: 38524 - DNA, 15 bp, Homo sapiens
gcaggtggctcctgc

SEQ ID NO: 38525 - DNA, 15 bp, Homo sapiens
tgcaggtggctcctg

SEQ ID NO: 38526 - DNA, 15 bp, Homo sapiens
gtgcaggtggctcct

SEQ ID NO: 38527 - DNA, 15 bp, Homo sapiens
tgtgcaggtggctcc

SEQ ID NO: 38528 - DNA, 15 bp, Homo sapiens
gtgtgcaggtggctc

SEQ ID NO: 38529 - DNA, 15 bp, Homo sapiens
agtgtgcaggtggct

SEQ ID NO: 38530 - DNA, 15 bp, Homo sapiens
gagtgtgcaggtggc

SEQ ID NO: 38531 - DNA, 15 bp, Homo sapiens
tgagtgtgcaggtgg

SEQ ID NO: 38532 - DNA, 15 bp, Homo sapiens
ttgagtgtgcaggtg

SEQ ID NO: 38533 - DNA, 15 bp, Homo sapiens
attgagtgtgcaggt

SEQ ID NO: 38534 - DNA, 15 bp, Homo sapiens
cattgagtgtgcagg

SEQ ID NO: 38535 - DNA, 15 bp, Homo sapiens
tcattgagtgtgcag

SEQ ID NO: 38536 - DNA, 15 bp, Homo sapiens
ctcattgagtgtgca

SEQ ID NO: 38537 - DNA, 15 bp, Homo sapiens
cctcattgagtgtgc

SEQ ID NO: 38538 - DNA, 15 bp, Homo sapiens
tcctcattgagtgtg

SEQ ID NO: 38539 - DNA, 15 bp, Homo sapiens
ctcctcattgagtgt

SEQ ID NO: 38540 - DNA, 15 bp, Homo sapiens
gctcctcattgagtg

SEQ ID NO: 38541 - DNA, 15 bp, Homo sapiens
agctcctcattgagt

SEQ ID NO: 38542 - DNA, 15 bp, Homo sapiens
cagctcctcattgag

SEQ ID NO: 38543 - DNA, 15 bp, Homo sapiens
tcagctcctcattga

SEQ ID NO: 38544 - DNA, 15 bp, Homo sapiens
ttcagctcctcattg

SEQ ID NO: 38545 - DNA, 15 bp, Homo sapiens
gttcagctcctcatt

SEQ ID NO: 38546 - DNA, 15 bp, Homo sapiens
tgttcagctcctcat

SEQ ID NO: 38547 - DNA, 15 bp, Homo sapiens
ctgttcagctcctca

SEQ ID NO: 38548 - DNA, 15 bp, Homo sapiens
cctgttcagctcctc

SEQ ID NO: 38549 - DNA, 15 bp, Homo sapiens
ccctgttcagctcct

SEQ ID NO: 38550 - DNA, 15 bp, Homo sapiens
tccctgttcagctcc

SEQ ID NO: 38551 - DNA, 15 bp, Homo sapiens
atccctgttcagctc

SEQ ID NO: 38552 - DNA, 15 bp, Homo sapiens
gatccctgttcagct

SEQ ID NO: 38553 - DNA, 15 bp, Homo sapiens
tgatccctgttcagc

SEQ ID NO: 38554 - DNA, 15 bp, Homo sapiens
ttgatccctgttcag

SEQ ID NO: 38555 - DNA, 15 bp, Homo sapiens
attgatccctgttca

SEQ ID NO: 38556 - DNA, 15 bp, Homo sapiens
aattgatccctgttc

SEQ ID NO: 38557 - DNA, 15 bp, Homo sapiens
taattgatccctgtt

SEQ ID NO: 38558 - DNA, 15 bp, Homo sapiens
gtaattgatccctgt

SEQ ID NO: 38559 - DNA, 15 bp, Homo sapiens
ggtaattgatccctg

SEQ ID NO: 38560 - DNA, 15 bp, Homo sapiens
aggtaattgatccct

SEQ ID NO: 38561 - DNA, 15 bp, Homo sapiens
aaggtaattgatccc

SEQ ID NO: 38562 - DNA, 15 bp, Homo sapiens
aaaggtaattgatcc

SEQ ID NO: 38563 - DNA, 15 bp, Homo sapiens
aaaaggtaattgatc

SEQ ID NO: 38564 - DNA, 15 bp, Homo sapiens
aaaaaggtaattgat

SEQ ID NO: 38565 - DNA, 15 bp, Homo sapiens
aaaaaaggtaattga

SEQ ID NO: 38566 - DNA, 15 bp, Homo sapiens
aaaaaaaggtaattg

SEQ ID NO: 38567 - DNA, 15 bp, Homo sapiens
aaaaaaaaggtaatt

SEQ ID NO: 38568 - DNA, 15 bp, Homo sapiens
aaaaaaaaaggtaat

SEQ ID NO: 38569 - DNA, 15 bp, Homo sapiens
taaaaaaaaaggtaa

SEQ ID NO: 38570 - DNA, 15 bp, Homo sapiens
ctaaaaaaaaaggta

SEQ ID NO: 38571 - DNA, 15 bp, Homo sapiens
actaaaaaaaaaggt

SEQ ID NO: 38572 - DNA, 15 bp, Homo sapiens
aactaaaaaaaaagg

SEQ ID NO: 38573 - DNA, 15 bp, Homo sapiens
taactaaaaaaaaag

SEQ ID NO: 38574 - DNA, 15 bp, Homo sapiens
ataactaaaaaaaaa

SEQ ID NO: 38575 - DNA, 15 bp, Homo sapiens
aataactaaaaaaaa

SEQ ID NO: 38576 - DNA, 15 bp, Homo sapiens
taataactaaaaaaa

SEQ ID NO: 38577 - DNA, 15 bp, Homo sapiens
ctaataactaaaaaa

SEQ ID NO: 38578 - DNA, 15 bp, Homo sapiens
cctaataactaaaaa

SEQ ID NO: 38579 - DNA, 15 bp, Homo sapiens
tcctaataactaaaa

SEQ ID NO: 38580 - DNA, 15 bp, Homo sapiens
atcctaataactaaa

SEQ ID NO: 38581 - DNA, 15 bp, Homo sapiens
catcctaataactaa

SEQ ID NO: 38582 - DNA, 15 bp, Homo sapiens
gcatcctaataacta

SEQ ID NO: 38583 - DNA, 15 bp, Homo sapiens
agcatcctaataact

SEQ ID NO: 38584 - DNA, 15 bp, Homo sapiens
cagcatcctaataac

SEQ ID NO: 38585 - DNA, 15 bp, Homo sapiens
gcagcatcctaataa

SEQ ID NO: 38586 - DNA, 15 bp, Homo sapiens
agcagcatcctaata

SEQ ID NO: 38587 - DNA, 15 bp, Homo sapiens
tagcagcatcctaat

SEQ ID NO: 38588 - DNA, 15 bp, Homo sapiens
ctagcagcatcctaa

SEQ ID NO: 38589 - DNA, 15 bp, Homo sapiens
gctagcagcatccta

SEQ ID NO: 38590 - DNA, 15 bp, Homo sapiens
agctagcagcatcct

SEQ ID NO: 38591 - DNA, 15 bp, Homo sapiens
cagctagcagcatcc

SEQ ID NO: 38592 - DNA, 15 bp, Homo sapiens
tcagctagcagcatc

SEQ ID NO: 38593 - DNA, 15 bp, Homo sapiens
ctcagctagcagcat

SEQ ID NO: 38594 - DNA, 15 bp, Homo sapiens
tctcagctagcagca

SEQ ID NO: 38595 - DNA, 15 bp, Homo sapiens
ttctcagctagcagc

SEQ ID NO: 38596 - DNA, 15 bp, Homo sapiens
attctcagctagcag

SEQ ID NO: 38597 - DNA, 15 bp, Homo sapiens
gattctcagctagca

SEQ ID NO: 38598 - DNA, 15 bp, Homo sapiens
agattctcagctagc

SEQ ID NO: 38599 - DNA, 15 bp, Homo sapiens
cagattctcagctag

SEQ ID NO: 38600 - DNA, 15 bp, Homo sapiens
gcagattctcagcta

SEQ ID NO: 38601 - DNA, 15 bp, Homo sapiens
ggcagattctcagct

SEQ ID NO: 38602 - DNA, 15 bp, Homo sapiens
aggcagattctcagc

SEQ ID NO: 38603 - DNA, 15 bp, Homo sapiens
aaggcagattctcag

SEQ ID NO: 38604 - DNA, 15 bp, Homo sapiens
caaggcagattctca

SEQ ID NO: 38605 - DNA, 15 bp, Homo sapiens
gcaaggcagattctc

SEQ ID NO: 38606 - DNA, 15 bp, Homo sapiens
ggcaaggcagattct

SEQ ID NO: 38607 - DNA, 15 bp, Homo sapiens
aggcaaggcagattc

SEQ ID NO: 38608 - DNA, 15 bp, Homo sapiens
aaggcaaggcagatt

SEQ ID NO: 38609 - DNA, 15 bp, Homo sapiens
caaggcaaggcagat

SEQ ID NO: 38610 - DNA, 15 bp, Homo sapiens
tcaaggcaaggcaga

SEQ ID NO: 38611 - DNA, 15 bp, Homo sapiens
atcaaggcaaggcag

SEQ ID NO: 38612 - DNA, 15 bp, Homo sapiens
aatcaaggcaaggca

SEQ ID NO: 38613 - DNA, 15 bp, Homo sapiens
taatcaaggcaaggc

SEQ ID NO: 38614 - DNA, 15 bp, Homo sapiens
gtaatcaaggcaagg

SEQ ID NO: 38615 - DNA, 15 bp, Homo sapiens
ggtaatcaaggcaag

SEQ ID NO: 38616 - DNA, 15 bp, Homo sapiens
gggtaatcaaggcaa

SEQ ID NO: 38617 - DNA, 15 bp, Homo sapiens
ggggtaatcaaggca

SEQ ID NO: 38618 - DNA, 15 bp, Homo sapiens
tggggtaatcaaggc

SEQ ID NO: 38619 - DNA, 15 bp, Homo sapiens
ttggggtaatcaagg

SEQ ID NO: 38620 - DNA, 15 bp, Homo sapiens
attggggtaatcaag

SEQ ID NO: 38621 - DNA, 15 bp, Homo sapiens
cattggggtaatcaa

SEQ ID NO: 38622 - DNA, 15 bp, Homo sapiens
acattggggtaatca

SEQ ID NO: 38623 - DNA, 15 bp, Homo sapiens
gacattggggtaatc

SEQ ID NO: 38624 - DNA, 15 bp, Homo sapiens
agacattggggtaat

SEQ ID NO: 38625 - DNA, 15 bp, Homo sapiens
cagacattggggtaa

SEQ ID NO: 38626 - DNA, 15 bp, Homo sapiens
ccagacattggggta

SEQ ID NO: 38627 - DNA, 15 bp, Homo sapiens
accagacattggggt

SEQ ID NO: 38628 - DNA, 15 bp, Homo sapiens
caccagacattgggg

SEQ ID NO: 38629 - DNA, 15 bp, Homo sapiens
gcaccagacattggg

SEQ ID NO: 38630 - DNA, 15 bp, Homo sapiens
ggcaccagacattgg

SEQ ID NO: 38631 - DNA, 15 bp, Homo sapiens
gggcaccagacattg

SEQ ID NO: 38632 - DNA, 15 bp, Homo sapiens
tgggcaccagacatt

SEQ ID NO: 38633 - DNA, 15 bp, Homo sapiens
ttgggcaccagacat

SEQ ID NO: 38634 - DNA, 15 bp, Homo sapiens
cttgggcaccagaca

SEQ ID NO: 38635 - DNA, 15 bp, Homo sapiens
acttgggcaccagac

SEQ ID NO: 38636 - DNA, 15 bp, Homo sapiens
gacttgggcaccaga

SEQ ID NO: 38637 - DNA, 15 bp, Homo sapiens
ggacttgggcaccag

SEQ ID NO: 38638 - DNA, 15 bp, Homo sapiens
gggacttgggcacca

SEQ ID NO: 38639 - DNA, 15 bp, Homo sapiens
agggacttgggcacc

SEQ ID NO: 38640 - DNA, 15 bp, Homo sapiens
aagggacttgggcac

SEQ ID NO: 38641 - DNA, 15 bp, Homo sapiens
caagggacttgggca

SEQ ID NO: 38642 - DNA, 15 bp, Homo sapiens
tcaagggacttgggc

SEQ ID NO: 38643 - DNA, 15 bp, Homo sapiens
ctcaagggacttggg

SEQ ID NO: 38644 - DNA, 15 bp, Homo sapiens
actcaagggacttgg

SEQ ID NO: 38645 - DNA, 15 bp, Homo sapiens
gactcaagggacttg

SEQ ID NO: 38646 - DNA, 15 bp, Homo sapiens
ggactcaagggactt

SEQ ID NO: 38647 - DNA, 15 bp, Homo sapiens
aggactcaagggact

SEQ ID NO: 38648 - DNA, 15 bp, Homo sapiens
gaggactcaagggac

SEQ ID NO: 38649 - DNA, 15 bp, Homo sapiens
ggaggactcaaggga

SEQ ID NO: 38650 - DNA, 15 bp, Homo sapiens
tggaggactcaaggg

SEQ ID NO: 38651 - DNA, 15 bp, Homo sapiens
ctggaggactcaagg

SEQ ID NO: 38652 - DNA, 15 bp, Homo sapiens
gctggaggactcaag

SEQ ID NO: 38653 - DNA, 15 bp, Homo sapiens
tgctggaggactcaa

SEQ ID NO: 38654 - DNA, 15 bp, Homo sapiens
ctgctggaggactca

SEQ ID NO: 38655 - DNA, 15 bp, Homo sapiens
cctgctggaggactc

SEQ ID NO: 38656 - DNA, 15 bp, Homo sapiens
tcctgctggaggact

SEQ ID NO: 38657 - DNA, 15 bp, Homo sapiens
ttcctgctggaggac

SEQ ID NO: 38658 - DNA, 15 bp, Homo sapiens
gttcctgctggagga

SEQ ID NO: 38659 - DNA, 15 bp, Homo sapiens
agttcctgctggagg

SEQ ID NO: 38660 - DNA, 15 bp, Homo sapiens
gagttcctgctggag

SEQ ID NO: 38661 - DNA, 15 bp, Homo sapiens
ggagttcctgctgga

SEQ ID NO: 38662 - DNA, 15 bp, Homo sapiens
aggagttcctgctgg

SEQ ID NO: 38663 - DNA, 15 bp, Homo sapiens
caggagttcctgctg

SEQ ID NO: 38664 - DNA, 15 bp, Homo sapiens
acaggagttcctgct

SEQ ID NO: 38665 - DNA, 15 bp, Homo sapiens
cacaggagttcctgc

SEQ ID NO: 38666 - DNA, 15 bp, Homo sapiens
ccacaggagttcctg

SEQ ID NO: 38667 - DNA, 15 bp, Homo sapiens
gccacaggagttcct

SEQ ID NO: 38668 - DNA, 15 bp, Homo sapiens
tgccacaggagttcc

SEQ ID NO: 38669 - DNA, 15 bp, Homo sapiens
atgccacaggagttc

SEQ ID NO: 38670 - DNA, 15 bp, Homo sapiens
gatgccacaggagtt

SEQ ID NO: 38671 - DNA, 15 bp, Homo sapiens
tgatgccacaggagt

SEQ ID NO: 38672 - DNA, 15 bp, Homo sapiens
gtgatgccacaggag

SEQ ID NO: 38673 - DNA, 15 bp, Homo sapiens
agtgatgccacagga

SEQ ID NO: 38674 - DNA, 15 bp, Homo sapiens
gagtgatgccacagg

SEQ ID NO: 38675 - DNA, 15 bp, Homo sapiens
tgagtgatgccacag

SEQ ID NO: 38676 - DNA, 15 bp, Homo sapiens
ctgagtgatgccaca

SEQ ID NO: 38677 - DNA, 15 bp, Homo sapiens
cctgagtgatgccac

SEQ ID NO: 38678 - DNA, 15 bp, Homo sapiens
tcctgagtgatgcca

SEQ ID NO: 38679 - DNA, 15 bp, Homo sapiens
ctcctgagtgatgcc

SEQ ID NO: 38680 - DNA, 15 bp, Homo sapiens
actcctgagtgatgc

SEQ ID NO: 38681 - DNA, 15 bp, Homo sapiens
gactcctgagtgatg

SEQ ID NO: 38682 - DNA, 15 bp, Homo sapiens
agactcctgagtgat

SEQ ID NO: 38683 - DNA, 15 bp, Homo sapiens
tagactcctgagtga

SEQ ID NO: 38684 - DNA, 15 bp, Homo sapiens
ctagactcctgagtg

SEQ ID NO: 38685 - DNA, 15 bp, Homo sapiens
actagactcctgagt

SEQ ID NO: 38686 - DNA, 15 bp, Homo sapiens
gactagactcctgag

SEQ ID NO: 38687 - DNA, 15 bp, Homo sapiens
agactagactcctga

SEQ ID NO: 38688 - DNA, 15 bp, Homo sapiens
tagactagactcctg

SEQ ID NO: 38689 - DNA, 15 bp, Homo sapiens
ttagactagactcct

SEQ ID NO: 38690 - DNA, 15 bp, Homo sapiens
cttagactagactcc

SEQ ID NO: 38691 - DNA, 15 bp, Homo sapiens
tcttagactagactc

SEQ ID NO: 38692 - DNA, 15 bp, Homo sapiens
ttcttagactagact

SEQ ID NO: 38693 - DNA, 15 bp, Homo sapiens
cttcttagactagac

SEQ ID NO: 38694 - DNA, 15 bp, Homo sapiens
gcttcttagactaga

SEQ ID NO: 38695 - DNA, 15 bp, Homo sapiens
agcttcttagactag

SEQ ID NO: 38696 - DNA, 15 bp, Homo sapiens
tagcttcttagacta

SEQ ID NO: 38697 - DNA, 15 bp, Homo sapiens
ctagcttcttagact

SEQ ID NO: 38698 - DNA, 15 bp, Homo sapiens
gctagcttcttagac

SEQ ID NO: 38699 - DNA, 15 bp, Homo sapiens
agctagcttcttaga

SEQ ID NO: 38700 - DNA, 15 bp, Homo sapiens
gagctagcttcttag

SEQ ID NO: 38701 - DNA, 15 bp, Homo sapiens
agagctagcttctta

SEQ ID NO: 38702 - DNA, 15 bp, Homo sapiens
cagagctagcttctt

SEQ ID NO: 38703 - DNA, 15 bp, Homo sapiens
tcagagctagcttct

SEQ ID NO: 38704 - DNA, 15 bp, Homo sapiens
gtcagagctagcttc

SEQ ID NO: 38705 - DNA, 15 bp, Homo sapiens
ggtcagagctagctt

SEQ ID NO: 38706 - DNA, 15 bp, Homo sapiens
tggtcagagctagct

SEQ ID NO: 38707 - DNA, 15 bp, Homo sapiens
ctggtcagagctagc

SEQ ID NO: 38708 - DNA, 15 bp, Homo sapiens
cctggtcagagctag

SEQ ID NO: 38709 - DNA, 15 bp, Homo sapiens
ccctggtcagagcta

SEQ ID NO: 38710 - DNA, 15 bp, Homo sapiens
gccctggtcagagct

SEQ ID NO: 38711 - DNA, 15 bp, Homo sapiens
tgccctggtcagagc

SEQ ID NO: 38712 - DNA, 15 bp, Homo sapiens
ctgccctggtcagag

SEQ ID NO: 38713 - DNA, 15 bp, Homo sapiens
actgccctggtcaga

SEQ ID NO: 38714 - DNA, 15 bp, Homo sapiens
cactgccctggtcag

SEQ ID NO: 38715 - DNA, 15 bp, Homo sapiens
ccactgccctggtca

SEQ ID NO: 38716 - DNA, 15 bp, Homo sapiens
accactgccctggtc

SEQ ID NO: 38717 - DNA, 15 bp, Homo sapiens
caccactgccctggt

SEQ ID NO: 38718 - DNA, 15 bp, Homo sapiens
ccaccactgccctgg

SEQ ID NO: 38719 - DNA, 15 bp, Homo sapiens
gccaccactgccctg

SEQ ID NO: 38720 - DNA, 15 bp, Homo sapiens
ggccaccactgccct

SEQ ID NO: 38721 - DNA, 15 bp, Homo sapiens
tggccaccactgccc

SEQ ID NO: 38722 - DNA, 15 bp, Homo sapiens
ctggccaccactgcc

SEQ ID NO: 38723 - DNA, 15 bp, Homo sapiens
cctggccaccactgc

SEQ ID NO: 38724 - DNA, 15 bp, Homo sapiens
gcctggccaccactg

SEQ ID NO: 38725 - DNA, 15 bp, Homo sapiens
agcctggccaccact

SEQ ID NO: 38726 - DNA, 15 bp, Homo sapiens
aagcctggccaccac

SEQ ID NO: 38727 - DNA, 15 bp, Homo sapiens
gaagcctggccacca

SEQ ID NO: 38728 - DNA, 15 bp, Homo sapiens
agaagcctggccacc

SEQ ID NO: 38729 - DNA, 15 bp, Homo sapiens
cagaagcctggccac

SEQ ID NO: 38730 - DNA, 15 bp, Homo sapiens
acagaagcctggcca

SEQ ID NO: 38731 - DNA, 15 bp, Homo sapiens
cacagaagcctggcc

SEQ ID NO: 38732 - DNA, 15 bp, Homo sapiens
tcacagaagcctggc

SEQ ID NO: 38733 - DNA, 15 bp, Homo sapiens
ctcacagaagcctgg

SEQ ID NO: 38734 - DNA, 15 bp, Homo sapiens
actcacagaagcctg

SEQ ID NO: 38735 - DNA, 15 bp, Homo sapiens
cactcacagaagcct

SEQ ID NO: 38736 - DNA, 15 bp, Homo sapiens
ccactcacagaagcc

SEQ ID NO: 38737 - DNA, 15 bp, Homo sapiens
cccactcacagaagc

SEQ ID NO: 38738 - DNA, 15 bp, Homo sapiens
gcccactcacagaag

SEQ ID NO: 38739 - DNA, 15 bp, Homo sapiens
ggcccactcacagaa

SEQ ID NO: 38740 - DNA, 15 bp, Homo sapiens
tggcccactcacaga

SEQ ID NO: 38741 - DNA, 15 bp, Homo sapiens
ctggcccactcacag

SEQ ID NO: 38742 - DNA, 15 bp, Homo sapiens
gctggcccactcaca

SEQ ID NO: 38743 - DNA, 15 bp, Homo sapiens
ggctggcccactcac

SEQ ID NO: 38744 - DNA, 15 bp, Homo sapiens
aggctggcccactca

SEQ ID NO: 38745 - DNA, 15 bp, Homo sapiens
gaggctggcccactc

SEQ ID NO: 38746 - DNA, 15 bp, Homo sapiens
ggaggctggcccact

SEQ ID NO: 38747 - DNA, 15 bp, Homo sapiens
gggaggctggcccac

SEQ ID NO: 38748 - DNA, 15 bp, Homo sapiens
ggggaggctggccca

SEQ ID NO: 38749 - DNA, 15 bp, Homo sapiens
cgggggaggctggcc

SEQ ID NO: 38750 - DNA, 15 bp, Homo sapiens
ccgggggaggctggc

SEQ ID NO: 38751 - DNA, 15 bp, Homo sapiens
cccgggggaggctgg

SEQ ID NO: 38752 - DNA, 15 bp, Homo sapiens
acccgggggaggctg

SEQ ID NO: 38753 - DNA, 15 bp, Homo sapiens
tacccgggggaggct

SEQ ID NO: 38754 - DNA, 15 bp, Homo sapiens
ctacccgggggaggc

SEQ ID NO: 38755 - DNA, 15 bp, Homo sapiens
cctacccgggggagg

SEQ ID NO: 38756 - DNA, 15 bp, Homo sapiens
tcctacccgggggag

SEQ ID NO: 38757 - DNA, 15 bp, Homo sapiens
gtcctacccggggga

SEQ ID NO: 38758 - DNA, 15 bp, Homo sapiens
tgtcctacccggggg

SEQ ID NO: 38759 - DNA, 15 bp, Homo sapiens
gtgtcctacccgggg

SEQ ID NO: 38760 - DNA, 15 bp, Homo sapiens
tgtgtcctacccggg

SEQ ID NO: 38761 - DNA, 15 bp, Homo sapiens
ttgtgtcctacccgg

SEQ ID NO: 38762 - DNA, 15 bp, Homo sapiens
cttgtgtcctacccg

SEQ ID NO: 38763 - DNA, 15 bp, Homo sapiens
gcttgtgtcctaccc

SEQ ID NO: 38764 - DNA, 15 bp, Homo sapiens
ggcttgtgtcctacc

SEQ ID NO: 38765 - DNA, 15 bp, Homo sapiens
tggcttgtgtcctac

SEQ ID NO: 38766 - DNA, 15 bp, Homo sapiens
atggcttgtgtccta

SEQ ID NO: 38767 - DNA, 15 bp, Homo sapiens
tatggcttgtgtcct

SEQ ID NO: 38768 - DNA, 15 bp, Homo sapiens
gtatggcttgtgtcc

SEQ ID NO: 38769 - DNA, 15 bp, Homo sapiens
ggtatggcttgtgtc

SEQ ID NO: 38770 - DNA, 15 bp, Homo sapiens
tggtatggcttgtgt

SEQ ID NO: 38771 - DNA, 15 bp, Homo sapiens
ctggtatggcttgtg

SEQ ID NO: 38772 - DNA, 15 bp, Homo sapiens
gctggtatggcttgt

SEQ ID NO: 38773 - DNA, 15 bp, Homo sapiens
tgctggtatggcttg

SEQ ID NO: 38774 - DNA, 15 bp, Homo sapiens
ctgctggtatggctt

SEQ ID NO: 38775 - DNA, 15 bp, Homo sapiens
cctgctggtatggct

SEQ ID NO: 38776 - DNA, 15 bp, Homo sapiens
ccctgctggtatggc

SEQ ID NO: 38777 - DNA, 15 bp, Homo sapiens
gccctgctggtatgg

SEQ ID NO: 38778 - DNA, 15 bp, Homo sapiens
agccctgctggtatg

SEQ ID NO: 38779 - DNA, 15 bp, Homo sapiens
cagccctgctggtat

SEQ ID NO: 38780 - DNA, 15 bp, Homo sapiens
acagccctgctggta

SEQ ID NO: 38781 - DNA, 15 bp, Homo sapiens
tacagccctgctggt

SEQ ID NO: 38782 - DNA, 15 bp, Homo sapiens
atacagccctgctgg

SEQ ID NO: 38783 - DNA, 15 bp, Homo sapiens
catacagccctgctg

SEQ ID NO: 38784 - DNA, 15 bp, Homo sapiens
acatacagccctgct

SEQ ID NO: 38785 - DNA, 15 bp, Homo sapiens
cacatacagccctgc

SEQ ID NO: 38786 - DNA, 15 bp, Homo sapiens
tcacatacagccctg

SEQ ID NO: 38787 - DNA, 15 bp, Homo sapiens
ttcacatacagccct

SEQ ID NO: 38788 - DNA, 15 bp, Homo sapiens
gttcacatacagccc

SEQ ID NO: 38789 - DNA, 15 bp, Homo sapiens
agttcacatacagcc

SEQ ID NO: 38790 - DNA, 15 bp, Homo sapiens
cagttcacatacagc

SEQ ID NO: 38791 - DNA, 15 bp, Homo sapiens
acagttcacatacag

SEQ ID NO: 38792 - DNA, 15 bp, Homo sapiens
cacagttcacataca

SEQ ID NO: 38793 - DNA, 15 bp, Homo sapiens
ccacagttcacatac

SEQ ID NO: 38794 - DNA, 15 bp, Homo sapiens
tccacagttcacata

SEQ ID NO: 38795 - DNA, 15 bp, Homo sapiens
ttccacagttcacat

SEQ ID NO: 38796 - DNA, 15 bp, Homo sapiens
tttccacagttcaca

SEQ ID NO: 38797 - DNA, 15 bp, Homo sapiens
ttttccacagttcac

SEQ ID NO: 38798 - DNA, 15 bp, Homo sapiens
attttccacagttca

SEQ ID NO: 38799 - DNA, 15 bp, Homo sapiens
tattttccacagttc

SEQ ID NO: 38800 - DNA, 15 bp, Homo sapiens
ctattttccacagtt

SEQ ID NO: 38801 - DNA, 15 bp, Homo sapiens
tctattttccacagt

SEQ ID NO: 38802 - DNA, 15 bp, Homo sapiens
ctctattttccacag

SEQ ID NO: 38803 - DNA, 15 bp, Homo sapiens
tctctattttccaca

SEQ ID NO: 38804 - DNA, 15 bp, Homo sapiens
ctctctattttccac

SEQ ID NO: 38805 - DNA, 15 bp, Homo sapiens
gctctctattttcca

SEQ ID NO: 38806 - DNA, 15 bp, Homo sapiens
tgctctctattttcc

SEQ ID NO: 38807 - DNA, 15 bp, Homo sapiens
ttgctctctattttc

SEQ ID NO: 38808 - DNA, 15 bp, Homo sapiens
tttgctctctatttt

SEQ ID NO: 38809 - DNA, 15 bp, Homo sapiens
ctttgctctctattt

SEQ ID NO: 38810 - DNA, 15 bp, Homo sapiens
actttgctctctatt

SEQ ID NO: 38811 - DNA, 15 bp, Homo sapiens
cactttgctctctat

SEQ ID NO: 38812 - DNA, 15 bp, Homo sapiens
ccactttgctctcta

SEQ ID NO: 38813 - DNA, 15 bp, Homo sapiens
cccactttgctctct

SEQ ID NO: 38814 - DNA, 15 bp, Homo sapiens
acccactttgctctc

SEQ ID NO: 38815 - DNA, 15 bp, Homo sapiens
tacccactttgctct

SEQ ID NO: 38816 - DNA, 15 bp, Homo sapiens
ctacccactttgctc

SEQ ID NO: 38817 - DNA, 15 bp, Homo sapiens
cctacccactttgct

SEQ ID NO: 38818 - DNA, 15 bp, Homo sapiens
acctacccactttgc

SEQ ID NO: 38819 - DNA, 15 bp, Homo sapiens
cacctacccactttg

SEQ ID NO: 38820 - DNA, 15 bp, Homo sapiens
ccacctacccacttt

SEQ ID NO: 38821 - DNA, 15 bp, Homo sapiens
cccacctacccactt

SEQ ID NO: 38822 - DNA, 15 bp, Homo sapiens
acccacctacccact

SEQ ID NO: 38823 - DNA, 15 bp, Homo sapiens
cacccacctacccac

SEQ ID NO: 38824 - DNA, 15 bp, Homo sapiens
acacccacctaccca

SEQ ID NO: 38825 - DNA, 15 bp, Homo sapiens
tacacccacctaccc

SEQ ID NO: 38826 - DNA, 15 bp, Homo sapiens
ctacacccacctacc

SEQ ID NO: 38827 - DNA, 15 bp, Homo sapiens
cctacacccacctac

SEQ ID NO: 38828 - DNA, 15 bp, Homo sapiens
ccctacacccaccta

SEQ ID NO: 38829 - DNA, 15 bp, Homo sapiens
accctacacccacct

SEQ ID NO: 38830 - DNA, 15 bp, Homo sapiens
caccctacacccacc

SEQ ID NO: 38831 - DNA, 15 bp, Homo sapiens
gcaccctacacccac

SEQ ID NO: 38832 - DNA, 15 bp, Homo sapiens
agcaccctacaccca

SEQ ID NO: 38833 - DNA, 15 bp, Homo sapiens
cagcaccctacaccc

SEQ ID NO: 38834 - DNA, 15 bp, Homo sapiens
acagcaccctacacc

SEQ ID NO: 38835 - DNA, 15 bp, Homo sapiens
aacagcaccctacac

SEQ ID NO: 38836 - DNA, 15 bp, Homo sapiens
aaacagcaccctaca

SEQ ID NO: 38837 - DNA, 15 bp, Homo sapiens
aaaacagcaccctac

SEQ ID NO: 38838 - DNA, 15 bp, Homo sapiens
gaaaacagcacccta

SEQ ID NO: 38839 - DNA, 15 bp, Homo sapiens
ggaaaacagcaccct

SEQ ID NO: 38840 - DNA, 15 bp, Homo sapiens
aggaaaacagcaccc

SEQ ID NO: 38841 - DNA, 15 bp, Homo sapiens
caggaaaacagcacc

SEQ ID NO: 38842 - DNA, 15 bp, Homo sapiens
ccaggaaaacagcac

SEQ ID NO: 38843 - DNA, 15 bp, Homo sapiens
tccaggaaaacagca

SEQ ID NO: 38844 - DNA, 15 bp, Homo sapiens
ttccaggaaaacagc

SEQ ID NO: 38845 - DNA, 15 bp, Homo sapiens
tttccaggaaaacag

SEQ ID NO: 38846 - DNA, 15 bp, Homo sapiens
atttccaggaaaaca

SEQ ID NO: 38847 - DNA, 15 bp, Homo sapiens
tatttccaggaaaac

SEQ ID NO: 38848 - DNA, 15 bp, Homo sapiens
atatttccaggaaaa

SEQ ID NO: 38849 - DNA, 15 bp, Homo sapiens
gatatttccaggaaa

SEQ ID NO: 38850 - DNA, 15 bp, Homo sapiens
agatatttccaggaa

SEQ ID NO: 38851 - DNA, 15 bp, Homo sapiens
tagatatttccagga

SEQ ID NO: 38852 - DNA, 15 bp, Homo sapiens
gtagatatttccagg

SEQ ID NO: 38853 - DNA, 15 bp, Homo sapiens
ggtagatatttccag

SEQ ID NO: 38854 - DNA, 15 bp, Homo sapiens
aggtagatatttcca

SEQ ID NO: 38855 - DNA, 15 bp, Homo sapiens
taggtagatatttcc

SEQ ID NO: 38856 - DNA, 15 bp, Homo sapiens
ttaggtagatatttc

SEQ ID NO: 38857 - DNA, 15 bp, Homo sapiens
attaggtagatattt

SEQ ID NO: 38858 - DNA, 15 bp, Homo sapiens
gattaggtagatatt

SEQ ID NO: 38859 - DNA, 15 bp, Homo sapiens
agattaggtagatat

SEQ ID NO: 38860 - DNA, 15 bp, Homo sapiens
gagattaggtagata

SEQ ID NO: 38861 - DNA, 15 bp, Homo sapiens
cgagattaggtagat

SEQ ID NO: 38862 - DNA, 15 bp, Homo sapiens
gcgagattaggtaga

SEQ ID NO: 38863 - DNA, 15 bp, Homo sapiens
agcgagattaggtag

SEQ ID NO: 38864 - DNA, 15 bp, Homo sapiens
gagcgagattaggta

SEQ ID NO: 38865 - DNA, 15 bp, Homo sapiens
agagcgagattaggt

SEQ ID NO: 38866 - DNA, 15 bp, Homo sapiens
aagagcgagattagg

SEQ ID NO: 38867 - DNA, 15 bp, Homo sapiens
gaagagcgagattag

SEQ ID NO: 38868 - DNA, 15 bp, Homo sapiens
agaagagcgagatta

SEQ ID NO: 38869 - DNA, 15 bp, Homo sapiens
gagaagagcgagatt

SEQ ID NO: 38870 - DNA, 15 bp, Homo sapiens
agagaagagcgagat

SEQ ID NO: 38871 - DNA, 15 bp, Homo sapiens
aagagaagagcgaga

SEQ ID NO: 38872 - DNA, 15 bp, Homo sapiens
taagagaagagcgag

SEQ ID NO: 38873 - DNA, 15 bp, Homo sapiens
gtaagagaagagcga

SEQ ID NO: 38874 - DNA, 15 bp, Homo sapiens
ggtaagagaagagcg

SEQ ID NO: 38875 - DNA, 15 bp, Homo sapiens
aggtaagagaagagc

SEQ ID NO: 38876 - DNA, 15 bp, Homo sapiens
gaggtaagagaagag

SEQ ID NO: 38877 - DNA, 15 bp, Homo sapiens
agaggtaagagaaga

SEQ ID NO: 38878 - DNA, 15 bp, Homo sapiens
tagaggtaagagaag

SEQ ID NO: 38879 - DNA, 15 bp, Homo sapiens
ctagaggtaagagaa

SEQ ID NO: 38880 - DNA, 15 bp, Homo sapiens
cctagaggtaagaga

SEQ ID NO: 38881 - DNA, 15 bp, Homo sapiens
acctagaggtaagag

SEQ ID NO: 38882 - DNA, 15 bp, Homo sapiens
cacctagaggtaaga

SEQ ID NO: 38883 - DNA, 15 bp, Homo sapiens
acacctagaggtaag

SEQ ID NO: 38884 - DNA, 15 bp, Homo sapiens
aacacctagaggtaa

SEQ ID NO: 38885 - DNA, 15 bp, Homo sapiens
aaacacctagaggta

SEQ ID NO: 38886 - DNA, 15 bp, Homo sapiens
caaacacctagaggt

SEQ ID NO: 38887 - DNA, 15 bp, Homo sapiens
acaaacacctagagg

SEQ ID NO: 38888 - DNA, 15 bp, Homo sapiens
tacaaacacctagag

SEQ ID NO: 38889 - DNA, 15 bp, Homo sapiens
ttacaaacacctaga

SEQ ID NO: 38890 - DNA, 15 bp, Homo sapiens
tttacaaacacctag

SEQ ID NO: 38891 - DNA, 15 bp, Homo sapiens
atttacaaacaccta

SEQ ID NO: 38892 - DNA, 15 bp, Homo sapiens
aatttacaaacacct

SEQ ID NO: 38893 - DNA, 15 bp, Homo sapiens
aaatttacaaacacc

SEQ ID NO: 38894 - DNA, 15 bp, Homo sapiens
aaaatttacaaacac

SEQ ID NO: 38895 - DNA, 15 bp, Homo sapiens
caaaatttacaaaca

SEQ ID NO: 38896 - DNA, 15 bp, Homo sapiens
gcaaaatttacaaac

SEQ ID NO: 38897 - DNA, 15 bp, Homo sapiens
agcaaaatttacaaa

SEQ ID NO: 38898 - DNA, 15 bp, Homo sapiens
tagcaaaatttacaa

SEQ ID NO: 38899 - DNA, 15 bp, Homo sapiens
ttagcaaaatttaca

SEQ ID NO: 38900 - DNA, 15 bp, Homo sapiens
tttagcaaaatttac

SEQ ID NO: 38901 - DNA, 15 bp, Homo sapiens
gtttagcaaaattta

SEQ ID NO: 38902 - DNA, 15 bp, Homo sapiens
tgtttagcaaaattt

SEQ ID NO: 38903 - DNA, 15 bp, Homo sapiens
ctgtttagcaaaatt

SEQ ID NO: 38904 - DNA, 15 bp, Homo sapiens
gctgtttagcaaaat

SEQ ID NO: 38905 - DNA, 15 bp, Homo sapiens
tgctgtttagcaaaa

SEQ ID NO: 38906 - DNA, 15 bp, Homo sapiens
ctgctgtttagcaaa

SEQ ID NO: 38907 - DNA, 15 bp, Homo sapiens
tctgctgtttagcaa

SEQ ID NO: 38908 - DNA, 15 bp, Homo sapiens
gtctgctgtttagca

SEQ ID NO: 38909 - DNA, 15 bp, Homo sapiens
agtctgctgtttagc

SEQ ID NO: 38910 - DNA, 15 bp, Homo sapiens
cagtctgctgtttag

SEQ ID NO: 38911 - DNA, 15 bp, Homo sapiens
tcagtctgctgttta

SEQ ID NO: 38912 - DNA, 15 bp, Homo sapiens
ttcagtctgctgttt

SEQ ID NO: 38913 - DNA, 15 bp, Homo sapiens
tttcagtctgctgtt

SEQ ID NO: 38914 - DNA, 15 bp, Homo sapiens
ctttcagtctgctgt

SEQ ID NO: 38915 - DNA, 15 bp, Homo sapiens
actttcagtctgctg

SEQ ID NO: 38916 - DNA, 15 bp, Homo sapiens
gactttcagtctgct

SEQ ID NO: 38917 - DNA, 15 bp, Homo sapiens
tgactttcagtctgc

SEQ ID NO: 38918 - DNA, 15 bp, Homo sapiens
atgactttcagtctg

SEQ ID NO: 38919 - DNA, 15 bp, Homo sapiens
catgactttcagtct

SEQ ID NO: 38920 - DNA, 15 bp, Homo sapiens
tcatgactttcagtc

SEQ ID NO: 38921 - DNA, 15 bp, Homo sapiens
gtcatgactttcagt

SEQ ID NO: 38922 - DNA, 15 bp, Homo sapiens
ggtcatgactttcag

SEQ ID NO: 38923 - DNA, 15 bp, Homo sapiens
aggtcatgactttca

SEQ ID NO: 38924 - DNA, 15 bp, Homo sapiens
gaggtcatgactttc

SEQ ID NO: 38925 - DNA, 15 bp, Homo sapiens
ggaggtcatgacttt

SEQ ID NO: 38926 - DNA, 15 bp, Homo sapiens
gggaggtcatgactt

SEQ ID NO: 38927 - DNA, 15 bp, Homo sapiens
agggaggtcatgact

SEQ ID NO: 38928 - DNA, 15 bp, Homo sapiens
gagggaggtcatgac

SEQ ID NO: 38929 - DNA, 15 bp, Homo sapiens
agagggaggtcatga

SEQ ID NO: 38930 - DNA, 15 bp, Homo sapiens
cagagggaggtcatg

SEQ ID NO: 38931 - DNA, 15 bp, Homo sapiens
gcagagggaggtcat

SEQ ID NO: 38932 - DNA, 15 bp, Homo sapiens
tgcagagggaggtca

SEQ ID NO: 38933 - DNA, 15 bp, Homo sapiens
gtgcagagggaggtc

SEQ ID NO: 38934 - DNA, 15 bp, Homo sapiens
ggtgcagagggaggt

SEQ ID NO: 38935 - DNA, 15 bp, Homo sapiens
gggtgcagagggagg

SEQ ID NO: 38936 - DNA, 15 bp, Homo sapiens
agggtgcagagggag

SEQ ID NO: 38937 - DNA, 15 bp, Homo sapiens
gagggtgcagaggga

SEQ ID NO: 38938 - DNA, 15 bp, Homo sapiens
cgagggtgcagaggg

SEQ ID NO: 38939 - DNA, 15 bp, Homo sapiens
tcgagggtgcagagg

SEQ ID NO: 38940 - DNA, 15 bp, Homo sapiens
ctcgagggtgcagag

SEQ ID NO: 38941 - DNA, 15 bp, Homo sapiens
gctcgagggtgcaga

SEQ ID NO: 38942 - DNA, 15 bp, Homo sapiens
agctcgagggtgcag

SEQ ID NO: 38943 - DNA, 15 bp, Homo sapiens
cagctcgagggtgca

SEQ ID NO: 38944 - DNA, 15 bp, Homo sapiens
gcagctcgagggtgc

SEQ ID NO: 38945 - DNA, 15 bp, Homo sapiens
agcagctcgagggtg

SEQ ID NO: 38946 - DNA, 15 bp, Homo sapiens
cagcagctcgagggt

SEQ ID NO: 38947 - DNA, 15 bp, Homo sapiens
ccagcagctcgaggg

SEQ ID NO: 38948 - DNA, 15 bp, Homo sapiens
tccagcagctcgagg

SEQ ID NO: 38949 - DNA, 15 bp, Homo sapiens
ctccagcagctcgag

SEQ ID NO: 38950 - DNA, 15 bp, Homo sapiens
gctccagcagctcga

SEQ ID NO: 38951 - DNA, 15 bp, Homo sapiens
ggctccagcagctcg

SEQ ID NO: 38952 - DNA, 15 bp, Homo sapiens
tggctccagcagctc

SEQ ID NO: 38953 - DNA, 15 bp, Homo sapiens
ctggctccagcagct

SEQ ID NO: 38954 - DNA, 15 bp, Homo sapiens
actggctccagcagc

SEQ ID NO: 38955 - DNA, 15 bp, Homo sapiens
gactggctccagcag

SEQ ID NO: 38956 - DNA, 15 bp, Homo sapiens
cgactggctccagca

SEQ ID NO: 38957 - DNA, 15 bp, Homo sapiens
tcgactggctccagc

SEQ ID NO: 38958 - DNA, 15 bp, Homo sapiens
gtcgactggctccag

SEQ ID NO: 38959 - DNA, 15 bp, Homo sapiens
tgtcgactggctcca

SEQ ID NO: 38960 - DNA, 15 bp, Homo sapiens
ttgtcgactggctcc

SEQ ID NO: 38961 - DNA, 15 bp, Homo sapiens
cttgtcgactggctc

SEQ ID NO: 38962 - DNA, 15 bp, Homo sapiens
gcttgtcgactggct

SEQ ID NO: 38963 - DNA, 15 bp, Homo sapiens
ggcttgtcgactggc

SEQ ID NO: 38964 - DNA, 15 bp, Homo sapiens
gggcttgtcgactgg

SEQ ID NO: 38965 - DNA, 15 bp, Homo sapiens
tgggcttgtcgactg

SEQ ID NO: 38966 - DNA, 15 bp, Homo sapiens
ctgggcttgtcgact

SEQ ID NO: 38967 - DNA, 15 bp, Homo sapiens
cctgggcttgtcgac

SEQ ID NO: 38968 - DNA, 15 bp, Homo sapiens
acctgggcttgtcga

SEQ ID NO: 38969 - DNA, 15 bp, Homo sapiens
tacctgggcttgtcg

SEQ ID NO: 38970 - DNA, 15 bp, Homo sapiens
gtacctgggcttgtc

SEQ ID NO: 38971 - DNA, 15 bp, Homo sapiens
ggtacctgggcttgt

SEQ ID NO: 38972 - DNA, 15 bp, Homo sapiens
gggtacctgggcttg

SEQ ID NO: 38973 - DNA, 15 bp, Homo sapiens
ggggtacctgggctt

SEQ ID NO: 38974 - DNA, 15 bp, Homo sapiens
aggggtacctgggct

SEQ ID NO: 38975 - DNA, 15 bp, Homo sapiens
caggggtacctgggc

SEQ ID NO: 38976 - DNA, 15 bp, Homo sapiens
gcaggggtacctggg

SEQ ID NO: 38977 - DNA, 15 bp, Homo sapiens
agcaggggtacctgg

SEQ ID NO: 38978 - DNA, 15 bp, Homo sapiens
cagcaggggtacctg

SEQ ID NO: 38979 - DNA, 15 bp, Homo sapiens
gcagcaggggtacct

SEQ ID NO: 38980 - DNA, 15 bp, Homo sapiens
agcagcaggggtacc

SEQ ID NO: 38981 - DNA, 15 bp, Homo sapiens
aagcagcaggggtac

SEQ ID NO: 38982 - DNA, 15 bp, Homo sapiens
taagcagcaggggta

SEQ ID NO: 38983 - DNA, 15 bp, Homo sapiens
ataagcagcaggggt

SEQ ID NO: 38984 - DNA, 15 bp, Homo sapiens
cataagcagcagggg

SEQ ID NO: 38985 - DNA, 15 bp, Homo sapiens
gcataagcagcaggg

SEQ ID NO: 38986 - DNA, 15 bp, Homo sapiens
tgcataagcagcagg

SEQ ID NO: 38987 - DNA, 15 bp, Homo sapiens
ctgcataagcagcag

SEQ ID NO: 38988 - DNA, 15 bp, Homo sapiens
actgcataagcagca

SEQ ID NO: 38989 - DNA, 15 bp, Homo sapiens
gactgcataagcagc

SEQ ID NO: 38990 - DNA, 15 bp, Homo sapiens
ggactgcataagcag

SEQ ID NO: 38991 - DNA, 15 bp, Homo sapiens
tggactgcataagca

SEQ ID NO: 38992 - DNA, 15 bp, Homo sapiens
gtggactgcataagc

SEQ ID NO: 38993 - DNA, 15 bp, Homo sapiens
tgtggactgcataag

SEQ ID NO: 38994 - DNA, 15 bp, Homo sapiens
ctgtggactgcataa

SEQ ID NO: 38995 - DNA, 15 bp, Homo sapiens
gctgtggactgcata

SEQ ID NO: 38996 - DNA, 15 bp, Homo sapiens
agctgtggactgcat

SEQ ID NO: 38997 - DNA, 15 bp, Homo sapiens
aagctgtggactgca

SEQ ID NO: 38998 - DNA, 15 bp, Homo sapiens
caagctgtggactgc

SEQ ID NO: 38999 - DNA, 15 bp, Homo sapiens
tcaagctgtggactg

SEQ ID NO: 39000 - DNA, 15 bp, Homo sapiens
ctcaagctgtggact

SEQ ID NO: 39001 - DNA, 15 bp, Homo sapiens
cctcaagctgtggac

SEQ ID NO: 39002 - DNA, 15 bp, Homo sapiens
gcctcaagctgtgga

SEQ ID NO: 39003 - DNA, 15 bp, Homo sapiens
tgcctcaagctgtgg

SEQ ID NO: 39004 - DNA, 15 bp, Homo sapiens
ctgcctcaagctgtg

SEQ ID NO: 39005 - DNA, 15 bp, Homo sapiens
actgcctcaagctgt

SEQ ID NO: 39006 - DNA, 15 bp, Homo sapiens
aactgcctcaagctg

SEQ ID NO: 39007 - DNA, 15 bp, Homo sapiens
gaactgcctcaagct

SEQ ID NO: 39008 - DNA, 15 bp, Homo sapiens
ggaactgcctcaagc

SEQ ID NO: 39009 - DNA, 15 bp, Homo sapiens
aggaactgcctcaag

SEQ ID NO: 39010 - DNA, 15 bp, Homo sapiens
aaggaactgcctcaa

SEQ ID NO: 39011 - DNA, 15 bp, Homo sapiens
caaggaactgcctca

SEQ ID NO: 39012 - DNA, 15 bp, Homo sapiens
ccaaggaactgcctc

SEQ ID NO: 39013 - DNA, 15 bp, Homo sapiens
gccaaggaactgcct

SEQ ID NO: 39014 - DNA, 15 bp, Homo sapiens
agccaaggaactgcc

SEQ ID NO: 39015 - DNA, 15 bp, Homo sapiens
gagccaaggaactgc

SEQ ID NO: 39016 - DNA, 15 bp, Homo sapiens
tgagccaaggaactg

SEQ ID NO: 39017 - DNA, 15 bp, Homo sapiens
ctgagccaaggaact

SEQ ID NO: 39018 - DNA, 15 bp, Homo sapiens
tctgagccaaggaac

SEQ ID NO: 39019 - DNA, 15 bp, Homo sapiens
ctctgagccaaggaa

SEQ ID NO: 39020 - DNA, 15 bp, Homo sapiens
gctctgagccaagga

SEQ ID NO: 39021 - DNA, 15 bp, Homo sapiens
ggctctgagccaagg

SEQ ID NO: 39022 - DNA, 15 bp, Homo sapiens
gggctctgagccaag

SEQ ID NO: 39023 - DNA, 15 bp, Homo sapiens
tgggctctgagccaa

SEQ ID NO: 39024 - DNA, 15 bp, Homo sapiens
ctgggctctgagcca

SEQ ID NO: 39025 - DNA, 15 bp, Homo sapiens
gctgggctctgagcc

SEQ ID NO: 39026 - DNA, 15 bp, Homo sapiens
agctgggctctgagc

SEQ ID NO: 39027 - DNA, 15 bp, Homo sapiens
cagctgggctctgag

SEQ ID NO: 39028 - DNA, 15 bp, Homo sapiens
ccagctgggctctga

SEQ ID NO: 39029 - DNA, 15 bp, Homo sapiens
accagctgggctctg

SEQ ID NO: 39030 - DNA, 15 bp, Homo sapiens
aaccagctgggctct

SEQ ID NO: 39031 - DNA, 15 bp, Homo sapiens
gaaccagctgggctc

SEQ ID NO: 39032 - DNA, 15 bp, Homo sapiens
tgaaccagctgggct

SEQ ID NO: 39033 - DNA, 15 bp, Homo sapiens
gtgaaccagctgggc

SEQ ID NO: 39034 - DNA, 15 bp, Homo sapiens
agtgaaccagctggg

SEQ ID NO: 39035 - DNA, 15 bp, Homo sapiens
cagtgaaccagctgg

SEQ ID NO: 39036 - DNA, 15 bp, Homo sapiens
ccagtgaaccagctg

SEQ ID NO: 39037 - DNA, 15 bp, Homo sapiens
cccagtgaaccagct

SEQ ID NO: 39038 - DNA, 15 bp, Homo sapiens
gcccagtgaaccagc

SEQ ID NO: 39039 - DNA, 15 bp, Homo sapiens
agcccagtgaaccag

SEQ ID NO: 39040 - DNA, 15 bp, Homo sapiens
aagcccagtgaacca

SEQ ID NO: 39041 - DNA, 15 bp, Homo sapiens
caagcccagtgaacc

SEQ ID NO: 39042 - DNA, 15 bp, Homo sapiens
tcaagcccagtgaac

SEQ ID NO: 39043 - DNA, 15 bp, Homo sapiens
ctcaagcccagtgaa

SEQ ID NO: 39044 - DNA, 15 bp, Homo sapiens
actcaagcccagtga

SEQ ID NO: 39045 - DNA, 15 bp, Homo sapiens
aactcaagcccagtg

SEQ ID NO: 39046 - DNA, 15 bp, Homo sapiens
caactcaagcccagt

SEQ ID NO: 39047 - DNA, 15 bp, Homo sapiens
gcaactcaagcccag

SEQ ID NO: 39048 - DNA, 15 bp, Homo sapiens
agcaactcaagccca

SEQ ID NO: 39049 - DNA, 15 bp, Homo sapiens
gagcaactcaagccc

SEQ ID NO: 39050 - DNA, 15 bp, Homo sapiens
ggagcaactcaagcc

SEQ ID NO: 39051 - DNA, 15 bp, Homo sapiens
tggagcaactcaagc

SEQ ID NO: 39052 - DNA, 15 bp, Homo sapiens
ttggagcaactcaag

SEQ ID NO: 39053 - DNA, 15 bp, Homo sapiens
cttggagcaactcaa

SEQ ID NO: 39054 - DNA, 15 bp, Homo sapiens
ccttggagcaactca

SEQ ID NO: 39055 - DNA, 15 bp, Homo sapiens
gccttggagcaactc

SEQ ID NO: 39056 - DNA, 15 bp, Homo sapiens
agccttggagcaact

SEQ ID NO: 39057 - DNA, 15 bp, Homo sapiens
gagccttggagcaac

SEQ ID NO: 39058 - DNA, 15 bp, Homo sapiens
tgagccttggagcaa

SEQ ID NO: 39059 - DNA, 15 bp, Homo sapiens
ctgagccttggagca

SEQ ID NO: 39060 - DNA, 15 bp, Homo sapiens
tctgagccttggagc

SEQ ID NO: 39061 - DNA, 15 bp, Homo sapiens
atctgagccttggag

SEQ ID NO: 39062 - DNA, 15 bp, Homo sapiens
tatctgagccttgga

SEQ ID NO: 39063 - DNA, 15 bp, Homo sapiens
atatctgagccttgg

SEQ ID NO: 39064 - DNA, 15 bp, Homo sapiens
catatctgagccttg

SEQ ID NO: 39065 - DNA, 15 bp, Homo sapiens
gcatatctgagcctt

SEQ ID NO: 39066 - DNA, 15 bp, Homo sapiens
ggcatatctgagcct

SEQ ID NO: 39067 - DNA, 15 bp, Homo sapiens
aggcatatctgagcc

SEQ ID NO: 39068 - DNA, 15 bp, Homo sapiens
gaggcatatctgagc

SEQ ID NO: 39069 - DNA, 15 bp, Homo sapiens
ggaggcatatctgag

SEQ ID NO: 39070 - DNA, 15 bp, Homo sapiens
aggaggcatatctga

SEQ ID NO: 39071 - DNA, 15 bp, Homo sapiens
taggaggcatatctg

SEQ ID NO: 39072 - DNA, 15 bp, Homo sapiens
gtaggaggcatatct

SEQ ID NO: 39073 - DNA, 15 bp, Homo sapiens
tgtaggaggcatatc

SEQ ID NO: 39074 - DNA, 15 bp, Homo sapiens
ctgtaggaggcatat

SEQ ID NO: 39075 - DNA, 15 bp, Homo sapiens
tctgtaggaggcata

SEQ ID NO: 39076 - DNA, 15 bp, Homo sapiens
ctctgtaggaggcat

SEQ ID NO: 39077 - DNA, 15 bp, Homo sapiens
tctctgtaggaggca

SEQ ID NO: 39078 - DNA, 15 bp, Homo sapiens
ctctctgtaggaggc

SEQ ID NO: 39079 - DNA, 15 bp, Homo sapiens
gctctctgtaggagg

SEQ ID NO: 39080 - DNA, 15 bp, Homo sapiens
ggctctctgtaggag

SEQ ID NO: 39081 - DNA, 15 bp, Homo sapiens
gggctctctgtagga

SEQ ID NO: 39082 - DNA, 15 bp, Homo sapiens
ggggctctctgtagg

SEQ ID NO: 39083 - DNA, 15 bp, Homo sapiens
tggggctctctgtag

SEQ ID NO: 39084 - DNA, 15 bp, Homo sapiens
gtggggctctctgta

SEQ ID NO: 39085 - DNA, 15 bp, Homo sapiens
ggtggggctctctgt

SEQ ID NO: 39086 - DNA, 15 bp, Homo sapiens
gggtggggctctctg

SEQ ID NO: 39087 - DNA, 15 bp, Homo sapiens
tgggtggggctctct

SEQ ID NO: 39088 - DNA, 15 bp, Homo sapiens
gtgggtggggctctc

SEQ ID NO: 39089 - DNA, 15 bp, Homo sapiens
tgtgggtggggctct

SEQ ID NO: 39090 - DNA, 15 bp, Homo sapiens
gtgtgggtggggctc

SEQ ID NO: 39091 - DNA, 15 bp, Homo sapiens
ggtgtgggtggggct

SEQ ID NO: 39092 - DNA, 15 bp, Homo sapiens
tggtgtgggtggggc

SEQ ID NO: 39093 - DNA, 15 bp, Homo sapiens
gtggtgtgggtgggg

SEQ ID NO: 39094 - DNA, 15 bp, Homo sapiens
cgtggtgtgggtggg

SEQ ID NO: 39095 - DNA, 15 bp, Homo sapiens
ccgtggtgtgggtgg

SEQ ID NO: 39096 - DNA, 15 bp, Homo sapiens
accgtggtgtgggtg

SEQ ID NO: 39097 - DNA, 15 bp, Homo sapiens
gaccgtggtgtgggt

SEQ ID NO: 39098 - DNA, 15 bp, Homo sapiens
ggaccgtggtgtggg

SEQ ID NO: 39099 - DNA, 15 bp, Homo sapiens
gggaccgtggtgtgg

SEQ ID NO: 39100 - DNA, 15 bp, Homo sapiens
agggaccgtggtgtg

SEQ ID NO: 39101 - DNA, 15 bp, Homo sapiens
tagggaccgtggtgt

SEQ ID NO: 39102 - DNA, 15 bp, Homo sapiens
gtagggaccgtggtg

SEQ ID NO: 39103 - DNA, 15 bp, Homo sapiens
ggtagggaccgtggt

SEQ ID NO: 39104 - DNA, 15 bp, Homo sapiens
tggtagggaccgtgg

SEQ ID NO: 39105 - DNA, 15 bp, Homo sapiens
ttggtagggaccgtg

SEQ ID NO: 39106 - DNA, 15 bp, Homo sapiens
cttggtagggaccgt

SEQ ID NO: 39107 - DNA, 15 bp, Homo sapiens
acttggtagggaccg

SEQ ID NO: 39108 - DNA, 15 bp, Homo sapiens
gacttggtagggacc

SEQ ID NO: 39109 - DNA, 15 bp, Homo sapiens
ggacttggtagggac

SEQ ID NO: 39110 - DNA, 15 bp, Homo sapiens
gggacttggtaggga

SEQ ID NO: 39111 - DNA, 15 bp, Homo sapiens
ggggacttggtaggg

SEQ ID NO: 39112 - DNA, 15 bp, Homo sapiens
tggggacttggtagg

SEQ ID NO: 39113 - DNA, 15 bp, Homo sapiens
gtggggacttggtag

SEQ ID NO: 39114 - DNA, 15 bp, Homo sapiens
ggtggggacttggta

SEQ ID NO: 39115 - DNA, 15 bp, Homo sapiens
tggtggggacttggt

SEQ ID NO: 39116 - DNA, 15 bp, Homo sapiens
gtggtggggacttgg

SEQ ID NO: 39117 - DNA, 15 bp, Homo sapiens
tgtggtggggacttg

SEQ ID NO: 39118 - DNA, 15 bp, Homo sapiens
atgtggtggggactt

SEQ ID NO: 39119 - DNA, 15 bp, Homo sapiens
gatgtggtggggact

SEQ ID NO: 39120 - DNA, 15 bp, Homo sapiens
ggatgtggtggggac

SEQ ID NO: 39121 - DNA, 15 bp, Homo sapiens
aggatgtggtgggga

SEQ ID NO: 39122 - DNA, 15 bp, Homo sapiens
gaggatgtggtgggg

SEQ ID NO: 39123 - DNA, 15 bp, Homo sapiens
tgaggatgtggtggg

SEQ ID NO: 39124 - DNA, 15 bp, Homo sapiens
atgaggatgtggtgg

SEQ ID NO: 39125 - DNA, 15 bp, Homo sapiens
gatgaggatgtggtg

SEQ ID NO: 39126 - DNA, 15 bp, Homo sapiens
tgatgaggatgtggt

SEQ ID NO: 39127 - DNA, 15 bp, Homo sapiens
gtgatgaggatgtgg

SEQ ID NO: 39128 - DNA, 15 bp, Homo sapiens
tgtgatgaggatgtg

SEQ ID NO: 39129 - DNA, 15 bp, Homo sapiens
atgtgatgaggatgt

SEQ ID NO: 39130 - DNA, 15 bp, Homo sapiens
gatgtgatgaggatg

SEQ ID NO: 39131 - DNA, 15 bp, Homo sapiens
ggatgtgatgaggat

SEQ ID NO: 39132 - DNA, 15 bp, Homo sapiens
aggatgtgatgagga

SEQ ID NO: 39133 - DNA, 15 bp, Homo sapiens
aaggatgtgatgagg

SEQ ID NO: 39134 - DNA, 15 bp, Homo sapiens
caaggatgtgatgag

SEQ ID NO: 39135 - DNA, 15 bp, Homo sapiens
gcaaggatgtgatga

SEQ ID NO: 39136 - DNA, 15 bp, Homo sapiens
agcaaggatgtgatg

SEQ ID NO: 39137 - DNA, 15 bp, Homo sapiens
tagcaaggatgtgat

SEQ ID NO: 39138 - DNA, 15 bp, Homo sapiens
ttagcaaggatgtga

SEQ ID NO: 39139 - DNA, 15 bp, Homo sapiens
cttagcaaggatgtg

SEQ ID NO: 39140 - DNA, 15 bp, Homo sapiens
acttagcaaggatgt

SEQ ID NO: 39141 - DNA, 15 bp, Homo sapiens
gacttagcaaggatg

SEQ ID NO: 39142 - DNA, 15 bp, Homo sapiens
ggacttagcaaggat

SEQ ID NO: 39143 - DNA, 15 bp, Homo sapiens
gggacttagcaagga

SEQ ID NO: 39144 - DNA, 15 bp, Homo sapiens
agggacttagcaagg

SEQ ID NO: 39145 - DNA, 15 bp, Homo sapiens
cagggacttagcaag

SEQ ID NO: 39146 - DNA, 15 bp, Homo sapiens
gcagggacttagcaa

SEQ ID NO: 39147 - DNA, 15 bp, Homo sapiens
ggcagggacttagca

SEQ ID NO: 39148 - DNA, 15 bp, Homo sapiens
tggcagggacttagc

SEQ ID NO: 39149 - DNA, 15 bp, Homo sapiens
gtggcagggacttag

SEQ ID NO: 39150 - DNA, 15 bp, Homo sapiens
agtggcagggactta

SEQ ID NO: 39151 - DNA, 15 bp, Homo sapiens
cagtggcagggactt

SEQ ID NO: 39152 - DNA, 15 bp, Homo sapiens
acagtggcagggact

SEQ ID NO: 39153 - DNA, 15 bp, Homo sapiens
cacagtggcagggac

SEQ ID NO: 39154 - DNA, 15 bp, Homo sapiens
acacagtggcaggga

SEQ ID NO: 39155 - DNA, 15 bp, Homo sapiens
cacacagtggcaggg

SEQ ID NO: 39156 - DNA, 15 bp, Homo sapiens
acacacagtggcagg

SEQ ID NO: 39157 - DNA, 15 bp, Homo sapiens
aacacacagtggcag

SEQ ID NO: 39158 - DNA, 15 bp, Homo sapiens
gaacacacagtggca

SEQ ID NO: 39159 - DNA, 15 bp, Homo sapiens
agaacacacagtggc

SEQ ID NO: 39160 - DNA, 15 bp, Homo sapiens
cagaacacacagtgg

SEQ ID NO: 39161 - DNA, 15 bp, Homo sapiens
acagaacacacagtg

SEQ ID NO: 39162 - DNA, 15 bp, Homo sapiens
cacagaacacacagt

SEQ ID NO: 39163 - DNA, 15 bp, Homo sapiens
gcacagaacacacag

SEQ ID NO: 39164 - DNA, 15 bp, Homo sapiens
agcacagaacacaca

SEQ ID NO: 39165 - DNA, 15 bp, Homo sapiens
cagcacagaacacac

SEQ ID NO: 39166 - DNA, 15 bp, Homo sapiens
tcagcacagaacaca

SEQ ID NO: 39167 - DNA, 15 bp, Homo sapiens
ttcagcacagaacac

SEQ ID NO: 39168 - DNA, 15 bp, Homo sapiens
cttcagcacagaaca

SEQ ID NO: 39169 - DNA, 15 bp, Homo sapiens
tcttcagcacagaac

SEQ ID NO: 39170 - DNA, 15 bp, Homo sapiens
ttcttcagcacagaa

SEQ ID NO: 39171 - DNA, 15 bp, Homo sapiens
gttcttcagcacaga

SEQ ID NO: 39172 - DNA, 15 bp, Homo sapiens
agttcttcagcacag

SEQ ID NO: 39173 - DNA, 15 bp, Homo sapiens
aagttcttcagcaca

SEQ ID NO: 39174 - DNA, 15 bp, Homo sapiens
aaagttcttcagcac

SEQ ID NO: 39175 - DNA, 15 bp, Homo sapiens
aaaagttcttcagca

SEQ ID NO: 39176 - DNA, 15 bp, Homo sapiens
gaaaagttcttcagc

SEQ ID NO: 39177 - DNA, 15 bp, Homo sapiens
tgaaaagttcttcag

SEQ ID NO: 39178 - DNA, 15 bp, Homo sapiens
atgaaaagttcttca

SEQ ID NO: 39179 - DNA, 15 bp, Homo sapiens
aatgaaaagttcttc

SEQ ID NO: 39180 - DNA, 15 bp, Homo sapiens
gaatgaaaagttctt

SEQ ID NO: 39181 - DNA, 15 bp, Homo sapiens
tgaatgaaaagttct

SEQ ID NO: 39182 - DNA, 15 bp, Homo sapiens
ctgaatgaaaagttc

SEQ ID NO: 39183 - DNA, 15 bp, Homo sapiens
actgaatgaaaagtt

SEQ ID NO: 39184 - DNA, 15 bp, Homo sapiens
tactgaatgaaaagt

SEQ ID NO: 39185 - DNA, 15 bp, Homo sapiens
ctactgaatgaaaag

SEQ ID NO: 39186 - DNA, 15 bp, Homo sapiens
actactgaatgaaaa

SEQ ID NO: 39187 - DNA, 15 bp, Homo sapiens
aactactgaatgaaa

SEQ ID NO: 39188 - DNA, 15 bp, Homo sapiens
caactactgaatgaa

SEQ ID NO: 39189 - DNA, 15 bp, Homo sapiens
acaactactgaatga

SEQ ID NO: 39190 - DNA, 15 bp, Homo sapiens
tacaactactgaatg

SEQ ID NO: 39191 - DNA, 15 bp, Homo sapiens
ctacaactactgaat

SEQ ID NO: 39192 - DNA, 15 bp, Homo sapiens
cctacaactactgaa

SEQ ID NO: 39193 - DNA, 15 bp, Homo sapiens
ccctacaactactga

SEQ ID NO: 39194 - DNA, 15 bp, Homo sapiens
cccctacaactactg

SEQ ID NO: 39195 - DNA, 15 bp, Homo sapiens
acccctacaactact

SEQ ID NO: 39196 - DNA, 15 bp, Homo sapiens
aacccctacaactac

SEQ ID NO: 39197 - DNA, 15 bp, Homo sapiens
gaacccctacaacta

SEQ ID NO: 39198 - DNA, 15 bp, Homo sapiens
ggaacccctacaact

SEQ ID NO: 39199 - DNA, 15 bp, Homo sapiens
aggaacccctacaac

SEQ ID NO: 39200 - DNA, 15 bp, Homo sapiens
taggaacccctacaa

SEQ ID NO: 39201 - DNA, 15 bp, Homo sapiens
ataggaacccctaca

SEQ ID NO: 39202 - DNA, 15 bp, Homo sapiens
aataggaacccctac

SEQ ID NO: 39203 - DNA, 15 bp, Homo sapiens
caataggaaccccta

SEQ ID NO: 39204 - DNA, 15 bp, Homo sapiens
acaataggaacccct

SEQ ID NO: 39205 - DNA, 15 bp, Homo sapiens
tacaataggaacccc

SEQ ID NO: 39206 - DNA, 15 bp, Homo sapiens
ttacaataggaaccc

SEQ ID NO: 39207 - DNA, 15 bp, Homo sapiens
attacaataggaacc

SEQ ID NO: 39208 - DNA, 15 bp, Homo sapiens
gattacaataggaac

SEQ ID NO: 39209 - DNA, 15 bp, Homo sapiens
tgattacaataggaa

SEQ ID NO: 39210 - DNA, 15 bp, Homo sapiens
ctgattacaatagga

SEQ ID NO: 39211 - DNA, 15 bp, Homo sapiens
cctgattacaatagg

SEQ ID NO: 39212 - DNA, 15 bp, Homo sapiens
tcctgattacaatag

SEQ ID NO: 39213 - DNA, 15 bp, Homo sapiens
ttcctgattacaata

SEQ ID NO: 39214 - DNA, 15 bp, Homo sapiens
tttcctgattacaat

SEQ ID NO: 39215 - DNA, 15 bp, Homo sapiens
gtttcctgattacaa

SEQ ID NO: 39216 - DNA, 15 bp, Homo sapiens
ggtttcctgattaca

SEQ ID NO: 39217 - DNA, 15 bp, Homo sapiens
tggtttcctgattac

SEQ ID NO: 39218 - DNA, 15 bp, Homo sapiens
atggtttcctgatta

SEQ ID NO: 39219 - DNA, 15 bp, Homo sapiens
gatggtttcctgatt

SEQ ID NO: 39220 - DNA, 15 bp, Homo sapiens
agatggtttcctgat

SEQ ID NO: 39221 - DNA, 15 bp, Homo sapiens
cagatggtttcctga

SEQ ID NO: 39222 - DNA, 15 bp, Homo sapiens
ccagatggtttcctg

SEQ ID NO: 39223 - DNA, 15 bp, Homo sapiens
tccagatggtttcct

SEQ ID NO: 39224 - DNA, 15 bp, Homo sapiens
atccagatggtttcc

SEQ ID NO: 39225 - DNA, 15 bp, Homo sapiens
tatccagatggtttc

SEQ ID NO: 39226 - DNA, 15 bp, Homo sapiens
ctatccagatggttt

SEQ ID NO: 39227 - DNA, 15 bp, Homo sapiens
gctatccagatggtt

SEQ ID NO: 39228 - DNA, 15 bp, Homo sapiens
tgctatccagatggt

SEQ ID NO: 39229 - DNA, 15 bp, Homo sapiens
atgctatccagatgg

SEQ ID NO: 39230 - DNA, 15 bp, Homo sapiens
catgctatccagatg

SEQ ID NO: 39231 - DNA, 15 bp, Homo sapiens
ccatgctatccagat

SEQ ID NO: 39232 - DNA, 15 bp, Homo sapiens
cccatgctatccaga

SEQ ID NO: 39233 - DNA, 15 bp, Homo sapiens
tcccatgctatccag

SEQ ID NO: 39234 - DNA, 15 bp, Homo sapiens
ctcccatgctatcca

SEQ ID NO: 39235 - DNA, 15 bp, Homo sapiens
tctcccatgctatcc

SEQ ID NO: 39236 - DNA, 15 bp, Homo sapiens
ctctcccatgctatc

SEQ ID NO: 39237 - DNA, 15 bp, Homo sapiens
gctctcccatgctat

SEQ ID NO: 39238 - DNA, 15 bp, Homo sapiens
tgctctcccatgcta

SEQ ID NO: 39239 - DNA, 15 bp, Homo sapiens
atgctctcccatgct

SEQ ID NO: 39240 - DNA, 15 bp, Homo sapiens
aatgctctcccatgc

SEQ ID NO: 39241 - DNA, 15 bp, Homo sapiens
aaatgctctcccatg

SEQ ID NO: 39242 - DNA, 15 bp, Homo sapiens
aaaatgctctcccat

SEQ ID NO: 39243 - DNA, 15 bp, Homo sapiens
aaaaatgctctccca

SEQ ID NO: 39244 - DNA, 15 bp, Homo sapiens
caaaaatgctctccc

SEQ ID NO: 39245 - DNA, 15 bp, Homo sapiens
tcaaaaatgctctcc

SEQ ID NO: 39246 - DNA, 15 bp, Homo sapiens
ttcaaaaatgctctc

SEQ ID NO: 39247 - DNA, 15 bp, Homo sapiens
tttcaaaaatgctct

SEQ ID NO: 39248 - DNA, 15 bp, Homo sapiens
ttttcaaaaatgctc

SEQ ID NO: 39249 - DNA, 15 bp, Homo sapiens
cttttcaaaaatgct

SEQ ID NO: 39250 - DNA, 15 bp, Homo sapiens
tcttttcaaaaatgc

SEQ ID NO: 39251 - DNA, 15 bp, Homo sapiens
ttcttttcaaaaatg

SEQ ID NO: 39252 - DNA, 15 bp, Homo sapiens
gttcttttcaaaaat

SEQ ID NO: 39253 - DNA, 15 bp, Homo sapiens
agttcttttcaaaaa

SEQ ID NO: 39254 - DNA, 15 bp, Homo sapiens
aagttcttttcaaaa

SEQ ID NO: 39255 - DNA, 15 bp, Homo sapiens
aaagttcttttcaaa

SEQ ID NO: 39256 - DNA, 15 bp, Homo sapiens
gaaagttcttttcaa

SEQ ID NO: 39257 - DNA, 15 bp, Homo sapiens
ggaaagttcttttca

SEQ ID NO: 39258 - DNA, 15 bp, Homo sapiens
gggaaagttcttttc

SEQ ID NO: 39259 - DNA, 15 bp, Homo sapiens
tgggaaagttctttt

SEQ ID NO: 39260 - DNA, 15 bp, Homo sapiens
atgggaaagttcttt

SEQ ID NO: 39261 - DNA, 15 bp, Homo sapiens
catgggaaagttctt

SEQ ID NO: 39262 - DNA, 15 bp, Homo sapiens
acatgggaaagttct

SEQ ID NO: 39263 - DNA, 15 bp, Homo sapiens
aacatgggaaagttc

SEQ ID NO: 39264 - DNA, 15 bp, Homo sapiens
aaacatgggaaagtt

SEQ ID NO: 39265 - DNA, 15 bp, Homo sapiens
aaaacatgggaaagt

SEQ ID NO: 39266 - DNA, 15 bp, Homo sapiens
aaaaacatgggaaag

SEQ ID NO: 39267 - DNA, 15 bp, Homo sapiens
caaaaacatgggaaa

SEQ ID NO: 39268 - DNA, 15 bp, Homo sapiens
gcaaaaacatgggaa

SEQ ID NO: 39269 - DNA, 15 bp, Homo sapiens
agcaaaaacatggga

SEQ ID NO: 39270 - DNA, 15 bp, Homo sapiens
aagcaaaaacatggg

SEQ ID NO: 39271 - DNA, 15 bp, Homo sapiens
taagcaaaaacatgg

SEQ ID NO: 39272 - DNA, 15 bp, Homo sapiens
gtaagcaaaaacatg

SEQ ID NO: 39273 - DNA, 15 bp, Homo sapiens
tgtaagcaaaaacat

SEQ ID NO: 39274 - DNA, 15 bp, Homo sapiens
ctgtaagcaaaaaca

SEQ ID NO: 39275 - DNA, 15 bp, Homo sapiens
gctgtaagcaaaaac

SEQ ID NO: 39276 - DNA, 15 bp, Homo sapiens
tgctgtaagcaaaaa

SEQ ID NO: 39277 - DNA, 15 bp, Homo sapiens
ttgctgtaagcaaaa

SEQ ID NO: 39278 - DNA, 15 bp, Homo sapiens
tttgctgtaagcaaa

SEQ ID NO: 39279 - DNA, 15 bp, Homo sapiens
ttttgctgtaagcaa

SEQ ID NO: 39280 - DNA, 15 bp, Homo sapiens
tttttgctgtaagca

SEQ ID NO: 39281 - DNA, 15 bp, Homo sapiens
ttttttgctgtaagc

SEQ ID NO: 39282 - DNA, 15 bp, Homo sapiens
cttttttgctgtaag

SEQ ID NO: 39283 - DNA, 15 bp, Homo sapiens
gcttttttgctgtaa

SEQ ID NO: 39284 - DNA, 15 bp, Homo sapiens
agcttttttgctgta

SEQ ID NO: 39285 - DNA, 15 bp, Homo sapiens
aagcttttttgctgt

SEQ ID NO: 39286 - DNA, 15 bp, Homo sapiens
caagcttttttgctg

SEQ ID NO: 39287 - DNA, 15 bp, Homo sapiens
ccaagcttttttgct

SEQ ID NO: 39288 - DNA, 15 bp, Homo sapiens
tccaagcttttttgc

SEQ ID NO: 39289 - DNA, 15 bp, Homo sapiens
atccaagcttttttg

SEQ ID NO: 39290 - DNA, 15 bp, Homo sapiens
aatccaagctttttt

SEQ ID NO: 39291 - DNA, 15 bp, Homo sapiens
aaatccaagcttttt

SEQ ID NO: 39292 - DNA, 15 bp, Homo sapiens
caaatccaagctttt

SEQ ID NO: 39293 - DNA, 15 bp, Homo sapiens
ccaaatccaagcttt

SEQ ID NO: 39294 - DNA, 15 bp, Homo sapiens
cccaaatccaagctt

SEQ ID NO: 39295 - DNA, 15 bp, Homo sapiens
ccccaaatccaagct

SEQ ID NO: 39296 - DNA, 15 bp, Homo sapiens
tccccaaatccaagc

SEQ ID NO: 39297 - DNA, 15 bp, Homo sapiens
ttccccaaatccaag

SEQ ID NO: 39298 - DNA, 15 bp, Homo sapiens
attccccaaatccaa

SEQ ID NO: 39299 - DNA, 15 bp, Homo sapiens
tattccccaaatcca

SEQ ID NO: 39300 - DNA, 15 bp, Homo sapiens
ttattccccaaatcc

SEQ ID NO: 39301 - DNA, 15 bp, Homo sapiens
cttattccccaaatc

SEQ ID NO: 39302 - DNA, 15 bp, Homo sapiens
ccttattccccaaat

SEQ ID NO: 39303 - DNA, 15 bp, Homo sapiens
tccttattccccaaa

SEQ ID NO: 39304 - DNA, 15 bp, Homo sapiens
ctccttattccccaa

SEQ ID NO: 39305 - DNA, 15 bp, Homo sapiens
gctccttattcccca

SEQ ID NO: 39306 - DNA, 15 bp, Homo sapiens
tgctccttattcccc

SEQ ID NO: 39307 - DNA, 15 bp, Homo sapiens
ctgctccttattccc

SEQ ID NO: 39308 - DNA, 15 bp, Homo sapiens
tctgctccttattcc

SEQ ID NO: 39309 - DNA, 15 bp, Homo sapiens
ctctgctccttattc

SEQ ID NO: 39310 - DNA, 15 bp, Homo sapiens
tctctgctccttatt

SEQ ID NO: 39311 - DNA, 15 bp, Homo sapiens
ttctctgctccttat

SEQ ID NO: 39312 - DNA, 15 bp, Homo sapiens
cttctctgctcctta

SEQ ID NO: 39313 - DNA, 15 bp, Homo sapiens
ccttctctgctcctt

SEQ ID NO: 39314 - DNA, 15 bp, Homo sapiens
accttctctgctcct

SEQ ID NO: 39315 - DNA, 15 bp, Homo sapiens
taccttctctgctcc

SEQ ID NO: 39316 - DNA, 15 bp, Homo sapiens
ttaccttctctgctc

SEQ ID NO: 39317 - DNA, 15 bp, Homo sapiens
attaccttctctgct

SEQ ID NO: 39318 - DNA, 15 bp, Homo sapiens
tattaccttctctgc

SEQ ID NO: 39319 - DNA, 15 bp, Homo sapiens
ctattaccttctctg

SEQ ID NO: 39320 - DNA, 15 bp, Homo sapiens
tctattaccttctct

SEQ ID NO: 39321 - DNA, 15 bp, Homo sapiens
ctctattaccttctc

SEQ ID NO: 39322 - DNA, 15 bp, Homo sapiens
tctctattaccttct

SEQ ID NO: 39323 - DNA, 15 bp, Homo sapiens
ttctctattaccttc

SEQ ID NO: 39324 - DNA, 15 bp, Homo sapiens
attctctattacctt

SEQ ID NO: 39325 - DNA, 15 bp, Homo sapiens
tattctctattacct

SEQ ID NO: 39326 - DNA, 15 bp, Homo sapiens
atattctctattacc

SEQ ID NO: 39327 - DNA, 15 bp, Homo sapiens
aatattctctattac

SEQ ID NO: 39328 - DNA, 15 bp, Homo sapiens
taatattctctatta

SEQ ID NO: 39329 - DNA, 15 bp, Homo sapiens
ctaatattctctatt

SEQ ID NO: 39330 - DNA, 15 bp, Homo sapiens
tctaatattctctat

SEQ ID NO: 39331 - DNA, 15 bp, Homo sapiens
ttctaatattctcta

SEQ ID NO: 39332 - DNA, 15 bp, Homo sapiens
attctaatattctct

SEQ ID NO: 39333 - DNA, 15 bp, Homo sapiens
cattctaatattctc

SEQ ID NO: 39334 - DNA, 15 bp, Homo sapiens
acattctaatattct

SEQ ID NO: 39335 - DNA, 15 bp, Homo sapiens
aacattctaatattc

SEQ ID NO: 39336 - DNA, 15 bp, Homo sapiens
aaacattctaatatt

SEQ ID NO: 39337 - DNA, 15 bp, Homo sapiens
aaaacattctaatat

SEQ ID NO: 39338 - DNA, 15 bp, Homo sapiens
caaaacattctaata

SEQ ID NO: 39339 - DNA, 15 bp, Homo sapiens
ccaaaacattctaat

SEQ ID NO: 39340 - DNA, 15 bp, Homo sapiens
cccaaaacattctaa

SEQ ID NO: 39341 - DNA, 15 bp, Homo sapiens
acccaaaacattcta

SEQ ID NO: 39342 - DNA, 15 bp, Homo sapiens
cacccaaaacattct

SEQ ID NO: 39343 - DNA, 15 bp, Homo sapiens
gcacccaaaacattc

SEQ ID NO: 39344 - DNA, 15 bp, Homo sapiens
agcacccaaaacatt

SEQ ID NO: 39345 - DNA, 15 bp, Homo sapiens
aagcacccaaaacat

SEQ ID NO: 39346 - DNA, 15 bp, Homo sapiens
caagcacccaaaaca

SEQ ID NO: 39347 - DNA, 15 bp, Homo sapiens
tcaagcacccaaaac

SEQ ID NO: 39348 - DNA, 15 bp, Homo sapiens
gtcaagcacccaaaa

SEQ ID NO: 39349 - DNA, 15 bp, Homo sapiens
tgtcaagcacccaaa

SEQ ID NO: 39350 - DNA, 15 bp, Homo sapiens
atgtcaagcacccaa

SEQ ID NO: 39351 - DNA, 15 bp, Homo sapiens
gatgtcaagcaccca

SEQ ID NO: 39352 - DNA, 15 bp, Homo sapiens
agatgtcaagcaccc

SEQ ID NO: 39353 - DNA, 15 bp, Homo sapiens
tagatgtcaagcacc

SEQ ID NO: 39354 - DNA, 15 bp, Homo sapiens
atagatgtcaagcac

SEQ ID NO: 39355 - DNA, 15 bp, Homo sapiens
catagatgtcaagca

SEQ ID NO: 39356 - DNA, 15 bp, Homo sapiens
acatagatgtcaagc

SEQ ID NO: 39357 - DNA, 15 bp, Homo sapiens
gacatagatgtcaag

SEQ ID NO: 39358 - DNA, 15 bp, Homo sapiens
agacatagatgtcaa

SEQ ID NO: 39359 - DNA, 15 bp, Homo sapiens
cagacatagatgtca

SEQ ID NO: 39360 - DNA, 15 bp, Homo sapiens
ccagacatagatgtc

SEQ ID NO: 39361 - DNA, 15 bp, Homo sapiens
tccagacatagatgt

SEQ ID NO: 39362 - DNA, 15 bp, Homo sapiens
gtccagacatagatg

SEQ ID NO: 39363 - DNA, 15 bp, Homo sapiens
tgtccagacatagat

SEQ ID NO: 39364 - DNA, 15 bp, Homo sapiens
atgtccagacataga

SEQ ID NO: 39365 - DNA, 15 bp, Homo sapiens
catgtccagacatag

SEQ ID NO: 39366 - DNA, 15 bp, Homo sapiens
acatgtccagacata

SEQ ID NO: 39367 - DNA, 15 bp, Homo sapiens
cacatgtccagacat

SEQ ID NO: 39368 - DNA, 15 bp, Homo sapiens
acacatgtccagaca

SEQ ID NO: 39369 - DNA, 15 bp, Homo sapiens
aacacatgtccagac

SEQ ID NO: 39370 - DNA, 15 bp, Homo sapiens
aaacacatgtccaga

SEQ ID NO: 39371 - DNA, 15 bp, Homo sapiens
caaacacatgtccag

SEQ ID NO: 39372 - DNA, 15 bp, Homo sapiens
tcaaacacatgtcca

SEQ ID NO: 39373 - DNA, 15 bp, Homo sapiens
ctcaaacacatgtcc

SEQ ID NO: 39374 - DNA, 15 bp, Homo sapiens
actcaaacacatgtc

SEQ ID NO: 39375 - DNA, 15 bp, Homo sapiens
aactcaaacacatgt

SEQ ID NO: 39376 - DNA, 15 bp, Homo sapiens
aaactcaaacacatg

SEQ ID NO: 39377 - DNA, 15 bp, Homo sapiens
gaaactcaaacacat

SEQ ID NO: 39378 - DNA, 15 bp, Homo sapiens
tgaaactcaaacaca

SEQ ID NO: 39379 - DNA, 15 bp, Homo sapiens
ttgaaactcaaacac

SEQ ID NO: 39380 - DNA, 15 bp, Homo sapiens
cttgaaactcaaaca

SEQ ID NO: 39381 - DNA, 15 bp, Homo sapiens
ccttgaaactcaaac

SEQ ID NO: 39382 - DNA, 15 bp, Homo sapiens
cccttgaaactcaaa

SEQ ID NO: 39383 - DNA, 15 bp, Homo sapiens
tcccttgaaactcaa

SEQ ID NO: 39384 - DNA, 15 bp, Homo sapiens
ttcccttgaaactca

SEQ ID NO: 39385 - DNA, 15 bp, Homo sapiens
cttcccttgaaactc

SEQ ID NO: 39386 - DNA, 15 bp, Homo sapiens
ccttcccttgaaact

SEQ ID NO: 39387 - DNA, 15 bp, Homo sapiens
cccttcccttgaaac

SEQ ID NO: 39388 - DNA, 15 bp, Homo sapiens
tcccttcccttgaaa

SEQ ID NO: 39389 - DNA, 15 bp, Homo sapiens
gtcccttcccttgaa

SEQ ID NO: 39390 - DNA, 15 bp, Homo sapiens
agtcccttcccttga

SEQ ID NO: 39391 - DNA, 15 bp, Homo sapiens
aagtcccttcccttg

SEQ ID NO: 39392 - DNA, 15 bp, Homo sapiens
taagtcccttccctt

SEQ ID NO: 39393 - DNA, 15 bp, Homo sapiens
ttaagtcccttccct

SEQ ID NO: 39394 - DNA, 15 bp, Homo sapiens
gttaagtcccttccc

SEQ ID NO: 39395 - DNA, 15 bp, Homo sapiens
agttaagtcccttcc

SEQ ID NO: 39396 - DNA, 15 bp, Homo sapiens
cagttaagtcccttc

SEQ ID NO: 39397 - DNA, 15 bp, Homo sapiens
ccagttaagtccctt

SEQ ID NO: 39398 - DNA, 15 bp, Homo sapiens
gccagttaagtccct

SEQ ID NO: 39399 - DNA, 15 bp, Homo sapiens
tgccagttaagtccc

SEQ ID NO: 39400 - DNA, 15 bp, Homo sapiens
gtgccagttaagtcc

SEQ ID NO: 39401 - DNA, 15 bp, Homo sapiens
tgtgccagttaagtc

SEQ ID NO: 39402 - DNA, 15 bp, Homo sapiens
atgtgccagttaagt

SEQ ID NO: 39403 - DNA, 15 bp, Homo sapiens
gatgtgccagttaag

SEQ ID NO: 39404 - DNA, 15 bp, Homo sapiens
tgatgtgccagttaa

SEQ ID NO: 39405 - DNA, 15 bp, Homo sapiens
atgatgtgccagtta

SEQ ID NO: 39406 - DNA, 15 bp, Homo sapiens
aatgatgtgccagtt

SEQ ID NO: 39407 - DNA, 15 bp, Homo sapiens
aaatgatgtgccagt

SEQ ID NO: 39408 - DNA, 15 bp, Homo sapiens
gaaatgatgtgccag

SEQ ID NO: 39409 - DNA, 15 bp, Homo sapiens
tgaaatgatgtgcca

SEQ ID NO: 39410 - DNA, 15 bp, Homo sapiens
ctgaaatgatgtgcc

SEQ ID NO: 39411 - DNA, 15 bp, Homo sapiens
actgaaatgatgtgc

SEQ ID NO: 39412 - DNA, 15 bp, Homo sapiens
cactgaaatgatgtg

SEQ ID NO: 39413 - DNA, 15 bp, Homo sapiens
acactgaaatgatgt

SEQ ID NO: 39414 - DNA, 15 bp, Homo sapiens
gacactgaaatgatg

SEQ ID NO: 39415 - DNA, 15 bp, Homo sapiens
tgacactgaaatgat

SEQ ID NO: 39416 - DNA, 15 bp, Homo sapiens
ctgacactgaaatga

SEQ ID NO: 39417 - DNA, 15 bp, Homo sapiens
tctgacactgaaatg

SEQ ID NO: 39418 - DNA, 15 bp, Homo sapiens
gtctgacactgaaat

SEQ ID NO: 39419 - DNA, 15 bp, Homo sapiens
tgtctgacactgaaa

SEQ ID NO: 39420 - DNA, 15 bp, Homo sapiens
gtgtctgacactgaa

SEQ ID NO: 39421 - DNA, 15 bp, Homo sapiens
tgtgtctgacactga

SEQ ID NO: 39422 - DNA, 15 bp, Homo sapiens
atgtgtctgacactg

SEQ ID NO: 39423 - DNA, 15 bp, Homo sapiens
aatgtgtctgacact

SEQ ID NO: 39424 - DNA, 15 bp, Homo sapiens
aaatgtgtctgacac

SEQ ID NO: 39425 - DNA, 15 bp, Homo sapiens
caaatgtgtctgaca

SEQ ID NO: 39426 - DNA, 15 bp, Homo sapiens
ccaaatgtgtctgac

SEQ ID NO: 39427 - DNA, 15 bp, Homo sapiens
accaaatgtgtctga

SEQ ID NO: 39428 - DNA, 15 bp, Homo sapiens
aaccaaatgtgtctg

SEQ ID NO: 39429 - DNA, 15 bp, Homo sapiens
taaccaaatgtgtct

SEQ ID NO: 39430 - DNA, 15 bp, Homo sapiens
ctaaccaaatgtgtc

SEQ ID NO: 39431 - DNA, 15 bp, Homo sapiens
tctaaccaaatgtgt

SEQ ID NO: 39432 - DNA, 15 bp, Homo sapiens
atctaaccaaatgtg

SEQ ID NO: 39433 - DNA, 15 bp, Homo sapiens
gatctaaccaaatgt

SEQ ID NO: 39434 - DNA, 15 bp, Homo sapiens
tgatctaaccaaatg

SEQ ID NO: 39435 - DNA, 15 bp, Homo sapiens
ttgatctaaccaaat

SEQ ID NO: 39436 - DNA, 15 bp, Homo sapiens
cttgatctaaccaaa

SEQ ID NO: 39437 - DNA, 15 bp, Homo sapiens
ccttgatctaaccaa

SEQ ID NO: 39438 - DNA, 15 bp, Homo sapiens
tccttgatctaacca

SEQ ID NO: 39439 - DNA, 15 bp, Homo sapiens
ttccttgatctaacc

SEQ ID NO: 39440 - DNA, 15 bp, Homo sapiens
attccttgatctaac

SEQ ID NO: 39441 - DNA, 15 bp, Homo sapiens
tattccttgatctaa

SEQ ID NO: 39442 - DNA, 15 bp, Homo sapiens
ctattccttgatcta

SEQ ID NO: 39443 - DNA, 15 bp, Homo sapiens
gctattccttgatct

SEQ ID NO: 39444 - DNA, 15 bp, Homo sapiens
tgctattccttgatc

SEQ ID NO: 39445 - DNA, 15 bp, Homo sapiens
atgctattccttgat

SEQ ID NO: 39446 - DNA, 15 bp, Homo sapiens
gatgctattccttga

SEQ ID NO: 39447 - DNA, 15 bp, Homo sapiens
agatgctattccttg

SEQ ID NO: 39448 - DNA, 15 bp, Homo sapiens
cagatgctattcctt

SEQ ID NO: 39449 - DNA, 15 bp, Homo sapiens
acagatgctattcct

SEQ ID NO: 39450 - DNA, 15 bp, Homo sapiens
aacagatgctattcc

SEQ ID NO: 39451 - DNA, 15 bp, Homo sapiens
caacagatgctattc

SEQ ID NO: 39452 - DNA, 15 bp, Homo sapiens
acaacagatgctatt

SEQ ID NO: 39453 - DNA, 15 bp, Homo sapiens
tacaacagatgctat

SEQ ID NO: 39454 - DNA, 15 bp, Homo sapiens
ctacaacagatgcta

SEQ ID NO: 39455 - DNA, 15 bp, Homo sapiens
cctacaacagatgct

SEQ ID NO: 39456 - DNA, 15 bp, Homo sapiens
tcctacaacagatgc

SEQ ID NO: 39457 - DNA, 15 bp, Homo sapiens
ttcctacaacagatg

SEQ ID NO: 39458 - DNA, 15 bp, Homo sapiens
cttcctacaacagat

SEQ ID NO: 39459 - DNA, 15 bp, Homo sapiens
tcttcctacaacaga

SEQ ID NO: 39460 - DNA, 15 bp, Homo sapiens
ctcttcctacaacag

SEQ ID NO: 39461 - DNA, 15 bp, Homo sapiens
cctcttcctacaaca

SEQ ID NO: 39462 - DNA, 15 bp, Homo sapiens
ccctcttcctacaac

SEQ ID NO: 39463 - DNA, 15 bp, Homo sapiens
gccctcttcctacaa

SEQ ID NO: 39464 - DNA, 15 bp, Homo sapiens
agccctcttcctaca

SEQ ID NO: 39465 - DNA, 15 bp, Homo sapiens
gagccctcttcctac

SEQ ID NO: 39466 - DNA, 15 bp, Homo sapiens
agagccctcttccta

SEQ ID NO: 39467 - DNA, 15 bp, Homo sapiens
aagagccctcttcct

SEQ ID NO: 39468 - DNA, 15 bp, Homo sapiens
aaagagccctcttcc

SEQ ID NO: 39469 - DNA, 15 bp, Homo sapiens
caaagagccctcttc

SEQ ID NO: 39470 - DNA, 15 bp, Homo sapiens
acaaagagccctctt

SEQ ID NO: 39471 - DNA, 15 bp, Homo sapiens
aacaaagagccctct

SEQ ID NO: 39472 - DNA, 15 bp, Homo sapiens
gaacaaagagccctc

SEQ ID NO: 39473 - DNA, 15 bp, Homo sapiens
agaacaaagagccct

SEQ ID NO: 39474 - DNA, 15 bp, Homo sapiens
aagaacaaagagccc

SEQ ID NO: 39475 - DNA, 15 bp, Homo sapiens
aaagaacaaagagcc

SEQ ID NO: 39476 - DNA, 15 bp, Homo sapiens
taaagaacaaagagc

SEQ ID NO: 39477 - DNA, 15 bp, Homo sapiens
ataaagaacaaagag

SEQ ID NO: 39478 - DNA, 15 bp, Homo sapiens
tataaagaacaaaga

SEQ ID NO: 39479 - DNA, 15 bp, Homo sapiens
ttataaagaacaaag

SEQ ID NO: 39480 - DNA, 15 bp, Homo sapiens
tttataaagaacaaa

SEQ ID NO: 39481 - DNA, 15 bp, Homo sapiens
ttttataaagaacaa

SEQ ID NO: 39482 - DNA, 15 bp, Homo sapiens
tttttataaagaaca

SEQ ID NO: 39483 - DNA, 15 bp, Homo sapiens
atttttataaagaac

SEQ ID NO: 39484 - DNA, 15 bp, Homo sapiens
aatttttataaagaa

SEQ ID NO: 39485 - DNA, 15 bp, Homo sapiens
taatttttataaaga

SEQ ID NO: 39486 - DNA, 15 bp, Homo sapiens
gtaatttttataaag

SEQ ID NO: 39487 - DNA, 15 bp, Homo sapiens
tgtaatttttataaa

SEQ ID NO: 39488 - DNA, 15 bp, Homo sapiens
ttgtaatttttataa

SEQ ID NO: 39489 - DNA, 15 bp, Homo sapiens
cttgtaatttttata

SEQ ID NO: 39490 - DNA, 15 bp, Homo sapiens
tcttgtaatttttat

SEQ ID NO: 39491 - DNA, 15 bp, Homo sapiens
ttcttgtaattttta

SEQ ID NO: 39492 - DNA, 15 bp, Homo sapiens
cttcttgtaattttt

SEQ ID NO: 39493 - DNA, 15 bp, Homo sapiens
tcttcttgtaatttt

SEQ ID NO: 39494 - DNA, 15 bp, Homo sapiens
atcttcttgtaattt

SEQ ID NO: 39495 - DNA, 15 bp, Homo sapiens
catcttcttgtaatt

SEQ ID NO: 39496 - DNA, 15 bp, Homo sapiens
ccatcttcttgtaat

SEQ ID NO: 39497 - DNA, 15 bp, Homo sapiens
tccatcttcttgtaa

SEQ ID NO: 39498 - DNA, 15 bp, Homo sapiens
ctccatcttcttgta

SEQ ID NO: 39499 - DNA, 15 bp, Homo sapiens
tctccatcttcttgt

SEQ ID NO: 39500 - DNA, 15 bp, Homo sapiens
ttctccatcttcttg

SEQ ID NO: 39501 - DNA, 15 bp, Homo sapiens
tttctccatcttctt

SEQ ID NO: 39502 - DNA, 15 bp, Homo sapiens
ctttctccatcttct

SEQ ID NO: 39503 - DNA, 15 bp, Homo sapiens
tctttctccatcttc

SEQ ID NO: 39504 - DNA, 15 bp, Homo sapiens
ttctttctccatctt

SEQ ID NO: 39505 - DNA, 15 bp, Homo sapiens
cttctttctccatct

SEQ ID NO: 39506 - DNA, 15 bp, Homo sapiens
gcttctttctccatc

SEQ ID NO: 39507 - DNA, 15 bp, Homo sapiens
tgcttctttctccat

SEQ ID NO: 39508 - DNA, 15 bp, Homo sapiens
ttgcttctttctcca

SEQ ID NO: 39509 - DNA, 15 bp, Homo sapiens
attgcttctttctcc

SEQ ID NO: 39510 - DNA, 15 bp, Homo sapiens
tattgcttctttctc

SEQ ID NO: 39511 - DNA, 15 bp, Homo sapiens
ctattgcttctttct

SEQ ID NO: 39512 - DNA, 15 bp, Homo sapiens
cctattgcttctttc

SEQ ID NO: 39513 - DNA, 15 bp, Homo sapiens
tcctattgcttcttt

SEQ ID NO: 39514 - DNA, 15 bp, Homo sapiens
ctcctattgcttctt

SEQ ID NO: 39515 - DNA, 15 bp, Homo sapiens
cctcctattgcttct

SEQ ID NO: 39516 - DNA, 15 bp, Homo sapiens
acctcctattgcttc

SEQ ID NO: 39517 - DNA, 15 bp, Homo sapiens
tacctcctattgctt

SEQ ID NO: 39518 - DNA, 15 bp, Homo sapiens
atacctcctattgct

SEQ ID NO: 39519 - DNA, 15 bp, Homo sapiens
catacctcctattgc

SEQ ID NO: 39520 - DNA, 15 bp, Homo sapiens
acatacctcctattg

SEQ ID NO: 39521 - DNA, 15 bp, Homo sapiens
gacatacctcctatt

SEQ ID NO: 39522 - DNA, 15 bp, Homo sapiens
agacatacctcctat

SEQ ID NO: 39523 - DNA, 15 bp, Homo sapiens
gagacatacctccta

SEQ ID NO: 39524 - DNA, 15 bp, Homo sapiens
ggagacatacctcct

SEQ ID NO: 39525 - DNA, 15 bp, Homo sapiens
aggagacatacctcc

SEQ ID NO: 39526 - DNA, 15 bp, Homo sapiens
caggagacatacctc

SEQ ID NO: 39527 - DNA, 15 bp, Homo sapiens
ccaggagacatacct

SEQ ID NO: 39528 - DNA, 15 bp, Homo sapiens
gccaggagacatacc

SEQ ID NO: 39529 - DNA, 15 bp, Homo sapiens
agccaggagacatac

SEQ ID NO: 39530 - DNA, 15 bp, Homo sapiens
aagccaggagacata

SEQ ID NO: 39531 - DNA, 15 bp, Homo sapiens
caagccaggagacat

SEQ ID NO: 39532 - DNA, 15 bp, Homo sapiens
acaagccaggagaca

SEQ ID NO: 39533 - DNA, 15 bp, Homo sapiens
cacaagccaggagac

SEQ ID NO: 39534 - DNA, 15 bp, Homo sapiens
tcacaagccaggaga

SEQ ID NO: 39535 - DNA, 15 bp, Homo sapiens
atcacaagccaggag

SEQ ID NO: 39536 - DNA, 15 bp, Homo sapiens
tatcacaagccagga

SEQ ID NO: 39537 - DNA, 15 bp, Homo sapiens
ttatcacaagccagg

SEQ ID NO: 39538 - DNA, 15 bp, Homo sapiens
gttatcacaagccag

SEQ ID NO: 39539 - DNA, 15 bp, Homo sapiens
agttatcacaagcca

SEQ ID NO: 39540 - DNA, 15 bp, Homo sapiens
gagttatcacaagcc

SEQ ID NO: 39541 - DNA, 15 bp, Homo sapiens
agagttatcacaagc

SEQ ID NO: 39542 - DNA, 15 bp, Homo sapiens
aagagttatcacaag

SEQ ID NO: 39543 - DNA, 15 bp, Homo sapiens
caagagttatcacaa

SEQ ID NO: 39544 - DNA, 15 bp, Homo sapiens
ccaagagttatcaca

SEQ ID NO: 39545 - DNA, 15 bp, Homo sapiens
tccaagagttatcac

SEQ ID NO: 39546 - DNA, 15 bp, Homo sapiens
ttccaagagttatca

SEQ ID NO: 39547 - DNA, 15 bp, Homo sapiens
attccaagagttatc

SEQ ID NO: 39548 - DNA, 15 bp, Homo sapiens
tattccaagagttat

SEQ ID NO: 39549 - DNA, 15 bp, Homo sapiens
ctattccaagagtta

SEQ ID NO: 39550 - DNA, 15 bp, Homo sapiens
cctattccaagagtt

SEQ ID NO: 39551 - DNA, 15 bp, Homo sapiens
acctattccaagagt

SEQ ID NO: 39552 - DNA, 15 bp, Homo sapiens
cacctattccaagag

SEQ ID NO: 39553 - DNA, 15 bp, Homo sapiens
gcacctattccaaga

SEQ ID NO: 39554 - DNA, 15 bp, Homo sapiens
agcacctattccaag

SEQ ID NO: 39555 - DNA, 15 bp, Homo sapiens
aagcacctattccaa

SEQ ID NO: 39556 - DNA, 15 bp, Homo sapiens
caagcacctattcca

SEQ ID NO: 39557 - DNA, 15 bp, Homo sapiens
acaagcacctattcc

SEQ ID NO: 39558 - DNA, 15 bp, Homo sapiens
tacaagcacctattc

SEQ ID NO: 39559 - DNA, 15 bp, Homo sapiens
ctacaagcacctatt

SEQ ID NO: 39560 - DNA, 15 bp, Homo sapiens
cctacaagcacctat

SEQ ID NO: 39561 - DNA, 15 bp, Homo sapiens
acctacaagcaccta

SEQ ID NO: 39562 - DNA, 15 bp, Homo sapiens
aacctacaagcacct

SEQ ID NO: 39563 - DNA, 15 bp, Homo sapiens
gaacctacaagcacc

SEQ ID NO: 39564 - DNA, 15 bp, Homo sapiens
ggaacctacaagcac

SEQ ID NO: 39565 - DNA, 15 bp, Homo sapiens
aggaacctacaagca

SEQ ID NO: 39566 - DNA, 15 bp, Homo sapiens
caggaacctacaagc

SEQ ID NO: 39567 - DNA, 15 bp, Homo sapiens
gcaggaacctacaag

SEQ ID NO: 39568 - DNA, 15 bp, Homo sapiens
ggcaggaacctacaa

SEQ ID NO: 39569 - DNA, 15 bp, Homo sapiens
gggcaggaacctaca

SEQ ID NO: 39570 - DNA, 15 bp, Homo sapiens
agggcaggaacctac

SEQ ID NO: 39571 - DNA, 15 bp, Homo sapiens
cagggcaggaaccta

SEQ ID NO: 39572 - DNA, 15 bp, Homo sapiens
ccagggcaggaacct

SEQ ID NO: 39573 - DNA, 15 bp, Homo sapiens
gccagggcaggaacc

SEQ ID NO: 39574 - DNA, 15 bp, Homo sapiens
tgccagggcaggaac

SEQ ID NO: 39575 - DNA, 15 bp, Homo sapiens
gtgccagggcaggaa

SEQ ID NO: 39576 - DNA, 15 bp, Homo sapiens
tgtgccagggcagga

SEQ ID NO: 39577 - DNA, 15 bp, Homo sapiens
ctgtgccagggcagg

SEQ ID NO: 39578 - DNA, 15 bp, Homo sapiens
actgtgccagggcag

SEQ ID NO: 39579 - DNA, 15 bp, Homo sapiens
cactgtgccagggca

SEQ ID NO: 39580 - DNA, 15 bp, Homo sapiens
gcactgtgccagggc

SEQ ID NO: 39581 - DNA, 15 bp, Homo sapiens
ggcactgtgccaggg

SEQ ID NO: 39582 - DNA, 15 bp, Homo sapiens
gggcactgtgccagg

SEQ ID NO: 39583 - DNA, 15 bp, Homo sapiens
ggggcactgtgccag

SEQ ID NO: 39584 - DNA, 15 bp, Homo sapiens
tggggcactgtgcca

SEQ ID NO: 39585 - DNA, 15 bp, Homo sapiens
atggggcactgtgcc

SEQ ID NO: 39586 - DNA, 15 bp, Homo sapiens
catggggcactgtgc

SEQ ID NO: 39587 - DNA, 15 bp, Homo sapiens
acatggggcactgtg

SEQ ID NO: 39588 - DNA, 15 bp, Homo sapiens
tacatggggcactgt

SEQ ID NO: 39589 - DNA, 15 bp, Homo sapiens
ttacatggggcactg

SEQ ID NO: 39590 - DNA, 15 bp, Homo sapiens
cttacatggggcact

SEQ ID NO: 39591 - DNA, 15 bp, Homo sapiens
ccttacatggggcac

SEQ ID NO: 39592 - DNA, 15 bp, Homo sapiens
tccttacatggggca

SEQ ID NO: 39593 - DNA, 15 bp, Homo sapiens
ctccttacatggggc

SEQ ID NO: 39594 - DNA, 15 bp, Homo sapiens
gctccttacatgggg

SEQ ID NO: 39595 - DNA, 15 bp, Homo sapiens
tgctccttacatggg

SEQ ID NO: 39596 - DNA, 15 bp, Homo sapiens
gtgctccttacatgg

SEQ ID NO: 39597 - DNA, 15 bp, Homo sapiens
tgtgctccttacatg

SEQ ID NO: 39598 - DNA, 15 bp, Homo sapiens
gtgtgctccttacat

SEQ ID NO: 39599 - DNA, 15 bp, Homo sapiens
ggtgtgctccttaca

SEQ ID NO: 39600 - DNA, 15 bp, Homo sapiens
tggtgtgctccttac

SEQ ID NO: 39601 - DNA, 15 bp, Homo sapiens
gtggtgtgctcctta

SEQ ID NO: 39602 - DNA, 15 bp, Homo sapiens
ggtggtgtgctcctt

SEQ ID NO: 39603 - DNA, 15 bp, Homo sapiens
gggtggtgtgctcct

SEQ ID NO: 39604 - DNA, 15 bp, Homo sapiens
tgggtggtgtgctcc

SEQ ID NO: 39605 - DNA, 15 bp, Homo sapiens
ttgggtggtgtgctc

SEQ ID NO: 39606 - DNA, 15 bp, Homo sapiens
cttgggtggtgtgct

SEQ ID NO: 39607 - DNA, 15 bp, Homo sapiens
tcttgggtggtgtgc

SEQ ID NO: 39608 - DNA, 15 bp, Homo sapiens
ttcttgggtggtgtg

SEQ ID NO: 39609 - DNA, 15 bp, Homo sapiens
cttcttgggtggtgt

SEQ ID NO: 39610 - DNA, 15 bp, Homo sapiens
ccttcttgggtggtg

SEQ ID NO: 39611 - DNA, 15 bp, Homo sapiens
tccttcttgggtggt

SEQ ID NO: 39612 - DNA, 15 bp, Homo sapiens
ctccttcttgggtgg

SEQ ID NO: 39613 - DNA, 15 bp, Homo sapiens
tctccttcttgggtg

SEQ ID NO: 39614 - DNA, 15 bp, Homo sapiens
ctctccttcttgggt

SEQ ID NO: 39615 - DNA, 15 bp, Homo sapiens
tctctccttcttggg

SEQ ID NO: 39616 - DNA, 15 bp, Homo sapiens
ctctctccttcttgg

SEQ ID NO: 39617 - DNA, 15 bp, Homo sapiens
gctctctccttcttg

SEQ ID NO: 39618 - DNA, 15 bp, Homo sapiens
agctctctccttctt

SEQ ID NO: 39619 - DNA, 15 bp, Homo sapiens
tagctctctccttct

SEQ ID NO: 39620 - DNA, 15 bp, Homo sapiens
ctagctctctccttc

SEQ ID NO: 39621 - DNA, 15 bp, Homo sapiens
tctagctctctcctt

SEQ ID NO: 39622 - DNA, 15 bp, Homo sapiens
ctctagctctctcct

SEQ ID NO: 39623 - DNA, 15 bp, Homo sapiens
gctctagctctctcc

SEQ ID NO: 39624 - DNA, 15 bp, Homo sapiens
tgctctagctctctc

SEQ ID NO: 39625 - DNA, 15 bp, Homo sapiens
ttgctctagctctct

SEQ ID NO: 39626 - DNA, 15 bp, Homo sapiens
cttgctctagctctc

SEQ ID NO: 39627 - DNA, 15 bp, Homo sapiens
acttgctctagctct

SEQ ID NO: 39628 - DNA, 15 bp, Homo sapiens
tacttgctctagctc

SEQ ID NO: 39629 - DNA, 15 bp, Homo sapiens
gtacttgctctagct

SEQ ID NO: 39630 - DNA, 15 bp, Homo sapiens
agtacttgctctagc

SEQ ID NO: 39631 - DNA, 15 bp, Homo sapiens
cagtacttgctctag

SEQ ID NO: 39632 - DNA, 15 bp, Homo sapiens
ccagtacttgctcta

SEQ ID NO: 39633 - DNA, 15 bp, Homo sapiens
tccagtacttgctct

SEQ ID NO: 39634 - DNA, 15 bp, Homo sapiens
ctccagtacttgctc

SEQ ID NO: 39635 - DNA, 15 bp, Homo sapiens
cctccagtacttgct

SEQ ID NO: 39636 - DNA, 15 bp, Homo sapiens
tcctccagtacttgc

SEQ ID NO: 39637 - DNA, 15 bp, Homo sapiens
ctcctccagtacttg

SEQ ID NO: 39638 - DNA, 15 bp, Homo sapiens
cctcctccagtactt

SEQ ID NO: 39639 - DNA, 15 bp, Homo sapiens
gcctcctccagtact

SEQ ID NO: 39640 - DNA, 15 bp, Homo sapiens
tgcctcctccagtac

SEQ ID NO: 39641 - DNA, 15 bp, Homo sapiens
gtgcctcctccagta

SEQ ID NO: 39642 - DNA, 15 bp, Homo sapiens
ggtgcctcctccagt

SEQ ID NO: 39643 - DNA, 15 bp, Homo sapiens
tggtgcctcctccag

SEQ ID NO: 39644 - DNA, 15 bp, Homo sapiens
ctggtgcctcctcca

SEQ ID NO: 39645 - DNA, 15 bp, Homo sapiens
gctggtgcctcctcc

SEQ ID NO: 39646 - DNA, 15 bp, Homo sapiens
tgctggtgcctcctc

SEQ ID NO: 39647 - DNA, 15 bp, Homo sapiens
atgctggtgcctcct

SEQ ID NO: 39648 - DNA, 15 bp, Homo sapiens
gatgctggtgcctcc

SEQ ID NO: 39649 - DNA, 15 bp, Homo sapiens
ggatgctggtgcctc

SEQ ID NO: 39650 - DNA, 15 bp, Homo sapiens
gggatgctggtgcct

SEQ ID NO: 39651 - DNA, 15 bp, Homo sapiens
tgggatgctggtgcc

SEQ ID NO: 39652 - DNA, 15 bp, Homo sapiens
ttgggatgctggtgc

SEQ ID NO: 39653 - DNA, 15 bp, Homo sapiens
attgggatgctggtg

SEQ ID NO: 39654 - DNA, 15 bp, Homo sapiens
cattgggatgctggt

SEQ ID NO: 39655 - DNA, 15 bp, Homo sapiens
gcattgggatgctgg

SEQ ID NO: 39656 - DNA, 15 bp, Homo sapiens
ggcattgggatgctg

SEQ ID NO: 39657 - DNA, 15 bp, Homo sapiens
aggcattgggatgct

SEQ ID NO: 39658 - DNA, 15 bp, Homo sapiens
aaggcattgggatgc

SEQ ID NO: 39659 - DNA, 15 bp, Homo sapiens
caaggcattgggatg

SEQ ID NO: 39660 - DNA, 15 bp, Homo sapiens
ccaaggcattgggat

SEQ ID NO: 39661 - DNA, 15 bp, Homo sapiens
gccaaggcattggga

SEQ ID NO: 39662 - DNA, 15 bp, Homo sapiens
agccaaggcattggg

SEQ ID NO: 39663 - DNA, 15 bp, Homo sapiens
aagccaaggcattgg

SEQ ID NO: 39664 - DNA, 15 bp, Homo sapiens
taagccaaggcattg

SEQ ID NO: 39665 - DNA, 15 bp, Homo sapiens
ttaagccaaggcatt

SEQ ID NO: 39666 - DNA, 15 bp, Homo sapiens
cttaagccaaggcat

SEQ ID NO: 39667 - DNA, 15 bp, Homo sapiens
gcttaagccaaggca

SEQ ID NO: 39668 - DNA, 15 bp, Homo sapiens
ggcttaagccaaggc

SEQ ID NO: 39669 - DNA, 15 bp, Homo sapiens
aggcttaagccaagg

SEQ ID NO: 39670 - DNA, 15 bp, Homo sapiens
caggcttaagccaag

SEQ ID NO: 39671 - DNA, 15 bp, Homo sapiens
ccaggcttaagccaa

SEQ ID NO: 39672 - DNA, 15 bp, Homo sapiens
cccaggcttaagcca

SEQ ID NO: 39673 - DNA, 15 bp, Homo sapiens
tcccaggcttaagcc

SEQ ID NO: 39674 - DNA, 15 bp, Homo sapiens
atcccaggcttaagc

SEQ ID NO: 39675 - DNA, 15 bp, Homo sapiens
aatcccaggcttaag

SEQ ID NO: 39676 - DNA, 15 bp, Homo sapiens
caatcccaggcttaa

SEQ ID NO: 39677 - DNA, 15 bp, Homo sapiens
acaatcccaggctta

SEQ ID NO: 39678 - DNA, 15 bp, Homo sapiens
tacaatcccaggctt

SEQ ID NO: 39679 - DNA, 15 bp, Homo sapiens
ctacaatcccaggct

SEQ ID NO: 39680 - DNA, 15 bp, Homo sapiens
tctacaatcccaggc

SEQ ID NO: 39681 - DNA, 15 bp, Homo sapiens
ctctacaatcccagg

SEQ ID NO: 39682 - DNA, 15 bp, Homo sapiens
cctctacaatcccag

SEQ ID NO: 39683 - DNA, 15 bp, Homo sapiens
ccctctacaatccca

SEQ ID NO: 39684 - DNA, 15 bp, Homo sapiens
tccctctacaatccc

SEQ ID NO: 39685 - DNA, 15 bp, Homo sapiens
atccctctacaatcc

SEQ ID NO: 39686 - DNA, 15 bp, Homo sapiens
catccctctacaatc

SEQ ID NO: 39687 - DNA, 15 bp, Homo sapiens
tcatccctctacaat

SEQ ID NO: 39688 - DNA, 15 bp, Homo sapiens
ttcatccctctacaa

SEQ ID NO: 39689 - DNA, 15 bp, Homo sapiens
attcatccctctaca

SEQ ID NO: 39690 - DNA, 15 bp, Homo sapiens
aattcatccctctac

SEQ ID NO: 39691 - DNA, 15 bp, Homo sapiens
taattcatccctcta

SEQ ID NO: 39692 - DNA, 15 bp, Homo sapiens
ctaattcatccctct

SEQ ID NO: 39693 - DNA, 15 bp, Homo sapiens
gctaattcatccctc

SEQ ID NO: 39694 - DNA, 15 bp, Homo sapiens
ggctaattcatccct

SEQ ID NO: 39695 - DNA, 15 bp, Homo sapiens
tggctaattcatccc

SEQ ID NO: 39696 - DNA, 15 bp, Homo sapiens
gtggctaattcatcc

SEQ ID NO: 39697 - DNA, 15 bp, Homo sapiens
agtggctaattcatc

SEQ ID NO: 39698 - DNA, 15 bp, Homo sapiens
gagtggctaattcat

SEQ ID NO: 39699 - DNA, 15 bp, Homo sapiens
agagtggctaattca

SEQ ID NO: 39700 - DNA, 15 bp, Homo sapiens
gagagtggctaattc

SEQ ID NO: 39701 - DNA, 15 bp, Homo sapiens
agagagtggctaatt

SEQ ID NO: 39702 - DNA, 15 bp, Homo sapiens
aagagagtggctaat

SEQ ID NO: 39703 - DNA, 15 bp, Homo sapiens
gaagagagtggctaa

SEQ ID NO: 39704 - DNA, 15 bp, Homo sapiens
agaagagagtggcta

SEQ ID NO: 39705 - DNA, 15 bp, Homo sapiens
cagaagagagtggct

SEQ ID NO: 39706 - DNA, 15 bp, Homo sapiens
tcagaagagagtggc

SEQ ID NO: 39707 - DNA, 15 bp, Homo sapiens
gtcagaagagagtgg

SEQ ID NO: 39708 - DNA, 15 bp, Homo sapiens
agtcagaagagagtg

SEQ ID NO: 39709 - DNA, 15 bp, Homo sapiens
aagtcagaagagagt

SEQ ID NO: 39710 - DNA, 15 bp, Homo sapiens
taagtcagaagagag

SEQ ID NO: 39711 - DNA, 15 bp, Homo sapiens
gtaagtcagaagaga

SEQ ID NO: 39712 - DNA, 15 bp, Homo sapiens
ggtaagtcagaagag

SEQ ID NO: 39713 - DNA, 15 bp, Homo sapiens
aggtaagtcagaaga

SEQ ID NO: 39714 - DNA, 15 bp, Homo sapiens
caggtaagtcagaag

SEQ ID NO: 39715 - DNA, 15 bp, Homo sapiens
ccaggtaagtcagaa

SEQ ID NO: 39716 - DNA, 15 bp, Homo sapiens
tccaggtaagtcaga

SEQ ID NO: 39717 - DNA, 15 bp, Homo sapiens
ctccaggtaagtcag

SEQ ID NO: 39718 - DNA, 15 bp, Homo sapiens
tctccaggtaagtca

SEQ ID NO: 39719 - DNA, 15 bp, Homo sapiens
ctctccaggtaagtc

SEQ ID NO: 39720 - DNA, 15 bp, Homo sapiens
actctccaggtaagt

SEQ ID NO: 39721 - DNA, 15 bp, Homo sapiens
tactctccaggtaag

SEQ ID NO: 39722 - DNA, 15 bp, Homo sapiens
ttactctccaggtaa

SEQ ID NO: 39723 - DNA, 15 bp, Homo sapiens
tttactctccaggta

SEQ ID NO: 39724 - DNA, 15 bp, Homo sapiens
atttactctccaggt

SEQ ID NO: 39725 - DNA, 15 bp, Homo sapiens
gatttactctccagg

SEQ ID NO: 39726 - DNA, 15 bp, Homo sapiens
tgatttactctccag

SEQ ID NO: 39727 - DNA, 15 bp, Homo sapiens
ttgatttactctcca

SEQ ID NO: 39728 - DNA, 15 bp, Homo sapiens
tttgatttactctcc

SEQ ID NO: 39729 - DNA, 15 bp, Homo sapiens
atttgatttactctc

SEQ ID NO: 39730 - DNA, 15 bp, Homo sapiens
gatttgatttactct

SEQ ID NO: 39731 - DNA, 15 bp, Homo sapiens
tgatttgatttactc

SEQ ID NO: 39732 - DNA, 15 bp, Homo sapiens
ttgatttgatttact

SEQ ID NO: 39733 - DNA, 15 bp, Homo sapiens
tttgatttgatttac

SEQ ID NO: 39734 - DNA, 15 bp, Homo sapiens
atttgatttgattta

SEQ ID NO: 39735 - DNA, 15 bp, Homo sapiens
gatttgatttgattt

SEQ ID NO: 39736 - DNA, 15 bp, Homo sapiens
tgatttgatttgatt

SEQ ID NO: 39737 - DNA, 15 bp, Homo sapiens
ttgatttgatttgat

SEQ ID NO: 39738 - DNA, 15 bp, Homo sapiens
cttgatttgatttga

SEQ ID NO: 39739 - DNA, 15 bp, Homo sapiens
tcttgatttgatttg

SEQ ID NO: 39740 - DNA, 15 bp, Homo sapiens
ttcttgatttgattt

SEQ ID NO: 39741 - DNA, 15 bp, Homo sapiens
cttcttgatttgatt

SEQ ID NO: 39742 - DNA, 15 bp, Homo sapiens
gcttcttgatttgat

SEQ ID NO: 39743 - DNA, 15 bp, Homo sapiens
tgcttcttgatttga

SEQ ID NO: 39744 - DNA, 15 bp, Homo sapiens
ttgcttcttgatttg

SEQ ID NO: 39745 - DNA, 15 bp, Homo sapiens
cttgcttcttgattt

SEQ ID NO: 39746 - DNA, 15 bp, Homo sapiens
ccttgcttcttgatt

SEQ ID NO: 39747 - DNA, 15 bp, Homo sapiens
tccttgcttcttgat

SEQ ID NO: 39748 - DNA, 15 bp, Homo sapiens
atccttgcttcttga

SEQ ID NO: 39749 - DNA, 15 bp, Homo sapiens
tatccttgcttcttg

SEQ ID NO: 39750 - DNA, 15 bp, Homo sapiens
atatccttgcttctt

SEQ ID NO: 39751 - DNA, 15 bp, Homo sapiens
catatccttgcttct

SEQ ID NO: 39752 - DNA, 15 bp, Homo sapiens
gcatatccttgcttc

SEQ ID NO: 39753 - DNA, 15 bp, Homo sapiens
tgcatatccttgctt

SEQ ID NO: 39754 - DNA, 15 bp, Homo sapiens
ttgcatatccttgct

SEQ ID NO: 39755 - DNA, 15 bp, Homo sapiens
tttgcatatccttgc

SEQ ID NO: 39756 - DNA, 15 bp, Homo sapiens
ttttgcatatccttg

SEQ ID NO: 39757 - DNA, 15 bp, Homo sapiens
tttttgcatatcctt

SEQ ID NO: 39758 - DNA, 15 bp, Homo sapiens
gtttttgcatatcct

SEQ ID NO: 39759 - DNA, 15 bp, Homo sapiens
ggtttttgcatatcc

SEQ ID NO: 39760 - DNA, 15 bp, Homo sapiens
aggtttttgcatatc

SEQ ID NO: 39761 - DNA, 15 bp, Homo sapiens
aaggtttttgcatat

SEQ ID NO: 39762 - DNA, 15 bp, Homo sapiens
taaggtttttgcata

SEQ ID NO: 39763 - DNA, 15 bp, Homo sapiens
ataaggtttttgcat

SEQ ID NO: 39764 - DNA, 15 bp, Homo sapiens
aataaggtttttgca

SEQ ID NO: 39765 - DNA, 15 bp, Homo sapiens
aaataaggtttttgc

SEQ ID NO: 39766 - DNA, 15 bp, Homo sapiens
gaaataaggtttttg

SEQ ID NO: 39767 - DNA, 15 bp, Homo sapiens
ggaaataaggttttt

SEQ ID NO: 39768 - DNA, 15 bp, Homo sapiens
gggaaataaggtttt

SEQ ID NO: 39769 - DNA, 15 bp, Homo sapiens
ggggaaataaggttt

SEQ ID NO: 39770 - DNA, 15 bp, Homo sapiens
tggggaaataaggtt

SEQ ID NO: 39771 - DNA, 15 bp, Homo sapiens
atggggaaataaggt

SEQ ID NO: 39772 - DNA, 15 bp, Homo sapiens
tatggggaaataagg

SEQ ID NO: 39773 - DNA, 15 bp, Homo sapiens
ttatggggaaataag

SEQ ID NO: 39774 - DNA, 15 bp, Homo sapiens
tttatggggaaataa

SEQ ID NO: 39775 - DNA, 15 bp, Homo sapiens
ctttatggggaaata

SEQ ID NO: 39776 - DNA, 15 bp, Homo sapiens
actttatggggaaat

SEQ ID NO: 39777 - DNA, 15 bp, Homo sapiens
aactttatggggaaa

SEQ ID NO: 39778 - DNA, 15 bp, Homo sapiens
aaactttatggggaa

SEQ ID NO: 39779 - DNA, 15 bp, Homo sapiens
aaaactttatgggga

SEQ ID NO: 39780 - DNA, 15 bp, Homo sapiens
aaaaactttatgggg

SEQ ID NO: 39781 - DNA, 15 bp, Homo sapiens
taaaaactttatggg

SEQ ID NO: 39782 - DNA, 15 bp, Homo sapiens
ataaaaactttatgg

SEQ ID NO: 39783 - DNA, 15 bp, Homo sapiens
aataaaaactttatg

SEQ ID NO: 39784 - DNA, 15 bp, Homo sapiens
gaataaaaactttat

SEQ ID NO: 39785 - DNA, 15 bp, Homo sapiens
agaataaaaacttta

SEQ ID NO: 39786 - DNA, 15 bp, Homo sapiens
cagaataaaaacttt

SEQ ID NO: 39787 - DNA, 15 bp, Homo sapiens
gcagaataaaaactt

SEQ ID NO: 39788 - DNA, 15 bp, Homo sapiens
ggcagaataaaaact

SEQ ID NO: 39789 - DNA, 15 bp, Homo sapiens
gggcagaataaaaac

SEQ ID NO: 39790 - DNA, 15 bp, Homo sapiens
tgggcagaataaaaa

SEQ ID NO: 39791 - DNA, 15 bp, Homo sapiens
ctgggcagaataaaa

SEQ ID NO: 39792 - DNA, 15 bp, Homo sapiens
actgggcagaataaa

SEQ ID NO: 39793 - DNA, 15 bp, Homo sapiens
aactgggcagaataa

SEQ ID NO: 39794 - DNA, 15 bp, Homo sapiens
aaactgggcagaata

SEQ ID NO: 39795 - DNA, 15 bp, Homo sapiens
gaaactgggcagaat

SEQ ID NO: 39796 - DNA, 15 bp, Homo sapiens
agaaactgggcagaa

SEQ ID NO: 39797 - DNA, 15 bp, Homo sapiens
cagaaactgggcaga

SEQ ID NO: 39798 - DNA, 15 bp, Homo sapiens
ccagaaactgggcag

SEQ ID NO: 39799 - DNA, 15 bp, Homo sapiens
tccagaaactgggca

SEQ ID NO: 39800 - DNA, 15 bp, Homo sapiens
atccagaaactgggc

SEQ ID NO: 39801 - DNA, 15 bp, Homo sapiens
aatccagaaactggg

SEQ ID NO: 39802 - DNA, 15 bp, Homo sapiens
caatccagaaactgg

SEQ ID NO: 39803 - DNA, 15 bp, Homo sapiens
gcaatccagaaactg

SEQ ID NO: 39804 - DNA, 15 bp, Homo sapiens
tgcaatccagaaact

SEQ ID NO: 39805 - DNA, 15 bp, Homo sapiens
ttgcaatccagaaac

SEQ ID NO: 39806 - DNA, 15 bp, Homo sapiens
cttgcaatccagaaa

SEQ ID NO: 39807 - DNA, 15 bp, Homo sapiens
tcttgcaatccagaa

SEQ ID NO: 39808 - DNA, 15 bp, Homo sapiens
ttcttgcaatccaga

SEQ ID NO: 39809 - DNA, 15 bp, Homo sapiens
tttcttgcaatccag

SEQ ID NO: 39810 - DNA, 15 bp, Homo sapiens
ttttcttgcaatcca

SEQ ID NO: 39811 - DNA, 15 bp, Homo sapiens
tttttcttgcaatcc

SEQ ID NO: 39812 - DNA, 15 bp, Homo sapiens
gtttttcttgcaatc

SEQ ID NO: 39813 - DNA, 15 bp, Homo sapiens
ggtttttcttgcaat

SEQ ID NO: 39814 - DNA, 15 bp, Homo sapiens
tggtttttcttgcaa

SEQ ID NO: 39815 - DNA, 15 bp, Homo sapiens
ttggtttttcttgca

SEQ ID NO: 39816 - DNA, 15 bp, Homo sapiens
tttggtttttcttgc

SEQ ID NO: 39817 - DNA, 15 bp, Homo sapiens
atttggtttttcttg

SEQ ID NO: 39818 - DNA, 15 bp, Homo sapiens
tatttggtttttctt

SEQ ID NO: 39819 - DNA, 15 bp, Homo sapiens
gtatttggtttttct

SEQ ID NO: 39820 - DNA, 15 bp, Homo sapiens
tgtatttggtttttc

SEQ ID NO: 39821 - DNA, 15 bp, Homo sapiens
ctgtatttggttttt

SEQ ID NO: 39822 - DNA, 15 bp, Homo sapiens
gctgtatttggtttt

SEQ ID NO: 39823 - DNA, 15 bp, Homo sapiens
agctgtatttggttt

SEQ ID NO: 39824 - DNA, 15 bp, Homo sapiens
tagctgtatttggtt

SEQ ID NO: 39825 - DNA, 15 bp, Homo sapiens
ttagctgtatttggt

SEQ ID NO: 39826 - DNA, 15 bp, Homo sapiens
attagctgtatttgg

SEQ ID NO: 39827 - DNA, 15 bp, Homo sapiens
cattagctgtatttg

SEQ ID NO: 39828 - DNA, 15 bp, Homo sapiens
tcattagctgtattt

SEQ ID NO: 39829 - DNA, 15 bp, Homo sapiens
atcattagctgtatt

SEQ ID NO: 39830 - DNA, 15 bp, Homo sapiens
aatcattagctgtat

SEQ ID NO: 39831 - DNA, 15 bp, Homo sapiens
caatcattagctgta

SEQ ID NO: 39832 - DNA, 15 bp, Homo sapiens
tcaatcattagctgt

SEQ ID NO: 39833 - DNA, 15 bp, Homo sapiens
ttcaatcattagctg

SEQ ID NO: 39834 - DNA, 15 bp, Homo sapiens
tttcaatcattagct

SEQ ID NO: 39835 - DNA, 15 bp, Homo sapiens
gtttcaatcattagc

SEQ ID NO: 39836 - DNA, 15 bp, Homo sapiens
tgtttcaatcattag

SEQ ID NO: 39837 - DNA, 15 bp, Homo sapiens
gtgtttcaatcatta

SEQ ID NO: 39838 - DNA, 15 bp, Homo sapiens
agtgtttcaatcatt

SEQ ID NO: 39839 - DNA, 15 bp, Homo sapiens
cagtgtttcaatcat

SEQ ID NO: 39840 - DNA, 15 bp, Homo sapiens
gcagtgtttcaatca

SEQ ID NO: 39841 - DNA, 15 bp, Homo sapiens
agcagtgtttcaatc

SEQ ID NO: 39842 - DNA, 15 bp, Homo sapiens
cagcagtgtttcaat

SEQ ID NO: 39843 - DNA, 15 bp, Homo sapiens
acagcagtgtttcaa

SEQ ID NO: 39844 - DNA, 15 bp, Homo sapiens
gacagcagtgtttca

SEQ ID NO: 39845 - DNA, 15 bp, Homo sapiens
agacagcagtgtttc

SEQ ID NO: 39846 - DNA, 15 bp, Homo sapiens
tagacagcagtgttt

SEQ ID NO: 39847 - DNA, 15 bp, Homo sapiens
ttagacagcagtgtt

SEQ ID NO: 39848 - DNA, 15 bp, Homo sapiens
tttagacagcagtgt

SEQ ID NO: 39849 - DNA, 15 bp, Homo sapiens
ctttagacagcagtg

SEQ ID NO: 39850 - DNA, 15 bp, Homo sapiens
gctttagacagcagt

SEQ ID NO: 39851 - DNA, 15 bp, Homo sapiens
tgctttagacagcag

SEQ ID NO: 39852 - DNA, 15 bp, Homo sapiens
ctgctttagacagca

SEQ ID NO: 39853 - DNA, 15 bp, Homo sapiens
actgctttagacagc

SEQ ID NO: 39854 - DNA, 15 bp, Homo sapiens
cactgctttagacag

SEQ ID NO: 39855 - DNA, 15 bp, Homo sapiens
gcactgctttagaca

SEQ ID NO: 39856 - DNA, 15 bp, Homo sapiens
agcactgctttagac

SEQ ID NO: 39857 - DNA, 15 bp, Homo sapiens
aagcactgctttaga

SEQ ID NO: 39858 - DNA, 15 bp, Homo sapiens
caagcactgctttag

SEQ ID NO: 39859 - DNA, 15 bp, Homo sapiens
acaagcactgcttta

SEQ ID NO: 39860 - DNA, 15 bp, Homo sapiens
cacaagcactgcttt

SEQ ID NO: 39861 - DNA, 15 bp, Homo sapiens
tcacaagcactgctt

SEQ ID NO: 39862 - DNA, 15 bp, Homo sapiens
atcacaagcactgct

SEQ ID NO: 39863 - DNA, 15 bp, Homo sapiens
catcacaagcactgc

SEQ ID NO: 39864 - DNA, 15 bp, Homo sapiens
tcatcacaagcactg

SEQ ID NO: 39865 - DNA, 15 bp, Homo sapiens
ttcatcacaagcact

SEQ ID NO: 39866 - DNA, 15 bp, Homo sapiens
attcatcacaagcac

SEQ ID NO: 39867 - DNA, 15 bp, Homo sapiens
aattcatcacaagca

SEQ ID NO: 39868 - DNA, 15 bp, Homo sapiens
aaattcatcacaagc

SEQ ID NO: 39869 - DNA, 15 bp, Homo sapiens
aaaattcatcacaag

SEQ ID NO: 39870 - DNA, 15 bp, Homo sapiens
aaaaattcatcacaa

SEQ ID NO: 39871 - DNA, 15 bp, Homo sapiens
aaaaaattcatcaca

SEQ ID NO: 39872 - DNA, 15 bp, Homo sapiens
gaaaaaattcatcac

SEQ ID NO: 39873 - DNA, 15 bp, Homo sapiens
ggaaaaaattcatca

SEQ ID NO: 39874 - DNA, 15 bp, Homo sapiens
gggaaaaaattcatc

SEQ ID NO: 39875 - DNA, 15 bp, Homo sapiens
agggaaaaaattcat

SEQ ID NO: 39876 - DNA, 15 bp, Homo sapiens
aagggaaaaaattca

SEQ ID NO: 39877 - DNA, 15 bp, Homo sapiens
gaagggaaaaaattc

SEQ ID NO: 39878 - DNA, 15 bp, Homo sapiens
ggaagggaaaaaatt

SEQ ID NO: 39879 - DNA, 15 bp, Homo sapiens
aggaagggaaaaaat

SEQ ID NO: 39880 - DNA, 15 bp, Homo sapiens
gaggaagggaaaaaa

SEQ ID NO: 39881 - DNA, 15 bp, Homo sapiens
agaggaagggaaaaa

SEQ ID NO: 39882 - DNA, 15 bp, Homo sapiens
aagaggaagggaaaa

SEQ ID NO: 39883 - DNA, 15 bp, Homo sapiens
caagaggaagggaaa

SEQ ID NO: 39884 - DNA, 15 bp, Homo sapiens
tcaagaggaagggaa

SEQ ID NO: 39885 - DNA, 15 bp, Homo sapiens
gtcaagaggaaggga

SEQ ID NO: 39886 - DNA, 15 bp, Homo sapiens
ggtcaagaggaaggg

SEQ ID NO: 39887 - DNA, 15 bp, Homo sapiens
tggtcaagaggaagg

SEQ ID NO: 39888 - DNA, 15 bp, Homo sapiens
ctggtcaagaggaag

SEQ ID NO: 39889 - DNA, 15 bp, Homo sapiens
gctggtcaagaggaa

SEQ ID NO: 39890 - DNA, 15 bp, Homo sapiens
tgctggtcaagagga

SEQ ID NO: 39891 - DNA, 15 bp, Homo sapiens
ctgctggtcaagagg

SEQ ID NO: 39892 - DNA, 15 bp, Homo sapiens
tctgctggtcaagag

SEQ ID NO: 39893 - DNA, 15 bp, Homo sapiens
ctctgctggtcaaga

SEQ ID NO: 39894 - DNA, 15 bp, Homo sapiens
tctctgctggtcaag

SEQ ID NO: 39895 - DNA, 15 bp, Homo sapiens
gtctctgctggtcaa

SEQ ID NO: 39896 - DNA, 15 bp, Homo sapiens
ggtctctgctggtca

SEQ ID NO: 39897 - DNA, 15 bp, Homo sapiens
aggtctctgctggtc

SEQ ID NO: 39898 - DNA, 15 bp, Homo sapiens
taggtctctgctggt

SEQ ID NO: 39899 - DNA, 15 bp, Homo sapiens
ttaggtctctgctgg

SEQ ID NO: 39900 - DNA, 15 bp, Homo sapiens
attaggtctctgctg

SEQ ID NO: 39901 - DNA, 15 bp, Homo sapiens
cattaggtctctgct

SEQ ID NO: 39902 - DNA, 15 bp, Homo sapiens
ccattaggtctctgc

SEQ ID NO: 39903 - DNA, 15 bp, Homo sapiens
gccattaggtctctg

SEQ ID NO: 39904 - DNA, 15 bp, Homo sapiens
agccattaggtctct

SEQ ID NO: 39905 - DNA, 15 bp, Homo sapiens
tagccattaggtctc

SEQ ID NO: 39906 - DNA, 15 bp, Homo sapiens
gtagccattaggtct

SEQ ID NO: 39907 - DNA, 15 bp, Homo sapiens
agtagccattaggtc

SEQ ID NO: 39908 - DNA, 15 bp, Homo sapiens
aagtagccattaggt

SEQ ID NO: 39909 - DNA, 15 bp, Homo sapiens
caagtagccattagg

SEQ ID NO: 39910 - DNA, 15 bp, Homo sapiens
ccaagtagccattag

SEQ ID NO: 39911 - DNA, 15 bp, Homo sapiens
gccaagtagccatta

SEQ ID NO: 39912 - DNA, 15 bp, Homo sapiens
tgccaagtagccatt

SEQ ID NO: 39913 - DNA, 15 bp, Homo sapiens
ttgccaagtagccat

SEQ ID NO: 39914 - DNA, 15 bp, Homo sapiens
tttgccaagtagcca

SEQ ID NO: 39915 - DNA, 15 bp, Homo sapiens
ttttgccaagtagcc

SEQ ID NO: 39916 - DNA, 15 bp, Homo sapiens
gttttgccaagtagc

SEQ ID NO: 39917 - DNA, 15 bp, Homo sapiens
agttttgccaagtag

SEQ ID NO: 39918 - DNA, 15 bp, Homo sapiens
cagttttgccaagta

SEQ ID NO: 39919 - DNA, 15 bp, Homo sapiens
tcagttttgccaagt

SEQ ID NO: 39920 - DNA, 15 bp, Homo sapiens
gtcagttttgccaag

SEQ ID NO: 39921 - DNA, 15 bp, Homo sapiens
agtcagttttgccaa

SEQ ID NO: 39922 - DNA, 15 bp, Homo sapiens
aagtcagttttgcca

SEQ ID NO: 39923 - DNA, 15 bp, Homo sapiens
aaagtcagttttgcc

SEQ ID NO: 39924 - DNA, 15 bp, Homo sapiens
caaagtcagttttgc

SEQ ID NO: 39925 - DNA, 15 bp, Homo sapiens
acaaagtcagttttg

SEQ ID NO: 39926 - DNA, 15 bp, Homo sapiens
gacaaagtcagtttt

SEQ ID NO: 39927 - DNA, 15 bp, Homo sapiens
agacaaagtcagttt

SEQ ID NO: 39928 - DNA, 15 bp, Homo sapiens
aagacaaagtcagtt

SEQ ID NO: 39929 - DNA, 15 bp, Homo sapiens
gaagacaaagtcagt

SEQ ID NO: 39930 - DNA, 15 bp, Homo sapiens
ggaagacaaagtcag

SEQ ID NO: 39931 - DNA, 15 bp, Homo sapiens
gggaagacaaagtca

SEQ ID NO: 39932 - DNA, 15 bp, Homo sapiens
tgggaagacaaagtc

SEQ ID NO: 39933 - DNA, 15 bp, Homo sapiens
gtgggaagacaaagt

SEQ ID NO: 39934 - DNA, 15 bp, Homo sapiens
ggtgggaagacaaag

SEQ ID NO: 39935 - DNA, 15 bp, Homo sapiens
gggtgggaagacaaa

SEQ ID NO: 39936 - DNA, 15 bp, Homo sapiens
ggggtgggaagacaa

SEQ ID NO: 39937 - DNA, 15 bp, Homo sapiens
aggggtgggaagaca

SEQ ID NO: 39938 - DNA, 15 bp, Homo sapiens
aaggggtgggaagac

SEQ ID NO: 39939 - DNA, 15 bp, Homo sapiens
taaggggtgggaaga

SEQ ID NO: 39940 - DNA, 15 bp, Homo sapiens
gtaaggggtgggaag

SEQ ID NO: 39941 - DNA, 15 bp, Homo sapiens
ggtaaggggtgggaa

SEQ ID NO: 39942 - DNA, 15 bp, Homo sapiens
aggtaaggggtggga

SEQ ID NO: 39943 - DNA, 15 bp, Homo sapiens
caggtaaggggtggg

SEQ ID NO: 39944 - DNA, 15 bp, Homo sapiens
gcaggtaaggggtgg

SEQ ID NO: 39945 - DNA, 15 bp, Homo sapiens
ggcaggtaaggggtg

SEQ ID NO: 39946 - DNA, 15 bp, Homo sapiens
tggcaggtaaggggt

SEQ ID NO: 39947 - DNA, 15 bp, Homo sapiens
ctggcaggtaagggg

SEQ ID NO: 39948 - DNA, 15 bp, Homo sapiens
tctggcaggtaaggg

SEQ ID NO: 39949 - DNA, 15 bp, Homo sapiens
ctctggcaggtaagg

SEQ ID NO: 39950 - DNA, 15 bp, Homo sapiens
cctctggcaggtaag

SEQ ID NO: 39951 - DNA, 15 bp, Homo sapiens
ccctctggcaggtaa

SEQ ID NO: 39952 - DNA, 15 bp, Homo sapiens
gccctctggcaggta

SEQ ID NO: 39953 - DNA, 15 bp, Homo sapiens
ggccctctggcaggt

SEQ ID NO: 39954 - DNA, 15 bp, Homo sapiens
gggccctctggcagg

SEQ ID NO: 39955 - DNA, 15 bp, Homo sapiens
tgggccctctggcag

SEQ ID NO: 39956 - DNA, 15 bp, Homo sapiens
ctgggccctctggca

SEQ ID NO: 39957 - DNA, 15 bp, Homo sapiens
tctgggccctctggc

SEQ ID NO: 39958 - DNA, 15 bp, Homo sapiens
ttctgggccctctgg

SEQ ID NO: 39959 - DNA, 15 bp, Homo sapiens
tttctgggccctctg

SEQ ID NO: 39960 - DNA, 15 bp, Homo sapiens
atttctgggccctct

SEQ ID NO: 39961 - DNA, 15 bp, Homo sapiens
catttctgggccctc

SEQ ID NO: 39962 - DNA, 15 bp, Homo sapiens
gcatttctgggccct

SEQ ID NO: 39963 - DNA, 15 bp, Homo sapiens
ggcatttctgggccc

SEQ ID NO: 39964 - DNA, 15 bp, Homo sapiens
aggcatttctgggcc

SEQ ID NO: 39965 - DNA, 15 bp, Homo sapiens
taggcatttctgggc

SEQ ID NO: 39966 - DNA, 15 bp, Homo sapiens
ttaggcatttctggg

SEQ ID NO: 39967 - DNA, 15 bp, Homo sapiens
cttaggcatttctgg

SEQ ID NO: 39968 - DNA, 15 bp, Homo sapiens
ccttaggcatttctg

SEQ ID NO: 39969 - DNA, 15 bp, Homo sapiens
gccttaggcatttct

SEQ ID NO: 39970 - DNA, 15 bp, Homo sapiens
agccttaggcatttc

SEQ ID NO: 39971 - DNA, 15 bp, Homo sapiens
gagccttaggcattt

SEQ ID NO: 39972 - DNA, 15 bp, Homo sapiens
ggagccttaggcatt

SEQ ID NO: 39973 - DNA, 15 bp, Homo sapiens
aggagccttaggcat

SEQ ID NO: 39974 - DNA, 15 bp, Homo sapiens
aaggagccttaggca

SEQ ID NO: 39975 - DNA, 15 bp, Homo sapiens
aaaggagccttaggc

SEQ ID NO: 39976 - DNA, 15 bp, Homo sapiens
taaaggagccttagg

SEQ ID NO: 39977 - DNA, 15 bp, Homo sapiens
ctaaaggagccttag

SEQ ID NO: 39978 - DNA, 15 bp, Homo sapiens
actaaaggagcctta

SEQ ID NO: 39979 - DNA, 15 bp, Homo sapiens
aactaaaggagcctt

SEQ ID NO: 39980 - DNA, 15 bp, Homo sapiens
taactaaaggagcct

SEQ ID NO: 39981 - DNA, 15 bp, Homo sapiens
gtaactaaaggagcc

SEQ ID NO: 39982 - DNA, 15 bp, Homo sapiens
tgtaactaaaggagc

SEQ ID NO: 39983 - DNA, 15 bp, Homo sapiens
ctgtaactaaaggag

SEQ ID NO: 39984 - DNA, 15 bp, Homo sapiens
tctgtaactaaagga

SEQ ID NO: 39985 - DNA, 15 bp, Homo sapiens
ttctgtaactaaagg

SEQ ID NO: 39986 - DNA, 15 bp, Homo sapiens
tttctgtaactaaag

SEQ ID NO: 39987 - DNA, 15 bp, Homo sapiens
ctttctgtaactaaa

SEQ ID NO: 39988 - DNA, 15 bp, Homo sapiens
actttctgtaactaa

SEQ ID NO: 39989 - DNA, 15 bp, Homo sapiens
aactttctgtaacta

SEQ ID NO: 39990 - DNA, 15 bp, Homo sapiens
aaactttctgtaact

SEQ ID NO: 39991 - DNA, 15 bp, Homo sapiens
caaactttctgtaac

SEQ ID NO: 39992 - DNA, 15 bp, Homo sapiens
gcaaactttctgtaa

SEQ ID NO: 39993 - DNA, 15 bp, Homo sapiens
agcaaactttctgta

SEQ ID NO: 39994 - DNA, 15 bp, Homo sapiens
aagcaaactttctgt

SEQ ID NO: 39995 - DNA, 15 bp, Homo sapiens
aaagcaaactttctg

SEQ ID NO: 39996 - DNA, 15 bp, Homo sapiens
aaaagcaaactttct

SEQ ID NO: 39997 - DNA, 15 bp, Homo sapiens
taaaagcaaactttc

SEQ ID NO: 39998 - DNA, 15 bp, Homo sapiens
gtaaaagcaaacttt

SEQ ID NO: 39999 - DNA, 15 bp, Homo sapiens
agtaaaagcaaactt

SEQ ID NO: 40000 - DNA, 15 bp, Homo sapiens
cagtaaaagcaaact

SEQ ID NO: 40001 - DNA, 15 bp, Homo sapiens
tcagtaaaagcaaac

SEQ ID NO: 40002 - DNA, 15 bp, Homo sapiens
ctcagtaaaagcaaa

SEQ ID NO: 40003 - DNA, 15 bp, Homo sapiens
tctcagtaaaagcaa

SEQ ID NO: 40004 - DNA, 15 bp, Homo sapiens
atctcagtaaaagca

SEQ ID NO: 40005 - DNA, 15 bp, Homo sapiens
gatctcagtaaaagc

SEQ ID NO: 40006 - DNA, 15 bp, Homo sapiens
agatctcagtaaaag

SEQ ID NO: 40007 - DNA, 15 bp, Homo sapiens
aagatctcagtaaaa

SEQ ID NO: 40008 - DNA, 15 bp, Homo sapiens
gaagatctcagtaaa

SEQ ID NO: 40009 - DNA, 15 bp, Homo sapiens
ggaagatctcagtaa

SEQ ID NO: 40010 - DNA, 15 bp, Homo sapiens
tggaagatctcagta

SEQ ID NO: 40011 - DNA, 15 bp, Homo sapiens
ctggaagatctcagt

SEQ ID NO: 40012 - DNA, 15 bp, Homo sapiens
gctggaagatctcag

SEQ ID NO: 40013 - DNA, 15 bp, Homo sapiens
ggctggaagatctca

SEQ ID NO: 40014 - DNA, 15 bp, Homo sapiens
tggctggaagatctc

SEQ ID NO: 40015 - DNA, 15 bp, Homo sapiens
gtggctggaagatct

SEQ ID NO: 40016 - DNA, 15 bp, Homo sapiens
agtggctggaagatc

SEQ ID NO: 40017 - DNA, 15 bp, Homo sapiens
cagtggctggaagat

SEQ ID NO: 40018 - DNA, 15 bp, Homo sapiens
tcagtggctggaaga

SEQ ID NO: 40019 - DNA, 15 bp, Homo sapiens
atcagtggctggaag

SEQ ID NO: 40020 - DNA, 15 bp, Homo sapiens
aatcagtggctggaa

SEQ ID NO: 40021 - DNA, 15 bp, Homo sapiens
gaatcagtggctgga

SEQ ID NO: 40022 - DNA, 15 bp, Homo sapiens
ggaatcagtggctgg

SEQ ID NO: 40023 - DNA, 15 bp, Homo sapiens
gggaatcagtggctg

SEQ ID NO: 40024 - DNA, 15 bp, Homo sapiens
tgggaatcagtggct

SEQ ID NO: 40025 - DNA, 15 bp, Homo sapiens
atgggaatcagtggc

SEQ ID NO: 40026 - DNA, 15 bp, Homo sapiens
aatgggaatcagtgg

SEQ ID NO: 40027 - DNA, 15 bp, Homo sapiens
aaatgggaatcagtg

SEQ ID NO: 40028 - DNA, 15 bp, Homo sapiens
taaatgggaatcagt

SEQ ID NO: 40029 - DNA, 15 bp, Homo sapiens
ataaatgggaatcag

SEQ ID NO: 40030 - DNA, 15 bp, Homo sapiens
tataaatgggaatca

SEQ ID NO: 40031 - DNA, 15 bp, Homo sapiens
ctataaatgggaatc

SEQ ID NO: 40032 - DNA, 15 bp, Homo sapiens
tctataaatgggaat

SEQ ID NO: 40033 - DNA, 15 bp, Homo sapiens
atctataaatgggaa

SEQ ID NO: 40034 - DNA, 15 bp, Homo sapiens
gatctataaatggga

SEQ ID NO: 40035 - DNA, 15 bp, Homo sapiens
agatctataaatggg

SEQ ID NO: 40036 - DNA, 15 bp, Homo sapiens
cagatctataaatgg

SEQ ID NO: 40037 - DNA, 15 bp, Homo sapiens
ccagatctataaatg

SEQ ID NO: 40038 - DNA, 15 bp, Homo sapiens
accagatctataaat

SEQ ID NO: 40039 - DNA, 15 bp, Homo sapiens
caccagatctataaa

SEQ ID NO: 40040 - DNA, 15 bp, Homo sapiens
tcaccagatctataa

SEQ ID NO: 40041 - DNA, 15 bp, Homo sapiens
atcaccagatctata

SEQ ID NO: 40042 - DNA, 15 bp, Homo sapiens
aatcaccagatctat

SEQ ID NO: 40043 - DNA, 15 bp, Homo sapiens
caatcaccagatcta

SEQ ID NO: 40044 - DNA, 15 bp, Homo sapiens
gcaatcaccagatct

SEQ ID NO: 40045 - DNA, 15 bp, Homo sapiens
agcaatcaccagatc

SEQ ID NO: 40046 - DNA, 15 bp, Homo sapiens
cagcaatcaccagat

SEQ ID NO: 40047 - DNA, 15 bp, Homo sapiens
acagcaatcaccaga

SEQ ID NO: 40048 - DNA, 15 bp, Homo sapiens
aacagcaatcaccag

SEQ ID NO: 40049 - DNA, 15 bp, Homo sapiens
caacagcaatcacca

SEQ ID NO: 40050 - DNA, 15 bp, Homo sapiens
tcaacagcaatcacc

SEQ ID NO: 40051 - DNA, 15 bp, Homo sapiens
gtcaacagcaatcac

SEQ ID NO: 40052 - DNA, 15 bp, Homo sapiens
tgtcaacagcaatca

SEQ ID NO: 40053 - DNA, 15 bp, Homo sapiens
atgtcaacagcaatc

SEQ ID NO: 40054 - DNA, 15 bp, Homo sapiens
gatgtcaacagcaat

SEQ ID NO: 40055 - DNA, 15 bp, Homo sapiens
tgatgtcaacagcaa

SEQ ID NO: 40056 - DNA, 15 bp, Homo sapiens
ctgatgtcaacagca

SEQ ID NO: 40057 - DNA, 15 bp, Homo sapiens
actgatgtcaacagc

SEQ ID NO: 40058 - DNA, 15 bp, Homo sapiens
aactgatgtcaacag

SEQ ID NO: 40059 - DNA, 15 bp, Homo sapiens
caactgatgtcaaca

SEQ ID NO: 40060 - DNA, 15 bp, Homo sapiens
tcaactgatgtcaac

SEQ ID NO: 40061 - DNA, 15 bp, Homo sapiens
ttcaactgatgtcaa

SEQ ID NO: 40062 - DNA, 15 bp, Homo sapiens
tttcaactgatgtca

SEQ ID NO: 40063 - DNA, 15 bp, Homo sapiens
ttttcaactgatgtc

SEQ ID NO: 40064 - DNA, 15 bp, Homo sapiens
attttcaactgatgt

SEQ ID NO: 40065 - DNA, 15 bp, Homo sapiens
aattttcaactgatg

SEQ ID NO: 40066 - DNA, 15 bp, Homo sapiens
taattttcaactgat

SEQ ID NO: 40067 - DNA, 15 bp, Homo sapiens
ataattttcaactga

SEQ ID NO: 40068 - DNA, 15 bp, Homo sapiens
aataattttcaactg

SEQ ID NO: 40069 - DNA, 15 bp, Homo sapiens
aaataattttcaact

SEQ ID NO: 40070 - DNA, 15 bp, Homo sapiens
aaaataattttcaac

SEQ ID NO: 40071 - DNA, 15 bp, Homo sapiens
aaaaataattttcaa

SEQ ID NO: 40072 - DNA, 15 bp, Homo sapiens
taaaaataattttca

SEQ ID NO: 40073 - DNA, 15 bp, Homo sapiens
ttaaaaataattttc

SEQ ID NO: 40074 - DNA, 15 bp, Homo sapiens
tttaaaaataatttt

SEQ ID NO: 40075 - DNA, 15 bp, Homo sapiens
ttttaaaaataattt

SEQ ID NO: 40076 - DNA, 15 bp, Homo sapiens
tttttaaaaataatt

SEQ ID NO: 40077 - DNA, 15 bp, Homo sapiens
gtttttaaaaataat

SEQ ID NO: 40078 - DNA, 15 bp, Homo sapiens
ggtttttaaaaataa

SEQ ID NO: 40079 - DNA, 15 bp, Homo sapiens
tggtttttaaaaata

SEQ ID NO: 40080 - DNA, 15 bp, Homo sapiens
gtggtttttaaaaat

SEQ ID NO: 40081 - DNA, 15 bp, Homo sapiens
agtggtttttaaaaa

SEQ ID NO: 40082 - DNA, 15 bp, Homo sapiens
aagtggtttttaaaa

SEQ ID NO: 40083 - DNA, 15 bp, Homo sapiens
caagtggtttttaaa

SEQ ID NO: 40084 - DNA, 15 bp, Homo sapiens
gcaagtggtttttaa

SEQ ID NO: 40085 - DNA, 15 bp, Homo sapiens
tgcaagtggttttta

SEQ ID NO: 40086 - DNA, 15 bp, Homo sapiens
ctgcaagtggttttt

SEQ ID NO: 40087 - DNA, 15 bp, Homo sapiens
actgcaagtggtttt

SEQ ID NO: 40088 - DNA, 15 bp, Homo sapiens
aactgcaagtggttt

SEQ ID NO: 40089 - DNA, 15 bp, Homo sapiens
caactgcaagtggtt

SEQ ID NO: 40090 - DNA, 15 bp, Homo sapiens
gcaactgcaagtggt

SEQ ID NO: 40091 - DNA, 15 bp, Homo sapiens
tgcaactgcaagtgg

SEQ ID NO: 40092 - DNA, 15 bp, Homo sapiens
ttgcaactgcaagtg

SEQ ID NO: 40093 - DNA, 15 bp, Homo sapiens
tttgcaactgcaagt

SEQ ID NO: 40094 - DNA, 15 bp, Homo sapiens
atttgcaactgcaag

SEQ ID NO: 40095 - DNA, 15 bp, Homo sapiens
gatttgcaactgcaa

SEQ ID NO: 40096 - DNA, 15 bp, Homo sapiens
ggatttgcaactgca

SEQ ID NO: 40097 - DNA, 15 bp, Homo sapiens
aggatttgcaactgc

SEQ ID NO: 40098 - DNA, 15 bp, Homo sapiens
aaggatttgcaactg

SEQ ID NO: 40099 - DNA, 15 bp, Homo sapiens
aaaggatttgcaact

SEQ ID NO: 40100 - DNA, 15 bp, Homo sapiens
aaaaggatttgcaac

SEQ ID NO: 40101 - DNA, 15 bp, Homo sapiens
aaaaaggatttgcaa

SEQ ID NO: 40102 - DNA, 15 bp, Homo sapiens
taaaaaggatttgca

SEQ ID NO: 40103 - DNA, 15 bp, Homo sapiens
ataaaaaggatttgc

SEQ ID NO: 40104 - DNA, 15 bp, Homo sapiens
tataaaaaggatttg

SEQ ID NO: 40105 - DNA, 15 bp, Homo sapiens
ttataaaaaggattt

SEQ ID NO: 40106 - DNA, 15 bp, Homo sapiens
gttataaaaaggatt

SEQ ID NO: 40107 - DNA, 15 bp, Homo sapiens
agttataaaaaggat

SEQ ID NO: 40108 - DNA, 15 bp, Homo sapiens
gagttataaaaagga

SEQ ID NO: 40109 - DNA, 15 bp, Homo sapiens
agagttataaaaagg

SEQ ID NO: 40110 - DNA, 15 bp, Homo sapiens
cagagttataaaaag

SEQ ID NO: 40111 - DNA, 15 bp, Homo sapiens
acagagttataaaaa

SEQ ID NO: 40112 - DNA, 15 bp, Homo sapiens
tacagagttataaaa

SEQ ID NO: 40113 - DNA, 15 bp, Homo sapiens
ttacagagttataaa

SEQ ID NO: 40114 - DNA, 15 bp, Homo sapiens
gttacagagttataa

SEQ ID NO: 40115 - DNA, 15 bp, Homo sapiens
agttacagagttata

SEQ ID NO: 40116 - DNA, 15 bp, Homo sapiens
gagttacagagttat

SEQ ID NO: 40117 - DNA, 15 bp, Homo sapiens
tgagttacagagtta

SEQ ID NO: 40118 - DNA, 15 bp, Homo sapiens
ctgagttacagagtt

SEQ ID NO: 40119 - DNA, 15 bp, Homo sapiens
tctgagttacagagt

SEQ ID NO: 40120 - DNA, 15 bp, Homo sapiens
ttctgagttacagag

SEQ ID NO: 40121 - DNA, 15 bp, Homo sapiens
attctgagttacaga

SEQ ID NO: 40122 - DNA, 15 bp, Homo sapiens
tattctgagttacag

SEQ ID NO: 40123 - DNA, 15 bp, Homo sapiens
atattctgagttaca

SEQ ID NO: 40124 - DNA, 15 bp, Homo sapiens
tatattctgagttac

SEQ ID NO: 40125 - DNA, 15 bp, Homo sapiens
ctatattctgagtta

SEQ ID NO: 40126 - DNA, 15 bp, Homo sapiens
tctatattctgagtt

SEQ ID NO: 40127 - DNA, 15 bp, Homo sapiens
ttctatattctgagt

SEQ ID NO: 40128 - DNA, 15 bp, Homo sapiens
attctatattctgag

SEQ ID NO: 40129 - DNA, 15 bp, Homo sapiens
aattctatattctga

SEQ ID NO: 40130 - DNA, 15 bp, Homo sapiens
caattctatattctg

SEQ ID NO: 40131 - DNA, 15 bp, Homo sapiens
ccaattctatattct

SEQ ID NO: 40132 - DNA, 15 bp, Homo sapiens
cccaattctatattc

SEQ ID NO: 40133 - DNA, 15 bp, Homo sapiens
acccaattctatatt

SEQ ID NO: 40134 - DNA, 15 bp, Homo sapiens
tacccaattctatat

SEQ ID NO: 40135 - DNA, 15 bp, Homo sapiens
ctacccaattctata

SEQ ID NO: 40136 - DNA, 15 bp, Homo sapiens
gctacccaattctat

SEQ ID NO: 40137 - DNA, 15 bp, Homo sapiens
tgctacccaattcta

SEQ ID NO: 40138 - DNA, 15 bp, Homo sapiens
ttgctacccaattct

SEQ ID NO: 40139 - DNA, 15 bp, Homo sapiens
tttgctacccaattc

SEQ ID NO: 40140 - DNA, 15 bp, Homo sapiens
ttttgctacccaatt

SEQ ID NO: 40141 - DNA, 15 bp, Homo sapiens
attttgctacccaat

SEQ ID NO: 40142 - DNA, 15 bp, Homo sapiens
aattttgctacccaa

SEQ ID NO: 40143 - DNA, 15 bp, Homo sapiens
caattttgctaccca

SEQ ID NO: 40144 - DNA, 15 bp, Homo sapiens
acaattttgctaccc

SEQ ID NO: 40145 - DNA, 15 bp, Homo sapiens
aacaattttgctacc

SEQ ID NO: 40146 - DNA, 15 bp, Homo sapiens
aaacaattttgctac

SEQ ID NO: 40147 - DNA, 15 bp, Homo sapiens
gaaacaattttgcta

SEQ ID NO: 40148 - DNA, 15 bp, Homo sapiens
ggaaacaattttgct

SEQ ID NO: 40149 - DNA, 15 bp, Homo sapiens
gggaaacaattttgc

SEQ ID NO: 40150 - DNA, 15 bp, Homo sapiens
tgggaaacaattttg

SEQ ID NO: 40151 - DNA, 15 bp, Homo sapiens
ctgggaaacaatttt

SEQ ID NO: 40152 - DNA, 15 bp, Homo sapiens
tctgggaaacaattt

SEQ ID NO: 40153 - DNA, 15 bp, Homo sapiens
ttctgggaaacaatt

SEQ ID NO: 40154 - DNA, 15 bp, Homo sapiens
attctgggaaacaat

SEQ ID NO: 40155 - DNA, 15 bp, Homo sapiens
aattctgggaaacaa

SEQ ID NO: 40156 - DNA, 15 bp, Homo sapiens
taattctgggaaaca

SEQ ID NO: 40157 - DNA, 15 bp, Homo sapiens
gtaattctgggaaac

SEQ ID NO: 40158 - DNA, 15 bp, Homo sapiens
ggtaattctgggaaa

SEQ ID NO: 40159 - DNA, 15 bp, Homo sapiens
tggtaattctgggaa

SEQ ID NO: 40160 - DNA, 15 bp, Homo sapiens
ttggtaattctggga

SEQ ID NO: 40161 - DNA, 15 bp, Homo sapiens
attggtaattctggg

SEQ ID NO: 40162 - DNA, 15 bp, Homo sapiens
cattggtaattctgg

SEQ ID NO: 40163 - DNA, 15 bp, Homo sapiens
ccattggtaattctg

SEQ ID NO: 40164 - DNA, 15 bp, Homo sapiens
accattggtaattct

SEQ ID NO: 40165 - DNA, 15 bp, Homo sapiens
gaccattggtaattc

SEQ ID NO: 40166 - DNA, 15 bp, Homo sapiens
agaccattggtaatt

SEQ ID NO: 40167 - DNA, 15 bp, Homo sapiens
gagaccattggtaat

SEQ ID NO: 40168 - DNA, 15 bp, Homo sapiens
ggagaccattggtaa

SEQ ID NO: 40169 - DNA, 15 bp, Homo sapiens
gggagaccattggta

SEQ ID NO: 40170 - DNA, 15 bp, Homo sapiens
ggggagaccattggt

SEQ ID NO: 40171 - DNA, 15 bp, Homo sapiens
tggggagaccattgg

SEQ ID NO: 40172 - DNA, 15 bp, Homo sapiens
gtggggagaccattg

SEQ ID NO: 40173 - DNA, 15 bp, Homo sapiens
ggtggggagaccatt

SEQ ID NO: 40174 - DNA, 15 bp, Homo sapiens
gggtggggagaccat

SEQ ID NO: 40175 - DNA, 15 bp, Homo sapiens
ggggtggggagacca

SEQ ID NO: 40176 - DNA, 15 bp, Homo sapiens
aggggtggggagacc

SEQ ID NO: 40177 - DNA, 15 bp, Homo sapiens
caggggtggggagac

SEQ ID NO: 40178 - DNA, 15 bp, Homo sapiens
gcaggggtggggaga

SEQ ID NO: 40179 - DNA, 15 bp, Homo sapiens
ggcaggggtggggag

SEQ ID NO: 40180 - DNA, 15 bp, Homo sapiens
aggcaggggtgggga

SEQ ID NO: 40181 - DNA, 15 bp, Homo sapiens
caggcaggggtgggg

SEQ ID NO: 40182 - DNA, 15 bp, Homo sapiens
ccaggcaggggtggg

SEQ ID NO: 40183 - DNA, 15 bp, Homo sapiens
gccaggcaggggtgg

SEQ ID NO: 40184 - DNA, 15 bp, Homo sapiens
tgccaggcaggggtg

SEQ ID NO: 40185 - DNA, 15 bp, Homo sapiens
atgccaggcaggggt

SEQ ID NO: 40186 - DNA, 15 bp, Homo sapiens
catgccaggcagggg

SEQ ID NO: 40187 - DNA, 15 bp, Homo sapiens
acatgccaggcaggg

SEQ ID NO: 40188 - DNA, 15 bp, Homo sapiens
aacatgccaggcagg

SEQ ID NO: 40189 - DNA, 15 bp, Homo sapiens
gaacatgccaggcag

SEQ ID NO: 40190 - DNA, 15 bp, Homo sapiens
ggaacatgccaggca

SEQ ID NO: 40191 - DNA, 15 bp, Homo sapiens
gggaacatgccaggc

SEQ ID NO: 40192 - DNA, 15 bp, Homo sapiens
agggaacatgccagg

SEQ ID NO: 40193 - DNA, 15 bp, Homo sapiens
gagggaacatgccag

SEQ ID NO: 40194 - DNA, 15 bp, Homo sapiens
agagggaacatgcca

SEQ ID NO: 40195 - DNA, 15 bp, Homo sapiens
aagagggaacatgcc

SEQ ID NO: 40196 - DNA, 15 bp, Homo sapiens
taagagggaacatgc

SEQ ID NO: 40197 - DNA, 15 bp, Homo sapiens
ttaagagggaacatg

SEQ ID NO: 40198 - DNA, 15 bp, Homo sapiens
tttaagagggaacat

SEQ ID NO: 40199 - DNA, 15 bp, Homo sapiens
ctttaagagggaaca

SEQ ID NO: 40200 - DNA, 15 bp, Homo sapiens
cctttaagagggaac

SEQ ID NO: 40201 - DNA, 15 bp, Homo sapiens
tcctttaagagggaa

SEQ ID NO: 40202 - DNA, 15 bp, Homo sapiens
gtcctttaagaggga

SEQ ID NO: 40203 - DNA, 15 bp, Homo sapiens
agtcctttaagaggg

SEQ ID NO: 40204 - DNA, 15 bp, Homo sapiens
tagtcctttaagagg

SEQ ID NO: 40205 - DNA, 15 bp, Homo sapiens
ttagtcctttaagag

SEQ ID NO: 40206 - DNA, 15 bp, Homo sapiens
attagtcctttaaga

SEQ ID NO: 40207 - DNA, 15 bp, Homo sapiens
gattagtcctttaag

SEQ ID NO: 40208 - DNA, 15 bp, Homo sapiens
ggattagtcctttaa

SEQ ID NO: 40209 - DNA, 15 bp, Homo sapiens
gggattagtccttta

SEQ ID NO: 40210 - DNA, 15 bp, Homo sapiens
tgggattagtccttt

SEQ ID NO: 40211 - DNA, 15 bp, Homo sapiens
gtgggattagtcctt

SEQ ID NO: 40212 - DNA, 15 bp, Homo sapiens
ggtgggattagtcct

SEQ ID NO: 40213 - DNA, 15 bp, Homo sapiens
tggtgggattagtcc

SEQ ID NO: 40214 - DNA, 15 bp, Homo sapiens
gtggtgggattagtc

SEQ ID NO: 40215 - DNA, 15 bp, Homo sapiens
tgtggtgggattagt

SEQ ID NO: 40216 - DNA, 15 bp, Homo sapiens
atgtggtgggattag

SEQ ID NO: 40217 - DNA, 15 bp, Homo sapiens
gatgtggtgggatta

SEQ ID NO: 40218 - DNA, 15 bp, Homo sapiens
tgatgtggtgggatt

SEQ ID NO: 40219 - DNA, 15 bp, Homo sapiens
gtgatgtggtgggat

SEQ ID NO: 40220 - DNA, 15 bp, Homo sapiens
ggtgatgtggtggga

SEQ ID NO: 40221 - DNA, 15 bp, Homo sapiens
aggtgatgtggtggg

SEQ ID NO: 40222 - DNA, 15 bp, Homo sapiens
gaggtgatgtggtgg

SEQ ID NO: 40223 - DNA, 15 bp, Homo sapiens
agaggtgatgtggtg

SEQ ID NO: 40224 - DNA, 15 bp, Homo sapiens
cagaggtgatgtggt

SEQ ID NO: 40225 - DNA, 15 bp, Homo sapiens
ccagaggtgatgtgg

SEQ ID NO: 40226 - DNA, 15 bp, Homo sapiens
cccagaggtgatgtg

SEQ ID NO: 40227 - DNA, 15 bp, Homo sapiens
gcccagaggtgatgt

SEQ ID NO: 40228 - DNA, 15 bp, Homo sapiens
ggcccagaggtgatg

SEQ ID NO: 40229 - DNA, 15 bp, Homo sapiens
tggcccagaggtgat

SEQ ID NO: 40230 - DNA, 15 bp, Homo sapiens
ctggcccagaggtga

SEQ ID NO: 40231 - DNA, 15 bp, Homo sapiens
cctggcccagaggtg

SEQ ID NO: 40232 - DNA, 15 bp, Homo sapiens
gcctggcccagaggt

SEQ ID NO: 40233 - DNA, 15 bp, Homo sapiens
tgcctggcccagagg

SEQ ID NO: 40234 - DNA, 15 bp, Homo sapiens
ctgcctggcccagag

SEQ ID NO: 40235 - DNA, 15 bp, Homo sapiens
tctgcctggcccaga

SEQ ID NO: 40236 - DNA, 15 bp, Homo sapiens
ttctgcctggcccag

SEQ ID NO: 40237 - DNA, 15 bp, Homo sapiens
gttctgcctggccca

SEQ ID NO: 40238 - DNA, 15 bp, Homo sapiens
tgttctgcctggccc

SEQ ID NO: 40239 - DNA, 15 bp, Homo sapiens
atgttctgcctggcc

SEQ ID NO: 40240 - DNA, 15 bp, Homo sapiens
gatgttctgcctggc

SEQ ID NO: 40241 - DNA, 15 bp, Homo sapiens
tgatgttctgcctgg

SEQ ID NO: 40242 - DNA, 15 bp, Homo sapiens
ctgatgttctgcctg

SEQ ID NO: 40243 - DNA, 15 bp, Homo sapiens
cctgatgttctgcct

SEQ ID NO: 40244 - DNA, 15 bp, Homo sapiens
ccctgatgttctgcc

SEQ ID NO: 40245 - DNA, 15 bp, Homo sapiens
cccctgatgttctgc

SEQ ID NO: 40246 - DNA, 15 bp, Homo sapiens
acccctgatgttctg

SEQ ID NO: 40247 - DNA, 15 bp, Homo sapiens
cacccctgatgttct

SEQ ID NO: 40248 - DNA, 15 bp, Homo sapiens
gcacccctgatgttc

SEQ ID NO: 40249 - DNA, 15 bp, Homo sapiens
agcacccctgatgtt

SEQ ID NO: 40250 - DNA, 15 bp, Homo sapiens
cagcacccctgatgt

SEQ ID NO: 40251 - DNA, 15 bp, Homo sapiens
tcagcacccctgatg

SEQ ID NO: 40252 - DNA, 15 bp, Homo sapiens
atcagcacccctgat

SEQ ID NO: 40253 - DNA, 15 bp, Homo sapiens
catcagcacccctga

SEQ ID NO: 40254 - DNA, 15 bp, Homo sapiens
acatcagcacccctg

SEQ ID NO: 40255 - DNA, 15 bp, Homo sapiens
aacatcagcacccct

SEQ ID NO: 40256 - DNA, 15 bp, Homo sapiens
gaacatcagcacccc

SEQ ID NO: 40257 - DNA, 15 bp, Homo sapiens
agaacatcagcaccc

SEQ ID NO: 40258 - DNA, 15 bp, Homo sapiens
cagaacatcagcacc

SEQ ID NO: 40259 - DNA, 15 bp, Homo sapiens
acagaacatcagcac

SEQ ID NO: 40260 - DNA, 15 bp, Homo sapiens
cacagaacatcagca

SEQ ID NO: 40261 - DNA, 15 bp, Homo sapiens
tcacagaacatcagc

SEQ ID NO: 40262 - DNA, 15 bp, Homo sapiens
atcacagaacatcag

SEQ ID NO: 40263 - DNA, 15 bp, Homo sapiens
gatcacagaacatca

SEQ ID NO: 40264 - DNA, 15 bp, Homo sapiens
agatcacagaacatc

SEQ ID NO: 40265 - DNA, 15 bp, Homo sapiens
tagatcacagaacat

SEQ ID NO: 40266 - DNA, 15 bp, Homo sapiens
gtagatcacagaaca

SEQ ID NO: 40267 - DNA, 15 bp, Homo sapiens
tgtagatcacagaac

SEQ ID NO: 40268 - DNA, 15 bp, Homo sapiens
ctgtagatcacagaa

SEQ ID NO: 40269 - DNA, 15 bp, Homo sapiens
gctgtagatcacaga

SEQ ID NO: 40270 - DNA, 15 bp, Homo sapiens
tgctgtagatcacag

SEQ ID NO: 40271 - DNA, 15 bp, Homo sapiens
ctgctgtagatcaca

SEQ ID NO: 40272 - DNA, 15 bp, Homo sapiens
actgctgtagatcac

SEQ ID NO: 40273 - DNA, 15 bp, Homo sapiens
aactgctgtagatca

SEQ ID NO: 40274 - DNA, 15 bp, Homo sapiens
taactgctgtagatc

SEQ ID NO: 40275 - DNA, 15 bp, Homo sapiens
ttaactgctgtagat

SEQ ID NO: 40276 - DNA, 15 bp, Homo sapiens
attaactgctgtaga

SEQ ID NO: 40277 - DNA, 15 bp, Homo sapiens
aattaactgctgtag

SEQ ID NO: 40278 - DNA, 15 bp, Homo sapiens
gaattaactgctgta

SEQ ID NO: 40279 - DNA, 15 bp, Homo sapiens
ggaattaactgctgt

SEQ ID NO: 40280 - DNA, 15 bp, Homo sapiens
tggaattaactgctg

SEQ ID NO: 40281 - DNA, 15 bp, Homo sapiens
ttggaattaactgct

SEQ ID NO: 40282 - DNA, 15 bp, Homo sapiens
tttggaattaactgc

SEQ ID NO: 40283 - DNA, 15 bp, Homo sapiens
gtttggaattaactg

SEQ ID NO: 40284 - DNA, 15 bp, Homo sapiens
agtttggaattaact

SEQ ID NO: 40285 - DNA, 15 bp, Homo sapiens
aagtttggaattaac

SEQ ID NO: 40286 - DNA, 15 bp, Homo sapiens
aaagtttggaattaa

SEQ ID NO: 40287 - DNA, 15 bp, Homo sapiens
aaaagtttggaatta

SEQ ID NO: 40288 - DNA, 15 bp, Homo sapiens
gaaaagtttggaatt

SEQ ID NO: 40289 - DNA, 15 bp, Homo sapiens
agaaaagtttggaat

SEQ ID NO: 40290 - DNA, 15 bp, Homo sapiens
aagggagaaaagttt

SEQ ID NO: 40291 - DNA, 15 bp, Homo sapiens
taagggagaaaagtt

SEQ ID NO: 40292 - DNA, 15 bp, Homo sapiens
ataagggagaaaagt

SEQ ID NO: 40293 - DNA, 15 bp, Homo sapiens
aataagggagaaaag

SEQ ID NO: 40294 - DNA, 15 bp, Homo sapiens
caataagggagaaaa

SEQ ID NO: 40295 - DNA, 15 bp, Homo sapiens
ccaataagggagaaa

SEQ ID NO: 40296 - DNA, 15 bp, Homo sapiens
tccaataagggagaa

SEQ ID NO: 40297 - DNA, 15 bp, Homo sapiens
atccaataagggaga

SEQ ID NO: 40298 - DNA, 15 bp, Homo sapiens
catccaataagggag

SEQ ID NO: 40299 - DNA, 15 bp, Homo sapiens
tcatccaataaggga

SEQ ID NO: 40300 - DNA, 15 bp, Homo sapiens
ctcatccaataaggg

SEQ ID NO: 40301 - DNA, 15 bp, Homo sapiens
tctcatccaataagg

SEQ ID NO: 40302 - DNA, 15 bp, Homo sapiens
atctcatccaataag

SEQ ID NO: 40303 - DNA, 15 bp, Homo sapiens
gatctcatccaataa

SEQ ID NO: 40304 - DNA, 15 bp, Homo sapiens
tgatctcatccaata

SEQ ID NO: 40305 - DNA, 15 bp, Homo sapiens
atgatctcatccaat

SEQ ID NO: 40306 - DNA, 15 bp, Homo sapiens
aatgatctcatccaa

SEQ ID NO: 40307 - DNA, 15 bp, Homo sapiens
aaatgatctcatcca

SEQ ID NO: 40308 - DNA, 15 bp, Homo sapiens
aaaatgatctcatcc

SEQ ID NO: 40309 - DNA, 15 bp, Homo sapiens
aaaaatgatctcatc

SEQ ID NO: 40310 - DNA, 15 bp, Homo sapiens
gaaaaatgatctcat

SEQ ID NO: 40311 - DNA, 15 bp, Homo sapiens
agaaaaatgatctca

SEQ ID NO: 40312 - DNA, 15 bp, Homo sapiens
tagaaaaatgatctc

SEQ ID NO: 40313 - DNA, 15 bp, Homo sapiens
atagaaaaatgatct

SEQ ID NO: 40314 - DNA, 15 bp, Homo sapiens
aatagaaaaatgatc

SEQ ID NO: 40315 - DNA, 15 bp, Homo sapiens
caatagaaaaatgat

SEQ ID NO: 40316 - DNA, 15 bp, Homo sapiens
acaatagaaaaatga

SEQ ID NO: 40317 - DNA, 15 bp, Homo sapiens
cacaatagaaaaatg

SEQ ID NO: 40318 - DNA, 15 bp, Homo sapiens
acacaatagaaaaat

SEQ ID NO: 40319 - DNA, 15 bp, Homo sapiens
aacacaatagaaaaa

SEQ ID NO: 40320 - DNA, 15 bp, Homo sapiens
aaacacaatagaaaa

SEQ ID NO: 40321 - DNA, 15 bp, Homo sapiens
aaaacacaatagaaa

SEQ ID NO: 40322 - DNA, 15 bp, Homo sapiens
aaaaacacaatagaa

SEQ ID NO: 40323 - DNA, 15 bp, Homo sapiens
aaaaaacacaataga

SEQ ID NO: 40324 - DNA, 15 bp, Homo sapiens
taaaaaacacaatag

SEQ ID NO: 40325 - DNA, 15 bp, Homo sapiens
gtaaaaaacacaata

SEQ ID NO: 40326 - DNA, 15 bp, Homo sapiens
tgtaaaaaacacaat

SEQ ID NO: 40327 - DNA, 15 bp, Homo sapiens
atgtaaaaaacacaa

SEQ ID NO: 40328 - DNA, 15 bp, Homo sapiens
aatgtaaaaaacaca

SEQ ID NO: 40329 - DNA, 15 bp, Homo sapiens
aaatgtaaaaaacac

SEQ ID NO: 40330 - DNA, 15 bp, Homo sapiens
aaaatgtaaaaaaca

SEQ ID NO: 40331 - DNA, 15 bp, Homo sapiens
aaaaatgtaaaaaac

SEQ ID NO: 40332 - DNA, 15 bp, Homo sapiens
caaaaatgtaaaaaa

SEQ ID NO: 40333 - DNA, 15 bp, Homo sapiens
acaaaaatgtaaaaa

SEQ ID NO: 40334 - DNA, 15 bp, Homo sapiens
aacaaaaatgtaaaa

SEQ ID NO: 40335 - DNA, 15 bp, Homo sapiens
gaacaaaaatgtaaa

SEQ ID NO: 40336 - DNA, 15 bp, Homo sapiens
tgaacaaaaatgtaa

SEQ ID NO: 40337 - DNA, 15 bp, Homo sapiens
gtgaacaaaaatgta

SEQ ID NO: 40338 - DNA, 15 bp, Homo sapiens
tgtgaacaaaaatgt

SEQ ID NO: 40339 - DNA, 15 bp, Homo sapiens
ttgtgaacaaaaatg

SEQ ID NO: 40340 - DNA, 15 bp, Homo sapiens
tttgtgaacaaaaat

SEQ ID NO: 40341 - DNA, 15 bp, Homo sapiens
ctttgtgaacaaaaa

SEQ ID NO: 40342 - DNA, 15 bp, Homo sapiens
tctttgtgaacaaaa

SEQ ID NO: 40343 - DNA, 15 bp, Homo sapiens
atctttgtgaacaaa

SEQ ID NO: 40344 - DNA, 15 bp, Homo sapiens
aatctttgtgaacaa

SEQ ID NO: 40345 - DNA, 15 bp, Homo sapiens
taatctttgtgaaca

SEQ ID NO: 40346 - DNA, 15 bp, Homo sapiens
ctaatctttgtgaac

SEQ ID NO: 40347 - DNA, 15 bp, Homo sapiens
tctaatctttgtgaa

SEQ ID NO: 40348 - DNA, 15 bp, Homo sapiens
ttctaatctttgtga

SEQ ID NO: 40349 - DNA, 15 bp, Homo sapiens
tttctaatctttgtg

SEQ ID NO: 40350 - DNA, 15 bp, Homo sapiens
ttttctaatctttgt

SEQ ID NO: 40351 - DNA, 15 bp, Homo sapiens
gttttctaatctttg

SEQ ID NO: 40352 - DNA, 15 bp, Homo sapiens
ggttttctaatcttt

SEQ ID NO: 40353 - DNA, 15 bp, Homo sapiens
aggttttctaatctt

SEQ ID NO: 40354 - DNA, 15 bp, Homo sapiens
caggttttctaatct

SEQ ID NO: 40355 - DNA, 15 bp, Homo sapiens
gcaggttttctaatc

SEQ ID NO: 40356 - DNA, 15 bp, Homo sapiens
tgcaggttttctaat

SEQ ID NO: 40357 - DNA, 15 bp, Homo sapiens
ttgcaggttttctaa

SEQ ID NO: 40358 - DNA, 15 bp, Homo sapiens
gttgcaggttttcta

SEQ ID NO: 40359 - DNA, 15 bp, Homo sapiens
tgttgcaggttttct

SEQ ID NO: 40360 - DNA, 15 bp, Homo sapiens
gtgttgcaggttttc

SEQ ID NO: 40361 - DNA, 15 bp, Homo sapiens
tgtgttgcaggtttt

SEQ ID NO: 40362 - DNA, 15 bp, Homo sapiens
gtgtgttgcaggttt

SEQ ID NO: 40363 - DNA, 15 bp, Homo sapiens
agtgtgttgcaggtt

SEQ ID NO: 40364 - DNA, 15 bp, Homo sapiens
aagtgtgttgcaggt

SEQ ID NO: 40365 - DNA, 15 bp, Homo sapiens
taagtgtgttgcagg

SEQ ID NO: 40366 - DNA, 15 bp, Homo sapiens
ataagtgtgttgcag

SEQ ID NO: 40367 - DNA, 15 bp, Homo sapiens
aataagtgtgttgca

SEQ ID NO: 40368 - DNA, 15 bp, Homo sapiens
caataagtgtgttgc

SEQ ID NO: 40369 - DNA, 15 bp, Homo sapiens
ccaataagtgtgttg

SEQ ID NO: 40370 - DNA, 15 bp, Homo sapiens
gccaataagtgtgtt

SEQ ID NO: 40371 - DNA, 15 bp, Homo sapiens
tgccaataagtgtgt

SEQ ID NO: 40372 - DNA, 15 bp, Homo sapiens
atgccaataagtgtg

SEQ ID NO: 40373 - DNA, 15 bp, Homo sapiens
tatgccaataagtgt

SEQ ID NO: 40374 - DNA, 15 bp, Homo sapiens
atatgccaataagtg

SEQ ID NO: 40375 - DNA, 15 bp, Homo sapiens
aatatgccaataagt

SEQ ID NO: 40376 - DNA, 15 bp, Homo sapiens
aaatatgccaataag

SEQ ID NO: 40377 - DNA, 15 bp, Homo sapiens
aaaatatgccaataa

SEQ ID NO: 40378 - DNA, 15 bp, Homo sapiens
aaaaatatgccaata

SEQ ID NO: 40379 - DNA, 15 bp, Homo sapiens
gaaaaatatgccaat

SEQ ID NO: 40380 - DNA, 15 bp, Homo sapiens
agaaaaatatgccaa

SEQ ID NO: 40381 - DNA, 15 bp, Homo sapiens
cagaaaaatatgcca

SEQ ID NO: 40382 - DNA, 15 bp, Homo sapiens
tcagaaaaatatgcc

SEQ ID NO: 40383 - DNA, 15 bp, Homo sapiens
atcagaaaaatatgc

SEQ ID NO: 40384 - DNA, 15 bp, Homo sapiens
tatcagaaaaatatg

SEQ ID NO: 40385 - DNA, 15 bp, Homo sapiens
ttatcagaaaaatat

SEQ ID NO: 40386 - DNA, 15 bp, Homo sapiens
attatcagaaaaata

SEQ ID NO: 40387 - DNA, 15 bp, Homo sapiens
aattatcagaaaaat

SEQ ID NO: 40388 - DNA, 15 bp, Homo sapiens
aaattatcagaaaaa

SEQ ID NO: 40389 - DNA, 15 bp, Homo sapiens
aaaattatcagaaaa

SEQ ID NO: 40390 - DNA, 15 bp, Homo sapiens
gaaaattatcagaaa

SEQ ID NO: 40391 - DNA, 15 bp, Homo sapiens
tgaaaattatcagaa

SEQ ID NO: 40392 - DNA, 15 bp, Homo sapiens
atgaaaattatcaga

SEQ ID NO: 40393 - DNA, 15 bp, Homo sapiens
gatgaaaattatcag

SEQ ID NO: 40394 - DNA, 15 bp, Homo sapiens
ggatgaaaattatca

SEQ ID NO: 40395 - DNA, 15 bp, Homo sapiens
tggatgaaaattatc

SEQ ID NO: 40396 - DNA, 15 bp, Homo sapiens
ttggatgaaaattat

SEQ ID NO: 40397 - DNA, 15 bp, Homo sapiens
tttggatgaaaatta

SEQ ID NO: 40398 - DNA, 15 bp, Homo sapiens
ttttggatgaaaatt

SEQ ID NO: 40399 - DNA, 15 bp, Homo sapiens
gttttggatgaaaat

SEQ ID NO: 40400 - DNA, 15 bp, Homo sapiens
ggttttggatgaaaa

SEQ ID NO: 40401 - DNA, 15 bp, Homo sapiens
aggttttggatgaaa

SEQ ID NO: 40402 - DNA, 15 bp, Homo sapiens
taggttttggatgaa

SEQ ID NO: 40403 - DNA, 15 bp, Homo sapiens
ttaggttttggatga

SEQ ID NO: 40404 - DNA, 15 bp, Homo sapiens
attaggttttggatg

SEQ ID NO: 40405 - DNA, 15 bp, Homo sapiens
aattaggttttggat

SEQ ID NO: 40406 - DNA, 15 bp, Homo sapiens
gaattaggttttgga

SEQ ID NO: 40407 - DNA, 15 bp, Homo sapiens
agaattaggttttgg

SEQ ID NO: 40408 - DNA, 15 bp, Homo sapiens
cagaattaggttttg

SEQ ID NO: 40409 - DNA, 15 bp, Homo sapiens
tcagaattaggtttt

SEQ ID NO: 40410 - DNA, 15 bp, Homo sapiens
gtcagaattaggttt

SEQ ID NO: 40411 - DNA, 15 bp, Homo sapiens
agtcagaattaggtt

SEQ ID NO: 40412 - DNA, 15 bp, Homo sapiens
aagtcagaattaggt

SEQ ID NO: 40413 - DNA, 15 bp, Homo sapiens
aaagtcagaattagg

SEQ ID NO: 40414 - DNA, 15 bp, Homo sapiens
taaagtcagaattag

SEQ ID NO: 40415 - DNA, 15 bp, Homo sapiens
gtaaagtcagaatta

SEQ ID NO: 40416 - DNA, 15 bp, Homo sapiens
tgtaaagtcagaatt

SEQ ID NO: 40417 - DNA, 15 bp, Homo sapiens
ttgtaaagtcagaat

SEQ ID NO: 40418 - DNA, 15 bp, Homo sapiens
gttgtaaagtcagaa

SEQ ID NO: 40419 - DNA, 15 bp, Homo sapiens
tgttgtaaagtcaga

SEQ ID NO: 40420 - DNA, 15 bp, Homo sapiens
atgttgtaaagtcag

SEQ ID NO: 40421 - DNA, 15 bp, Homo sapiens
tatgttgtaaagtca

SEQ ID NO: 40422 - DNA, 15 bp, Homo sapiens
gtatgttgtaaagtc

SEQ ID NO: 40423 - DNA, 15 bp, Homo sapiens
agtatgttgtaaagt

SEQ ID NO: 40424 - DNA, 15 bp, Homo sapiens
tagtatgttgtaaag

SEQ ID NO: 40425 - DNA, 15 bp, Homo sapiens
atagtatgttgtaaa

SEQ ID NO: 40426 - DNA, 15 bp, Homo sapiens
gatagtatgttgtaa

SEQ ID NO: 40427 - DNA, 15 bp, Homo sapiens
agatagtatgttgta

SEQ ID NO: 40428 - DNA, 15 bp, Homo sapiens
aagatagtatgttgt

SEQ ID NO: 40429 - DNA, 15 bp, Homo sapiens
aaagatagtatgttg

SEQ ID NO: 40430 - DNA, 15 bp, Homo sapiens
taaagatagtatgtt

SEQ ID NO: 40431 - DNA, 15 bp, Homo sapiens
gtaaagatagtatgt

SEQ ID NO: 40432 - DNA, 15 bp, Homo sapiens
tgtaaagatagtatg

SEQ ID NO: 40433 - DNA, 15 bp, Homo sapiens
ttgtaaagatagtat

SEQ ID NO: 40434 - DNA, 15 bp, Homo sapiens
tttgtaaagatagta

SEQ ID NO: 40435 - DNA, 15 bp, Homo sapiens
ctttgtaaagatagt

SEQ ID NO: 40436 - DNA, 15 bp, Homo sapiens
cctttgtaaagatag

SEQ ID NO: 40437 - DNA, 15 bp, Homo sapiens
acctttgtaaagata

SEQ ID NO: 40438 - DNA, 15 bp, Homo sapiens
aacctttgtaaagat

SEQ ID NO: 40439 - DNA, 15 bp, Homo sapiens
aaacctttgtaaaga

SEQ ID NO: 40440 - DNA, 15 bp, Homo sapiens
caaacctttgtaaag

SEQ ID NO: 40441 - DNA, 15 bp, Homo sapiens
gcaaacctttgtaaa

SEQ ID NO: 40442 - DNA, 15 bp, Homo sapiens
tgcaaacctttgtaa

SEQ ID NO: 40443 - DNA, 15 bp, Homo sapiens
ttgcaaacctttgta

SEQ ID NO: 40444 - DNA, 15 bp, Homo sapiens
tttgcaaacctttgt

SEQ ID NO: 40445 - DNA, 15 bp, Homo sapiens
ttttgcaaacctttg

SEQ ID NO: 40446 - DNA, 15 bp, Homo sapiens
tttttgcaaaccttt

SEQ ID NO: 40447 - DNA, 15 bp, Homo sapiens
atttttgcaaacctt

SEQ ID NO: 40448 - DNA, 15 bp, Homo sapiens
aatttttgcaaacct

SEQ ID NO: 40449 - DNA, 15 bp, Homo sapiens
gaatttttgcaaacc

SEQ ID NO: 40450 - DNA, 15 bp, Homo sapiens
agaatttttgcaaac

SEQ ID NO: 40451 - DNA, 15 bp, Homo sapiens
aagaatttttgcaaa

SEQ ID NO: 40452 - DNA, 15 bp, Homo sapiens
aaagaatttttgcaa

SEQ ID NO: 40453 - DNA, 15 bp, Homo sapiens
gaaagaatttttgca

SEQ ID NO: 40454 - DNA, 15 bp, Homo sapiens
tgaaagaatttttgc

SEQ ID NO: 40455 - DNA, 15 bp, Homo sapiens
atgaaagaatttttg

SEQ ID NO: 40456 - DNA, 15 bp, Homo sapiens
tatgaaagaattttt

SEQ ID NO: 40457 - DNA, 15 bp, Homo sapiens
atatgaaagaatttt

SEQ ID NO: 40458 - DNA, 15 bp, Homo sapiens
tatatgaaagaattt

SEQ ID NO: 40459 - DNA, 15 bp, Homo sapiens
ctatatgaaagaatt

SEQ ID NO: 40460 - DNA, 15 bp, Homo sapiens
gctatatgaaagaat

SEQ ID NO: 40461 - DNA, 15 bp, Homo sapiens
tgctatatgaaagaa

SEQ ID NO: 40462 - DNA, 15 bp, Homo sapiens
atgctatatgaaaga

SEQ ID NO: 40463 - DNA, 15 bp, Homo sapiens
aatgctatatgaaag

SEQ ID NO: 40464 - DNA, 15 bp, Homo sapiens
caatgctatatgaaa

SEQ ID NO: 40465 - DNA, 15 bp, Homo sapiens
acaatgctatatgaa

SEQ ID NO: 40466 - DNA, 15 bp, Homo sapiens
tacaatgctatatga

SEQ ID NO: 40467 - DNA, 15 bp, Homo sapiens
atacaatgctatatg

SEQ ID NO: 40468 - DNA, 15 bp, Homo sapiens
tatacaatgctatat

SEQ ID NO: 40469 - DNA, 15 bp, Homo sapiens
atatacaatgctata

SEQ ID NO: 40470 - DNA, 15 bp, Homo sapiens
catatacaatgctat

SEQ ID NO: 40471 - DNA, 15 bp, Homo sapiens
acatatacaatgcta

SEQ ID NO: 40472 - DNA, 15 bp, Homo sapiens
gacatatacaatgct

SEQ ID NO: 40473 - DNA, 15 bp, Homo sapiens
agacatatacaatgc

SEQ ID NO: 40474 - DNA, 15 bp, Homo sapiens
cagacatatacaatg

SEQ ID NO: 40475 - DNA, 15 bp, Homo sapiens
acagacatatacaat

SEQ ID NO: 40476 - DNA, 15 bp, Homo sapiens
gacagacatatacaa

SEQ ID NO: 40477 - DNA, 15 bp, Homo sapiens
tgacagacatataca

SEQ ID NO: 40478 - DNA, 15 bp, Homo sapiens
atgacagacatatac

SEQ ID NO: 40479 - DNA, 15 bp, Homo sapiens
catgacagacatata

SEQ ID NO: 40480 - DNA, 15 bp, Homo sapiens
tcatgacagacatat

SEQ ID NO: 40481 - DNA, 15 bp, Homo sapiens
ttcatgacagacata

SEQ ID NO: 40482 - DNA, 15 bp, Homo sapiens
tttcatgacagacat

SEQ ID NO: 40483 - DNA, 15 bp, Homo sapiens
atttcatgacagaca

SEQ ID NO: 40484 - DNA, 15 bp, Homo sapiens
tatttcatgacagac

SEQ ID NO: 40485 - DNA, 15 bp, Homo sapiens
ttatttcatgacaga

SEQ ID NO: 40486 - DNA, 15 bp, Homo sapiens
attatttcatgacag

SEQ ID NO: 40487 - DNA, 15 bp, Homo sapiens
tattatttcatgaca

SEQ ID NO: 40488 - DNA, 15 bp, Homo sapiens
ctattatttcatgac

SEQ ID NO: 40489 - DNA, 15 bp, Homo sapiens
actattatttcatga

SEQ ID NO: 40490 - DNA, 15 bp, Homo sapiens
tactattatttcatg

SEQ ID NO: 40491 - DNA, 15 bp, Homo sapiens
ttactattatttcat

SEQ ID NO: 40492 - DNA, 15 bp, Homo sapiens
cttactattatttca

SEQ ID NO: 40493 - DNA, 15 bp, Homo sapiens
acttactattatttc

SEQ ID NO: 40494 - DNA, 15 bp, Homo sapiens
tacttactattattt

SEQ ID NO: 40495 - DNA, 15 bp, Homo sapiens
atacttactattatt

SEQ ID NO: 40496 - DNA, 15 bp, Homo sapiens
tatacttactattat

SEQ ID NO: 40497 - DNA, 15 bp, Homo sapiens
atatacttactatta

SEQ ID NO: 40498 - DNA, 15 bp, Homo sapiens
aatatacttactatt

SEQ ID NO: 40499 - DNA, 15 bp, Homo sapiens
taatatacttactat

SEQ ID NO: 40500 - DNA, 15 bp, Homo sapiens
ataatatacttacta

SEQ ID NO: 40501 - DNA, 15 bp, Homo sapiens
aataatatacttact

SEQ ID NO: 40502 - DNA, 15 bp, Homo sapiens
caataatatacttac

SEQ ID NO: 40503 - DNA, 15 bp, Homo sapiens
acaataatatactta

SEQ ID NO: 40504 - DNA, 15 bp, Homo sapiens
aacaataatatactt

SEQ ID NO: 40505 - DNA, 15 bp, Homo sapiens
aaacaataatatact

SEQ ID NO: 40506 - DNA, 15 bp, Homo sapiens
taaacaataatatac

SEQ ID NO: 40507 - DNA, 15 bp, Homo sapiens
gtaaacaataatata

SEQ ID NO: 40508 - DNA, 15 bp, Homo sapiens
tgtaaacaataatat

SEQ ID NO: 40509 - DNA, 15 bp, Homo sapiens
atgtaaacaataata

SEQ ID NO: 40510 - DNA, 15 bp, Homo sapiens
aatgtaaacaataat

SEQ ID NO: 40511 - DNA, 15 bp, Homo sapiens
taatgtaaacaataa

SEQ ID NO: 40512 - DNA, 15 bp, Homo sapiens
ataatgtaaacaata

SEQ ID NO: 40513 - DNA, 15 bp, Homo sapiens
tataatgtaaacaat

SEQ ID NO: 40514 - DNA, 15 bp, Homo sapiens
gtataatgtaaacaa

SEQ ID NO: 40515 - DNA, 15 bp, Homo sapiens
ggtataatgtaaaca

SEQ ID NO: 40516 - DNA, 15 bp, Homo sapiens
tggtataatgtaaac

SEQ ID NO: 40517 - DNA, 15 bp, Homo sapiens
gtggtataatgtaaa

SEQ ID NO: 40518 - DNA, 15 bp, Homo sapiens
agtggtataatgtaa

SEQ ID NO: 40519 - DNA, 15 bp, Homo sapiens
aagtggtataatgta

SEQ ID NO: 40520 - DNA, 15 bp, Homo sapiens
gaagtggtataatgt

SEQ ID NO: 40521 - DNA, 15 bp, Homo sapiens
tgaagtggtataatg

SEQ ID NO: 40522 - DNA, 15 bp, Homo sapiens
ttgaagtggtataat

SEQ ID NO: 40523 - DNA, 15 bp, Homo sapiens
tttgaagtggtataa

SEQ ID NO: 40524 - DNA, 15 bp, Homo sapiens
ttttgaagtggtata

SEQ ID NO: 40525 - DNA, 15 bp, Homo sapiens
attttgaagtggtat

SEQ ID NO: 40526 - DNA, 15 bp, Homo sapiens
tattttgaagtggta

SEQ ID NO: 40527 - DNA, 15 bp, Homo sapiens
ttattttgaagtggt

SEQ ID NO: 40528 - DNA, 15 bp, Homo sapiens
attattttgaagtgg

SEQ ID NO: 40529 - DNA, 15 bp, Homo sapiens
aattattttgaagtg

SEQ ID NO: 40530 - DNA, 15 bp, Homo sapiens
aaattattttgaagt

SEQ ID NO: 40531 - DNA, 15 bp, Homo sapiens
gaaattattttgaag

SEQ ID NO: 40532 - DNA, 15 bp, Homo sapiens
ggaaattattttgaa

SEQ ID NO: 40533 - DNA, 15 bp, Homo sapiens
aggaaattattttga

SEQ ID NO: 40534 - DNA, 15 bp, Homo sapiens
aaggaaattattttg

SEQ ID NO: 40535 - DNA, 15 bp, Homo sapiens
aaaggaaattatttt

SEQ ID NO: 40536 - DNA, 15 bp, Homo sapiens
taaaggaaattattt

SEQ ID NO: 40537 - DNA, 15 bp, Homo sapiens
ttaaaggaaattatt

SEQ ID NO: 40538 - DNA, 15 bp, Homo sapiens
tttaaaggaaattat

SEQ ID NO: 40539 - DNA, 15 bp, Homo sapiens
ctttaaaggaaatta

SEQ ID NO: 40540 - DNA, 15 bp, Homo sapiens
actttaaaggaaatt

SEQ ID NO: 40541 - DNA, 15 bp, Homo sapiens
tactttaaaggaaat

SEQ ID NO: 40542 - DNA, 15 bp, Homo sapiens
atactttaaaggaaa

SEQ ID NO: 40543 - DNA, 15 bp, Homo sapiens
aatactttaaaggaa

SEQ ID NO: 40544 - DNA, 15 bp, Homo sapiens
gaatactttaaagga

SEQ ID NO: 40545 - DNA, 15 bp, Homo sapiens
agaatactttaaagg

SEQ ID NO: 40546 - DNA, 15 bp, Homo sapiens
aagaatactttaaag

SEQ ID NO: 40547 - DNA, 15 bp, Homo sapiens
gaagaatactttaaa

SEQ ID NO: 40548 - DNA, 15 bp, Homo sapiens
tgaagaatactttaa

SEQ ID NO: 40549 - DNA, 15 bp, Homo sapiens
ttgaagaatacttta

SEQ ID NO: 40550 - DNA, 15 bp, Homo sapiens
tttgaagaatacttt

SEQ ID NO: 40551 - DNA, 15 bp, Homo sapiens
gtttgaagaatactt

SEQ ID NO: 40552 - DNA, 15 bp, Homo sapiens
tgtttgaagaatact

SEQ ID NO: 40553 - DNA, 15 bp, Homo sapiens
ttgtttgaagaatac

SEQ ID NO: 40554 - DNA, 15 bp, Homo sapiens
cttgtttgaagaata

SEQ ID NO: 40555 - DNA, 15 bp, Homo sapiens
tcttgtttgaagaat

SEQ ID NO: 40556 - DNA, 15 bp, Homo sapiens
ttcttgtttgaagaa

SEQ ID NO: 40557 - DNA, 15 bp, Homo sapiens
tttcttgtttgaaga

SEQ ID NO: 40558 - DNA, 15 bp, Homo sapiens
ttttcttgtttgaag

SEQ ID NO: 40559 - DNA, 15 bp, Homo sapiens
tttttcttgtttgaa

SEQ ID NO: 40560 - DNA, 15 bp, Homo sapiens
ctttttcttgtttga

SEQ ID NO: 40561 - DNA, 15 bp, Homo sapiens
cctttttcttgtttg

SEQ ID NO: 40562 - DNA, 15 bp, Homo sapiens
gcctttttcttgttt

SEQ ID NO: 40563 - DNA, 15 bp, Homo sapiens
tgcctttttcttgtt

SEQ ID NO: 40564 - DNA, 15 bp, Homo sapiens
ttgcctttttcttgt

SEQ ID NO: 40565 - DNA, 15 bp, Homo sapiens
attgcctttttcttg

SEQ ID NO: 40566 - DNA, 15 bp, Homo sapiens
aattgcctttttctt

SEQ ID NO: 40567 - DNA, 15 bp, Homo sapiens
aaattgcctttttct

SEQ ID NO: 40568 - DNA, 15 bp, Homo sapiens
gaaattgcctttttc

SEQ ID NO: 40569 - DNA, 15 bp, Homo sapiens
agaaattgccttttt

SEQ ID NO: 40570 - DNA, 15 bp, Homo sapiens
gagaaattgcctttt

SEQ ID NO: 40571 - DNA, 15 bp, Homo sapiens
agagaaattgccttt

SEQ ID NO: 40572 - DNA, 15 bp, Homo sapiens
gagagaaattgcctt

SEQ ID NO: 40573 - DNA, 15 bp, Homo sapiens
tgagagaaattgcct

SEQ ID NO: 40574 - DNA, 15 bp, Homo sapiens
ttgagagaaattgcc

SEQ ID NO: 40575 - DNA, 15 bp, Homo sapiens
cttgagagaaattgc

SEQ ID NO: 40576 - DNA, 15 bp, Homo sapiens
tcttgagagaaattg

SEQ ID NO: 40577 - DNA, 15 bp, Homo sapiens
ttcttgagagaaatt

SEQ ID NO: 40578 - DNA, 15 bp, Homo sapiens
cttcttgagagaaat

SEQ ID NO: 40579 - DNA, 15 bp, Homo sapiens
acttcttgagagaaa

SEQ ID NO: 40580 - DNA, 15 bp, Homo sapiens
aacttcttgagagaa

SEQ ID NO: 40581 - DNA, 15 bp, Homo sapiens
aaacttcttgagaga

SEQ ID NO: 40582 - DNA, 15 bp, Homo sapiens
aaaacttcttgagag

SEQ ID NO: 40583 - DNA, 15 bp, Homo sapiens
taaaacttcttgaga

SEQ ID NO: 40584 - DNA, 15 bp, Homo sapiens
ctaaaacttcttgag

SEQ ID NO: 40585 - DNA, 15 bp, Homo sapiens
tctaaaacttcttga

SEQ ID NO: 40586 - DNA, 15 bp, Homo sapiens
ctctaaaacttcttg

SEQ ID NO: 40587 - DNA, 15 bp, Homo sapiens
tctctaaaacttctt

SEQ ID NO: 40588 - DNA, 15 bp, Homo sapiens
ctctctaaaacttct

SEQ ID NO: 40589 - DNA, 15 bp, Homo sapiens
tctctctaaaacttc

SEQ ID NO: 40590 - DNA, 15 bp, Homo sapiens
ttctctctaaaactt

SEQ ID NO: 40591 - DNA, 15 bp, Homo sapiens
attctctctaaaact

SEQ ID NO: 40592 - DNA, 15 bp, Homo sapiens
aattctctctaaaac

SEQ ID NO: 40593 - DNA, 15 bp, Homo sapiens
aaattctctctaaaa

SEQ ID NO: 40594 - DNA, 15 bp, Homo sapiens
taaattctctctaaa

SEQ ID NO: 40595 - DNA, 15 bp, Homo sapiens
gtaaattctctctaa

SEQ ID NO: 40596 - DNA, 15 bp, Homo sapiens
tgtaaattctctcta

SEQ ID NO: 40597 - DNA, 15 bp, Homo sapiens
ttgtaaattctctct

SEQ ID NO: 40598 - DNA, 15 bp, Homo sapiens
gttgtaaattctctc

SEQ ID NO: 40599 - DNA, 15 bp, Homo sapiens
agttgtaaattctct

SEQ ID NO: 40600 - DNA, 15 bp, Homo sapiens
aagttgtaaattctc

SEQ ID NO: 40601 - DNA, 15 bp, Homo sapiens
caagttgtaaattct

SEQ ID NO: 40602 - DNA, 15 bp, Homo sapiens
gcaagttgtaaattc

SEQ ID NO: 40603 - DNA, 15 bp, Homo sapiens
agcaagttgtaaatt

SEQ ID NO: 40604 - DNA, 15 bp, Homo sapiens
gagcaagttgtaaat

SEQ ID NO: 40605 - DNA, 15 bp, Homo sapiens
ggagcaagttgtaaa

SEQ ID NO: 40606 - DNA, 15 bp, Homo sapiens
aggagcaagttgtaa

SEQ ID NO: 40607 - DNA, 15 bp, Homo sapiens
taggagcaagttgta

SEQ ID NO: 40608 - DNA, 15 bp, Homo sapiens
ttaggagcaagttgt

SEQ ID NO: 40609 - DNA, 15 bp, Homo sapiens
cttaggagcaagttg

SEQ ID NO: 40610 - DNA, 15 bp, Homo sapiens
gcttaggagcaagtt

SEQ ID NO: 40611 - DNA, 15 bp, Homo sapiens
tgcttaggagcaagt

SEQ ID NO: 40612 - DNA, 15 bp, Homo sapiens
ttgcttaggagcaag

SEQ ID NO: 40613 - DNA, 15 bp, Homo sapiens
tttgcttaggagcaa

SEQ ID NO: 40614 - DNA, 15 bp, Homo sapiens
atttgcttaggagca

SEQ ID NO: 40615 - DNA, 15 bp, Homo sapiens
catttgcttaggagc

SEQ ID NO: 40616 - DNA, 15 bp, Homo sapiens
acatttgcttaggag

SEQ ID NO: 40617 - DNA, 15 bp, Homo sapiens
cacatttgcttagga

SEQ ID NO: 40618 - DNA, 15 bp, Homo sapiens
tcacatttgcttagg

SEQ ID NO: 40619 - DNA, 15 bp, Homo sapiens
ctcacatttgcttag

SEQ ID NO: 40620 - DNA, 15 bp, Homo sapiens
tctcacatttgctta

SEQ ID NO: 40621 - DNA, 15 bp, Homo sapiens
ttctcacatttgctt

SEQ ID NO: 40622 - DNA, 15 bp, Homo sapiens
gttctcacatttgct

SEQ ID NO: 40623 - DNA, 15 bp, Homo sapiens
agttctcacatttgc

SEQ ID NO: 40624 - DNA, 15 bp, Homo sapiens
aagttctcacatttg

SEQ ID NO: 40625 - DNA, 15 bp, Homo sapiens
gaagttctcacattt

SEQ ID NO: 40626 - DNA, 15 bp, Homo sapiens
tgaagttctcacatt

SEQ ID NO: 40627 - DNA, 15 bp, Homo sapiens
ctgaagttctcacat

SEQ ID NO: 40628 - DNA, 15 bp, Homo sapiens
cctgaagttctcaca

SEQ ID NO: 40629 - DNA, 15 bp, Homo sapiens
tcctgaagttctcac

SEQ ID NO: 40630 - DNA, 15 bp, Homo sapiens
ctcctgaagttctca

SEQ ID NO: 40631 - DNA, 15 bp, Homo sapiens
cctcctgaagttctc

SEQ ID NO: 40632 - DNA, 15 bp, Homo sapiens
acctcctgaagttct

SEQ ID NO: 40633 - DNA, 15 bp, Homo sapiens
aacctcctgaagttc

SEQ ID NO: 40634 - DNA, 15 bp, Homo sapiens
gaacctcctgaagtt

SEQ ID NO: 40635 - DNA, 15 bp, Homo sapiens
tgaacctcctgaagt

SEQ ID NO: 40636 - DNA, 15 bp, Homo sapiens
atgaacctcctgaag

SEQ ID NO: 40637 - DNA, 15 bp, Homo sapiens
gatgaacctcctgaa

SEQ ID NO: 40638 - DNA, 15 bp, Homo sapiens
agatgaacctcctga

SEQ ID NO: 40639 - DNA, 15 bp, Homo sapiens
cagatgaacctcctg

SEQ ID NO: 40640 - DNA, 15 bp, Homo sapiens
ccagatgaacctcct

SEQ ID NO: 40641 - DNA, 15 bp, Homo sapiens
gccagatgaacctcc

SEQ ID NO: 40642 - DNA, 15 bp, Homo sapiens
ggccagatgaacctc

SEQ ID NO: 40643 - DNA, 15 bp, Homo sapiens
tggccagatgaacct

SEQ ID NO: 40644 - DNA, 15 bp, Homo sapiens
atggccagatgaacc

SEQ ID NO: 40645 - DNA, 15 bp, Homo sapiens
aatggccagatgaac

SEQ ID NO: 40646 - DNA, 15 bp, Homo sapiens
caatggccagatgaa

SEQ ID NO: 40647 - DNA, 15 bp, Homo sapiens
ccaatggccagatga

SEQ ID NO: 40648 - DNA, 15 bp, Homo sapiens
gccaatggccagatg

SEQ ID NO: 40649 - DNA, 15 bp, Homo sapiens
agccaatggccagat

SEQ ID NO: 40650 - DNA, 15 bp, Homo sapiens
aagccaatggccaga

SEQ ID NO: 40651 - DNA, 15 bp, Homo sapiens
aaagccaatggccag

SEQ ID NO: 40652 - DNA, 15 bp, Homo sapiens
taaagccaatggcca

SEQ ID NO: 40653 - DNA, 15 bp, Homo sapiens
gtaaagccaatggcc

SEQ ID NO: 40654 - DNA, 15 bp, Homo sapiens
tgtaaagccaatggc

SEQ ID NO: 40655 - DNA, 15 bp, Homo sapiens
ttgtaaagccaatgg

SEQ ID NO: 40656 - DNA, 15 bp, Homo sapiens
gttgtaaagccaatg

SEQ ID NO: 40657 - DNA, 15 bp, Homo sapiens
agttgtaaagccaat

SEQ ID NO: 40658 - DNA, 15 bp, Homo sapiens
gagttgtaaagccaa

SEQ ID NO: 40659 - DNA, 15 bp, Homo sapiens
ggagttgtaaagcca

SEQ ID NO: 40660 - DNA, 15 bp, Homo sapiens
tggagttgtaaagcc

SEQ ID NO: 40661 - DNA, 15 bp, Homo sapiens
ttggagttgtaaagc

SEQ ID NO: 40662 - DNA, 15 bp, Homo sapiens
tttggagttgtaaag

SEQ ID NO: 40663 - DNA, 15 bp, Homo sapiens
atttggagttgtaaa

SEQ ID NO: 40664 - DNA, 15 bp, Homo sapiens
aatttggagttgtaa

SEQ ID NO: 40665 - DNA, 15 bp, Homo sapiens
caatttggagttgta

SEQ ID NO: 40666 - DNA, 15 bp, Homo sapiens
acaatttggagttgt

SEQ ID NO: 40667 - DNA, 15 bp, Homo sapiens
cacaatttggagttg

SEQ ID NO: 40668 - DNA, 15 bp, Homo sapiens
tcacaatttggagtt

SEQ ID NO: 40669 - DNA, 15 bp, Homo sapiens
ctcacaatttggagt

SEQ ID NO: 40670 - DNA, 15 bp, Homo sapiens
gctcacaatttggag

SEQ ID NO: 40671 - DNA, 15 bp, Homo sapiens
ggctcacaatttgga

SEQ ID NO: 40672 - DNA, 15 bp, Homo sapiens
tggctcacaatttgg

SEQ ID NO: 40673 - DNA, 15 bp, Homo sapiens
ctggctcacaatttg

SEQ ID NO: 40674 - DNA, 15 bp, Homo sapiens
cctggctcacaattt

SEQ ID NO: 40675 - DNA, 15 bp, Homo sapiens
tcctggctcacaatt

SEQ ID NO: 40676 - DNA, 15 bp, Homo sapiens
gtcctggctcacaat

SEQ ID NO: 40677 - DNA, 15 bp, Homo sapiens
ggtcctggctcacaa

SEQ ID NO: 40678 - DNA, 15 bp, Homo sapiens
tggtcctggctcaca

SEQ ID NO: 40679 - DNA, 15 bp, Homo sapiens
gtggtcctggctcac

SEQ ID NO: 40680 - DNA, 15 bp, Homo sapiens
tgtggtcctggctca

SEQ ID NO: 40681 - DNA, 15 bp, Homo sapiens
gtgtggtcctggctc

SEQ ID NO: 40682 - DNA, 15 bp, Homo sapiens
tgtgtggtcctggct

SEQ ID NO: 40683 - DNA, 15 bp, Homo sapiens
ctgtgtggtcctggc

SEQ ID NO: 40684 - DNA, 15 bp, Homo sapiens
tctgtgtggtcctgg

SEQ ID NO: 40685 - DNA, 15 bp, Homo sapiens
atctgtgtggtcctg

SEQ ID NO: 40686 - DNA, 15 bp, Homo sapiens
tatctgtgtggtcct

SEQ ID NO: 40687 - DNA, 15 bp, Homo sapiens
atatctgtgtggtcc

SEQ ID NO: 40688 - DNA, 15 bp, Homo sapiens
aatatctgtgtggtc

SEQ ID NO: 40689 - DNA, 15 bp, Homo sapiens
aaatatctgtgtggt

SEQ ID NO: 40690 - DNA, 15 bp, Homo sapiens
gaaatatctgtgtgg

SEQ ID NO: 40691 - DNA, 15 bp, Homo sapiens
agaaatatctgtgtg

SEQ ID NO: 40692 - DNA, 15 bp, Homo sapiens
gagaaatatctgtgt

SEQ ID NO: 40693 - DNA, 15 bp, Homo sapiens
agagaaatatctgtg

SEQ ID NO: 40694 - DNA, 15 bp, Homo sapiens
tagagaaatatctgt

SEQ ID NO: 40695 - DNA, 15 bp, Homo sapiens
ctagagaaatatctg

SEQ ID NO: 40696 - DNA, 15 bp, Homo sapiens
tctagagaaatatct

SEQ ID NO: 40697 - DNA, 15 bp, Homo sapiens
ttctagagaaatatc

SEQ ID NO: 40698 - DNA, 15 bp, Homo sapiens
tttctagagaaatat

SEQ ID NO: 40699 - DNA, 15 bp, Homo sapiens
atttctagagaaata

SEQ ID NO: 40700 - DNA, 15 bp, Homo sapiens
gatttctagagaaat

SEQ ID NO: 40701 - DNA, 15 bp, Homo sapiens
tgatttctagagaaa

SEQ ID NO: 40702 - DNA, 15 bp, Homo sapiens
ctgatttctagagaa

SEQ ID NO: 40703 - DNA, 15 bp, Homo sapiens
gctgatttctagaga

SEQ ID NO: 40704 - DNA, 15 bp, Homo sapiens
cgctgatttctagag

SEQ ID NO: 40705 - DNA, 15 bp, Homo sapiens
acgctgatttctaga

SEQ ID NO: 40706 - DNA, 15 bp, Homo sapiens
aacgctgatttctag

SEQ ID NO: 40707 - DNA, 15 bp, Homo sapiens
aaacgctgatttcta

SEQ ID NO: 40708 - DNA, 15 bp, Homo sapiens
caaacgctgatttct

SEQ ID NO: 40709 - DNA, 15 bp, Homo sapiens
gcaaacgctgatttc

SEQ ID NO: 40710 - DNA, 15 bp, Homo sapiens
agcaaacgctgattt

SEQ ID NO: 40711 - DNA, 15 bp, Homo sapiens
aagcaaacgctgatt

SEQ ID NO: 40712 - DNA, 15 bp, Homo sapiens
taagcaaacgctgat

SEQ ID NO: 40713 - DNA, 15 bp, Homo sapiens
gtaagcaaacgctga

SEQ ID NO: 40714 - DNA, 15 bp, Homo sapiens
ggtaagcaaacgctg

SEQ ID NO: 40715 - DNA, 15 bp, Homo sapiens
tggtaagcaaacgct

SEQ ID NO: 40716 - DNA, 15 bp, Homo sapiens
ttggtaagcaaacgc

SEQ ID NO: 40717 - DNA, 15 bp, Homo sapiens
cttggtaagcaaacg

SEQ ID NO: 40718 - DNA, 15 bp, Homo sapiens
tcttggtaagcaaac

SEQ ID NO: 40719 - DNA, 15 bp, Homo sapiens
ttcttggtaagcaaa

SEQ ID NO: 40720 - DNA, 15 bp, Homo sapiens
gttcttggtaagcaa

SEQ ID NO: 40721 - DNA, 15 bp, Homo sapiens
tgttcttggtaagca

SEQ ID NO: 40722 - DNA, 15 bp, Homo sapiens
atgttcttggtaagc

SEQ ID NO: 40723 - DNA, 15 bp, Homo sapiens
aatgttcttggtaag

SEQ ID NO: 40724 - DNA, 15 bp, Homo sapiens
aaatgttcttggtaa

SEQ ID NO: 40725 - DNA, 15 bp, Homo sapiens
aaaatgttcttggta

SEQ ID NO: 40726 - DNA, 15 bp, Homo sapiens
aaaaatgttcttggt

SEQ ID NO: 40727 - DNA, 15 bp, Homo sapiens
taaaaatgttcttgg

SEQ ID NO: 40728 - DNA, 15 bp, Homo sapiens
gtaaaaatgttcttg

SEQ ID NO: 40729 - DNA, 15 bp, Homo sapiens
agtaaaaatgttctt

SEQ ID NO: 40730 - DNA, 15 bp, Homo sapiens
gagtaaaaatgttct

SEQ ID NO: 40731 - DNA, 15 bp, Homo sapiens
agagtaaaaatgttc

SEQ ID NO: 40732 - DNA, 15 bp, Homo sapiens
gagagtaaaaatgtt

SEQ ID NO: 40733 - DNA, 15 bp, Homo sapiens
ggagagtaaaaatgt

SEQ ID NO: 40734 - DNA, 15 bp, Homo sapiens
tggagagtaaaaatg

SEQ ID NO: 40735 - DNA, 15 bp, Homo sapiens
ttggagagtaaaaat

SEQ ID NO: 40736 - DNA, 15 bp, Homo sapiens
tttggagagtaaaaa

SEQ ID NO: 40737 - DNA, 15 bp, Homo sapiens
ctttggagagtaaaa

SEQ ID NO: 40738 - DNA, 15 bp, Homo sapiens
cctttggagagtaaa

SEQ ID NO: 40739 - DNA, 15 bp, Homo sapiens
tcctttggagagtaa

SEQ ID NO: 40740 - DNA, 15 bp, Homo sapiens
gtcctttggagagta

SEQ ID NO: 40741 - DNA, 15 bp, Homo sapiens
agtcctttggagagt

SEQ ID NO: 40742 - DNA, 15 bp, Homo sapiens
gagtcctttggagag

SEQ ID NO: 40743 - DNA, 15 bp, Homo sapiens
ggagtcctttggaga

SEQ ID NO: 40744 - DNA, 15 bp, Homo sapiens
tggagtcctttggag

SEQ ID NO: 40745 - DNA, 15 bp, Homo sapiens
atggagtcctttgga

SEQ ID NO: 40746 - DNA, 15 bp, Homo sapiens
gatggagtcctttgg

SEQ ID NO: 40747 - DNA, 15 bp, Homo sapiens
ggatggagtcctttg

SEQ ID NO: 40748 - DNA, 15 bp, Homo sapiens
aggatggagtccttt

SEQ ID NO: 40749 - DNA, 15 bp, Homo sapiens
caggatggagtcctt

SEQ ID NO: 40750 - DNA, 15 bp, Homo sapiens
ccaggatggagtcct

SEQ ID NO: 40751 - DNA, 15 bp, Homo sapiens
tccaggatggagtcc

SEQ ID NO: 40752 - DNA, 15 bp, Homo sapiens
ttccaggatggagtc

SEQ ID NO: 40753 - DNA, 15 bp, Homo sapiens
tttccaggatggagt

SEQ ID NO: 40754 - DNA, 15 bp, Homo sapiens
ttttccaggatggag

SEQ ID NO: 40755 - DNA, 15 bp, Homo sapiens
gttttccaggatgga

SEQ ID NO: 40756 - DNA, 15 bp, Homo sapiens
tgttttccaggatgg

SEQ ID NO: 40757 - DNA, 15 bp, Homo sapiens
atgttttccaggatg

SEQ ID NO: 40758 - DNA, 15 bp, Homo sapiens
catgttttccaggat

SEQ ID NO: 40759 - DNA, 15 bp, Homo sapiens
acatgttttccagga

SEQ ID NO: 40760 - DNA, 15 bp, Homo sapiens
aacatgttttccagg

SEQ ID NO: 40761 - DNA, 15 bp, Homo sapiens
aaacatgttttccag

SEQ ID NO: 40762 - DNA, 15 bp, Homo sapiens
aaaacatgttttcca

SEQ ID NO: 40763 - DNA, 15 bp, Homo sapiens
caaaacatgttttcc

SEQ ID NO: 40764 - DNA, 15 bp, Homo sapiens
ccaaaacatgttttc

SEQ ID NO: 40765 - DNA, 15 bp, Homo sapiens
cccaaaacatgtttt

SEQ ID NO: 40766 - DNA, 15 bp, Homo sapiens
tcccaaaacatgttt

SEQ ID NO: 40767 - DNA, 15 bp, Homo sapiens
atcccaaaacatgtt

SEQ ID NO: 40768 - DNA, 15 bp, Homo sapiens
tatcccaaaacatgt

SEQ ID NO: 40769 - DNA, 15 bp, Homo sapiens
ttatcccaaaacatg

SEQ ID NO: 40770 - DNA, 15 bp, Homo sapiens
cttatcccaaaacat

SEQ ID NO: 40771 - DNA, 15 bp, Homo sapiens
ccttatcccaaaaca

SEQ ID NO: 40772 - DNA, 15 bp, Homo sapiens
accttatcccaaaac

SEQ ID NO: 40773 - DNA, 15 bp, Homo sapiens
gaccttatcccaaaa

SEQ ID NO: 40774 - DNA, 15 bp, Homo sapiens
agaccttatcccaaa

SEQ ID NO: 40775 - DNA, 15 bp, Homo sapiens
aagaccttatcccaa

SEQ ID NO: 40776 - DNA, 15 bp, Homo sapiens
taagaccttatccca

SEQ ID NO: 40777 - DNA, 15 bp, Homo sapiens
ataagaccttatccc

SEQ ID NO: 40778 - DNA, 15 bp, Homo sapiens
cataagaccttatcc

SEQ ID NO: 40779 - DNA, 15 bp, Homo sapiens
gcataagaccttatc

SEQ ID NO: 40780 - DNA, 15 bp, Homo sapiens
tgcataagaccttat

SEQ ID NO: 40781 - DNA, 15 bp, Homo sapiens
ttgcataagacctta

SEQ ID NO: 40782 - DNA, 15 bp, Homo sapiens
attgcataagacctt

SEQ ID NO: 40783 - DNA, 15 bp, Homo sapiens
gattgcataagacct

SEQ ID NO: 40784 - DNA, 15 bp, Homo sapiens
agattgcataagacc

SEQ ID NO: 40785 - DNA, 15 bp, Homo sapiens
aagattgcataagac

SEQ ID NO: 40786 - DNA, 15 bp, Homo sapiens
taagattgcataaga

SEQ ID NO: 40787 - DNA, 15 bp, Homo sapiens
ataagattgcataag

SEQ ID NO: 40788 - DNA, 15 bp, Homo sapiens
tataagattgcataa

SEQ ID NO: 40789 - DNA, 15 bp, Homo sapiens
gtataagattgcata

SEQ ID NO: 40790 - DNA, 15 bp, Homo sapiens
agtataagattgcat

SEQ ID NO: 40791 - DNA, 15 bp, Homo sapiens
gagtataagattgca

SEQ ID NO: 40792 - DNA, 15 bp, Homo sapiens
agagtataagattgc

SEQ ID NO: 40793 - DNA, 15 bp, Homo sapiens
cagagtataagattg

SEQ ID NO: 40794 - DNA, 15 bp, Homo sapiens
acagagtataagatt

SEQ ID NO: 40795 - DNA, 15 bp, Homo sapiens
aacagagtataagat

SEQ ID NO: 40796 - DNA, 15 bp, Homo sapiens
taacagagtataaga

SEQ ID NO: 40797 - DNA, 15 bp, Homo sapiens
ataacagagtataag

SEQ ID NO: 40798 - DNA, 15 bp, Homo sapiens
aataacagagtataa

SEQ ID NO: 40799 - DNA, 15 bp, Homo sapiens
taataacagagtata

SEQ ID NO: 40800 - DNA, 15 bp, Homo sapiens
ttaataacagagtat

SEQ ID NO: 40801 - DNA, 15 bp, Homo sapiens
tttaataacagagta

SEQ ID NO: 40802 - DNA, 15 bp, Homo sapiens
ttttaataacagagt

SEQ ID NO: 40803 - DNA, 15 bp, Homo sapiens
gttttaataacagag

SEQ ID NO: 40804 - DNA, 15 bp, Homo sapiens
ggttttaataacaga

SEQ ID NO: 40805 - DNA, 15 bp, Homo sapiens
tggttttaataacag

SEQ ID NO: 40806 - DNA, 15 bp, Homo sapiens
ctggttttaataaca

SEQ ID NO: 40807 - DNA, 15 bp, Homo sapiens
actggttttaataac

SEQ ID NO: 40808 - DNA, 15 bp, Homo sapiens
cactggttttaataa

SEQ ID NO: 40809 - DNA, 15 bp, Homo sapiens
tcactggttttaata

SEQ ID NO: 40810 - DNA, 15 bp, Homo sapiens
ctcactggttttaat

SEQ ID NO: 40811 - DNA, 15 bp, Homo sapiens
cctcactggttttaa

SEQ ID NO: 40812 - DNA, 15 bp, Homo sapiens
ccctcactggtttta

SEQ ID NO: 40813 - DNA, 15 bp, Homo sapiens
accctcactggtttt

SEQ ID NO: 40814 - DNA, 15 bp, Homo sapiens
gaccctcactggttt

SEQ ID NO: 40815 - DNA, 15 bp, Homo sapiens
tgaccctcactggtt

SEQ ID NO: 40816 - DNA, 15 bp, Homo sapiens
ttgaccctcactggt

SEQ ID NO: 40817 - DNA, 15 bp, Homo sapiens
cttgaccctcactgg

SEQ ID NO: 40818 - DNA, 15 bp, Homo sapiens
ccttgaccctcactg

SEQ ID NO: 40819 - DNA, 15 bp, Homo sapiens
accttgaccctcact

SEQ ID NO: 40820 - DNA, 15 bp, Homo sapiens
caccttgaccctcac

SEQ ID NO: 40821 - DNA, 15 bp, Homo sapiens
acaccttgaccctca

SEQ ID NO: 40822 - DNA, 15 bp, Homo sapiens
aacaccttgaccctc

SEQ ID NO: 40823 - DNA, 15 bp, Homo sapiens
taacaccttgaccct

SEQ ID NO: 40824 - DNA, 15 bp, Homo sapiens
ttaacaccttgaccc

SEQ ID NO: 40825 - DNA, 15 bp, Homo sapiens
attaacaccttgacc

SEQ ID NO: 40826 - DNA, 15 bp, Homo sapiens
tattaacaccttgac

SEQ ID NO: 40827 - DNA, 15 bp, Homo sapiens
ctattaacaccttga

SEQ ID NO: 40828 - DNA, 15 bp, Homo sapiens
tctattaacaccttg

SEQ ID NO: 40829 - DNA, 15 bp, Homo sapiens
atctattaacacctt

SEQ ID NO: 40830 - DNA, 15 bp, Homo sapiens
aatctattaacacct

SEQ ID NO: 40831 - DNA, 15 bp, Homo sapiens
taatctattaacacc

SEQ ID NO: 40832 - DNA, 15 bp, Homo sapiens
ttaatctattaacac

SEQ ID NO: 40833 - DNA, 15 bp, Homo sapiens
cttaatctattaaca

SEQ ID NO: 40834 - DNA, 15 bp, Homo sapiens
acttaatctattaac

SEQ ID NO: 40835 - DNA, 15 bp, Homo sapiens
tacttaatctattaa

SEQ ID NO: 40836 - DNA, 15 bp, Homo sapiens
ctacttaatctatta

SEQ ID NO: 40837 - DNA, 15 bp, Homo sapiens
actacttaatctatt

SEQ ID NO: 40838 - DNA, 15 bp, Homo sapiens
cactacttaatctat

SEQ ID NO: 40839 - DNA, 15 bp, Homo sapiens
tcactacttaatcta

SEQ ID NO: 40840 - DNA, 15 bp, Homo sapiens
gtcactacttaatct

SEQ ID NO: 40841 - DNA, 15 bp, Homo sapiens
tgtcactacttaatc

SEQ ID NO: 40842 - DNA, 15 bp, Homo sapiens
ctgtcactacttaat

SEQ ID NO: 40843 - DNA, 15 bp, Homo sapiens
tctgtcactacttaa

SEQ ID NO: 40844 - DNA, 15 bp, Homo sapiens
atctgtcactactta

SEQ ID NO: 40845 - DNA, 15 bp, Homo sapiens
catctgtcactactt

SEQ ID NO: 40846 - DNA, 15 bp, Homo sapiens
tcatctgtcactact

SEQ ID NO: 40847 - DNA, 15 bp, Homo sapiens
atcatctgtcactac

SEQ ID NO: 40848 - DNA, 15 bp, Homo sapiens
gatcatctgtcacta

SEQ ID NO: 40849 - DNA, 15 bp, Homo sapiens
tgatcatctgtcact

SEQ ID NO: 40850 - DNA, 15 bp, Homo sapiens
ctgatcatctgtcac

SEQ ID NO: 40851 - DNA, 15 bp, Homo sapiens
tctgatcatctgtca

SEQ ID NO: 40852 - DNA, 15 bp, Homo sapiens
gtctgatcatctgtc

SEQ ID NO: 40853 - DNA, 15 bp, Homo sapiens
tgtctgatcatctgt

SEQ ID NO: 40854 - DNA, 15 bp, Homo sapiens
ttgtctgatcatctg

SEQ ID NO: 40855 - DNA, 15 bp, Homo sapiens
gttgtctgatcatct

SEQ ID NO: 40856 - DNA, 15 bp, Homo sapiens
agttgtctgatcatc

SEQ ID NO: 40857 - DNA, 15 bp, Homo sapiens
aagttgtctgatcat

SEQ ID NO: 40858 - DNA, 15 bp, Homo sapiens
taagttgtctgatca

SEQ ID NO: 40859 - DNA, 15 bp, Homo sapiens
ctaagttgtctgatc

SEQ ID NO: 40860 - DNA, 15 bp, Homo sapiens
tctaagttgtctgat

SEQ ID NO: 40861 - DNA, 15 bp, Homo sapiens
ttctaagttgtctga

SEQ ID NO: 40862 - DNA, 15 bp, Homo sapiens
tttctaagttgtctg

SEQ ID NO: 40863 - DNA, 15 bp, Homo sapiens
gtttctaagttgtct

SEQ ID NO: 40864 - DNA, 15 bp, Homo sapiens
tgtttctaagttgtc

SEQ ID NO: 40865 - DNA, 15 bp, Homo sapiens
atgtttctaagttgt

SEQ ID NO: 40866 - DNA, 15 bp, Homo sapiens
gatgtttctaagttg

SEQ ID NO: 40867 - DNA, 15 bp, Homo sapiens
ggatgtttctaagtt

SEQ ID NO: 40868 - DNA, 15 bp, Homo sapiens
aggatgtttctaagt

SEQ ID NO: 40869 - DNA, 15 bp, Homo sapiens
taggatgtttctaag

SEQ ID NO: 40870 - DNA, 15 bp, Homo sapiens
ttaggatgtttctaa

SEQ ID NO: 40871 - DNA, 15 bp, Homo sapiens
tttaggatgtttcta

SEQ ID NO: 40872 - DNA, 15 bp, Homo sapiens
atttaggatgtttct

SEQ ID NO: 40873 - DNA, 15 bp, Homo sapiens
tatttaggatgtttc

SEQ ID NO: 40874 - DNA, 15 bp, Homo sapiens
ctatttaggatgttt

SEQ ID NO: 40875 - DNA, 15 bp, Homo sapiens
cctatttaggatgtt

SEQ ID NO: 40876 - DNA, 15 bp, Homo sapiens
acctatttaggatgt

SEQ ID NO: 40877 - DNA, 15 bp, Homo sapiens
aacctatttaggatg

SEQ ID NO: 40878 - DNA, 15 bp, Homo sapiens
taacctatttaggat

SEQ ID NO: 40879 - DNA, 15 bp, Homo sapiens
ttaacctatttagga

SEQ ID NO: 40880 - DNA, 15 bp, Homo sapiens
attaacctatttagg

SEQ ID NO: 40881 - DNA, 15 bp, Homo sapiens
tattaacctatttag

SEQ ID NO: 40882 - DNA, 15 bp, Homo sapiens
ttattaacctattta

SEQ ID NO: 40883 - DNA, 15 bp, Homo sapiens
attattaacctattt

SEQ ID NO: 40884 - DNA, 15 bp, Homo sapiens
aattattaacctatt

SEQ ID NO: 40885 - DNA, 15 bp, Homo sapiens
taattattaacctat

SEQ ID NO: 40886 - DNA, 15 bp, Homo sapiens
ataattattaaccta

SEQ ID NO: 40887 - DNA, 15 bp, Homo sapiens
cataattattaacct

SEQ ID NO: 40888 - DNA, 15 bp, Homo sapiens
acataattattaacc

SEQ ID NO: 40889 - DNA, 15 bp, Homo sapiens
cacataattattaac

SEQ ID NO: 40890 - DNA, 15 bp, Homo sapiens
tcacataattattaa

SEQ ID NO: 40891 - DNA, 15 bp, Homo sapiens
gtcacataattatta

SEQ ID NO: 40892 - DNA, 15 bp, Homo sapiens
ggtcacataattatt

SEQ ID NO: 40893 - DNA, 15 bp, Homo sapiens
tggtcacataattat

SEQ ID NO: 40894 - DNA, 15 bp, Homo sapiens
atggtcacataatta

SEQ ID NO: 40895 - DNA, 15 bp, Homo sapiens
gatggtcacataatt

SEQ ID NO: 40896 - DNA, 15 bp, Homo sapiens
cgatggtcacataat

SEQ ID NO: 40897 - DNA, 15 bp, Homo sapiens
gcgatggtcacataa

SEQ ID NO: 40898 - DNA, 15 bp, Homo sapiens
tgcgatggtcacata

SEQ ID NO: 40899 - DNA, 15 bp, Homo sapiens
atgcgatggtcacat

SEQ ID NO: 40900 - DNA, 15 bp, Homo sapiens
catgcgatggtcaca

SEQ ID NO: 40901 - DNA, 15 bp, Homo sapiens
acatgcgatggtcac

SEQ ID NO: 40902 - DNA, 15 bp, Homo sapiens
cacatgcgatggtca

SEQ ID NO: 40903 - DNA, 15 bp, Homo sapiens
gcacatgcgatggtc

SEQ ID NO: 40904 - DNA, 15 bp, Homo sapiens
tgcacatgcgatggt

SEQ ID NO: 40905 - DNA, 15 bp, Homo sapiens
atgcacatgcgatgg

SEQ ID NO: 40906 - DNA, 15 bp, Homo sapiens
aatgcacatgcgatg

SEQ ID NO: 40907 - DNA, 15 bp, Homo sapiens
gaatgcacatgcgat

SEQ ID NO: 40908 - DNA, 15 bp, Homo sapiens
ggaatgcacatgcga

SEQ ID NO: 40909 - DNA, 15 bp, Homo sapiens
gggaatgcacatgcg

SEQ ID NO: 40910 - DNA, 15 bp, Homo sapiens
tgggaatgcacatgc

SEQ ID NO: 40911 - DNA, 15 bp, Homo sapiens
ttgggaatgcacatg

SEQ ID NO: 40912 - DNA, 15 bp, Homo sapiens
tttgggaatgcacat

SEQ ID NO: 40913 - DNA, 15 bp, Homo sapiens
atttgggaatgcaca

SEQ ID NO: 40914 - DNA, 15 bp, Homo sapiens
aatttgggaatgcac

SEQ ID NO: 40915 - DNA, 15 bp, Homo sapiens
taatttgggaatgca

SEQ ID NO: 40916 - DNA, 15 bp, Homo sapiens
ctaatttgggaatgc

SEQ ID NO: 40917 - DNA, 15 bp, Homo sapiens
cctaatttgggaatg

SEQ ID NO: 40918 - DNA, 15 bp, Homo sapiens
tcctaatttgggaat

SEQ ID NO: 40919 - DNA, 15 bp, Homo sapiens
ttcctaatttgggaa

SEQ ID NO: 40920 - DNA, 15 bp, Homo sapiens
gttcctaatttggga

SEQ ID NO: 40921 - DNA, 15 bp, Homo sapiens
tgttcctaatttggg

SEQ ID NO: 40922 - DNA, 15 bp, Homo sapiens
ttgttcctaatttgg

SEQ ID NO: 40923 - DNA, 15 bp, Homo sapiens
gttgttcctaatttg

SEQ ID NO: 40924 - DNA, 15 bp, Homo sapiens
agttgttcctaattt

SEQ ID NO: 40925 - DNA, 15 bp, Homo sapiens
gagttgttcctaatt

SEQ ID NO: 40926 - DNA, 15 bp, Homo sapiens
tgagttgttcctaat

SEQ ID NO: 40927 - DNA, 15 bp, Homo sapiens
ctgagttgttcctaa

SEQ ID NO: 40928 - DNA, 15 bp, Homo sapiens
tctgagttgttccta

SEQ ID NO: 40929 - DNA, 15 bp, Homo sapiens
atctgagttgttcct

SEQ ID NO: 40930 - DNA, 15 bp, Homo sapiens
gatctgagttgttcc

SEQ ID NO: 40931 - DNA, 15 bp, Homo sapiens
tgatctgagttgttc

SEQ ID NO: 40932 - DNA, 15 bp, Homo sapiens
ttgatctgagttgtt

SEQ ID NO: 40933 - DNA, 15 bp, Homo sapiens
attgatctgagttgt

SEQ ID NO: 40934 - DNA, 15 bp, Homo sapiens
aattgatctgagttg

SEQ ID NO: 40935 - DNA, 15 bp, Homo sapiens
aaattgatctgagtt

SEQ ID NO: 40936 - DNA, 15 bp, Homo sapiens
gaaattgatctgagt

SEQ ID NO: 40937 - DNA, 15 bp, Homo sapiens
agaaattgatctgag

SEQ ID NO: 40938 - DNA, 15 bp, Homo sapiens
tagaaattgatctga

SEQ ID NO: 40939 - DNA, 15 bp, Homo sapiens
ttagaaattgatctg

SEQ ID NO: 40940 - DNA, 15 bp, Homo sapiens
attagaaattgatct

SEQ ID NO: 40941 - DNA, 15 bp, Homo sapiens
gattagaaattgatc

SEQ ID NO: 40942 - DNA, 15 bp, Homo sapiens
ggattagaaattgat

SEQ ID NO: 40943 - DNA, 15 bp, Homo sapiens
aggattagaaattga

SEQ ID NO: 40944 - DNA, 15 bp, Homo sapiens
aaggattagaaattg

SEQ ID NO: 40945 - DNA, 15 bp, Homo sapiens
taaggattagaaatt

SEQ ID NO: 40946 - DNA, 15 bp, Homo sapiens
ataaggattagaaat

SEQ ID NO: 40947 - DNA, 15 bp, Homo sapiens
aataaggattagaaa

SEQ ID NO: 40948 - DNA, 15 bp, Homo sapiens
gaataaggattagaa

SEQ ID NO: 40949 - DNA, 15 bp, Homo sapiens
agaataaggattaga

SEQ ID NO: 40950 - DNA, 15 bp, Homo sapiens
aagaataaggattag

SEQ ID NO: 40951 - DNA, 15 bp, Homo sapiens
taagaataaggatta

SEQ ID NO: 40952 - DNA, 15 bp, Homo sapiens
gtaagaataaggatt

SEQ ID NO: 40953 - DNA, 15 bp, Homo sapiens
tgtaagaataaggat

SEQ ID NO: 40954 - DNA, 15 bp, Homo sapiens
gtgtaagaataagga

SEQ ID NO: 40955 - DNA, 15 bp, Homo sapiens
agtgtaagaataagg

SEQ ID NO: 40956 - DNA, 15 bp, Homo sapiens
cagtgtaagaataag

SEQ ID NO: 40957 - DNA, 15 bp, Homo sapiens
acagtgtaagaataa

SEQ ID NO: 40958 - DNA, 15 bp, Homo sapiens
aacagtgtaagaata

SEQ ID NO: 40959 - DNA, 15 bp, Homo sapiens
gaacagtgtaagaat

SEQ ID NO: 40960 - DNA, 15 bp, Homo sapiens
ggaacagtgtaagaa

SEQ ID NO: 40961 - DNA, 15 bp, Homo sapiens
tggaacagtgtaaga

SEQ ID NO: 40962 - DNA, 15 bp, Homo sapiens
ctggaacagtgtaag

SEQ ID NO: 40963 - DNA, 15 bp, Homo sapiens
actggaacagtgtaa

SEQ ID NO: 40964 - DNA, 15 bp, Homo sapiens
aactggaacagtgta

SEQ ID NO: 40965 - DNA, 15 bp, Homo sapiens
gaactggaacagtgt

SEQ ID NO: 40966 - DNA, 15 bp, Homo sapiens
ggaactggaacagtg

SEQ ID NO: 40967 - DNA, 15 bp, Homo sapiens
gggaactggaacagt

SEQ ID NO: 40968 - DNA, 15 bp, Homo sapiens
ggggaactggaacag

SEQ ID NO: 40969 - DNA, 15 bp, Homo sapiens
gggggaactggaaca

SEQ ID NO: 40970 - DNA, 15 bp, Homo sapiens
tgggggaactggaac

SEQ ID NO: 40971 - DNA, 15 bp, Homo sapiens
atgggggaactggaa

SEQ ID NO: 40972 - DNA, 15 bp, Homo sapiens
tatgggggaactgga

SEQ ID NO: 40973 - DNA, 15 bp, Homo sapiens
atatgggggaactgg

SEQ ID NO: 40974 - DNA, 15 bp, Homo sapiens
tatatgggggaactg

SEQ ID NO: 40975 - DNA, 15 bp, Homo sapiens
ttatatgggggaact

SEQ ID NO: 40976 - DNA, 15 bp, Homo sapiens
gttatatgggggaac

SEQ ID NO: 40977 - DNA, 15 bp, Homo sapiens
agttatatgggggaa

SEQ ID NO: 40978 - DNA, 15 bp, Homo sapiens
gagttatatggggga

SEQ ID NO: 40979 - DNA, 15 bp, Homo sapiens
cgagttatatggggg

SEQ ID NO: 40980 - DNA, 15 bp, Homo sapiens
acgagttatatgggg

SEQ ID NO: 40981 - DNA, 15 bp, Homo sapiens
tacgagttatatggg

SEQ ID NO: 40982 - DNA, 15 bp, Homo sapiens
atacgagttatatgg

SEQ ID NO: 40983 - DNA, 15 bp, Homo sapiens
gatacgagttatatg

SEQ ID NO: 40984 - DNA, 15 bp, Homo sapiens
agatacgagttatat

SEQ ID NO: 40985 - DNA, 15 bp, Homo sapiens
aagatacgagttata

SEQ ID NO: 40986 - DNA, 15 bp, Homo sapiens
aaagatacgagttat

SEQ ID NO: 40987 - DNA, 15 bp, Homo sapiens
caaagatacgagtta

SEQ ID NO: 40988 - DNA, 15 bp, Homo sapiens
acaaagatacgagtt

SEQ ID NO: 40989 - DNA, 15 bp, Homo sapiens
cacaaagatacgagt

SEQ ID NO: 40990 - DNA, 15 bp, Homo sapiens
acacaaagatacgag

SEQ ID NO: 40991 - DNA, 15 bp, Homo sapiens
aacacaaagatacga

SEQ ID NO: 40992 - DNA, 15 bp, Homo sapiens
taacacaaagatacg

SEQ ID NO: 40993 - DNA, 15 bp, Homo sapiens
ctaacacaaagatac

SEQ ID NO: 40994 - DNA, 15 bp, Homo sapiens
actaacacaaagata

SEQ ID NO: 40995 - DNA, 15 bp, Homo sapiens
aactaacacaaagat

SEQ ID NO: 40996 - DNA, 15 bp, Homo sapiens
aaactaacacaaaga

SEQ ID NO: 40997 - DNA, 15 bp, Homo sapiens
gaaactaacacaaag

SEQ ID NO: 40998 - DNA, 15 bp, Homo sapiens
tgaaactaacacaaa

SEQ ID NO: 40999 - DNA, 15 bp, Homo sapiens
ctgaaactaacacaa

SEQ ID NO: 41000 - DNA, 15 bp, Homo sapiens
tctgaaactaacaca

SEQ ID NO: 41001 - DNA, 15 bp, Homo sapiens
ttctgaaactaacac

SEQ ID NO: 41002 - DNA, 15 bp, Homo sapiens
cttctgaaactaaca

SEQ ID NO: 41003 - DNA, 15 bp, Homo sapiens
acttctgaaactaac

SEQ ID NO: 41004 - DNA, 15 bp, Homo sapiens
aacttctgaaactaa

SEQ ID NO: 41005 - DNA, 15 bp, Homo sapiens
aaacttctgaaacta

SEQ ID NO: 41006 - DNA, 15 bp, Homo sapiens
gaaacttctgaaact

SEQ ID NO: 41007 - DNA, 15 bp, Homo sapiens
agaaacttctgaaac

SEQ ID NO: 41008 - DNA, 15 bp, Homo sapiens
cagaaacttctgaaa

SEQ ID NO: 41009 - DNA, 15 bp, Homo sapiens
tcagaaacttctgaa

SEQ ID NO: 41010 - DNA, 15 bp, Homo sapiens
ttcagaaacttctga

SEQ ID NO: 41011 - DNA, 15 bp, Homo sapiens
cttcagaaacttctg

SEQ ID NO: 41012 - DNA, 15 bp, Homo sapiens
acttcagaaacttct

SEQ ID NO: 41013 - DNA, 15 bp, Homo sapiens
tacttcagaaacttc

SEQ ID NO: 41014 - DNA, 15 bp, Homo sapiens
gtacttcagaaactt

SEQ ID NO: 41015 - DNA, 15 bp, Homo sapiens
ggtacttcagaaact

SEQ ID NO: 41016 - DNA, 15 bp, Homo sapiens
gggtacttcagaaac

SEQ ID NO: 41017 - DNA, 15 bp, Homo sapiens
agggtacttcagaaa

SEQ ID NO: 41018 - DNA, 15 bp, Homo sapiens
gagggtacttcagaa

SEQ ID NO: 41019 - DNA, 15 bp, Homo sapiens
tgagggtacttcaga

SEQ ID NO: 41020 - DNA, 15 bp, Homo sapiens
ctgagggtacttcag

SEQ ID NO: 41021 - DNA, 15 bp, Homo sapiens
gctgagggtacttca

SEQ ID NO: 41022 - DNA, 15 bp, Homo sapiens
ggctgagggtacttc

SEQ ID NO: 41023 - DNA, 15 bp, Homo sapiens
aggctgagggtactt

SEQ ID NO: 41024 - DNA, 15 bp, Homo sapiens
aaggctgagggtact

SEQ ID NO: 41025 - DNA, 15 bp, Homo sapiens
caaggctgagggtac

SEQ ID NO: 41026 - DNA, 15 bp, Homo sapiens
tcaaggctgagggta

SEQ ID NO: 41027 - DNA, 15 bp, Homo sapiens
atcaaggctgagggt

SEQ ID NO: 41028 - DNA, 15 bp, Homo sapiens
catcaaggctgaggg

SEQ ID NO: 41029 - DNA, 15 bp, Homo sapiens
ccatcaaggctgagg

SEQ ID NO: 41030 - DNA, 15 bp, Homo sapiens
cccatcaaggctgag

SEQ ID NO: 41031 - DNA, 15 bp, Homo sapiens
ccccatcaaggctga

SEQ ID NO: 41032 - DNA, 15 bp, Homo sapiens
tccccatcaaggctg

SEQ ID NO: 41033 - DNA, 15 bp, Homo sapiens
atccccatcaaggct

SEQ ID NO: 41034 - DNA, 15 bp, Homo sapiens
gatccccatcaaggc

SEQ ID NO: 41035 - DNA, 15 bp, Homo sapiens
ggatccccatcaagg

SEQ ID NO: 41036 - DNA, 15 bp, Homo sapiens
aggatccccatcaag

SEQ ID NO: 41037 - DNA, 15 bp, Homo sapiens
gaggatccccatcaa

SEQ ID NO: 41038 - DNA, 15 bp, Homo sapiens
cgaggatccccatca

SEQ ID NO: 41039 - DNA, 15 bp, Homo sapiens
gcgaggatccccatc

SEQ ID NO: 41040 - DNA, 15 bp, Homo sapiens
tgcgaggatccccat

SEQ ID NO: 41041 - DNA, 15 bp, Homo sapiens
gtgcgaggatcccca

SEQ ID NO: 41042 - DNA, 15 bp, Homo sapiens
ggtgcgaggatcccc

SEQ ID NO: 41043 - DNA, 15 bp, Homo sapiens
tggtgcgaggatccc

SEQ ID NO: 41044 - DNA, 15 bp, Homo sapiens
gtggtgcgaggatcc

SEQ ID NO: 41045 - DNA, 15 bp, Homo sapiens
ggtggtgcgaggatc

SEQ ID NO: 41046 - DNA, 15 bp, Homo sapiens
aggtggtgcgaggat

SEQ ID NO: 41047 - DNA, 15 bp, Homo sapiens
gaggtggtgcgagga

SEQ ID NO: 41048 - DNA, 15 bp, Homo sapiens
tgaggtggtgcgagg

SEQ ID NO: 41049 - DNA, 15 bp, Homo sapiens
ttgaggtggtgcgag

SEQ ID NO: 41050 - DNA, 15 bp, Homo sapiens
tttgaggtggtgcga

SEQ ID NO: 41051 - DNA, 15 bp, Homo sapiens
atttgaggtggtgcg

SEQ ID NO: 41052 - DNA, 15 bp, Homo sapiens
gatttgaggtggtgc

SEQ ID NO: 41053 - DNA, 15 bp, Homo sapiens
ggatttgaggtggtg

SEQ ID NO: 41054 - DNA, 15 bp, Homo sapiens
aggatttgaggtggt

SEQ ID NO: 41055 - DNA, 15 bp, Homo sapiens
caggatttgaggtgg

SEQ ID NO: 41056 - DNA, 15 bp, Homo sapiens
acaggatttgaggtg

SEQ ID NO: 41057 - DNA, 15 bp, Homo sapiens
aacaggatttgaggt

SEQ ID NO: 41058 - DNA, 15 bp, Homo sapiens
gaacaggatttgagg

SEQ ID NO: 41059 - DNA, 15 bp, Homo sapiens
agaacaggatttgag

SEQ ID NO: 41060 - DNA, 15 bp, Homo sapiens
gagaacaggatttga

SEQ ID NO: 41061 - DNA, 15 bp, Homo sapiens
tgagaacaggatttg

SEQ ID NO: 41062 - DNA, 15 bp, Homo sapiens
ctgagaacaggattt

SEQ ID NO: 41063 - DNA, 15 bp, Homo sapiens
gctgagaacaggatt

SEQ ID NO: 41064 - DNA, 15 bp, Homo sapiens
ggctgagaacaggat

SEQ ID NO: 41065 - DNA, 15 bp, Homo sapiens
gggctgagaacagga

SEQ ID NO: 41066 - DNA, 15 bp, Homo sapiens
agggctgagaacagg

SEQ ID NO: 41067 - DNA, 15 bp, Homo sapiens
tagggctgagaacag

SEQ ID NO: 41068 - DNA, 15 bp, Homo sapiens
ttagggctgagaaca

SEQ ID NO: 41069 - DNA, 15 bp, Homo sapiens
cttagggctgagaac

SEQ ID NO: 41070 - DNA, 15 bp, Homo sapiens
tcttagggctgagaa

SEQ ID NO: 41071 - DNA, 15 bp, Homo sapiens
ttcttagggctgaga

SEQ ID NO: 41072 - DNA, 15 bp, Homo sapiens
gttcttagggctgag

SEQ ID NO: 41073 - DNA, 15 bp, Homo sapiens
agttcttagggctga

SEQ ID NO: 41074 - DNA, 15 bp, Homo sapiens
cagttcttagggctg

SEQ ID NO: 41075 - DNA, 15 bp, Homo sapiens
acagttcttagggct

SEQ ID NO: 41076 - DNA, 15 bp, Homo sapiens
cacagttcttagggc

SEQ ID NO: 41077 - DNA, 15 bp, Homo sapiens
acacagttcttaggg

SEQ ID NO: 41078 - DNA, 15 bp, Homo sapiens
aacacagttcttagg

SEQ ID NO: 41079 - DNA, 15 bp, Homo sapiens
taacacagttcttag

SEQ ID NO: 41080 - DNA, 15 bp, Homo sapiens
ctaacacagttctta

SEQ ID NO: 41081 - DNA, 15 bp, Homo sapiens
actaacacagttctt

SEQ ID NO: 41082 - DNA, 15 bp, Homo sapiens
gactaacacagttct

SEQ ID NO: 41083 - DNA, 15 bp, Homo sapiens
tgactaacacagttc

SEQ ID NO: 41084 - DNA, 15 bp, Homo sapiens
atgactaacacagtt

SEQ ID NO: 41085 - DNA, 15 bp, Homo sapiens
gatgactaacacagt

SEQ ID NO: 41086 - DNA, 15 bp, Homo sapiens
ggatgactaacacag

SEQ ID NO: 41087 - DNA, 15 bp, Homo sapiens
aggatgactaacaca

SEQ ID NO: 41088 - DNA, 15 bp, Homo sapiens
gaggatgactaacac

SEQ ID NO: 41089 - DNA, 15 bp, Homo sapiens
agaggatgactaaca

SEQ ID NO: 41090 - DNA, 15 bp, Homo sapiens
aagaggatgactaac

SEQ ID NO: 41091 - DNA, 15 bp, Homo sapiens
taagaggatgactaa

SEQ ID NO: 41092 - DNA, 15 bp, Homo sapiens
ttaagaggatgacta

SEQ ID NO: 41093 - DNA, 15 bp, Homo sapiens
cttaagaggatgact

SEQ ID NO: 41094 - DNA, 15 bp, Homo sapiens
tcttaagaggatgac

SEQ ID NO: 41095 - DNA, 15 bp, Homo sapiens
ctcttaagaggatga

SEQ ID NO: 41096 - DNA, 15 bp, Homo sapiens
cctcttaagaggatg

SEQ ID NO: 41097 - DNA, 15 bp, Homo sapiens
tcctcttaagaggat

SEQ ID NO: 41098 - DNA, 15 bp, Homo sapiens
atcctcttaagagga

SEQ ID NO: 41099 - DNA, 15 bp, Homo sapiens
catcctcttaagagg

SEQ ID NO: 41100 - DNA, 15 bp, Homo sapiens
acatcctcttaagag

SEQ ID NO: 41101 - DNA, 15 bp, Homo sapiens
cacatcctcttaaga

SEQ ID NO: 41102 - DNA, 15 bp, Homo sapiens
acacatcctcttaag

SEQ ID NO: 41103 - DNA, 15 bp, Homo sapiens
cacacatcctcttaa

SEQ ID NO: 41104 - DNA, 15 bp, Homo sapiens
tcacacatcctctta

SEQ ID NO: 41105 - DNA, 15 bp, Homo sapiens
atcacacatcctctt

SEQ ID NO: 41106 - DNA, 15 bp, Homo sapiens
aatcacacatcctct

SEQ ID NO: 41107 - DNA, 15 bp, Homo sapiens
aaatcacacatcctc

SEQ ID NO: 41108 - DNA, 15 bp, Homo sapiens
aaaatcacacatcct

SEQ ID NO: 41109 - DNA, 15 bp, Homo sapiens
taaaatcacacatcc

SEQ ID NO: 41110 - DNA, 15 bp, Homo sapiens
ttaaaatcacacatc

SEQ ID NO: 41111 - DNA, 15 bp, Homo sapiens
tttaaaatcacacat

SEQ ID NO: 41112 - DNA, 15 bp, Homo sapiens
atttaaaatcacaca

SEQ ID NO: 41113 - DNA, 15 bp, Homo sapiens
gatttaaaatcacac

SEQ ID NO: 41114 - DNA, 15 bp, Homo sapiens
tgatttaaaatcaca

SEQ ID NO: 41115 - DNA, 15 bp, Homo sapiens
ctgatttaaaatcac

SEQ ID NO: 41116 - DNA, 15 bp, Homo sapiens
tctgatttaaaatca

SEQ ID NO: 41117 - DNA, 15 bp, Homo sapiens
atctgatttaaaatc

SEQ ID NO: 41118 - DNA, 15 bp, Homo sapiens
tatctgatttaaaat

SEQ ID NO: 41119 - DNA, 15 bp, Homo sapiens
ttatctgatttaaaa

SEQ ID NO: 41120 - DNA, 15 bp, Homo sapiens
attatctgatttaaa

SEQ ID NO: 41121 - DNA, 15 bp, Homo sapiens
cattatctgatttaa

SEQ ID NO: 41122 - DNA, 15 bp, Homo sapiens
ccattatctgattta

SEQ ID NO: 41123 - DNA, 15 bp, Homo sapiens
cccattatctgattt

SEQ ID NO: 41124 - DNA, 15 bp, Homo sapiens
tcccattatctgatt

SEQ ID NO: 41125 - DNA, 15 bp, Homo sapiens
atcccattatctgat

SEQ ID NO: 41126 - DNA, 15 bp, Homo sapiens
tatcccattatctga

SEQ ID NO: 41127 - DNA, 15 bp, Homo sapiens
ttatcccattatctg

SEQ ID NO: 41128 - DNA, 15 bp, Homo sapiens
tttatcccattatct

SEQ ID NO: 41129 - DNA, 15 bp, Homo sapiens
gtttatcccattatc

SEQ ID NO: 41130 - DNA, 15 bp, Homo sapiens
ggtttatcccattat

SEQ ID NO: 41131 - DNA, 15 bp, Homo sapiens
tggtttatcccatta

SEQ ID NO: 41132 - DNA, 15 bp, Homo sapiens
gtggtttatcccatt

SEQ ID NO: 41133 - DNA, 15 bp, Homo sapiens
tgtggtttatcccat

SEQ ID NO: 41134 - DNA, 15 bp, Homo sapiens
atgtggtttatccca

SEQ ID NO: 41135 - DNA, 15 bp, Homo sapiens
aatgtggtttatccc

SEQ ID NO: 41136 - DNA, 15 bp, Homo sapiens
aaatgtggtttatcc

SEQ ID NO: 41137 - DNA, 15 bp, Homo sapiens
gaaatgtggtttatc

SEQ ID NO: 41138 - DNA, 15 bp, Homo sapiens
cgaaatgtggtttat

SEQ ID NO: 41139 - DNA, 15 bp, Homo sapiens
acgaaatgtggttta

SEQ ID NO: 41140 - DNA, 15 bp, Homo sapiens
gacgaaatgtggttt

SEQ ID NO: 41141 - DNA, 15 bp, Homo sapiens
agacgaaatgtggtt

SEQ ID NO: 41142 - DNA, 15 bp, Homo sapiens
tagacgaaatgtggt

SEQ ID NO: 41143 - DNA, 15 bp, Homo sapiens
ctagacgaaatgtgg

SEQ ID NO: 41144 - DNA, 15 bp, Homo sapiens
tctagacgaaatgtg

SEQ ID NO: 41145 - DNA, 15 bp, Homo sapiens
gtctagacgaaatgt

SEQ ID NO: 41146 - DNA, 15 bp, Homo sapiens
agtctagacgaaatg

SEQ ID NO: 41147 - DNA, 15 bp, Homo sapiens
cagtctagacgaaat

SEQ ID NO: 41148 - DNA, 15 bp, Homo sapiens
ccagtctagacgaaa

SEQ ID NO: 41149 - DNA, 15 bp, Homo sapiens
accagtctagacgaa

SEQ ID NO: 41150 - DNA, 15 bp, Homo sapiens
gaccagtctagacga

SEQ ID NO: 41151 - DNA, 15 bp, Homo sapiens
tgaccagtctagacg

SEQ ID NO: 41152 - DNA, 15 bp, Homo sapiens
ctgaccagtctagac

SEQ ID NO: 41153 - DNA, 15 bp, Homo sapiens
cctgaccagtctaga

SEQ ID NO: 41154 - DNA, 15 bp, Homo sapiens
gcctgaccagtctag

SEQ ID NO: 41155 - DNA, 15 bp, Homo sapiens
ggcctgaccagtcta

SEQ ID NO: 41156 - DNA, 15 bp, Homo sapiens
aggcctgaccagtct

SEQ ID NO: 41157 - DNA, 15 bp, Homo sapiens
aaggcctgaccagtc

SEQ ID NO: 41158 - DNA, 15 bp, Homo sapiens
aaaggcctgaccagt

SEQ ID NO: 41159 - DNA, 15 bp, Homo sapiens
caaaggcctgaccag

SEQ ID NO: 41160 - DNA, 15 bp, Homo sapiens
acaaaggcctgacca

SEQ ID NO: 41161 - DNA, 15 bp, Homo sapiens
gacaaaggcctgacc

SEQ ID NO: 41162 - DNA, 15 bp, Homo sapiens
ggacaaaggcctgac

SEQ ID NO: 41163 - DNA, 15 bp, Homo sapiens
tggacaaaggcctga

SEQ ID NO: 41164 - DNA, 15 bp, Homo sapiens
ctggacaaaggcctg

SEQ ID NO: 41165 - DNA, 15 bp, Homo sapiens
actggacaaaggcct

SEQ ID NO: 41166 - DNA, 15 bp, Homo sapiens
gactggacaaaggcc

SEQ ID NO: 41167 - DNA, 15 bp, Homo sapiens
ggactggacaaaggc

SEQ ID NO: 41168 - DNA, 15 bp, Homo sapiens
gggactggacaaagg

SEQ ID NO: 41169 - DNA, 15 bp, Homo sapiens
ggggactggacaaag

SEQ ID NO: 41170 - DNA, 15 bp, Homo sapiens
aggggactggacaaa

SEQ ID NO: 41171 - DNA, 15 bp, Homo sapiens
gaggggactggacaa

SEQ ID NO: 41172 - DNA, 15 bp, Homo sapiens
ggaggggactggaca

SEQ ID NO: 41173 - DNA, 15 bp, Homo sapiens
aggaggggactggac

SEQ ID NO: 41174 - DNA, 15 bp, Homo sapiens
gaggaggggactgga

SEQ ID NO: 41175 - DNA, 15 bp, Homo sapiens
cgaggaggggactgg

SEQ ID NO: 41176 - DNA, 15 bp, Homo sapiens
gcgaggaggggactg

SEQ ID NO: 41177 - DNA, 15 bp, Homo sapiens
ggcgaggaggggact

SEQ ID NO: 41178 - DNA, 15 bp, Homo sapiens
gggcgaggaggggac

SEQ ID NO: 41179 - DNA, 15 bp, Homo sapiens
tgggcgaggagggga

SEQ ID NO: 41180 - DNA, 15 bp, Homo sapiens
gtgggcgaggagggg

SEQ ID NO: 41181 - DNA, 15 bp, Homo sapiens
tgtgggcgaggaggg

SEQ ID NO: 41182 - DNA, 15 bp, Homo sapiens
gtgtgggcgaggagg

SEQ ID NO: 41183 - DNA, 15 bp, Homo sapiens
agtgtgggcgaggag

SEQ ID NO: 41184 - DNA, 15 bp, Homo sapiens
tagtgtgggcgagga

SEQ ID NO: 41185 - DNA, 15 bp, Homo sapiens
gtagtgtgggcgagg

SEQ ID NO: 41186 - DNA, 15 bp, Homo sapiens
ggtagtgtgggcgag

SEQ ID NO: 41187 - DNA, 15 bp, Homo sapiens
gggtagtgtgggcga

SEQ ID NO: 41188 - DNA, 15 bp, Homo sapiens
ggggtagtgtgggcg

SEQ ID NO: 41189 - DNA, 15 bp, Homo sapiens
tggggtagtgtgggc

SEQ ID NO: 41190 - DNA, 15 bp, Homo sapiens
ctggggtagtgtggg

SEQ ID NO: 41191 - DNA, 15 bp, Homo sapiens
gctggggtagtgtgg

SEQ ID NO: 41192 - DNA, 15 bp, Homo sapiens
agctggggtagtgtg

SEQ ID NO: 41193 - DNA, 15 bp, Homo sapiens
gagctggggtagtgt

SEQ ID NO: 41194 - DNA, 15 bp, Homo sapiens
ggagctggggtagtg

SEQ ID NO: 41195 - DNA, 15 bp, Homo sapiens
tggagctggggtagt

SEQ ID NO: 41196 - DNA, 15 bp, Homo sapiens
gtggagctggggtag

SEQ ID NO: 41197 - DNA, 15 bp, Homo sapiens
tgtggagctggggta

SEQ ID NO: 41198 - DNA, 15 bp, Homo sapiens
ctgtggagctggggt

SEQ ID NO: 41199 - DNA, 15 bp, Homo sapiens
gctgtggagctgggg

SEQ ID NO: 41200 - DNA, 15 bp, Homo sapiens
cgctgtggagctggg

SEQ ID NO: 41201 - DNA, 15 bp, Homo sapiens
ccgctgtggagctgg

SEQ ID NO: 41202 - DNA, 15 bp, Homo sapiens
cccgctgtggagctg

SEQ ID NO: 41203 - DNA, 15 bp, Homo sapiens
gcccgctgtggagct

SEQ ID NO: 41204 - DNA, 15 bp, Homo sapiens
tgcccgctgtggagc

SEQ ID NO: 41205 - DNA, 15 bp, Homo sapiens
atgcccgctgtggag

SEQ ID NO: 41206 - DNA, 15 bp, Homo sapiens
aatgcccgctgtgga

SEQ ID NO: 41207 - DNA, 15 bp, Homo sapiens
caatgcccgctgtgg

SEQ ID NO: 41208 - DNA, 15 bp, Homo sapiens
ccaatgcccgctgtg

SEQ ID NO: 41209 - DNA, 15 bp, Homo sapiens
accaatgcccgctgt

SEQ ID NO: 41210 - DNA, 15 bp, Homo sapiens
aaccaatgcccgctg

SEQ ID NO: 41211 - DNA, 15 bp, Homo sapiens
gaaccaatgcccgct

SEQ ID NO: 41212 - DNA, 15 bp, Homo sapiens
tgaaccaatgcccgc

SEQ ID NO: 41213 - DNA, 15 bp, Homo sapiens
ctgaaccaatgcccg

SEQ ID NO: 41214 - DNA, 15 bp, Homo sapiens
cctgaaccaatgccc

SEQ ID NO: 41215 - DNA, 15 bp, Homo sapiens
tcctgaaccaatgcc

SEQ ID NO: 41216 - DNA, 15 bp, Homo sapiens
ttcctgaaccaatgc

SEQ ID NO: 41217 - DNA, 15 bp, Homo sapiens
attcctgaaccaatg

SEQ ID NO: 41218 - DNA, 15 bp, Homo sapiens
aattcctgaaccaat

SEQ ID NO: 41219 - DNA, 15 bp, Homo sapiens
gaattcctgaaccaa

SEQ ID NO: 41220 - DNA, 15 bp, Homo sapiens
tgaattcctgaacca

SEQ ID NO: 41221 - DNA, 15 bp, Homo sapiens
ttgaattcctgaacc

SEQ ID NO: 41222 - DNA, 15 bp, Homo sapiens
gttgaattcctgaac

SEQ ID NO: 41223 - DNA, 15 bp, Homo sapiens
ggttgaattcctgaa

SEQ ID NO: 41224 - DNA, 15 bp, Homo sapiens
gggttgaattcctga

SEQ ID NO: 41225 - DNA, 15 bp, Homo sapiens
tgggttgaattcctg

SEQ ID NO: 41226 - DNA, 15 bp, Homo sapiens
gtgggttgaattcct

SEQ ID NO: 41227 - DNA, 15 bp, Homo sapiens
tgtgggttgaattcc

SEQ ID NO: 41228 - DNA, 15 bp, Homo sapiens
gtgtgggttgaattc

SEQ ID NO: 41229 - DNA, 15 bp, Homo sapiens
agtgtgggttgaatt

SEQ ID NO: 41230 - DNA, 15 bp, Homo sapiens
aagtgtgggttgaat

SEQ ID NO: 41231 - DNA, 15 bp, Homo sapiens
aaagtgtgggttgaa

SEQ ID NO: 41232 - DNA, 15 bp, Homo sapiens
taaagtgtgggttga

SEQ ID NO: 41233 - DNA, 15 bp, Homo sapiens
ataaagtgtgggttg

SEQ ID NO: 41234 - DNA, 15 bp, Homo sapiens
tataaagtgtgggtt

SEQ ID NO: 41235 - DNA, 15 bp, Homo sapiens
ttataaagtgtgggt

SEQ ID NO: 41236 - DNA, 15 bp, Homo sapiens
gttataaagtgtggg

SEQ ID NO: 41237 - DNA, 15 bp, Homo sapiens
agttataaagtgtgg

SEQ ID NO: 41238 - DNA, 15 bp, Homo sapiens
cagttataaagtgtg

SEQ ID NO: 41239 - DNA, 15 bp, Homo sapiens
ccagttataaagtgt

SEQ ID NO: 41240 - DNA, 15 bp, Homo sapiens
tccagttataaagtg

SEQ ID NO: 41241 - DNA, 15 bp, Homo sapiens
ctccagttataaagt

SEQ ID NO: 41242 - DNA, 15 bp, Homo sapiens
tctccagttataaag

SEQ ID NO: 41243 - DNA, 15 bp, Homo sapiens
gtctccagttataaa

SEQ ID NO: 41244 - DNA, 15 bp, Homo sapiens
tgtctccagttataa

SEQ ID NO: 41245 - DNA, 15 bp, Homo sapiens
ctgtctccagttata

SEQ ID NO: 41246 - DNA, 15 bp, Homo sapiens
actgtctccagttat

SEQ ID NO: 41247 - DNA, 15 bp, Homo sapiens
tactgtctccagtta

SEQ ID NO: 41248 - DNA, 15 bp, Homo sapiens
atactgtctccagtt

SEQ ID NO: 41249 - DNA, 15 bp, Homo sapiens
gatactgtctccagt

SEQ ID NO: 41250 - DNA, 15 bp, Homo sapiens
agatactgtctccag

SEQ ID NO: 41251 - DNA, 15 bp, Homo sapiens
gagatactgtctcca

SEQ ID NO: 41252 - DNA, 15 bp, Homo sapiens
agagatactgtctcc

SEQ ID NO: 41253 - DNA, 15 bp, Homo sapiens
gagagatactgtctc

SEQ ID NO: 41254 - DNA, 15 bp, Homo sapiens
ggagagatactgtct

SEQ ID NO: 41255 - DNA, 15 bp, Homo sapiens
tggagagatactgtc

SEQ ID NO: 41256 - DNA, 15 bp, Homo sapiens
ctggagagatactgt

SEQ ID NO: 41257 - DNA, 15 bp, Homo sapiens
actggagagatactg

SEQ ID NO: 41258 - DNA, 15 bp, Homo sapiens
aactggagagatact

SEQ ID NO: 41259 - DNA, 15 bp, Homo sapiens
taactggagagatac

SEQ ID NO: 41260 - DNA, 15 bp, Homo sapiens
ttaactggagagata

SEQ ID NO: 41261 - DNA, 15 bp, Homo sapiens
tttaactggagagat

SEQ ID NO: 41262 - DNA, 15 bp, Homo sapiens
ttttaactggagaga

SEQ ID NO: 41263 - DNA, 15 bp, Homo sapiens
tttttaactggagag

SEQ ID NO: 41264 - DNA, 15 bp, Homo sapiens
ctttttaactggaga

SEQ ID NO: 41265 - DNA, 15 bp, Homo sapiens
cctttttaactggag

SEQ ID NO: 41266 - DNA, 15 bp, Homo sapiens
acctttttaactgga

SEQ ID NO: 41267 - DNA, 15 bp, Homo sapiens
gacctttttaactgg

SEQ ID NO: 41268 - DNA, 15 bp, Homo sapiens
tgacctttttaactg

SEQ ID NO: 41269 - DNA, 15 bp, Homo sapiens
gtgacctttttaact

SEQ ID NO: 41270 - DNA, 15 bp, Homo sapiens
ggtgacctttttaac

SEQ ID NO: 41271 - DNA, 15 bp, Homo sapiens
aggtgacctttttaa

SEQ ID NO: 41272 - DNA, 15 bp, Homo sapiens
aaggtgaccttttta

SEQ ID NO: 41273 - DNA, 15 bp, Homo sapiens
caaggtgaccttttt

SEQ ID NO: 41274 - DNA, 15 bp, Homo sapiens
ccaaggtgacctttt

SEQ ID NO: 41275 - DNA, 15 bp, Homo sapiens
accaaggtgaccttt

SEQ ID NO: 41276 - DNA, 15 bp, Homo sapiens
caccaaggtgacctt

SEQ ID NO: 41277 - DNA, 15 bp, Homo sapiens
acaccaaggtgacct

SEQ ID NO: 41278 - DNA, 15 bp, Homo sapiens
gacaccaaggtgacc

SEQ ID NO: 41279 - DNA, 15 bp, Homo sapiens
ggacaccaaggtgac

SEQ ID NO: 41280 - DNA, 15 bp, Homo sapiens
cggacaccaaggtga

SEQ ID NO: 41281 - DNA, 15 bp, Homo sapiens
gcggacaccaaggtg

SEQ ID NO: 41282 - DNA, 15 bp, Homo sapiens
agcggacaccaaggt

SEQ ID NO: 41283 - DNA, 15 bp, Homo sapiens
aagcggacaccaagg

SEQ ID NO: 41284 - DNA, 15 bp, Homo sapiens
gaagcggacaccaag

SEQ ID NO: 41285 - DNA, 15 bp, Homo sapiens
agaagcggacaccaa

SEQ ID NO: 41286 - DNA, 15 bp, Homo sapiens
gagaagcggacacca

SEQ ID NO: 41287 - DNA, 15 bp, Homo sapiens
tgagaagcggacacc

SEQ ID NO: 41288 - DNA, 15 bp, Homo sapiens
ttgagaagcggacac

SEQ ID NO: 41289 - DNA, 15 bp, Homo sapiens
cttgagaagcggaca

SEQ ID NO: 41290 - DNA, 15 bp, Homo sapiens
ccttgagaagcggac

SEQ ID NO: 41291 - DNA, 15 bp, Homo sapiens
tccttgagaagcgga

SEQ ID NO: 41292 - DNA, 15 bp, Homo sapiens
ttccttgagaagcgg

SEQ ID NO: 41293 - DNA, 15 bp, Homo sapiens
gttccttgagaagcg

SEQ ID NO: 41294 - DNA, 15 bp, Homo sapiens
tgttccttgagaagc

SEQ ID NO: 41295 - DNA, 15 bp, Homo sapiens
atgttccttgagaag

SEQ ID NO: 41296 - DNA, 15 bp, Homo sapiens
catgttccttgagaa

SEQ ID NO: 41297 - DNA, 15 bp, Homo sapiens
ccatgttccttgaga

SEQ ID NO: 41298 - DNA, 15 bp, Homo sapiens
tccatgttccttgag

SEQ ID NO: 41299 - DNA, 15 bp, Homo sapiens
gtccatgttccttga

SEQ ID NO: 41300 - DNA, 15 bp, Homo sapiens
tgtccatgttccttg

SEQ ID NO: 41301 - DNA, 15 bp, Homo sapiens
atgtccatgttcctt

SEQ ID NO: 41302 - DNA, 15 bp, Homo sapiens
gatgtccatgttcct

SEQ ID NO: 41303 - DNA, 15 bp, Homo sapiens
agatgtccatgttcc

SEQ ID NO: 41304 - DNA, 15 bp, Homo sapiens
aagatgtccatgttc

SEQ ID NO: 41305 - DNA, 15 bp, Homo sapiens
aaagatgtccatgtt

SEQ ID NO: 41306 - DNA, 15 bp, Homo sapiens
taaagatgtccatgt

SEQ ID NO: 41307 - DNA, 15 bp, Homo sapiens
ataaagatgtccatg

SEQ ID NO: 41308 - DNA, 15 bp, Homo sapiens
aataaagatgtccat

SEQ ID NO: 41309 - DNA, 15 bp, Homo sapiens
taataaagatgtcca

SEQ ID NO: 41310 - DNA, 15 bp, Homo sapiens
ttaataaagatgtcc

SEQ ID NO: 41311 - DNA, 15 bp, Homo sapiens
attaataaagatgtc

SEQ ID NO: 41312 - DNA, 15 bp, Homo sapiens
gattaataaagatgt

SEQ ID NO: 41313 - DNA, 15 bp, Homo sapiens
tgattaataaagatg

SEQ ID NO: 41314 - DNA, 15 bp, Homo sapiens
ttgattaataaagat

SEQ ID NO: 41315 - DNA, 15 bp, Homo sapiens
tttgattaataaaga

SEQ ID NO: 41316 - DNA, 15 bp, Homo sapiens
ctttgattaataaag

SEQ ID NO: 41317 - DNA, 15 bp, Homo sapiens
gctttgattaataaa

SEQ ID NO: 41318 - DNA, 15 bp, Homo sapiens
ggctttgattaataa

SEQ ID NO: 41319 - DNA, 15 bp, Homo sapiens
gggctttgattaata

SEQ ID NO: 41320 - DNA, 15 bp, Homo sapiens
tgggctttgattaat

SEQ ID NO: 41321 - DNA, 15 bp, Homo sapiens
ttgggctttgattaa

SEQ ID NO: 41322 - DNA, 15 bp, Homo sapiens
cttgggctttgatta

SEQ ID NO: 41323 - DNA, 15 bp, Homo sapiens
gcttgggctttgatt

SEQ ID NO: 41324 - DNA, 15 bp, Homo sapiens
agcttgggctttgat

SEQ ID NO: 41325 - DNA, 15 bp, Homo sapiens
aagcttgggctttga

SEQ ID NO: 41326 - DNA, 15 bp, Homo sapiens
aaagcttgggctttg

SEQ ID NO: 41327 - DNA, 15 bp, Homo sapiens
caaagcttgggcttt

SEQ ID NO: 41328 - DNA, 15 bp, Homo sapiens
tcaaagcttgggctt

SEQ ID NO: 41329 - DNA, 15 bp, Homo sapiens
atcaaagcttgggct

SEQ ID NO: 41330 - DNA, 15 bp, Homo sapiens
gatcaaagcttgggc

SEQ ID NO: 41331 - DNA, 15 bp, Homo sapiens
agatcaaagcttggg

SEQ ID NO: 41332 - DNA, 15 bp, Homo sapiens
cagatcaaagcttgg

SEQ ID NO: 41333 - DNA, 15 bp, Homo sapiens
ccagatcaaagcttg

SEQ ID NO: 41334 - DNA, 15 bp, Homo sapiens
tccagatcaaagctt

SEQ ID NO: 41335 - DNA, 15 bp, Homo sapiens
ctccagatcaaagct

SEQ ID NO: 41336 - DNA, 15 bp, Homo sapiens
gctccagatcaaagc

SEQ ID NO: 41337 - DNA, 15 bp, Homo sapiens
ggctccagatcaaag

SEQ ID NO: 41338 - DNA, 15 bp, Homo sapiens
aggctccagatcaaa

SEQ ID NO: 41339 - DNA, 15 bp, Homo sapiens
taggctccagatcaa

SEQ ID NO: 41340 - DNA, 15 bp, Homo sapiens
ttaggctccagatca

SEQ ID NO: 41341 - DNA, 15 bp, Homo sapiens
attaggctccagatc

SEQ ID NO: 41342 - DNA, 15 bp, Homo sapiens
tattaggctccagat

SEQ ID NO: 41343 - DNA, 15 bp, Homo sapiens
atattaggctccaga

SEQ ID NO: 41344 - DNA, 15 bp, Homo sapiens
gatattaggctccag

SEQ ID NO: 41345 - DNA, 15 bp, Homo sapiens
ggatattaggctcca

SEQ ID NO: 41346 - DNA, 15 bp, Homo sapiens
aggatattaggctcc

SEQ ID NO: 41347 - DNA, 15 bp, Homo sapiens
caggatattaggctc

SEQ ID NO: 41348 - DNA, 15 bp, Homo sapiens
gcaggatattaggct

SEQ ID NO: 41349 - DNA, 15 bp, Homo sapiens
tgcaggatattaggc

SEQ ID NO: 41350 - DNA, 15 bp, Homo sapiens
gtgcaggatattagg

SEQ ID NO: 41351 - DNA, 15 bp, Homo sapiens
agtgcaggatattag

SEQ ID NO: 41352 - DNA, 15 bp, Homo sapiens
gagtgcaggatatta

SEQ ID NO: 41353 - DNA, 15 bp, Homo sapiens
ggagtgcaggatatt

SEQ ID NO: 41354 - DNA, 15 bp, Homo sapiens
tggagtgcaggatat

SEQ ID NO: 41355 - DNA, 15 bp, Homo sapiens
ctggagtgcaggata

SEQ ID NO: 41356 - DNA, 15 bp, Homo sapiens
gctggagtgcaggat

SEQ ID NO: 41357 - DNA, 15 bp, Homo sapiens
agctggagtgcagga

SEQ ID NO: 41358 - DNA, 15 bp, Homo sapiens
gagctggagtgcagg

SEQ ID NO: 41359 - DNA, 15 bp, Homo sapiens
agagctggagtgcag

SEQ ID NO: 41360 - DNA, 15 bp, Homo sapiens
gagagctggagtgca

SEQ ID NO: 41361 - DNA, 15 bp, Homo sapiens
tgagagctggagtgc

SEQ ID NO: 41362 - DNA, 15 bp, Homo sapiens
atgagagctggagtg

SEQ ID NO: 41363 - DNA, 15 bp, Homo sapiens
gatgagagctggagt

SEQ ID NO: 41364 - DNA, 15 bp, Homo sapiens
agatgagagctggag

SEQ ID NO: 41365 - DNA, 15 bp, Homo sapiens
gagatgagagctgga

SEQ ID NO: 41366 - DNA, 15 bp, Homo sapiens
agagatgagagctgg

SEQ ID NO: 41367 - DNA, 15 bp, Homo sapiens
gagagatgagagctg

SEQ ID NO: 41368 - DNA, 15 bp, Homo sapiens
ggagagatgagagct

SEQ ID NO: 41369 - DNA, 15 bp, Homo sapiens
gggagagatgagagc

SEQ ID NO: 41370 - DNA, 15 bp, Homo sapiens
ggggagagatgagag

SEQ ID NO: 41371 - DNA, 15 bp, Homo sapiens
aggggagagatgaga

SEQ ID NO: 41372 - DNA, 15 bp, Homo sapiens
gaggggagagatgag

SEQ ID NO: 41373 - DNA, 15 bp, Homo sapiens
ggaggggagagatga

SEQ ID NO: 41374 - DNA, 15 bp, Homo sapiens
gggaggggagagatg

SEQ ID NO: 41375 - DNA, 15 bp, Homo sapiens
ggggaggggagagat

SEQ ID NO: 41376 - DNA, 15 bp, Homo sapiens
gggggaggggagaga

SEQ ID NO: 41377 - DNA, 15 bp, Homo sapiens
tgggggaggggagag

SEQ ID NO: 41378 - DNA, 15 bp, Homo sapiens
ctgggggaggggaga

SEQ ID NO: 41379 - DNA, 15 bp, Homo sapiens
actgggggaggggag

SEQ ID NO: 41380 - DNA, 15 bp, Homo sapiens
gactgggggagggga

SEQ ID NO: 41381 - DNA, 15 bp, Homo sapiens
tgactgggggagggg

SEQ ID NO: 41382 - DNA, 15 bp, Homo sapiens
gtgactgggggaggg

SEQ ID NO: 41383 - DNA, 15 bp, Homo sapiens
tgtgactgggggagg

SEQ ID NO: 41384 - DNA, 15 bp, Homo sapiens
gtgtgactgggggag

SEQ ID NO: 41385 - DNA, 15 bp, Homo sapiens
agtgtgactggggga

SEQ ID NO: 41386 - DNA, 15 bp, Homo sapiens
aagtgtgactggggg

SEQ ID NO: 41387 - DNA, 15 bp, Homo sapiens
aaagtgtgactgggg

SEQ ID NO: 41388 - DNA, 15 bp, Homo sapiens
gaaagtgtgactggg

SEQ ID NO: 41389 - DNA, 15 bp, Homo sapiens
tgaaagtgtgactgg

SEQ ID NO: 41390 - DNA, 15 bp, Homo sapiens
atgaaagtgtgactg

SEQ ID NO: 41391 - DNA, 15 bp, Homo sapiens
catgaaagtgtgact

SEQ ID NO: 41392 - DNA, 15 bp, Homo sapiens
gcatgaaagtgtgac

SEQ ID NO: 41393 - DNA, 15 bp, Homo sapiens
agcatgaaagtgtga

SEQ ID NO: 41394 - DNA, 15 bp, Homo sapiens
aagcatgaaagtgtg

SEQ ID NO: 41395 - DNA, 15 bp, Homo sapiens
gaagcatgaaagtgt

SEQ ID NO: 41396 - DNA, 15 bp, Homo sapiens
ggaagcatgaaagtg

SEQ ID NO: 41397 - DNA, 15 bp, Homo sapiens
gggaagcatgaaagt

SEQ ID NO: 41398 - DNA, 15 bp, Homo sapiens
tgggaagcatgaaag

SEQ ID NO: 41399 - DNA, 15 bp, Homo sapiens
ctgggaagcatgaaa

SEQ ID NO: 41400 - DNA, 15 bp, Homo sapiens
tctgggaagcatgaa

SEQ ID NO: 41401 - DNA, 15 bp, Homo sapiens
ctctgggaagcatga

SEQ ID NO: 41402 - DNA, 15 bp, Homo sapiens
gctctgggaagcatg

SEQ ID NO: 41403 - DNA, 15 bp, Homo sapiens
ggctctgggaagcat

SEQ ID NO: 41404 - DNA, 15 bp, Homo sapiens
tggctctgggaagca

SEQ ID NO: 41405 - DNA, 15 bp, Homo sapiens
gtggctctgggaagc

SEQ ID NO: 41406 - DNA, 15 bp, Homo sapiens
ggtggctctgggaag

SEQ ID NO: 41407 - DNA, 15 bp, Homo sapiens
gggtggctctgggaa

SEQ ID NO: 41408 - DNA, 15 bp, Homo sapiens
ggggtggctctggga

SEQ ID NO: 41409 - DNA, 15 bp, Homo sapiens
aggggtggctctggg

SEQ ID NO: 41410 - DNA, 15 bp, Homo sapiens
taggggtggctctgg

SEQ ID NO: 41411 - DNA, 15 bp, Homo sapiens
gtaggggtggctctg

SEQ ID NO: 41412 - DNA, 15 bp, Homo sapiens
tgtaggggtggctct

SEQ ID NO: 41413 - DNA, 15 bp, Homo sapiens
ctgtaggggtggctc

SEQ ID NO: 41414 - DNA, 15 bp, Homo sapiens
cctgtaggggtggct

SEQ ID NO: 41415 - DNA, 15 bp, Homo sapiens
tcctgtaggggtggc

SEQ ID NO: 41416 - DNA, 15 bp, Homo sapiens
ttcctgtaggggtgg

SEQ ID NO: 41417 - DNA, 15 bp, Homo sapiens
cttcctgtaggggtg

SEQ ID NO: 41418 - DNA, 15 bp, Homo sapiens
acttcctgtaggggt

SEQ ID NO: 41419 - DNA, 15 bp, Homo sapiens
cacttcctgtagggg

SEQ ID NO: 41420 - DNA, 15 bp, Homo sapiens
ccacttcctgtaggg

SEQ ID NO: 41421 - DNA, 15 bp, Homo sapiens
accacttcctgtagg

SEQ ID NO: 41422 - DNA, 15 bp, Homo sapiens
gaccacttcctgtag

SEQ ID NO: 41423 - DNA, 15 bp, Homo sapiens
tgaccacttcctgta

SEQ ID NO: 41424 - DNA, 15 bp, Homo sapiens
ttgaccacttcctgt

SEQ ID NO: 41425 - DNA, 15 bp, Homo sapiens
cttgaccacttcctg

SEQ ID NO: 41426 - DNA, 15 bp, Homo sapiens
ccttgaccacttcct

SEQ ID NO: 41427 - DNA, 15 bp, Homo sapiens
cccttgaccacttcc

SEQ ID NO: 41428 - DNA, 15 bp, Homo sapiens
tcccttgaccacttc

SEQ ID NO: 41429 - DNA, 15 bp, Homo sapiens
ttcccttgaccactt

SEQ ID NO: 41430 - DNA, 15 bp, Homo sapiens
attcccttgaccact

SEQ ID NO: 41431 - DNA, 15 bp, Homo sapiens
aattcccttgaccac

SEQ ID NO: 41432 - DNA, 15 bp, Homo sapiens
gaattcccttgacca

SEQ ID NO: 41433 - DNA, 15 bp, Homo sapiens
agaattcccttgacc

SEQ ID NO: 41434 - DNA, 15 bp, Homo sapiens
tagaattcccttgac

SEQ ID NO: 41435 - DNA, 15 bp, Homo sapiens
atagaattcccttga

SEQ ID NO: 41436 - DNA, 15 bp, Homo sapiens
tatagaattcccttg

SEQ ID NO: 41437 - DNA, 15 bp, Homo sapiens
gtatagaattccctt

SEQ ID NO: 41438 - DNA, 15 bp, Homo sapiens
ggtatagaattccct

SEQ ID NO: 41439 - DNA, 15 bp, Homo sapiens
aggtatagaattccc

SEQ ID NO: 41440 - DNA, 15 bp, Homo sapiens
gaggtatagaattcc

SEQ ID NO: 41441 - DNA, 15 bp, Homo sapiens
tgaggtatagaattc

SEQ ID NO: 41442 - DNA, 15 bp, Homo sapiens
ctgaggtatagaatt

SEQ ID NO: 41443 - DNA, 15 bp, Homo sapiens
cctgaggtatagaat

SEQ ID NO: 41444 - DNA, 15 bp, Homo sapiens
ccctgaggtatagaa

SEQ ID NO: 41445 - DNA, 15 bp, Homo sapiens
gccctgaggtataga

SEQ ID NO: 41446 - DNA, 15 bp, Homo sapiens
agccctgaggtatag

SEQ ID NO: 41447 - DNA, 15 bp, Homo sapiens
cagccctgaggtata

SEQ ID NO: 41448 - DNA, 15 bp, Homo sapiens
tcagccctgaggtat

SEQ ID NO: 41449 - DNA, 15 bp, Homo sapiens
gtcagccctgaggta

SEQ ID NO: 41450 - DNA, 15 bp, Homo sapiens
ggtcagccctgaggt

SEQ ID NO: 41451 - DNA, 15 bp, Homo sapiens
aggtcagccctgagg

SEQ ID NO: 41452 - DNA, 15 bp, Homo sapiens
taggtcagccctgag

SEQ ID NO: 41453 - DNA, 15 bp, Homo sapiens
ttaggtcagccctga

SEQ ID NO: 41454 - DNA, 15 bp, Homo sapiens
tttaggtcagccctg

SEQ ID NO: 41455 - DNA, 15 bp, Homo sapiens
atttaggtcagccct

SEQ ID NO: 41456 - DNA, 15 bp, Homo sapiens
aatttaggtcagccc

SEQ ID NO: 41457 - DNA, 15 bp, Homo sapiens
taatttaggtcagcc

SEQ ID NO: 41458 - DNA, 15 bp, Homo sapiens
ctaatttaggtcagc

SEQ ID NO: 41459 - DNA, 15 bp, Homo sapiens
cctaatttaggtcag

SEQ ID NO: 41460 - DNA, 15 bp, Homo sapiens
tcctaatttaggtca

SEQ ID NO: 41461 - DNA, 15 bp, Homo sapiens
atcctaatttaggtc

SEQ ID NO: 41462 - DNA, 15 bp, Homo sapiens
aatcctaatttaggt

SEQ ID NO: 41463 - DNA, 15 bp, Homo sapiens
aaatcctaatttagg

SEQ ID NO: 41464 - DNA, 15 bp, Homo sapiens
gaaatcctaatttag

SEQ ID NO: 41465 - DNA, 15 bp, Homo sapiens
agaaatcctaattta

SEQ ID NO: 41466 - DNA, 15 bp, Homo sapiens
aagaaatcctaattt

SEQ ID NO: 41467 - DNA, 15 bp, Homo sapiens
caagaaatcctaatt

SEQ ID NO: 41468 - DNA, 15 bp, Homo sapiens
ccaagaaatcctaat

SEQ ID NO: 41469 - DNA, 15 bp, Homo sapiens
gccaagaaatcctaa

SEQ ID NO: 41470 - DNA, 15 bp, Homo sapiens
agccaagaaatccta

SEQ ID NO: 41471 - DNA, 15 bp, Homo sapiens
aagccaagaaatcct

SEQ ID NO: 41472 - DNA, 15 bp, Homo sapiens
aaagccaagaaatcc

SEQ ID NO: 41473 - DNA, 15 bp, Homo sapiens
aaaagccaagaaatc

SEQ ID NO: 41474 - DNA, 15 bp, Homo sapiens
taaaagccaagaaat

SEQ ID NO: 41475 - DNA, 15 bp, Homo sapiens
ttaaaagccaagaaa

SEQ ID NO: 41476 - DNA, 15 bp, Homo sapiens
cttaaaagccaagaa

SEQ ID NO: 41477 - DNA, 15 bp, Homo sapiens
tcttaaaagccaaga

SEQ ID NO: 41478 - DNA, 15 bp, Homo sapiens
atcttaaaagccaag

SEQ ID NO: 41479 - DNA, 15 bp, Homo sapiens
tatcttaaaagccaa

SEQ ID NO: 41480 - DNA, 15 bp, Homo sapiens
ttatcttaaaagcca

SEQ ID NO: 41481 - DNA, 15 bp, Homo sapiens
attatcttaaaagcc

SEQ ID NO: 41482 - DNA, 15 bp, Homo sapiens
cattatcttaaaagc

SEQ ID NO: 41483 - DNA, 15 bp, Homo sapiens
ccattatcttaaaag

SEQ ID NO: 41484 - DNA, 15 bp, Homo sapiens
accattatcttaaaa

SEQ ID NO: 41485 - DNA, 15 bp, Homo sapiens
taccattatcttaaa

SEQ ID NO: 41486 - DNA, 15 bp, Homo sapiens
ttaccattatcttaa

SEQ ID NO: 41487 - DNA, 15 bp, Homo sapiens
cccggccagttcttt

SEQ ID NO: 41488 - DNA, 15 bp, Homo sapiens
gcccggccagttctt

SEQ ID NO: 41489 - DNA, 15 bp, Homo sapiens
cgcccggccagttct

SEQ ID NO: 41490 - DNA, 15 bp, Homo sapiens
gcgcccggccagttc

SEQ ID NO: 41491 - DNA, 15 bp, Homo sapiens
cgcgcccggccagtt

SEQ ID NO: 41492 - DNA, 15 bp, Homo sapiens
ccgcgcccggccagt

SEQ ID NO: 41493 - DNA, 15 bp, Homo sapiens
accgcgcccggccag

SEQ ID NO: 41494 - DNA, 15 bp, Homo sapiens
caccgcgcccggcca

SEQ ID NO: 41495 - DNA, 15 bp, Homo sapiens
ccaccgcgcccggcc

SEQ ID NO: 41496 - DNA, 15 bp, Homo sapiens
gccaccgcgcccggc

SEQ ID NO: 41497 - DNA, 15 bp, Homo sapiens
agccaccgcgcccgg

SEQ ID NO: 41498 - DNA, 15 bp, Homo sapiens
gagccaccgcgcccg

SEQ ID NO: 41499 - DNA, 15 bp, Homo sapiens
tgagccaccgcgccc

SEQ ID NO: 41500 - DNA, 15 bp, Homo sapiens
gtgagccaccgcgcc

SEQ ID NO: 41501 - DNA, 15 bp, Homo sapiens
cgtgagccaccgcgc

SEQ ID NO: 41502 - DNA, 15 bp, Homo sapiens
gcgtgagccaccgcg

SEQ ID NO: 41503 - DNA, 15 bp, Homo sapiens
ggcgtgagccaccgc

SEQ ID NO: 41504 - DNA, 15 bp, Homo sapiens
aggcgtgagccaccg

SEQ ID NO: 41505 - DNA, 15 bp, Homo sapiens
caggcgtgagccacc

SEQ ID NO: 41506 - DNA, 15 bp, Homo sapiens
acaggcgtgagccac

SEQ ID NO: 41507 - DNA, 15 bp, Homo sapiens
tacaggcgtgagcca

SEQ ID NO: 41508 - DNA, 15 bp, Homo sapiens
ttacaggcgtgagcc

SEQ ID NO: 41509 - DNA, 15 bp, Homo sapiens
attacaggcgtgagc

SEQ ID NO: 41510 - DNA, 15 bp, Homo sapiens
gattacaggcgtgag

SEQ ID NO: 41511 - DNA, 15 bp, Homo sapiens
agattacaggcgtga

SEQ ID NO: 41512 - DNA, 15 bp, Homo sapiens
gagattacaggcgtg

SEQ ID NO: 41513 - DNA, 15 bp, Homo sapiens
tgagattacaggcgt

SEQ ID NO: 41514 - DNA, 15 bp, Homo sapiens
ctgagattacaggcg

SEQ ID NO: 41515 - DNA, 15 bp, Homo sapiens
gctgagattacaggc

SEQ ID NO: 41516 - DNA, 15 bp, Homo sapiens
tgctgagattacagg

SEQ ID NO: 41517 - DNA, 15 bp, Homo sapiens
gtgctgagattacag

SEQ ID NO: 41518 - DNA, 15 bp, Homo sapiens
agtgctgagattaca

SEQ ID NO: 41519 - DNA, 15 bp, Homo sapiens
aagtgctgagattac

SEQ ID NO: 41520 - DNA, 15 bp, Homo sapiens
aaagtgctgagatta

SEQ ID NO: 41521 - DNA, 15 bp, Homo sapiens
caaagtgctgagatt

SEQ ID NO: 41522 - DNA, 15 bp, Homo sapiens
ccaaagtgctgagat

SEQ ID NO: 41523 - DNA, 15 bp, Homo sapiens
cccaaagtgctgaga

SEQ ID NO: 41524 - DNA, 15 bp, Homo sapiens
tcccaaagtgctgag

SEQ ID NO: 41525 - DNA, 15 bp, Homo sapiens
ctcccaaagtgctga

SEQ ID NO: 41526 - DNA, 15 bp, Homo sapiens
cctcccaaagtgctg

SEQ ID NO: 41527 - DNA, 15 bp, Homo sapiens
gcctcccaaagtgct

SEQ ID NO: 41528 - DNA, 15 bp, Homo sapiens
ggcctcccaaagtgc

SEQ ID NO: 41529 - DNA, 15 bp, Homo sapiens
cggcctcccaaagtg

SEQ ID NO: 41530 - DNA, 15 bp, Homo sapiens
tcggcctcccaaagt

SEQ ID NO: 41531 - DNA, 15 bp, Homo sapiens
ctcggcctcccaaag

SEQ ID NO: 41532 - DNA, 15 bp, Homo sapiens
cctcggcctcccaaa

SEQ ID NO: 41533 - DNA, 15 bp, Homo sapiens
gcctcggcctcccaa

SEQ ID NO: 41534 - DNA, 15 bp, Homo sapiens
cgcctcggcctccca

SEQ ID NO: 41535 - DNA, 15 bp, Homo sapiens
ccgcctcggcctccc

SEQ ID NO: 41536 - DNA, 15 bp, Homo sapiens
cccgcctcggcctcc

SEQ ID NO: 41537 - DNA, 15 bp, Homo sapiens
acccgcctcggcctc

SEQ ID NO: 41538 - DNA, 15 bp, Homo sapiens
cacccgcctcggcct

SEQ ID NO: 41539 - DNA, 15 bp, Homo sapiens
ccacccgcctcggcc

SEQ ID NO: 41540 - DNA, 15 bp, Homo sapiens
tccacccgcctcggc

SEQ ID NO: 41541 - DNA, 15 bp, Homo sapiens
atccacccgcctcgg

SEQ ID NO: 41542 - DNA, 15 bp, Homo sapiens
gatccacccgcctcg

SEQ ID NO: 41543 - DNA, 15 bp, Homo sapiens
tgatccacccgcctc

SEQ ID NO: 41544 - DNA, 15 bp, Homo sapiens
atgatccacccgcct

SEQ ID NO: 41545 - DNA, 15 bp, Homo sapiens
catgatccacccgcc

SEQ ID NO: 41546 - DNA, 15 bp, Homo sapiens
tcatgatccacccgc

SEQ ID NO: 41547 - DNA, 15 bp, Homo sapiens
ctcatgatccacccg

SEQ ID NO: 41548 - DNA, 15 bp, Homo sapiens
cctcatgatccaccc

SEQ ID NO: 41549 - DNA, 15 bp, Homo sapiens
acctcatgatccacc

SEQ ID NO: 41550 - DNA, 15 bp, Homo sapiens
gacctcatgatccac

SEQ ID NO: 41551 - DNA, 15 bp, Homo sapiens
tgacctcatgatcca

SEQ ID NO: 41552 - DNA, 15 bp, Homo sapiens
ttgacctcatgatcc

SEQ ID NO: 41553 - DNA, 15 bp, Homo sapiens
cttgacctcatgatc

SEQ ID NO: 41554 - DNA, 15 bp, Homo sapiens
tcttgacctcatgat

SEQ ID NO: 41555 - DNA, 15 bp, Homo sapiens
ctcttgacctcatga

SEQ ID NO: 41556 - DNA, 15 bp, Homo sapiens
tctcttgacctcatg

SEQ ID NO: 41557 - DNA, 15 bp, Homo sapiens
atctcttgacctcat

SEQ ID NO: 41558 - DNA, 15 bp, Homo sapiens
gatctcttgacctca

SEQ ID NO: 41559 - DNA, 15 bp, Homo sapiens
cgatctcttgacctc

SEQ ID NO: 41560 - DNA, 15 bp, Homo sapiens
tcgatctcttgacct

SEQ ID NO: 41561 - DNA, 15 bp, Homo sapiens
ctcgatctcttgacc

SEQ ID NO: 41562 - DNA, 15 bp, Homo sapiens
tctcgatctcttgac

SEQ ID NO: 41563 - DNA, 15 bp, Homo sapiens
gtctcgatctcttga

SEQ ID NO: 41564 - DNA, 15 bp, Homo sapiens
ggtctcgatctcttg

SEQ ID NO: 41565 - DNA, 15 bp, Homo sapiens
tggtctcgatctctt

SEQ ID NO: 41566 - DNA, 15 bp, Homo sapiens
atggtctcgatctct

SEQ ID NO: 41567 - DNA, 15 bp, Homo sapiens
gatggtctcgatctc

SEQ ID NO: 41568 - DNA, 15 bp, Homo sapiens
ggatggtctcgatct

SEQ ID NO: 41569 - DNA, 15 bp, Homo sapiens
aggatggtctcgatc

SEQ ID NO: 41570 - DNA, 15 bp, Homo sapiens
caggatggtctcgat

SEQ ID NO: 41571 - DNA, 15 bp, Homo sapiens
ccaggatggtctcga

SEQ ID NO: 41572 - DNA, 15 bp, Homo sapiens
gccaggatggtctcg

SEQ ID NO: 41573 - DNA, 15 bp, Homo sapiens
agccaggatggtctc

SEQ ID NO: 41574 - DNA, 15 bp, Homo sapiens
tagccaggatggtct

SEQ ID NO: 41575 - DNA, 15 bp, Homo sapiens
ttagccaggatggtc

SEQ ID NO: 41576 - DNA, 15 bp, Homo sapiens
gttagccaggatggt

SEQ ID NO: 41577 - DNA, 15 bp, Homo sapiens
tgttagccaggatgg

SEQ ID NO: 41578 - DNA, 15 bp, Homo sapiens
gtgttagccaggatg

SEQ ID NO: 41579 - DNA, 15 bp, Homo sapiens
cgtgttagccaggat

SEQ ID NO: 41580 - DNA, 15 bp, Homo sapiens
ccgtgttagccagga

SEQ ID NO: 41581 - DNA, 15 bp, Homo sapiens
accgtgttagccagg

SEQ ID NO: 41582 - DNA, 15 bp, Homo sapiens
caccgtgttagccag

SEQ ID NO: 41583 - DNA, 15 bp, Homo sapiens
tcaccgtgttagcca

SEQ ID NO: 41584 - DNA, 15 bp, Homo sapiens
ttcaccgtgttagcc

SEQ ID NO: 41585 - DNA, 15 bp, Homo sapiens
tttcaccgtgttagc

SEQ ID NO: 41586 - DNA, 15 bp, Homo sapiens
gtttcaccgtgttag

SEQ ID NO: 41587 - DNA, 15 bp, Homo sapiens
ggtttcaccgtgtta

SEQ ID NO: 41588 - DNA, 15 bp, Homo sapiens
gggtttcaccgtgtt

SEQ ID NO: 41589 - DNA, 15 bp, Homo sapiens
ggggtttcaccgtgt

SEQ ID NO: 41590 - DNA, 15 bp, Homo sapiens
cggggtttcaccgtg

SEQ ID NO: 41591 - DNA, 15 bp, Homo sapiens
acggggtttcaccgt

SEQ ID NO: 41592 - DNA, 15 bp, Homo sapiens
gacggggtttcaccg

SEQ ID NO: 41593 - DNA, 15 bp, Homo sapiens
agacggggtttcacc

SEQ ID NO: 41594 - DNA, 15 bp, Homo sapiens
gagacggggtttcac

SEQ ID NO: 41595 - DNA, 15 bp, Homo sapiens
agagacggggtttca

SEQ ID NO: 41596 - DNA, 15 bp, Homo sapiens
tagagacggggtttc

SEQ ID NO: 41597 - DNA, 15 bp, Homo sapiens
agtagagacggggtt

SEQ ID NO: 41598 - DNA, 15 bp, Homo sapiens
tagtagagacggggt

SEQ ID NO: 41599 - DNA, 15 bp, Homo sapiens
ttagtagagacgggg

SEQ ID NO: 41600 - DNA, 15 bp, Homo sapiens
tttagtagagacggg

SEQ ID NO: 41601 - DNA, 15 bp, Homo sapiens
ttttagtagagacgg

SEQ ID NO: 41602 - DNA, 15 bp, Homo sapiens
tttttagtagagacg

SEQ ID NO: 41603 - DNA, 15 bp, Homo sapiens
atttttagtagagac

SEQ ID NO: 41604 - DNA, 15 bp, Homo sapiens
tatttttagtagaga

SEQ ID NO: 41605 - DNA, 15 bp, Homo sapiens
gtatttttagtagag

SEQ ID NO: 41606 - DNA, 15 bp, Homo sapiens
tgtatttttagtaga

SEQ ID NO: 41607 - DNA, 15 bp, Homo sapiens
ttgtatttttagtag

SEQ ID NO: 41608 - DNA, 15 bp, Homo sapiens
tttgtatttttagta

SEQ ID NO: 41609 - DNA, 15 bp, Homo sapiens
ttttgtatttttagt

SEQ ID NO: 41610 - DNA, 15 bp, Homo sapiens
tttttgtatttttag

SEQ ID NO: 41611 - DNA, 15 bp, Homo sapiens
ttttttgtattttta

SEQ ID NO: 41612 - DNA, 15 bp, Homo sapiens
attttttgtattttt

SEQ ID NO: 41613 - DNA, 15 bp, Homo sapiens
aattttttgtatttt

SEQ ID NO: 41614 - DNA, 15 bp, Homo sapiens
taattttttgtattt

SEQ ID NO: 41615 - DNA, 15 bp, Homo sapiens
ctaattttttgtatt

SEQ ID NO: 41616 - DNA, 15 bp, Homo sapiens
gctaattttttgtat

SEQ ID NO: 41617 - DNA, 15 bp, Homo sapiens
ggctaattttttgta

SEQ ID NO: 41618 - DNA, 15 bp, Homo sapiens
cggctaattttttgt

SEQ ID NO: 41619 - DNA, 15 bp, Homo sapiens
ccggctaattttttg

SEQ ID NO: 41620 - DNA, 15 bp, Homo sapiens
cccggctaatttttt

SEQ ID NO: 41621 - DNA, 15 bp, Homo sapiens
gcccggctaattttt

SEQ ID NO: 41622 - DNA, 15 bp, Homo sapiens
cgcccggctaatttt

SEQ ID NO: 41623 - DNA, 15 bp, Homo sapiens
gcgcccggctaattt

SEQ ID NO: 41624 - DNA, 15 bp, Homo sapiens
cgcgcccggctaatt

SEQ ID NO: 41625 - DNA, 15 bp, Homo sapiens
ccgcgcccggctaat

SEQ ID NO: 41626 - DNA, 15 bp, Homo sapiens
accgcgcccggctaa

SEQ ID NO: 41627 - DNA, 15 bp, Homo sapiens
caccgcgcccggcta

SEQ ID NO: 41628 - DNA, 15 bp, Homo sapiens
ccaccgcgcccggct

SEQ ID NO: 41629 - DNA, 15 bp, Homo sapiens
cgccaccgcgcccgg

SEQ ID NO: 41630 - DNA, 15 bp, Homo sapiens
ccgccaccgcgcccg

SEQ ID NO: 41631 - DNA, 15 bp, Homo sapiens
cccgccaccgcgccc

SEQ ID NO: 41632 - DNA, 15 bp, Homo sapiens
gcccgccaccgcgcc

SEQ ID NO: 41633 - DNA, 15 bp, Homo sapiens
cgcccgccaccgcgc

SEQ ID NO: 41634 - DNA, 15 bp, Homo sapiens
gcgcccgccaccgcg

SEQ ID NO: 41635 - DNA, 15 bp, Homo sapiens
ggcgcccgccaccgc

SEQ ID NO: 41636 - DNA, 15 bp, Homo sapiens
aggcgcccgccaccg

SEQ ID NO: 41637 - DNA, 15 bp, Homo sapiens
caggcgcccgccacc

SEQ ID NO: 41638 - DNA, 15 bp, Homo sapiens
acaggcgcccgccac

SEQ ID NO: 41639 - DNA, 15 bp, Homo sapiens
tacaggcgcccgcca

SEQ ID NO: 41640 - DNA, 15 bp, Homo sapiens
ctacaggcgcccgcc

SEQ ID NO: 41641 - DNA, 15 bp, Homo sapiens
actacaggcgcccgc

SEQ ID NO: 41642 - DNA, 15 bp, Homo sapiens
gactacaggcgcccg

SEQ ID NO: 41643 - DNA, 15 bp, Homo sapiens
ggactacaggcgccc

SEQ ID NO: 41644 - DNA, 15 bp, Homo sapiens
gggactacaggcgcc

SEQ ID NO: 41645 - DNA, 15 bp, Homo sapiens
tgggactacaggcgc

SEQ ID NO: 41646 - DNA, 15 bp, Homo sapiens
ctgggactacaggcg

SEQ ID NO: 41647 - DNA, 15 bp, Homo sapiens
gctgggactacaggc

SEQ ID NO: 41648 - DNA, 15 bp, Homo sapiens
agctgggactacagg

SEQ ID NO: 41649 - DNA, 15 bp, Homo sapiens
tagctgggactacag

SEQ ID NO: 41650 - DNA, 15 bp, Homo sapiens
gtagctgggactaca

SEQ ID NO: 41651 - DNA, 15 bp, Homo sapiens
agtagctgggactac

SEQ ID NO: 41652 - DNA, 15 bp, Homo sapiens
gagtagctgggacta

SEQ ID NO: 41653 - DNA, 15 bp, Homo sapiens
cgagtagctgggact

SEQ ID NO: 41654 - DNA, 15 bp, Homo sapiens
ccgagtagctgggac

SEQ ID NO: 41655 - DNA, 15 bp, Homo sapiens
cccgagtagctggga

SEQ ID NO: 41656 - DNA, 15 bp, Homo sapiens
tcccgagtagctggg

SEQ ID NO: 41657 - DNA, 15 bp, Homo sapiens
ctcccgagtagctgg

SEQ ID NO: 41658 - DNA, 15 bp, Homo sapiens
cctcccgagtagctg

SEQ ID NO: 41659 - DNA, 15 bp, Homo sapiens
gcctcccgagtagct

SEQ ID NO: 41660 - DNA, 15 bp, Homo sapiens
agcctcccgagtagc

SEQ ID NO: 41661 - DNA, 15 bp, Homo sapiens
cagcctcccgagtag

SEQ ID NO: 41662 - DNA, 15 bp, Homo sapiens
tcagcctcccgagta

SEQ ID NO: 41663 - DNA, 15 bp, Homo sapiens
ctcagcctcccgagt

SEQ ID NO: 41664 - DNA, 15 bp, Homo sapiens
cctcagcctcccgag

SEQ ID NO: 41665 - DNA, 15 bp, Homo sapiens
gcctcagcctcccga

SEQ ID NO: 41666 - DNA, 15 bp, Homo sapiens
tgcctcagcctcccg

SEQ ID NO: 41667 - DNA, 15 bp, Homo sapiens
ctgcctcagcctccc

SEQ ID NO: 41668 - DNA, 15 bp, Homo sapiens
cctgcctcagcctcc

SEQ ID NO: 41669 - DNA, 15 bp, Homo sapiens
tcctgcctcagcctc

SEQ ID NO: 41670 - DNA, 15 bp, Homo sapiens
ctcctgcctcagcct

SEQ ID NO: 41671 - DNA, 15 bp, Homo sapiens
tctcctgcctcagcc

SEQ ID NO: 41672 - DNA, 15 bp, Homo sapiens
ttctcctgcctcagc

SEQ ID NO: 41673 - DNA, 15 bp, Homo sapiens
attctcctgcctcag

SEQ ID NO: 41674 - DNA, 15 bp, Homo sapiens
cattctcctgcctca

SEQ ID NO: 41675 - DNA, 15 bp, Homo sapiens
ccattctcctgcctc

SEQ ID NO: 41676 - DNA, 15 bp, Homo sapiens
gccattctcctgcct

SEQ ID NO: 41677 - DNA, 15 bp, Homo sapiens
cgccattctcctgcc

SEQ ID NO: 41678 - DNA, 15 bp, Homo sapiens
acgccattctcctgc

SEQ ID NO: 41679 - DNA, 15 bp, Homo sapiens
cacgccattctcctg

SEQ ID NO: 41680 - DNA, 15 bp, Homo sapiens
tcacgccattctcct

SEQ ID NO: 41681 - DNA, 15 bp, Homo sapiens
ttcacgccattctcc

SEQ ID NO: 41682 - DNA, 15 bp, Homo sapiens
gttcacgccattctc

SEQ ID NO: 41683 - DNA, 15 bp, Homo sapiens
ggttcacgccattct

SEQ ID NO: 41684 - DNA, 15 bp, Homo sapiens
gggttcacgccattc

SEQ ID NO: 41685 - DNA, 15 bp, Homo sapiens
cgggttcacgccatt

SEQ ID NO: 41686 - DNA, 15 bp, Homo sapiens
ccgggttcacgccat

SEQ ID NO: 41687 - DNA, 15 bp, Homo sapiens
cccgggttcacgcca

SEQ ID NO: 41688 - DNA, 15 bp, Homo sapiens
tcccgggttcacgcc

SEQ ID NO: 41689 - DNA, 15 bp, Homo sapiens
ttcccgggttcacgc

SEQ ID NO: 41690 - DNA, 15 bp, Homo sapiens
cttcccgggttcacg

SEQ ID NO: 41691 - DNA, 15 bp, Homo sapiens
gcttcccgggttcac

SEQ ID NO: 41692 - DNA, 15 bp, Homo sapiens
cgcttcccgggttca

SEQ ID NO: 41693 - DNA, 15 bp, Homo sapiens
ccgcttcccgggttc

SEQ ID NO: 41694 - DNA, 15 bp, Homo sapiens
tccgcttcccgggtt

SEQ ID NO: 41695 - DNA, 15 bp, Homo sapiens
ctccgcttcccgggt

SEQ ID NO: 41696 - DNA, 15 bp, Homo sapiens
gctccgcttcccggg

SEQ ID NO: 41697 - DNA, 15 bp, Homo sapiens
agctccgcttcccgg

SEQ ID NO: 41698 - DNA, 15 bp, Homo sapiens
aagctccgcttcccg

SEQ ID NO: 41699 - DNA, 15 bp, Homo sapiens
caagctccgcttccc

SEQ ID NO: 41700 - DNA, 15 bp, Homo sapiens
gcaagctccgcttcc

SEQ ID NO: 41701 - DNA, 15 bp, Homo sapiens
tgcaagctccgcttc

SEQ ID NO: 41702 - DNA, 15 bp, Homo sapiens
ctgcaagctccgctt

SEQ ID NO: 41703 - DNA, 15 bp, Homo sapiens
actgcaagctccgct

SEQ ID NO: 41704 - DNA, 15 bp, Homo sapiens
cactgcaagctccgc

SEQ ID NO: 41705 - DNA, 15 bp, Homo sapiens
tcactgcaagctccg

SEQ ID NO: 41706 - DNA, 15 bp, Homo sapiens
ctcactgcaagctcc

SEQ ID NO: 41707 - DNA, 15 bp, Homo sapiens
gctcactgcaagctc

SEQ ID NO: 41708 - DNA, 15 bp, Homo sapiens
ggctcactgcaagct

SEQ ID NO: 41709 - DNA, 15 bp, Homo sapiens
cggctcactgcaagc

SEQ ID NO: 41710 - DNA, 15 bp, Homo sapiens
tcggctcactgcaag

SEQ ID NO: 41711 - DNA, 15 bp, Homo sapiens
ctcggctcactgcaa

SEQ ID NO: 41712 - DNA, 15 bp, Homo sapiens
tctcggctcactgca

SEQ ID NO: 41713 - DNA, 15 bp, Homo sapiens
atctcggctcactgc

SEQ ID NO: 41714 - DNA, 15 bp, Homo sapiens
aatctcggctcactg

SEQ ID NO: 41715 - DNA, 15 bp, Homo sapiens
caatctcggctcact

SEQ ID NO: 41716 - DNA, 15 bp, Homo sapiens
gcaatctcggctcac

SEQ ID NO: 41717 - DNA, 15 bp, Homo sapiens
cgcaatctcggctca

SEQ ID NO: 41718 - DNA, 15 bp, Homo sapiens
gcgcaatctcggctc

SEQ ID NO: 41719 - DNA, 15 bp, Homo sapiens
ggcgcaatctcggct

SEQ ID NO: 41720 - DNA, 15 bp, Homo sapiens
tggcgcaatctcggc

SEQ ID NO: 41721 - DNA, 15 bp, Homo sapiens
gtggcgcaatctcgg

SEQ ID NO: 41722 - DNA, 15 bp, Homo sapiens
agtggcgcaatctcg

SEQ ID NO: 41723 - DNA, 15 bp, Homo sapiens
cagtggcgcaatctc

SEQ ID NO: 41724 - DNA, 15 bp, Homo sapiens
gcagtggcgcaatct

SEQ ID NO: 41725 - DNA, 15 bp, Homo sapiens
tgcagtggcgcaatc

SEQ ID NO: 41726 - DNA, 15 bp, Homo sapiens
ctgcagtggcgcaat

SEQ ID NO: 41727 - DNA, 15 bp, Homo sapiens
actgcagtggcgcaa

SEQ ID NO: 41728 - DNA, 15 bp, Homo sapiens
gactgcagtggcgca

SEQ ID NO: 41729 - DNA, 15 bp, Homo sapiens
ggactgcagtggcgc

SEQ ID NO: 41730 - DNA, 15 bp, Homo sapiens
cggactgcagtggcg

SEQ ID NO: 41731 - DNA, 15 bp, Homo sapiens
gcggactgcagtggc

SEQ ID NO: 41732 - DNA, 15 bp, Homo sapiens
tgcggactgcagtgg

SEQ ID NO: 41733 - DNA, 15 bp, Homo sapiens
ctgcggactgcagtg

SEQ ID NO: 41734 - DNA, 15 bp, Homo sapiens
actgcggactgcagt

SEQ ID NO: 41735 - DNA, 15 bp, Homo sapiens
gactgcggactgcag

SEQ ID NO: 41736 - DNA, 15 bp, Homo sapiens
ggactgcggactgca

SEQ ID NO: 41737 - DNA, 15 bp, Homo sapiens
cggactgcggactgc

SEQ ID NO: 41738 - DNA, 15 bp, Homo sapiens
ccggactgcggactg

SEQ ID NO: 41739 - DNA, 15 bp, Homo sapiens
gccggactgcggact

SEQ ID NO: 41740 - DNA, 15 bp, Homo sapiens
ggccggactgcggac

SEQ ID NO: 41741 - DNA, 15 bp, Homo sapiens
aggccggactgcgga

SEQ ID NO: 41742 - DNA, 15 bp, Homo sapiens
caggccggactgcgg

SEQ ID NO: 41743 - DNA, 15 bp, Homo sapiens
ccaggccggactgcg

SEQ ID NO: 41744 - DNA, 15 bp, Homo sapiens
cccaggccggactgc

SEQ ID NO: 41745 - DNA, 15 bp, Homo sapiens
gcccaggccggactg

SEQ ID NO: 41746 - DNA, 15 bp, Homo sapiens
cgcccaggccggact

SEQ ID NO: 41747 - DNA, 15 bp, Homo sapiens
tcgcccaggccggac

SEQ ID NO: 41748 - DNA, 15 bp, Homo sapiens
gtcgcccaggccgga

SEQ ID NO: 41749 - DNA, 15 bp, Homo sapiens
tgtcgcccaggccgg

SEQ ID NO: 41750 - DNA, 15 bp, Homo sapiens
ctgtcgcccaggccg

SEQ ID NO: 41751 - DNA, 15 bp, Homo sapiens
tctgtcgcccaggcc

SEQ ID NO: 41752 - DNA, 15 bp, Homo sapiens
ctctgtcgcccaggc

SEQ ID NO: 41753 - DNA, 15 bp, Homo sapiens
gctctgtcgcccagg

SEQ ID NO: 41754 - DNA, 15 bp, Homo sapiens
cgctctgtcgcccag

SEQ ID NO: 41755 - DNA, 15 bp, Homo sapiens
tcgctctgtcgccca

SEQ ID NO: 41756 - DNA, 15 bp, Homo sapiens
ctcgctctgtcgccc

SEQ ID NO: 41757 - DNA, 15 bp, Homo sapiens
tctcgctctgtcgcc

SEQ ID NO: 41758 - DNA, 15 bp, Homo sapiens
gtctcgctctgtcgc

SEQ ID NO: 41759 - DNA, 15 bp, Homo sapiens
agtctcgctctgtcg

SEQ ID NO: 41760 - DNA, 15 bp, Homo sapiens
gagtctcgctctgtc

SEQ ID NO: 41761 - DNA, 15 bp, Homo sapiens
ggagtctcgctctgt

SEQ ID NO: 41762 - DNA, 15 bp, Homo sapiens
aggagtctcgctctg

SEQ ID NO: 41763 - DNA, 15 bp, Homo sapiens
gaggagtctcgctct

SEQ ID NO: 41764 - DNA, 15 bp, Homo sapiens
agaggagtctcgctc

SEQ ID NO: 41765 - DNA, 15 bp, Homo sapiens
gagaggagtctcgct

SEQ ID NO: 41766 - DNA, 15 bp, Homo sapiens
tgagaggagtctcgc

SEQ ID NO: 41767 - DNA, 15 bp, Homo sapiens
ttgagaggagtctcg

SEQ ID NO: 41768 - DNA, 15 bp, Homo sapiens
tttgagaggagtctc

SEQ ID NO: 41769 - DNA, 15 bp, Homo sapiens
ttttgagaggagtct

SEQ ID NO: 41770 - DNA, 15 bp, Homo sapiens
tttttgagaggagtc

SEQ ID NO: 41771 - DNA, 15 bp, Homo sapiens
ttttttgagaggagt

SEQ ID NO: 41772 - DNA, 15 bp, Homo sapiens
tttttttgagaggag

SEQ ID NO: 41773 - DNA, 15 bp, Homo sapiens
ttttttttgagagga

SEQ ID NO: 41774 - DNA, 15 bp, Homo sapiens
tttttttttgagagg

SEQ ID NO: 41775 - DNA, 15 bp, Homo sapiens
ttttttttttgagag

SEQ ID NO: 41776 - DNA, 15 bp, Homo sapiens
tcttttttttttttt

SEQ ID NO: 41777 - DNA, 15 bp, Homo sapiens
ctctttttttttttt

SEQ ID NO: 41778 - DNA, 15 bp, Homo sapiens
cctcttttttttttt

SEQ ID NO: 41779 - DNA, 15 bp, Homo sapiens
tcctctttttttttt

SEQ ID NO: 41780 - DNA, 15 bp, Homo sapiens
ttcctcttttttttt

SEQ ID NO: 41781 - DNA, 15 bp, Homo sapiens
tttcctctttttttt

SEQ ID NO: 41782 - DNA, 15 bp, Homo sapiens
ctttcctcttttttt

SEQ ID NO: 41783 - DNA, 15 bp, Homo sapiens
tctttcctctttttt

SEQ ID NO: 41784 - DNA, 15 bp, Homo sapiens
ttctttcctcttttt

SEQ ID NO: 41785 - DNA, 15 bp, Homo sapiens
gttctttcctctttt

SEQ ID NO: 41786 - DNA, 15 bp, Homo sapiens
agttctttcctcttt

SEQ ID NO: 41787 - DNA, 15 bp, Homo sapiens
acagttctttcctct

SEQ ID NO: 41788 - DNA, 15 bp, Homo sapiens
tacagttctttcctc

SEQ ID NO: 41789 - DNA, 15 bp, Homo sapiens
gtacagttctttcct

SEQ ID NO: 41790 - DNA, 15 bp, Homo sapiens
tgtacagttctttcc

SEQ ID NO: 41791 - DNA, 15 bp, Homo sapiens
atgtacagttctttc

SEQ ID NO: 41792 - DNA, 15 bp, Homo sapiens
aatgtacagttcttt

SEQ ID NO: 41793 - DNA, 15 bp, Homo sapiens
aaatgtacagttctt

SEQ ID NO: 41794 - DNA, 15 bp, Homo sapiens
taaatgtacagttct

SEQ ID NO: 41795 - DNA, 15 bp, Homo sapiens
ctaaatgtacagttc

SEQ ID NO: 41796 - DNA, 15 bp, Homo sapiens
tctaaatgtacagtt

SEQ ID NO: 41797 - DNA, 15 bp, Homo sapiens
ctctaaatgtacagt

SEQ ID NO: 41798 - DNA, 15 bp, Homo sapiens
tctctaaatgtacag

SEQ ID NO: 41799 - DNA, 15 bp, Homo sapiens
gtctctaaatgtaca

SEQ ID NO: 41800 - DNA, 15 bp, Homo sapiens
tgtctctaaatgtac

SEQ ID NO: 41801 - DNA, 15 bp, Homo sapiens
ttgtctctaaatgta

SEQ ID NO: 41802 - DNA, 15 bp, Homo sapiens
tttgtctctaaatgt

SEQ ID NO: 41803 - DNA, 15 bp, Homo sapiens
ctttgtctctaaatg

SEQ ID NO: 41804 - DNA, 15 bp, Homo sapiens
tctttgtctctaaat

SEQ ID NO: 41805 - DNA, 15 bp, Homo sapiens
ttctttgtctctaaa

SEQ ID NO: 41806 - DNA, 15 bp, Homo sapiens
attctttgtctctaa

SEQ ID NO: 41807 - DNA, 15 bp, Homo sapiens
gattctttgtctcta

SEQ ID NO: 41808 - DNA, 15 bp, Homo sapiens
cgattctttgtctct

SEQ ID NO: 41809 - DNA, 15 bp, Homo sapiens
gcgattctttgtctc

SEQ ID NO: 41810 - DNA, 15 bp, Homo sapiens
agcgattctttgtct

SEQ ID NO: 41811 - DNA, 15 bp, Homo sapiens
cagcgattctttgtc

SEQ ID NO: 41812 - DNA, 15 bp, Homo sapiens
acagcgattctttgt

SEQ ID NO: 41813 - DNA, 15 bp, Homo sapiens
cacagcgattctttg

SEQ ID NO: 41814 - DNA, 15 bp, Homo sapiens
ccacagcgattcttt

SEQ ID NO: 41815 - DNA, 15 bp, Homo sapiens
gccacagcgattctt

SEQ ID NO: 41816 - DNA, 15 bp, Homo sapiens
tgccacagcgattct

SEQ ID NO: 41817 - DNA, 15 bp, Homo sapiens
ctgccacagcgattc

SEQ ID NO: 41818 - DNA, 15 bp, Homo sapiens
actgccacagcgatt

SEQ ID NO: 41819 - DNA, 15 bp, Homo sapiens
aactgccacagcgat

SEQ ID NO: 41820 - DNA, 15 bp, Homo sapiens
taactgccacagcga

SEQ ID NO: 41821 - DNA, 15 bp, Homo sapiens
ttaactgccacagcg

SEQ ID NO: 41822 - DNA, 15 bp, Homo sapiens
gttaactgccacagc

SEQ ID NO: 41823 - DNA, 15 bp, Homo sapiens
agttaactgccacag

SEQ ID NO: 41824 - DNA, 15 bp, Homo sapiens
aagttaactgccaca

SEQ ID NO: 41825 - DNA, 15 bp, Homo sapiens
aaagttaactgccac

SEQ ID NO: 41826 - DNA, 15 bp, Homo sapiens
caaagttaactgcca

SEQ ID NO: 41827 - DNA, 15 bp, Homo sapiens
ccaaagttaactgcc

SEQ ID NO: 41828 - DNA, 15 bp, Homo sapiens
accaaagttaactgc

SEQ ID NO: 41829 - DNA, 15 bp, Homo sapiens
caccaaagttaactg

SEQ ID NO: 41830 - DNA, 15 bp, Homo sapiens
acaccaaagttaact

SEQ ID NO: 41831 - DNA, 15 bp, Homo sapiens
aacaccaaagttaac

SEQ ID NO: 41832 - DNA, 15 bp, Homo sapiens
taacaccaaagttaa

SEQ ID NO: 41833 - DNA, 15 bp, Homo sapiens
gtaacaccaaagtta

SEQ ID NO: 41834 - DNA, 15 bp, Homo sapiens
tgtaacaccaaagtt

SEQ ID NO: 41835 - DNA, 15 bp, Homo sapiens
atgtaacaccaaagt

SEQ ID NO: 41836 - DNA, 15 bp, Homo sapiens
aatgtaacaccaaag

SEQ ID NO: 41837 - DNA, 15 bp, Homo sapiens
gaatgtaacaccaaa

SEQ ID NO: 41838 - DNA, 15 bp, Homo sapiens
agaatgtaacaccaa

SEQ ID NO: 41839 - DNA, 15 bp, Homo sapiens
cagaatgtaacacca

SEQ ID NO: 41840 - DNA, 15 bp, Homo sapiens
acagaatgtaacacc

SEQ ID NO: 41841 - DNA, 15 bp, Homo sapiens
aacagaatgtaacac

SEQ ID NO: 41842 - DNA, 15 bp, Homo sapiens
aaacagaatgtaaca

SEQ ID NO: 41843 - DNA, 15 bp, Homo sapiens
aaaacagaatgtaac

SEQ ID NO: 41844 - DNA, 15 bp, Homo sapiens
gaaaacagaatgtaa

SEQ ID NO: 41845 - DNA, 15 bp, Homo sapiens
agaaaacagaatgta

SEQ ID NO: 41846 - DNA, 15 bp, Homo sapiens
aagaaaacagaatgt

SEQ ID NO: 41847 - DNA, 15 bp, Homo sapiens
gaagaaaacagaatg

SEQ ID NO: 41848 - DNA, 15 bp, Homo sapiens
ggaagaaaacagaat

SEQ ID NO: 41849 - DNA, 15 bp, Homo sapiens
aggaagaaaacagaa

SEQ ID NO: 41850 - DNA, 15 bp, Homo sapiens
taggaagaaaacaga

SEQ ID NO: 41851 - DNA, 15 bp, Homo sapiens
ttaggaagaaaacag

SEQ ID NO: 41852 - DNA, 15 bp, Homo sapiens
cttaggaagaaaaca

SEQ ID NO: 41853 - DNA, 15 bp, Homo sapiens
gcttaggaagaaaac

SEQ ID NO: 41854 - DNA, 15 bp, Homo sapiens
tgcttaggaagaaaa

SEQ ID NO: 41855 - DNA, 15 bp, Homo sapiens
ttgcttaggaagaaa

SEQ ID NO: 41856 - DNA, 15 bp, Homo sapiens
attgcttaggaagaa

SEQ ID NO: 41857 - DNA, 15 bp, Homo sapiens
aattgcttaggaaga

SEQ ID NO: 41858 - DNA, 15 bp, Homo sapiens
gaattgcttaggaag

SEQ ID NO: 41859 - DNA, 15 bp, Homo sapiens
agaattgcttaggaa

SEQ ID NO: 41860 - DNA, 15 bp, Homo sapiens
aagaattgcttagga

SEQ ID NO: 41861 - DNA, 15 bp, Homo sapiens
aaagaattgcttagg

SEQ ID NO: 41862 - DNA, 15 bp, Homo sapiens
taaagaattgcttag

SEQ ID NO: 41863 - DNA, 15 bp, Homo sapiens
ctaaagaattgctta

SEQ ID NO: 41864 - DNA, 15 bp, Homo sapiens
actaaagaattgctt

SEQ ID NO: 41865 - DNA, 15 bp, Homo sapiens
gactaaagaattgct

SEQ ID NO: 41866 - DNA, 15 bp, Homo sapiens
ggactaaagaattgc

SEQ ID NO: 41867 - DNA, 15 bp, Homo sapiens
aggactaaagaattg

SEQ ID NO: 41868 - DNA, 15 bp, Homo sapiens
gaggactaaagaatt

SEQ ID NO: 41869 - DNA, 15 bp, Homo sapiens
agaggactaaagaat

SEQ ID NO: 41870 - DNA, 15 bp, Homo sapiens
tagaggactaaagaa

SEQ ID NO: 41871 - DNA, 15 bp, Homo sapiens
gtagaggactaaaga

SEQ ID NO: 41872 - DNA, 15 bp, Homo sapiens
ggtagaggactaaag

SEQ ID NO: 41873 - DNA, 15 bp, Homo sapiens
aggtagaggactaaa

SEQ ID NO: 41874 - DNA, 15 bp, Homo sapiens
gaggtagaggactaa

SEQ ID NO: 41875 - DNA, 15 bp, Homo sapiens
tgaggtagaggacta

SEQ ID NO: 41876 - DNA, 15 bp, Homo sapiens
ttgaggtagaggact

SEQ ID NO: 41877 - DNA, 15 bp, Homo sapiens
gttgaggtagaggac

SEQ ID NO: 41878 - DNA, 15 bp, Homo sapiens
cgttgaggtagagga

SEQ ID NO: 41879 - DNA, 15 bp, Homo sapiens
ccgttgaggtagagg

SEQ ID NO: 41880 - DNA, 15 bp, Homo sapiens
accgttgaggtagag

SEQ ID NO: 41881 - DNA, 15 bp, Homo sapiens
caccgttgaggtaga

SEQ ID NO: 41882 - DNA, 15 bp, Homo sapiens
gcaccgttgaggtag

SEQ ID NO: 41883 - DNA, 15 bp, Homo sapiens
ggcaccgttgaggta

SEQ ID NO: 41884 - DNA, 15 bp, Homo sapiens
aggcaccgttgaggt

SEQ ID NO: 41885 - DNA, 15 bp, Homo sapiens
gaggcaccgttgagg

SEQ ID NO: 41886 - DNA, 15 bp, Homo sapiens
agaggcaccgttgag

SEQ ID NO: 41887 - DNA, 15 bp, Homo sapiens
cagaggcaccgttga

SEQ ID NO: 41888 - DNA, 15 bp, Homo sapiens
tcagaggcaccgttg

SEQ ID NO: 41889 - DNA, 15 bp, Homo sapiens
ttcagaggcaccgtt

SEQ ID NO: 41890 - DNA, 15 bp, Homo sapiens
cttcagaggcaccgt

SEQ ID NO: 41891 - DNA, 15 bp, Homo sapiens
tcttcagaggcaccg

SEQ ID NO: 41892 - DNA, 15 bp, Homo sapiens
ttcttcagaggcacc

SEQ ID NO: 41893 - DNA, 15 bp, Homo sapiens
tttcttcagaggcac

SEQ ID NO: 41894 - DNA, 15 bp, Homo sapiens
ctttcttcagaggca

SEQ ID NO: 41895 - DNA, 15 bp, Homo sapiens
cctttcttcagaggc

SEQ ID NO: 41896 - DNA, 15 bp, Homo sapiens
tcctttcttcagagg

SEQ ID NO: 41897 - DNA, 15 bp, Homo sapiens
gtcctttcttcagag

SEQ ID NO: 41898 - DNA, 15 bp, Homo sapiens
agtcctttcttcaga

SEQ ID NO: 41899 - DNA, 15 bp, Homo sapiens
aagtcctttcttcag

SEQ ID NO: 41900 - DNA, 15 bp, Homo sapiens
taagtcctttcttca

SEQ ID NO: 41901 - DNA, 15 bp, Homo sapiens
gtaagtcctttcttc

SEQ ID NO: 41902 - DNA, 15 bp, Homo sapiens
cgtaagtcctttctt

SEQ ID NO: 41903 - DNA, 15 bp, Homo sapiens
acgtaagtcctttct

SEQ ID NO: 41904 - DNA, 15 bp, Homo sapiens
cacgtaagtcctttc

SEQ ID NO: 41905 - DNA, 15 bp, Homo sapiens
ccacgtaagtccttt

SEQ ID NO: 41906 - DNA, 15 bp, Homo sapiens
gccacgtaagtcctt

SEQ ID NO: 41907 - DNA, 15 bp, Homo sapiens
ggccacgtaagtcct

SEQ ID NO: 41908 - DNA, 15 bp, Homo sapiens
tggccacgtaagtcc

SEQ ID NO: 41909 - DNA, 15 bp, Homo sapiens
ttggccacgtaagtc

SEQ ID NO: 41910 - DNA, 15 bp, Homo sapiens
attggccacgtaagt

SEQ ID NO: 41911 - DNA, 15 bp, Homo sapiens
cattggccacgtaag

SEQ ID NO: 41912 - DNA, 15 bp, Homo sapiens
ccattggccacgtaa

SEQ ID NO: 41913 - DNA, 15 bp, Homo sapiens
cccattggccacgta

SEQ ID NO: 41914 - DNA, 15 bp, Homo sapiens
tcccattggccacgt

SEQ ID NO: 41915 - DNA, 15 bp, Homo sapiens
atcccattggccacg

SEQ ID NO: 41916 - DNA, 15 bp, Homo sapiens
gatcccattggccac

SEQ ID NO: 41917 - DNA, 15 bp, Homo sapiens
tgatcccattggcca

SEQ ID NO: 41918 - DNA, 15 bp, Homo sapiens
gtgatcccattggcc

SEQ ID NO: 41919 - DNA, 15 bp, Homo sapiens
ggtgatcccattggc

SEQ ID NO: 41920 - DNA, 15 bp, Homo sapiens
cggtgatcccattgg

SEQ ID NO: 41921 - DNA, 15 bp, Homo sapiens
acggtgatcccattg

SEQ ID NO: 41922 - DNA, 15 bp, Homo sapiens
cacggtgatcccatt

SEQ ID NO: 41923 - DNA, 15 bp, Homo sapiens
acacggtgatcccat

SEQ ID NO: 41924 - DNA, 15 bp, Homo sapiens
tacacggtgatccca

SEQ ID NO: 41925 - DNA, 15 bp, Homo sapiens
atacacggtgatccc

SEQ ID NO: 41926 - DNA, 15 bp, Homo sapiens
aatacacggtgatcc

SEQ ID NO: 41927 - DNA, 15 bp, Homo sapiens
aaatacacggtgatc

SEQ ID NO: 41928 - DNA, 15 bp, Homo sapiens
taaatacacggtgat

SEQ ID NO: 41929 - DNA, 15 bp, Homo sapiens
ataaatacacggtga

SEQ ID NO: 41930 - DNA, 15 bp, Homo sapiens
aataaatacacggtg

SEQ ID NO: 41931 - DNA, 15 bp, Homo sapiens
aaataaatacacggt

SEQ ID NO: 41932 - DNA, 15 bp, Homo sapiens
gaaataaatacacgg

SEQ ID NO: 41933 - DNA, 15 bp, Homo sapiens
ggaaataaatacacg

SEQ ID NO: 41934 - DNA, 15 bp, Homo sapiens
gggaaataaatacac

SEQ ID NO: 41935 - DNA, 15 bp, Homo sapiens
agggaaataaataca

SEQ ID NO: 41936 - DNA, 15 bp, Homo sapiens
aagggaaataaatac

SEQ ID NO: 41937 - DNA, 15 bp, Homo sapiens
gaagggaaataaata

SEQ ID NO: 41938 - DNA, 15 bp, Homo sapiens
ggaagggaaataaat

SEQ ID NO: 41939 - DNA, 15 bp, Homo sapiens
gggaagggaaataaa

SEQ ID NO: 41940 - DNA, 15 bp, Homo sapiens
agggaagggaaataa

SEQ ID NO: 41941 - DNA, 15 bp, Homo sapiens
tagggaagggaaata

SEQ ID NO: 41942 - DNA, 15 bp, Homo sapiens
atagggaagggaaat

SEQ ID NO: 41943 - DNA, 15 bp, Homo sapiens
gatagggaagggaaa

SEQ ID NO: 41944 - DNA, 15 bp, Homo sapiens
tgatagggaagggaa

SEQ ID NO: 41945 - DNA, 15 bp, Homo sapiens
ctgatagggaaggga

SEQ ID NO: 41946 - DNA, 15 bp, Homo sapiens
gctgatagggaaggg

SEQ ID NO: 41947 - DNA, 15 bp, Homo sapiens
ggctgatagggaagg

SEQ ID NO: 41948 - DNA, 15 bp, Homo sapiens
tggctgatagggaag

SEQ ID NO: 41949 - DNA, 15 bp, Homo sapiens
atggctgatagggaa

SEQ ID NO: 41950 - DNA, 15 bp, Homo sapiens
tatggctgataggga

SEQ ID NO: 41951 - DNA, 15 bp, Homo sapiens
ctatggctgataggg

SEQ ID NO: 41952 - DNA, 15 bp, Homo sapiens
gctatggctgatagg

SEQ ID NO: 41953 - DNA, 15 bp, Homo sapiens
ggctatggctgatag

SEQ ID NO: 41954 - DNA, 15 bp, Homo sapiens
gggctatggctgata

SEQ ID NO: 41955 - DNA, 15 bp, Homo sapiens
agggctatggctgat

SEQ ID NO: 41956 - DNA, 15 bp, Homo sapiens
gagggctatggctga

SEQ ID NO: 41957 - DNA, 15 bp, Homo sapiens
tgagggctatggctg

SEQ ID NO: 41958 - DNA, 15 bp, Homo sapiens
ctgagggctatggct

SEQ ID NO: 41959 - DNA, 15 bp, Homo sapiens
cctgagggctatggc

SEQ ID NO: 41960 - DNA, 15 bp, Homo sapiens
ccctgagggctatgg

SEQ ID NO: 41961 - DNA, 15 bp, Homo sapiens
gccctgagggctatg

SEQ ID NO: 41962 - DNA, 15 bp, Homo sapiens
agccctgagggctat

SEQ ID NO: 41963 - DNA, 15 bp, Homo sapiens
cagccctgagggcta

SEQ ID NO: 41964 - DNA, 15 bp, Homo sapiens
ccagccctgagggct

SEQ ID NO: 41965 - DNA, 15 bp, Homo sapiens
tccagccctgagggc

SEQ ID NO: 41966 - DNA, 15 bp, Homo sapiens
ttccagccctgaggg

SEQ ID NO: 41967 - DNA, 15 bp, Homo sapiens
cttccagccctgagg

SEQ ID NO: 41968 - DNA, 15 bp, Homo sapiens
ccttccagccctgag

SEQ ID NO: 41969 - DNA, 15 bp, Homo sapiens
cccttccagccctga

SEQ ID NO: 41970 - DNA, 15 bp, Homo sapiens
gcccttccagccctg

SEQ ID NO: 41971 - DNA, 15 bp, Homo sapiens
ggcccttccagccct

SEQ ID NO: 41972 - DNA, 15 bp, Homo sapiens
aggcccttccagccc

SEQ ID NO: 41973 - DNA, 15 bp, Homo sapiens
gaggcccttccagcc

SEQ ID NO: 41974 - DNA, 15 bp, Homo sapiens
tgaggcccttccagc

SEQ ID NO: 41975 - DNA, 15 bp, Homo sapiens
atgaggcccttccag

SEQ ID NO: 41976 - DNA, 15 bp, Homo sapiens
aatgaggcccttcca

SEQ ID NO: 41977 - DNA, 15 bp, Homo sapiens
aaatgaggcccttcc

SEQ ID NO: 41978 - DNA, 15 bp, Homo sapiens
aaaatgaggcccttc

SEQ ID NO: 41979 - DNA, 15 bp, Homo sapiens
taaaatgaggccctt

SEQ ID NO: 41980 - DNA, 15 bp, Homo sapiens
ctaaaatgaggccct

SEQ ID NO: 41981 - DNA, 15 bp, Homo sapiens
actaaaatgaggccc

SEQ ID NO: 41982 - DNA, 15 bp, Homo sapiens
gactaaaatgaggcc

SEQ ID NO: 41983 - DNA, 15 bp, Homo sapiens
agactaaaatgaggc

SEQ ID NO: 41984 - DNA, 15 bp, Homo sapiens
tagactaaaatgagg

SEQ ID NO: 41985 - DNA, 15 bp, Homo sapiens
atagactaaaatgag

SEQ ID NO: 41986 - DNA, 15 bp, Homo sapiens
aatagactaaaatga

SEQ ID NO: 41987 - DNA, 15 bp, Homo sapiens
gaatagactaaaatg

SEQ ID NO: 41988 - DNA, 15 bp, Homo sapiens
ggaatagactaaaat

SEQ ID NO: 41989 - DNA, 15 bp, Homo sapiens
gggaatagactaaaa

SEQ ID NO: 41990 - DNA, 15 bp, Homo sapiens
tgggaatagactaaa

SEQ ID NO: 41991 - DNA, 15 bp, Homo sapiens
ctgggaatagactaa

SEQ ID NO: 41992 - DNA, 15 bp, Homo sapiens
tctgggaatagacta

SEQ ID NO: 41993 - DNA, 15 bp, Homo sapiens
gtctgggaatagact

SEQ ID NO: 41994 - DNA, 15 bp, Homo sapiens
agtctgggaatagac

SEQ ID NO: 41995 - DNA, 15 bp, Homo sapiens
cagtctgggaataga

SEQ ID NO: 41996 - DNA, 15 bp, Homo sapiens
ccagtctgggaatag

SEQ ID NO: 41997 - DNA, 15 bp, Homo sapiens
cccagtctgggaata

SEQ ID NO: 41998 - DNA, 15 bp, Homo sapiens
acccagtctgggaat

SEQ ID NO: 41999 - DNA, 15 bp, Homo sapiens
gacccagtctgggaa

SEQ ID NO: 42000 - DNA, 15 bp, Homo sapiens
tgacccagtctggga

SEQ ID NO: 42001 - DNA, 15 bp, Homo sapiens
gtgacccagtctggg

SEQ ID NO: 42002 - DNA, 15 bp, Homo sapiens
ggtgacccagtctgg

SEQ ID NO: 42003 - DNA, 15 bp, Homo sapiens
gggtgacccagtctg

SEQ ID NO: 42004 - DNA, 15 bp, Homo sapiens
tgggtgacccagtct

SEQ ID NO: 42005 - DNA, 15 bp, Homo sapiens
gtgggtgacccagtc

SEQ ID NO: 42006 - DNA, 15 bp, Homo sapiens
tgtgggtgacccagt

SEQ ID NO: 42007 - DNA, 15 bp, Homo sapiens
ctgtgggtgacccag

SEQ ID NO: 42008 - DNA, 15 bp, Homo sapiens
actgtgggtgaccca

SEQ ID NO: 42009 - DNA, 15 bp, Homo sapiens
cactgtgggtgaccc

SEQ ID NO: 42010 - DNA, 15 bp, Homo sapiens
acactgtgggtgacc

SEQ ID NO: 42011 - DNA, 15 bp, Homo sapiens
aacactgtgggtgac

SEQ ID NO: 42012 - DNA, 15 bp, Homo sapiens
caacactgtgggtga

SEQ ID NO: 42013 - DNA, 15 bp, Homo sapiens
tcaacactgtgggtg

SEQ ID NO: 42014 - DNA, 15 bp, Homo sapiens
gtcaacactgtgggt

SEQ ID NO: 42015 - DNA, 15 bp, Homo sapiens
tgtcaacactgtggg

SEQ ID NO: 42016 - DNA, 15 bp, Homo sapiens
gtgtcaacactgtgg

SEQ ID NO: 42017 - DNA, 15 bp, Homo sapiens
tgtgtcaacactgtg

SEQ ID NO: 42018 - DNA, 15 bp, Homo sapiens
gtgtgtcaacactgt

SEQ ID NO: 42019 - DNA, 15 bp, Homo sapiens
tgtgtgtcaacactg

SEQ ID NO: 42020 - DNA, 15 bp, Homo sapiens
ctgtgtgtcaacact

SEQ ID NO: 42021 - DNA, 15 bp, Homo sapiens
gctgtgtgtcaacac

SEQ ID NO: 42022 - DNA, 15 bp, Homo sapiens
tgctgtgtgtcaaca

SEQ ID NO: 42023 - DNA, 15 bp, Homo sapiens
atgctgtgtgtcaac

SEQ ID NO: 42024 - DNA, 15 bp, Homo sapiens
gatgctgtgtgtcaa

SEQ ID NO: 42025 - DNA, 15 bp, Homo sapiens
tgatgctgtgtgtca

SEQ ID NO: 42026 - DNA, 15 bp, Homo sapiens
ttgatgctgtgtgtc

SEQ ID NO: 42027 - DNA, 15 bp, Homo sapiens
gttgatgctgtgtgt

SEQ ID NO: 42028 - DNA, 15 bp, Homo sapiens
ggttgatgctgtgtg

SEQ ID NO: 42029 - DNA, 15 bp, Homo sapiens
cggttgatgctgtgt

SEQ ID NO: 42030 - DNA, 15 bp, Homo sapiens
tcggttgatgctgtg

SEQ ID NO: 42031 - DNA, 15 bp, Homo sapiens
gtcggttgatgctgt

SEQ ID NO: 42032 - DNA, 15 bp, Homo sapiens
tgtcggttgatgctg

SEQ ID NO: 42033 - DNA, 15 bp, Homo sapiens
ctgtcggttgatgct

SEQ ID NO: 42034 - DNA, 15 bp, Homo sapiens
actgtcggttgatgc

SEQ ID NO: 42035 - DNA, 15 bp, Homo sapiens
cactgtcggttgatg

SEQ ID NO: 42036 - DNA, 15 bp, Homo sapiens
tcactgtcggttgat

SEQ ID NO: 42037 - DNA, 15 bp, Homo sapiens
ctcactgtcggttga

SEQ ID NO: 42038 - DNA, 15 bp, Homo sapiens
gctcactgtcggttg

SEQ ID NO: 42039 - DNA, 15 bp, Homo sapiens
agctcactgtcggtt

SEQ ID NO: 42040 - DNA, 15 bp, Homo sapiens
aagctcactgtcggt

SEQ ID NO: 42041 - DNA, 15 bp, Homo sapiens
taagctcactgtcgg

SEQ ID NO: 42042 - DNA, 15 bp, Homo sapiens
ataagctcactgtcg

SEQ ID NO: 42043 - DNA, 15 bp, Homo sapiens
gataagctcactgtc

SEQ ID NO: 42044 - DNA, 15 bp, Homo sapiens
agataagctcactgt

SEQ ID NO: 42045 - DNA, 15 bp, Homo sapiens
cagataagctcactg

SEQ ID NO: 42046 - DNA, 15 bp, Homo sapiens
ccagataagctcact

SEQ ID NO: 42047 - DNA, 15 bp, Homo sapiens
tccagataagctcac

SEQ ID NO: 42048 - DNA, 15 bp, Homo sapiens
ttccagataagctca

SEQ ID NO: 42049 - DNA, 15 bp, Homo sapiens
tttccagataagctc

SEQ ID NO: 42050 - DNA, 15 bp, Homo sapiens
ttttccagataagct

SEQ ID NO: 42051 - DNA, 15 bp, Homo sapiens
attttccagataagc

SEQ ID NO: 42052 - DNA, 15 bp, Homo sapiens
tattttccagataag

SEQ ID NO: 42053 - DNA, 15 bp, Homo sapiens
ttattttccagataa

SEQ ID NO: 42054 - DNA, 15 bp, Homo sapiens
attattttccagata

SEQ ID NO: 42055 - DNA, 15 bp, Homo sapiens
cattattttccagat

SEQ ID NO: 42056 - DNA, 15 bp, Homo sapiens
gcattattttccaga

SEQ ID NO: 42057 - DNA, 15 bp, Homo sapiens
ggcattattttccag

SEQ ID NO: 42058 - DNA, 15 bp, Homo sapiens
aggcattattttcca

SEQ ID NO: 42059 - DNA, 15 bp, Homo sapiens
aaggcattattttcc

SEQ ID NO: 42060 - DNA, 15 bp, Homo sapiens
aaaggcattattttc

SEQ ID NO: 42061 - DNA, 15 bp, Homo sapiens
gaaaggcattatttt

SEQ ID NO: 42062 - DNA, 15 bp, Homo sapiens
agaaaggcattattt

SEQ ID NO: 42063 - DNA, 15 bp, Homo sapiens
tagaaaggcattatt

SEQ ID NO: 42064 - DNA, 15 bp, Homo sapiens
atagaaaggcattat

SEQ ID NO: 42065 - DNA, 15 bp, Homo sapiens
aatagaaaggcatta

SEQ ID NO: 42066 - DNA, 15 bp, Homo sapiens
aaatagaaaggcatt

SEQ ID NO: 42067 - DNA, 15 bp, Homo sapiens
aaaatagaaaggcat

SEQ ID NO: 42068 - DNA, 15 bp, Homo sapiens
gaaaatagaaaggca

SEQ ID NO: 42069 - DNA, 15 bp, Homo sapiens
agaaaatagaaaggc

SEQ ID NO: 42070 - DNA, 15 bp, Homo sapiens
aagaaaatagaaagg

SEQ ID NO: 42071 - DNA, 15 bp, Homo sapiens
aaagaaaatagaaag

SEQ ID NO: 42072 - DNA, 15 bp, Homo sapiens
caaagaaaatagaaa

SEQ ID NO: 42073 - DNA, 15 bp, Homo sapiens
acaaagaaaatagaa

SEQ ID NO: 42074 - DNA, 15 bp, Homo sapiens
aacaaagaaaataga

SEQ ID NO: 42075 - DNA, 15 bp, Homo sapiens
aaacaaagaaaatag

SEQ ID NO: 42076 - DNA, 15 bp, Homo sapiens
gaaacaaagaaaata

SEQ ID NO: 42077 - DNA, 15 bp, Homo sapiens
agaaacaaagaaaat

SEQ ID NO: 42078 - DNA, 15 bp, Homo sapiens
aagaaacaaagaaaa

SEQ ID NO: 42079 - DNA, 15 bp, Homo sapiens
taagaaacaaagaaa

SEQ ID NO: 42080 - DNA, 15 bp, Homo sapiens
ctaagaaacaaagaa

SEQ ID NO: 42081 - DNA, 15 bp, Homo sapiens
gctaagaaacaaaga

SEQ ID NO: 42082 - DNA, 15 bp, Homo sapiens
tgctaagaaacaaag

SEQ ID NO: 42083 - DNA, 15 bp, Homo sapiens
atgctaagaaacaaa

SEQ ID NO: 42084 - DNA, 15 bp, Homo sapiens
tatgctaagaaacaa

SEQ ID NO: 42085 - DNA, 15 bp, Homo sapiens
atatgctaagaaaca

SEQ ID NO: 42086 - DNA, 15 bp, Homo sapiens
tatatgctaagaaac

SEQ ID NO: 42087 - DNA, 15 bp, Homo sapiens
atatatgctaagaaa

SEQ ID NO: 42088 - DNA, 15 bp, Homo sapiens
aatatatgctaagaa

SEQ ID NO: 42089 - DNA, 15 bp, Homo sapiens
taatatatgctaaga

SEQ ID NO: 42090 - DNA, 15 bp, Homo sapiens
ttaatatatgctaag

SEQ ID NO: 42091 - DNA, 15 bp, Homo sapiens
tttaatatatgctaa

SEQ ID NO: 42092 - DNA, 15 bp, Homo sapiens
atttaatatatgcta

SEQ ID NO: 42093 - DNA, 15 bp, Homo sapiens
catttaatatatgct

SEQ ID NO: 42094 - DNA, 15 bp, Homo sapiens
acatttaatatatgc

SEQ ID NO: 42095 - DNA, 15 bp, Homo sapiens
aacatttaatatatg

SEQ ID NO: 42096 - DNA, 15 bp, Homo sapiens
aaacatttaatatat

SEQ ID NO: 42097 - DNA, 15 bp, Homo sapiens
gaaacatttaatata

SEQ ID NO: 42098 - DNA, 15 bp, Homo sapiens
agaaacatttaatat

SEQ ID NO: 42099 - DNA, 15 bp, Homo sapiens
aagaaacatttaata

SEQ ID NO: 42100 - DNA, 15 bp, Homo sapiens
aaagaaacatttaat

SEQ ID NO: 42101 - DNA, 15 bp, Homo sapiens
gaaagaaacatttaa

SEQ ID NO: 42102 - DNA, 15 bp, Homo sapiens
ggaaagaaacattta

SEQ ID NO: 42103 - DNA, 15 bp, Homo sapiens
aggaaagaaacattt

SEQ ID NO: 42104 - DNA, 15 bp, Homo sapiens
aaggaaagaaacatt

SEQ ID NO: 42105 - DNA, 15 bp, Homo sapiens
gaaggaaagaaacat

SEQ ID NO: 42106 - DNA, 15 bp, Homo sapiens
agaaggaaagaaaca

SEQ ID NO: 42107 - DNA, 15 bp, Homo sapiens
gagaaggaaagaaac

SEQ ID NO: 42108 - DNA, 15 bp, Homo sapiens
agagaaggaaagaaa

SEQ ID NO: 42109 - DNA, 15 bp, Homo sapiens
tagagaaggaaagaa

SEQ ID NO: 42110 - DNA, 15 bp, Homo sapiens
ttagagaaggaaaga

SEQ ID NO: 42111 - DNA, 15 bp, Homo sapiens
attagagaaggaaag

SEQ ID NO: 42112 - DNA, 15 bp, Homo sapiens
tattagagaaggaaa

SEQ ID NO: 42113 - DNA, 15 bp, Homo sapiens
ttattagagaaggaa

SEQ ID NO: 42114 - DNA, 15 bp, Homo sapiens
attattagagaagga

SEQ ID NO: 42115 - DNA, 15 bp, Homo sapiens
gattattagagaagg

SEQ ID NO: 42116 - DNA, 15 bp, Homo sapiens
agattattagagaag

SEQ ID NO: 42117 - DNA, 15 bp, Homo sapiens
aagattattagagaa

SEQ ID NO: 42118 - DNA, 15 bp, Homo sapiens
aaagattattagaga

SEQ ID NO: 42119 - DNA, 15 bp, Homo sapiens
aaaagattattagag

SEQ ID NO: 42120 - DNA, 15 bp, Homo sapiens
taaaagattattaga

SEQ ID NO: 42121 - DNA, 15 bp, Homo sapiens
ctaaaagattattag

SEQ ID NO: 42122 - DNA, 15 bp, Homo sapiens
tctaaaagattatta

SEQ ID NO: 42123 - DNA, 15 bp, Homo sapiens
atctaaaagattatt

SEQ ID NO: 42124 - DNA, 15 bp, Homo sapiens
tatctaaaagattat

SEQ ID NO: 42125 - DNA, 15 bp, Homo sapiens
ttatctaaaagatta

SEQ ID NO: 42126 - DNA, 15 bp, Homo sapiens
tttatctaaaagatt

SEQ ID NO: 42127 - DNA, 15 bp, Homo sapiens
ctttatctaaaagat

SEQ ID NO: 42128 - DNA, 15 bp, Homo sapiens
tctttatctaaaaga

SEQ ID NO: 42129 - DNA, 15 bp, Homo sapiens
ttctttatctaaaag

SEQ ID NO: 42130 - DNA, 15 bp, Homo sapiens
tttctttatctaaaa

SEQ ID NO: 42131 - DNA, 15 bp, Homo sapiens
atttctttatctaaa

SEQ ID NO: 42132 - DNA, 15 bp, Homo sapiens
gatttctttatctaa

SEQ ID NO: 42133 - DNA, 15 bp, Homo sapiens
tgatttctttatcta

SEQ ID NO: 42134 - DNA, 15 bp, Homo sapiens
atgatttctttatct

SEQ ID NO: 42135 - DNA, 15 bp, Homo sapiens
aatgatttctttatc

SEQ ID NO: 42136 - DNA, 15 bp, Homo sapiens
aaatgatttctttat

SEQ ID NO: 42137 - DNA, 15 bp, Homo sapiens
caaatgatttcttta

SEQ ID NO: 42138 - DNA, 15 bp, Homo sapiens
gcaaatgatttcttt

SEQ ID NO: 42139 - DNA, 15 bp, Homo sapiens
agcaaatgatttctt

SEQ ID NO: 42140 - DNA, 15 bp, Homo sapiens
cagcaaatgatttct

SEQ ID NO: 42141 - DNA, 15 bp, Homo sapiens
tcagcaaatgatttc

SEQ ID NO: 42142 - DNA, 15 bp, Homo sapiens
ctcagcaaatgattt

SEQ ID NO: 42143 - DNA, 15 bp, Homo sapiens
gctcagcaaatgatt

SEQ ID NO: 42144 - DNA, 15 bp, Homo sapiens
agctcagcaaatgat

SEQ ID NO: 42145 - DNA, 15 bp, Homo sapiens
cagctcagcaaatga

SEQ ID NO: 42146 - DNA, 15 bp, Homo sapiens
tcagctcagcaaatg

SEQ ID NO: 42147 - DNA, 15 bp, Homo sapiens
atcagctcagcaaat

SEQ ID NO: 42148 - DNA, 15 bp, Homo sapiens
tatcagctcagcaaa

SEQ ID NO: 42149 - DNA, 15 bp, Homo sapiens
ttatcagctcagcaa

SEQ ID NO: 42150 - DNA, 15 bp, Homo sapiens
attatcagctcagca

SEQ ID NO: 42151 - DNA, 15 bp, Homo sapiens
tattatcagctcagc

SEQ ID NO: 42152 - DNA, 15 bp, Homo sapiens
ttattatcagctcag

SEQ ID NO: 42153 - DNA, 15 bp, Homo sapiens
gttattatcagctca

SEQ ID NO: 42154 - DNA, 15 bp, Homo sapiens
tgttattatcagctc

SEQ ID NO: 42155 - DNA, 15 bp, Homo sapiens
ttgttattatcagct

SEQ ID NO: 42156 - DNA, 15 bp, Homo sapiens
tttgttattatcagc

SEQ ID NO: 42157 - DNA, 15 bp, Homo sapiens
ttttgttattatcag

SEQ ID NO: 42158 - DNA, 15 bp, Homo sapiens
cttttgttattatca

SEQ ID NO: 42159 - DNA, 15 bp, Homo sapiens
acttttgttattatc

SEQ ID NO: 42160 - DNA, 15 bp, Homo sapiens
tacttttgttattat

SEQ ID NO: 42161 - DNA, 15 bp, Homo sapiens
atacttttgttatta

SEQ ID NO: 42162 - DNA, 15 bp, Homo sapiens
gatacttttgttatt

SEQ ID NO: 42163 - DNA, 15 bp, Homo sapiens
ggatacttttgttat

SEQ ID NO: 42164 - DNA, 15 bp, Homo sapiens
aggatacttttgtta

SEQ ID NO: 42165 - DNA, 15 bp, Homo sapiens
taggatacttttgtt

SEQ ID NO: 42166 - DNA, 15 bp, Homo sapiens
gtaggatacttttgt

SEQ ID NO: 42167 - DNA, 15 bp, Homo sapiens
ggtaggatacttttg

SEQ ID NO: 42168 - DNA, 15 bp, Homo sapiens
aggtaggatactttt

SEQ ID NO: 42169 - DNA, 15 bp, Homo sapiens
taggtaggatacttt

SEQ ID NO: 42170 - DNA, 15 bp, Homo sapiens
gtaggtaggatactt

SEQ ID NO: 42171 - DNA, 15 bp, Homo sapiens
tgtaggtaggatact

SEQ ID NO: 42172 - DNA, 15 bp, Homo sapiens
atgtaggtaggatac

SEQ ID NO: 42173 - DNA, 15 bp, Homo sapiens
aatgtaggtaggata

SEQ ID NO: 42174 - DNA, 15 bp, Homo sapiens
aaatgtaggtaggat

SEQ ID NO: 42175 - DNA, 15 bp, Homo sapiens
aaaatgtaggtagga

SEQ ID NO: 42176 - DNA, 15 bp, Homo sapiens
aaaaatgtaggtagg

SEQ ID NO: 42177 - DNA, 15 bp, Homo sapiens
taaaaatgtaggtag

SEQ ID NO: 42178 - DNA, 15 bp, Homo sapiens
ttaaaaatgtaggta

SEQ ID NO: 42179 - DNA, 15 bp, Homo sapiens
tttaaaaatgtaggt

SEQ ID NO: 42180 - DNA, 15 bp, Homo sapiens
atttaaaaatgtagg

SEQ ID NO: 42181 - DNA, 15 bp, Homo sapiens
catttaaaaatgtag

SEQ ID NO: 42182 - DNA, 15 bp, Homo sapiens
acatttaaaaatgta

SEQ ID NO: 42183 - DNA, 15 bp, Homo sapiens
gacatttaaaaatgt

SEQ ID NO: 42184 - DNA, 15 bp, Homo sapiens
tgacatttaaaaatg

SEQ ID NO: 42185 - DNA, 15 bp, Homo sapiens
ctgacatttaaaaat

SEQ ID NO: 42186 - DNA, 15 bp, Homo sapiens
gctgacatttaaaaa

SEQ ID NO: 42187 - DNA, 15 bp, Homo sapiens
tgctgacatttaaaa

SEQ ID NO: 42188 - DNA, 15 bp, Homo sapiens
ctgctgacatttaaa

SEQ ID NO: 42189 - DNA, 15 bp, Homo sapiens
actgctgacatttaa

SEQ ID NO: 42190 - DNA, 15 bp, Homo sapiens
cactgctgacattta

SEQ ID NO: 42191 - DNA, 15 bp, Homo sapiens
tcactgctgacattt

SEQ ID NO: 42192 - DNA, 15 bp, Homo sapiens
ttcactgctgacatt

SEQ ID NO: 42193 - DNA, 15 bp, Homo sapiens
tttcactgctgacat

SEQ ID NO: 42194 - DNA, 15 bp, Homo sapiens
ctttcactgctgaca

SEQ ID NO: 42195 - DNA, 15 bp, Homo sapiens
tctttcactgctgac

SEQ ID NO: 42196 - DNA, 15 bp, Homo sapiens
gtctttcactgctga

SEQ ID NO: 42197 - DNA, 15 bp, Homo sapiens
cgtctttcactgctg

SEQ ID NO: 42198 - DNA, 15 bp, Homo sapiens
acgtctttcactgct

SEQ ID NO: 42199 - DNA, 15 bp, Homo sapiens
aacgtctttcactgc

SEQ ID NO: 42200 - DNA, 15 bp, Homo sapiens
aaacgtctttcactg

SEQ ID NO: 42201 - DNA, 15 bp, Homo sapiens
aaaacgtctttcact

SEQ ID NO: 42202 - DNA, 15 bp, Homo sapiens
taaaacgtctttcac

SEQ ID NO: 42203 - DNA, 15 bp, Homo sapiens
ttaaaacgtctttca

SEQ ID NO: 42204 - DNA, 15 bp, Homo sapiens
cttaaaacgtctttc

SEQ ID NO: 42205 - DNA, 15 bp, Homo sapiens
ccttaaaacgtcttt

SEQ ID NO: 42206 - DNA, 15 bp, Homo sapiens
cccttaaaacgtctt

SEQ ID NO: 42207 - DNA, 15 bp, Homo sapiens
gcccttaaaacgtct

SEQ ID NO: 42208 - DNA, 15 bp, Homo sapiens
agcccttaaaacgtc

SEQ ID NO: 42209 - DNA, 15 bp, Homo sapiens
aagcccttaaaacgt

SEQ ID NO: 42210 - DNA, 15 bp, Homo sapiens
aaagcccttaaaacg

SEQ ID NO: 42211 - DNA, 15 bp, Homo sapiens
taaagcccttaaaac

SEQ ID NO: 42212 - DNA, 15 bp, Homo sapiens
ttaaagcccttaaaa

SEQ ID NO: 42213 - DNA, 15 bp, Homo sapiens
tttaaagcccttaaa

SEQ ID NO: 42214 - DNA, 15 bp, Homo sapiens
ttttaaagcccttaa

SEQ ID NO: 42215 - DNA, 15 bp, Homo sapiens
tttttaaagccctta

SEQ ID NO: 42216 - DNA, 15 bp, Homo sapiens
ttttttaaagccctt

SEQ ID NO: 42217 - DNA, 15 bp, Homo sapiens
tttttttaaagccct

SEQ ID NO: 42218 - DNA, 15 bp, Homo sapiens
ttttttttaaagccc

SEQ ID NO: 42219 - DNA, 15 bp, Homo sapiens
tttttttttaaagcc

SEQ ID NO: 42220 - DNA, 15 bp, Homo sapiens
ttttttttttaaagc

SEQ ID NO: 42221 - DNA, 15 bp, Homo sapiens
tttttttttttaaag

SEQ ID NO: 42222 - DNA, 15 bp, Homo sapiens
ttttttttttttaaa

SEQ ID NO: 42223 - DNA, 15 bp, Homo sapiens
ttctttttttttttt

SEQ ID NO: 42224 - DNA, 15 bp, Homo sapiens
tttcttttttttttt

SEQ ID NO: 42225 - DNA, 15 bp, Homo sapiens
ctttctttttttttt

SEQ ID NO: 42226 - DNA, 15 bp, Homo sapiens
tctttcttttttttt

SEQ ID NO: 42227 - DNA, 15 bp, Homo sapiens
ttctttctttttttt

SEQ ID NO: 42228 - DNA, 15 bp, Homo sapiens
tttctttcttttttt

SEQ ID NO: 42229 - DNA, 15 bp, Homo sapiens
ttttctttctttttt

SEQ ID NO: 42230 - DNA, 15 bp, Homo sapiens
cttttctttcttttt

SEQ ID NO: 42231 - DNA, 15 bp, Homo sapiens
tcttttctttctttt

SEQ ID NO: 42232 - DNA, 15 bp, Homo sapiens
ttcttttctttcttt

SEQ ID NO: 42233 - DNA, 15 bp, Homo sapiens
tttcttttctttctt

SEQ ID NO: 42234 - DNA, 15 bp, Homo sapiens
ttttcttttctttct

SEQ ID NO: 42235 - DNA, 15 bp, Homo sapiens
gttttcttttctttc

SEQ ID NO: 42236 - DNA, 15 bp, Homo sapiens
agttttcttttcttt

SEQ ID NO: 42237 - DNA, 15 bp, Homo sapiens
cagttttcttttctt

SEQ ID NO: 42238 - DNA, 15 bp, Homo sapiens
acagttttcttttct

SEQ ID NO: 42239 - DNA, 15 bp, Homo sapiens
tacagttttcttttc

SEQ ID NO: 42240 - DNA, 15 bp, Homo sapiens
ctacagttttctttt

SEQ ID NO: 42241 - DNA, 15 bp, Homo sapiens
actacagttttcttt

SEQ ID NO: 42242 - DNA, 15 bp, Homo sapiens
aactacagttttctt

SEQ ID NO: 42243 - DNA, 15 bp, Homo sapiens
aaactacagttttct

SEQ ID NO: 42244 - DNA, 15 bp, Homo sapiens
taaactacagttttc

SEQ ID NO: 42245 - DNA, 15 bp, Homo sapiens
ctaaactacagtttt

SEQ ID NO: 42246 - DNA, 15 bp, Homo sapiens
tctaaactacagttt

SEQ ID NO: 42247 - DNA, 15 bp, Homo sapiens
ttctaaactacagtt

SEQ ID NO: 42248 - DNA, 15 bp, Homo sapiens
tttctaaactacagt

SEQ ID NO: 42249 - DNA, 15 bp, Homo sapiens
ctttctaaactacag

SEQ ID NO: 42250 - DNA, 15 bp, Homo sapiens
cctttctaaactaca

SEQ ID NO: 42251 - DNA, 15 bp, Homo sapiens
tcctttctaaactac

SEQ ID NO: 42252 - DNA, 15 bp, Homo sapiens
gtcctttctaaacta

SEQ ID NO: 42253 - DNA, 15 bp, Homo sapiens
tgtcctttctaaact

SEQ ID NO: 42254 - DNA, 15 bp, Homo sapiens
atgtcctttctaaac

SEQ ID NO: 42255 - DNA, 15 bp, Homo sapiens
gatgtcctttctaaa

SEQ ID NO: 42256 - DNA, 15 bp, Homo sapiens
ggatgtcctttctaa

SEQ ID NO: 42257 - DNA, 15 bp, Homo sapiens
tggatgtcctttcta

SEQ ID NO: 42258 - DNA, 15 bp, Homo sapiens
ttggatgtcctttct

SEQ ID NO: 42259 - DNA, 15 bp, Homo sapiens
tttggatgtcctttc

SEQ ID NO: 42260 - DNA, 15 bp, Homo sapiens
atttggatgtccttt

SEQ ID NO: 42261 - DNA, 15 bp, Homo sapiens
aatttggatgtcctt

SEQ ID NO: 42262 - DNA, 15 bp, Homo sapiens
caatttggatgtcct

SEQ ID NO: 42263 - DNA, 15 bp, Homo sapiens
tcaatttggatgtcc

SEQ ID NO: 42264 - DNA, 15 bp, Homo sapiens
ttcaatttggatgtc

SEQ ID NO: 42265 - DNA, 15 bp, Homo sapiens
cttcaatttggatgt

SEQ ID NO: 42266 - DNA, 15 bp, Homo sapiens
tcttcaatttggatg

SEQ ID NO: 42267 - DNA, 15 bp, Homo sapiens
ctcttcaatttggat

SEQ ID NO: 42268 - DNA, 15 bp, Homo sapiens
cctcttcaatttgga

SEQ ID NO: 42269 - DNA, 15 bp, Homo sapiens
tcctcttcaatttgg

SEQ ID NO: 42270 - DNA, 15 bp, Homo sapiens
ctcctcttcaatttg

SEQ ID NO: 42271 - DNA, 15 bp, Homo sapiens
gctcctcttcaattt

SEQ ID NO: 42272 - DNA, 15 bp, Homo sapiens
tgctcctcttcaatt

SEQ ID NO: 42273 - DNA, 15 bp, Homo sapiens
ctgctcctcttcaat

SEQ ID NO: 42274 - DNA, 15 bp, Homo sapiens
cctgctcctcttcaa

SEQ ID NO: 42275 - DNA, 15 bp, Homo sapiens
ccctgctcctcttca

SEQ ID NO: 42276 - DNA, 15 bp, Homo sapiens
cccctgctcctcttc

SEQ ID NO: 42277 - DNA, 15 bp, Homo sapiens
gcccctgctcctctt

SEQ ID NO: 42278 - DNA, 15 bp, Homo sapiens
tgcccctgctcctct

SEQ ID NO: 42279 - DNA, 15 bp, Homo sapiens
ctgcccctgctcctc

SEQ ID NO: 42280 - DNA, 15 bp, Homo sapiens
actgcccctgctcct

SEQ ID NO: 42281 - DNA, 15 bp, Homo sapiens
aactgcccctgctcc

SEQ ID NO: 42282 - DNA, 15 bp, Homo sapiens
gaactgcccctgctc

SEQ ID NO: 42283 - DNA, 15 bp, Homo sapiens
agaactgcccctgct

SEQ ID NO: 42284 - DNA, 15 bp, Homo sapiens
cagaactgcccctgc

SEQ ID NO: 42285 - DNA, 15 bp, Homo sapiens
acagaactgcccctg

SEQ ID NO: 42286 - DNA, 15 bp, Homo sapiens
aacagaactgcccct

SEQ ID NO: 42287 - DNA, 15 bp, Homo sapiens
gaacagaactgcccc

SEQ ID NO: 42288 - DNA, 15 bp, Homo sapiens
agaacagaactgccc

SEQ ID NO: 42289 - DNA, 15 bp, Homo sapiens
gagaacagaactgcc

SEQ ID NO: 42290 - DNA, 15 bp, Homo sapiens
agagaacagaactgc

SEQ ID NO: 42291 - DNA, 15 bp, Homo sapiens
gagagaacagaactg

SEQ ID NO: 42292 - DNA, 15 bp, Homo sapiens
agagagaacagaact

SEQ ID NO: 42293 - DNA, 15 bp, Homo sapiens
cagagagaacagaac

SEQ ID NO: 42294 - DNA, 15 bp, Homo sapiens
tcagagagaacagaa

SEQ ID NO: 42295 - DNA, 15 bp, Homo sapiens
ctcagagagaacaga

SEQ ID NO: 42296 - DNA, 15 bp, Homo sapiens
gctcagagagaacag

SEQ ID NO: 42297 - DNA, 15 bp, Homo sapiens
tgctcagagagaaca

SEQ ID NO: 42298 - DNA, 15 bp, Homo sapiens
ctgctcagagagaac

SEQ ID NO: 42299 - DNA, 15 bp, Homo sapiens
gctgctcagagagaa

SEQ ID NO: 42300 - DNA, 15 bp, Homo sapiens
agctgctcagagaga

SEQ ID NO: 42301 - DNA, 15 bp, Homo sapiens
gagctgctcagagag

SEQ ID NO: 42302 - DNA, 15 bp, Homo sapiens
agagctgctcagaga

SEQ ID NO: 42303 - DNA, 15 bp, Homo sapiens
cagagctgctcagag

SEQ ID NO: 42304 - DNA, 15 bp, Homo sapiens
acagagctgctcaga

SEQ ID NO: 42305 - DNA, 15 bp, Homo sapiens
cacagagctgctcag

SEQ ID NO: 42306 - DNA, 15 bp, Homo sapiens
tcacagagctgctca

SEQ ID NO: 42307 - DNA, 15 bp, Homo sapiens
ttcacagagctgctc

SEQ ID NO: 42308 - DNA, 15 bp, Homo sapiens
cttcacagagctgct

SEQ ID NO: 42309 - DNA, 15 bp, Homo sapiens
ccttcacagagctgc

SEQ ID NO: 42310 - DNA, 15 bp, Homo sapiens
cccttcacagagctg

SEQ ID NO: 42311 - DNA, 15 bp, Homo sapiens
ccccttcacagagct

SEQ ID NO: 42312 - DNA, 15 bp, Homo sapiens
cccccttcacagagc

SEQ ID NO: 42313 - DNA, 15 bp, Homo sapiens
tcccccttcacagag

SEQ ID NO: 42314 - DNA, 15 bp, Homo sapiens
ctcccccttcacaga

SEQ ID NO: 42315 - DNA, 15 bp, Homo sapiens
actcccccttcacag

SEQ ID NO: 42316 - DNA, 15 bp, Homo sapiens
aactcccccttcaca

SEQ ID NO: 42317 - DNA, 15 bp, Homo sapiens
aaactcccccttcac

SEQ ID NO: 42318 - DNA, 15 bp, Homo sapiens
caaactcccccttca

SEQ ID NO: 42319 - DNA, 15 bp, Homo sapiens
acaaactcccccttc

SEQ ID NO: 42320 - DNA, 15 bp, Homo sapiens
cacaaactccccctt

SEQ ID NO: 42321 - DNA, 15 bp, Homo sapiens
ccacaaactccccct

SEQ ID NO: 42322 - DNA, 15 bp, Homo sapiens
gccacaaactccccc

SEQ ID NO: 42323 - DNA, 15 bp, Homo sapiens
cgccacaaactcccc

SEQ ID NO: 42324 - DNA, 15 bp, Homo sapiens
gcgccacaaactccc

SEQ ID NO: 42325 - DNA, 15 bp, Homo sapiens
agcgccacaaactcc

SEQ ID NO: 42326 - DNA, 15 bp, Homo sapiens
cagcgccacaaactc

SEQ ID NO: 42327 - DNA, 15 bp, Homo sapiens
ccagcgccacaaact

SEQ ID NO: 42328 - DNA, 15 bp, Homo sapiens
cccagcgccacaaac

SEQ ID NO: 42329 - DNA, 15 bp, Homo sapiens
ccccagcgccacaaa

SEQ ID NO: 42330 - DNA, 15 bp, Homo sapiens
accccagcgccacaa

SEQ ID NO: 42331 - DNA, 15 bp, Homo sapiens
gaccccagcgccaca

SEQ ID NO: 42332 - DNA, 15 bp, Homo sapiens
agaccccagcgccac

SEQ ID NO: 42333 - DNA, 15 bp, Homo sapiens
aagaccccagcgcca

SEQ ID NO: 42334 - DNA, 15 bp, Homo sapiens
caagaccccagcgcc

SEQ ID NO: 42335 - DNA, 15 bp, Homo sapiens
tcaagaccccagcgc

SEQ ID NO: 42336 - DNA, 15 bp, Homo sapiens
ttcaagaccccagcg

SEQ ID NO: 42337 - DNA, 15 bp, Homo sapiens
tttcaagaccccagc

SEQ ID NO: 42338 - DNA, 15 bp, Homo sapiens
ctttcaagaccccag

SEQ ID NO: 42339 - DNA, 15 bp, Homo sapiens
actttcaagacccca

SEQ ID NO: 42340 - DNA, 15 bp, Homo sapiens
gactttcaagacccc

SEQ ID NO: 42341 - DNA, 15 bp, Homo sapiens
agactttcaagaccc

SEQ ID NO: 42342 - DNA, 15 bp, Homo sapiens
aagactttcaagacc

SEQ ID NO: 42343 - DNA, 15 bp, Homo sapiens
aaagactttcaagac

SEQ ID NO: 42344 - DNA, 15 bp, Homo sapiens
taaagactttcaaga

SEQ ID NO: 42345 - DNA, 15 bp, Homo sapiens
gtaaagactttcaag

SEQ ID NO: 42346 - DNA, 15 bp, Homo sapiens
tgtaaagactttcaa

SEQ ID NO: 42347 - DNA, 15 bp, Homo sapiens
ctgtaaagactttca

SEQ ID NO: 42348 - DNA, 15 bp, Homo sapiens
tctgtaaagactttc

SEQ ID NO: 42349 - DNA, 15 bp, Homo sapiens
ctctgtaaagacttt

SEQ ID NO: 42350 - DNA, 15 bp, Homo sapiens
cctctgtaaagactt

SEQ ID NO: 42351 - DNA, 15 bp, Homo sapiens
ccctctgtaaagact

SEQ ID NO: 42352 - DNA, 15 bp, Homo sapiens
gccctctgtaaagac

SEQ ID NO: 42353 - DNA, 15 bp, Homo sapiens
tgccctctgtaaaga

SEQ ID NO: 42354 - DNA, 15 bp, Homo sapiens
ttgccctctgtaaag

SEQ ID NO: 42355 - DNA, 15 bp, Homo sapiens
cttgccctctgtaaa

SEQ ID NO: 42356 - DNA, 15 bp, Homo sapiens
tcttgccctctgtaa

SEQ ID NO: 42357 - DNA, 15 bp, Homo sapiens
gtcttgccctctgta

SEQ ID NO: 42358 - DNA, 15 bp, Homo sapiens
agtcttgccctctgt

SEQ ID NO: 42359 - DNA, 15 bp, Homo sapiens
aagtcttgccctctg

SEQ ID NO: 42360 - DNA, 15 bp, Homo sapiens
gaagtcttgccctct

SEQ ID NO: 42361 - DNA, 15 bp, Homo sapiens
tgaagtcttgccctc

SEQ ID NO: 42362 - DNA, 15 bp, Homo sapiens
gtgaagtcttgccct

SEQ ID NO: 42363 - DNA, 15 bp, Homo sapiens
tgtgaagtcttgccc

SEQ ID NO: 42364 - DNA, 15 bp, Homo sapiens
ttgtgaagtcttgcc

SEQ ID NO: 42365 - DNA, 15 bp, Homo sapiens
cttgtgaagtcttgc

SEQ ID NO: 42366 - DNA, 15 bp, Homo sapiens
tcttgtgaagtcttg

SEQ ID NO: 42367 - DNA, 15 bp, Homo sapiens
ctcttgtgaagtctt

SEQ ID NO: 42368 - DNA, 15 bp, Homo sapiens
tctcttgtgaagtct

SEQ ID NO: 42369 - DNA, 15 bp, Homo sapiens
ttctcttgtgaagtc

SEQ ID NO: 42370 - DNA, 15 bp, Homo sapiens
tttctcttgtgaagt

SEQ ID NO: 42371 - DNA, 15 bp, Homo sapiens
ttttctcttgtgaag

SEQ ID NO: 42372 - DNA, 15 bp, Homo sapiens
cttttctcttgtgaa

SEQ ID NO: 42373 - DNA, 15 bp, Homo sapiens
gcttttctcttgtga

SEQ ID NO: 42374 - DNA, 15 bp, Homo sapiens
ggcttttctcttgtg

SEQ ID NO: 42375 - DNA, 15 bp, Homo sapiens
cggcttttctcttgt

SEQ ID NO: 42376 - DNA, 15 bp, Homo sapiens
acggcttttctcttg

SEQ ID NO: 42377 - DNA, 15 bp, Homo sapiens
cacggcttttctctt

SEQ ID NO: 42378 - DNA, 15 bp, Homo sapiens
ccacggcttttctct

SEQ ID NO: 42379 - DNA, 15 bp, Homo sapiens
tccacggcttttctc

SEQ ID NO: 42380 - DNA, 15 bp, Homo sapiens
ctccacggcttttct

SEQ ID NO: 42381 - DNA, 15 bp, Homo sapiens
cctccacggcttttc

SEQ ID NO: 42382 - DNA, 15 bp, Homo sapiens
ccctccacggctttt

SEQ ID NO: 42383 - DNA, 15 bp, Homo sapiens
tccctccacggcttt

SEQ ID NO: 42384 - DNA, 15 bp, Homo sapiens
gtccctccacggctt

SEQ ID NO: 42385 - DNA, 15 bp, Homo sapiens
ggtccctccacggct

SEQ ID NO: 42386 - DNA, 15 bp, Homo sapiens
gggtccctccacggc

SEQ ID NO: 42387 - DNA, 15 bp, Homo sapiens
agggtccctccacgg

SEQ ID NO: 42388 - DNA, 15 bp, Homo sapiens
gagggtccctccacg

SEQ ID NO: 42389 - DNA, 15 bp, Homo sapiens
tgagggtccctccac

SEQ ID NO: 42390 - DNA, 15 bp, Homo sapiens
gtgagggtccctcca

SEQ ID NO: 42391 - DNA, 15 bp, Homo sapiens
tgtgagggtccctcc

SEQ ID NO: 42392 - DNA, 15 bp, Homo sapiens
atgtgagggtccctc

SEQ ID NO: 42393 - DNA, 15 bp, Homo sapiens
catgtgagggtccct

SEQ ID NO: 42394 - DNA, 15 bp, Homo sapiens
tcatgtgagggtccc

SEQ ID NO: 42395 - DNA, 15 bp, Homo sapiens
atcatgtgagggtcc

SEQ ID NO: 42396 - DNA, 15 bp, Homo sapiens
gatcatgtgagggtc

SEQ ID NO: 42397 - DNA, 15 bp, Homo sapiens
tgatcatgtgagggt

SEQ ID NO: 42398 - DNA, 15 bp, Homo sapiens
ctgatcatgtgaggg

SEQ ID NO: 42399 - DNA, 15 bp, Homo sapiens
tctgatcatgtgagg

SEQ ID NO: 42400 - DNA, 15 bp, Homo sapiens
ttctgatcatgtgag

SEQ ID NO: 42401 - DNA, 15 bp, Homo sapiens
attctgatcatgtga

SEQ ID NO: 42402 - DNA, 15 bp, Homo sapiens
tattctgatcatgtg

SEQ ID NO: 42403 - DNA, 15 bp, Homo sapiens
atattctgatcatgt

SEQ ID NO: 42404 - DNA, 15 bp, Homo sapiens
aatattctgatcatg

SEQ ID NO: 42405 - DNA, 15 bp, Homo sapiens
gaatattctgatcat

SEQ ID NO: 42406 - DNA, 15 bp, Homo sapiens
tgaatattctgatca

SEQ ID NO: 42407 - DNA, 15 bp, Homo sapiens
gtgaatattctgatc

SEQ ID NO: 42408 - DNA, 15 bp, Homo sapiens
tgtgaatattctgat

SEQ ID NO: 42409 - DNA, 15 bp, Homo sapiens
ctgtgaatattctga

SEQ ID NO: 42410 - DNA, 15 bp, Homo sapiens
actgtgaatattctg

SEQ ID NO: 42411 - DNA, 15 bp, Homo sapiens
cactgtgaatattct

SEQ ID NO: 42412 - DNA, 15 bp, Homo sapiens
acactgtgaatattc

SEQ ID NO: 42413 - DNA, 15 bp, Homo sapiens
cacactgtgaatatt

SEQ ID NO: 42414 - DNA, 15 bp, Homo sapiens
tcacactgtgaatat

SEQ ID NO: 42415 - DNA, 15 bp, Homo sapiens
atcacactgtgaata

SEQ ID NO: 42416 - DNA, 15 bp, Homo sapiens
catcacactgtgaat

SEQ ID NO: 42417 - DNA, 15 bp, Homo sapiens
acatcacactgtgaa

SEQ ID NO: 42418 - DNA, 15 bp, Homo sapiens
cacatcacactgtga

SEQ ID NO: 42419 - DNA, 15 bp, Homo sapiens
ccacatcacactgtg

SEQ ID NO: 42420 - DNA, 15 bp, Homo sapiens
cccacatcacactgt

SEQ ID NO: 42421 - DNA, 15 bp, Homo sapiens
ccccacatcacactg

SEQ ID NO: 42422 - DNA, 15 bp, Homo sapiens
gccccacatcacact

SEQ ID NO: 42423 - DNA, 15 bp, Homo sapiens
tgccccacatcacac

SEQ ID NO: 42424 - DNA, 15 bp, Homo sapiens
atgccccacatcaca

SEQ ID NO: 42425 - DNA, 15 bp, Homo sapiens
catgccccacatcac

SEQ ID NO: 42426 - DNA, 15 bp, Homo sapiens
ccatgccccacatca

SEQ ID NO: 42427 - DNA, 15 bp, Homo sapiens
accatgccccacatc

SEQ ID NO: 42428 - DNA, 15 bp, Homo sapiens
caccatgccccacat

SEQ ID NO: 42429 - DNA, 15 bp, Homo sapiens
ccaccatgccccaca

SEQ ID NO: 42430 - DNA, 15 bp, Homo sapiens
cccaccatgccccac

SEQ ID NO: 42431 - DNA, 15 bp, Homo sapiens
ccccaccatgcccca

SEQ ID NO: 42432 - DNA, 15 bp, Homo sapiens
cccccaccatgcccc

SEQ ID NO: 42433 - DNA, 15 bp, Homo sapiens
gcccccaccatgccc

SEQ ID NO: 42434 - DNA, 15 bp, Homo sapiens
cgcccccaccatgcc

SEQ ID NO: 42435 - DNA, 15 bp, Homo sapiens
ccgcccccaccatgc

SEQ ID NO: 42436 - DNA, 15 bp, Homo sapiens
cccgcccccaccatg

SEQ ID NO: 42437 - DNA, 15 bp, Homo sapiens
acccgcccccaccat

SEQ ID NO: 42438 - DNA, 15 bp, Homo sapiens
cacccgcccccacca

SEQ ID NO: 42439 - DNA, 15 bp, Homo sapiens
gcacccgcccccacc

SEQ ID NO: 42440 - DNA, 15 bp, Homo sapiens
agcacccgcccccac

SEQ ID NO: 42441 - DNA, 15 bp, Homo sapiens
gagcacccgccccca

SEQ ID NO: 42442 - DNA, 15 bp, Homo sapiens
agagcacccgccccc

SEQ ID NO: 42443 - DNA, 15 bp, Homo sapiens
gagagcacccgcccc

SEQ ID NO: 42444 - DNA, 15 bp, Homo sapiens
ggagagcacccgccc

SEQ ID NO: 42445 - DNA, 15 bp, Homo sapiens
tggagagcacccgcc

SEQ ID NO: 42446 - DNA, 15 bp, Homo sapiens
gtggagagcacccgc

SEQ ID NO: 42447 - DNA, 15 bp, Homo sapiens
agtggagagcacccg

SEQ ID NO: 42448 - DNA, 15 bp, Homo sapiens
gagtggagagcaccc

SEQ ID NO: 42449 - DNA, 15 bp, Homo sapiens
ggagtggagagcacc

SEQ ID NO: 42450 - DNA, 15 bp, Homo sapiens
gggagtggagagcac

SEQ ID NO: 42451 - DNA, 15 bp, Homo sapiens
cgggagtggagagca

SEQ ID NO: 42452 - DNA, 15 bp, Homo sapiens
ccgggagtggagagc

SEQ ID NO: 42453 - DNA, 15 bp, Homo sapiens
cccgggagtggagag

SEQ ID NO: 42454 - DNA, 15 bp, Homo sapiens
gcccgggagtggaga

SEQ ID NO: 42455 - DNA, 15 bp, Homo sapiens
ggcccgggagtggag

SEQ ID NO: 42456 - DNA, 15 bp, Homo sapiens
aggcccgggagtgga

SEQ ID NO: 42457 - DNA, 15 bp, Homo sapiens
caggcccgggagtgg

SEQ ID NO: 42458 - DNA, 15 bp, Homo sapiens
ccaggcccgggagtg

SEQ ID NO: 42459 - DNA, 15 bp, Homo sapiens
gccaggcccgggagt

SEQ ID NO: 42460 - DNA, 15 bp, Homo sapiens
agccaggcccgggag

SEQ ID NO: 42461 - DNA, 15 bp, Homo sapiens
aagccaggcccggga

SEQ ID NO: 42462 - DNA, 15 bp, Homo sapiens
caagccaggcccggg

SEQ ID NO: 42463 - DNA, 15 bp, Homo sapiens
ccaagccaggcccgg

SEQ ID NO: 42464 - DNA, 15 bp, Homo sapiens
accaagccaggcccg

SEQ ID NO: 42465 - DNA, 15 bp, Homo sapiens
aaccaagccaggccc

SEQ ID NO: 42466 - DNA, 15 bp, Homo sapiens
gaaccaagccaggcc

SEQ ID NO: 42467 - DNA, 15 bp, Homo sapiens
ggaaccaagccaggc

SEQ ID NO: 42468 - DNA, 15 bp, Homo sapiens
gggaaccaagccagg

SEQ ID NO: 42469 - DNA, 15 bp, Homo sapiens
ggggaaccaagccag

SEQ ID NO: 42470 - DNA, 15 bp, Homo sapiens
aggggaaccaagcca

SEQ ID NO: 42471 - DNA, 15 bp, Homo sapiens
gaggggaaccaagcc

SEQ ID NO: 42472 - DNA, 15 bp, Homo sapiens
tgaggggaaccaagc

SEQ ID NO: 42473 - DNA, 15 bp, Homo sapiens
gtgaggggaaccaag

SEQ ID NO: 42474 - DNA, 15 bp, Homo sapiens
agtgaggggaaccaa

SEQ ID NO: 42475 - DNA, 15 bp, Homo sapiens
cagtgaggggaacca

SEQ ID NO: 42476 - DNA, 15 bp, Homo sapiens
acagtgaggggaacc

SEQ ID NO: 42477 - DNA, 15 bp, Homo sapiens
gacagtgaggggaac

SEQ ID NO: 42478 - DNA, 15 bp, Homo sapiens
ggacagtgaggggaa

SEQ ID NO: 42479 - DNA, 15 bp, Homo sapiens
aggacagtgagggga

SEQ ID NO: 42480 - DNA, 15 bp, Homo sapiens
gaggacagtgagggg

SEQ ID NO: 42481 - DNA, 15 bp, Homo sapiens
tgaggacagtgaggg

SEQ ID NO: 42482 - DNA, 15 bp, Homo sapiens
ctgaggacagtgagg

SEQ ID NO: 42483 - DNA, 15 bp, Homo sapiens
gctgaggacagtgag

SEQ ID NO: 42484 - DNA, 15 bp, Homo sapiens
agctgaggacagtga

SEQ ID NO: 42485 - DNA, 15 bp, Homo sapiens
gagctgaggacagtg

SEQ ID NO: 42486 - DNA, 15 bp, Homo sapiens
ggagctgaggacagt

SEQ ID NO: 42487 - DNA, 15 bp, Homo sapiens
aggagctgaggacag

SEQ ID NO: 42488 - DNA, 15 bp, Homo sapiens
gaggagctgaggaca

SEQ ID NO: 42489 - DNA, 15 bp, Homo sapiens
tgaggagctgaggac

SEQ ID NO: 42490 - DNA, 15 bp, Homo sapiens
ttgaggagctgagga

SEQ ID NO: 42491 - DNA, 15 bp, Homo sapiens
attgaggagctgagg

SEQ ID NO: 42492 - DNA, 15 bp, Homo sapiens
cattgaggagctgag

SEQ ID NO: 42493 - DNA, 15 bp, Homo sapiens
ccattgaggagctga

SEQ ID NO: 42494 - DNA, 15 bp, Homo sapiens
gccattgaggagctg

SEQ ID NO: 42495 - DNA, 15 bp, Homo sapiens
agccattgaggagct

SEQ ID NO: 42496 - DNA, 15 bp, Homo sapiens
aagccattgaggagc

SEQ ID NO: 42497 - DNA, 15 bp, Homo sapiens
aaagccattgaggag

SEQ ID NO: 42498 - DNA, 15 bp, Homo sapiens
caaagccattgagga

SEQ ID NO: 42499 - DNA, 15 bp, Homo sapiens
tcaaagccattgagg

SEQ ID NO: 42500 - DNA, 15 bp, Homo sapiens
ctcaaagccattgag

SEQ ID NO: 42501 - DNA, 15 bp, Homo sapiens
cctcaaagccattga

SEQ ID NO: 42502 - DNA, 15 bp, Homo sapiens
tcctcaaagccattg

SEQ ID NO: 42503 - DNA, 15 bp, Homo sapiens
gtcctcaaagccatt

SEQ ID NO: 42504 - DNA, 15 bp, Homo sapiens
tgtcctcaaagccat

SEQ ID NO: 42505 - DNA, 15 bp, Homo sapiens
atgtcctcaaagcca

SEQ ID NO: 42506 - DNA, 15 bp, Homo sapiens
aatgtcctcaaagcc

SEQ ID NO: 42507 - DNA, 15 bp, Homo sapiens
aaatgtcctcaaagc

SEQ ID NO: 42508 - DNA, 15 bp, Homo sapiens
taaatgtcctcaaag

SEQ ID NO: 42509 - DNA, 15 bp, Homo sapiens
ctaaatgtcctcaaa

SEQ ID NO: 42510 - DNA, 15 bp, Homo sapiens
tctaaatgtcctcaa

SEQ ID NO: 42511 - DNA, 15 bp, Homo sapiens
atctaaatgtcctca

SEQ ID NO: 42512 - DNA, 15 bp, Homo sapiens
aatctaaatgtcctc

SEQ ID NO: 42513 - DNA, 15 bp, Homo sapiens
gaatctaaatgtcct

SEQ ID NO: 42514 - DNA, 15 bp, Homo sapiens
agaatctaaatgtcc

SEQ ID NO: 42515 - DNA, 15 bp, Homo sapiens
aagaatctaaatgtc

SEQ ID NO: 42516 - DNA, 15 bp, Homo sapiens
gaagaatctaaatgt

SEQ ID NO: 42517 - DNA, 15 bp, Homo sapiens
agaagaatctaaatg

SEQ ID NO: 42518 - DNA, 15 bp, Homo sapiens
aagaagaatctaaat

SEQ ID NO: 42519 - DNA, 15 bp, Homo sapiens
taagaagaatctaaa

SEQ ID NO: 42520 - DNA, 15 bp, Homo sapiens
gtaagaagaatctaa

SEQ ID NO: 42521 - DNA, 15 bp, Homo sapiens
ggtaagaagaatcta

SEQ ID NO: 42522 - DNA, 15 bp, Homo sapiens
tggtaagaagaatct

SEQ ID NO: 42523 - DNA, 15 bp, Homo sapiens
atggtaagaagaatc

SEQ ID NO: 42524 - DNA, 15 bp, Homo sapiens
gatggtaagaagaat

SEQ ID NO: 42525 - DNA, 15 bp, Homo sapiens
agatggtaagaagaa

SEQ ID NO: 42526 - DNA, 15 bp, Homo sapiens
aagatggtaagaaga

SEQ ID NO: 42527 - DNA, 15 bp, Homo sapiens
caagatggtaagaag

SEQ ID NO: 42528 - DNA, 15 bp, Homo sapiens
ccaagatggtaagaa

SEQ ID NO: 42529 - DNA, 15 bp, Homo sapiens
gccaagatggtaaga

SEQ ID NO: 42530 - DNA, 15 bp, Homo sapiens
ggccaagatggtaag

SEQ ID NO: 42531 - DNA, 15 bp, Homo sapiens
aggccaagatggtaa

SEQ ID NO: 42532 - DNA, 15 bp, Homo sapiens
caggccaagatggta

SEQ ID NO: 42533 - DNA, 15 bp, Homo sapiens
tcaggccaagatggt

SEQ ID NO: 42534 - DNA, 15 bp, Homo sapiens
ttcaggccaagatgg

SEQ ID NO: 42535 - DNA, 15 bp, Homo sapiens
attcaggccaagatg

SEQ ID NO: 42536 - DNA, 15 bp, Homo sapiens
cattcaggccaagat

SEQ ID NO: 42537 - DNA, 15 bp, Homo sapiens
acattcaggccaaga

SEQ ID NO: 42538 - DNA, 15 bp, Homo sapiens
cacattcaggccaag

SEQ ID NO: 42539 - DNA, 15 bp, Homo sapiens
ccacattcaggccaa

SEQ ID NO: 42540 - DNA, 15 bp, Homo sapiens
tccacattcaggcca

SEQ ID NO: 42541 - DNA, 15 bp, Homo sapiens
ttccacattcaggcc

SEQ ID NO: 42542 - DNA, 15 bp, Homo sapiens
tttccacattcaggc

SEQ ID NO: 42543 - DNA, 15 bp, Homo sapiens
ttttccacattcagg

SEQ ID NO: 42544 - DNA, 15 bp, Homo sapiens
tttttccacattcag

SEQ ID NO: 42545 - DNA, 15 bp, Homo sapiens
ctttttccacattca

SEQ ID NO: 42546 - DNA, 15 bp, Homo sapiens
gctttttccacattc

SEQ ID NO: 42547 - DNA, 15 bp, Homo sapiens
agctttttccacatt

SEQ ID NO: 42548 - DNA, 15 bp, Homo sapiens
gagctttttccacat

SEQ ID NO: 42549 - DNA, 15 bp, Homo sapiens
agagctttttccaca

SEQ ID NO: 42550 - DNA, 15 bp, Homo sapiens
aagagctttttccac

SEQ ID NO: 42551 - DNA, 15 bp, Homo sapiens
aaagagctttttcca

SEQ ID NO: 42552 - DNA, 15 bp, Homo sapiens
aaaagagctttttcc

SEQ ID NO: 42553 - DNA, 15 bp, Homo sapiens
aaaaagagctttttc

SEQ ID NO: 42554 - DNA, 15 bp, Homo sapiens
gaaaaagagcttttt

SEQ ID NO: 42555 - DNA, 15 bp, Homo sapiens
ggaaaaagagctttt

SEQ ID NO: 42556 - DNA, 15 bp, Homo sapiens
aggaaaaagagcttt

SEQ ID NO: 42557 - DNA, 15 bp, Homo sapiens
aaggaaaaagagctt

SEQ ID NO: 42558 - DNA, 15 bp, Homo sapiens
taaggaaaaagagct

SEQ ID NO: 42559 - DNA, 15 bp, Homo sapiens
ttaaggaaaaagagc

SEQ ID NO: 42560 - DNA, 15 bp, Homo sapiens
attaaggaaaaagag

SEQ ID NO: 42561 - DNA, 15 bp, Homo sapiens
aattaaggaaaaaga

SEQ ID NO: 42562 - DNA, 15 bp, Homo sapiens
taattaaggaaaaag

SEQ ID NO: 42563 - DNA, 15 bp, Homo sapiens
ttaattaaggaaaaa

SEQ ID NO: 42564 - DNA, 15 bp, Homo sapiens
cttaattaaggaaaa

SEQ ID NO: 42565 - DNA, 15 bp, Homo sapiens
acttaattaaggaaa

SEQ ID NO: 42566 - DNA, 15 bp, Homo sapiens
gacttaattaaggaa

SEQ ID NO: 42567 - DNA, 15 bp, Homo sapiens
agacttaattaagga

SEQ ID NO: 42568 - DNA, 15 bp, Homo sapiens
tagacttaattaagg

SEQ ID NO: 42569 - DNA, 15 bp, Homo sapiens
ctagacttaattaag

SEQ ID NO: 42570 - DNA, 15 bp, Homo sapiens
tctagacttaattaa

SEQ ID NO: 42571 - DNA, 15 bp, Homo sapiens
ttctagacttaatta

SEQ ID NO: 42572 - DNA, 15 bp, Homo sapiens
tttctagacttaatt

SEQ ID NO: 42573 - DNA, 15 bp, Homo sapiens
ttttctagacttaat

SEQ ID NO: 42574 - DNA, 15 bp, Homo sapiens
cttttctagacttaa

SEQ ID NO: 42575 - DNA, 15 bp, Homo sapiens
ccttttctagactta

SEQ ID NO: 42576 - DNA, 15 bp, Homo sapiens
accttttctagactt

SEQ ID NO: 42577 - DNA, 15 bp, Homo sapiens
gaccttttctagact

SEQ ID NO: 42578 - DNA, 15 bp, Homo sapiens
tgaccttttctagac

SEQ ID NO: 42579 - DNA, 15 bp, Homo sapiens
ttgaccttttctaga

SEQ ID NO: 42580 - DNA, 15 bp, Homo sapiens
gttgaccttttctag

SEQ ID NO: 42581 - DNA, 15 bp, Homo sapiens
tgttgaccttttcta

SEQ ID NO: 42582 - DNA, 15 bp, Homo sapiens
atgttgaccttttct

SEQ ID NO: 42583 - DNA, 15 bp, Homo sapiens
catgttgaccttttc

SEQ ID NO: 42584 - DNA, 15 bp, Homo sapiens
acatgttgacctttt

SEQ ID NO: 42585 - DNA, 15 bp, Homo sapiens
aacatgttgaccttt

SEQ ID NO: 42586 - DNA, 15 bp, Homo sapiens
aaacatgttgacctt

SEQ ID NO: 42587 - DNA, 15 bp, Homo sapiens
gaaacatgttgacct

SEQ ID NO: 42588 - DNA, 15 bp, Homo sapiens
tgaaacatgttgacc

SEQ ID NO: 42589 - DNA, 15 bp, Homo sapiens
ttgaaacatgttgac

SEQ ID NO: 42590 - DNA, 15 bp, Homo sapiens
tttgaaacatgttga

SEQ ID NO: 42591 - DNA, 15 bp, Homo sapiens
ttttgaaacatgttg

SEQ ID NO: 42592 - DNA, 15 bp, Homo sapiens
tttttgaaacatgtt

SEQ ID NO: 42593 - DNA, 15 bp, Homo sapiens
ttttttgaaacatgt

SEQ ID NO: 42594 - DNA, 15 bp, Homo sapiens
attttttgaaacatg

SEQ ID NO: 42595 - DNA, 15 bp, Homo sapiens
tattttttgaaacat

SEQ ID NO: 42596 - DNA, 15 bp, Homo sapiens
ctattttttgaaaca

SEQ ID NO: 42597 - DNA, 15 bp, Homo sapiens
gctattttttgaaac

SEQ ID NO: 42598 - DNA, 15 bp, Homo sapiens
tgctattttttgaaa

SEQ ID NO: 42599 - DNA, 15 bp, Homo sapiens
atgctattttttgaa

SEQ ID NO: 42600 - DNA, 15 bp, Homo sapiens
aatgctattttttga

SEQ ID NO: 42601 - DNA, 15 bp, Homo sapiens
aaatgctattttttg

SEQ ID NO: 42602 - DNA, 15 bp, Homo sapiens
caaatgctatttttt

SEQ ID NO: 42603 - DNA, 15 bp, Homo sapiens
ccaaatgctattttt

SEQ ID NO: 42604 - DNA, 15 bp, Homo sapiens
cccaaatgctatttt

SEQ ID NO: 42605 - DNA, 15 bp, Homo sapiens
acccaaatgctattt

SEQ ID NO: 42606 - DNA, 15 bp, Homo sapiens
cacccaaatgctatt

SEQ ID NO: 42607 - DNA, 15 bp, Homo sapiens
ccacccaaatgctat

SEQ ID NO: 42608 - DNA, 15 bp, Homo sapiens
tccacccaaatgcta

SEQ ID NO: 42609 - DNA, 15 bp, Homo sapiens
ttccacccaaatgct

SEQ ID NO: 42610 - DNA, 15 bp, Homo sapiens
tttccacccaaatgc

SEQ ID NO: 42611 - DNA, 15 bp, Homo sapiens
atttccacccaaatg

SEQ ID NO: 42612 - DNA, 15 bp, Homo sapiens
aatttccacccaaat

SEQ ID NO: 42613 - DNA, 15 bp, Homo sapiens
taatttccacccaaa

SEQ ID NO: 42614 - DNA, 15 bp, Homo sapiens
ttaatttccacccaa

SEQ ID NO: 42615 - DNA, 15 bp, Homo sapiens
tttaatttccaccca

SEQ ID NO: 42616 - DNA, 15 bp, Homo sapiens
atttaatttccaccc

SEQ ID NO: 42617 - DNA, 15 bp, Homo sapiens
catttaatttccacc

SEQ ID NO: 42618 - DNA, 15 bp, Homo sapiens
ccatttaatttccac

SEQ ID NO: 42619 - DNA, 15 bp, Homo sapiens
tccatttaatttcca

SEQ ID NO: 42620 - DNA, 15 bp, Homo sapiens
ttccatttaatttcc

SEQ ID NO: 42621 - DNA, 15 bp, Homo sapiens
tttccatttaatttc

SEQ ID NO: 42622 - DNA, 15 bp, Homo sapiens
ctttccatttaattt

SEQ ID NO: 42623 - DNA, 15 bp, Homo sapiens
actttccatttaatt

SEQ ID NO: 42624 - DNA, 15 bp, Homo sapiens
cactttccatttaat

SEQ ID NO: 42625 - DNA, 15 bp, Homo sapiens
ccactttccatttaa

SEQ ID NO: 42626 - DNA, 15 bp, Homo sapiens
tccactttccattta

SEQ ID NO: 42627 - DNA, 15 bp, Homo sapiens
ttccactttccattt

SEQ ID NO: 42628 - DNA, 15 bp, Homo sapiens
gttccactttccatt

SEQ ID NO: 42629 - DNA, 15 bp, Homo sapiens
tgttccactttccat

SEQ ID NO: 42630 - DNA, 15 bp, Homo sapiens
ttgttccactttcca

SEQ ID NO: 42631 - DNA, 15 bp, Homo sapiens
tttgttccactttcc

SEQ ID NO: 42632 - DNA, 15 bp, Homo sapiens
atttgttccactttc

SEQ ID NO: 42633 - DNA, 15 bp, Homo sapiens
gatttgttccacttt

SEQ ID NO: 42634 - DNA, 15 bp, Homo sapiens
agatttgttccactt

SEQ ID NO: 42635 - DNA, 15 bp, Homo sapiens
gagatttgttccact

SEQ ID NO: 42636 - DNA, 15 bp, Homo sapiens
agagatttgttccac

SEQ ID NO: 42637 - DNA, 15 bp, Homo sapiens
cagagatttgttcca

SEQ ID NO: 42638 - DNA, 15 bp, Homo sapiens
gcagagatttgttcc

SEQ ID NO: 42639 - DNA, 15 bp, Homo sapiens
tgcagagatttgttc

SEQ ID NO: 42640 - DNA, 15 bp, Homo sapiens
ctgcagagatttgtt

SEQ ID NO: 42641 - DNA, 15 bp, Homo sapiens
tctgcagagatttgt

SEQ ID NO: 42642 - DNA, 15 bp, Homo sapiens
ctctgcagagatttg

SEQ ID NO: 42643 - DNA, 15 bp, Homo sapiens
tctctgcagagattt

SEQ ID NO: 42644 - DNA, 15 bp, Homo sapiens
ttctctgcagagatt

SEQ ID NO: 42645 - DNA, 15 bp, Homo sapiens
tttctctgcagagat

SEQ ID NO: 42646 - DNA, 15 bp, Homo sapiens
ttttctctgcagaga

SEQ ID NO: 42647 - DNA, 15 bp, Homo sapiens
attttctctgcagag

SEQ ID NO: 42648 - DNA, 15 bp, Homo sapiens
cattttctctgcaga

SEQ ID NO: 42649 - DNA, 15 bp, Homo sapiens
gcattttctctgcag

SEQ ID NO: 42650 - DNA, 15 bp, Homo sapiens
tgcattttctctgca

SEQ ID NO: 42651 - DNA, 15 bp, Homo sapiens
ttgcattttctctgc

SEQ ID NO: 42652 - DNA, 15 bp, Homo sapiens
tttgcattttctctg

SEQ ID NO: 42653 - DNA, 15 bp, Homo sapiens
ttttgcattttctct

SEQ ID NO: 42654 - DNA, 15 bp, Homo sapiens
gttttgcattttctc

SEQ ID NO: 42655 - DNA, 15 bp, Homo sapiens
ggttttgcattttct

SEQ ID NO: 42656 - DNA, 15 bp, Homo sapiens
gggttttgcattttc

SEQ ID NO: 42657 - DNA, 15 bp, Homo sapiens
agggttttgcatttt

SEQ ID NO: 42658 - DNA, 15 bp, Homo sapiens
tagggttttgcattt

SEQ ID NO: 42659 - DNA, 15 bp, Homo sapiens
ctagggttttgcatt

SEQ ID NO: 42660 - DNA, 15 bp, Homo sapiens
tctagggttttgcat

SEQ ID NO: 42661 - DNA, 15 bp, Homo sapiens
ttctagggttttgca

SEQ ID NO: 42662 - DNA, 15 bp, Homo sapiens
gttctagggttttgc

SEQ ID NO: 42663 - DNA, 15 bp, Homo sapiens
tgttctagggttttg

SEQ ID NO: 42664 - DNA, 15 bp, Homo sapiens
gtgttctagggtttt

SEQ ID NO: 42665 - DNA, 15 bp, Homo sapiens
tgtgttctagggttt

SEQ ID NO: 42666 - DNA, 15 bp, Homo sapiens
ctgtgttctagggtt

SEQ ID NO: 42667 - DNA, 15 bp, Homo sapiens
tctgtgttctagggt

SEQ ID NO: 42668 - DNA, 15 bp, Homo sapiens
gtctgtgttctaggg

SEQ ID NO: 42669 - DNA, 15 bp, Homo sapiens
tgtctgtgttctagg

SEQ ID NO: 42670 - DNA, 15 bp, Homo sapiens
ctgtctgtgttctag

SEQ ID NO: 42671 - DNA, 15 bp, Homo sapiens
tctgtctgtgttcta

SEQ ID NO: 42672 - DNA, 15 bp, Homo sapiens
ctctgtctgtgttct

SEQ ID NO: 42673 - DNA, 15 bp, Homo sapiens
gctctgtctgtgttc

SEQ ID NO: 42674 - DNA, 15 bp, Homo sapiens
ggctctgtctgtgtt

SEQ ID NO: 42675 - DNA, 15 bp, Homo sapiens
tggctctgtctgtgt

SEQ ID NO: 42676 - DNA, 15 bp, Homo sapiens
atggctctgtctgtg

SEQ ID NO: 42677 - DNA, 15 bp, Homo sapiens
gatggctctgtctgt

SEQ ID NO: 42678 - DNA, 15 bp, Homo sapiens
agatggctctgtctg

SEQ ID NO: 42679 - DNA, 15 bp, Homo sapiens
gagatggctctgtct

SEQ ID NO: 42680 - DNA, 15 bp, Homo sapiens
agagatggctctgtc

SEQ ID NO: 42681 - DNA, 15 bp, Homo sapiens
cagagatggctctgt

SEQ ID NO: 42682 - DNA, 15 bp, Homo sapiens
gcagagatggctctg

SEQ ID NO: 42683 - DNA, 15 bp, Homo sapiens
ggcagagatggctct

SEQ ID NO: 42684 - DNA, 15 bp, Homo sapiens
aggcagagatggctc

SEQ ID NO: 42685 - DNA, 15 bp, Homo sapiens
gaggcagagatggct

SEQ ID NO: 42686 - DNA, 15 bp, Homo sapiens
agaggcagagatggc

SEQ ID NO: 42687 - DNA, 15 bp, Homo sapiens
aagaggcagagatgg

SEQ ID NO: 42688 - DNA, 15 bp, Homo sapiens
caagaggcagagatg

SEQ ID NO: 42689 - DNA, 15 bp, Homo sapiens
ccaagaggcagagat

SEQ ID NO: 42690 - DNA, 15 bp, Homo sapiens
accaagaggcagaga

SEQ ID NO: 42691 - DNA, 15 bp, Homo sapiens
gaccaagaggcagag

SEQ ID NO: 42692 - DNA, 15 bp, Homo sapiens
agaccaagaggcaga

SEQ ID NO: 42693 - DNA, 15 bp, Homo sapiens
cagaccaagaggcag

SEQ ID NO: 42694 - DNA, 15 bp, Homo sapiens
ccagaccaagaggca

SEQ ID NO: 42695 - DNA, 15 bp, Homo sapiens
accagaccaagaggc

SEQ ID NO: 42696 - DNA, 15 bp, Homo sapiens
caccagaccaagagg

SEQ ID NO: 42697 - DNA, 15 bp, Homo sapiens
ccaccagaccaagag

SEQ ID NO: 42698 - DNA, 15 bp, Homo sapiens
cccaccagaccaaga

SEQ ID NO: 42699 - DNA, 15 bp, Homo sapiens
tcccaccagaccaag

SEQ ID NO: 42700 - DNA, 15 bp, Homo sapiens
atcccaccagaccaa

SEQ ID NO: 42701 - DNA, 15 bp, Homo sapiens
gatcccaccagacca

SEQ ID NO: 42702 - DNA, 15 bp, Homo sapiens
agatcccaccagacc

SEQ ID NO: 42703 - DNA, 15 bp, Homo sapiens
gagatcccaccagac

SEQ ID NO: 42704 - DNA, 15 bp, Homo sapiens
agagatcccaccaga

SEQ ID NO: 42705 - DNA, 15 bp, Homo sapiens
tagagatcccaccag

SEQ ID NO: 42706 - DNA, 15 bp, Homo sapiens
atagagatcccacca

SEQ ID NO: 42707 - DNA, 15 bp, Homo sapiens
aatagagatcccacc

SEQ ID NO: 42708 - DNA, 15 bp, Homo sapiens
gaatagagatcccac

SEQ ID NO: 42709 - DNA, 15 bp, Homo sapiens
agaatagagatccca

SEQ ID NO: 42710 - DNA, 15 bp, Homo sapiens
aagaatagagatccc

SEQ ID NO: 42711 - DNA, 15 bp, Homo sapiens
gaagaatagagatcc

SEQ ID NO: 42712 - DNA, 15 bp, Homo sapiens
agaagaatagagatc

SEQ ID NO: 42713 - DNA, 15 bp, Homo sapiens
gagaagaatagagat

SEQ ID NO: 42714 - DNA, 15 bp, Homo sapiens
tgagaagaatagaga

SEQ ID NO: 42715 - DNA, 15 bp, Homo sapiens
ttgagaagaatagag

SEQ ID NO: 42716 - DNA, 15 bp, Homo sapiens
tttgagaagaataga

SEQ ID NO: 42717 - DNA, 15 bp, Homo sapiens
gtttgagaagaatag

SEQ ID NO: 42718 - DNA, 15 bp, Homo sapiens
ggtttgagaagaata

SEQ ID NO: 42719 - DNA, 15 bp, Homo sapiens
gggtttgagaagaat

SEQ ID NO: 42720 - DNA, 15 bp, Homo sapiens
tgggtttgagaagaa

SEQ ID NO: 42721 - DNA, 15 bp, Homo sapiens
atgggtttgagaaga

SEQ ID NO: 42722 - DNA, 15 bp, Homo sapiens
aatgggtttgagaag

SEQ ID NO: 42723 - DNA, 15 bp, Homo sapiens
aaatgggtttgagaa

SEQ ID NO: 42724 - DNA, 15 bp, Homo sapiens
gaaatgggtttgaga

SEQ ID NO: 42725 - DNA, 15 bp, Homo sapiens
ggaaatgggtttgag

SEQ ID NO: 42726 - DNA, 15 bp, Homo sapiens
aggaaatgggtttga

SEQ ID NO: 42727 - DNA, 15 bp, Homo sapiens
taggaaatgggtttg

SEQ ID NO: 42728 - DNA, 15 bp, Homo sapiens
ttaggaaatgggttt

SEQ ID NO: 42729 - DNA, 15 bp, Homo sapiens
gttaggaaatgggtt

SEQ ID NO: 42730 - DNA, 15 bp, Homo sapiens
ggttaggaaatgggt

SEQ ID NO: 42731 - DNA, 15 bp, Homo sapiens
aggttaggaaatggg

SEQ ID NO: 42732 - DNA, 15 bp, Homo sapiens
gaggttaggaaatgg

SEQ ID NO: 42733 - DNA, 15 bp, Homo sapiens
agaggttaggaaatg

SEQ ID NO: 42734 - DNA, 15 bp, Homo sapiens
cagaggttaggaaat

SEQ ID NO: 42735 - DNA, 15 bp, Homo sapiens
acagaggttaggaaa

SEQ ID NO: 42736 - DNA, 15 bp, Homo sapiens
cacagaggttaggaa

SEQ ID NO: 42737 - DNA, 15 bp, Homo sapiens
ccacagaggttagga

SEQ ID NO: 42738 - DNA, 15 bp, Homo sapiens
cccacagaggttagg

SEQ ID NO: 42739 - DNA, 15 bp, Homo sapiens
acccacagaggttag

SEQ ID NO: 42740 - DNA, 15 bp, Homo sapiens
cacccacagaggtta

SEQ ID NO: 42741 - DNA, 15 bp, Homo sapiens
acacccacagaggtt

SEQ ID NO: 42742 - DNA, 15 bp, Homo sapiens
cacacccacagaggt

SEQ ID NO: 42743 - DNA, 15 bp, Homo sapiens
ccacacccacagagg

SEQ ID NO: 42744 - DNA, 15 bp, Homo sapiens
cccacacccacagag

SEQ ID NO: 42745 - DNA, 15 bp, Homo sapiens
gcccacacccacaga

SEQ ID NO: 42746 - DNA, 15 bp, Homo sapiens
agcccacacccacag

SEQ ID NO: 42747 - DNA, 15 bp, Homo sapiens
gagcccacacccaca

SEQ ID NO: 42748 - DNA, 15 bp, Homo sapiens
ggagcccacacccac

SEQ ID NO: 42749 - DNA, 15 bp, Homo sapiens
tggagcccacaccca

SEQ ID NO: 42750 - DNA, 15 bp, Homo sapiens
ttggagcccacaccc

SEQ ID NO: 42751 - DNA, 15 bp, Homo sapiens
cttggagcccacacc

SEQ ID NO: 42752 - DNA, 15 bp, Homo sapiens
acttggagcccacac

SEQ ID NO: 42753 - DNA, 15 bp, Homo sapiens
gacttggagcccaca

SEQ ID NO: 42754 - DNA, 15 bp, Homo sapiens
ggacttggagcccac

SEQ ID NO: 42755 - DNA, 15 bp, Homo sapiens
gggacttggagccca

SEQ ID NO: 42756 - DNA, 15 bp, Homo sapiens
tgggacttggagccc

SEQ ID NO: 42757 - DNA, 15 bp, Homo sapiens
ttgggacttggagcc

SEQ ID NO: 42758 - DNA, 15 bp, Homo sapiens
cttgggacttggagc

SEQ ID NO: 42759 - DNA, 15 bp, Homo sapiens
gcttgggacttggag

SEQ ID NO: 42760 - DNA, 15 bp, Homo sapiens
ggcttgggacttgga

SEQ ID NO: 42761 - DNA, 15 bp, Homo sapiens
aggcttgggacttgg

SEQ ID NO: 42762 - DNA, 15 bp, Homo sapiens
aaggcttgggacttg

SEQ ID NO: 42763 - DNA, 15 bp, Homo sapiens
taaggcttgggactt

SEQ ID NO: 42764 - DNA, 15 bp, Homo sapiens
ataaggcttgggact

SEQ ID NO: 42765 - DNA, 15 bp, Homo sapiens
gataaggcttgggac

SEQ ID NO: 42766 - DNA, 15 bp, Homo sapiens
tgataaggcttggga

SEQ ID NO: 42767 - DNA, 15 bp, Homo sapiens
ctgataaggcttggg

SEQ ID NO: 42768 - DNA, 15 bp, Homo sapiens
cctgataaggcttgg

SEQ ID NO: 42769 - DNA, 15 bp, Homo sapiens
ccctgataaggcttg

SEQ ID NO: 42770 - DNA, 15 bp, Homo sapiens
accctgataaggctt

SEQ ID NO: 42771 - DNA, 15 bp, Homo sapiens
taccctgataaggct

SEQ ID NO: 42772 - DNA, 15 bp, Homo sapiens
ttaccctgataaggc

SEQ ID NO: 42773 - DNA, 15 bp, Homo sapiens
gttaccctgataagg

SEQ ID NO: 42774 - DNA, 15 bp, Homo sapiens
agttaccctgataag

SEQ ID NO: 42775 - DNA, 15 bp, Homo sapiens
aagttaccctgataa

SEQ ID NO: 42776 - DNA, 15 bp, Homo sapiens
aaagttaccctgata

SEQ ID NO: 42777 - DNA, 15 bp, Homo sapiens
aaaagttaccctgat

SEQ ID NO: 42778 - DNA, 15 bp, Homo sapiens
aaaaagttaccctga

SEQ ID NO: 42779 - DNA, 15 bp, Homo sapiens
aaaaaagttaccctg

SEQ ID NO: 42780 - DNA, 15 bp, Homo sapiens
aaaaaaagttaccct

SEQ ID NO: 42781 - DNA, 15 bp, Homo sapiens
taaaaaaagttaccc

SEQ ID NO: 42782 - DNA, 15 bp, Homo sapiens
ttaaaaaaagttacc

SEQ ID NO: 42783 - DNA, 15 bp, Homo sapiens
cttaaaaaaagttac

SEQ ID NO: 42784 - DNA, 15 bp, Homo sapiens
acttaaaaaaagtta

SEQ ID NO: 42785 - DNA, 15 bp, Homo sapiens
tacttaaaaaaagtt

SEQ ID NO: 42786 - DNA, 15 bp, Homo sapiens
atacttaaaaaaagt

SEQ ID NO: 42787 - DNA, 15 bp, Homo sapiens
tatacttaaaaaaag

SEQ ID NO: 42788 - DNA, 15 bp, Homo sapiens
ttatacttaaaaaaa

SEQ ID NO: 42789 - DNA, 15 bp, Homo sapiens
tttatacttaaaaaa

SEQ ID NO: 42790 - DNA, 15 bp, Homo sapiens
atttatacttaaaaa

SEQ ID NO: 42791 - DNA, 15 bp, Homo sapiens
aatttatacttaaaa

SEQ ID NO: 42792 - DNA, 15 bp, Homo sapiens
aaatttatacttaaa

SEQ ID NO: 42793 - DNA, 15 bp, Homo sapiens
caaatttatacttaa

SEQ ID NO: 42794 - DNA, 15 bp, Homo sapiens
tcaaatttatactta

SEQ ID NO: 42795 - DNA, 15 bp, Homo sapiens
atcaaatttatactt

SEQ ID NO: 42796 - DNA, 15 bp, Homo sapiens
gatcaaatttatact

SEQ ID NO: 42797 - DNA, 15 bp, Homo sapiens
tgatcaaatttatac

SEQ ID NO: 42798 - DNA, 15 bp, Homo sapiens
atgatcaaatttata

SEQ ID NO: 42799 - DNA, 15 bp, Homo sapiens
tatgatcaaatttat

SEQ ID NO: 42800 - DNA, 15 bp, Homo sapiens
atatgatcaaattta

SEQ ID NO: 42801 - DNA, 15 bp, Homo sapiens
gatatgatcaaattt

SEQ ID NO: 42802 - DNA, 15 bp, Homo sapiens
ggatatgatcaaatt

SEQ ID NO: 42803 - DNA, 15 bp, Homo sapiens
aggatatgatcaaat

SEQ ID NO: 42804 - DNA, 15 bp, Homo sapiens
aaggatatgatcaaa

SEQ ID NO: 42805 - DNA, 15 bp, Homo sapiens
aaaggatatgatcaa

SEQ ID NO: 42806 - DNA, 15 bp, Homo sapiens
gaaaggatatgatca

SEQ ID NO: 42807 - DNA, 15 bp, Homo sapiens
agaaaggatatgatc

SEQ ID NO: 42808 - DNA, 15 bp, Homo sapiens
aagaaaggatatgat

SEQ ID NO: 42809 - DNA, 15 bp, Homo sapiens
caagaaaggatatga

SEQ ID NO: 42810 - DNA, 15 bp, Homo sapiens
gcaagaaaggatatg

SEQ ID NO: 42811 - DNA, 15 bp, Homo sapiens
ggcaagaaaggatat

SEQ ID NO: 42812 - DNA, 15 bp, Homo sapiens
aggcaagaaaggata

SEQ ID NO: 42813 - DNA, 15 bp, Homo sapiens
taggcaagaaaggat

SEQ ID NO: 42814 - DNA, 15 bp, Homo sapiens
ttaggcaagaaagga

SEQ ID NO: 42815 - DNA, 15 bp, Homo sapiens
tttaggcaagaaagg

SEQ ID NO: 42816 - DNA, 15 bp, Homo sapiens
ttttaggcaagaaag

SEQ ID NO: 42817 - DNA, 15 bp, Homo sapiens
cttttaggcaagaaa

SEQ ID NO: 42818 - DNA, 15 bp, Homo sapiens
tcttttaggcaagaa

SEQ ID NO: 42819 - DNA, 15 bp, Homo sapiens
gtcttttaggcaaga

SEQ ID NO: 42820 - DNA, 15 bp, Homo sapiens
agtcttttaggcaag

SEQ ID NO: 42821 - DNA, 15 bp, Homo sapiens
aagtcttttaggcaa

SEQ ID NO: 42822 - DNA, 15 bp, Homo sapiens
gaagtcttttaggca

SEQ ID NO: 42823 - DNA, 15 bp, Homo sapiens
tgaagtcttttaggc

SEQ ID NO: 42824 - DNA, 15 bp, Homo sapiens
atgaagtcttttagg

SEQ ID NO: 42825 - DNA, 15 bp, Homo sapiens
aatgaagtcttttag

SEQ ID NO: 42826 - DNA, 15 bp, Homo sapiens
taatgaagtctttta

SEQ ID NO: 42827 - DNA, 15 bp, Homo sapiens
ctaatgaagtctttt

SEQ ID NO: 42828 - DNA, 15 bp, Homo sapiens
gctaatgaagtcttt

SEQ ID NO: 42829 - DNA, 15 bp, Homo sapiens
agctaatgaagtctt

SEQ ID NO: 42830 - DNA, 15 bp, Homo sapiens
aagctaatgaagtct

SEQ ID NO: 42831 - DNA, 15 bp, Homo sapiens
gaagctaatgaagtc

SEQ ID NO: 42832 - DNA, 15 bp, Homo sapiens
ggaagctaatgaagt

SEQ ID NO: 42833 - DNA, 15 bp, Homo sapiens
gggaagctaatgaag

SEQ ID NO: 42834 - DNA, 15 bp, Homo sapiens
tgggaagctaatgaa

SEQ ID NO: 42835 - DNA, 15 bp, Homo sapiens
atgggaagctaatga

SEQ ID NO: 42836 - DNA, 15 bp, Homo sapiens
catgggaagctaatg

SEQ ID NO: 42837 - DNA, 15 bp, Homo sapiens
ccatgggaagctaat

SEQ ID NO: 42838 - DNA, 15 bp, Homo sapiens
gccatgggaagctaa

SEQ ID NO: 42839 - DNA, 15 bp, Homo sapiens
ggccatgggaagcta

SEQ ID NO: 42840 - DNA, 15 bp, Homo sapiens
aggccatgggaagct

SEQ ID NO: 42841 - DNA, 15 bp, Homo sapiens
aaggccatgggaagc

SEQ ID NO: 42842 - DNA, 15 bp, Homo sapiens
aaaggccatgggaag

SEQ ID NO: 42843 - DNA, 15 bp, Homo sapiens
taaaggccatgggaa

SEQ ID NO: 42844 - DNA, 15 bp, Homo sapiens
ctaaaggccatggga

SEQ ID NO: 42845 - DNA, 15 bp, Homo sapiens
cctaaaggccatggg

SEQ ID NO: 42846 - DNA, 15 bp, Homo sapiens
tcctaaaggccatgg

SEQ ID NO: 42847 - DNA, 15 bp, Homo sapiens
atcctaaaggccatg

SEQ ID NO: 42848 - DNA, 15 bp, Homo sapiens
tatcctaaaggccat

SEQ ID NO: 42849 - DNA, 15 bp, Homo sapiens
ttatcctaaaggcca

SEQ ID NO: 42850 - DNA, 15 bp, Homo sapiens
cttatcctaaaggcc

SEQ ID NO: 42851 - DNA, 15 bp, Homo sapiens
ccttatcctaaaggc

SEQ ID NO: 42852 - DNA, 15 bp, Homo sapiens
accttatcctaaagg

SEQ ID NO: 42853 - DNA, 15 bp, Homo sapiens
gaccttatcctaaag

SEQ ID NO: 42854 - DNA, 15 bp, Homo sapiens
ggaccttatcctaaa

SEQ ID NO: 42855 - DNA, 15 bp, Homo sapiens
gggaccttatcctaa

SEQ ID NO: 42856 - DNA, 15 bp, Homo sapiens
tgggaccttatccta

SEQ ID NO: 42857 - DNA, 15 bp, Homo sapiens
ttgggaccttatcct

SEQ ID NO: 42858 - DNA, 15 bp, Homo sapiens
cttgggaccttatcc

SEQ ID NO: 42859 - DNA, 15 bp, Homo sapiens
acttgggaccttatc

SEQ ID NO: 42860 - DNA, 15 bp, Homo sapiens
aacttgggaccttat

SEQ ID NO: 42861 - DNA, 15 bp, Homo sapiens
gaacttgggacctta

SEQ ID NO: 42862 - DNA, 15 bp, Homo sapiens
agaacttgggacctt

SEQ ID NO: 42863 - DNA, 15 bp, Homo sapiens
gagaacttgggacct

SEQ ID NO: 42864 - DNA, 15 bp, Homo sapiens
tgagaacttgggacc

SEQ ID NO: 42865 - DNA, 15 bp, Homo sapiens
ctgagaacttgggac

SEQ ID NO: 42866 - DNA, 15 bp, Homo sapiens
actgagaacttggga

SEQ ID NO: 42867 - DNA, 15 bp, Homo sapiens
cactgagaacttggg

SEQ ID NO: 42868 - DNA, 15 bp, Homo sapiens
ccactgagaacttgg

SEQ ID NO: 42869 - DNA, 15 bp, Homo sapiens
accactgagaacttg

SEQ ID NO: 42870 - DNA, 15 bp, Homo sapiens
taccactgagaactt

SEQ ID NO: 42871 - DNA, 15 bp, Homo sapiens
ttaccactgagaact

SEQ ID NO: 42872 - DNA, 15 bp, Homo sapiens
cttaccactgagaac

SEQ ID NO: 42873 - DNA, 15 bp, Homo sapiens
ccttaccactgagaa

SEQ ID NO: 42874 - DNA, 15 bp, Homo sapiens
tccttaccactgaga

SEQ ID NO: 42875 - DNA, 15 bp, Homo sapiens
atccttaccactgag

SEQ ID NO: 42876 - DNA, 15 bp, Homo sapiens
gatccttaccactga

SEQ ID NO: 42877 - DNA, 15 bp, Homo sapiens
tgatccttaccactg

SEQ ID NO: 42878 - DNA, 15 bp, Homo sapiens
atgatccttaccact

SEQ ID NO: 42879 - DNA, 15 bp, Homo sapiens
catgatccttaccac

SEQ ID NO: 42880 - DNA, 15 bp, Homo sapiens
tcatgatccttacca

SEQ ID NO: 42881 - DNA, 15 bp, Homo sapiens
ctcatgatccttacc

SEQ ID NO: 42882 - DNA, 15 bp, Homo sapiens
cctcatgatccttac

SEQ ID NO: 42883 - DNA, 15 bp, Homo sapiens
gcctcatgatcctta

SEQ ID NO: 42884 - DNA, 15 bp, Homo sapiens
ggcctcatgatcctt

SEQ ID NO: 42885 - DNA, 15 bp, Homo sapiens
gggcctcatgatcct

SEQ ID NO: 42886 - DNA, 15 bp, Homo sapiens
agggcctcatgatcc

SEQ ID NO: 42887 - DNA, 15 bp, Homo sapiens
cagggcctcatgatc

SEQ ID NO: 42888 - DNA, 15 bp, Homo sapiens
tcagggcctcatgat

SEQ ID NO: 42889 - DNA, 15 bp, Homo sapiens
ttcagggcctcatga

SEQ ID NO: 42890 - DNA, 15 bp, Homo sapiens
cttcagggcctcatg

SEQ ID NO: 42891 - DNA, 15 bp, Homo sapiens
ccttcagggcctcat

SEQ ID NO: 42892 - DNA, 15 bp, Homo sapiens
tccttcagggcctca

SEQ ID NO: 42893 - DNA, 15 bp, Homo sapiens
atccttcagggcctc

SEQ ID NO: 42894 - DNA, 15 bp, Homo sapiens
gatccttcagggcct

SEQ ID NO: 42895 - DNA, 15 bp, Homo sapiens
tgatccttcagggcc

SEQ ID NO: 42896 - DNA, 15 bp, Homo sapiens
ttgatccttcagggc

SEQ ID NO: 42897 - DNA, 15 bp, Homo sapiens
gttgatccttcaggg

SEQ ID NO: 42898 - DNA, 15 bp, Homo sapiens
ggttgatccttcagg

SEQ ID NO: 42899 - DNA, 15 bp, Homo sapiens
tggttgatccttcag

SEQ ID NO: 42900 - DNA, 15 bp, Homo sapiens
ctggttgatccttca

SEQ ID NO: 42901 - DNA, 15 bp, Homo sapiens
gctggttgatccttc

SEQ ID NO: 42902 - DNA, 15 bp, Homo sapiens
ggctggttgatcctt

SEQ ID NO: 42903 - DNA, 15 bp, Homo sapiens
tggctggttgatcct

SEQ ID NO: 42904 - DNA, 15 bp, Homo sapiens
gtggctggttgatcc

SEQ ID NO: 42905 - DNA, 15 bp, Homo sapiens
tgtggctggttgatc

SEQ ID NO: 42906 - DNA, 15 bp, Homo sapiens
atgtggctggttgat

SEQ ID NO: 42907 - DNA, 15 bp, Homo sapiens
gatgtggctggttga

SEQ ID NO: 42908 - DNA, 15 bp, Homo sapiens
ggatgtggctggttg

SEQ ID NO: 42909 - DNA, 15 bp, Homo sapiens
aggatgtggctggtt

SEQ ID NO: 42910 - DNA, 15 bp, Homo sapiens
gaggatgtggctggt

SEQ ID NO: 42911 - DNA, 15 bp, Homo sapiens
ggaggatgtggctgg

SEQ ID NO: 42912 - DNA, 15 bp, Homo sapiens
gggaggatgtggctg

SEQ ID NO: 42913 - DNA, 15 bp, Homo sapiens
cgggaggatgtggct

SEQ ID NO: 42914 - DNA, 15 bp, Homo sapiens
tcgggaggatgtggc

SEQ ID NO: 42915 - DNA, 15 bp, Homo sapiens
ctcgggaggatgtgg

SEQ ID NO: 42916 - DNA, 15 bp, Homo sapiens
actcgggaggatgtg

SEQ ID NO: 42917 - DNA, 15 bp, Homo sapiens
aactcgggaggatgt

SEQ ID NO: 42918 - DNA, 15 bp, Homo sapiens
caactcgggaggatg

SEQ ID NO: 42919 - DNA, 15 bp, Homo sapiens
gcaactcgggaggat

SEQ ID NO: 42920 - DNA, 15 bp, Homo sapiens
ggcaactcgggagga

SEQ ID NO: 42921 - DNA, 15 bp, Homo sapiens
gggcaactcgggagg

SEQ ID NO: 42922 - DNA, 15 bp, Homo sapiens
tgggcaactcgggag

SEQ ID NO: 42923 - DNA, 15 bp, Homo sapiens
atgggcaactcggga

SEQ ID NO: 42924 - DNA, 15 bp, Homo sapiens
gatgggcaactcggg

SEQ ID NO: 42925 - DNA, 15 bp, Homo sapiens
ggatgggcaactcgg

SEQ ID NO: 42926 - DNA, 15 bp, Homo sapiens
cggatgggcaactcg

SEQ ID NO: 42927 - DNA, 15 bp, Homo sapiens
gcggatgggcaactc

SEQ ID NO: 42928 - DNA, 15 bp, Homo sapiens
ggcggatgggcaact

SEQ ID NO: 42929 - DNA, 15 bp, Homo sapiens
aggcggatgggcaac

SEQ ID NO: 42930 - DNA, 15 bp, Homo sapiens
gaggcggatgggcaa

SEQ ID NO: 42931 - DNA, 15 bp, Homo sapiens
ggaggcggatgggca

SEQ ID NO: 42932 - DNA, 15 bp, Homo sapiens
gggaggcggatgggc

SEQ ID NO: 42933 - DNA, 15 bp, Homo sapiens
agggaggcggatggg

SEQ ID NO: 42934 - DNA, 15 bp, Homo sapiens
cagggaggcggatgg

SEQ ID NO: 42935 - DNA, 15 bp, Homo sapiens
tcagggaggcggatg

SEQ ID NO: 42936 - DNA, 15 bp, Homo sapiens
ctcagggaggcggat

SEQ ID NO: 42937 - DNA, 15 bp, Homo sapiens
tctcagggaggcgga

SEQ ID NO: 42938 - DNA, 15 bp, Homo sapiens
atctcagggaggcgg

SEQ ID NO: 42939 - DNA, 15 bp, Homo sapiens
aatctcagggaggcg

SEQ ID NO: 42940 - DNA, 15 bp, Homo sapiens
gaatctcagggaggc

SEQ ID NO: 42941 - DNA, 15 bp, Homo sapiens
tgaatctcagggagg

SEQ ID NO: 42942 - DNA, 15 bp, Homo sapiens
gtgaatctcagggag

SEQ ID NO: 42943 - DNA, 15 bp, Homo sapiens
agtgaatctcaggga

SEQ ID NO: 42944 - DNA, 15 bp, Homo sapiens
cagtgaatctcaggg

SEQ ID NO: 42945 - DNA, 15 bp, Homo sapiens
ccagtgaatctcagg

SEQ ID NO: 42946 - DNA, 15 bp, Homo sapiens
cccagtgaatctcag

SEQ ID NO: 42947 - DNA, 15 bp, Homo sapiens
gcccagtgaatctca

SEQ ID NO: 42948 - DNA, 15 bp, Homo sapiens
agcccagtgaatctc

SEQ ID NO: 42949 - DNA, 15 bp, Homo sapiens
gagcccagtgaatct

SEQ ID NO: 42950 - DNA, 15 bp, Homo sapiens
ggagcccagtgaatc

SEQ ID NO: 42951 - DNA, 15 bp, Homo sapiens
aggagcccagtgaat

SEQ ID NO: 42952 - DNA, 15 bp, Homo sapiens
aaggagcccagtgaa

SEQ ID NO: 42953 - DNA, 15 bp, Homo sapiens
gaaggagcccagtga

SEQ ID NO: 42954 - DNA, 15 bp, Homo sapiens
tgaaggagcccagtg

SEQ ID NO: 42955 - DNA, 15 bp, Homo sapiens
ctgaaggagcccagt

SEQ ID NO: 42956 - DNA, 15 bp, Homo sapiens
gctgaaggagcccag

SEQ ID NO: 42957 - DNA, 15 bp, Homo sapiens
ggctgaaggagccca

SEQ ID NO: 42958 - DNA, 15 bp, Homo sapiens
aggctgaaggagccc

SEQ ID NO: 42959 - DNA, 15 bp, Homo sapiens
aaggctgaaggagcc

SEQ ID NO: 42960 - DNA, 15 bp, Homo sapiens
caaggctgaaggagc

SEQ ID NO: 42961 - DNA, 15 bp, Homo sapiens
ccaaggctgaaggag

SEQ ID NO: 42962 - DNA, 15 bp, Homo sapiens
tccaaggctgaagga

SEQ ID NO: 42963 - DNA, 15 bp, Homo sapiens
gtccaaggctgaagg

SEQ ID NO: 42964 - DNA, 15 bp, Homo sapiens
ggtccaaggctgaag

SEQ ID NO: 42965 - DNA, 15 bp, Homo sapiens
gggtccaaggctgaa

SEQ ID NO: 42966 - DNA, 15 bp, Homo sapiens
cgggtccaaggctga

SEQ ID NO: 42967 - DNA, 15 bp, Homo sapiens
ccgggtccaaggctg

SEQ ID NO: 42968 - DNA, 15 bp, Homo sapiens
gccgggtccaaggct

SEQ ID NO: 42969 - DNA, 15 bp, Homo sapiens
agccgggtccaaggc

SEQ ID NO: 42970 - DNA, 15 bp, Homo sapiens
cagccgggtccaagg

SEQ ID NO: 42971 - DNA, 15 bp, Homo sapiens
gcagccgggtccaag

SEQ ID NO: 42972 - DNA, 15 bp, Homo sapiens
ggcagccgggtccaa

SEQ ID NO: 42973 - DNA, 15 bp, Homo sapiens
gggcagccgggtcca

SEQ ID NO: 42974 - DNA, 15 bp, Homo sapiens
agggcagccgggtcc

SEQ ID NO: 42975 - DNA, 15 bp, Homo sapiens
cagggcagccgggtc

SEQ ID NO: 42976 - DNA, 15 bp, Homo sapiens
acagggcagccgggt

SEQ ID NO: 42977 - DNA, 15 bp, Homo sapiens
gacagggcagccggg

SEQ ID NO: 42978 - DNA, 15 bp, Homo sapiens
agacagggcagccgg

SEQ ID NO: 42979 - DNA, 15 bp, Homo sapiens
gagacagggcagccg

SEQ ID NO: 42980 - DNA, 15 bp, Homo sapiens
agagacagggcagcc

SEQ ID NO: 42981 - DNA, 15 bp, Homo sapiens
aagagacagggcagc

SEQ ID NO: 42982 - DNA, 15 bp, Homo sapiens
caagagacagggcag

SEQ ID NO: 42983 - DNA, 15 bp, Homo sapiens
gcaagagacagggca

SEQ ID NO: 42984 - DNA, 15 bp, Homo sapiens
tgcaagagacagggc

SEQ ID NO: 42985 - DNA, 15 bp, Homo sapiens
atgcaagagacaggg

SEQ ID NO: 42986 - DNA, 15 bp, Homo sapiens
gatgcaagagacagg

SEQ ID NO: 42987 - DNA, 15 bp, Homo sapiens
agatgcaagagacag

SEQ ID NO: 42988 - DNA, 15 bp, Homo sapiens
cagatgcaagagaca

SEQ ID NO: 42989 - DNA, 15 bp, Homo sapiens
ccagatgcaagagac

SEQ ID NO: 42990 - DNA, 15 bp, Homo sapiens
cccagatgcaagaga

SEQ ID NO: 42991 - DNA, 15 bp, Homo sapiens
gcccagatgcaagag

SEQ ID NO: 42992 - DNA, 15 bp, Homo sapiens
ggcccagatgcaaga

SEQ ID NO: 42993 - DNA, 15 bp, Homo sapiens
aggcccagatgcaag

SEQ ID NO: 42994 - DNA, 15 bp, Homo sapiens
aaggcccagatgcaa

SEQ ID NO: 42995 - DNA, 15 bp, Homo sapiens
aaaggcccagatgca

SEQ ID NO: 42996 - DNA, 15 bp, Homo sapiens
caaaggcccagatgc

SEQ ID NO: 42997 - DNA, 15 bp, Homo sapiens
gcaaaggcccagatg

SEQ ID NO: 42998 - DNA, 15 bp, Homo sapiens
tgcaaaggcccagat

SEQ ID NO: 42999 - DNA, 15 bp, Homo sapiens
atgcaaaggcccaga

SEQ ID NO: 43000 - DNA, 15 bp, Homo sapiens
catgcaaaggcccag

SEQ ID NO: 43001 - DNA, 15 bp, Homo sapiens
acatgcaaaggccca

SEQ ID NO: 43002 - DNA, 15 bp, Homo sapiens
cacatgcaaaggccc

SEQ ID NO: 43003 - DNA, 15 bp, Homo sapiens
acacatgcaaaggcc

SEQ ID NO: 43004 - DNA, 15 bp, Homo sapiens
gacacatgcaaaggc

SEQ ID NO: 43005 - DNA, 15 bp, Homo sapiens
ggacacatgcaaagg

SEQ ID NO: 43006 - DNA, 15 bp, Homo sapiens
aggacacatgcaaag

SEQ ID NO: 43007 - DNA, 15 bp, Homo sapiens
aaggacacatgcaaa

SEQ ID NO: 43008 - DNA, 15 bp, Homo sapiens
gaaggacacatgcaa

SEQ ID NO: 43009 - DNA, 15 bp, Homo sapiens
ggaaggacacatgca

SEQ ID NO: 43010 - DNA, 15 bp, Homo sapiens
gggaaggacacatgc

SEQ ID NO: 43011 - DNA, 15 bp, Homo sapiens
agggaaggacacatg

SEQ ID NO: 43012 - DNA, 15 bp, Homo sapiens
cagggaaggacacat

SEQ ID NO: 43013 - DNA, 15 bp, Homo sapiens
gcagggaaggacaca

SEQ ID NO: 43014 - DNA, 15 bp, Homo sapiens
ggcagggaaggacac

SEQ ID NO: 43015 - DNA, 15 bp, Homo sapiens
aggcagggaaggaca

SEQ ID NO: 43016 - DNA, 15 bp, Homo sapiens
caggcagggaaggac

SEQ ID NO: 43017 - DNA, 15 bp, Homo sapiens
ccaggcagggaagga

SEQ ID NO: 43018 - DNA, 15 bp, Homo sapiens
tccaggcagggaagg

SEQ ID NO: 43019 - DNA, 15 bp, Homo sapiens
gtccaggcagggaag

SEQ ID NO: 43020 - DNA, 15 bp, Homo sapiens
agtccaggcagggaa

SEQ ID NO: 43021 - DNA, 15 bp, Homo sapiens
cagtccaggcaggga

SEQ ID NO: 43022 - DNA, 15 bp, Homo sapiens
gcagtccaggcaggg

SEQ ID NO: 43023 - DNA, 15 bp, Homo sapiens
agcagtccaggcagg

SEQ ID NO: 43024 - DNA, 15 bp, Homo sapiens
gagcagtccaggcag

SEQ ID NO: 43025 - DNA, 15 bp, Homo sapiens
agagcagtccaggca

SEQ ID NO: 43026 - DNA, 15 bp, Homo sapiens
aagagcagtccaggc

SEQ ID NO: 43027 - DNA, 15 bp, Homo sapiens
gaagagcagtccagg

SEQ ID NO: 43028 - DNA, 15 bp, Homo sapiens
ggaagagcagtccag

SEQ ID NO: 43029 - DNA, 15 bp, Homo sapiens
gggaagagcagtcca

SEQ ID NO: 43030 - DNA, 15 bp, Homo sapiens
agggaagagcagtcc

SEQ ID NO: 43031 - DNA, 15 bp, Homo sapiens
gagggaagagcagtc

SEQ ID NO: 43032 - DNA, 15 bp, Homo sapiens
agagggaagagcagt

SEQ ID NO: 43033 - DNA, 15 bp, Homo sapiens
gagagggaagagcag

SEQ ID NO: 43034 - DNA, 15 bp, Homo sapiens
ggagagggaagagca

SEQ ID NO: 43035 - DNA, 15 bp, Homo sapiens
aggagagggaagagc

SEQ ID NO: 43036 - DNA, 15 bp, Homo sapiens
gaggagagggaagag

SEQ ID NO: 43037 - DNA, 15 bp, Homo sapiens
agaggagagggaaga

SEQ ID NO: 43038 - DNA, 15 bp, Homo sapiens
aagaggagagggaag

SEQ ID NO: 43039 - DNA, 15 bp, Homo sapiens
gaagaggagagggaa

SEQ ID NO: 43040 - DNA, 15 bp, Homo sapiens
ggaagaggagaggga

SEQ ID NO: 43041 - DNA, 15 bp, Homo sapiens
gggaagaggagaggg

SEQ ID NO: 43042 - DNA, 15 bp, Homo sapiens
tgggaagaggagagg

SEQ ID NO: 43043 - DNA, 15 bp, Homo sapiens
atgggaagaggagag

SEQ ID NO: 43044 - DNA, 15 bp, Homo sapiens
catgggaagaggaga

SEQ ID NO: 43045 - DNA, 15 bp, Homo sapiens
ccatgggaagaggag

SEQ ID NO: 43046 - DNA, 15 bp, Homo sapiens
tccatgggaagagga

SEQ ID NO: 43047 - DNA, 15 bp, Homo sapiens
ttccatgggaagagg

SEQ ID NO: 43048 - DNA, 15 bp, Homo sapiens
tttccatgggaagag

SEQ ID NO: 43049 - DNA, 15 bp, Homo sapiens
ttttccatgggaaga

SEQ ID NO: 43050 - DNA, 15 bp, Homo sapiens
gttttccatgggaag

SEQ ID NO: 43051 - DNA, 15 bp, Homo sapiens
agttttccatgggaa

SEQ ID NO: 43052 - DNA, 15 bp, Homo sapiens
aagttttccatggga

SEQ ID NO: 43053 - DNA, 15 bp, Homo sapiens
caagttttccatggg

SEQ ID NO: 43054 - DNA, 15 bp, Homo sapiens
gcaagttttccatgg

SEQ ID NO: 43055 - DNA, 15 bp, Homo sapiens
agcaagttttccatg

SEQ ID NO: 43056 - DNA, 15 bp, Homo sapiens
gagcaagttttccat

SEQ ID NO: 43057 - DNA, 15 bp, Homo sapiens
agagcaagttttcca

SEQ ID NO: 43058 - DNA, 15 bp, Homo sapiens
gagagcaagttttcc

SEQ ID NO: 43059 - DNA, 15 bp, Homo sapiens
tgagagcaagttttc

SEQ ID NO: 43060 - DNA, 15 bp, Homo sapiens
atgagagcaagtttt

SEQ ID NO: 43061 - DNA, 15 bp, Homo sapiens
gatgagagcaagttt

SEQ ID NO: 43062 - DNA, 15 bp, Homo sapiens
agatgagagcaagtt

SEQ ID NO: 43063 - DNA, 15 bp, Homo sapiens
aagatgagagcaagt

SEQ ID NO: 43064 - DNA, 15 bp, Homo sapiens
gaagatgagagcaag

SEQ ID NO: 43065 - DNA, 15 bp, Homo sapiens
tgaagatgagagcaa

SEQ ID NO: 43066 - DNA, 15 bp, Homo sapiens
ttgaagatgagagca

SEQ ID NO: 43067 - DNA, 15 bp, Homo sapiens
gttgaagatgagagc

SEQ ID NO: 43068 - DNA, 15 bp, Homo sapiens
tgttgaagatgagag

SEQ ID NO: 43069 - DNA, 15 bp, Homo sapiens
atgttgaagatgaga

SEQ ID NO: 43070 - DNA, 15 bp, Homo sapiens
gatgttgaagatgag

SEQ ID NO: 43071 - DNA, 15 bp, Homo sapiens
agatgttgaagatga

SEQ ID NO: 43072 - DNA, 15 bp, Homo sapiens
gagatgttgaagatg

SEQ ID NO: 43073 - DNA, 15 bp, Homo sapiens
tgagatgttgaagat

SEQ ID NO: 43074 - DNA, 15 bp, Homo sapiens
atgagatgttgaaga

SEQ ID NO: 43075 - DNA, 15 bp, Homo sapiens
catgagatgttgaag

SEQ ID NO: 43076 - DNA, 15 bp, Homo sapiens
gcatgagatgttgaa

SEQ ID NO: 43077 - DNA, 15 bp, Homo sapiens
agcatgagatgttga

SEQ ID NO: 43078 - DNA, 15 bp, Homo sapiens
tagcatgagatgttg

SEQ ID NO: 43079 - DNA, 15 bp, Homo sapiens
ttagcatgagatgtt

SEQ ID NO: 43080 - DNA, 15 bp, Homo sapiens
cttagcatgagatgt

SEQ ID NO: 43081 - DNA, 15 bp, Homo sapiens
gcttagcatgagatg

SEQ ID NO: 43082 - DNA, 15 bp, Homo sapiens
tgcttagcatgagat

SEQ ID NO: 43083 - DNA, 15 bp, Homo sapiens
gtgcttagcatgaga

SEQ ID NO: 43084 - DNA, 15 bp, Homo sapiens
agtgcttagcatgag

SEQ ID NO: 43085 - DNA, 15 bp, Homo sapiens
aagtgcttagcatga

SEQ ID NO: 43086 - DNA, 15 bp, Homo sapiens
caagtgcttagcatg

SEQ ID NO: 43087 - DNA, 15 bp, Homo sapiens
gcaagtgcttagcat

SEQ ID NO: 43088 - DNA, 15 bp, Homo sapiens
agcaagtgcttagca

SEQ ID NO: 43089 - DNA, 15 bp, Homo sapiens
gagcaagtgcttagc

SEQ ID NO: 43090 - DNA, 15 bp, Homo sapiens
ggagcaagtgcttag

SEQ ID NO: 43091 - DNA, 15 bp, Homo sapiens
tggagcaagtgctta

SEQ ID NO: 43092 - DNA, 15 bp, Homo sapiens
ctggagcaagtgctt

SEQ ID NO: 43093 - DNA, 15 bp, Homo sapiens
tctggagcaagtgct

SEQ ID NO: 43094 - DNA, 15 bp, Homo sapiens
ctctggagcaagtgc

SEQ ID NO: 43095 - DNA, 15 bp, Homo sapiens
gctctggagcaagtg

SEQ ID NO: 43096 - DNA, 15 bp, Homo sapiens
ggctctggagcaagt

SEQ ID NO: 43097 - DNA, 15 bp, Homo sapiens
aggctctggagcaag

SEQ ID NO: 43098 - DNA, 15 bp, Homo sapiens
aaggctctggagcaa

SEQ ID NO: 43099 - DNA, 15 bp, Homo sapiens
gaaggctctggagca

SEQ ID NO: 43100 - DNA, 15 bp, Homo sapiens
agaaggctctggagc

SEQ ID NO: 43101 - DNA, 15 bp, Homo sapiens
gagaaggctctggag

SEQ ID NO: 43102 - DNA, 15 bp, Homo sapiens
ggagaaggctctgga

SEQ ID NO: 43103 - DNA, 15 bp, Homo sapiens
tggagaaggctctgg

SEQ ID NO: 43104 - DNA, 15 bp, Homo sapiens
ctggagaaggctctg

SEQ ID NO: 43105 - DNA, 15 bp, Homo sapiens
gctggagaaggctct

SEQ ID NO: 43106 - DNA, 15 bp, Homo sapiens
agctggagaaggctc

SEQ ID NO: 43107 - DNA, 15 bp, Homo sapiens
gagctggagaaggct

SEQ ID NO: 43108 - DNA, 15 bp, Homo sapiens
agagctggagaaggc

SEQ ID NO: 43109 - DNA, 15 bp, Homo sapiens
gagagctggagaagg

SEQ ID NO: 43110 - DNA, 15 bp, Homo sapiens
agagagctggagaag

SEQ ID NO: 43111 - DNA, 15 bp, Homo sapiens
tagagagctggagaa

SEQ ID NO: 43112 - DNA, 15 bp, Homo sapiens
ctagagagctggaga

SEQ ID NO: 43113 - DNA, 15 bp, Homo sapiens
tctagagagctggag

SEQ ID NO: 43114 - DNA, 15 bp, Homo sapiens
gtctagagagctgga

SEQ ID NO: 43115 - DNA, 15 bp, Homo sapiens
tgtctagagagctgg

SEQ ID NO: 43116 - DNA, 15 bp, Homo sapiens
ttgtctagagagctg

SEQ ID NO: 43117 - DNA, 15 bp, Homo sapiens
cttgtctagagagct

SEQ ID NO: 43118 - DNA, 15 bp, Homo sapiens
ccttgtctagagagc

SEQ ID NO: 43119 - DNA, 15 bp, Homo sapiens
gccttgtctagagag

SEQ ID NO: 43120 - DNA, 15 bp, Homo sapiens
tgccttgtctagaga

SEQ ID NO: 43121 - DNA, 15 bp, Homo sapiens
ctgccttgtctagag

SEQ ID NO: 43122 - DNA, 15 bp, Homo sapiens
gctgccttgtctaga

SEQ ID NO: 43123 - DNA, 15 bp, Homo sapiens
agctgccttgtctag

SEQ ID NO: 43124 - DNA, 15 bp, Homo sapiens
gagctgccttgtcta

SEQ ID NO: 43125 - DNA, 15 bp, Homo sapiens
ggagctgccttgtct

SEQ ID NO: 43126 - DNA, 15 bp, Homo sapiens
aggagctgccttgtc

SEQ ID NO: 43127 - DNA, 15 bp, Homo sapiens
gaggagctgccttgt

SEQ ID NO: 43128 - DNA, 15 bp, Homo sapiens
agaggagctgccttg

SEQ ID NO: 43129 - DNA, 15 bp, Homo sapiens
cagaggagctgcctt

SEQ ID NO: 43130 - DNA, 15 bp, Homo sapiens
gcagaggagctgcct

SEQ ID NO: 43131 - DNA, 15 bp, Homo sapiens
tgcagaggagctgcc

SEQ ID NO: 43132 - DNA, 15 bp, Homo sapiens
atgcagaggagctgc

SEQ ID NO: 43133 - DNA, 15 bp, Homo sapiens
gatgcagaggagctg

SEQ ID NO: 43134 - DNA, 15 bp, Homo sapiens
tgatgcagaggagct

SEQ ID NO: 43135 - DNA, 15 bp, Homo sapiens
ctgatgcagaggagc

SEQ ID NO: 43136 - DNA, 15 bp, Homo sapiens
cctgatgcagaggag

SEQ ID NO: 43137 - DNA, 15 bp, Homo sapiens
ccctgatgcagagga

SEQ ID NO: 43138 - DNA, 15 bp, Homo sapiens
gccctgatgcagagg

SEQ ID NO: 43139 - DNA, 15 bp, Homo sapiens
ggccctgatgcagag

SEQ ID NO: 43140 - DNA, 15 bp, Homo sapiens
gggccctgatgcaga

SEQ ID NO: 43141 - DNA, 15 bp, Homo sapiens
tgggccctgatgcag

SEQ ID NO: 43142 - DNA, 15 bp, Homo sapiens
ctgggccctgatgca

SEQ ID NO: 43143 - DNA, 15 bp, Homo sapiens
cctgggccctgatgc

SEQ ID NO: 43144 - DNA, 15 bp, Homo sapiens
tcctgggccctgatg

SEQ ID NO: 43145 - DNA, 15 bp, Homo sapiens
ctcctgggccctgat

SEQ ID NO: 43146 - DNA, 15 bp, Homo sapiens
tctcctgggccctga

SEQ ID NO: 43147 - DNA, 15 bp, Homo sapiens
atctcctgggccctg

SEQ ID NO: 43148 - DNA, 15 bp, Homo sapiens
catctcctgggccct

SEQ ID NO: 43149 - DNA, 15 bp, Homo sapiens
gcatctcctgggccc

SEQ ID NO: 43150 - DNA, 15 bp, Homo sapiens
ggcatctcctgggcc

SEQ ID NO: 43151 - DNA, 15 bp, Homo sapiens
aggcatctcctgggc

SEQ ID NO: 43152 - DNA, 15 bp, Homo sapiens
caggcatctcctggg

SEQ ID NO: 43153 - DNA, 15 bp, Homo sapiens
acaggcatctcctgg

SEQ ID NO: 43154 - DNA, 15 bp, Homo sapiens
tacaggcatctcctg

SEQ ID NO: 43155 - DNA, 15 bp, Homo sapiens
atacaggcatctcct

SEQ ID NO: 43156 - DNA, 15 bp, Homo sapiens
aatacaggcatctcc

SEQ ID NO: 43157 - DNA, 15 bp, Homo sapiens
aaatacaggcatctc

SEQ ID NO: 43158 - DNA, 15 bp, Homo sapiens
gaaatacaggcatct

SEQ ID NO: 43159 - DNA, 15 bp, Homo sapiens
ggaaatacaggcatc

SEQ ID NO: 43160 - DNA, 15 bp, Homo sapiens
gggaaatacaggcat

SEQ ID NO: 43161 - DNA, 15 bp, Homo sapiens
ggggaaatacaggca

SEQ ID NO: 43162 - DNA, 15 bp, Homo sapiens
aggggaaatacaggc

SEQ ID NO: 43163 - DNA, 15 bp, Homo sapiens
aaggggaaatacagg

SEQ ID NO: 43164 - DNA, 15 bp, Homo sapiens
aaaggggaaatacag

SEQ ID NO: 43165 - DNA, 15 bp, Homo sapiens
gaaaggggaaataca

SEQ ID NO: 43166 - DNA, 15 bp, Homo sapiens
ggaaaggggaaatac

SEQ ID NO: 43167 - DNA, 15 bp, Homo sapiens
aggaaaggggaaata

SEQ ID NO: 43168 - DNA, 15 bp, Homo sapiens
gaggaaaggggaaat

SEQ ID NO: 43169 - DNA, 15 bp, Homo sapiens
tgaggaaaggggaaa

SEQ ID NO: 43170 - DNA, 15 bp, Homo sapiens
gtgaggaaaggggaa

SEQ ID NO: 43171 - DNA, 15 bp, Homo sapiens
agtgaggaaagggga

SEQ ID NO: 43172 - DNA, 15 bp, Homo sapiens
cagtgaggaaagggg

SEQ ID NO: 43173 - DNA, 15 bp, Homo sapiens
gcagtgaggaaaggg

SEQ ID NO: 43174 - DNA, 15 bp, Homo sapiens
ggcagtgaggaaagg

SEQ ID NO: 43175 - DNA, 15 bp, Homo sapiens
tggcagtgaggaaag

SEQ ID NO: 43176 - DNA, 15 bp, Homo sapiens
atggcagtgaggaaa

SEQ ID NO: 43177 - DNA, 15 bp, Homo sapiens
gatggcagtgaggaa

SEQ ID NO: 43178 - DNA, 15 bp, Homo sapiens
ggatggcagtgagga

SEQ ID NO: 43179 - DNA, 15 bp, Homo sapiens
aggatggcagtgagg

SEQ ID NO: 43180 - DNA, 15 bp, Homo sapiens
caggatggcagtgag

SEQ ID NO: 43181 - DNA, 15 bp, Homo sapiens
gcaggatggcagtga

SEQ ID NO: 43182 - DNA, 15 bp, Homo sapiens
agcaggatggcagtg

SEQ ID NO: 43183 - DNA, 15 bp, Homo sapiens
aagcaggatggcagt

SEQ ID NO: 43184 - DNA, 15 bp, Homo sapiens
caagcaggatggcag

SEQ ID NO: 43185 - DNA, 15 bp, Homo sapiens
tcaagcaggatggca

SEQ ID NO: 43186 - DNA, 15 bp, Homo sapiens
gtcaagcaggatggc

SEQ ID NO: 43187 - DNA, 15 bp, Homo sapiens
cgtcaagcaggatgg

SEQ ID NO: 43188 - DNA, 15 bp, Homo sapiens
gcgtcaagcaggatg

SEQ ID NO: 43189 - DNA, 15 bp, Homo sapiens
ggcgtcaagcaggat

SEQ ID NO: 43190 - DNA, 15 bp, Homo sapiens
aggcgtcaagcagga

SEQ ID NO: 43191 - DNA, 15 bp, Homo sapiens
taggcgtcaagcagg

SEQ ID NO: 43192 - DNA, 15 bp, Homo sapiens
ttaggcgtcaagcag

SEQ ID NO: 43193 - DNA, 15 bp, Homo sapiens
attaggcgtcaagca

SEQ ID NO: 43194 - DNA, 15 bp, Homo sapiens
aattaggcgtcaagc

SEQ ID NO: 43195 - DNA, 15 bp, Homo sapiens
aaattaggcgtcaag

SEQ ID NO: 43196 - DNA, 15 bp, Homo sapiens
gaaattaggcgtcaa

SEQ ID NO: 43197 - DNA, 15 bp, Homo sapiens
ggaaattaggcgtca

SEQ ID NO: 43198 - DNA, 15 bp, Homo sapiens
gggaaattaggcgtc

SEQ ID NO: 43199 - DNA, 15 bp, Homo sapiens
tgggaaattaggcgt

SEQ ID NO: 43200 - DNA, 15 bp, Homo sapiens
ctgggaaattaggcg

SEQ ID NO: 43201 - DNA, 15 bp, Homo sapiens
tctgggaaattaggc

SEQ ID NO: 43202 - DNA, 15 bp, Homo sapiens
atctgggaaattagg

SEQ ID NO: 43203 - DNA, 15 bp, Homo sapiens
tatctgggaaattag

SEQ ID NO: 43204 - DNA, 15 bp, Homo sapiens
ttatctgggaaatta

SEQ ID NO: 43205 - DNA, 15 bp, Homo sapiens
attatctgggaaatt

SEQ ID NO: 43206 - DNA, 15 bp, Homo sapiens
cattatctgggaaat

SEQ ID NO: 43207 - DNA, 15 bp, Homo sapiens
acattatctgggaaa

SEQ ID NO: 43208 - DNA, 15 bp, Homo sapiens
gacattatctgggaa

SEQ ID NO: 43209 - DNA, 15 bp, Homo sapiens
agacattatctggga

SEQ ID NO: 43210 - DNA, 15 bp, Homo sapiens
cagacattatctggg

SEQ ID NO: 43211 - DNA, 15 bp, Homo sapiens
gcagacattatctgg

SEQ ID NO: 43212 - DNA, 15 bp, Homo sapiens
ggcagacattatctg

SEQ ID NO: 43213 - DNA, 15 bp, Homo sapiens
aggcagacattatct

SEQ ID NO: 43214 - DNA, 15 bp, Homo sapiens
aaggcagacattatc

SEQ ID NO: 43215 - DNA, 15 bp, Homo sapiens
gaaggcagacattat

SEQ ID NO: 43216 - DNA, 15 bp, Homo sapiens
ggaaggcagacatta

SEQ ID NO: 43217 - DNA, 15 bp, Homo sapiens
gggaaggcagacatt

SEQ ID NO: 43218 - DNA, 15 bp, Homo sapiens
agggaaggcagacat

SEQ ID NO: 43219 - DNA, 15 bp, Homo sapiens
cagggaaggcagaca

SEQ ID NO: 43220 - DNA, 15 bp, Homo sapiens
gcagggaaggcagac

SEQ ID NO: 43221 - DNA, 15 bp, Homo sapiens
ggcagggaaggcaga

SEQ ID NO: 43222 - DNA, 15 bp, Homo sapiens
tggcagggaaggcag

SEQ ID NO: 43223 - DNA, 15 bp, Homo sapiens
gtggcagggaaggca

SEQ ID NO: 43224 - DNA, 15 bp, Homo sapiens
tgtggcagggaaggc

SEQ ID NO: 43225 - DNA, 15 bp, Homo sapiens
atgtggcagggaagg

SEQ ID NO: 43226 - DNA, 15 bp, Homo sapiens
aatgtggcagggaag

SEQ ID NO: 43227 - DNA, 15 bp, Homo sapiens
caatgtggcagggaa

SEQ ID NO: 43228 - DNA, 15 bp, Homo sapiens
acaatgtggcaggga

SEQ ID NO: 43229 - DNA, 15 bp, Homo sapiens
tacaatgtggcaggg

SEQ ID NO: 43230 - DNA, 15 bp, Homo sapiens
ttacaatgtggcagg

SEQ ID NO: 43231 - DNA, 15 bp, Homo sapiens
cttacaatgtggcag

SEQ ID NO: 43232 - DNA, 15 bp, Homo sapiens
acttacaatgtggca

SEQ ID NO: 43233 - DNA, 15 bp, Homo sapiens
aacttacaatgtggc

SEQ ID NO: 43234 - DNA, 15 bp, Homo sapiens
gaacttacaatgtgg

SEQ ID NO: 43235 - DNA, 15 bp, Homo sapiens
ggaacttacaatgtg

SEQ ID NO: 43236 - DNA, 15 bp, Homo sapiens
tggaacttacaatgt

SEQ ID NO: 43237 - DNA, 15 bp, Homo sapiens
atggaacttacaatg

SEQ ID NO: 43238 - DNA, 15 bp, Homo sapiens
catggaacttacaat

SEQ ID NO: 43239 - DNA, 15 bp, Homo sapiens
tcatggaacttacaa

SEQ ID NO: 43240 - DNA, 15 bp, Homo sapiens
ctcatggaacttaca

SEQ ID NO: 43241 - DNA, 15 bp, Homo sapiens
cctcatggaacttac

SEQ ID NO: 43242 - DNA, 15 bp, Homo sapiens
ccctcatggaactta

SEQ ID NO: 43243 - DNA, 15 bp, Homo sapiens
accctcatggaactt

SEQ ID NO: 43244 - DNA, 15 bp, Homo sapiens
taccctcatggaact

SEQ ID NO: 43245 - DNA, 15 bp, Homo sapiens
ctaccctcatggaac

SEQ ID NO: 43246 - DNA, 15 bp, Homo sapiens
cctaccctcatggaa

SEQ ID NO: 43247 - DNA, 15 bp, Homo sapiens
ccctaccctcatgga

SEQ ID NO: 43248 - DNA, 15 bp, Homo sapiens
gccctaccctcatgg

SEQ ID NO: 43249 - DNA, 15 bp, Homo sapiens
agccctaccctcatg

SEQ ID NO: 43250 - DNA, 15 bp, Homo sapiens
cagccctaccctcat

SEQ ID NO: 43251 - DNA, 15 bp, Homo sapiens
ccagccctaccctca

SEQ ID NO: 43252 - DNA, 15 bp, Homo sapiens
gccagccctaccctc

SEQ ID NO: 43253 - DNA, 15 bp, Homo sapiens
agccagccctaccct

SEQ ID NO: 43254 - DNA, 15 bp, Homo sapiens
cagccagccctaccc

SEQ ID NO: 43255 - DNA, 15 bp, Homo sapiens
ccagccagccctacc

SEQ ID NO: 43256 - DNA, 15 bp, Homo sapiens
tccagccagccctac

SEQ ID NO: 43257 - DNA, 15 bp, Homo sapiens
ctccagccagcccta

SEQ ID NO: 43258 - DNA, 15 bp, Homo sapiens
cctccagccagccct

SEQ ID NO: 43259 - DNA, 15 bp, Homo sapiens
ccctccagccagccc

SEQ ID NO: 43260 - DNA, 15 bp, Homo sapiens
gccctccagccagcc

SEQ ID NO: 43261 - DNA, 15 bp, Homo sapiens
agccctccagccagc

SEQ ID NO: 43262 - DNA, 15 bp, Homo sapiens
cagccctccagccag

SEQ ID NO: 43263 - DNA, 15 bp, Homo sapiens
ccagccctccagcca

SEQ ID NO: 43264 - DNA, 15 bp, Homo sapiens
accagccctccagcc

SEQ ID NO: 43265 - DNA, 15 bp, Homo sapiens
caccagccctccagc

SEQ ID NO: 43266 - DNA, 15 bp, Homo sapiens
gcaccagccctccag

SEQ ID NO: 43267 - DNA, 15 bp, Homo sapiens
agcaccagccctcca

SEQ ID NO: 43268 - DNA, 15 bp, Homo sapiens
gagcaccagccctcc

SEQ ID NO: 43269 - DNA, 15 bp, Homo sapiens
ggagcaccagccctc

SEQ ID NO: 43270 - DNA, 15 bp, Homo sapiens
tggagcaccagccct

SEQ ID NO: 43271 - DNA, 15 bp, Homo sapiens
gtggagcaccagccc

SEQ ID NO: 43272 - DNA, 15 bp, Homo sapiens
tgtggagcaccagcc

SEQ ID NO: 43273 - DNA, 15 bp, Homo sapiens
gtgtggagcaccagc

SEQ ID NO: 43274 - DNA, 15 bp, Homo sapiens
tgtgtggagcaccag

SEQ ID NO: 43275 - DNA, 15 bp, Homo sapiens
ttgtgtggagcacca

SEQ ID NO: 43276 - DNA, 15 bp, Homo sapiens
attgtgtggagcacc

SEQ ID NO: 43277 - DNA, 15 bp, Homo sapiens
aattgtgtggagcac

SEQ ID NO: 43278 - DNA, 15 bp, Homo sapiens
aaattgtgtggagca

SEQ ID NO: 43279 - DNA, 15 bp, Homo sapiens
aaaattgtgtggagc

SEQ ID NO: 43280 - DNA, 15 bp, Homo sapiens
aaaaattgtgtggag

SEQ ID NO: 43281 - DNA, 15 bp, Homo sapiens
taaaaattgtgtgga

SEQ ID NO: 43282 - DNA, 15 bp, Homo sapiens
ctaaaaattgtgtgg

SEQ ID NO: 43283 - DNA, 15 bp, Homo sapiens
cctaaaaattgtgtg

SEQ ID NO: 43284 - DNA, 15 bp, Homo sapiens
ccctaaaaattgtgt

SEQ ID NO: 43285 - DNA, 15 bp, Homo sapiens
accctaaaaattgtg

SEQ ID NO: 43286 - DNA, 15 bp, Homo sapiens
taccctaaaaattgt

SEQ ID NO: 43287 - DNA, 15 bp, Homo sapiens
ctaccctaaaaattg

SEQ ID NO: 43288 - DNA, 15 bp, Homo sapiens
cctaccctaaaaatt

SEQ ID NO: 43289 - DNA, 15 bp, Homo sapiens
acctaccctaaaaat

SEQ ID NO: 43290 - DNA, 15 bp, Homo sapiens
tacctaccctaaaaa

SEQ ID NO: 43291 - DNA, 15 bp, Homo sapiens
ttacctaccctaaaa

SEQ ID NO: 43292 - DNA, 15 bp, Homo sapiens
tttacctaccctaaa

SEQ ID NO: 43293 - DNA, 15 bp, Homo sapiens
atttacctaccctaa

SEQ ID NO: 43294 - DNA, 15 bp, Homo sapiens
gatttacctacccta

SEQ ID NO: 43295 - DNA, 15 bp, Homo sapiens
tgatttacctaccct

SEQ ID NO: 43296 - DNA, 15 bp, Homo sapiens
ctgatttacctaccc

SEQ ID NO: 43297 - DNA, 15 bp, Homo sapiens
cctgatttacctacc

SEQ ID NO: 43298 - DNA, 15 bp, Homo sapiens
acctgatttacctac

SEQ ID NO: 43299 - DNA, 15 bp, Homo sapiens
gacctgatttaccta

SEQ ID NO: 43300 - DNA, 15 bp, Homo sapiens
ggacctgatttacct

SEQ ID NO: 43301 - DNA, 15 bp, Homo sapiens
aggacctgatttacc

SEQ ID NO: 43302 - DNA, 15 bp, Homo sapiens
gaggacctgatttac

SEQ ID NO: 43303 - DNA, 15 bp, Homo sapiens
tgaggacctgattta

SEQ ID NO: 43304 - DNA, 15 bp, Homo sapiens
ctgaggacctgattt

SEQ ID NO: 43305 - DNA, 15 bp, Homo sapiens
tctgaggacctgatt

SEQ ID NO: 43306 - DNA, 15 bp, Homo sapiens
ctctgaggacctgat

SEQ ID NO: 43307 - DNA, 15 bp, Homo sapiens
tctctgaggacctga

SEQ ID NO: 43308 - DNA, 15 bp, Homo sapiens
atctctgaggacctg

SEQ ID NO: 43309 - DNA, 15 bp, Homo sapiens
aatctctgaggacct

SEQ ID NO: 43310 - DNA, 15 bp, Homo sapiens
aaatctctgaggacc

SEQ ID NO: 43311 - DNA, 15 bp, Homo sapiens
gaaatctctgaggac

SEQ ID NO: 43312 - DNA, 15 bp, Homo sapiens
agaaatctctgagga

SEQ ID NO: 43313 - DNA, 15 bp, Homo sapiens
aagaaatctctgagg

SEQ ID NO: 43314 - DNA, 15 bp, Homo sapiens
gaagaaatctctgag

SEQ ID NO: 43315 - DNA, 15 bp, Homo sapiens
ggaagaaatctctga

SEQ ID NO: 43316 - DNA, 15 bp, Homo sapiens
aggaagaaatctctg

SEQ ID NO: 43317 - DNA, 15 bp, Homo sapiens
caggaagaaatctct

SEQ ID NO: 43318 - DNA, 15 bp, Homo sapiens
ccaggaagaaatctc

SEQ ID NO: 43319 - DNA, 15 bp, Homo sapiens
cccaggaagaaatct

SEQ ID NO: 43320 - DNA, 15 bp, Homo sapiens
gcccaggaagaaatc

SEQ ID NO: 43321 - DNA, 15 bp, Homo sapiens
ggcccaggaagaaat

SEQ ID NO: 43322 - DNA, 15 bp, Homo sapiens
aggcccaggaagaaa

SEQ ID NO: 43323 - DNA, 15 bp, Homo sapiens
gaggcccaggaagaa

SEQ ID NO: 43324 - DNA, 15 bp, Homo sapiens
tgaggcccaggaaga

SEQ ID NO: 43325 - DNA, 15 bp, Homo sapiens
ctgaggcccaggaag

SEQ ID NO: 43326 - DNA, 15 bp, Homo sapiens
cctgaggcccaggaa

SEQ ID NO: 43327 - DNA, 15 bp, Homo sapiens
gcctgaggcccagga

SEQ ID NO: 43328 - DNA, 15 bp, Homo sapiens
agcctgaggcccagg

SEQ ID NO: 43329 - DNA, 15 bp, Homo sapiens
cagcctgaggcccag

SEQ ID NO: 43330 - DNA, 15 bp, Homo sapiens
gcagcctgaggccca

SEQ ID NO: 43331 - DNA, 15 bp, Homo sapiens
ggcagcctgaggccc

SEQ ID NO: 43332 - DNA, 15 bp, Homo sapiens
gggcagcctgaggcc

SEQ ID NO: 43333 - DNA, 15 bp, Homo sapiens
agggcagcctgaggc

SEQ ID NO: 43334 - DNA, 15 bp, Homo sapiens
cagggcagcctgagg

SEQ ID NO: 43335 - DNA, 15 bp, Homo sapiens
tcagggcagcctgag

SEQ ID NO: 43336 - DNA, 15 bp, Homo sapiens
ttcagggcagcctga

SEQ ID NO: 43337 - DNA, 15 bp, Homo sapiens
gttcagggcagcctg

SEQ ID NO: 43338 - DNA, 15 bp, Homo sapiens
agttcagggcagcct

SEQ ID NO: 43339 - DNA, 15 bp, Homo sapiens
cagttcagggcagcc

SEQ ID NO: 43340 - DNA, 15 bp, Homo sapiens
tcagttcagggcagc

SEQ ID NO: 43341 - DNA, 15 bp, Homo sapiens
atcagttcagggcag

SEQ ID NO: 43342 - DNA, 15 bp, Homo sapiens
gatcagttcagggca

SEQ ID NO: 43343 - DNA, 15 bp, Homo sapiens
agatcagttcagggc

SEQ ID NO: 43344 - DNA, 15 bp, Homo sapiens
gagatcagttcaggg

SEQ ID NO: 43345 - DNA, 15 bp, Homo sapiens
tgagatcagttcagg

SEQ ID NO: 43346 - DNA, 15 bp, Homo sapiens
gtgagatcagttcag

SEQ ID NO: 43347 - DNA, 15 bp, Homo sapiens
tgtgagatcagttca

SEQ ID NO: 43348 - DNA, 15 bp, Homo sapiens
ctgtgagatcagttc

SEQ ID NO: 43349 - DNA, 15 bp, Homo sapiens
actgtgagatcagtt

SEQ ID NO: 43350 - DNA, 15 bp, Homo sapiens
tactgtgagatcagt

SEQ ID NO: 43351 - DNA, 15 bp, Homo sapiens
gtactgtgagatcag

SEQ ID NO: 43352 - DNA, 15 bp, Homo sapiens
tgtactgtgagatca

SEQ ID NO: 43353 - DNA, 15 bp, Homo sapiens
ctgtactgtgagatc

SEQ ID NO: 43354 - DNA, 15 bp, Homo sapiens
cctgtactgtgagat

SEQ ID NO: 43355 - DNA, 15 bp, Homo sapiens
ccctgtactgtgaga

SEQ ID NO: 43356 - DNA, 15 bp, Homo sapiens
tccctgtactgtgag

SEQ ID NO: 43357 - DNA, 15 bp, Homo sapiens
atccctgtactgtga

SEQ ID NO: 43358 - DNA, 15 bp, Homo sapiens
aatccctgtactgtg

SEQ ID NO: 43359 - DNA, 15 bp, Homo sapiens
caatccctgtactgt

SEQ ID NO: 43360 - DNA, 15 bp, Homo sapiens
tcaatccctgtactg

SEQ ID NO: 43361 - DNA, 15 bp, Homo sapiens
gtcaatccctgtact

SEQ ID NO: 43362 - DNA, 15 bp, Homo sapiens
tgtcaatccctgtac

SEQ ID NO: 43363 - DNA, 15 bp, Homo sapiens
atgtcaatccctgta

SEQ ID NO: 43364 - DNA, 15 bp, Homo sapiens
aatgtcaatccctgt

SEQ ID NO: 43365 - DNA, 15 bp, Homo sapiens
aaatgtcaatccctg

SEQ ID NO: 43366 - DNA, 15 bp, Homo sapiens
aaaatgtcaatccct

SEQ ID NO: 43367 - DNA, 15 bp, Homo sapiens
gaaaatgtcaatccc

SEQ ID NO: 43368 - DNA, 15 bp, Homo sapiens
agaaaatgtcaatcc

SEQ ID NO: 43369 - DNA, 15 bp, Homo sapiens
cagaaaatgtcaatc

SEQ ID NO: 43370 - DNA, 15 bp, Homo sapiens
gcagaaaatgtcaat

SEQ ID NO: 43371 - DNA, 15 bp, Homo sapiens
tgcagaaaatgtcaa

SEQ ID NO: 43372 - DNA, 15 bp, Homo sapiens
ttgcagaaaatgtca

SEQ ID NO: 43373 - DNA, 15 bp, Homo sapiens
tttgcagaaaatgtc

SEQ ID NO: 43374 - DNA, 15 bp, Homo sapiens
ctttgcagaaaatgt

SEQ ID NO: 43375 - DNA, 15 bp, Homo sapiens
tctttgcagaaaatg

SEQ ID NO: 43376 - DNA, 15 bp, Homo sapiens
ctctttgcagaaaat

SEQ ID NO: 43377 - DNA, 15 bp, Homo sapiens
gctctttgcagaaaa

SEQ ID NO: 43378 - DNA, 15 bp, Homo sapiens
agctctttgcagaaa

SEQ ID NO: 43379 - DNA, 15 bp, Homo sapiens
cagctctttgcagaa

SEQ ID NO: 43380 - DNA, 15 bp, Homo sapiens
acagctctttgcaga

SEQ ID NO: 43381 - DNA, 15 bp, Homo sapiens
tacagctctttgcag

SEQ ID NO: 43382 - DNA, 15 bp, Homo sapiens
atacagctctttgca

SEQ ID NO: 43383 - DNA, 15 bp, Homo sapiens
tatacagctctttgc

SEQ ID NO: 43384 - DNA, 15 bp, Homo sapiens
ctatacagctctttg

SEQ ID NO: 43385 - DNA, 15 bp, Homo sapiens
actatacagctcttt

SEQ ID NO: 43386 - DNA, 15 bp, Homo sapiens
cactatacagctctt

SEQ ID NO: 43387 - DNA, 15 bp, Homo sapiens
tcactatacagctct

SEQ ID NO: 43388 - DNA, 15 bp, Homo sapiens
ttcactatacagctc

SEQ ID NO: 43389 - DNA, 15 bp, Homo sapiens
attcactatacagct

SEQ ID NO: 43390 - DNA, 15 bp, Homo sapiens
tattcactatacagc

SEQ ID NO: 43391 - DNA, 15 bp, Homo sapiens
atattcactatacag

SEQ ID NO: 43392 - DNA, 15 bp, Homo sapiens
aatattcactataca

SEQ ID NO: 43393 - DNA, 15 bp, Homo sapiens
aaatattcactatac

SEQ ID NO: 43394 - DNA, 15 bp, Homo sapiens
aaaatattcactata

SEQ ID NO: 43395 - DNA, 15 bp, Homo sapiens
taaaatattcactat

SEQ ID NO: 43396 - DNA, 15 bp, Homo sapiens
ctaaaatattcacta

SEQ ID NO: 43397 - DNA, 15 bp, Homo sapiens
cctaaaatattcact

SEQ ID NO: 43398 - DNA, 15 bp, Homo sapiens
acctaaaatattcac

SEQ ID NO: 43399 - DNA, 15 bp, Homo sapiens
tacctaaaatattca

SEQ ID NO: 43400 - DNA, 15 bp, Homo sapiens
atacctaaaatattc

SEQ ID NO: 43401 - DNA, 15 bp, Homo sapiens
catacctaaaatatt

SEQ ID NO: 43402 - DNA, 15 bp, Homo sapiens
ccatacctaaaatat

SEQ ID NO: 43403 - DNA, 15 bp, Homo sapiens
cccatacctaaaata

SEQ ID NO: 43404 - DNA, 15 bp, Homo sapiens
tcccatacctaaaat

SEQ ID NO: 43405 - DNA, 15 bp, Homo sapiens
ctcccatacctaaaa

SEQ ID NO: 43406 - DNA, 15 bp, Homo sapiens
tctcccatacctaaa

SEQ ID NO: 43407 - DNA, 15 bp, Homo sapiens
ctctcccatacctaa

SEQ ID NO: 43408 - DNA, 15 bp, Homo sapiens
tctctcccataccta

SEQ ID NO: 43409 - DNA, 15 bp, Homo sapiens
ctctctcccatacct

SEQ ID NO: 43410 - DNA, 15 bp, Homo sapiens
tctctctcccatacc

SEQ ID NO: 43411 - DNA, 15 bp, Homo sapiens
ttctctctcccatac

SEQ ID NO: 43412 - DNA, 15 bp, Homo sapiens
tttctctctcccata

SEQ ID NO: 43413 - DNA, 15 bp, Homo sapiens
ctttctctctcccat

SEQ ID NO: 43414 - DNA, 15 bp, Homo sapiens
cctttctctctccca

SEQ ID NO: 43415 - DNA, 15 bp, Homo sapiens
ccctttctctctccc

SEQ ID NO: 43416 - DNA, 15 bp, Homo sapiens
gccctttctctctcc

SEQ ID NO: 43417 - DNA, 15 bp, Homo sapiens
ggccctttctctctc

SEQ ID NO: 43418 - DNA, 15 bp, Homo sapiens
tggccctttctctct

SEQ ID NO: 43419 - DNA, 15 bp, Homo sapiens
atggccctttctctc

SEQ ID NO: 43420 - DNA, 15 bp, Homo sapiens
tatggccctttctct

SEQ ID NO: 43421 - DNA, 15 bp, Homo sapiens
gtatggccctttctc

SEQ ID NO: 43422 - DNA, 15 bp, Homo sapiens
tgtatggccctttct

SEQ ID NO: 43423 - DNA, 15 bp, Homo sapiens
atgtatggccctttc

SEQ ID NO: 43424 - DNA, 15 bp, Homo sapiens
aatgtatggcccttt

SEQ ID NO: 43425 - DNA, 15 bp, Homo sapiens
gaatgtatggccctt

SEQ ID NO: 43426 - DNA, 15 bp, Homo sapiens
agaatgtatggccct

SEQ ID NO: 43427 - DNA, 15 bp, Homo sapiens
cagaatgtatggccc

SEQ ID NO: 43428 - DNA, 15 bp, Homo sapiens
acagaatgtatggcc

SEQ ID NO: 43429 - DNA, 15 bp, Homo sapiens
gacagaatgtatggc

SEQ ID NO: 43430 - DNA, 15 bp, Homo sapiens
tgacagaatgtatgg

SEQ ID NO: 43431 - DNA, 15 bp, Homo sapiens
gtgacagaatgtatg

SEQ ID NO: 43432 - DNA, 15 bp, Homo sapiens
agtgacagaatgtat

SEQ ID NO: 43433 - DNA, 15 bp, Homo sapiens
cagtgacagaatgta

SEQ ID NO: 43434 - DNA, 15 bp, Homo sapiens
acagtgacagaatgt

SEQ ID NO: 43435 - DNA, 15 bp, Homo sapiens
tacagtgacagaatg

SEQ ID NO: 43436 - DNA, 15 bp, Homo sapiens
ctacagtgacagaat

SEQ ID NO: 43437 - DNA, 15 bp, Homo sapiens
gctacagtgacagaa

SEQ ID NO: 43438 - DNA, 15 bp, Homo sapiens
tgctacagtgacaga

SEQ ID NO: 43439 - DNA, 15 bp, Homo sapiens
gtgctacagtgacag

SEQ ID NO: 43440 - DNA, 15 bp, Homo sapiens
tgtgctacagtgaca

SEQ ID NO: 43441 - DNA, 15 bp, Homo sapiens
ctgtgctacagtgac

SEQ ID NO: 43442 - DNA, 15 bp, Homo sapiens
tctgtgctacagtga

SEQ ID NO: 43443 - DNA, 15 bp, Homo sapiens
ttctgtgctacagtg

SEQ ID NO: 43444 - DNA, 15 bp, Homo sapiens
cttctgtgctacagt

SEQ ID NO: 43445 - DNA, 15 bp, Homo sapiens
gcttctgtgctacag

SEQ ID NO: 43446 - DNA, 15 bp, Homo sapiens
tgcttctgtgctaca

SEQ ID NO: 43447 - DNA, 15 bp, Homo sapiens
ctgcttctgtgctac

SEQ ID NO: 43448 - DNA, 15 bp, Homo sapiens
gctgcttctgtgcta

SEQ ID NO: 43449 - DNA, 15 bp, Homo sapiens
ggctgcttctgtgct

SEQ ID NO: 43450 - DNA, 15 bp, Homo sapiens
tggctgcttctgtgc

SEQ ID NO: 43451 - DNA, 15 bp, Homo sapiens
ttggctgcttctgtg

SEQ ID NO: 43452 - DNA, 15 bp, Homo sapiens
tttggctgcttctgt

SEQ ID NO: 43453 - DNA, 15 bp, Homo sapiens
ctttggctgcttctg

SEQ ID NO: 43454 - DNA, 15 bp, Homo sapiens
tctttggctgcttct

SEQ ID NO: 43455 - DNA, 15 bp, Homo sapiens
atctttggctgcttc

SEQ ID NO: 43456 - DNA, 15 bp, Homo sapiens
tatctttggctgctt

SEQ ID NO: 43457 - DNA, 15 bp, Homo sapiens
ttatctttggctgct

SEQ ID NO: 43458 - DNA, 15 bp, Homo sapiens
attatctttggctgc

SEQ ID NO: 43459 - DNA, 15 bp, Homo sapiens
tattatctttggctg

SEQ ID NO: 43460 - DNA, 15 bp, Homo sapiens
ctattatctttggct

SEQ ID NO: 43461 - DNA, 15 bp, Homo sapiens
tctattatctttggc

SEQ ID NO: 43462 - DNA, 15 bp, Homo sapiens
ttctattatctttgg

SEQ ID NO: 43463 - DNA, 15 bp, Homo sapiens
tttctattatctttg

SEQ ID NO: 43464 - DNA, 15 bp, Homo sapiens
ttttctattatcttt

SEQ ID NO: 43465 - DNA, 15 bp, Homo sapiens
attttctattatctt

SEQ ID NO: 43466 - DNA, 15 bp, Homo sapiens
cattttctattatct

SEQ ID NO: 43467 - DNA, 15 bp, Homo sapiens
tcattttctattatc

SEQ ID NO: 43468 - DNA, 15 bp, Homo sapiens
ttcattttctattat

SEQ ID NO: 43469 - DNA, 15 bp, Homo sapiens
tttcattttctatta

SEQ ID NO: 43470 - DNA, 15 bp, Homo sapiens
ctttcattttctatt

SEQ ID NO: 43471 - DNA, 15 bp, Homo sapiens
cctttcattttctat

SEQ ID NO: 43472 - DNA, 15 bp, Homo sapiens
ccctttcattttcta

SEQ ID NO: 43473 - DNA, 15 bp, Homo sapiens
accctttcattttct

SEQ ID NO: 43474 - DNA, 15 bp, Homo sapiens
taccctttcattttc

SEQ ID NO: 43475 - DNA, 15 bp, Homo sapiens
ataccctttcatttt

SEQ ID NO: 43476 - DNA, 15 bp, Homo sapiens
cataccctttcattt

SEQ ID NO: 43477 - DNA, 15 bp, Homo sapiens
tcataccctttcatt

SEQ ID NO: 43478 - DNA, 15 bp, Homo sapiens
gtcataccctttcat

SEQ ID NO: 43479 - DNA, 15 bp, Homo sapiens
agtcataccctttca

SEQ ID NO: 43480 - DNA, 15 bp, Homo sapiens
cagtcataccctttc

SEQ ID NO: 43481 - DNA, 15 bp, Homo sapiens
acagtcatacccttt

SEQ ID NO: 43482 - DNA, 15 bp, Homo sapiens
cacagtcataccctt

SEQ ID NO: 43483 - DNA, 15 bp, Homo sapiens
acacagtcataccct

SEQ ID NO: 43484 - DNA, 15 bp, Homo sapiens
aacacagtcataccc

SEQ ID NO: 43485 - DNA, 15 bp, Homo sapiens
gaacacagtcatacc

SEQ ID NO: 43486 - DNA, 15 bp, Homo sapiens
ggaacacagtcatac

SEQ ID NO: 43487 - DNA, 15 bp, Homo sapiens
gggaacacagtcata

SEQ ID NO: 43488 - DNA, 15 bp, Homo sapiens
tgggaacacagtcat

SEQ ID NO: 43489 - DNA, 15 bp, Homo sapiens
atgggaacacagtca

SEQ ID NO: 43490 - DNA, 15 bp, Homo sapiens
tatgggaacacagtc

SEQ ID NO: 43491 - DNA, 15 bp, Homo sapiens
ttatgggaacacagt

SEQ ID NO: 43492 - DNA, 15 bp, Homo sapiens
tttatgggaacacag

SEQ ID NO: 43493 - DNA, 15 bp, Homo sapiens
ttttatgggaacaca

SEQ ID NO: 43494 - DNA, 15 bp, Homo sapiens
gttttatgggaacac

SEQ ID NO: 43495 - DNA, 15 bp, Homo sapiens
agttttatgggaaca

SEQ ID NO: 43496 - DNA, 15 bp, Homo sapiens
cagttttatgggaac

SEQ ID NO: 43497 - DNA, 15 bp, Homo sapiens
acagttttatgggaa

SEQ ID NO: 43498 - DNA, 15 bp, Homo sapiens
tacagttttatggga

SEQ ID NO: 43499 - DNA, 15 bp, Homo sapiens
atacagttttatggg

SEQ ID NO: 43500 - DNA, 15 bp, Homo sapiens
aatacagttttatgg

SEQ ID NO: 43501 - DNA, 15 bp, Homo sapiens
aaatacagttttatg

SEQ ID NO: 43502 - DNA, 15 bp, Homo sapiens
taaatacagttttat

SEQ ID NO: 43503 - DNA, 15 bp, Homo sapiens
ataaatacagtttta

SEQ ID NO: 43504 - DNA, 15 bp, Homo sapiens
tataaatacagtttt

SEQ ID NO: 43505 - DNA, 15 bp, Homo sapiens
ttataaatacagttt

SEQ ID NO: 43506 - DNA, 15 bp, Homo sapiens
tttataaatacagtt

SEQ ID NO: 43507 - DNA, 15 bp, Homo sapiens
ttttataaatacagt

SEQ ID NO: 43508 - DNA, 15 bp, Homo sapiens
attttataaatacag

SEQ ID NO: 43509 - DNA, 15 bp, Homo sapiens
tattttataaataca

SEQ ID NO: 43510 - DNA, 15 bp, Homo sapiens
ctattttataaatac

SEQ ID NO: 43511 - DNA, 15 bp, Homo sapiens
cctattttataaata

SEQ ID NO: 43512 - DNA, 15 bp, Homo sapiens
tcctattttataaat

SEQ ID NO: 43513 - DNA, 15 bp, Homo sapiens
atcctattttataaa

SEQ ID NO: 43514 - DNA, 15 bp, Homo sapiens
catcctattttataa

SEQ ID NO: 43515 - DNA, 15 bp, Homo sapiens
ccatcctattttata

SEQ ID NO: 43516 - DNA, 15 bp, Homo sapiens
accatcctattttat

SEQ ID NO: 43517 - DNA, 15 bp, Homo sapiens
taccatcctatttta

SEQ ID NO: 43518 - DNA, 15 bp, Homo sapiens
ttaccatcctatttt

SEQ ID NO: 43519 - DNA, 15 bp, Homo sapiens
attaccatcctattt

SEQ ID NO: 43520 - DNA, 15 bp, Homo sapiens
cattaccatcctatt

SEQ ID NO: 43521 - DNA, 15 bp, Homo sapiens
ccattaccatcctat

SEQ ID NO: 43522 - DNA, 15 bp, Homo sapiens
accattaccatccta

SEQ ID NO: 43523 - DNA, 15 bp, Homo sapiens
taccattaccatcct

SEQ ID NO: 43524 - DNA, 15 bp, Homo sapiens
ataccattaccatcc

SEQ ID NO: 43525 - DNA, 15 bp, Homo sapiens
gataccattaccatc

SEQ ID NO: 43526 - DNA, 15 bp, Homo sapiens
agataccattaccat

SEQ ID NO: 43527 - DNA, 15 bp, Homo sapiens
aagataccattacca

SEQ ID NO: 43528 - DNA, 15 bp, Homo sapiens
aaagataccattacc

SEQ ID NO: 43529 - DNA, 15 bp, Homo sapiens
gaaagataccattac

SEQ ID NO: 43530 - DNA, 15 bp, Homo sapiens
tgaaagataccatta

SEQ ID NO: 43531 - DNA, 15 bp, Homo sapiens
ctgaaagataccatt

SEQ ID NO: 43532 - DNA, 15 bp, Homo sapiens
gctgaaagataccat

SEQ ID NO: 43533 - DNA, 15 bp, Homo sapiens
ggctgaaagatacca

SEQ ID NO: 43534 - DNA, 15 bp, Homo sapiens
gggctgaaagatacc

SEQ ID NO: 43535 - DNA, 15 bp, Homo sapiens
tgggctgaaagatac

SEQ ID NO: 43536 - DNA, 15 bp, Homo sapiens
ctgggctgaaagata

SEQ ID NO: 43537 - DNA, 15 bp, Homo sapiens
tctgggctgaaagat

SEQ ID NO: 43538 - DNA, 15 bp, Homo sapiens
ttctgggctgaaaga

SEQ ID NO: 43539 - DNA, 15 bp, Homo sapiens
cttctgggctgaaag

SEQ ID NO: 43540 - DNA, 15 bp, Homo sapiens
ccttctgggctgaaa

SEQ ID NO: 43541 - DNA, 15 bp, Homo sapiens
tccttctgggctgaa

SEQ ID NO: 43542 - DNA, 15 bp, Homo sapiens
atccttctgggctga

SEQ ID NO: 43543 - DNA, 15 bp, Homo sapiens
aatccttctgggctg

SEQ ID NO: 43544 - DNA, 15 bp, Homo sapiens
gaatccttctgggct

SEQ ID NO: 43545 - DNA, 15 bp, Homo sapiens
tgaatccttctgggc

SEQ ID NO: 43546 - DNA, 15 bp, Homo sapiens
ctgaatccttctggg

SEQ ID NO: 43547 - DNA, 15 bp, Homo sapiens
gctgaatccttctgg

SEQ ID NO: 43548 - DNA, 15 bp, Homo sapiens
agctgaatccttctg

SEQ ID NO: 43549 - DNA, 15 bp, Homo sapiens
gagctgaatccttct

SEQ ID NO: 43550 - DNA, 15 bp, Homo sapiens
agagctgaatccttc

SEQ ID NO: 43551 - DNA, 15 bp, Homo sapiens
cagagctgaatcctt

SEQ ID NO: 43552 - DNA, 15 bp, Homo sapiens
ccagagctgaatcct

SEQ ID NO: 43553 - DNA, 15 bp, Homo sapiens
tccagagctgaatcc

SEQ ID NO: 43554 - DNA, 15 bp, Homo sapiens
ctccagagctgaatc

SEQ ID NO: 43555 - DNA, 15 bp, Homo sapiens
tctccagagctgaat

SEQ ID NO: 43556 - DNA, 15 bp, Homo sapiens
gtctccagagctgaa

SEQ ID NO: 43557 - DNA, 15 bp, Homo sapiens
tgtctccagagctga

SEQ ID NO: 43558 - DNA, 15 bp, Homo sapiens
gtgtctccagagctg

SEQ ID NO: 43559 - DNA, 15 bp, Homo sapiens
ggtgtctccagagct

SEQ ID NO: 43560 - DNA, 15 bp, Homo sapiens
aggtgtctccagagc

SEQ ID NO: 43561 - DNA, 15 bp, Homo sapiens
aaggtgtctccagag

SEQ ID NO: 43562 - DNA, 15 bp, Homo sapiens
aaaggtgtctccaga

SEQ ID NO: 43563 - DNA, 15 bp, Homo sapiens
aaaaggtgtctccag

SEQ ID NO: 43564 - DNA, 15 bp, Homo sapiens
gaaaaggtgtctcca

SEQ ID NO: 43565 - DNA, 15 bp, Homo sapiens
agaaaaggtgtctcc

SEQ ID NO: 43566 - DNA, 15 bp, Homo sapiens
gagaaaaggtgtctc

SEQ ID NO: 43567 - DNA, 15 bp, Homo sapiens
tgagaaaaggtgtct

SEQ ID NO: 43568 - DNA, 15 bp, Homo sapiens
ttgagaaaaggtgtc

SEQ ID NO: 43569 - DNA, 15 bp, Homo sapiens
gttgagaaaaggtgt

SEQ ID NO: 43570 - DNA, 15 bp, Homo sapiens
ggttgagaaaaggtg

SEQ ID NO: 43571 - DNA, 15 bp, Homo sapiens
gggttgagaaaaggt

SEQ ID NO: 43572 - DNA, 15 bp, Homo sapiens
agggttgagaaaagg

SEQ ID NO: 43573 - DNA, 15 bp, Homo sapiens
cagggttgagaaaag

SEQ ID NO: 43574 - DNA, 15 bp, Homo sapiens
tcagggttgagaaaa

SEQ ID NO: 43575 - DNA, 15 bp, Homo sapiens
gtcagggttgagaaa

SEQ ID NO: 43576 - DNA, 15 bp, Homo sapiens
ggtcagggttgagaa

SEQ ID NO: 43577 - DNA, 15 bp, Homo sapiens
gggtcagggttgaga

SEQ ID NO: 43578 - DNA, 15 bp, Homo sapiens
agggtcagggttgag

SEQ ID NO: 43579 - DNA, 15 bp, Homo sapiens
aagggtcagggttga

SEQ ID NO: 43580 - DNA, 15 bp, Homo sapiens
aaagggtcagggttg

SEQ ID NO: 43581 - DNA, 15 bp, Homo sapiens
aaaagggtcagggtt

SEQ ID NO: 43582 - DNA, 15 bp, Homo sapiens
aaaaagggtcagggt

SEQ ID NO: 43583 - DNA, 15 bp, Homo sapiens
aaaaaagggtcaggg

SEQ ID NO: 43584 - DNA, 15 bp, Homo sapiens
aaaaaaagggtcagg

SEQ ID NO: 43585 - DNA, 15 bp, Homo sapiens
aaaaaaaagggtcag

SEQ ID NO: 43586 - DNA, 15 bp, Homo sapiens
aaaaaaaaagggtca

SEQ ID NO: 43587 - DNA, 15 bp, Homo sapiens
gaaaaaaaaagggtc

SEQ ID NO: 43588 - DNA, 15 bp, Homo sapiens
agaaaaaaaaagggt

SEQ ID NO: 43589 - DNA, 15 bp, Homo sapiens
aagaaaaaaaaaggg

SEQ ID NO: 43590 - DNA, 15 bp, Homo sapiens
gaagaaaaaaaaagg

SEQ ID NO: 43591 - DNA, 15 bp, Homo sapiens
tgaagaaaaaaaaag

SEQ ID NO: 43592 - DNA, 15 bp, Homo sapiens
ttgaagaaaaaaaaa

SEQ ID NO: 43593 - DNA, 15 bp, Homo sapiens
attgaagaaaaaaaa

SEQ ID NO: 43594 - DNA, 15 bp, Homo sapiens
aattgaagaaaaaaa

SEQ ID NO: 43595 - DNA, 15 bp, Homo sapiens
gaattgaagaaaaaa

SEQ ID NO: 43596 - DNA, 15 bp, Homo sapiens
agaattgaagaaaaa

SEQ ID NO: 43597 - DNA, 15 bp, Homo sapiens
aagaattgaagaaaa

SEQ ID NO: 43598 - DNA, 15 bp, Homo sapiens
gaagaattgaagaaa

SEQ ID NO: 43599 - DNA, 15 bp, Homo sapiens
agaagaattgaagaa

SEQ ID NO: 43600 - DNA, 15 bp, Homo sapiens
tagaagaattgaaga

SEQ ID NO: 43601 - DNA, 15 bp, Homo sapiens
gtagaagaattgaag

SEQ ID NO: 43602 - DNA, 15 bp, Homo sapiens
tgtagaagaattgaa

SEQ ID NO: 43603 - DNA, 15 bp, Homo sapiens
ttgtagaagaattga

SEQ ID NO: 43604 - DNA, 15 bp, Homo sapiens
attgtagaagaattg

SEQ ID NO: 43605 - DNA, 15 bp, Homo sapiens
tattgtagaagaatt

SEQ ID NO: 43606 - DNA, 15 bp, Homo sapiens
gtattgtagaagaat

SEQ ID NO: 43607 - DNA, 15 bp, Homo sapiens
ggtattgtagaagaa

SEQ ID NO: 43608 - DNA, 15 bp, Homo sapiens
tggtattgtagaaga

SEQ ID NO: 43609 - DNA, 15 bp, Homo sapiens
ttggtattgtagaag

SEQ ID NO: 43610 - DNA, 15 bp, Homo sapiens
attggtattgtagaa

SEQ ID NO: 43611 - DNA, 15 bp, Homo sapiens
tattggtattgtaga

SEQ ID NO: 43612 - DNA, 15 bp, Homo sapiens
ctattggtattgtag

SEQ ID NO: 43613 - DNA, 15 bp, Homo sapiens
gctattggtattgta

SEQ ID NO: 43614 - DNA, 15 bp, Homo sapiens
ggctattggtattgt

SEQ ID NO: 43615 - DNA, 15 bp, Homo sapiens
tggctattggtattg

SEQ ID NO: 43616 - DNA, 15 bp, Homo sapiens
ttggctattggtatt

SEQ ID NO: 43617 - DNA, 15 bp, Homo sapiens
attggctattggtat

SEQ ID NO: 43618 - DNA, 15 bp, Homo sapiens
aattggctattggta

SEQ ID NO: 43619 - DNA, 15 bp, Homo sapiens
caattggctattggt

SEQ ID NO: 43620 - DNA, 15 bp, Homo sapiens
gcaattggctattgg

SEQ ID NO: 43621 - DNA, 15 bp, Homo sapiens
agcaattggctattg

SEQ ID NO: 43622 - DNA, 15 bp, Homo sapiens
tagcaattggctatt

SEQ ID NO: 43623 - DNA, 15 bp, Homo sapiens
ctagcaattggctat

SEQ ID NO: 43624 - DNA, 15 bp, Homo sapiens
actagcaattggcta

SEQ ID NO: 43625 - DNA, 15 bp, Homo sapiens
tactagcaattggct

SEQ ID NO: 43626 - DNA, 15 bp, Homo sapiens
atactagcaattggc

SEQ ID NO: 43627 - DNA, 15 bp, Homo sapiens
aatactagcaattgg

SEQ ID NO: 43628 - DNA, 15 bp, Homo sapiens
caatactagcaattg

SEQ ID NO: 43629 - DNA, 15 bp, Homo sapiens
tcaatactagcaatt

SEQ ID NO: 43630 - DNA, 15 bp, Homo sapiens
atcaatactagcaat

SEQ ID NO: 43631 - DNA, 15 bp, Homo sapiens
gatcaatactagcaa

SEQ ID NO: 43632 - DNA, 15 bp, Homo sapiens
ggatcaatactagca

SEQ ID NO: 43633 - DNA, 15 bp, Homo sapiens
gggatcaatactagc

SEQ ID NO: 43634 - DNA, 15 bp, Homo sapiens
tgggatcaatactag

SEQ ID NO: 43635 - DNA, 15 bp, Homo sapiens
ctgggatcaatacta

SEQ ID NO: 43636 - DNA, 15 bp, Homo sapiens
gctgggatcaatact

SEQ ID NO: 43637 - DNA, 15 bp, Homo sapiens
ggctgggatcaatac

SEQ ID NO: 43638 - DNA, 15 bp, Homo sapiens
tggctgggatcaata

SEQ ID NO: 43639 - DNA, 15 bp, Homo sapiens
atggctgggatcaat

SEQ ID NO: 43640 - DNA, 15 bp, Homo sapiens
aatggctgggatcaa

SEQ ID NO: 43641 - DNA, 15 bp, Homo sapiens
caatggctgggatca

SEQ ID NO: 43642 - DNA, 15 bp, Homo sapiens
ccaatggctgggatc

SEQ ID NO: 43643 - DNA, 15 bp, Homo sapiens
accaatggctgggat

SEQ ID NO: 43644 - DNA, 15 bp, Homo sapiens
caccaatggctggga

SEQ ID NO: 43645 - DNA, 15 bp, Homo sapiens
tcaccaatggctggg

SEQ ID NO: 43646 - DNA, 15 bp, Homo sapiens
ttcaccaatggctgg

SEQ ID NO: 43647 - DNA, 15 bp, Homo sapiens
cttcaccaatggctg

SEQ ID NO: 43648 - DNA, 15 bp, Homo sapiens
tcttcaccaatggct

SEQ ID NO: 43649 - DNA, 15 bp, Homo sapiens
atcttcaccaatggc

SEQ ID NO: 43650 - DNA, 15 bp, Homo sapiens
gatcttcaccaatgg

SEQ ID NO: 43651 - DNA, 15 bp, Homo sapiens
tgatcttcaccaatg

SEQ ID NO: 43652 - DNA, 15 bp, Homo sapiens
ctgatcttcaccaat

SEQ ID NO: 43653 - DNA, 15 bp, Homo sapiens
gctgatcttcaccaa

SEQ ID NO: 43654 - DNA, 15 bp, Homo sapiens
ggctgatcttcacca

SEQ ID NO: 43655 - DNA, 15 bp, Homo sapiens
aggctgatcttcacc

SEQ ID NO: 43656 - DNA, 15 bp, Homo sapiens
caggctgatcttcac

SEQ ID NO: 43657 - DNA, 15 bp, Homo sapiens
acaggctgatcttca

SEQ ID NO: 43658 - DNA, 15 bp, Homo sapiens
gacaggctgatcttc

SEQ ID NO: 43659 - DNA, 15 bp, Homo sapiens
ggacaggctgatctt

SEQ ID NO: 43660 - DNA, 15 bp, Homo sapiens
tggacaggctgatct

SEQ ID NO: 43661 - DNA, 15 bp, Homo sapiens
atggacaggctgatc

SEQ ID NO: 43662 - DNA, 15 bp, Homo sapiens
gatggacaggctgat

SEQ ID NO: 43663 - DNA, 15 bp, Homo sapiens
agatggacaggctga

SEQ ID NO: 43664 - DNA, 15 bp, Homo sapiens
cagatggacaggctg

SEQ ID NO: 43665 - DNA, 15 bp, Homo sapiens
acagatggacaggct

SEQ ID NO: 43666 - DNA, 15 bp, Homo sapiens
aacagatggacaggc

SEQ ID NO: 43667 - DNA, 15 bp, Homo sapiens
caacagatggacagg

SEQ ID NO: 43668 - DNA, 15 bp, Homo sapiens
gcaacagatggacag

SEQ ID NO: 43669 - DNA, 15 bp, Homo sapiens
agcaacagatggaca

SEQ ID NO: 43670 - DNA, 15 bp, Homo sapiens
gagcaacagatggac

SEQ ID NO: 43671 - DNA, 15 bp, Homo sapiens
ggagcaacagatgga

SEQ ID NO: 43672 - DNA, 15 bp, Homo sapiens
tggagcaacagatgg

SEQ ID NO: 43673 - DNA, 15 bp, Homo sapiens
ctggagcaacagatg

SEQ ID NO: 43674 - DNA, 15 bp, Homo sapiens
cctggagcaacagat

SEQ ID NO: 43675 - DNA, 15 bp, Homo sapiens
gcctggagcaacaga

SEQ ID NO: 43676 - DNA, 15 bp, Homo sapiens
agcctggagcaacag

SEQ ID NO: 43677 - DNA, 15 bp, Homo sapiens
cagcctggagcaaca

SEQ ID NO: 43678 - DNA, 15 bp, Homo sapiens
tcagcctggagcaac

SEQ ID NO: 43679 - DNA, 15 bp, Homo sapiens
gtcagcctggagcaa

SEQ ID NO: 43680 - DNA, 15 bp, Homo sapiens
tgtcagcctggagca

SEQ ID NO: 43681 - DNA, 15 bp, Homo sapiens
atgtcagcctggagc

SEQ ID NO: 43682 - DNA, 15 bp, Homo sapiens
gatgtcagcctggag

SEQ ID NO: 43683 - DNA, 15 bp, Homo sapiens
ggatgtcagcctgga

SEQ ID NO: 43684 - DNA, 15 bp, Homo sapiens
gggatgtcagcctgg

SEQ ID NO: 43685 - DNA, 15 bp, Homo sapiens
ggggatgtcagcctg

SEQ ID NO: 43686 - DNA, 15 bp, Homo sapiens
tggggatgtcagcct

SEQ ID NO: 43687 - DNA, 15 bp, Homo sapiens
gtggggatgtcagcc

SEQ ID NO: 43688 - DNA, 15 bp, Homo sapiens
ggtggggatgtcagc

SEQ ID NO: 43689 - DNA, 15 bp, Homo sapiens
tggtggggatgtcag

SEQ ID NO: 43690 - DNA, 15 bp, Homo sapiens
ctggtggggatgtca

SEQ ID NO: 43691 - DNA, 15 bp, Homo sapiens
actggtggggatgtc

SEQ ID NO: 43692 - DNA, 15 bp, Homo sapiens
aactggtggggatgt

SEQ ID NO: 43693 - DNA, 15 bp, Homo sapiens
gaactggtggggatg

SEQ ID NO: 43694 - DNA, 15 bp, Homo sapiens
tgaactggtggggat

SEQ ID NO: 43695 - DNA, 15 bp, Homo sapiens
gtgaactggtgggga

SEQ ID NO: 43696 - DNA, 15 bp, Homo sapiens
tgtgaactggtgggg

SEQ ID NO: 43697 - DNA, 15 bp, Homo sapiens
gtgtgaactggtggg

SEQ ID NO: 43698 - DNA, 15 bp, Homo sapiens
agtgtgaactggtgg

SEQ ID NO: 43699 - DNA, 15 bp, Homo sapiens
tagtgtgaactggtg

SEQ ID NO: 43700 - DNA, 15 bp, Homo sapiens
ctagtgtgaactggt

SEQ ID NO: 43701 - DNA, 15 bp, Homo sapiens
gctagtgtgaactgg

SEQ ID NO: 43702 - DNA, 15 bp, Homo sapiens
tgctagtgtgaactg

SEQ ID NO: 43703 - DNA, 15 bp, Homo sapiens
ctgctagtgtgaact

SEQ ID NO: 43704 - DNA, 15 bp, Homo sapiens
gctgctagtgtgaac

SEQ ID NO: 43705 - DNA, 15 bp, Homo sapiens
ggctgctagtgtgaa

SEQ ID NO: 43706 - DNA, 15 bp, Homo sapiens
aggctgctagtgtga

SEQ ID NO: 43707 - DNA, 15 bp, Homo sapiens
aaggctgctagtgtg

SEQ ID NO: 43708 - DNA, 15 bp, Homo sapiens
caaggctgctagtgt

SEQ ID NO: 43709 - DNA, 15 bp, Homo sapiens
gcaaggctgctagtg

SEQ ID NO: 43710 - DNA, 15 bp, Homo sapiens
agcaaggctgctagt

SEQ ID NO: 43711 - DNA, 15 bp, Homo sapiens
cagcaaggctgctag

SEQ ID NO: 43712 - DNA, 15 bp, Homo sapiens
acagcaaggctgcta

SEQ ID NO: 43713 - DNA, 15 bp, Homo sapiens
tacagcaaggctgct

SEQ ID NO: 43714 - DNA, 15 bp, Homo sapiens
ctacagcaaggctgc

SEQ ID NO: 43715 - DNA, 15 bp, Homo sapiens
actacagcaaggctg

SEQ ID NO: 43716 - DNA, 15 bp, Homo sapiens
cactacagcaaggct

SEQ ID NO: 43717 - DNA, 15 bp, Homo sapiens
ccactacagcaaggc

SEQ ID NO: 43718 - DNA, 15 bp, Homo sapiens
gccactacagcaagg

SEQ ID NO: 43719 - DNA, 15 bp, Homo sapiens
tgccactacagcaag

SEQ ID NO: 43720 - DNA, 15 bp, Homo sapiens
ttgccactacagcaa

SEQ ID NO: 43721 - DNA, 15 bp, Homo sapiens
cttgccactacagca

SEQ ID NO: 43722 - DNA, 15 bp, Homo sapiens
acttgccactacagc

SEQ ID NO: 43723 - DNA, 15 bp, Homo sapiens
tacttgccactacag

SEQ ID NO: 43724 - DNA, 15 bp, Homo sapiens
ctacttgccactaca

SEQ ID NO: 43725 - DNA, 15 bp, Homo sapiens
actacttgccactac

SEQ ID NO: 43726 - DNA, 15 bp, Homo sapiens
cactacttgccacta

SEQ ID NO: 43727 - DNA, 15 bp, Homo sapiens
ccactacttgccact

SEQ ID NO: 43728 - DNA, 15 bp, Homo sapiens
cccactacttgccac

SEQ ID NO: 43729 - DNA, 15 bp, Homo sapiens
gcccactacttgcca

SEQ ID NO: 43730 - DNA, 15 bp, Homo sapiens
tgcccactacttgcc

SEQ ID NO: 43731 - DNA, 15 bp, Homo sapiens
gtgcccactacttgc

SEQ ID NO: 43732 - DNA, 15 bp, Homo sapiens
agtgcccactacttg

SEQ ID NO: 43733 - DNA, 15 bp, Homo sapiens
cagtgcccactactt

SEQ ID NO: 43734 - DNA, 15 bp, Homo sapiens
tcagtgcccactact

SEQ ID NO: 43735 - DNA, 15 bp, Homo sapiens
gtcagtgcccactac

SEQ ID NO: 43736 - DNA, 15 bp, Homo sapiens
tgtcagtgcccacta

SEQ ID NO: 43737 - DNA, 15 bp, Homo sapiens
atgtcagtgcccact

SEQ ID NO: 43738 - DNA, 15 bp, Homo sapiens
aatgtcagtgcccac

SEQ ID NO: 43739 - DNA, 15 bp, Homo sapiens
aaatgtcagtgccca

SEQ ID NO: 43740 - DNA, 15 bp, Homo sapiens
aaaatgtcagtgccc

SEQ ID NO: 43741 - DNA, 15 bp, Homo sapiens
taaaatgtcagtgcc

SEQ ID NO: 43742 - DNA, 15 bp, Homo sapiens
ataaaatgtcagtgc

SEQ ID NO: 43743 - DNA, 15 bp, Homo sapiens
cataaaatgtcagtg

SEQ ID NO: 43744 - DNA, 15 bp, Homo sapiens
gcataaaatgtcagt

SEQ ID NO: 43745 - DNA, 15 bp, Homo sapiens
agcataaaatgtcag

SEQ ID NO: 43746 - DNA, 15 bp, Homo sapiens
gagcataaaatgtca

SEQ ID NO: 43747 - DNA, 15 bp, Homo sapiens
agagcataaaatgtc

SEQ ID NO: 43748 - DNA, 15 bp, Homo sapiens
gagagcataaaatgt

SEQ ID NO: 43749 - DNA, 15 bp, Homo sapiens
tgagagcataaaatg

SEQ ID NO: 43750 - DNA, 15 bp, Homo sapiens
ctgagagcataaaat

SEQ ID NO: 43751 - DNA, 15 bp, Homo sapiens
cctgagagcataaaa

SEQ ID NO: 43752 - DNA, 15 bp, Homo sapiens
tcctgagagcataaa

SEQ ID NO: 43753 - DNA, 15 bp, Homo sapiens
atcctgagagcataa

SEQ ID NO: 43754 - DNA, 15 bp, Homo sapiens
gatcctgagagcata

SEQ ID NO: 43755 - DNA, 15 bp, Homo sapiens
agatcctgagagcat

SEQ ID NO: 43756 - DNA, 15 bp, Homo sapiens
aagatcctgagagca

SEQ ID NO: 43757 - DNA, 15 bp, Homo sapiens
aaagatcctgagagc

SEQ ID NO: 43758 - DNA, 15 bp, Homo sapiens
caaagatcctgagag

SEQ ID NO: 43759 - DNA, 15 bp, Homo sapiens
tcaaagatcctgaga

SEQ ID NO: 43760 - DNA, 15 bp, Homo sapiens
atcaaagatcctgag

SEQ ID NO: 43761 - DNA, 15 bp, Homo sapiens
aatcaaagatcctga

SEQ ID NO: 43762 - DNA, 15 bp, Homo sapiens
aaatcaaagatcctg

SEQ ID NO: 43763 - DNA, 15 bp, Homo sapiens
gaaatcaaagatcct

SEQ ID NO: 43764 - DNA, 15 bp, Homo sapiens
agaaatcaaagatcc

SEQ ID NO: 43765 - DNA, 15 bp, Homo sapiens
aagaaatcaaagatc

SEQ ID NO: 43766 - DNA, 15 bp, Homo sapiens
aaagaaatcaaagat

SEQ ID NO: 43767 - DNA, 15 bp, Homo sapiens
gaaagaaatcaaaga

SEQ ID NO: 43768 - DNA, 15 bp, Homo sapiens
agaaagaaatcaaag

SEQ ID NO: 43769 - DNA, 15 bp, Homo sapiens
cagaaagaaatcaaa

SEQ ID NO: 43770 - DNA, 15 bp, Homo sapiens
ccagaaagaaatcaa

SEQ ID NO: 43771 - DNA, 15 bp, Homo sapiens
gccagaaagaaatca

SEQ ID NO: 43772 - DNA, 15 bp, Homo sapiens
tgccagaaagaaatc

SEQ ID NO: 43773 - DNA, 15 bp, Homo sapiens
atgccagaaagaaat

SEQ ID NO: 43774 - DNA, 15 bp, Homo sapiens
catgccagaaagaaa

SEQ ID NO: 43775 - DNA, 15 bp, Homo sapiens
ccatgccagaaagaa

SEQ ID NO: 43776 - DNA, 15 bp, Homo sapiens
gccatgccagaaaga

SEQ ID NO: 43777 - DNA, 15 bp, Homo sapiens
agccatgccagaaag

SEQ ID NO: 43778 - DNA, 15 bp, Homo sapiens
aagccatgccagaaa

SEQ ID NO: 43779 - DNA, 15 bp, Homo sapiens
caagccatgccagaa

SEQ ID NO: 43780 - DNA, 15 bp, Homo sapiens
acaagccatgccaga

SEQ ID NO: 43781 - DNA, 15 bp, Homo sapiens
tacaagccatgccag

SEQ ID NO: 43782 - DNA, 15 bp, Homo sapiens
ctacaagccatgcca

SEQ ID NO: 43783 - DNA, 15 bp, Homo sapiens
tctacaagccatgcc

SEQ ID NO: 43784 - DNA, 15 bp, Homo sapiens
ttctacaagccatgc

SEQ ID NO: 43785 - DNA, 15 bp, Homo sapiens
gttctacaagccatg

SEQ ID NO: 43786 - DNA, 15 bp, Homo sapiens
ggttctacaagccat

SEQ ID NO: 43787 - DNA, 15 bp, Homo sapiens
gggttctacaagcca

SEQ ID NO: 43788 - DNA, 15 bp, Homo sapiens
agggttctacaagcc

SEQ ID NO: 43789 - DNA, 15 bp, Homo sapiens
cagggttctacaagc

SEQ ID NO: 43790 - DNA, 15 bp, Homo sapiens
acagggttctacaag

SEQ ID NO: 43791 - DNA, 15 bp, Homo sapiens
tacagggttctacaa

SEQ ID NO: 43792 - DNA, 15 bp, Homo sapiens
atacagggttctaca

SEQ ID NO: 43793 - DNA, 15 bp, Homo sapiens
gatacagggttctac

SEQ ID NO: 43794 - DNA, 15 bp, Homo sapiens
agatacagggttcta

SEQ ID NO: 43795 - DNA, 15 bp, Homo sapiens
gagatacagggttct

SEQ ID NO: 43796 - DNA, 15 bp, Homo sapiens
ggagatacagggttc

SEQ ID NO: 43797 - DNA, 15 bp, Homo sapiens
aggagatacagggtt

SEQ ID NO: 43798 - DNA, 15 bp, Homo sapiens
gaggagatacagggt

SEQ ID NO: 43799 - DNA, 15 bp, Homo sapiens
ggaggagatacaggg

SEQ ID NO: 43800 - DNA, 15 bp, Homo sapiens
tggaggagatacagg

SEQ ID NO: 43801 - DNA, 15 bp, Homo sapiens
ttggaggagatacag

SEQ ID NO: 43802 - DNA, 15 bp, Homo sapiens
attggaggagataca

SEQ ID NO: 43803 - DNA, 15 bp, Homo sapiens
aattggaggagatac

SEQ ID NO: 43804 - DNA, 15 bp, Homo sapiens
aaattggaggagata

SEQ ID NO: 43805 - DNA, 15 bp, Homo sapiens
aaaattggaggagat

SEQ ID NO: 43806 - DNA, 15 bp, Homo sapiens
caaaattggaggaga

SEQ ID NO: 43807 - DNA, 15 bp, Homo sapiens
tcaaaattggaggag

SEQ ID NO: 43808 - DNA, 15 bp, Homo sapiens
gtcaaaattggagga

SEQ ID NO: 43809 - DNA, 15 bp, Homo sapiens
tgtcaaaattggagg

SEQ ID NO: 43810 - DNA, 15 bp, Homo sapiens
ctgtcaaaattggag

SEQ ID NO: 43811 - DNA, 15 bp, Homo sapiens
gctgtcaaaattgga

SEQ ID NO: 43812 - DNA, 15 bp, Homo sapiens
ggctgtcaaaattgg

SEQ ID NO: 43813 - DNA, 15 bp, Homo sapiens
aggctgtcaaaattg

SEQ ID NO: 43814 - DNA, 15 bp, Homo sapiens
gaggctgtcaaaatt

SEQ ID NO: 43815 - DNA, 15 bp, Homo sapiens
tgaggctgtcaaaat

SEQ ID NO: 43816 - DNA, 15 bp, Homo sapiens
ctgaggctgtcaaaa

SEQ ID NO: 43817 - DNA, 15 bp, Homo sapiens
cctgaggctgtcaaa

SEQ ID NO: 43818 - DNA, 15 bp, Homo sapiens
tcctgaggctgtcaa

SEQ ID NO: 43819 - DNA, 15 bp, Homo sapiens
gtcctgaggctgtca

SEQ ID NO: 43820 - DNA, 15 bp, Homo sapiens
ggtcctgaggctgtc

SEQ ID NO: 43821 - DNA, 15 bp, Homo sapiens
aggtcctgaggctgt

SEQ ID NO: 43822 - DNA, 15 bp, Homo sapiens
aaggtcctgaggctg

SEQ ID NO: 43823 - DNA, 15 bp, Homo sapiens
aaaggtcctgaggct

SEQ ID NO: 43824 - DNA, 15 bp, Homo sapiens
caaaggtcctgaggc

SEQ ID NO: 43825 - DNA, 15 bp, Homo sapiens
acaaaggtcctgagg

SEQ ID NO: 43826 - DNA, 15 bp, Homo sapiens
cacaaaggtcctgag

SEQ ID NO: 43827 - DNA, 15 bp, Homo sapiens
ccacaaaggtcctga

SEQ ID NO: 43828 - DNA, 15 bp, Homo sapiens
accacaaaggtcctg

SEQ ID NO: 43829 - DNA, 15 bp, Homo sapiens
taccacaaaggtcct

SEQ ID NO: 43830 - DNA, 15 bp, Homo sapiens
gtaccacaaaggtcc

SEQ ID NO: 43831 - DNA, 15 bp, Homo sapiens
agtaccacaaaggtc

SEQ ID NO: 43832 - DNA, 15 bp, Homo sapiens
tagtaccacaaaggt

SEQ ID NO: 43833 - DNA, 15 bp, Homo sapiens
gtagtaccacaaagg

SEQ ID NO: 43834 - DNA, 15 bp, Homo sapiens
agtagtaccacaaag

SEQ ID NO: 43835 - DNA, 15 bp, Homo sapiens
gagtagtaccacaaa

SEQ ID NO: 43836 - DNA, 15 bp, Homo sapiens
tgagtagtaccacaa

SEQ ID NO: 43837 - DNA, 15 bp, Homo sapiens
atgagtagtaccaca

SEQ ID NO: 43838 - DNA, 15 bp, Homo sapiens
aatgagtagtaccac

SEQ ID NO: 43839 - DNA, 15 bp, Homo sapiens
gaatgagtagtacca

SEQ ID NO: 43840 - DNA, 15 bp, Homo sapiens
tgaatgagtagtacc

SEQ ID NO: 43841 - DNA, 15 bp, Homo sapiens
ctgaatgagtagtac

SEQ ID NO: 43842 - DNA, 15 bp, Homo sapiens
cctgaatgagtagta

SEQ ID NO: 43843 - DNA, 15 bp, Homo sapiens
gcctgaatgagtagt

SEQ ID NO: 43844 - DNA, 15 bp, Homo sapiens
ggcctgaatgagtag

SEQ ID NO: 43845 - DNA, 15 bp, Homo sapiens
gggcctgaatgagta

SEQ ID NO: 43846 - DNA, 15 bp, Homo sapiens
tgggcctgaatgagt

SEQ ID NO: 43847 - DNA, 15 bp, Homo sapiens
atgggcctgaatgag

SEQ ID NO: 43848 - DNA, 15 bp, Homo sapiens
aatgggcctgaatga

SEQ ID NO: 43849 - DNA, 15 bp, Homo sapiens
aaatgggcctgaatg

SEQ ID NO: 43850 - DNA, 15 bp, Homo sapiens
aaaatgggcctgaat

SEQ ID NO: 43851 - DNA, 15 bp, Homo sapiens
aaaaatgggcctgaa

SEQ ID NO: 43852 - DNA, 15 bp, Homo sapiens
taaaaatgggcctga

SEQ ID NO: 43853 - DNA, 15 bp, Homo sapiens
ttaaaaatgggcctg

SEQ ID NO: 43854 - DNA, 15 bp, Homo sapiens
cttaaaaatgggcct

SEQ ID NO: 43855 - DNA, 15 bp, Homo sapiens
ccttaaaaatgggcc

SEQ ID NO: 43856 - DNA, 15 bp, Homo sapiens
accttaaaaatgggc

SEQ ID NO: 43857 - DNA, 15 bp, Homo sapiens
gaccttaaaaatggg

SEQ ID NO: 43858 - DNA, 15 bp, Homo sapiens
tgaccttaaaaatgg

SEQ ID NO: 43859 - DNA, 15 bp, Homo sapiens
ctgaccttaaaaatg

SEQ ID NO: 43860 - DNA, 15 bp, Homo sapiens
actgaccttaaaaat

SEQ ID NO: 43861 - DNA, 15 bp, Homo sapiens
gactgaccttaaaaa

SEQ ID NO: 43862 - DNA, 15 bp, Homo sapiens
tgactgaccttaaaa

SEQ ID NO: 43863 - DNA, 15 bp, Homo sapiens
ttgactgaccttaaa

SEQ ID NO: 43864 - DNA, 15 bp, Homo sapiens
tttgactgaccttaa

SEQ ID NO: 43865 - DNA, 15 bp, Homo sapiens
ctttgactgacctta

SEQ ID NO: 43866 - DNA, 15 bp, Homo sapiens
actttgactgacctt

SEQ ID NO: 43867 - DNA, 15 bp, Homo sapiens
tactttgactgacct

SEQ ID NO: 43868 - DNA, 15 bp, Homo sapiens
gtactttgactgacc

SEQ ID NO: 43869 - DNA, 15 bp, Homo sapiens
agtactttgactgac

SEQ ID NO: 43870 - DNA, 15 bp, Homo sapiens
tagtactttgactga

SEQ ID NO: 43871 - DNA, 15 bp, Homo sapiens
ctagtactttgactg

SEQ ID NO: 43872 - DNA, 15 bp, Homo sapiens
cctagtactttgact

SEQ ID NO: 43873 - DNA, 15 bp, Homo sapiens
acctagtactttgac

SEQ ID NO: 43874 - DNA, 15 bp, Homo sapiens
aacctagtactttga

SEQ ID NO: 43875 - DNA, 15 bp, Homo sapiens
gaacctagtactttg

SEQ ID NO: 43876 - DNA, 15 bp, Homo sapiens
agaacctagtacttt

SEQ ID NO: 43877 - DNA, 15 bp, Homo sapiens
gagaacctagtactt

SEQ ID NO: 43878 - DNA, 15 bp, Homo sapiens
agagaacctagtact

SEQ ID NO: 43879 - DNA, 15 bp, Homo sapiens
gagagaacctagtac

SEQ ID NO: 43880 - DNA, 15 bp, Homo sapiens
tgagagaacctagta

SEQ ID NO: 43881 - DNA, 15 bp, Homo sapiens
ttgagagaacctagt

SEQ ID NO: 43882 - DNA, 15 bp, Homo sapiens
cttgagagaacctag

SEQ ID NO: 43883 - DNA, 15 bp, Homo sapiens
acttgagagaaccta

SEQ ID NO: 43884 - DNA, 15 bp, Homo sapiens
cacttgagagaacct

SEQ ID NO: 43885 - DNA, 15 bp, Homo sapiens
tcacttgagagaacc

SEQ ID NO: 43886 - DNA, 15 bp, Homo sapiens
gtcacttgagagaac

SEQ ID NO: 43887 - DNA, 15 bp, Homo sapiens
ggtcacttgagagaa

SEQ ID NO: 43888 - DNA, 15 bp, Homo sapiens
tggtcacttgagaga

SEQ ID NO: 43889 - DNA, 15 bp, Homo sapiens
atggtcacttgagag

SEQ ID NO: 43890 - DNA, 15 bp, Homo sapiens
gatggtcacttgaga

SEQ ID NO: 43891 - DNA, 15 bp, Homo sapiens
agatggtcacttgag

SEQ ID NO: 43892 - DNA, 15 bp, Homo sapiens
tagatggtcacttga

SEQ ID NO: 43893 - DNA, 15 bp, Homo sapiens
ctagatggtcacttg

SEQ ID NO: 43894 - DNA, 15 bp, Homo sapiens
gctagatggtcactt

SEQ ID NO: 43895 - DNA, 15 bp, Homo sapiens
agctagatggtcact

SEQ ID NO: 43896 - DNA, 15 bp, Homo sapiens
cagctagatggtcac

SEQ ID NO: 43897 - DNA, 15 bp, Homo sapiens
tcagctagatggtca

SEQ ID NO: 43898 - DNA, 15 bp, Homo sapiens
atcagctagatggtc

SEQ ID NO: 43899 - DNA, 15 bp, Homo sapiens
catcagctagatggt

SEQ ID NO: 43900 - DNA, 15 bp, Homo sapiens
ccatcagctagatgg

SEQ ID NO: 43901 - DNA, 15 bp, Homo sapiens
accatcagctagatg

SEQ ID NO: 43902 - DNA, 15 bp, Homo sapiens
gaccatcagctagat

SEQ ID NO: 43903 - DNA, 15 bp, Homo sapiens
agaccatcagctaga

SEQ ID NO: 43904 - DNA, 15 bp, Homo sapiens
gagaccatcagctag

SEQ ID NO: 43905 - DNA, 15 bp, Homo sapiens
agagaccatcagcta

SEQ ID NO: 43906 - DNA, 15 bp, Homo sapiens
gagagaccatcagct

SEQ ID NO: 43907 - DNA, 15 bp, Homo sapiens
agagagaccatcagc

SEQ ID NO: 43908 - DNA, 15 bp, Homo sapiens
aagagagaccatcag

SEQ ID NO: 43909 - DNA, 15 bp, Homo sapiens
gaagagagaccatca

SEQ ID NO: 43910 - DNA, 15 bp, Homo sapiens
ggaagagagaccatc

SEQ ID NO: 43911 - DNA, 15 bp, Homo sapiens
gggaagagagaccat

SEQ ID NO: 43912 - DNA, 15 bp, Homo sapiens
ggggaagagagacca

SEQ ID NO: 43913 - DNA, 15 bp, Homo sapiens
tggggaagagagacc

SEQ ID NO: 43914 - DNA, 15 bp, Homo sapiens
atggggaagagagac

SEQ ID NO: 43915 - DNA, 15 bp, Homo sapiens
gatggggaagagaga

SEQ ID NO: 43916 - DNA, 15 bp, Homo sapiens
ggatggggaagagag

SEQ ID NO: 43917 - DNA, 15 bp, Homo sapiens
gggatggggaagaga

SEQ ID NO: 43918 - DNA, 15 bp, Homo sapiens
ggggatggggaagag

SEQ ID NO: 43919 - DNA, 15 bp, Homo sapiens
aggggatggggaaga

SEQ ID NO: 43920 - DNA, 15 bp, Homo sapiens
gaggggatggggaag

SEQ ID NO: 43921 - DNA, 15 bp, Homo sapiens
ggaggggatggggaa

SEQ ID NO: 43922 - DNA, 15 bp, Homo sapiens
aggaggggatgggga

SEQ ID NO: 43923 - DNA, 15 bp, Homo sapiens
gaggaggggatgggg

SEQ ID NO: 43924 - DNA, 15 bp, Homo sapiens
ggaggaggggatggg

SEQ ID NO: 43925 - DNA, 15 bp, Homo sapiens
gggaggaggggatgg

SEQ ID NO: 43926 - DNA, 15 bp, Homo sapiens
ggggaggaggggatg

SEQ ID NO: 43927 - DNA, 15 bp, Homo sapiens
tggggaggaggggat

SEQ ID NO: 43928 - DNA, 15 bp, Homo sapiens
ctggggaggagggga

SEQ ID NO: 43929 - DNA, 15 bp, Homo sapiens
gctggggaggagggg

SEQ ID NO: 43930 - DNA, 15 bp, Homo sapiens
tgctggggaggaggg

SEQ ID NO: 43931 - DNA, 15 bp, Homo sapiens
ctgctggggaggagg

SEQ ID NO: 43932 - DNA, 15 bp, Homo sapiens
actgctggggaggag

SEQ ID NO: 43933 - DNA, 15 bp, Homo sapiens
cactgctggggagga

SEQ ID NO: 43934 - DNA, 15 bp, Homo sapiens
tcactgctggggagg

SEQ ID NO: 43935 - DNA, 15 bp, Homo sapiens
ctcactgctggggag

SEQ ID NO: 43936 - DNA, 15 bp, Homo sapiens
cctcactgctgggga

SEQ ID NO: 43937 - DNA, 15 bp, Homo sapiens
acctcactgctgggg

SEQ ID NO: 43938 - DNA, 15 bp, Homo sapiens
gacctcactgctggg

SEQ ID NO: 43939 - DNA, 15 bp, Homo sapiens
agacctcactgctgg

SEQ ID NO: 43940 - DNA, 15 bp, Homo sapiens
aagacctcactgctg

SEQ ID NO: 43941 - DNA, 15 bp, Homo sapiens
aaagacctcactgct

SEQ ID NO: 43942 - DNA, 15 bp, Homo sapiens
gaaagacctcactgc

SEQ ID NO: 43943 - DNA, 15 bp, Homo sapiens
tgaaagacctcactg

SEQ ID NO: 43944 - DNA, 15 bp, Homo sapiens
ctgaaagacctcact

SEQ ID NO: 43945 - DNA, 15 bp, Homo sapiens
tctgaaagacctcac

SEQ ID NO: 43946 - DNA, 15 bp, Homo sapiens
ttctgaaagacctca

SEQ ID NO: 43947 - DNA, 15 bp, Homo sapiens
attctgaaagacctc

SEQ ID NO: 43948 - DNA, 15 bp, Homo sapiens
cattctgaaagacct

SEQ ID NO: 43949 - DNA, 15 bp, Homo sapiens
gcattctgaaagacc

SEQ ID NO: 43950 - DNA, 15 bp, Homo sapiens
agcattctgaaagac

SEQ ID NO: 43951 - DNA, 15 bp, Homo sapiens
cagcattctgaaaga

SEQ ID NO: 43952 - DNA, 15 bp, Homo sapiens
acagcattctgaaag

SEQ ID NO: 43953 - DNA, 15 bp, Homo sapiens
aacagcattctgaaa

SEQ ID NO: 43954 - DNA, 15 bp, Homo sapiens
caacagcattctgaa

SEQ ID NO: 43955 - DNA, 15 bp, Homo sapiens
acaacagcattctga

SEQ ID NO: 43956 - DNA, 15 bp, Homo sapiens
aacaacagcattctg

SEQ ID NO: 43957 - DNA, 15 bp, Homo sapiens
taacaacagcattct

SEQ ID NO: 43958 - DNA, 15 bp, Homo sapiens
ctaacaacagcattc

SEQ ID NO: 43959 - DNA, 15 bp, Homo sapiens
tctaacaacagcatt

SEQ ID NO: 43960 - DNA, 15 bp, Homo sapiens
ctctaacaacagcat

SEQ ID NO: 43961 - DNA, 15 bp, Homo sapiens
actctaacaacagca

SEQ ID NO: 43962 - DNA, 15 bp, Homo sapiens
cactctaacaacagc

SEQ ID NO: 43963 - DNA, 15 bp, Homo sapiens
acactctaacaacag

SEQ ID NO: 43964 - DNA, 15 bp, Homo sapiens
tacactctaacaaca

SEQ ID NO: 43965 - DNA, 15 bp, Homo sapiens
ttacactctaacaac

SEQ ID NO: 43966 - DNA, 15 bp, Homo sapiens
cttacactctaacaa

SEQ ID NO: 43967 - DNA, 15 bp, Homo sapiens
tcttacactctaaca

SEQ ID NO: 43968 - DNA, 15 bp, Homo sapiens
atcttacactctaac

SEQ ID NO: 43969 - DNA, 15 bp, Homo sapiens
tatcttacactctaa

SEQ ID NO: 43970 - DNA, 15 bp, Homo sapiens
ctatcttacactcta

SEQ ID NO: 43971 - DNA, 15 bp, Homo sapiens
tctatcttacactct

SEQ ID NO: 43972 - DNA, 15 bp, Homo sapiens
ttctatcttacactc

SEQ ID NO: 43973 - DNA, 15 bp, Homo sapiens
tttctatcttacact

SEQ ID NO: 43974 - DNA, 15 bp, Homo sapiens
gtttctatcttacac

SEQ ID NO: 43975 - DNA, 15 bp, Homo sapiens
tgtttctatcttaca

SEQ ID NO: 43976 - DNA, 15 bp, Homo sapiens
atgtttctatcttac

SEQ ID NO: 43977 - DNA, 15 bp, Homo sapiens
gatgtttctatctta

SEQ ID NO: 43978 - DNA, 15 bp, Homo sapiens
agatgtttctatctt

SEQ ID NO: 43979 - DNA, 15 bp, Homo sapiens
aagatgtttctatct

SEQ ID NO: 43980 - DNA, 15 bp, Homo sapiens
aaagatgtttctatc

SEQ ID NO: 43981 - DNA, 15 bp, Homo sapiens
caaagatgtttctat

SEQ ID NO: 43982 - DNA, 15 bp, Homo sapiens
tcaaagatgtttcta

SEQ ID NO: 43983 - DNA, 15 bp, Homo sapiens
atcaaagatgtttct

SEQ ID NO: 43984 - DNA, 15 bp, Homo sapiens
tatcaaagatgtttc

SEQ ID NO: 43985 - DNA, 15 bp, Homo sapiens
atatcaaagatgttt

SEQ ID NO: 43986 - DNA, 15 bp, Homo sapiens
catatcaaagatgtt

SEQ ID NO: 43987 - DNA, 15 bp, Homo sapiens
acatatcaaagatgt

SEQ ID NO: 43988 - DNA, 15 bp, Homo sapiens
aacatatcaaagatg

SEQ ID NO: 43989 - DNA, 15 bp, Homo sapiens
aaacatatcaaagat

SEQ ID NO: 43990 - DNA, 15 bp, Homo sapiens
aaaacatatcaaaga

SEQ ID NO: 43991 - DNA, 15 bp, Homo sapiens
aaaaacatatcaaag

SEQ ID NO: 43992 - DNA, 15 bp, Homo sapiens
taaaaacatatcaaa

SEQ ID NO: 43993 - DNA, 15 bp, Homo sapiens
gtaaaaacatatcaa

SEQ ID NO: 43994 - DNA, 15 bp, Homo sapiens
ggtaaaaacatatca

SEQ ID NO: 43995 - DNA, 15 bp, Homo sapiens
tggtaaaaacatatc

SEQ ID NO: 43996 - DNA, 15 bp, Homo sapiens
ctggtaaaaacatat

SEQ ID NO: 43997 - DNA, 15 bp, Homo sapiens
actggtaaaaacata

SEQ ID NO: 43998 - DNA, 15 bp, Homo sapiens
tactggtaaaaacat

SEQ ID NO: 43999 - DNA, 15 bp, Homo sapiens
ttactggtaaaaaca

SEQ ID NO: 44000 - DNA, 15 bp, Homo sapiens
attactggtaaaaac

SEQ ID NO: 44001 - DNA, 15 bp, Homo sapiens
aattactggtaaaaa

SEQ ID NO: 44002 - DNA, 15 bp, Homo sapiens
caattactggtaaaa

SEQ ID NO: 44003 - DNA, 15 bp, Homo sapiens
acaattactggtaaa

SEQ ID NO: 44004 - DNA, 15 bp, Homo sapiens
gacaattactggtaa

SEQ ID NO: 44005 - DNA, 15 bp, Homo sapiens
tgacaattactggta

SEQ ID NO: 44006 - DNA, 15 bp, Homo sapiens
ctgacaattactggt

SEQ ID NO: 44007 - DNA, 15 bp, Homo sapiens
cctgacaattactgg

SEQ ID NO: 44008 - DNA, 15 bp, Homo sapiens
tcctgacaattactg

SEQ ID NO: 44009 - DNA, 15 bp, Homo sapiens
ctcctgacaattact

SEQ ID NO: 44010 - DNA, 15 bp, Homo sapiens
tctcctgacaattac

SEQ ID NO: 44011 - DNA, 15 bp, Homo sapiens
gtctcctgacaatta

SEQ ID NO: 44012 - DNA, 15 bp, Homo sapiens
agtctcctgacaatt

SEQ ID NO: 44013 - DNA, 15 bp, Homo sapiens
cagtctcctgacaat

SEQ ID NO: 44014 - DNA, 15 bp, Homo sapiens
acagtctcctgacaa

SEQ ID NO: 44015 - DNA, 15 bp, Homo sapiens
aacagtctcctgaca

SEQ ID NO: 44016 - DNA, 15 bp, Homo sapiens
gaacagtctcctgac

SEQ ID NO: 44017 - DNA, 15 bp, Homo sapiens
agaacagtctcctga

SEQ ID NO: 44018 - DNA, 15 bp, Homo sapiens
gagaacagtctcctg

SEQ ID NO: 44019 - DNA, 15 bp, Homo sapiens
agagaacagtctcct

SEQ ID NO: 44020 - DNA, 15 bp, Homo sapiens
tagagaacagtctcc

SEQ ID NO: 44021 - DNA, 15 bp, Homo sapiens
ttagagaacagtctc

SEQ ID NO: 44022 - DNA, 15 bp, Homo sapiens
attagagaacagtct

SEQ ID NO: 44023 - DNA, 15 bp, Homo sapiens
cattagagaacagtc

SEQ ID NO: 44024 - DNA, 15 bp, Homo sapiens
acattagagaacagt

SEQ ID NO: 44025 - DNA, 15 bp, Homo sapiens
cacattagagaacag

SEQ ID NO: 44026 - DNA, 15 bp, Homo sapiens
gcacattagagaaca

SEQ ID NO: 44027 - DNA, 15 bp, Homo sapiens
cgcacattagagaac

SEQ ID NO: 44028 - DNA, 15 bp, Homo sapiens
acgcacattagagaa

SEQ ID NO: 44029 - DNA, 15 bp, Homo sapiens
tacgcacattagaga

SEQ ID NO: 44030 - DNA, 15 bp, Homo sapiens
atacgcacattagag

SEQ ID NO: 44031 - DNA, 15 bp, Homo sapiens
gatacgcacattaga

SEQ ID NO: 44032 - DNA, 15 bp, Homo sapiens
agatacgcacattag

SEQ ID NO: 44033 - DNA, 15 bp, Homo sapiens
cagatacgcacatta

SEQ ID NO: 44034 - DNA, 15 bp, Homo sapiens
acagatacgcacatt

SEQ ID NO: 44035 - DNA, 15 bp, Homo sapiens
cacagatacgcacat

SEQ ID NO: 44036 - DNA, 15 bp, Homo sapiens
acacagatacgcaca

SEQ ID NO: 44037 - DNA, 15 bp, Homo sapiens
aacacagatacgcac

SEQ ID NO: 44038 - DNA, 15 bp, Homo sapiens
caacacagatacgca

SEQ ID NO: 44039 - DNA, 15 bp, Homo sapiens
tcaacacagatacgc

SEQ ID NO: 44040 - DNA, 15 bp, Homo sapiens
atcaacacagatacg

SEQ ID NO: 44041 - DNA, 15 bp, Homo sapiens
tatcaacacagatac

SEQ ID NO: 44042 - DNA, 15 bp, Homo sapiens
ttatcaacacagata

SEQ ID NO: 44043 - DNA, 15 bp, Homo sapiens
cttatcaacacagat

SEQ ID NO: 44044 - DNA, 15 bp, Homo sapiens
tcttatcaacacaga

SEQ ID NO: 44045 - DNA, 15 bp, Homo sapiens
atcttatcaacacag

SEQ ID NO: 44046 - DNA, 15 bp, Homo sapiens
aatcttatcaacaca

SEQ ID NO: 44047 - DNA, 15 bp, Homo sapiens
taatcttatcaacac

SEQ ID NO: 44048 - DNA, 15 bp, Homo sapiens
gtaatcttatcaaca

SEQ ID NO: 44049 - DNA, 15 bp, Homo sapiens
tgtaatcttatcaac

SEQ ID NO: 44050 - DNA, 15 bp, Homo sapiens
gtgtaatcttatcaa

SEQ ID NO: 44051 - DNA, 15 bp, Homo sapiens
tgtgtaatcttatca

SEQ ID NO: 44052 - DNA, 15 bp, Homo sapiens
atgtgtaatcttatc

SEQ ID NO: 44053 - DNA, 15 bp, Homo sapiens
aatgtgtaatcttat

SEQ ID NO: 44054 - DNA, 15 bp, Homo sapiens
aaatgtgtaatctta

SEQ ID NO: 44055 - DNA, 15 bp, Homo sapiens
aaaatgtgtaatctt

SEQ ID NO: 44056 - DNA, 15 bp, Homo sapiens
taaaatgtgtaatct

SEQ ID NO: 44057 - DNA, 15 bp, Homo sapiens
ataaaatgtgtaatc

SEQ ID NO: 44058 - DNA, 15 bp, Homo sapiens
gataaaatgtgtaat

SEQ ID NO: 44059 - DNA, 15 bp, Homo sapiens
tgataaaatgtgtaa

SEQ ID NO: 44060 - DNA, 15 bp, Homo sapiens
ttgataaaatgtgta

SEQ ID NO: 44061 - DNA, 15 bp, Homo sapiens
cttgataaaatgtgt

SEQ ID NO: 44062 - DNA, 15 bp, Homo sapiens
tcttgataaaatgtg

SEQ ID NO: 44063 - DNA, 15 bp, Homo sapiens
ctcttgataaaatgt

SEQ ID NO: 44064 - DNA, 15 bp, Homo sapiens
tctcttgataaaatg

SEQ ID NO: 44065 - DNA, 15 bp, Homo sapiens
ttctcttgataaaat

SEQ ID NO: 44066 - DNA, 15 bp, Homo sapiens
tttctcttgataaaa

SEQ ID NO: 44067 - DNA, 15 bp, Homo sapiens
ttttctcttgataaa

SEQ ID NO: 44068 - DNA, 15 bp, Homo sapiens
gttttctcttgataa

SEQ ID NO: 44069 - DNA, 15 bp, Homo sapiens
agttttctcttgata

SEQ ID NO: 44070 - DNA, 15 bp, Homo sapiens
aagttttctcttgat

SEQ ID NO: 44071 - DNA, 15 bp, Homo sapiens
gaagttttctcttga

SEQ ID NO: 44072 - DNA, 15 bp, Homo sapiens
tgaagttttctcttg

SEQ ID NO: 44073 - DNA, 15 bp, Homo sapiens
ttgaagttttctctt

SEQ ID NO: 44074 - DNA, 15 bp, Homo sapiens
gttgaagttttctct

SEQ ID NO: 44075 - DNA, 15 bp, Homo sapiens
ggttgaagttttctc

SEQ ID NO: 44076 - DNA, 15 bp, Homo sapiens
gggttgaagttttct

SEQ ID NO: 44077 - DNA, 15 bp, Homo sapiens
agggttgaagttttc

SEQ ID NO: 44078 - DNA, 15 bp, Homo sapiens
cagggttgaagtttt

SEQ ID NO: 44079 - DNA, 15 bp, Homo sapiens
tcagggttgaagttt

SEQ ID NO: 44080 - DNA, 15 bp, Homo sapiens
ttcagggttgaagtt

SEQ ID NO: 44081 - DNA, 15 bp, Homo sapiens
attcagggttgaagt

SEQ ID NO: 44082 - DNA, 15 bp, Homo sapiens
tattcagggttgaag

SEQ ID NO: 44083 - DNA, 15 bp, Homo sapiens
ctattcagggttgaa

SEQ ID NO: 44084 - DNA, 15 bp, Homo sapiens
actattcagggttga

SEQ ID NO: 44085 - DNA, 15 bp, Homo sapiens
aactattcagggttg

SEQ ID NO: 44086 - DNA, 15 bp, Homo sapiens
taactattcagggtt

SEQ ID NO: 44087 - DNA, 15 bp, Homo sapiens
ttaactattcagggt

SEQ ID NO: 44088 - DNA, 15 bp, Homo sapiens
tttaactattcaggg

SEQ ID NO: 44089 - DNA, 15 bp, Homo sapiens
gtttaactattcagg

SEQ ID NO: 44090 - DNA, 15 bp, Homo sapiens
tgtttaactattcag

SEQ ID NO: 44091 - DNA, 15 bp, Homo sapiens
ctgtttaactattca

SEQ ID NO: 44092 - DNA, 15 bp, Homo sapiens
tctgtttaactattc

SEQ ID NO: 44093 - DNA, 15 bp, Homo sapiens
ttctgtttaactatt

SEQ ID NO: 44094 - DNA, 15 bp, Homo sapiens
cttctgtttaactat

SEQ ID NO: 44095 - DNA, 15 bp, Homo sapiens
gcttctgtttaacta

SEQ ID NO: 44096 - DNA, 15 bp, Homo sapiens
cgcttctgtttaact

SEQ ID NO: 44097 - DNA, 15 bp, Homo sapiens
gcgcttctgtttaac

SEQ ID NO: 44098 - DNA, 15 bp, Homo sapiens
tgcgcttctgtttaa

SEQ ID NO: 44099 - DNA, 15 bp, Homo sapiens
atgcgcttctgttta

SEQ ID NO: 44100 - DNA, 15 bp, Homo sapiens
tatgcgcttctgttt

SEQ ID NO: 44101 - DNA, 15 bp, Homo sapiens
atatgcgcttctgtt

SEQ ID NO: 44102 - DNA, 15 bp, Homo sapiens
tatatgcgcttctgt

SEQ ID NO: 44103 - DNA, 15 bp, Homo sapiens
ctatatgcgcttctg

SEQ ID NO: 44104 - DNA, 15 bp, Homo sapiens
actatatgcgcttct

SEQ ID NO: 44105 - DNA, 15 bp, Homo sapiens
cactatatgcgcttc

SEQ ID NO: 44106 - DNA, 15 bp, Homo sapiens
acactatatgcgctt

SEQ ID NO: 44107 - DNA, 15 bp, Homo sapiens
cacactatatgcgct

SEQ ID NO: 44108 - DNA, 15 bp, Homo sapiens
gcacactatatgcgc

SEQ ID NO: 44109 - DNA, 15 bp, Homo sapiens
tgcacactatatgcg

SEQ ID NO: 44110 - DNA, 15 bp, Homo sapiens
ctgcacactatatgc

SEQ ID NO: 44111 - DNA, 15 bp, Homo sapiens
cctgcacactatatg

SEQ ID NO: 44112 - DNA, 15 bp, Homo sapiens
acctgcacactatat

SEQ ID NO: 44113 - DNA, 15 bp, Homo sapiens
aacctgcacactata

SEQ ID NO: 44114 - DNA, 15 bp, Homo sapiens
taacctgcacactat

SEQ ID NO: 44115 - DNA, 15 bp, Homo sapiens
ataacctgcacacta

SEQ ID NO: 44116 - DNA, 15 bp, Homo sapiens
tataacctgcacact

SEQ ID NO: 44117 - DNA, 15 bp, Homo sapiens
ctataacctgcacac

SEQ ID NO: 44118 - DNA, 15 bp, Homo sapiens
tctataacctgcaca

SEQ ID NO: 44119 - DNA, 15 bp, Homo sapiens
gtctataacctgcac

SEQ ID NO: 44120 - DNA, 15 bp, Homo sapiens
ggtctataacctgca

SEQ ID NO: 44121 - DNA, 15 bp, Homo sapiens
tggtctataacctgc

SEQ ID NO: 44122 - DNA, 15 bp, Homo sapiens
gtggtctataacctg

SEQ ID NO: 44123 - DNA, 15 bp, Homo sapiens
tgtggtctataacct

SEQ ID NO: 44124 - DNA, 15 bp, Homo sapiens
atgtggtctataacc

SEQ ID NO: 44125 - DNA, 15 bp, Homo sapiens
catgtggtctataac

SEQ ID NO: 44126 - DNA, 15 bp, Homo sapiens
acatgtggtctataa

SEQ ID NO: 44127 - DNA, 15 bp, Homo sapiens
gacatgtggtctata

SEQ ID NO: 44128 - DNA, 15 bp, Homo sapiens
tgacatgtggtctat

SEQ ID NO: 44129 - DNA, 15 bp, Homo sapiens
gtgacatgtggtcta

SEQ ID NO: 44130 - DNA, 15 bp, Homo sapiens
agtgacatgtggtct

SEQ ID NO: 44131 - DNA, 15 bp, Homo sapiens
aagtgacatgtggtc

SEQ ID NO: 44132 - DNA, 15 bp, Homo sapiens
taagtgacatgtggt

SEQ ID NO: 44133 - DNA, 15 bp, Homo sapiens
ctaagtgacatgtgg

SEQ ID NO: 44134 - DNA, 15 bp, Homo sapiens
gctaagtgacatgtg

SEQ ID NO: 44135 - DNA, 15 bp, Homo sapiens
tgctaagtgacatgt

SEQ ID NO: 44136 - DNA, 15 bp, Homo sapiens
ctgctaagtgacatg

SEQ ID NO: 44137 - DNA, 15 bp, Homo sapiens
tctgctaagtgacat

SEQ ID NO: 44138 - DNA, 15 bp, Homo sapiens
ctctgctaagtgaca

SEQ ID NO: 44139 - DNA, 15 bp, Homo sapiens
tctctgctaagtgac

SEQ ID NO: 44140 - DNA, 15 bp, Homo sapiens
ctctctgctaagtga

SEQ ID NO: 44141 - DNA, 15 bp, Homo sapiens
cctctctgctaagtg

SEQ ID NO: 44142 - DNA, 15 bp, Homo sapiens
tcctctctgctaagt

SEQ ID NO: 44143 - DNA, 15 bp, Homo sapiens
ttcctctctgctaag

SEQ ID NO: 44144 - DNA, 15 bp, Homo sapiens
gttcctctctgctaa

SEQ ID NO: 44145 - DNA, 15 bp, Homo sapiens
tgttcctctctgcta

SEQ ID NO: 44146 - DNA, 15 bp, Homo sapiens
gtgttcctctctgct

SEQ ID NO: 44147 - DNA, 15 bp, Homo sapiens
agtgttcctctctgc

SEQ ID NO: 44148 - DNA, 15 bp, Homo sapiens
cagtgttcctctctg

SEQ ID NO: 44149 - DNA, 15 bp, Homo sapiens
ccagtgttcctctct

SEQ ID NO: 44150 - DNA, 15 bp, Homo sapiens
tccagtgttcctctc

SEQ ID NO: 44151 - DNA, 15 bp, Homo sapiens
ctccagtgttcctct

SEQ ID NO: 44152 - DNA, 15 bp, Homo sapiens
actccagtgttcctc

SEQ ID NO: 44153 - DNA, 15 bp, Homo sapiens
aactccagtgttcct

SEQ ID NO: 44154 - DNA, 15 bp, Homo sapiens
caactccagtgttcc

SEQ ID NO: 44155 - DNA, 15 bp, Homo sapiens
ccaactccagtgttc

SEQ ID NO: 44156 - DNA, 15 bp, Homo sapiens
accaactccagtgtt

SEQ ID NO: 44157 - DNA, 15 bp, Homo sapiens
caccaactccagtgt

SEQ ID NO: 44158 - DNA, 15 bp, Homo sapiens
acaccaactccagtg

SEQ ID NO: 44159 - DNA, 15 bp, Homo sapiens
cacaccaactccagt

SEQ ID NO: 44160 - DNA, 15 bp, Homo sapiens
ccacaccaactccag

SEQ ID NO: 44161 - DNA, 15 bp, Homo sapiens
tccacaccaactcca

SEQ ID NO: 44162 - DNA, 15 bp, Homo sapiens
gtccacaccaactcc

SEQ ID NO: 44163 - DNA, 15 bp, Homo sapiens
tgtccacaccaactc

SEQ ID NO: 44164 - DNA, 15 bp, Homo sapiens
ttgtccacaccaact

SEQ ID NO: 44165 - DNA, 15 bp, Homo sapiens
attgtccacaccaac

SEQ ID NO: 44166 - DNA, 15 bp, Homo sapiens
aattgtccacaccaa

SEQ ID NO: 44167 - DNA, 15 bp, Homo sapiens
taattgtccacacca

SEQ ID NO: 44168 - DNA, 15 bp, Homo sapiens
ttaattgtccacacc

SEQ ID NO: 44169 - DNA, 15 bp, Homo sapiens
cttaattgtccacac

SEQ ID NO: 44170 - DNA, 15 bp, Homo sapiens
tcttaattgtccaca

SEQ ID NO: 44171 - DNA, 15 bp, Homo sapiens
ttcttaattgtccac

SEQ ID NO: 44172 - DNA, 15 bp, Homo sapiens
attcttaattgtcca

SEQ ID NO: 44173 - DNA, 15 bp, Homo sapiens
aattcttaattgtcc

SEQ ID NO: 44174 - DNA, 15 bp, Homo sapiens
gaattcttaattgtc

SEQ ID NO: 44175 - DNA, 15 bp, Homo sapiens
agaattcttaattgt

SEQ ID NO: 44176 - DNA, 15 bp, Homo sapiens
aagaattcttaattg

SEQ ID NO: 44177 - DNA, 15 bp, Homo sapiens
caagaattcttaatt

SEQ ID NO: 44178 - DNA, 15 bp, Homo sapiens
ccaagaattcttaat

SEQ ID NO: 44179 - DNA, 15 bp, Homo sapiens
cccaagaattcttaa

SEQ ID NO: 44180 - DNA, 15 bp, Homo sapiens
ccccaagaattctta

SEQ ID NO: 44181 - DNA, 15 bp, Homo sapiens
cccccaagaattctt

SEQ ID NO: 44182 - DNA, 15 bp, Homo sapiens
tcccccaagaattct

SEQ ID NO: 44183 - DNA, 15 bp, Homo sapiens
atcccccaagaattc

SEQ ID NO: 44184 - DNA, 15 bp, Homo sapiens
aatcccccaagaatt

SEQ ID NO: 44185 - DNA, 15 bp, Homo sapiens
gaatcccccaagaat

SEQ ID NO: 44186 - DNA, 15 bp, Homo sapiens
agaatcccccaagaa

SEQ ID NO: 44187 - DNA, 15 bp, Homo sapiens
tagaatcccccaaga

SEQ ID NO: 44188 - DNA, 15 bp, Homo sapiens
atagaatcccccaag

SEQ ID NO: 44189 - DNA, 15 bp, Homo sapiens
catagaatcccccaa

SEQ ID NO: 44190 - DNA, 15 bp, Homo sapiens
tcatagaatccccca

SEQ ID NO: 44191 - DNA, 15 bp, Homo sapiens
atcatagaatccccc

SEQ ID NO: 44192 - DNA, 15 bp, Homo sapiens
aatcatagaatcccc

SEQ ID NO: 44193 - DNA, 15 bp, Homo sapiens
taatcatagaatccc

SEQ ID NO: 44194 - DNA, 15 bp, Homo sapiens
ctaatcatagaatcc

SEQ ID NO: 44195 - DNA, 15 bp, Homo sapiens
cctaatcatagaatc

SEQ ID NO: 44196 - DNA, 15 bp, Homo sapiens
acctaatcatagaat

SEQ ID NO: 44197 - DNA, 15 bp, Homo sapiens
cacctaatcatagaa

SEQ ID NO: 44198 - DNA, 15 bp, Homo sapiens
acacctaatcataga

SEQ ID NO: 44199 - DNA, 15 bp, Homo sapiens
gacacctaatcatag

SEQ ID NO: 44200 - DNA, 15 bp, Homo sapiens
ggacacctaatcata

SEQ ID NO: 44201 - DNA, 15 bp, Homo sapiens
tggacacctaatcat

SEQ ID NO: 44202 - DNA, 15 bp, Homo sapiens
ttggacacctaatca

SEQ ID NO: 44203 - DNA, 15 bp, Homo sapiens
tttggacacctaatc

SEQ ID NO: 44204 - DNA, 15 bp, Homo sapiens
ctttggacacctaat

SEQ ID NO: 44205 - DNA, 15 bp, Homo sapiens
actttggacacctaa

SEQ ID NO: 44206 - DNA, 15 bp, Homo sapiens
gactttggacaccta

SEQ ID NO: 44207 - DNA, 15 bp, Homo sapiens
agactttggacacct

SEQ ID NO: 44208 - DNA, 15 bp, Homo sapiens
cagactttggacacc

SEQ ID NO: 44209 - DNA, 15 bp, Homo sapiens
gcagactttggacac

SEQ ID NO: 44210 - DNA, 15 bp, Homo sapiens
ggcagactttggaca

SEQ ID NO: 44211 - DNA, 15 bp, Homo sapiens
tggcagactttggac

SEQ ID NO: 44212 - DNA, 15 bp, Homo sapiens
ttggcagactttgga

SEQ ID NO: 44213 - DNA, 15 bp, Homo sapiens
gttggcagactttgg

SEQ ID NO: 44214 - DNA, 15 bp, Homo sapiens
agttggcagactttg

SEQ ID NO: 44215 - DNA, 15 bp, Homo sapiens
tagttggcagacttt

SEQ ID NO: 44216 - DNA, 15 bp, Homo sapiens
ctagttggcagactt

SEQ ID NO: 44217 - DNA, 15 bp, Homo sapiens
actagttggcagact

SEQ ID NO: 44218 - DNA, 15 bp, Homo sapiens
cactagttggcagac

SEQ ID NO: 44219 - DNA, 15 bp, Homo sapiens
gcactagttggcaga

SEQ ID NO: 44220 - DNA, 15 bp, Homo sapiens
agcactagttggcag

SEQ ID NO: 44221 - DNA, 15 bp, Homo sapiens
aagcactagttggca

SEQ ID NO: 44222 - DNA, 15 bp, Homo sapiens
taagcactagttggc

SEQ ID NO: 44223 - DNA, 15 bp, Homo sapiens
ctaagcactagttgg

SEQ ID NO: 44224 - DNA, 15 bp, Homo sapiens
tctaagcactagttg

SEQ ID NO: 44225 - DNA, 15 bp, Homo sapiens
gtctaagcactagtt

SEQ ID NO: 44226 - DNA, 15 bp, Homo sapiens
tgtctaagcactagt

SEQ ID NO: 44227 - DNA, 15 bp, Homo sapiens
atgtctaagcactag

SEQ ID NO: 44228 - DNA, 15 bp, Homo sapiens
gatgtctaagcacta

SEQ ID NO: 44229 - DNA, 15 bp, Homo sapiens
agatgtctaagcact

SEQ ID NO: 44230 - DNA, 15 bp, Homo sapiens
gagatgtctaagcac

SEQ ID NO: 44231 - DNA, 15 bp, Homo sapiens
cgagatgtctaagca

SEQ ID NO: 44232 - DNA, 15 bp, Homo sapiens
tcgagatgtctaagc

SEQ ID NO: 44233 - DNA, 15 bp, Homo sapiens
atcgagatgtctaag

SEQ ID NO: 44234 - DNA, 15 bp, Homo sapiens
aatcgagatgtctaa

SEQ ID NO: 44235 - DNA, 15 bp, Homo sapiens
aaatcgagatgtcta

SEQ ID NO: 44236 - DNA, 15 bp, Homo sapiens
gaaatcgagatgtct

SEQ ID NO: 44237 - DNA, 15 bp, Homo sapiens
ggaaatcgagatgtc

SEQ ID NO: 44238 - DNA, 15 bp, Homo sapiens
aggaaatcgagatgt

SEQ ID NO: 44239 - DNA, 15 bp, Homo sapiens
caggaaatcgagatg

SEQ ID NO: 44240 - DNA, 15 bp, Homo sapiens
gcaggaaatcgagat

SEQ ID NO: 44241 - DNA, 15 bp, Homo sapiens
agcaggaaatcgaga

SEQ ID NO: 44242 - DNA, 15 bp, Homo sapiens
aagcaggaaatcgag

SEQ ID NO: 44243 - DNA, 15 bp, Homo sapiens
aaagcaggaaatcga

SEQ ID NO: 44244 - DNA, 15 bp, Homo sapiens
aaaagcaggaaatcg

SEQ ID NO: 44245 - DNA, 15 bp, Homo sapiens
aaaaagcaggaaatc

SEQ ID NO: 44246 - DNA, 15 bp, Homo sapiens
taaaaagcaggaaat

SEQ ID NO: 44247 - DNA, 15 bp, Homo sapiens
gtaaaaagcaggaaa

SEQ ID NO: 44248 - DNA, 15 bp, Homo sapiens
agtaaaaagcaggaa

SEQ ID NO: 44249 - DNA, 15 bp, Homo sapiens
gagtaaaaagcagga

SEQ ID NO: 44250 - DNA, 15 bp, Homo sapiens
agagtaaaaagcagg

SEQ ID NO: 44251 - DNA, 15 bp, Homo sapiens
aagagtaaaaagcag

SEQ ID NO: 44252 - DNA, 15 bp, Homo sapiens
taagagtaaaaagca

SEQ ID NO: 44253 - DNA, 15 bp, Homo sapiens
ctaagagtaaaaagc

SEQ ID NO: 44254 - DNA, 15 bp, Homo sapiens
tctaagagtaaaaag

SEQ ID NO: 44255 - DNA, 15 bp, Homo sapiens
atctaagagtaaaaa

SEQ ID NO: 44256 - DNA, 15 bp, Homo sapiens
aatctaagagtaaaa

SEQ ID NO: 44257 - DNA, 15 bp, Homo sapiens
gaatctaagagtaaa

SEQ ID NO: 44258 - DNA, 15 bp, Homo sapiens
ggaatctaagagtaa

SEQ ID NO: 44259 - DNA, 15 bp, Homo sapiens
gggaatctaagagta

SEQ ID NO: 44260 - DNA, 15 bp, Homo sapiens
agggaatctaagagt

SEQ ID NO: 44261 - DNA, 15 bp, Homo sapiens
aagggaatctaagag

SEQ ID NO: 44262 - DNA, 15 bp, Homo sapiens
taagggaatctaaga

SEQ ID NO: 44263 - DNA, 15 bp, Homo sapiens
ttaagggaatctaag

SEQ ID NO: 44264 - DNA, 15 bp, Homo sapiens
cttaagggaatctaa

SEQ ID NO: 44265 - DNA, 15 bp, Homo sapiens
acttaagggaatcta

SEQ ID NO: 44266 - DNA, 15 bp, Homo sapiens
aacttaagggaatct

SEQ ID NO: 44267 - DNA, 15 bp, Homo sapiens
aaacttaagggaatc

SEQ ID NO: 44268 - DNA, 15 bp, Homo sapiens
taaacttaagggaat

SEQ ID NO: 44269 - DNA, 15 bp, Homo sapiens
ataaacttaagggaa

SEQ ID NO: 44270 - DNA, 15 bp, Homo sapiens
aataaacttaaggga

SEQ ID NO: 44271 - DNA, 15 bp, Homo sapiens
caataaacttaaggg

SEQ ID NO: 44272 - DNA, 15 bp, Homo sapiens
ccaataaacttaagg

SEQ ID NO: 44273 - DNA, 15 bp, Homo sapiens
tccaataaacttaag

SEQ ID NO: 44274 - DNA, 15 bp, Homo sapiens
ttccaataaacttaa

SEQ ID NO: 44275 - DNA, 15 bp, Homo sapiens
tttccaataaactta

SEQ ID NO: 44276 - DNA, 15 bp, Homo sapiens
ttttccaataaactt

SEQ ID NO: 44277 - DNA, 15 bp, Homo sapiens
attttccaataaact

SEQ ID NO: 44278 - DNA, 15 bp, Homo sapiens
tattttccaataaac

SEQ ID NO: 44279 - DNA, 15 bp, Homo sapiens
gtattttccaataaa

SEQ ID NO: 44280 - DNA, 15 bp, Homo sapiens
tgtattttccaataa

SEQ ID NO: 44281 - DNA, 15 bp, Homo sapiens
atgtattttccaata

SEQ ID NO: 44282 - DNA, 15 bp, Homo sapiens
aatgtattttccaat

SEQ ID NO: 44283 - DNA, 15 bp, Homo sapiens
aaatgtattttccaa

SEQ ID NO: 44284 - DNA, 15 bp, Homo sapiens
aaaatgtattttcca

SEQ ID NO: 44285 - DNA, 15 bp, Homo sapiens
aaaaatgtattttcc

SEQ ID NO: 44286 - DNA, 15 bp, Homo sapiens
gaaaaatgtattttc

SEQ ID NO: 44287 - DNA, 15 bp, Homo sapiens
agaaaaatgtatttt

SEQ ID NO: 44288 - DNA, 15 bp, Homo sapiens
cagaaaaatgtattt

SEQ ID NO: 44289 - DNA, 15 bp, Homo sapiens
ccagaaaaatgtatt

SEQ ID NO: 44290 - DNA, 15 bp, Homo sapiens
tccagaaaaatgtat

SEQ ID NO: 44291 - DNA, 15 bp, Homo sapiens
ttccagaaaaatgta

SEQ ID NO: 44292 - DNA, 15 bp, Homo sapiens
attccagaaaaatgt

SEQ ID NO: 44293 - DNA, 15 bp, Homo sapiens
cattccagaaaaatg

SEQ ID NO: 44294 - DNA, 15 bp, Homo sapiens
gcattccagaaaaat

SEQ ID NO: 44295 - DNA, 15 bp, Homo sapiens
ggcattccagaaaaa

SEQ ID NO: 44296 - DNA, 15 bp, Homo sapiens
aggcattccagaaaa

SEQ ID NO: 44297 - DNA, 15 bp, Homo sapiens
aaggcattccagaaa

SEQ ID NO: 44298 - DNA, 15 bp, Homo sapiens
caaggcattccagaa

SEQ ID NO: 44299 - DNA, 15 bp, Homo sapiens
tcaaggcattccaga

SEQ ID NO: 44300 - DNA, 15 bp, Homo sapiens
ttcaaggcattccag

SEQ ID NO: 44301 - DNA, 15 bp, Homo sapiens
tttcaaggcattcca

SEQ ID NO: 44302 - DNA, 15 bp, Homo sapiens
ttttcaaggcattcc

SEQ ID NO: 44303 - DNA, 15 bp, Homo sapiens
attttcaaggcattc

SEQ ID NO: 44304 - DNA, 15 bp, Homo sapiens
aattttcaaggcatt

SEQ ID NO: 44305 - DNA, 15 bp, Homo sapiens
gaattttcaaggcat

SEQ ID NO: 44306 - DNA, 15 bp, Homo sapiens
agaattttcaaggca

SEQ ID NO: 44307 - DNA, 15 bp, Homo sapiens
gagaattttcaaggc

SEQ ID NO: 44308 - DNA, 15 bp, Homo sapiens
tgagaattttcaagg

SEQ ID NO: 44309 - DNA, 15 bp, Homo sapiens
ctgagaattttcaag

SEQ ID NO: 44310 - DNA, 15 bp, Homo sapiens
actgagaattttcaa

SEQ ID NO: 44311 - DNA, 15 bp, Homo sapiens
gactgagaattttca

SEQ ID NO: 44312 - DNA, 15 bp, Homo sapiens
agactgagaattttc

SEQ ID NO: 44313 - DNA, 15 bp, Homo sapiens
cagactgagaatttt

SEQ ID NO: 44314 - DNA, 15 bp, Homo sapiens
acagactgagaattt

SEQ ID NO: 44315 - DNA, 15 bp, Homo sapiens
aacagactgagaatt

SEQ ID NO: 44316 - DNA, 15 bp, Homo sapiens
gaacagactgagaat

SEQ ID NO: 44317 - DNA, 15 bp, Homo sapiens
ggaacagactgagaa

SEQ ID NO: 44318 - DNA, 15 bp, Homo sapiens
aggaacagactgaga

SEQ ID NO: 44319 - DNA, 15 bp, Homo sapiens
caggaacagactgag

SEQ ID NO: 44320 - DNA, 15 bp, Homo sapiens
tcaggaacagactga

SEQ ID NO: 44321 - DNA, 15 bp, Homo sapiens
ttcaggaacagactg

SEQ ID NO: 44322 - DNA, 15 bp, Homo sapiens
cttcaggaacagact

SEQ ID NO: 44323 - DNA, 15 bp, Homo sapiens
tcttcaggaacagac

SEQ ID NO: 44324 - DNA, 15 bp, Homo sapiens
ctcttcaggaacaga

SEQ ID NO: 44325 - DNA, 15 bp, Homo sapiens
tctcttcaggaacag

SEQ ID NO: 44326 - DNA, 15 bp, Homo sapiens
atctcttcaggaaca

SEQ ID NO: 44327 - DNA, 15 bp, Homo sapiens
aatctcttcaggaac

SEQ ID NO: 44328 - DNA, 15 bp, Homo sapiens
aaatctcttcaggaa

SEQ ID NO: 44329 - DNA, 15 bp, Homo sapiens
aaaatctcttcagga

SEQ ID NO: 44330 - DNA, 15 bp, Homo sapiens
caaaatctcttcagg

SEQ ID NO: 44331 - DNA, 15 bp, Homo sapiens
ccaaaatctcttcag

SEQ ID NO: 44332 - DNA, 15 bp, Homo sapiens
cccaaaatctcttca

SEQ ID NO: 44333 - DNA, 15 bp, Homo sapiens
ccccaaaatctcttc

SEQ ID NO: 44334 - DNA, 15 bp, Homo sapiens
tccccaaaatctctt

SEQ ID NO: 44335 - DNA, 15 bp, Homo sapiens
ctccccaaaatctct

SEQ ID NO: 44336 - DNA, 15 bp, Homo sapiens
cctccccaaaatctc

SEQ ID NO: 44337 - DNA, 15 bp, Homo sapiens
acctccccaaaatct

SEQ ID NO: 44338 - DNA, 15 bp, Homo sapiens
aacctccccaaaatc

SEQ ID NO: 44339 - DNA, 15 bp, Homo sapiens
taacctccccaaaat

SEQ ID NO: 44340 - DNA, 15 bp, Homo sapiens
ttaacctccccaaaa

SEQ ID NO: 44341 - DNA, 15 bp, Homo sapiens
tttaacctccccaaa

SEQ ID NO: 44342 - DNA, 15 bp, Homo sapiens
ttttaacctccccaa

SEQ ID NO: 44343 - DNA, 15 bp, Homo sapiens
attttaacctcccca

SEQ ID NO: 44344 - DNA, 15 bp, Homo sapiens
tattttaacctcccc

SEQ ID NO: 44345 - DNA, 15 bp, Homo sapiens
ttattttaacctccc

SEQ ID NO: 44346 - DNA, 15 bp, Homo sapiens
attattttaacctcc

SEQ ID NO: 44347 - DNA, 15 bp, Homo sapiens
aattattttaacctc

SEQ ID NO: 44348 - DNA, 15 bp, Homo sapiens
aaattattttaacct

SEQ ID NO: 44349 - DNA, 15 bp, Homo sapiens
taaattattttaacc

SEQ ID NO: 44350 - DNA, 15 bp, Homo sapiens
ttaaattattttaac

SEQ ID NO: 44351 - DNA, 15 bp, Homo sapiens
attaaattattttaa

SEQ ID NO: 44352 - DNA, 15 bp, Homo sapiens
tattaaattatttta

SEQ ID NO: 44353 - DNA, 15 bp, Homo sapiens
atattaaattatttt

SEQ ID NO: 44354 - DNA, 15 bp, Homo sapiens
catattaaattattt

SEQ ID NO: 44355 - DNA, 15 bp, Homo sapiens
acatattaaattatt

SEQ ID NO: 44356 - DNA, 15 bp, Homo sapiens
aacatattaaattat

SEQ ID NO: 44357 - DNA, 15 bp, Homo sapiens
taacatattaaatta

SEQ ID NO: 44358 - DNA, 15 bp, Homo sapiens
ttaacatattaaatt

SEQ ID NO: 44359 - DNA, 15 bp, Homo sapiens
tttaacatattaaat

SEQ ID NO: 44360 - DNA, 15 bp, Homo sapiens
ctttaacatattaaa

SEQ ID NO: 44361 - DNA, 15 bp, Homo sapiens
actttaacatattaa

SEQ ID NO: 44362 - DNA, 15 bp, Homo sapiens
cactttaacatatta

SEQ ID NO: 44363 - DNA, 15 bp, Homo sapiens
gcactttaacatatt

SEQ ID NO: 44364 - DNA, 15 bp, Homo sapiens
tgcactttaacatat

SEQ ID NO: 44365 - DNA, 15 bp, Homo sapiens
gtgcactttaacata

SEQ ID NO: 44366 - DNA, 15 bp, Homo sapiens
tgtgcactttaacat

SEQ ID NO: 44367 - DNA, 15 bp, Homo sapiens
ctgtgcactttaaca

SEQ ID NO: 44368 - DNA, 15 bp, Homo sapiens
actgtgcactttaac

SEQ ID NO: 44369 - DNA, 15 bp, Homo sapiens
tactgtgcactttaa

SEQ ID NO: 44370 - DNA, 15 bp, Homo sapiens
ttactgtgcacttta

SEQ ID NO: 44371 - DNA, 15 bp, Homo sapiens
tttactgtgcacttt

SEQ ID NO: 44372 - DNA, 15 bp, Homo sapiens
ttttactgtgcactt

SEQ ID NO: 44373 - DNA, 15 bp, Homo sapiens
tttttactgtgcact

SEQ ID NO: 44374 - DNA, 15 bp, Homo sapiens
atttttactgtgcac

SEQ ID NO: 44375 - DNA, 15 bp, Homo sapiens
catttttactgtgca

SEQ ID NO: 44376 - DNA, 15 bp, Homo sapiens
tcatttttactgtgc

SEQ ID NO: 44377 - DNA, 15 bp, Homo sapiens
ttcatttttactgtg

SEQ ID NO: 44378 - DNA, 15 bp, Homo sapiens
tttcatttttactgt

SEQ ID NO: 44379 - DNA, 15 bp, Homo sapiens
atttcatttttactg

SEQ ID NO: 44380 - DNA, 15 bp, Homo sapiens
tatttcatttttact

SEQ ID NO: 44381 - DNA, 15 bp, Homo sapiens
ctatttcatttttac

SEQ ID NO: 44382 - DNA, 15 bp, Homo sapiens
gctatttcattttta

SEQ ID NO: 44383 - DNA, 15 bp, Homo sapiens
tgctatttcattttt

SEQ ID NO: 44384 - DNA, 15 bp, Homo sapiens
atgctatttcatttt

SEQ ID NO: 44385 - DNA, 15 bp, Homo sapiens
aatgctatttcattt

SEQ ID NO: 44386 - DNA, 15 bp, Homo sapiens
caatgctatttcatt

SEQ ID NO: 44387 - DNA, 15 bp, Homo sapiens
ccaatgctatttcat

SEQ ID NO: 44388 - DNA, 15 bp, Homo sapiens
tccaatgctatttca

SEQ ID NO: 44389 - DNA, 15 bp, Homo sapiens
atccaatgctatttc

SEQ ID NO: 44390 - DNA, 15 bp, Homo sapiens
catccaatgctattt

SEQ ID NO: 44391 - DNA, 15 bp, Homo sapiens
acatccaatgctatt

SEQ ID NO: 44392 - DNA, 15 bp, Homo sapiens
aacatccaatgctat

SEQ ID NO: 44393 - DNA, 15 bp, Homo sapiens
taacatccaatgcta

SEQ ID NO: 44394 - DNA, 15 bp, Homo sapiens
ataacatccaatgct

SEQ ID NO: 44395 - DNA, 15 bp, Homo sapiens
aataacatccaatgc

SEQ ID NO: 44396 - DNA, 15 bp, Homo sapiens
aaataacatccaatg

SEQ ID NO: 44397 - DNA, 15 bp, Homo sapiens
aaaataacatccaat

SEQ ID NO: 44398 - DNA, 15 bp, Homo sapiens
gaaaataacatccaa

SEQ ID NO: 44399 - DNA, 15 bp, Homo sapiens
tgaaaataacatcca

SEQ ID NO: 44400 - DNA, 15 bp, Homo sapiens
ttgaaaataacatcc

SEQ ID NO: 44401 - DNA, 15 bp, Homo sapiens
gttgaaaataacatc

SEQ ID NO: 44402 - DNA, 15 bp, Homo sapiens
agttgaaaataacat

SEQ ID NO: 44403 - DNA, 15 bp, Homo sapiens
gagttgaaaataaca

SEQ ID NO: 44404 - DNA, 15 bp, Homo sapiens
agagttgaaaataac

SEQ ID NO: 44405 - DNA, 15 bp, Homo sapiens
cagagttgaaaataa

SEQ ID NO: 44406 - DNA, 15 bp, Homo sapiens
tcagagttgaaaata

SEQ ID NO: 44407 - DNA, 15 bp, Homo sapiens
ctcagagttgaaaat

SEQ ID NO: 44408 - DNA, 15 bp, Homo sapiens
actcagagttgaaaa

SEQ ID NO: 44409 - DNA, 15 bp, Homo sapiens
aactcagagttgaaa

SEQ ID NO: 44410 - DNA, 15 bp, Homo sapiens
aaactcagagttgaa

SEQ ID NO: 44411 - DNA, 15 bp, Homo sapiens
aaaactcagagttga

SEQ ID NO: 44412 - DNA, 15 bp, Homo sapiens
gaaaactcagagttg

SEQ ID NO: 44413 - DNA, 15 bp, Homo sapiens
agaaaactcagagtt

SEQ ID NO: 44414 - DNA, 15 bp, Homo sapiens
aagaaaactcagagt

SEQ ID NO: 44415 - DNA, 15 bp, Homo sapiens
caagaaaactcagag

SEQ ID NO: 44416 - DNA, 15 bp, Homo sapiens
acaagaaaactcaga

SEQ ID NO: 44417 - DNA, 15 bp, Homo sapiens
cacaagaaaactcag

SEQ ID NO: 44418 - DNA, 15 bp, Homo sapiens
acacaagaaaactca

SEQ ID NO: 44419 - DNA, 15 bp, Homo sapiens
aacacaagaaaactc

SEQ ID NO: 44420 - DNA, 15 bp, Homo sapiens
taacacaagaaaact

SEQ ID NO: 44421 - DNA, 15 bp, Homo sapiens
ctaacacaagaaaac

SEQ ID NO: 44422 - DNA, 15 bp, Homo sapiens
actaacacaagaaaa

SEQ ID NO: 44423 - DNA, 15 bp, Homo sapiens
aactaacacaagaaa

SEQ ID NO: 44424 - DNA, 15 bp, Homo sapiens
aaactaacacaagaa

SEQ ID NO: 44425 - DNA, 15 bp, Homo sapiens
taaactaacacaaga

SEQ ID NO: 44426 - DNA, 15 bp, Homo sapiens
ttaaactaacacaag

SEQ ID NO: 44427 - DNA, 15 bp, Homo sapiens
cttaaactaacacaa

SEQ ID NO: 44428 - DNA, 15 bp, Homo sapiens
acttaaactaacaca

SEQ ID NO: 44429 - DNA, 15 bp, Homo sapiens
tacttaaactaacac

SEQ ID NO: 44430 - DNA, 15 bp, Homo sapiens
ttacttaaactaaca

SEQ ID NO: 44431 - DNA, 15 bp, Homo sapiens
tttacttaaactaac

SEQ ID NO: 44432 - DNA, 15 bp, Homo sapiens
ttttacttaaactaa

SEQ ID NO: 44433 - DNA, 15 bp, Homo sapiens
attttacttaaacta

SEQ ID NO: 44434 - DNA, 15 bp, Homo sapiens
aattttacttaaact

SEQ ID NO: 44435 - DNA, 15 bp, Homo sapiens
aaattttacttaaac

SEQ ID NO: 44436 - DNA, 15 bp, Homo sapiens
aaaattttacttaaa

SEQ ID NO: 44437 - DNA, 15 bp, Homo sapiens
caaaattttacttaa

SEQ ID NO: 44438 - DNA, 15 bp, Homo sapiens
acaaaattttactta

SEQ ID NO: 44439 - DNA, 15 bp, Homo sapiens
aacaaaattttactt

SEQ ID NO: 44440 - DNA, 15 bp, Homo sapiens
taacaaaattttact

SEQ ID NO: 44441 - DNA, 15 bp, Homo sapiens
ataacaaaattttac

SEQ ID NO: 44442 - DNA, 15 bp, Homo sapiens
aataacaaaatttta

SEQ ID NO: 44443 - DNA, 15 bp, Homo sapiens
caataacaaaatttt

SEQ ID NO: 44444 - DNA, 15 bp, Homo sapiens
acaataacaaaattt

SEQ ID NO: 44445 - DNA, 15 bp, Homo sapiens
tacaataacaaaatt

SEQ ID NO: 44446 - DNA, 15 bp, Homo sapiens
ttacaataacaaaat

SEQ ID NO: 44447 - DNA, 15 bp, Homo sapiens
tttacaataacaaaa

SEQ ID NO: 44448 - DNA, 15 bp, Homo sapiens
atttacaataacaaa

SEQ ID NO: 44449 - DNA, 15 bp, Homo sapiens
aatttacaataacaa

SEQ ID NO: 44450 - DNA, 15 bp, Homo sapiens
aaatttacaataaca

SEQ ID NO: 44451 - DNA, 15 bp, Homo sapiens
caaatttacaataac

SEQ ID NO: 44452 - DNA, 15 bp, Homo sapiens
acaaatttacaataa

SEQ ID NO: 44453 - DNA, 15 bp, Homo sapiens
aacaaatttacaata

SEQ ID NO: 44454 - DNA, 15 bp, Homo sapiens
taacaaatttacaat

SEQ ID NO: 44455 - DNA, 15 bp, Homo sapiens
ttaacaaatttacaa

SEQ ID NO: 44456 - DNA, 15 bp, Homo sapiens
cttaacaaatttaca

SEQ ID NO: 44457 - DNA, 15 bp, Homo sapiens
tcttaacaaatttac

SEQ ID NO: 44458 - DNA, 15 bp, Homo sapiens
ttcttaacaaattta

SEQ ID NO: 44459 - DNA, 15 bp, Homo sapiens
tttcttaacaaattt

SEQ ID NO: 44460 - DNA, 15 bp, Homo sapiens
gtttcttaacaaatt

SEQ ID NO: 44461 - DNA, 15 bp, Homo sapiens
ggtttcttaacaaat

SEQ ID NO: 44462 - DNA, 15 bp, Homo sapiens
gggtttcttaacaaa

SEQ ID NO: 44463 - DNA, 15 bp, Homo sapiens
agggtttcttaacaa

SEQ ID NO: 44464 - DNA, 15 bp, Homo sapiens
tagggtttcttaaca

SEQ ID NO: 44465 - DNA, 15 bp, Homo sapiens
ttagggtttcttaac

SEQ ID NO: 44466 - DNA, 15 bp, Homo sapiens
attagggtttcttaa

SEQ ID NO: 44467 - DNA, 15 bp, Homo sapiens
aattagggtttctta

SEQ ID NO: 44468 - DNA, 15 bp, Homo sapiens
taattagggtttctt

SEQ ID NO: 44469 - DNA, 15 bp, Homo sapiens
ttaattagggtttct

SEQ ID NO: 44470 - DNA, 15 bp, Homo sapiens
tttaattagggtttc

SEQ ID NO: 44471 - DNA, 15 bp, Homo sapiens
ctttaattagggttt

SEQ ID NO: 44472 - DNA, 15 bp, Homo sapiens
gctttaattagggtt

SEQ ID NO: 44473 - DNA, 15 bp, Homo sapiens
ggctttaattagggt

SEQ ID NO: 44474 - DNA, 15 bp, Homo sapiens
aggctttaattaggg

SEQ ID NO: 44475 - DNA, 15 bp, Homo sapiens
gaggctttaattagg

SEQ ID NO: 44476 - DNA, 15 bp, Homo sapiens
ggaggctttaattag

SEQ ID NO: 44477 - DNA, 15 bp, Homo sapiens
aggaggctttaatta

SEQ ID NO: 44478 - DNA, 15 bp, Homo sapiens
aaggaggctttaatt

SEQ ID NO: 44479 - DNA, 15 bp, Homo sapiens
gaaggaggctttaat

SEQ ID NO: 44480 - DNA, 15 bp, Homo sapiens
tgaaggaggctttaa

SEQ ID NO: 44481 - DNA, 15 bp, Homo sapiens
ttgaaggaggcttta

SEQ ID NO: 44482 - DNA, 15 bp, Homo sapiens
attgaaggaggcttt

SEQ ID NO: 44483 - DNA, 15 bp, Homo sapiens
cattgaaggaggctt

SEQ ID NO: 44484 - DNA, 15 bp, Homo sapiens
acattgaaggaggct

SEQ ID NO: 44485 - DNA, 15 bp, Homo sapiens
tacattgaaggaggc

SEQ ID NO: 44486 - DNA, 15 bp, Homo sapiens
atacattgaaggagg

SEQ ID NO: 44487 - DNA, 15 bp, Homo sapiens
catacattgaaggag

SEQ ID NO: 44488 - DNA, 15 bp, Homo sapiens
tcatacattgaagga

SEQ ID NO: 44489 - DNA, 15 bp, Homo sapiens
ttcatacattgaagg

SEQ ID NO: 44490 - DNA, 15 bp, Homo sapiens
tttcatacattgaag

SEQ ID NO: 44491 - DNA, 15 bp, Homo sapiens
gtttcatacattgaa

SEQ ID NO: 44492 - DNA, 15 bp, Homo sapiens
agtttcatacattga

SEQ ID NO: 44493 - DNA, 15 bp, Homo sapiens
gagtttcatacattg

SEQ ID NO: 44494 - DNA, 15 bp, Homo sapiens
tgagtttcatacatt

SEQ ID NO: 44495 - DNA, 15 bp, Homo sapiens
ttgagtttcatacat

SEQ ID NO: 44496 - DNA, 15 bp, Homo sapiens
tttgagtttcataca

SEQ ID NO: 44497 - DNA, 15 bp, Homo sapiens
atttgagtttcatac

SEQ ID NO: 44498 - DNA, 15 bp, Homo sapiens
gatttgagtttcata

SEQ ID NO: 44499 - DNA, 15 bp, Homo sapiens
tgatttgagtttcat

SEQ ID NO: 44500 - DNA, 15 bp, Homo sapiens
ttgatttgagtttca

SEQ ID NO: 44501 - DNA, 15 bp, Homo sapiens
cttgatttgagtttc

SEQ ID NO: 44502 - DNA, 15 bp, Homo sapiens
acttgatttgagttt

SEQ ID NO: 44503 - DNA, 15 bp, Homo sapiens
aacttgatttgagtt

SEQ ID NO: 44504 - DNA, 15 bp, Homo sapiens
taacttgatttgagt

SEQ ID NO: 44505 - DNA, 15 bp, Homo sapiens
ataacttgatttgag

SEQ ID NO: 44506 - DNA, 15 bp, Homo sapiens
aataacttgatttga

SEQ ID NO: 44507 - DNA, 15 bp, Homo sapiens
taataacttgatttg

SEQ ID NO: 44508 - DNA, 15 bp, Homo sapiens
ctaataacttgattt

SEQ ID NO: 44509 - DNA, 15 bp, Homo sapiens
cctaataacttgatt

SEQ ID NO: 44510 - DNA, 15 bp, Homo sapiens
acctaataacttgat

SEQ ID NO: 44511 - DNA, 15 bp, Homo sapiens
aacctaataacttga

SEQ ID NO: 44512 - DNA, 15 bp, Homo sapiens
taacctaataacttg

SEQ ID NO: 44513 - DNA, 15 bp, Homo sapiens
ctaacctaataactt

SEQ ID NO: 44514 - DNA, 15 bp, Homo sapiens
cctaacctaataact

SEQ ID NO: 44515 - DNA, 15 bp, Homo sapiens
acctaacctaataac

SEQ ID NO: 44516 - DNA, 15 bp, Homo sapiens
cacctaacctaataa

SEQ ID NO: 44517 - DNA, 15 bp, Homo sapiens
gcacctaacctaata

SEQ ID NO: 44518 - DNA, 15 bp, Homo sapiens
agcacctaacctaat

SEQ ID NO: 44519 - DNA, 15 bp, Homo sapiens
tagcacctaacctaa

SEQ ID NO: 44520 - DNA, 15 bp, Homo sapiens
ttagcacctaaccta

SEQ ID NO: 44521 - DNA, 15 bp, Homo sapiens
tttagcacctaacct

SEQ ID NO: 44522 - DNA, 15 bp, Homo sapiens
ttttagcacctaacc

SEQ ID NO: 44523 - DNA, 15 bp, Homo sapiens
tttttagcacctaac

SEQ ID NO: 44524 - DNA, 15 bp, Homo sapiens
ttttttagcacctaa

SEQ ID NO: 44525 - DNA, 15 bp, Homo sapiens
cttttttagcaccta

SEQ ID NO: 44526 - DNA, 15 bp, Homo sapiens
acttttttagcacct

SEQ ID NO: 44527 - DNA, 15 bp, Homo sapiens
cacttttttagcacc

SEQ ID NO: 44528 - DNA, 15 bp, Homo sapiens
acacttttttagcac

SEQ ID NO: 44529 - DNA, 15 bp, Homo sapiens
aacacttttttagca

SEQ ID NO: 44530 - DNA, 15 bp, Homo sapiens
taacacttttttagc

SEQ ID NO: 44531 - DNA, 15 bp, Homo sapiens
gtaacacttttttag

SEQ ID NO: 44532 - DNA, 15 bp, Homo sapiens
tgtaacactttttta

SEQ ID NO: 44533 - DNA, 15 bp, Homo sapiens
ctgtaacactttttt

SEQ ID NO: 44534 - DNA, 15 bp, Homo sapiens
gctgtaacacttttt

SEQ ID NO: 44535 - DNA, 15 bp, Homo sapiens
agctgtaacactttt

SEQ ID NO: 44536 - DNA, 15 bp, Homo sapiens
tagctgtaacacttt

SEQ ID NO: 44537 - DNA, 15 bp, Homo sapiens
ttagctgtaacactt

SEQ ID NO: 44538 - DNA, 15 bp, Homo sapiens
attagctgtaacact

SEQ ID NO: 44539 - DNA, 15 bp, Homo sapiens
cattagctgtaacac

SEQ ID NO: 44540 - DNA, 15 bp, Homo sapiens
ccattagctgtaaca

SEQ ID NO: 44541 - DNA, 15 bp, Homo sapiens
gccattagctgtaac

SEQ ID NO: 44542 - DNA, 15 bp, Homo sapiens
ggccattagctgtaa

SEQ ID NO: 44543 - DNA, 15 bp, Homo sapiens
cggccattagctgta

SEQ ID NO: 44544 - DNA, 15 bp, Homo sapiens
tcggccattagctgt

SEQ ID NO: 44545 - DNA, 15 bp, Homo sapiens
ctcggccattagctg

SEQ ID NO: 44546 - DNA, 15 bp, Homo sapiens
tctcggccattagct

SEQ ID NO: 44547 - DNA, 15 bp, Homo sapiens
gtctcggccattagc

SEQ ID NO: 44548 - DNA, 15 bp, Homo sapiens
tgtctcggccattag

SEQ ID NO: 44549 - DNA, 15 bp, Homo sapiens
ctgtctcggccatta

SEQ ID NO: 44550 - DNA, 15 bp, Homo sapiens
actgtctcggccatt

SEQ ID NO: 44551 - DNA, 15 bp, Homo sapiens
tactgtctcggccat

SEQ ID NO: 44552 - DNA, 15 bp, Homo sapiens
ctactgtctcggcca

SEQ ID NO: 44553 - DNA, 15 bp, Homo sapiens
tctactgtctcggcc

SEQ ID NO: 44554 - DNA, 15 bp, Homo sapiens
ttctactgtctcggc

SEQ ID NO: 44555 - DNA, 15 bp, Homo sapiens
gttctactgtctcgg

SEQ ID NO: 44556 - DNA, 15 bp, Homo sapiens
agttctactgtctcg

SEQ ID NO: 44557 - DNA, 15 bp, Homo sapiens
tagttctactgtctc

SEQ ID NO: 44558 - DNA, 15 bp, Homo sapiens
ctagttctactgtct

SEQ ID NO: 44559 - DNA, 15 bp, Homo sapiens
cctagttctactgtc

SEQ ID NO: 44560 - DNA, 15 bp, Homo sapiens
acctagttctactgt

SEQ ID NO: 44561 - DNA, 15 bp, Homo sapiens
cacctagttctactg

SEQ ID NO: 44562 - DNA, 15 bp, Homo sapiens
tcacctagttctact

SEQ ID NO: 44563 - DNA, 15 bp, Homo sapiens
gtcacctagttctac

SEQ ID NO: 44564 - DNA, 15 bp, Homo sapiens
tgtcacctagttcta

SEQ ID NO: 44565 - DNA, 15 bp, Homo sapiens
atgtcacctagttct

SEQ ID NO: 44566 - DNA, 15 bp, Homo sapiens
aatgtcacctagttc

SEQ ID NO: 44567 - DNA, 15 bp, Homo sapiens
taatgtcacctagtt

SEQ ID NO: 44568 - DNA, 15 bp, Homo sapiens
ataatgtcacctagt

SEQ ID NO: 44569 - DNA, 15 bp, Homo sapiens
tataatgtcacctag

SEQ ID NO: 44570 - DNA, 15 bp, Homo sapiens
atataatgtcaccta

SEQ ID NO: 44571 - DNA, 15 bp, Homo sapiens
gatataatgtcacct

SEQ ID NO: 44572 - DNA, 15 bp, Homo sapiens
agatataatgtcacc

SEQ ID NO: 44573 - DNA, 15 bp, Homo sapiens
tagatataatgtcac

SEQ ID NO: 44574 - DNA, 15 bp, Homo sapiens
gtagatataatgtca

SEQ ID NO: 44575 - DNA, 15 bp, Homo sapiens
agtagatataatgtc

SEQ ID NO: 44576 - DNA, 15 bp, Homo sapiens
aagtagatataatgt

SEQ ID NO: 44577 - DNA, 15 bp, Homo sapiens
caagtagatataatg

SEQ ID NO: 44578 - DNA, 15 bp, Homo sapiens
acaagtagatataat

SEQ ID NO: 44579 - DNA, 15 bp, Homo sapiens
tacaagtagatataa

SEQ ID NO: 44580 - DNA, 15 bp, Homo sapiens
ttacaagtagatata

SEQ ID NO: 44581 - DNA, 15 bp, Homo sapiens
attacaagtagatat

SEQ ID NO: 44582 - DNA, 15 bp, Homo sapiens
gattacaagtagata

SEQ ID NO: 44583 - DNA, 15 bp, Homo sapiens
tgattacaagtagat

SEQ ID NO: 44584 - DNA, 15 bp, Homo sapiens
ctgattacaagtaga

SEQ ID NO: 44585 - DNA, 15 bp, Homo sapiens
actgattacaagtag

SEQ ID NO: 44586 - DNA, 15 bp, Homo sapiens
cactgattacaagta

SEQ ID NO: 44587 - DNA, 15 bp, Homo sapiens
tcactgattacaagt

SEQ ID NO: 44588 - DNA, 15 bp, Homo sapiens
ctcactgattacaag

SEQ ID NO: 44589 - DNA, 15 bp, Homo sapiens
cctcactgattacaa

SEQ ID NO: 44590 - DNA, 15 bp, Homo sapiens
tcctcactgattaca

SEQ ID NO: 44591 - DNA, 15 bp, Homo sapiens
ttcctcactgattac

SEQ ID NO: 44592 - DNA, 15 bp, Homo sapiens
tttcctcactgatta

SEQ ID NO: 44593 - DNA, 15 bp, Homo sapiens
ttttcctcactgatt

SEQ ID NO: 44594 - DNA, 15 bp, Homo sapiens
tttttcctcactgat

SEQ ID NO: 44595 - DNA, 15 bp, Homo sapiens
atttttcctcactga

SEQ ID NO: 44596 - DNA, 15 bp, Homo sapiens
tatttttcctcactg

SEQ ID NO: 44597 - DNA, 15 bp, Homo sapiens
ttatttttcctcact

SEQ ID NO: 44598 - DNA, 15 bp, Homo sapiens
attatttttcctcac

SEQ ID NO: 44599 - DNA, 15 bp, Homo sapiens
cattatttttcctca

SEQ ID NO: 44600 - DNA, 15 bp, Homo sapiens
acattatttttcctc

SEQ ID NO: 44601 - DNA, 15 bp, Homo sapiens
cacattatttttcct

SEQ ID NO: 44602 - DNA, 15 bp, Homo sapiens
ccacattatttttcc

SEQ ID NO: 44603 - DNA, 15 bp, Homo sapiens
gccacattatttttc

SEQ ID NO: 44604 - DNA, 15 bp, Homo sapiens
tgccacattattttt

SEQ ID NO: 44605 - DNA, 15 bp, Homo sapiens
ttgccacattatttt

SEQ ID NO: 44606 - DNA, 15 bp, Homo sapiens
tttgccacattattt

SEQ ID NO: 44607 - DNA, 15 bp, Homo sapiens
ttttgccacattatt

SEQ ID NO: 44608 - DNA, 15 bp, Homo sapiens
gttttgccacattat

SEQ ID NO: 44609 - DNA, 15 bp, Homo sapiens
tgttttgccacatta

SEQ ID NO: 44610 - DNA, 15 bp, Homo sapiens
gtgttttgccacatt

SEQ ID NO: 44611 - DNA, 15 bp, Homo sapiens
ggtgttttgccacat

SEQ ID NO: 44612 - DNA, 15 bp, Homo sapiens
tggtgttttgccaca

SEQ ID NO: 44613 - DNA, 15 bp, Homo sapiens
atggtgttttgccac

SEQ ID NO: 44614 - DNA, 15 bp, Homo sapiens
catggtgttttgcca

SEQ ID NO: 44615 - DNA, 15 bp, Homo sapiens
ccatggtgttttgcc

SEQ ID NO: 44616 - DNA, 15 bp, Homo sapiens
accatggtgttttgc

SEQ ID NO: 44617 - DNA, 15 bp, Homo sapiens
taccatggtgttttg

SEQ ID NO: 44618 - DNA, 15 bp, Homo sapiens
gtaccatggtgtttt

SEQ ID NO: 44619 - DNA, 15 bp, Homo sapiens
agtaccatggtgttt

SEQ ID NO: 44620 - DNA, 15 bp, Homo sapiens
gagtaccatggtgtt

SEQ ID NO: 44621 - DNA, 15 bp, Homo sapiens
agagtaccatggtgt

SEQ ID NO: 44622 - DNA, 15 bp, Homo sapiens
aagagtaccatggtg

SEQ ID NO: 44623 - DNA, 15 bp, Homo sapiens
taagagtaccatggt

SEQ ID NO: 44624 - DNA, 15 bp, Homo sapiens
ttaagagtaccatgg

SEQ ID NO: 44625 - DNA, 15 bp, Homo sapiens
tttaagagtaccatg

SEQ ID NO: 44626 - DNA, 15 bp, Homo sapiens
atttaagagtaccat

SEQ ID NO: 44627 - DNA, 15 bp, Homo sapiens
gatttaagagtacca

SEQ ID NO: 44628 - DNA, 15 bp, Homo sapiens
tgatttaagagtacc

SEQ ID NO: 44629 - DNA, 15 bp, Homo sapiens
atgatttaagagtac

SEQ ID NO: 44630 - DNA, 15 bp, Homo sapiens
tatgatttaagagta

SEQ ID NO: 44631 - DNA, 15 bp, Homo sapiens
ctatgatttaagagt

SEQ ID NO: 44632 - DNA, 15 bp, Homo sapiens
tctatgatttaagag

SEQ ID NO: 44633 - DNA, 15 bp, Homo sapiens
ttctatgatttaaga

SEQ ID NO: 44634 - DNA, 15 bp, Homo sapiens
tttctatgatttaag

SEQ ID NO: 44635 - DNA, 15 bp, Homo sapiens
ctttctatgatttaa

SEQ ID NO: 44636 - DNA, 15 bp, Homo sapiens
actttctatgattta

SEQ ID NO: 44637 - DNA, 15 bp, Homo sapiens
cactttctatgattt

SEQ ID NO: 44638 - DNA, 15 bp, Homo sapiens
gcactttctatgatt

SEQ ID NO: 44639 - DNA, 15 bp, Homo sapiens
ggcactttctatgat

SEQ ID NO: 44640 - DNA, 15 bp, Homo sapiens
tggcactttctatga

SEQ ID NO: 44641 - DNA, 15 bp, Homo sapiens
ttggcactttctatg

SEQ ID NO: 44642 - DNA, 15 bp, Homo sapiens
tttggcactttctat

SEQ ID NO: 44643 - DNA, 15 bp, Homo sapiens
atttggcactttcta

SEQ ID NO: 44644 - DNA, 15 bp, Homo sapiens
catttggcactttct

SEQ ID NO: 44645 - DNA, 15 bp, Homo sapiens
tcatttggcactttc

SEQ ID NO: 44646 - DNA, 15 bp, Homo sapiens
ctcatttggcacttt

SEQ ID NO: 44647 - DNA, 15 bp, Homo sapiens
cctcatttggcactt

SEQ ID NO: 44648 - DNA, 15 bp, Homo sapiens
tcctcatttggcact

SEQ ID NO: 44649 - DNA, 15 bp, Homo sapiens
ctcctcatttggcac

SEQ ID NO: 44650 - DNA, 15 bp, Homo sapiens
cctcctcatttggca

SEQ ID NO: 44651 - DNA, 15 bp, Homo sapiens
tcctcctcatttggc

SEQ ID NO: 44652 - DNA, 15 bp, Homo sapiens
ctcctcctcatttgg

SEQ ID NO: 44653 - DNA, 15 bp, Homo sapiens
cctcctcctcatttg

SEQ ID NO: 44654 - DNA, 15 bp, Homo sapiens
acctcctcctcattt

SEQ ID NO: 44655 - DNA, 15 bp, Homo sapiens
tacctcctcctcatt

SEQ ID NO: 44656 - DNA, 15 bp, Homo sapiens
gtacctcctcctcat

SEQ ID NO: 44657 - DNA, 15 bp, Homo sapiens
tgtacctcctcctca

SEQ ID NO: 44658 - DNA, 15 bp, Homo sapiens
gtgtacctcctcctc

SEQ ID NO: 44659 - DNA, 15 bp, Homo sapiens
agtgtacctcctcct

SEQ ID NO: 44660 - DNA, 15 bp, Homo sapiens
gagtgtacctcctcc

SEQ ID NO: 44661 - DNA, 15 bp, Homo sapiens
agagtgtacctcctc

SEQ ID NO: 44662 - DNA, 15 bp, Homo sapiens
gagagtgtacctcct

SEQ ID NO: 44663 - DNA, 15 bp, Homo sapiens
tgagagtgtacctcc

SEQ ID NO: 44664 - DNA, 15 bp, Homo sapiens
ttgagagtgtacctc

SEQ ID NO: 44665 - DNA, 15 bp, Homo sapiens
cttgagagtgtacct

SEQ ID NO: 44666 - DNA, 15 bp, Homo sapiens
tcttgagagtgtacc

SEQ ID NO: 44667 - DNA, 15 bp, Homo sapiens
ttcttgagagtgtac

SEQ ID NO: 44668 - DNA, 15 bp, Homo sapiens
gttcttgagagtgta

SEQ ID NO: 44669 - DNA, 15 bp, Homo sapiens
ggttcttgagagtgt

SEQ ID NO: 44670 - DNA, 15 bp, Homo sapiens
aggttcttgagagtg

SEQ ID NO: 44671 - DNA, 15 bp, Homo sapiens
caggttcttgagagt

SEQ ID NO: 44672 - DNA, 15 bp, Homo sapiens
gcaggttcttgagag

SEQ ID NO: 44673 - DNA, 15 bp, Homo sapiens
tgcaggttcttgaga

SEQ ID NO: 44674 - DNA, 15 bp, Homo sapiens
ttgcaggttcttgag

SEQ ID NO: 44675 - DNA, 15 bp, Homo sapiens
tttgcaggttcttga

SEQ ID NO: 44676 - DNA, 15 bp, Homo sapiens
ttttgcaggttcttg

SEQ ID NO: 44677 - DNA, 15 bp, Homo sapiens
gttttgcaggttctt

SEQ ID NO: 44678 - DNA, 15 bp, Homo sapiens
tgttttgcaggttct

SEQ ID NO: 44679 - DNA, 15 bp, Homo sapiens
ttgttttgcaggttc

SEQ ID NO: 44680 - DNA, 15 bp, Homo sapiens
tttgttttgcaggtt

SEQ ID NO: 44681 - DNA, 15 bp, Homo sapiens
atttgttttgcaggt

SEQ ID NO: 44682 - DNA, 15 bp, Homo sapiens
tatttgttttgcagg

SEQ ID NO: 44683 - DNA, 15 bp, Homo sapiens
atatttgttttgcag

SEQ ID NO: 44684 - DNA, 15 bp, Homo sapiens
catatttgttttgca

SEQ ID NO: 44685 - DNA, 15 bp, Homo sapiens
acatatttgttttgc

SEQ ID NO: 44686 - DNA, 15 bp, Homo sapiens
aacatatttgttttg

SEQ ID NO: 44687 - DNA, 15 bp, Homo sapiens
aaacatatttgtttt

SEQ ID NO: 44688 - DNA, 15 bp, Homo sapiens
taaacatatttgttt

SEQ ID NO: 44689 - DNA, 15 bp, Homo sapiens
ataaacatatttgtt

SEQ ID NO: 44690 - DNA, 15 bp, Homo sapiens
gataaacatatttgt

SEQ ID NO: 44691 - DNA, 15 bp, Homo sapiens
tgataaacatatttg

SEQ ID NO: 44692 - DNA, 15 bp, Homo sapiens
gtgataaacatattt

SEQ ID NO: 44693 - DNA, 15 bp, Homo sapiens
ggtgataaacatatt

SEQ ID NO: 44694 - DNA, 15 bp, Homo sapiens
tggtgataaacatat

SEQ ID NO: 44695 - DNA, 15 bp, Homo sapiens
ttggtgataaacata

SEQ ID NO: 44696 - DNA, 15 bp, Homo sapiens
tttggtgataaacat

SEQ ID NO: 44697 - DNA, 15 bp, Homo sapiens
ttttggtgataaaca

SEQ ID NO: 44698 - DNA, 15 bp, Homo sapiens
tttttggtgataaac

SEQ ID NO: 44699 - DNA, 15 bp, Homo sapiens
gtttttggtgataaa

SEQ ID NO: 44700 - DNA, 15 bp, Homo sapiens
agtttttggtgataa

SEQ ID NO: 44701 - DNA, 15 bp, Homo sapiens
tagtttttggtgata

SEQ ID NO: 44702 - DNA, 15 bp, Homo sapiens
ctagtttttggtgat

SEQ ID NO: 44703 - DNA, 15 bp, Homo sapiens
tctagtttttggtga

SEQ ID NO: 44704 - DNA, 15 bp, Homo sapiens
atctagtttttggtg

SEQ ID NO: 44705 - DNA, 15 bp, Homo sapiens
aatctagtttttggt

SEQ ID NO: 44706 - DNA, 15 bp, Homo sapiens
gaatctagtttttgg

SEQ ID NO: 44707 - DNA, 15 bp, Homo sapiens
ggaatctagtttttg

SEQ ID NO: 44708 - DNA, 15 bp, Homo sapiens
gggaatctagttttt

SEQ ID NO: 44709 - DNA, 15 bp, Homo sapiens
tgggaatctagtttt

SEQ ID NO: 44710 - DNA, 15 bp, Homo sapiens
gtgggaatctagttt

SEQ ID NO: 44711 - DNA, 15 bp, Homo sapiens
agtgggaatctagtt

SEQ ID NO: 44712 - DNA, 15 bp, Homo sapiens
cagtgggaatctagt

SEQ ID NO: 44713 - DNA, 15 bp, Homo sapiens
gcagtgggaatctag

SEQ ID NO: 44714 - DNA, 15 bp, Homo sapiens
tgcagtgggaatcta

SEQ ID NO: 44715 - DNA, 15 bp, Homo sapiens
atgcagtgggaatct

SEQ ID NO: 44716 - DNA, 15 bp, Homo sapiens
aatgcagtgggaatc

SEQ ID NO: 44717 - DNA, 15 bp, Homo sapiens
aaatgcagtgggaat

SEQ ID NO: 44718 - DNA, 15 bp, Homo sapiens
gaaatgcagtgggaa

SEQ ID NO: 44719 - DNA, 15 bp, Homo sapiens
ggaaatgcagtggga

SEQ ID NO: 44720 - DNA, 15 bp, Homo sapiens
tggaaatgcagtggg

SEQ ID NO: 44721 - DNA, 15 bp, Homo sapiens
ctggaaatgcagtgg

SEQ ID NO: 44722 - DNA, 15 bp, Homo sapiens
cctggaaatgcagtg

SEQ ID NO: 44723 - DNA, 15 bp, Homo sapiens
ccctggaaatgcagt

SEQ ID NO: 44724 - DNA, 15 bp, Homo sapiens
accctggaaatgcag

SEQ ID NO: 44725 - DNA, 15 bp, Homo sapiens
aaccctggaaatgca

SEQ ID NO: 44726 - DNA, 15 bp, Homo sapiens
aaaccctggaaatgc

SEQ ID NO: 44727 - DNA, 15 bp, Homo sapiens
gaaaccctggaaatg

SEQ ID NO: 44728 - DNA, 15 bp, Homo sapiens
tgaaaccctggaaat

SEQ ID NO: 44729 - DNA, 15 bp, Homo sapiens
ctgaaaccctggaaa

SEQ ID NO: 44730 - DNA, 15 bp, Homo sapiens
tctgaaaccctggaa

SEQ ID NO: 44731 - DNA, 15 bp, Homo sapiens
ctctgaaaccctgga

SEQ ID NO: 44732 - DNA, 15 bp, Homo sapiens
tctctgaaaccctgg

SEQ ID NO: 44733 - DNA, 15 bp, Homo sapiens
gtctctgaaaccctg

SEQ ID NO: 44734 - DNA, 15 bp, Homo sapiens
agtctctgaaaccct

SEQ ID NO: 44735 - DNA, 15 bp, Homo sapiens
cagtctctgaaaccc

SEQ ID NO: 44736 - DNA, 15 bp, Homo sapiens
ccagtctctgaaacc

SEQ ID NO: 44737 - DNA, 15 bp, Homo sapiens
gccagtctctgaaac

SEQ ID NO: 44738 - DNA, 15 bp, Homo sapiens
tgccagtctctgaaa

SEQ ID NO: 44739 - DNA, 15 bp, Homo sapiens
ctgccagtctctgaa

SEQ ID NO: 44740 - DNA, 15 bp, Homo sapiens
gctgccagtctctga

SEQ ID NO: 44741 - DNA, 15 bp, Homo sapiens
ggctgccagtctctg

SEQ ID NO: 44742 - DNA, 15 bp, Homo sapiens
tggctgccagtctct

SEQ ID NO: 44743 - DNA, 15 bp, Homo sapiens
atggctgccagtctc

SEQ ID NO: 44744 - DNA, 15 bp, Homo sapiens
catggctgccagtct

SEQ ID NO: 44745 - DNA, 15 bp, Homo sapiens
acatggctgccagtc

SEQ ID NO: 44746 - DNA, 15 bp, Homo sapiens
gacatggctgccagt

SEQ ID NO: 44747 - DNA, 15 bp, Homo sapiens
ggacatggctgccag

SEQ ID NO: 44748 - DNA, 15 bp, Homo sapiens
aggacatggctgcca

SEQ ID NO: 44749 - DNA, 15 bp, Homo sapiens
gaggacatggctgcc

SEQ ID NO: 44750 - DNA, 15 bp, Homo sapiens
ggaggacatggctgc

SEQ ID NO: 44751 - DNA, 15 bp, Homo sapiens
tggaggacatggctg

SEQ ID NO: 44752 - DNA, 15 bp, Homo sapiens
ctggaggacatggct

SEQ ID NO: 44753 - DNA, 15 bp, Homo sapiens
gctggaggacatggc

SEQ ID NO: 44754 - DNA, 15 bp, Homo sapiens
tgctggaggacatgg

SEQ ID NO: 44755 - DNA, 15 bp, Homo sapiens
atgctggaggacatg

SEQ ID NO: 44756 - DNA, 15 bp, Homo sapiens
gatgctggaggacat

SEQ ID NO: 44757 - DNA, 15 bp, Homo sapiens
agatgctggaggaca

SEQ ID NO: 44758 - DNA, 15 bp, Homo sapiens
cagatgctggaggac

SEQ ID NO: 44759 - DNA, 15 bp, Homo sapiens
tcagatgctggagga

SEQ ID NO: 44760 - DNA, 15 bp, Homo sapiens
atcagatgctggagg

SEQ ID NO: 44761 - DNA, 15 bp, Homo sapiens
catcagatgctggag

SEQ ID NO: 44762 - DNA, 15 bp, Homo sapiens
acatcagatgctgga

SEQ ID NO: 44763 - DNA, 15 bp, Homo sapiens
tacatcagatgctgg

SEQ ID NO: 44764 - DNA, 15 bp, Homo sapiens
atacatcagatgctg

SEQ ID NO: 44765 - DNA, 15 bp, Homo sapiens
catacatcagatgct

SEQ ID NO: 44766 - DNA, 15 bp, Homo sapiens
ccatacatcagatgc

SEQ ID NO: 44767 - DNA, 15 bp, Homo sapiens
cccatacatcagatg

SEQ ID NO: 44768 - DNA, 15 bp, Homo sapiens
acccatacatcagat

SEQ ID NO: 44769 - DNA, 15 bp, Homo sapiens
aacccatacatcaga

SEQ ID NO: 44770 - DNA, 15 bp, Homo sapiens
aaacccatacatcag

SEQ ID NO: 44771 - DNA, 15 bp, Homo sapiens
gaaacccatacatca

SEQ ID NO: 44772 - DNA, 15 bp, Homo sapiens
ggaaacccatacatc

SEQ ID NO: 44773 - DNA, 15 bp, Homo sapiens
gggaaacccatacat

SEQ ID NO: 44774 - DNA, 15 bp, Homo sapiens
tgggaaacccataca

SEQ ID NO: 44775 - DNA, 15 bp, Homo sapiens
ttgggaaacccatac

SEQ ID NO: 44776 - DNA, 15 bp, Homo sapiens
gttgggaaacccata

SEQ ID NO: 44777 - DNA, 15 bp, Homo sapiens
tgttgggaaacccat

SEQ ID NO: 44778 - DNA, 15 bp, Homo sapiens
atgttgggaaaccca

SEQ ID NO: 44779 - DNA, 15 bp, Homo sapiens
gatgttgggaaaccc

SEQ ID NO: 44780 - DNA, 15 bp, Homo sapiens
agatgttgggaaacc

SEQ ID NO: 44781 - DNA, 15 bp, Homo sapiens
gagatgttgggaaac

SEQ ID NO: 44782 - DNA, 15 bp, Homo sapiens
tgagatgttgggaaa

SEQ ID NO: 44783 - DNA, 15 bp, Homo sapiens
atgagatgttgggaa

SEQ ID NO: 44784 - DNA, 15 bp, Homo sapiens
gatgagatgttggga

SEQ ID NO: 44785 - DNA, 15 bp, Homo sapiens
agatgagatgttggg

SEQ ID NO: 44786 - DNA, 15 bp, Homo sapiens
cagatgagatgttgg

SEQ ID NO: 44787 - DNA, 15 bp, Homo sapiens
tcagatgagatgttg

SEQ ID NO: 44788 - DNA, 15 bp, Homo sapiens
atcagatgagatgtt

SEQ ID NO: 44789 - DNA, 15 bp, Homo sapiens
tatcagatgagatgt

SEQ ID NO: 44790 - DNA, 15 bp, Homo sapiens
ttatcagatgagatg

SEQ ID NO: 44791 - DNA, 15 bp, Homo sapiens
tttatcagatgagat

SEQ ID NO: 44792 - DNA, 15 bp, Homo sapiens
ttttatcagatgaga

SEQ ID NO: 44793 - DNA, 15 bp, Homo sapiens
tttttatcagatgag

SEQ ID NO: 44794 - DNA, 15 bp, Homo sapiens
ttttttatcagatga

SEQ ID NO: 44795 - DNA, 15 bp, Homo sapiens
tttttttatcagatg

SEQ ID NO: 44796 - DNA, 15 bp, Homo sapiens
ttttttttatcagat

SEQ ID NO: 44797 - DNA, 15 bp, Homo sapiens
attttttttatcaga

SEQ ID NO: 44798 - DNA, 15 bp, Homo sapiens
tattttttttatcag

SEQ ID NO: 44799 - DNA, 15 bp, Homo sapiens
ttattttttttatca

SEQ ID NO: 44800 - DNA, 15 bp, Homo sapiens
attattttttttatc

SEQ ID NO: 44801 - DNA, 15 bp, Homo sapiens
aattattttttttat

SEQ ID NO: 44802 - DNA, 15 bp, Homo sapiens
aaattatttttttta

SEQ ID NO: 44803 - DNA, 15 bp, Homo sapiens
caaattatttttttt

SEQ ID NO: 44804 - DNA, 15 bp, Homo sapiens
gcaaattattttttt

SEQ ID NO: 44805 - DNA, 15 bp, Homo sapiens
ggcaaattatttttt

SEQ ID NO: 44806 - DNA, 15 bp, Homo sapiens
tggcaaattattttt

SEQ ID NO: 44807 - DNA, 15 bp, Homo sapiens
ctggcaaattatttt

SEQ ID NO: 44808 - DNA, 15 bp, Homo sapiens
actggcaaattattt

SEQ ID NO: 44809 - DNA, 15 bp, Homo sapiens
cactggcaaattatt

SEQ ID NO: 44810 - DNA, 15 bp, Homo sapiens
ccactggcaaattat

SEQ ID NO: 44811 - DNA, 15 bp, Homo sapiens
tccactggcaaatta

SEQ ID NO: 44812 - DNA, 15 bp, Homo sapiens
ttccactggcaaatt

SEQ ID NO: 44813 - DNA, 15 bp, Homo sapiens
cttccactggcaaat

SEQ ID NO: 44814 - DNA, 15 bp, Homo sapiens
tcttccactggcaaa

SEQ ID NO: 44815 - DNA, 15 bp, Homo sapiens
ttcttccactggcaa

SEQ ID NO: 44816 - DNA, 15 bp, Homo sapiens
tttcttccactggca

SEQ ID NO: 44817 - DNA, 15 bp, Homo sapiens
ttttcttccactggc

SEQ ID NO: 44818 - DNA, 15 bp, Homo sapiens
gttttcttccactgg

SEQ ID NO: 44819 - DNA, 15 bp, Homo sapiens
tgttttcttccactg

SEQ ID NO: 44820 - DNA, 15 bp, Homo sapiens
atgttttcttccact

SEQ ID NO: 44821 - DNA, 15 bp, Homo sapiens
catgttttcttccac

SEQ ID NO: 44822 - DNA, 15 bp, Homo sapiens
ccatgttttcttcca

SEQ ID NO: 44823 - DNA, 15 bp, Homo sapiens
accatgttttcttcc

SEQ ID NO: 44824 - DNA, 15 bp, Homo sapiens
gaccatgttttcttc

SEQ ID NO: 44825 - DNA, 15 bp, Homo sapiens
agaccatgttttctt

SEQ ID NO: 44826 - DNA, 15 bp, Homo sapiens
tagaccatgttttct

SEQ ID NO: 44827 - DNA, 15 bp, Homo sapiens
ttagaccatgttttc

SEQ ID NO: 44828 - DNA, 15 bp, Homo sapiens
attagaccatgtttt

SEQ ID NO: 44829 - DNA, 15 bp, Homo sapiens
tattagaccatgttt

SEQ ID NO: 44830 - DNA, 15 bp, Homo sapiens
ttattagaccatgtt

SEQ ID NO: 44831 - DNA, 15 bp, Homo sapiens
attattagaccatgt

SEQ ID NO: 44832 - DNA, 15 bp, Homo sapiens
tattattagaccatg

SEQ ID NO: 44833 - DNA, 15 bp, Homo sapiens
atattattagaccat

SEQ ID NO: 44834 - DNA, 15 bp, Homo sapiens
tatattattagacca

SEQ ID NO: 44835 - DNA, 15 bp, Homo sapiens
atatattattagacc

SEQ ID NO: 44836 - DNA, 15 bp, Homo sapiens
tatatattattagac

SEQ ID NO: 44837 - DNA, 15 bp, Homo sapiens
atatatattattaga

SEQ ID NO: 44838 - DNA, 15 bp, Homo sapiens
gatatatattattag

SEQ ID NO: 44839 - DNA, 15 bp, Homo sapiens
tgatatatattatta

SEQ ID NO: 44840 - DNA, 15 bp, Homo sapiens
ctgatatatattatt

SEQ ID NO: 44841 - DNA, 15 bp, Homo sapiens
tctgatatatattat

SEQ ID NO: 44842 - DNA, 15 bp, Homo sapiens
atctgatatatatta

SEQ ID NO: 44843 - DNA, 15 bp, Homo sapiens
tatctgatatatatt

SEQ ID NO: 44844 - DNA, 15 bp, Homo sapiens
atatctgatatatat

SEQ ID NO: 44845 - DNA, 15 bp, Homo sapiens
tatatctgatatata

SEQ ID NO: 44846 - DNA, 15 bp, Homo sapiens
atatatctgatatat

SEQ ID NO: 44847 - DNA, 15 bp, Homo sapiens
tatatatctgatata

SEQ ID NO: 44848 - DNA, 15 bp, Homo sapiens
atatatatctgatat

SEQ ID NO: 44849 - DNA, 15 bp, Homo sapiens
aatatatatctgata

SEQ ID NO: 44850 - DNA, 15 bp, Homo sapiens
gaatatatatctgat

SEQ ID NO: 44851 - DNA, 15 bp, Homo sapiens
agaatatatatctga

SEQ ID NO: 44852 - DNA, 15 bp, Homo sapiens
tagaatatatatctg

SEQ ID NO: 44853 - DNA, 15 bp, Homo sapiens
gtagaatatatatct

SEQ ID NO: 44854 - DNA, 15 bp, Homo sapiens
tgtagaatatatatc

SEQ ID NO: 44855 - DNA, 15 bp, Homo sapiens
atgtagaatatatat

SEQ ID NO: 44856 - DNA, 15 bp, Homo sapiens
aatgtagaatatata

SEQ ID NO: 44857 - DNA, 15 bp, Homo sapiens
gaatgtagaatatat

SEQ ID NO: 44858 - DNA, 15 bp, Homo sapiens
tgaatgtagaatata

SEQ ID NO: 44859 - DNA, 15 bp, Homo sapiens
atgaatgtagaatat

SEQ ID NO: 44860 - DNA, 15 bp, Homo sapiens
tatgaatgtagaata

SEQ ID NO: 44861 - DNA, 15 bp, Homo sapiens
ttatgaatgtagaat

SEQ ID NO: 44862 - DNA, 15 bp, Homo sapiens
attatgaatgtagaa

SEQ ID NO: 44863 - DNA, 15 bp, Homo sapiens
cattatgaatgtaga

SEQ ID NO: 44864 - DNA, 15 bp, Homo sapiens
tcattatgaatgtag

SEQ ID NO: 44865 - DNA, 15 bp, Homo sapiens
atcattatgaatgta

SEQ ID NO: 44866 - DNA, 15 bp, Homo sapiens
tatcattatgaatgt

SEQ ID NO: 44867 - DNA, 15 bp, Homo sapiens
gtatcattatgaatg

SEQ ID NO: 44868 - DNA, 15 bp, Homo sapiens
tgtatcattatgaat

SEQ ID NO: 44869 - DNA, 15 bp, Homo sapiens
atgtatcattatgaa

SEQ ID NO: 44870 - DNA, 15 bp, Homo sapiens
catgtatcattatga

SEQ ID NO: 44871 - DNA, 15 bp, Homo sapiens
ccatgtatcattatg

SEQ ID NO: 44872 - DNA, 15 bp, Homo sapiens
gccatgtatcattat

SEQ ID NO: 44873 - DNA, 15 bp, Homo sapiens
tgccatgtatcatta

SEQ ID NO: 44874 - DNA, 15 bp, Homo sapiens
ttgccatgtatcatt

SEQ ID NO: 44875 - DNA, 15 bp, Homo sapiens
attgccatgtatcat

SEQ ID NO: 44876 - DNA, 15 bp, Homo sapiens
aattgccatgtatca

SEQ ID NO: 44877 - DNA, 15 bp, Homo sapiens
gaattgccatgtatc

SEQ ID NO: 44878 - DNA, 15 bp, Homo sapiens
tgaattgccatgtat

SEQ ID NO: 44879 - DNA, 15 bp, Homo sapiens
atgaattgccatgta

SEQ ID NO: 44880 - DNA, 15 bp, Homo sapiens
gatgaattgccatgt

SEQ ID NO: 44881 - DNA, 15 bp, Homo sapiens
agatgaattgccatg

SEQ ID NO: 44882 - DNA, 15 bp, Homo sapiens
tagatgaattgccat

SEQ ID NO: 44883 - DNA, 15 bp, Homo sapiens
ttagatgaattgcca

SEQ ID NO: 44884 - DNA, 15 bp, Homo sapiens
attagatgaattgcc

SEQ ID NO: 44885 - DNA, 15 bp, Homo sapiens
tattagatgaattgc

SEQ ID NO: 44886 - DNA, 15 bp, Homo sapiens
atattagatgaattg

SEQ ID NO: 44887 - DNA, 15 bp, Homo sapiens
aatattagatgaatt

SEQ ID NO: 44888 - DNA, 15 bp, Homo sapiens
gaatattagatgaat

SEQ ID NO: 44889 - DNA, 15 bp, Homo sapiens
tgaatattagatgaa

SEQ ID NO: 44890 - DNA, 15 bp, Homo sapiens
ttgaatattagatga

SEQ ID NO: 44891 - DNA, 15 bp, Homo sapiens
attgaatattagatg

SEQ ID NO: 44892 - DNA, 15 bp, Homo sapiens
aattgaatattagat

SEQ ID NO: 44893 - DNA, 15 bp, Homo sapiens
gaattgaatattaga

SEQ ID NO: 44894 - DNA, 15 bp, Homo sapiens
agaattgaatattag

SEQ ID NO: 44895 - DNA, 15 bp, Homo sapiens
cagaattgaatatta

SEQ ID NO: 44896 - DNA, 15 bp, Homo sapiens
tcagaattgaatatt

SEQ ID NO: 44897 - DNA, 15 bp, Homo sapiens
ttcagaattgaatat

SEQ ID NO: 44898 - DNA, 15 bp, Homo sapiens
tttcagaattgaata

SEQ ID NO: 44899 - DNA, 15 bp, Homo sapiens
ttttcagaattgaat

SEQ ID NO: 44900 - DNA, 15 bp, Homo sapiens
gttttcagaattgaa

SEQ ID NO: 44901 - DNA, 15 bp, Homo sapiens
ggttttcagaattga

SEQ ID NO: 44902 - DNA, 15 bp, Homo sapiens
aggttttcagaattg

SEQ ID NO: 44903 - DNA, 15 bp, Homo sapiens
gaggttttcagaatt

SEQ ID NO: 44904 - DNA, 15 bp, Homo sapiens
agaggttttcagaat

SEQ ID NO: 44905 - DNA, 15 bp, Homo sapiens
aagaggttttcagaa

SEQ ID NO: 44906 - DNA, 15 bp, Homo sapiens
aaagaggttttcaga

SEQ ID NO: 44907 - DNA, 15 bp, Homo sapiens
aaaagaggttttcag

SEQ ID NO: 44908 - DNA, 15 bp, Homo sapiens
caaaagaggttttca

SEQ ID NO: 44909 - DNA, 15 bp, Homo sapiens
acaaaagaggttttc

SEQ ID NO: 44910 - DNA, 15 bp, Homo sapiens
cacaaaagaggtttt

SEQ ID NO: 44911 - DNA, 15 bp, Homo sapiens
ccacaaaagaggttt

SEQ ID NO: 44912 - DNA, 15 bp, Homo sapiens
gccacaaaagaggtt

SEQ ID NO: 44913 - DNA, 15 bp, Homo sapiens
tgccacaaaagaggt

SEQ ID NO: 44914 - DNA, 15 bp, Homo sapiens
ttgccacaaaagagg

SEQ ID NO: 44915 - DNA, 15 bp, Homo sapiens
tttgccacaaaagag

SEQ ID NO: 44916 - DNA, 15 bp, Homo sapiens
atttgccacaaaaga

SEQ ID NO: 44917 - DNA, 15 bp, Homo sapiens
tatttgccacaaaag

SEQ ID NO: 44918 - DNA, 15 bp, Homo sapiens
atatttgccacaaaa

SEQ ID NO: 44919 - DNA, 15 bp, Homo sapiens
gatatttgccacaaa

SEQ ID NO: 44920 - DNA, 15 bp, Homo sapiens
tgatatttgccacaa

SEQ ID NO: 44921 - DNA, 15 bp, Homo sapiens
gtgatatttgccaca

SEQ ID NO: 44922 - DNA, 15 bp, Homo sapiens
tgtgatatttgccac

SEQ ID NO: 44923 - DNA, 15 bp, Homo sapiens
ctgtgatatttgcca

SEQ ID NO: 44924 - DNA, 15 bp, Homo sapiens
cctgtgatatttgcc

SEQ ID NO: 44925 - DNA, 15 bp, Homo sapiens
gcctgtgatatttgc

SEQ ID NO: 44926 - DNA, 15 bp, Homo sapiens
tgcctgtgatatttg

SEQ ID NO: 44927 - DNA, 15 bp, Homo sapiens
ttgcctgtgatattt

SEQ ID NO: 44928 - DNA, 15 bp, Homo sapiens
cttgcctgtgatatt

SEQ ID NO: 44929 - DNA, 15 bp, Homo sapiens
ccttgcctgtgatat

SEQ ID NO: 44930 - DNA, 15 bp, Homo sapiens
gccttgcctgtgata

SEQ ID NO: 44931 - DNA, 15 bp, Homo sapiens
ggccttgcctgtgat

SEQ ID NO: 44932 - DNA, 15 bp, Homo sapiens
aggccttgcctgtga

SEQ ID NO: 44933 - DNA, 15 bp, Homo sapiens
aaggccttgcctgtg

SEQ ID NO: 44934 - DNA, 15 bp, Homo sapiens
gaaggccttgcctgt

SEQ ID NO: 44935 - DNA, 15 bp, Homo sapiens
tgaaggccttgcctg

SEQ ID NO: 44936 - DNA, 15 bp, Homo sapiens
atgaaggccttgcct

SEQ ID NO: 44937 - DNA, 15 bp, Homo sapiens
aatgaaggccttgcc

SEQ ID NO: 44938 - DNA, 15 bp, Homo sapiens
gaatgaaggccttgc

SEQ ID NO: 44939 - DNA, 15 bp, Homo sapiens
agaatgaaggccttg

SEQ ID NO: 44940 - DNA, 15 bp, Homo sapiens
aagaatgaaggcctt

SEQ ID NO: 44941 - DNA, 15 bp, Homo sapiens
aaagaatgaaggcct

SEQ ID NO: 44942 - DNA, 15 bp, Homo sapiens
gaaagaatgaaggcc

SEQ ID NO: 44943 - DNA, 15 bp, Homo sapiens
agaaagaatgaaggc

SEQ ID NO: 44944 - DNA, 15 bp, Homo sapiens
tagaaagaatgaagg

SEQ ID NO: 44945 - DNA, 15 bp, Homo sapiens
ctagaaagaatgaag

SEQ ID NO: 44946 - DNA, 15 bp, Homo sapiens
tctagaaagaatgaa

SEQ ID NO: 44947 - DNA, 15 bp, Homo sapiens
ttctagaaagaatga

SEQ ID NO: 44948 - DNA, 15 bp, Homo sapiens
tttctagaaagaatg

SEQ ID NO: 44949 - DNA, 15 bp, Homo sapiens
atttctagaaagaat

SEQ ID NO: 44950 - DNA, 15 bp, Homo sapiens
aatttctagaaagaa

SEQ ID NO: 44951 - DNA, 15 bp, Homo sapiens
aaatttctagaaaga

SEQ ID NO: 44952 - DNA, 15 bp, Homo sapiens
gaaatttctagaaag

SEQ ID NO: 44953 - DNA, 15 bp, Homo sapiens
cgaaatttctagaaa

SEQ ID NO: 44954 - DNA, 15 bp, Homo sapiens
ccgaaatttctagaa

SEQ ID NO: 44955 - DNA, 15 bp, Homo sapiens
accgaaatttctaga

SEQ ID NO: 44956 - DNA, 15 bp, Homo sapiens
aaccgaaatttctag

SEQ ID NO: 44957 - DNA, 15 bp, Homo sapiens
aaaccgaaatttcta

SEQ ID NO: 44958 - DNA, 15 bp, Homo sapiens
aaaaccgaaatttct

SEQ ID NO: 44959 - DNA, 15 bp, Homo sapiens
aaaaaccgaaatttc

SEQ ID NO: 44960 - DNA, 15 bp, Homo sapiens
gaaaaaccgaaattt

SEQ ID NO: 44961 - DNA, 15 bp, Homo sapiens
tgaaaaaccgaaatt

SEQ ID NO: 44962 - DNA, 15 bp, Homo sapiens
ctgaaaaaccgaaat

SEQ ID NO: 44963 - DNA, 15 bp, Homo sapiens
actgaaaaaccgaaa

SEQ ID NO: 44964 - DNA, 15 bp, Homo sapiens
cactgaaaaaccgaa

SEQ ID NO: 44965 - DNA, 15 bp, Homo sapiens
acactgaaaaaccga

SEQ ID NO: 44966 - DNA, 15 bp, Homo sapiens
tacactgaaaaaccg

SEQ ID NO: 44967 - DNA, 15 bp, Homo sapiens
gtacactgaaaaacc

SEQ ID NO: 44968 - DNA, 15 bp, Homo sapiens
agtacactgaaaaac

SEQ ID NO: 44969 - DNA, 15 bp, Homo sapiens
aagtacactgaaaaa

SEQ ID NO: 44970 - DNA, 15 bp, Homo sapiens
aaagtacactgaaaa

SEQ ID NO: 44971 - DNA, 15 bp, Homo sapiens
gaaagtacactgaaa

SEQ ID NO: 44972 - DNA, 15 bp, Homo sapiens
ggaaagtacactgaa

SEQ ID NO: 44973 - DNA, 15 bp, Homo sapiens
gggaaagtacactga

SEQ ID NO: 44974 - DNA, 15 bp, Homo sapiens
tgggaaagtacactg

SEQ ID NO: 44975 - DNA, 15 bp, Homo sapiens
ttgggaaagtacact

SEQ ID NO: 44976 - DNA, 15 bp, Homo sapiens
tttgggaaagtacac

SEQ ID NO: 44977 - DNA, 15 bp, Homo sapiens
gtttgggaaagtaca

SEQ ID NO: 44978 - DNA, 15 bp, Homo sapiens
agtttgggaaagtac

SEQ ID NO: 44979 - DNA, 15 bp, Homo sapiens
aagtttgggaaagta

SEQ ID NO: 44980 - DNA, 15 bp, Homo sapiens
taagtttgggaaagt

SEQ ID NO: 44981 - DNA, 15 bp, Homo sapiens
ctaagtttgggaaag

SEQ ID NO: 44982 - DNA, 15 bp, Homo sapiens
actaagtttgggaaa

SEQ ID NO: 44983 - DNA, 15 bp, Homo sapiens
cactaagtttgggaa

SEQ ID NO: 44984 - DNA, 15 bp, Homo sapiens
acactaagtttggga

SEQ ID NO: 44985 - DNA, 15 bp, Homo sapiens
aacactaagtttggg

SEQ ID NO: 44986 - DNA, 15 bp, Homo sapiens
taacactaagtttgg

SEQ ID NO: 44987 - DNA, 15 bp, Homo sapiens
ataacactaagtttg

SEQ ID NO: 44988 - DNA, 15 bp, Homo sapiens
tataacactaagttt

SEQ ID NO: 44989 - DNA, 15 bp, Homo sapiens
ttataacactaagtt

SEQ ID NO: 44990 - DNA, 15 bp, Homo sapiens
tttataacactaagt

SEQ ID NO: 44991 - DNA, 15 bp, Homo sapiens
ttttataacactaag

SEQ ID NO: 44992 - DNA, 15 bp, Homo sapiens
attttataacactaa

SEQ ID NO: 44993 - DNA, 15 bp, Homo sapiens
aattttataacacta

SEQ ID NO: 44994 - DNA, 15 bp, Homo sapiens
gaattttataacact

SEQ ID NO: 44995 - DNA, 15 bp, Homo sapiens
ggaattttataacac

SEQ ID NO: 44996 - DNA, 15 bp, Homo sapiens
gggaattttataaca

SEQ ID NO: 44997 - DNA, 15 bp, Homo sapiens
tgggaattttataac

SEQ ID NO: 44998 - DNA, 15 bp, Homo sapiens
ctgggaattttataa

SEQ ID NO: 44999 - DNA, 15 bp, Homo sapiens
actgggaattttata

SEQ ID NO: 45000 - DNA, 15 bp, Homo sapiens
cactgggaattttat

SEQ ID NO: 45001 - DNA, 15 bp, Homo sapiens
acactgggaatttta

SEQ ID NO: 45002 - DNA, 15 bp, Homo sapiens
aacactgggaatttt

SEQ ID NO: 45003 - DNA, 15 bp, Homo sapiens
aaacactgggaattt

SEQ ID NO: 45004 - DNA, 15 bp, Homo sapiens
aaaacactgggaatt

SEQ ID NO: 45005 - DNA, 15 bp, Homo sapiens
aaaaacactgggaat

SEQ ID NO: 45006 - DNA, 15 bp, Homo sapiens
caaaaacactgggaa

SEQ ID NO: 45007 - DNA, 15 bp, Homo sapiens
acaaaaacactggga

SEQ ID NO: 45008 - DNA, 15 bp, Homo sapiens
cacaaaaacactggg

SEQ ID NO: 45009 - DNA, 15 bp, Homo sapiens
ccacaaaaacactgg

SEQ ID NO: 45010 - DNA, 15 bp, Homo sapiens
cccacaaaaacactg

SEQ ID NO: 45011 - DNA, 15 bp, Homo sapiens
acccacaaaaacact

SEQ ID NO: 45012 - DNA, 15 bp, Homo sapiens
tacccacaaaaacac

SEQ ID NO: 45013 - DNA, 15 bp, Homo sapiens
gtacccacaaaaaca

SEQ ID NO: 45014 - DNA, 15 bp, Homo sapiens
tgtacccacaaaaac

SEQ ID NO: 45015 - DNA, 15 bp, Homo sapiens
atgtacccacaaaaa

SEQ ID NO: 45016 - DNA, 15 bp, Homo sapiens
catgtacccacaaaa

SEQ ID NO: 45017 - DNA, 15 bp, Homo sapiens
gcatgtacccacaaa

SEQ ID NO: 45018 - DNA, 15 bp, Homo sapiens
tgcatgtacccacaa

SEQ ID NO: 45019 - DNA, 15 bp, Homo sapiens
ttgcatgtacccaca

SEQ ID NO: 45020 - DNA, 15 bp, Homo sapiens
cttgcatgtacccac

SEQ ID NO: 45021 - DNA, 15 bp, Homo sapiens
acttgcatgtaccca

SEQ ID NO: 45022 - DNA, 15 bp, Homo sapiens
tacttgcatgtaccc

SEQ ID NO: 45023 - DNA, 15 bp, Homo sapiens
ttacttgcatgtacc

SEQ ID NO: 45024 - DNA, 15 bp, Homo sapiens
attacttgcatgtac

SEQ ID NO: 45025 - DNA, 15 bp, Homo sapiens
aattacttgcatgta

SEQ ID NO: 45026 - DNA, 15 bp, Homo sapiens
taattacttgcatgt

SEQ ID NO: 45027 - DNA, 15 bp, Homo sapiens
ttaattacttgcatg

SEQ ID NO: 45028 - DNA, 15 bp, Homo sapiens
cttaattacttgcat

SEQ ID NO: 45029 - DNA, 15 bp, Homo sapiens
tcttaattacttgca

SEQ ID NO: 45030 - DNA, 15 bp, Homo sapiens
atcttaattacttgc

SEQ ID NO: 45031 - DNA, 15 bp, Homo sapiens
aatcttaattacttg

SEQ ID NO: 45032 - DNA, 15 bp, Homo sapiens
aaatcttaattactt

SEQ ID NO: 45033 - DNA, 15 bp, Homo sapiens
aaaatcttaattact

SEQ ID NO: 45034 - DNA, 15 bp, Homo sapiens
gaaaatcttaattac

SEQ ID NO: 45035 - DNA, 15 bp, Homo sapiens
tgaaaatcttaatta

SEQ ID NO: 45036 - DNA, 15 bp, Homo sapiens
ctgaaaatcttaatt

SEQ ID NO: 45037 - DNA, 15 bp, Homo sapiens
gctgaaaatcttaat

SEQ ID NO: 45038 - DNA, 15 bp, Homo sapiens
tgctgaaaatcttaa

SEQ ID NO: 45039 - DNA, 15 bp, Homo sapiens
gtgctgaaaatctta

SEQ ID NO: 45040 - DNA, 15 bp, Homo sapiens
tgtgctgaaaatctt

SEQ ID NO: 45041 - DNA, 15 bp, Homo sapiens
ttgtgctgaaaatct

SEQ ID NO: 45042 - DNA, 15 bp, Homo sapiens
attgtgctgaaaatc

SEQ ID NO: 45043 - DNA, 15 bp, Homo sapiens
cattgtgctgaaaat

SEQ ID NO: 45044 - DNA, 15 bp, Homo sapiens
ccattgtgctgaaaa

SEQ ID NO: 45045 - DNA, 15 bp, Homo sapiens
gccattgtgctgaaa

SEQ ID NO: 45046 - DNA, 15 bp, Homo sapiens
ggccattgtgctgaa

SEQ ID NO: 45047 - DNA, 15 bp, Homo sapiens
aggccattgtgctga

SEQ ID NO: 45048 - DNA, 15 bp, Homo sapiens
aaggccattgtgctg

SEQ ID NO: 45049 - DNA, 15 bp, Homo sapiens
gaaggccattgtgct

SEQ ID NO: 45050 - DNA, 15 bp, Homo sapiens
tgaaggccattgtgc

SEQ ID NO: 45051 - DNA, 15 bp, Homo sapiens
ttgaaggccattgtg

SEQ ID NO: 45052 - DNA, 15 bp, Homo sapiens
tttgaaggccattgt

SEQ ID NO: 45053 - DNA, 15 bp, Homo sapiens
ttttgaaggccattg

SEQ ID NO: 45054 - DNA, 15 bp, Homo sapiens
tttttgaaggccatt

SEQ ID NO: 45055 - DNA, 15 bp, Homo sapiens
atttttgaaggccat

SEQ ID NO: 45056 - DNA, 15 bp, Homo sapiens
gatttttgaaggcca

SEQ ID NO: 45057 - DNA, 15 bp, Homo sapiens
tgatttttgaaggcc

SEQ ID NO: 45058 - DNA, 15 bp, Homo sapiens
atgatttttgaaggc

SEQ ID NO: 45059 - DNA, 15 bp, Homo sapiens
gatgatttttgaagg

SEQ ID NO: 45060 - DNA, 15 bp, Homo sapiens
tgatgatttttgaag

SEQ ID NO: 45061 - DNA, 15 bp, Homo sapiens
gtgatgatttttgaa

SEQ ID NO: 45062 - DNA, 15 bp, Homo sapiens
tgtgatgatttttga

SEQ ID NO: 45063 - DNA, 15 bp, Homo sapiens
ctgtgatgatttttg

SEQ ID NO: 45064 - DNA, 15 bp, Homo sapiens
gctgtgatgattttt

SEQ ID NO: 45065 - DNA, 15 bp, Homo sapiens
ggctgtgatgatttt

SEQ ID NO: 45066 - DNA, 15 bp, Homo sapiens
cggctgtgatgattt

SEQ ID NO: 45067 - DNA, 15 bp, Homo sapiens
acggctgtgatgatt

SEQ ID NO: 45068 - DNA, 15 bp, Homo sapiens
aacggctgtgatgat

SEQ ID NO: 45069 - DNA, 15 bp, Homo sapiens
aaacggctgtgatga

SEQ ID NO: 45070 - DNA, 15 bp, Homo sapiens
gaaacggctgtgatg

SEQ ID NO: 45071 - DNA, 15 bp, Homo sapiens
agaaacggctgtgat

SEQ ID NO: 45072 - DNA, 15 bp, Homo sapiens
tagaaacggctgtga

SEQ ID NO: 45073 - DNA, 15 bp, Homo sapiens
ttagaaacggctgtg

SEQ ID NO: 45074 - DNA, 15 bp, Homo sapiens
cttagaaacggctgt

SEQ ID NO: 45075 - DNA, 15 bp, Homo sapiens
gcttagaaacggctg

SEQ ID NO: 45076 - DNA, 15 bp, Homo sapiens
agcttagaaacggct

SEQ ID NO: 45077 - DNA, 15 bp, Homo sapiens
cagcttagaaacggc

SEQ ID NO: 45078 - DNA, 15 bp, Homo sapiens
gcagcttagaaacgg

SEQ ID NO: 45079 - DNA, 15 bp, Homo sapiens
ggcagcttagaaacg

SEQ ID NO: 45080 - DNA, 15 bp, Homo sapiens
gggcagcttagaaac

SEQ ID NO: 45081 - DNA, 15 bp, Homo sapiens
tgggcagcttagaaa

SEQ ID NO: 45082 - DNA, 15 bp, Homo sapiens
ttgggcagcttagaa

SEQ ID NO: 45083 - DNA, 15 bp, Homo sapiens
tttgggcagcttaga

SEQ ID NO: 45084 - DNA, 15 bp, Homo sapiens
ctttgggcagcttag

SEQ ID NO: 45085 - DNA, 15 bp, Homo sapiens
tctttgggcagctta

SEQ ID NO: 45086 - DNA, 15 bp, Homo sapiens
atctttgggcagctt

SEQ ID NO: 45087 - DNA, 15 bp, Homo sapiens
tatctttgggcagct

SEQ ID NO: 45088 - DNA, 15 bp, Homo sapiens
ttatctttgggcagc

SEQ ID NO: 45089 - DNA, 15 bp, Homo sapiens
tttatctttgggcag

SEQ ID NO: 45090 - DNA, 15 bp, Homo sapiens
ctttatctttgggca

SEQ ID NO: 45091 - DNA, 15 bp, Homo sapiens
cctttatctttgggc

SEQ ID NO: 45092 - DNA, 15 bp, Homo sapiens
ccctttatctttggg

SEQ ID NO: 45093 - DNA, 15 bp, Homo sapiens
tccctttatctttgg

SEQ ID NO: 45094 - DNA, 15 bp, Homo sapiens
gtccctttatctttg

SEQ ID NO: 45095 - DNA, 15 bp, Homo sapiens
agtccctttatcttt

SEQ ID NO: 45096 - DNA, 15 bp, Homo sapiens
tagtccctttatctt

SEQ ID NO: 45097 - DNA, 15 bp, Homo sapiens
ctagtccctttatct

SEQ ID NO: 45098 - DNA, 15 bp, Homo sapiens
gctagtccctttatc

SEQ ID NO: 45099 - DNA, 15 bp, Homo sapiens
agctagtccctttat

SEQ ID NO: 45100 - DNA, 15 bp, Homo sapiens
aagctagtcccttta

SEQ ID NO: 45101 - DNA, 15 bp, Homo sapiens
gaagctagtcccttt

SEQ ID NO: 45102 - DNA, 15 bp, Homo sapiens
ggaagctagtccctt

SEQ ID NO: 45103 - DNA, 15 bp, Homo sapiens
tggaagctagtccct

SEQ ID NO: 45104 - DNA, 15 bp, Homo sapiens
atggaagctagtccc

SEQ ID NO: 45105 - DNA, 15 bp, Homo sapiens
aatggaagctagtcc

SEQ ID NO: 45106 - DNA, 15 bp, Homo sapiens
aaatggaagctagtc

SEQ ID NO: 45107 - DNA, 15 bp, Homo sapiens
gaaatggaagctagt

SEQ ID NO: 45108 - DNA, 15 bp, Homo sapiens
agaaatggaagctag

SEQ ID NO: 45109 - DNA, 15 bp, Homo sapiens
cagaaatggaagcta

SEQ ID NO: 45110 - DNA, 15 bp, Homo sapiens
tcagaaatggaagct

SEQ ID NO: 45111 - DNA, 15 bp, Homo sapiens
gtcagaaatggaagc

SEQ ID NO: 45112 - DNA, 15 bp, Homo sapiens
agtcagaaatggaag

SEQ ID NO: 45113 - DNA, 15 bp, Homo sapiens
cagtcagaaatggaa

SEQ ID NO: 45114 - DNA, 15 bp, Homo sapiens
tcagtcagaaatgga

SEQ ID NO: 45115 - DNA, 15 bp, Homo sapiens
ttcagtcagaaatgg

SEQ ID NO: 45116 - DNA, 15 bp, Homo sapiens
gttcagtcagaaatg

SEQ ID NO: 45117 - DNA, 15 bp, Homo sapiens
tgttcagtcagaaat

SEQ ID NO: 45118 - DNA, 15 bp, Homo sapiens
ttgttcagtcagaaa

SEQ ID NO: 45119 - DNA, 15 bp, Homo sapiens
gttgttcagtcagaa

SEQ ID NO: 45120 - DNA, 15 bp, Homo sapiens
ggttgttcagtcaga

SEQ ID NO: 45121 - DNA, 15 bp, Homo sapiens
tggttgttcagtcag

SEQ ID NO: 45122 - DNA, 15 bp, Homo sapiens
ctggttgttcagtca

SEQ ID NO: 45123 - DNA, 15 bp, Homo sapiens
actggttgttcagtc

SEQ ID NO: 45124 - DNA, 15 bp, Homo sapiens
cactggttgttcagt

SEQ ID NO: 45125 - DNA, 15 bp, Homo sapiens
gcactggttgttcag

SEQ ID NO: 45126 - DNA, 15 bp, Homo sapiens
tgcactggttgttca

SEQ ID NO: 45127 - DNA, 15 bp, Homo sapiens
atgcactggttgttc

SEQ ID NO: 45128 - DNA, 15 bp, Homo sapiens
catgcactggttgtt

SEQ ID NO: 45129 - DNA, 15 bp, Homo sapiens
gcatgcactggttgt

SEQ ID NO: 45130 - DNA, 15 bp, Homo sapiens
ggcatgcactggttg

SEQ ID NO: 45131 - DNA, 15 bp, Homo sapiens
aggcatgcactggtt

SEQ ID NO: 45132 - DNA, 15 bp, Homo sapiens
aaggcatgcactggt

SEQ ID NO: 45133 - DNA, 15 bp, Homo sapiens
aaaggcatgcactgg

SEQ ID NO: 45134 - DNA, 15 bp, Homo sapiens
taaaggcatgcactg

SEQ ID NO: 45135 - DNA, 15 bp, Homo sapiens
ctaaaggcatgcact

SEQ ID NO: 45136 - DNA, 15 bp, Homo sapiens
gctaaaggcatgcac

SEQ ID NO: 45137 - DNA, 15 bp, Homo sapiens
ggctaaaggcatgca

SEQ ID NO: 45138 - DNA, 15 bp, Homo sapiens
gggctaaaggcatgc

SEQ ID NO: 45139 - DNA, 15 bp, Homo sapiens
agggctaaaggcatg

SEQ ID NO: 45140 - DNA, 15 bp, Homo sapiens
tagggctaaaggcat

SEQ ID NO: 45141 - DNA, 15 bp, Homo sapiens
ctagggctaaaggca

SEQ ID NO: 45142 - DNA, 15 bp, Homo sapiens
tctagggctaaaggc

SEQ ID NO: 45143 - DNA, 15 bp, Homo sapiens
ctctagggctaaagg

SEQ ID NO: 45144 - DNA, 15 bp, Homo sapiens
tctctagggctaaag

SEQ ID NO: 45145 - DNA, 15 bp, Homo sapiens
ctctctagggctaaa

SEQ ID NO: 45146 - DNA, 15 bp, Homo sapiens
actctctagggctaa

SEQ ID NO: 45147 - DNA, 15 bp, Homo sapiens
tactctctagggcta

SEQ ID NO: 45148 - DNA, 15 bp, Homo sapiens
atactctctagggct

SEQ ID NO: 45149 - DNA, 15 bp, Homo sapiens
tatactctctagggc

SEQ ID NO: 45150 - DNA, 15 bp, Homo sapiens
gtatactctctaggg

SEQ ID NO: 45151 - DNA, 15 bp, Homo sapiens
tgtatactctctagg

SEQ ID NO: 45152 - DNA, 15 bp, Homo sapiens
atgtatactctctag

SEQ ID NO: 45153 - DNA, 15 bp, Homo sapiens
gatgtatactctcta

SEQ ID NO: 45154 - DNA, 15 bp, Homo sapiens
agatgtatactctct

SEQ ID NO: 45155 - DNA, 15 bp, Homo sapiens
aagatgtatactctc

SEQ ID NO: 45156 - DNA, 15 bp, Homo sapiens
aaagatgtatactct

SEQ ID NO: 45157 - DNA, 15 bp, Homo sapiens
aaaagatgtatactc

SEQ ID NO: 45158 - DNA, 15 bp, Homo sapiens
caaaagatgtatact

SEQ ID NO: 45159 - DNA, 15 bp, Homo sapiens
tcaaaagatgtatac

SEQ ID NO: 45160 - DNA, 15 bp, Homo sapiens
ttcaaaagatgtata

SEQ ID NO: 45161 - DNA, 15 bp, Homo sapiens
cttcaaaagatgtat

SEQ ID NO: 45162 - DNA, 15 bp, Homo sapiens
acttcaaaagatgta

SEQ ID NO: 45163 - DNA, 15 bp, Homo sapiens
tacttcaaaagatgt

SEQ ID NO: 45164 - DNA, 15 bp, Homo sapiens
atacttcaaaagatg

SEQ ID NO: 45165 - DNA, 15 bp, Homo sapiens
tatacttcaaaagat

SEQ ID NO: 45166 - DNA, 15 bp, Homo sapiens
ctatacttcaaaaga

SEQ ID NO: 45167 - DNA, 15 bp, Homo sapiens
gctatacttcaaaag

SEQ ID NO: 45168 - DNA, 15 bp, Homo sapiens
agctatacttcaaaa

SEQ ID NO: 45169 - DNA, 15 bp, Homo sapiens
gagctatacttcaaa

SEQ ID NO: 45170 - DNA, 15 bp, Homo sapiens
ggagctatacttcaa

SEQ ID NO: 45171 - DNA, 15 bp, Homo sapiens
aggagctatacttca

SEQ ID NO: 45172 - DNA, 15 bp, Homo sapiens
aaggagctatacttc

SEQ ID NO: 45173 - DNA, 15 bp, Homo sapiens
caaggagctatactt

SEQ ID NO: 45174 - DNA, 15 bp, Homo sapiens
ccaaggagctatact

SEQ ID NO: 45175 - DNA, 15 bp, Homo sapiens
gccaaggagctatac

SEQ ID NO: 45176 - DNA, 15 bp, Homo sapiens
tgccaaggagctata

SEQ ID NO: 45177 - DNA, 15 bp, Homo sapiens
atgccaaggagctat

SEQ ID NO: 45178 - DNA, 15 bp, Homo sapiens
catgccaaggagcta

SEQ ID NO: 45179 - DNA, 15 bp, Homo sapiens
acatgccaaggagct

SEQ ID NO: 45180 - DNA, 15 bp, Homo sapiens
gacatgccaaggagc

SEQ ID NO: 45181 - DNA, 15 bp, Homo sapiens
tgacatgccaaggag

SEQ ID NO: 45182 - DNA, 15 bp, Homo sapiens
ttgacatgccaagga

SEQ ID NO: 45183 - DNA, 15 bp, Homo sapiens
tttgacatgccaagg

SEQ ID NO: 45184 - DNA, 15 bp, Homo sapiens
ttttgacatgccaag

SEQ ID NO: 45185 - DNA, 15 bp, Homo sapiens
tttttgacatgccaa

SEQ ID NO: 45186 - DNA, 15 bp, Homo sapiens
ttttttgacatgcca

SEQ ID NO: 45187 - DNA, 15 bp, Homo sapiens
cttttttgacatgcc

SEQ ID NO: 45188 - DNA, 15 bp, Homo sapiens
tcttttttgacatgc

SEQ ID NO: 45189 - DNA, 15 bp, Homo sapiens
ttcttttttgacatg

SEQ ID NO: 45190 - DNA, 15 bp, Homo sapiens
gttcttttttgacat

SEQ ID NO: 45191 - DNA, 15 bp, Homo sapiens
tgttcttttttgaca

SEQ ID NO: 45192 - DNA, 15 bp, Homo sapiens
ctgttcttttttgac

SEQ ID NO: 45193 - DNA, 15 bp, Homo sapiens
actgttcttttttga

SEQ ID NO: 45194 - DNA, 15 bp, Homo sapiens
cactgttcttttttg

SEQ ID NO: 45195 - DNA, 15 bp, Homo sapiens
ccactgttctttttt

SEQ ID NO: 45196 - DNA, 15 bp, Homo sapiens
tccactgttcttttt

SEQ ID NO: 45197 - DNA, 15 bp, Homo sapiens
gtccactgttctttt

SEQ ID NO: 45198 - DNA, 15 bp, Homo sapiens
agtccactgttcttt

SEQ ID NO: 45199 - DNA, 15 bp, Homo sapiens
tagtccactgttctt

SEQ ID NO: 45200 - DNA, 15 bp, Homo sapiens
gtagtccactgttct

SEQ ID NO: 45201 - DNA, 15 bp, Homo sapiens
ggtagtccactgttc

SEQ ID NO: 45202 - DNA, 15 bp, Homo sapiens
tggtagtccactgtt

SEQ ID NO: 45203 - DNA, 15 bp, Homo sapiens
ttggtagtccactgt

SEQ ID NO: 45204 - DNA, 15 bp, Homo sapiens
tttggtagtccactg

SEQ ID NO: 45205 - DNA, 15 bp, Homo sapiens
ctttggtagtccact

SEQ ID NO: 45206 - DNA, 15 bp, Homo sapiens
actttggtagtccac

SEQ ID NO: 45207 - DNA, 15 bp, Homo sapiens
aactttggtagtcca

SEQ ID NO: 45208 - DNA, 15 bp, Homo sapiens
gaactttggtagtcc

SEQ ID NO: 45209 - DNA, 15 bp, Homo sapiens
tgaactttggtagtc

SEQ ID NO: 45210 - DNA, 15 bp, Homo sapiens
ctgaactttggtagt

SEQ ID NO: 45211 - DNA, 15 bp, Homo sapiens
tctgaactttggtag

SEQ ID NO: 45212 - DNA, 15 bp, Homo sapiens
ctctgaactttggta

SEQ ID NO: 45213 - DNA, 15 bp, Homo sapiens
actctgaactttggt

SEQ ID NO: 45214 - DNA, 15 bp, Homo sapiens
cactctgaactttgg

SEQ ID NO: 45215 - DNA, 15 bp, Homo sapiens
tcactctgaactttg

SEQ ID NO: 45216 - DNA, 15 bp, Homo sapiens
atcactctgaacttt

SEQ ID NO: 45217 - DNA, 15 bp, Homo sapiens
catcactctgaactt

SEQ ID NO: 45218 - DNA, 15 bp, Homo sapiens
gcatcactctgaact

SEQ ID NO: 45219 - DNA, 15 bp, Homo sapiens
tgcatcactctgaac

SEQ ID NO: 45220 - DNA, 15 bp, Homo sapiens
gtgcatcactctgaa

SEQ ID NO: 45221 - DNA, 15 bp, Homo sapiens
agtgcatcactctga

SEQ ID NO: 45222 - DNA, 15 bp, Homo sapiens
aagtgcatcactctg

SEQ ID NO: 45223 - DNA, 15 bp, Homo sapiens
caagtgcatcactct

SEQ ID NO: 45224 - DNA, 15 bp, Homo sapiens
tcaagtgcatcactc

SEQ ID NO: 45225 - DNA, 15 bp, Homo sapiens
atcaagtgcatcact

SEQ ID NO: 45226 - DNA, 15 bp, Homo sapiens
catcaagtgcatcac

SEQ ID NO: 45227 - DNA, 15 bp, Homo sapiens
gcatcaagtgcatca

SEQ ID NO: 45228 - DNA, 15 bp, Homo sapiens
agcatcaagtgcatc

SEQ ID NO: 45229 - DNA, 15 bp, Homo sapiens
cagcatcaagtgcat

SEQ ID NO: 45230 - DNA, 15 bp, Homo sapiens
tcagcatcaagtgca

SEQ ID NO: 45231 - DNA, 15 bp, Homo sapiens
ctcagcatcaagtgc

SEQ ID NO: 45232 - DNA, 15 bp, Homo sapiens
tctcagcatcaagtg

SEQ ID NO: 45233 - DNA, 15 bp, Homo sapiens
ttctcagcatcaagt

SEQ ID NO: 45234 - DNA, 15 bp, Homo sapiens
tttctcagcatcaag

SEQ ID NO: 45235 - DNA, 15 bp, Homo sapiens
ctttctcagcatcaa

SEQ ID NO: 45236 - DNA, 15 bp, Homo sapiens
tctttctcagcatca

SEQ ID NO: 45237 - DNA, 15 bp, Homo sapiens
ttctttctcagcatc

SEQ ID NO: 45238 - DNA, 15 bp, Homo sapiens
tttctttctcagcat

SEQ ID NO: 45239 - DNA, 15 bp, Homo sapiens
ttttctttctcagca

SEQ ID NO: 45240 - DNA, 15 bp, Homo sapiens
gttttctttctcagc

SEQ ID NO: 45241 - DNA, 15 bp, Homo sapiens
tgttttctttctcag

SEQ ID NO: 45242 - DNA, 15 bp, Homo sapiens
ttgttttctttctca

SEQ ID NO: 45243 - DNA, 15 bp, Homo sapiens
tttgttttctttctc

SEQ ID NO: 45244 - DNA, 15 bp, Homo sapiens
gtttgttttctttct

SEQ ID NO: 45245 - DNA, 15 bp, Homo sapiens
tgtttgttttctttc

SEQ ID NO: 45246 - DNA, 15 bp, Homo sapiens
ttgtttgttttcttt

SEQ ID NO: 45247 - DNA, 15 bp, Homo sapiens
tttgtttgttttctt

SEQ ID NO: 45248 - DNA, 15 bp, Homo sapiens
ctttgtttgttttct

SEQ ID NO: 45249 - DNA, 15 bp, Homo sapiens
tctttgtttgttttc

SEQ ID NO: 45250 - DNA, 15 bp, Homo sapiens
ttctttgtttgtttt

SEQ ID NO: 45251 - DNA, 15 bp, Homo sapiens
tttctttgtttgttt

SEQ ID NO: 45252 - DNA, 15 bp, Homo sapiens
ttttctttgtttgtt

SEQ ID NO: 45253 - DNA, 15 bp, Homo sapiens
gttttctttgtttgt

SEQ ID NO: 45254 - DNA, 15 bp, Homo sapiens
tgttttctttgtttg

SEQ ID NO: 45255 - DNA, 15 bp, Homo sapiens
ttgttttctttgttt

SEQ ID NO: 45256 - DNA, 15 bp, Homo sapiens
tttgttttctttgtt

SEQ ID NO: 45257 - DNA, 15 bp, Homo sapiens
gtttgttttctttgt

SEQ ID NO: 45258 - DNA, 15 bp, Homo sapiens
tgtttgttttctttg

SEQ ID NO: 45259 - DNA, 15 bp, Homo sapiens
ttttgtttgttttct

SEQ ID NO: 45260 - DNA, 15 bp, Homo sapiens
cttttgtttgttttc

SEQ ID NO: 45261 - DNA, 15 bp, Homo sapiens
tcttttgtttgtttt

SEQ ID NO: 45262 - DNA, 15 bp, Homo sapiens
ttcttttgtttgttt

SEQ ID NO: 45263 - DNA, 15 bp, Homo sapiens
gttcttttgtttgtt

SEQ ID NO: 45264 - DNA, 15 bp, Homo sapiens
tgttcttttgtttgt

SEQ ID NO: 45265 - DNA, 15 bp, Homo sapiens
gtgttcttttgtttg

SEQ ID NO: 45266 - DNA, 15 bp, Homo sapiens
ggtgttcttttgttt

SEQ ID NO: 45267 - DNA, 15 bp, Homo sapiens
gggtgttcttttgtt

SEQ ID NO: 45268 - DNA, 15 bp, Homo sapiens
agggtgttcttttgt

SEQ ID NO: 45269 - DNA, 15 bp, Homo sapiens
cagggtgttcttttg

SEQ ID NO: 45270 - DNA, 15 bp, Homo sapiens
acagggtgttctttt

SEQ ID NO: 45271 - DNA, 15 bp, Homo sapiens
aacagggtgttcttt

SEQ ID NO: 45272 - DNA, 15 bp, Homo sapiens
gaacagggtgttctt

SEQ ID NO: 45273 - DNA, 15 bp, Homo sapiens
ggaacagggtgttct

SEQ ID NO: 45274 - DNA, 15 bp, Homo sapiens
tggaacagggtgttc

SEQ ID NO: 45275 - DNA, 15 bp, Homo sapiens
atggaacagggtgtt

SEQ ID NO: 45276 - DNA, 15 bp, Homo sapiens
aatggaacagggtgt

SEQ ID NO: 45277 - DNA, 15 bp, Homo sapiens
aaatggaacagggtg

SEQ ID NO: 45278 - DNA, 15 bp, Homo sapiens
gaaatggaacagggt

SEQ ID NO: 45279 - DNA, 15 bp, Homo sapiens
tgaaatggaacaggg

SEQ ID NO: 45280 - DNA, 15 bp, Homo sapiens
atgaaatggaacagg

SEQ ID NO: 45281 - DNA, 15 bp, Homo sapiens
tatgaaatggaacag

SEQ ID NO: 45282 - DNA, 15 bp, Homo sapiens
ctatgaaatggaaca

SEQ ID NO: 45283 - DNA, 15 bp, Homo sapiens
gctatgaaatggaac

SEQ ID NO: 45284 - DNA, 15 bp, Homo sapiens
agctatgaaatggaa

SEQ ID NO: 45285 - DNA, 15 bp, Homo sapiens
cagctatgaaatgga

SEQ ID NO: 45286 - DNA, 15 bp, Homo sapiens
ccagctatgaaatgg

SEQ ID NO: 45287 - DNA, 15 bp, Homo sapiens
gccagctatgaaatg

SEQ ID NO: 45288 - DNA, 15 bp, Homo sapiens
ggccagctatgaaat

SEQ ID NO: 45289 - DNA, 15 bp, Homo sapiens
aggccagctatgaaa

SEQ ID NO: 45290 - DNA, 15 bp, Homo sapiens
caggccagctatgaa

SEQ ID NO: 45291 - DNA, 15 bp, Homo sapiens
ccaggccagctatga

SEQ ID NO: 45292 - DNA, 15 bp, Homo sapiens
accaggccagctatg

SEQ ID NO: 45293 - DNA, 15 bp, Homo sapiens
taccaggccagctat

SEQ ID NO: 45294 - DNA, 15 bp, Homo sapiens
gtaccaggccagcta

SEQ ID NO: 45295 - DNA, 15 bp, Homo sapiens
agtaccaggccagct

SEQ ID NO: 45296 - DNA, 15 bp, Homo sapiens
gagtaccaggccagc

SEQ ID NO: 45297 - DNA, 15 bp, Homo sapiens
tgagtaccaggccag

SEQ ID NO: 45298 - DNA, 15 bp, Homo sapiens
gtgagtaccaggcca

SEQ ID NO: 45299 - DNA, 15 bp, Homo sapiens
tgtgagtaccaggcc

SEQ ID NO: 45300 - DNA, 15 bp, Homo sapiens
gtgtgagtaccaggc

SEQ ID NO: 45301 - DNA, 15 bp, Homo sapiens
ggtgtgagtaccagg

SEQ ID NO: 45302 - DNA, 15 bp, Homo sapiens
aggtgtgagtaccag

SEQ ID NO: 45303 - DNA, 15 bp, Homo sapiens
taggtgtgagtacca

SEQ ID NO: 45304 - DNA, 15 bp, Homo sapiens
ttaggtgtgagtacc

SEQ ID NO: 45305 - DNA, 15 bp, Homo sapiens
cttaggtgtgagtac

SEQ ID NO: 45306 - DNA, 15 bp, Homo sapiens
gcttaggtgtgagta

SEQ ID NO: 45307 - DNA, 15 bp, Homo sapiens
ggcttaggtgtgagt

SEQ ID NO: 45308 - DNA, 15 bp, Homo sapiens
tggcttaggtgtgag

SEQ ID NO: 45309 - DNA, 15 bp, Homo sapiens
atggcttaggtgtga

SEQ ID NO: 45310 - DNA, 15 bp, Homo sapiens
catggcttaggtgtg

SEQ ID NO: 45311 - DNA, 15 bp, Homo sapiens
acatggcttaggtgt

SEQ ID NO: 45312 - DNA, 15 bp, Homo sapiens
aacatggcttaggtg

SEQ ID NO: 45313 - DNA, 15 bp, Homo sapiens
taacatggcttaggt

SEQ ID NO: 45314 - DNA, 15 bp, Homo sapiens
ataacatggcttagg

SEQ ID NO: 45315 - DNA, 15 bp, Homo sapiens
aataacatggcttag

SEQ ID NO: 45316 - DNA, 15 bp, Homo sapiens
gaataacatggctta

SEQ ID NO: 45317 - DNA, 15 bp, Homo sapiens
agaataacatggctt

SEQ ID NO: 45318 - DNA, 15 bp, Homo sapiens
gagaataacatggct

SEQ ID NO: 45319 - DNA, 15 bp, Homo sapiens
agagaataacatggc

SEQ ID NO: 45320 - DNA, 15 bp, Homo sapiens
aagagaataacatgg

SEQ ID NO: 45321 - DNA, 15 bp, Homo sapiens
taagagaataacatg

SEQ ID NO: 45322 - DNA, 15 bp, Homo sapiens
ataagagaataacat

SEQ ID NO: 45323 - DNA, 15 bp, Homo sapiens
aataagagaataaca

SEQ ID NO: 45324 - DNA, 15 bp, Homo sapiens
taataagagaataac

SEQ ID NO: 45325 - DNA, 15 bp, Homo sapiens
ctaataagagaataa

SEQ ID NO: 45326 - DNA, 15 bp, Homo sapiens
tctaataagagaata

SEQ ID NO: 45327 - DNA, 15 bp, Homo sapiens
gtctaataagagaat

SEQ ID NO: 45328 - DNA, 15 bp, Homo sapiens
tgtctaataagagaa

SEQ ID NO: 45329 - DNA, 15 bp, Homo sapiens
atgtctaataagaga

SEQ ID NO: 45330 - DNA, 15 bp, Homo sapiens
tatgtctaataagag

SEQ ID NO: 45331 - DNA, 15 bp, Homo sapiens
ttatgtctaataaga

SEQ ID NO: 45332 - DNA, 15 bp, Homo sapiens
tttatgtctaataag

SEQ ID NO: 45333 - DNA, 15 bp, Homo sapiens
gtttatgtctaataa

SEQ ID NO: 45334 - DNA, 15 bp, Homo sapiens
tgtttatgtctaata

SEQ ID NO: 45335 - DNA, 15 bp, Homo sapiens
ttgtttatgtctaat

SEQ ID NO: 45336 - DNA, 15 bp, Homo sapiens
attgtttatgtctaa

SEQ ID NO: 45337 - DNA, 15 bp, Homo sapiens
gattgtttatgtcta

SEQ ID NO: 45338 - DNA, 15 bp, Homo sapiens
agattgtttatgtct

SEQ ID NO: 45339 - DNA, 15 bp, Homo sapiens
gagattgtttatgtc

SEQ ID NO: 45340 - DNA, 15 bp, Homo sapiens
tgagattgtttatgt

SEQ ID NO: 45341 - DNA, 15 bp, Homo sapiens
gtgagattgtttatg

SEQ ID NO: 45342 - DNA, 15 bp, Homo sapiens
tgtgagattgtttat

SEQ ID NO: 45343 - DNA, 15 bp, Homo sapiens
ctgtgagattgttta

SEQ ID NO: 45344 - DNA, 15 bp, Homo sapiens
tctgtgagattgttt

SEQ ID NO: 45345 - DNA, 15 bp, Homo sapiens
ctctgtgagattgtt

SEQ ID NO: 45346 - DNA, 15 bp, Homo sapiens
actctgtgagattgt

SEQ ID NO: 45347 - DNA, 15 bp, Homo sapiens
tactctgtgagattg

SEQ ID NO: 45348 - DNA, 15 bp, Homo sapiens
gtactctgtgagatt

SEQ ID NO: 45349 - DNA, 15 bp, Homo sapiens
ggtactctgtgagat

SEQ ID NO: 45350 - DNA, 15 bp, Homo sapiens
tggtactctgtgaga

SEQ ID NO: 45351 - DNA, 15 bp, Homo sapiens
ttggtactctgtgag

SEQ ID NO: 45352 - DNA, 15 bp, Homo sapiens
gttggtactctgtga

SEQ ID NO: 45353 - DNA, 15 bp, Homo sapiens
ggttggtactctgtg

SEQ ID NO: 45354 - DNA, 15 bp, Homo sapiens
aggttggtactctgt

SEQ ID NO: 45355 - DNA, 15 bp, Homo sapiens
gaggttggtactctg

SEQ ID NO: 45356 - DNA, 15 bp, Homo sapiens
tgaggttggtactct

SEQ ID NO: 45357 - DNA, 15 bp, Homo sapiens
ttgaggttggtactc

SEQ ID NO: 45358 - DNA, 15 bp, Homo sapiens
tttgaggttggtact

SEQ ID NO: 45359 - DNA, 15 bp, Homo sapiens
ctttgaggttggtac

SEQ ID NO: 45360 - DNA, 15 bp, Homo sapiens
actttgaggttggta

SEQ ID NO: 45361 - DNA, 15 bp, Homo sapiens
aactttgaggttggt

SEQ ID NO: 45362 - DNA, 15 bp, Homo sapiens
taactttgaggttgg

SEQ ID NO: 45363 - DNA, 15 bp, Homo sapiens
gtaactttgaggttg

SEQ ID NO: 45364 - DNA, 15 bp, Homo sapiens
agtaactttgaggtt

SEQ ID NO: 45365 - DNA, 15 bp, Homo sapiens
aagtaactttgaggt

SEQ ID NO: 45366 - DNA, 15 bp, Homo sapiens
aaagtaactttgagg

SEQ ID NO: 45367 - DNA, 15 bp, Homo sapiens
caaagtaactttgag

SEQ ID NO: 45368 - DNA, 15 bp, Homo sapiens
tcaaagtaactttga

SEQ ID NO: 45369 - DNA, 15 bp, Homo sapiens
ctcaaagtaactttg

SEQ ID NO: 45370 - DNA, 15 bp, Homo sapiens
actcaaagtaacttt

SEQ ID NO: 45371 - DNA, 15 bp, Homo sapiens
gactcaaagtaactt

SEQ ID NO: 45372 - DNA, 15 bp, Homo sapiens
tgactcaaagtaact

SEQ ID NO: 45373 - DNA, 15 bp, Homo sapiens
ttgactcaaagtaac

SEQ ID NO: 45374 - DNA, 15 bp, Homo sapiens
attgactcaaagtaa

SEQ ID NO: 45375 - DNA, 15 bp, Homo sapiens
cattgactcaaagta

SEQ ID NO: 45376 - DNA, 15 bp, Homo sapiens
gcattgactcaaagt

SEQ ID NO: 45377 - DNA, 15 bp, Homo sapiens
tgcattgactcaaag

SEQ ID NO: 45378 - DNA, 15 bp, Homo sapiens
ttgcattgactcaaa

SEQ ID NO: 45379 - DNA, 15 bp, Homo sapiens
cttgcattgactcaa

SEQ ID NO: 45380 - DNA, 15 bp, Homo sapiens
ccttgcattgactca

SEQ ID NO: 45381 - DNA, 15 bp, Homo sapiens
accttgcattgactc

SEQ ID NO: 45382 - DNA, 15 bp, Homo sapiens
gaccttgcattgact

SEQ ID NO: 45383 - DNA, 15 bp, Homo sapiens
tgaccttgcattgac

SEQ ID NO: 45384 - DNA, 15 bp, Homo sapiens
ttgaccttgcattga

SEQ ID NO: 45385 - DNA, 15 bp, Homo sapiens
attgaccttgcattg

SEQ ID NO: 45386 - DNA, 15 bp, Homo sapiens
aattgaccttgcatt

SEQ ID NO: 45387 - DNA, 15 bp, Homo sapiens
aaattgaccttgcat

SEQ ID NO: 45388 - DNA, 15 bp, Homo sapiens
taaattgaccttgca

SEQ ID NO: 45389 - DNA, 15 bp, Homo sapiens
ataaattgaccttgc

SEQ ID NO: 45390 - DNA, 15 bp, Homo sapiens
tataaattgaccttg

SEQ ID NO: 45391 - DNA, 15 bp, Homo sapiens
gtataaattgacctt

SEQ ID NO: 45392 - DNA, 15 bp, Homo sapiens
agtataaattgacct

SEQ ID NO: 45393 - DNA, 15 bp, Homo sapiens
aagtataaattgacc

SEQ ID NO: 45394 - DNA, 15 bp, Homo sapiens
aaagtataaattgac

SEQ ID NO: 45395 - DNA, 15 bp, Homo sapiens
caaagtataaattga

SEQ ID NO: 45396 - DNA, 15 bp, Homo sapiens
acaaagtataaattg

SEQ ID NO: 45397 - DNA, 15 bp, Homo sapiens
aacaaagtataaatt

SEQ ID NO: 45398 - DNA, 15 bp, Homo sapiens
gaacaaagtataaat

SEQ ID NO: 45399 - DNA, 15 bp, Homo sapiens
agaacaaagtataaa

SEQ ID NO: 45400 - DNA, 15 bp, Homo sapiens
gagaacaaagtataa

SEQ ID NO: 45401 - DNA, 15 bp, Homo sapiens
tgagaacaaagtata

SEQ ID NO: 45402 - DNA, 15 bp, Homo sapiens
ctgagaacaaagtat

SEQ ID NO: 45403 - DNA, 15 bp, Homo sapiens
gctgagaacaaagta

SEQ ID NO: 45404 - DNA, 15 bp, Homo sapiens
tgctgagaacaaagt

SEQ ID NO: 45405 - DNA, 15 bp, Homo sapiens
ttgctgagaacaaag

SEQ ID NO: 45406 - DNA, 15 bp, Homo sapiens
tttgctgagaacaaa

SEQ ID NO: 45407 - DNA, 15 bp, Homo sapiens
ctttgctgagaacaa

SEQ ID NO: 45408 - DNA, 15 bp, Homo sapiens
cctttgctgagaaca

SEQ ID NO: 45409 - DNA, 15 bp, Homo sapiens
gcctttgctgagaac

SEQ ID NO: 45410 - DNA, 15 bp, Homo sapiens
tgcctttgctgagaa

SEQ ID NO: 45411 - DNA, 15 bp, Homo sapiens
ttgcctttgctgaga

SEQ ID NO: 45412 - DNA, 15 bp, Homo sapiens
tttgcctttgctgag

SEQ ID NO: 45413 - DNA, 15 bp, Homo sapiens
ttttgcctttgctga

SEQ ID NO: 45414 - DNA, 15 bp, Homo sapiens
attttgcctttgctg

SEQ ID NO: 45415 - DNA, 15 bp, Homo sapiens
gattttgcctttgct

SEQ ID NO: 45416 - DNA, 15 bp, Homo sapiens
tgattttgcctttgc

SEQ ID NO: 45417 - DNA, 15 bp, Homo sapiens
ttgattttgcctttg

SEQ ID NO: 45418 - DNA, 15 bp, Homo sapiens
cttgattttgccttt

SEQ ID NO: 45419 - DNA, 15 bp, Homo sapiens
ccttgattttgcctt

SEQ ID NO: 45420 - DNA, 15 bp, Homo sapiens
accttgattttgcct

SEQ ID NO: 45421 - DNA, 15 bp, Homo sapiens
gaccttgattttgcc

SEQ ID NO: 45422 - DNA, 15 bp, Homo sapiens
tgaccttgattttgc

SEQ ID NO: 45423 - DNA, 15 bp, Homo sapiens
gtgaccttgattttg

SEQ ID NO: 45424 - DNA, 15 bp, Homo sapiens
agtgaccttgatttt

SEQ ID NO: 45425 - DNA, 15 bp, Homo sapiens
cagtgaccttgattt

SEQ ID NO: 45426 - DNA, 15 bp, Homo sapiens
acagtgaccttgatt

SEQ ID NO: 45427 - DNA, 15 bp, Homo sapiens
cacagtgaccttgat

SEQ ID NO: 45428 - DNA, 15 bp, Homo sapiens
gcacagtgaccttga

SEQ ID NO: 45429 - DNA, 15 bp, Homo sapiens
tgcacagtgaccttg

SEQ ID NO: 45430 - DNA, 15 bp, Homo sapiens
ttgcacagtgacctt

SEQ ID NO: 45431 - DNA, 15 bp, Homo sapiens
gttgcacagtgacct

SEQ ID NO: 45432 - DNA, 15 bp, Homo sapiens
ggttgcacagtgacc

SEQ ID NO: 45433 - DNA, 15 bp, Homo sapiens
gggttgcacagtgac

SEQ ID NO: 45434 - DNA, 15 bp, Homo sapiens
tgggttgcacagtga

SEQ ID NO: 45435 - DNA, 15 bp, Homo sapiens
gtgggttgcacagtg

SEQ ID NO: 45436 - DNA, 15 bp, Homo sapiens
tgtgggttgcacagt

SEQ ID NO: 45437 - DNA, 15 bp, Homo sapiens
ttgtgggttgcacag

SEQ ID NO: 45438 - DNA, 15 bp, Homo sapiens
tttgtgggttgcaca

SEQ ID NO: 45439 - DNA, 15 bp, Homo sapiens
ttttgtgggttgcac

SEQ ID NO: 45440 - DNA, 15 bp, Homo sapiens
attttgtgggttgca

SEQ ID NO: 45441 - DNA, 15 bp, Homo sapiens
tattttgtgggttgc

SEQ ID NO: 45442 - DNA, 15 bp, Homo sapiens
gtattttgtgggttg

SEQ ID NO: 45443 - DNA, 15 bp, Homo sapiens
ggtattttgtgggtt

SEQ ID NO: 45444 - DNA, 15 bp, Homo sapiens
tggtattttgtgggt

SEQ ID NO: 45445 - DNA, 15 bp, Homo sapiens
ttggtattttgtggg

SEQ ID NO: 45446 - DNA, 15 bp, Homo sapiens
tttggtattttgtgg

SEQ ID NO: 45447 - DNA, 15 bp, Homo sapiens
gtttggtattttgtg

SEQ ID NO: 45448 - DNA, 15 bp, Homo sapiens
tgtttggtattttgt

SEQ ID NO: 45449 - DNA, 15 bp, Homo sapiens
gtgtttggtattttg

SEQ ID NO: 45450 - DNA, 15 bp, Homo sapiens
ggtgtttggtatttt

SEQ ID NO: 45451 - DNA, 15 bp, Homo sapiens
aggtgtttggtattt

SEQ ID NO: 45452 - DNA, 15 bp, Homo sapiens
aaggtgtttggtatt

SEQ ID NO: 45453 - DNA, 15 bp, Homo sapiens
caaggtgtttggtat

SEQ ID NO: 45454 - DNA, 15 bp, Homo sapiens
gcaaggtgtttggta

SEQ ID NO: 45455 - DNA, 15 bp, Homo sapiens
agcaaggtgtttggt

SEQ ID NO: 45456 - DNA, 15 bp, Homo sapiens
tagcaaggtgtttgg

SEQ ID NO: 45457 - DNA, 15 bp, Homo sapiens
ttagcaaggtgtttg

SEQ ID NO: 45458 - DNA, 15 bp, Homo sapiens
tttagcaaggtgttt

SEQ ID NO: 45459 - DNA, 15 bp, Homo sapiens
atttagcaaggtgtt

SEQ ID NO: 45460 - DNA, 15 bp, Homo sapiens
catttagcaaggtgt

SEQ ID NO: 45461 - DNA, 15 bp, Homo sapiens
tcatttagcaaggtg

SEQ ID NO: 45462 - DNA, 15 bp, Homo sapiens
ttcatttagcaaggt

SEQ ID NO: 45463 - DNA, 15 bp, Homo sapiens
attcatttagcaagg

SEQ ID NO: 45464 - DNA, 15 bp, Homo sapiens
cattcatttagcaag

SEQ ID NO: 45465 - DNA, 15 bp, Homo sapiens
ccattcatttagcaa

SEQ ID NO: 45466 - DNA, 15 bp, Homo sapiens
gccattcatttagca

SEQ ID NO: 45467 - DNA, 15 bp, Homo sapiens
agccattcatttagc

SEQ ID NO: 45468 - DNA, 15 bp, Homo sapiens
cagccattcatttag

SEQ ID NO: 45469 - DNA, 15 bp, Homo sapiens
acagccattcattta

SEQ ID NO: 45470 - DNA, 15 bp, Homo sapiens
aacagccattcattt

SEQ ID NO: 45471 - DNA, 15 bp, Homo sapiens
taacagccattcatt

SEQ ID NO: 45472 - DNA, 15 bp, Homo sapiens
ataacagccattcat

SEQ ID NO: 45473 - DNA, 15 bp, Homo sapiens
aataacagccattca

SEQ ID NO: 45474 - DNA, 15 bp, Homo sapiens
aaataacagccattc

SEQ ID NO: 45475 - DNA, 15 bp, Homo sapiens
gaaataacagccatt

SEQ ID NO: 45476 - DNA, 15 bp, Homo sapiens
agaaataacagccat

SEQ ID NO: 45477 - DNA, 15 bp, Homo sapiens
aagaaataacagcca

SEQ ID NO: 45478 - DNA, 15 bp, Homo sapiens
aaagaaataacagcc

SEQ ID NO: 45479 - DNA, 15 bp, Homo sapiens
taaagaaataacagc

SEQ ID NO: 45480 - DNA, 15 bp, Homo sapiens
ataaagaaataacag

SEQ ID NO: 45481 - DNA, 15 bp, Homo sapiens
gataaagaaataaca

SEQ ID NO: 45482 - DNA, 15 bp, Homo sapiens
agataaagaaataac

SEQ ID NO: 45483 - DNA, 15 bp, Homo sapiens
tagataaagaaataa

SEQ ID NO: 45484 - DNA, 15 bp, Homo sapiens
ctagataaagaaata

SEQ ID NO: 45485 - DNA, 15 bp, Homo sapiens
actagataaagaaat

SEQ ID NO: 45486 - DNA, 15 bp, Homo sapiens
gactagataaagaaa

SEQ ID NO: 45487 - DNA, 15 bp, Homo sapiens
tgactagataaagaa

SEQ ID NO: 45488 - DNA, 15 bp, Homo sapiens
atgactagataaaga

SEQ ID NO: 45489 - DNA, 15 bp, Homo sapiens
tatgactagataaag

SEQ ID NO: 45490 - DNA, 15 bp, Homo sapiens
ttatgactagataaa

SEQ ID NO: 45491 - DNA, 15 bp, Homo sapiens
gttatgactagataa

SEQ ID NO: 45492 - DNA, 15 bp, Homo sapiens
tgttatgactagata

SEQ ID NO: 45493 - DNA, 15 bp, Homo sapiens
atgttatgactagat

SEQ ID NO: 45494 - DNA, 15 bp, Homo sapiens
tatgttatgactaga

SEQ ID NO: 45495 - DNA, 15 bp, Homo sapiens
ctatgttatgactag

SEQ ID NO: 45496 - DNA, 15 bp, Homo sapiens
actatgttatgacta

SEQ ID NO: 45497 - DNA, 15 bp, Homo sapiens
gactatgttatgact

SEQ ID NO: 45498 - DNA, 15 bp, Homo sapiens
ggactatgttatgac

SEQ ID NO: 45499 - DNA, 15 bp, Homo sapiens
gggactatgttatga

SEQ ID NO: 45500 - DNA, 15 bp, Homo sapiens
tgggactatgttatg

SEQ ID NO: 45501 - DNA, 15 bp, Homo sapiens
ctgggactatgttat

SEQ ID NO: 45502 - DNA, 15 bp, Homo sapiens
gctgggactatgtta

SEQ ID NO: 45503 - DNA, 15 bp, Homo sapiens
agctgggactatgtt

SEQ ID NO: 45504 - DNA, 15 bp, Homo sapiens
aagctgggactatgt

SEQ ID NO: 45505 - DNA, 15 bp, Homo sapiens
aaagctgggactatg

SEQ ID NO: 45506 - DNA, 15 bp, Homo sapiens
aaaagctgggactat

SEQ ID NO: 45507 - DNA, 15 bp, Homo sapiens
aaaaagctgggacta

SEQ ID NO: 45508 - DNA, 15 bp, Homo sapiens
taaaaagctgggact

SEQ ID NO: 45509 - DNA, 15 bp, Homo sapiens
ttaaaaagctgggac

SEQ ID NO: 45510 - DNA, 15 bp, Homo sapiens
gttaaaaagctggga

SEQ ID NO: 45511 - DNA, 15 bp, Homo sapiens
tgttaaaaagctggg

SEQ ID NO: 45512 - DNA, 15 bp, Homo sapiens
ctgttaaaaagctgg

SEQ ID NO: 45513 - DNA, 15 bp, Homo sapiens
gctgttaaaaagctg

SEQ ID NO: 45514 - DNA, 15 bp, Homo sapiens
tgctgttaaaaagct

SEQ ID NO: 45515 - DNA, 15 bp, Homo sapiens
atgctgttaaaaagc

SEQ ID NO: 45516 - DNA, 15 bp, Homo sapiens
gatgctgttaaaaag

SEQ ID NO: 45517 - DNA, 15 bp, Homo sapiens
ggatgctgttaaaaa

SEQ ID NO: 45518 - DNA, 15 bp, Homo sapiens
tggatgctgttaaaa

SEQ ID NO: 45519 - DNA, 15 bp, Homo sapiens
ttggatgctgttaaa

SEQ ID NO: 45520 - DNA, 15 bp, Homo sapiens
ttggtgtgttcttac

SEQ ID NO: 45521 - DNA, 15 bp, Homo sapiens
cttggtgtgttctta

SEQ ID NO: 45522 - DNA, 15 bp, Homo sapiens
acttggtgtgttctt

SEQ ID NO: 45523 - DNA, 15 bp, Homo sapiens
cacttggtgtgttct

SEQ ID NO: 45524 - DNA, 15 bp, Homo sapiens
acacttggtgtgttc

SEQ ID NO: 45525 - DNA, 15 bp, Homo sapiens
cacacttggtgtgtt

SEQ ID NO: 45526 - DNA, 15 bp, Homo sapiens
acacacttggtgtgt

SEQ ID NO: 45527 - DNA, 15 bp, Homo sapiens
cacacacttggtgtg

SEQ ID NO: 45528 - DNA, 15 bp, Homo sapiens
acacacacttggtgt

SEQ ID NO: 45529 - DNA, 15 bp, Homo sapiens
tacacacacttggtg

SEQ ID NO: 45530 - DNA, 15 bp, Homo sapiens
ttacacacacttggt

SEQ ID NO: 45531 - DNA, 15 bp, Homo sapiens
tttacacacacttgg

SEQ ID NO: 45532 - DNA, 15 bp, Homo sapiens
atttacacacacttg

SEQ ID NO: 45533 - DNA, 15 bp, Homo sapiens
catttacacacactt

SEQ ID NO: 45534 - DNA, 15 bp, Homo sapiens
tcatttacacacact

SEQ ID NO: 45535 - DNA, 15 bp, Homo sapiens
ttcatttacacacac

SEQ ID NO: 45536 - DNA, 15 bp, Homo sapiens
tttcatttacacaca

SEQ ID NO: 45537 - DNA, 15 bp, Homo sapiens
ctttcatttacacac

SEQ ID NO: 45538 - DNA, 15 bp, Homo sapiens
gctttcatttacaca

SEQ ID NO: 45539 - DNA, 15 bp, Homo sapiens
tgctttcatttacac

SEQ ID NO: 45540 - DNA, 15 bp, Homo sapiens
atgctttcatttaca

SEQ ID NO: 45541 - DNA, 15 bp, Homo sapiens
gatgctttcatttac

SEQ ID NO: 45542 - DNA, 15 bp, Homo sapiens
agatgctttcattta

SEQ ID NO: 45543 - DNA, 15 bp, Homo sapiens
gagatgctttcattt

SEQ ID NO: 45544 - DNA, 15 bp, Homo sapiens
agagatgctttcatt

SEQ ID NO: 45545 - DNA, 15 bp, Homo sapiens
gagagatgctttcat

SEQ ID NO: 45546 - DNA, 15 bp, Homo sapiens
tgagagatgctttca

SEQ ID NO: 45547 - DNA, 15 bp, Homo sapiens
gtgagagatgctttc

SEQ ID NO: 45548 - DNA, 15 bp, Homo sapiens
ggtgagagatgcttt

SEQ ID NO: 45549 - DNA, 15 bp, Homo sapiens
tggtgagagatgctt

SEQ ID NO: 45550 - DNA, 15 bp, Homo sapiens
ttggtgagagatgct

SEQ ID NO: 45551 - DNA, 15 bp, Homo sapiens
gttggtgagagatgc

SEQ ID NO: 45552 - DNA, 15 bp, Homo sapiens
tgttggtgagagatg

SEQ ID NO: 45553 - DNA, 15 bp, Homo sapiens
gtgttggtgagagat

SEQ ID NO: 45554 - DNA, 15 bp, Homo sapiens
ggtgttggtgagaga

SEQ ID NO: 45555 - DNA, 15 bp, Homo sapiens
aggtgttggtgagag

SEQ ID NO: 45556 - DNA, 15 bp, Homo sapiens
aaggtgttggtgaga

SEQ ID NO: 45557 - DNA, 15 bp, Homo sapiens
aaaggtgttggtgag

SEQ ID NO: 45558 - DNA, 15 bp, Homo sapiens
gaaaggtgttggtga

SEQ ID NO: 45559 - DNA, 15 bp, Homo sapiens
ggaaaggtgttggtg

SEQ ID NO: 45560 - DNA, 15 bp, Homo sapiens
aggaaaggtgttggt

SEQ ID NO: 45561 - DNA, 15 bp, Homo sapiens
taggaaaggtgttgg

SEQ ID NO: 45562 - DNA, 15 bp, Homo sapiens
ctaggaaaggtgttg

SEQ ID NO: 45563 - DNA, 15 bp, Homo sapiens
tctaggaaaggtgtt

SEQ ID NO: 45564 - DNA, 15 bp, Homo sapiens
atctaggaaaggtgt

SEQ ID NO: 45565 - DNA, 15 bp, Homo sapiens
tatctaggaaaggtg

SEQ ID NO: 45566 - DNA, 15 bp, Homo sapiens
ctatctaggaaaggt

SEQ ID NO: 45567 - DNA, 15 bp, Homo sapiens
tctatctaggaaagg

SEQ ID NO: 45568 - DNA, 15 bp, Homo sapiens
ctctatctaggaaag

SEQ ID NO: 45569 - DNA, 15 bp, Homo sapiens
actctatctaggaaa

SEQ ID NO: 45570 - DNA, 15 bp, Homo sapiens
tactctatctaggaa

SEQ ID NO: 45571 - DNA, 15 bp, Homo sapiens
ctactctatctagga

SEQ ID NO: 45572 - DNA, 15 bp, Homo sapiens
cctactctatctagg

SEQ ID NO: 45573 - DNA, 15 bp, Homo sapiens
ccctactctatctag

SEQ ID NO: 45574 - DNA, 15 bp, Homo sapiens
accctactctatcta

SEQ ID NO: 45575 - DNA, 15 bp, Homo sapiens
aaccctactctatct

SEQ ID NO: 45576 - DNA, 15 bp, Homo sapiens
caaccctactctatc

SEQ ID NO: 45577 - DNA, 15 bp, Homo sapiens
acaaccctactctat

SEQ ID NO: 45578 - DNA, 15 bp, Homo sapiens
aacaaccctactcta

SEQ ID NO: 45579 - DNA, 15 bp, Homo sapiens
gaacaaccctactct

SEQ ID NO: 45580 - DNA, 15 bp, Homo sapiens
ggaacaaccctactc

SEQ ID NO: 45581 - DNA, 15 bp, Homo sapiens
tggaacaaccctact

SEQ ID NO: 45582 - DNA, 15 bp, Homo sapiens
ctggaacaaccctac

SEQ ID NO: 45583 - DNA, 15 bp, Homo sapiens
actggaacaacccta

SEQ ID NO: 45584 - DNA, 15 bp, Homo sapiens
cactggaacaaccct

SEQ ID NO: 45585 - DNA, 15 bp, Homo sapiens
ccactggaacaaccc

SEQ ID NO: 45586 - DNA, 15 bp, Homo sapiens
accactggaacaacc

SEQ ID NO: 45587 - DNA, 15 bp, Homo sapiens
caccactggaacaac

SEQ ID NO: 45588 - DNA, 15 bp, Homo sapiens
ccaccactggaacaa

SEQ ID NO: 45589 - DNA, 15 bp, Homo sapiens
gccaccactggaaca

SEQ ID NO: 45590 - DNA, 15 bp, Homo sapiens
agccaccactggaac

SEQ ID NO: 45591 - DNA, 15 bp, Homo sapiens
cagccaccactggaa

SEQ ID NO: 45592 - DNA, 15 bp, Homo sapiens
acagccaccactgga

SEQ ID NO: 45593 - DNA, 15 bp, Homo sapiens
aacagccaccactgg

SEQ ID NO: 45594 - DNA, 15 bp, Homo sapiens
taacagccaccactg

SEQ ID NO: 45595 - DNA, 15 bp, Homo sapiens
ataacagccaccact

SEQ ID NO: 45596 - DNA, 15 bp, Homo sapiens
cataacagccaccac

SEQ ID NO: 45597 - DNA, 15 bp, Homo sapiens
tcataacagccacca

SEQ ID NO: 45598 - DNA, 15 bp, Homo sapiens
gtcataacagccacc

SEQ ID NO: 45599 - DNA, 15 bp, Homo sapiens
agtcataacagccac

SEQ ID NO: 45600 - DNA, 15 bp, Homo sapiens
tagtcataacagcca

SEQ ID NO: 45601 - DNA, 15 bp, Homo sapiens
gtagtcataacagcc

SEQ ID NO: 45602 - DNA, 15 bp, Homo sapiens
ggtagtcataacagc

SEQ ID NO: 45603 - DNA, 15 bp, Homo sapiens
aggtagtcataacag

SEQ ID NO: 45604 - DNA, 15 bp, Homo sapiens
aaggtagtcataaca

SEQ ID NO: 45605 - DNA, 15 bp, Homo sapiens
aaaggtagtcataac

SEQ ID NO: 45606 - DNA, 15 bp, Homo sapiens
taaaggtagtcataa

SEQ ID NO: 45607 - DNA, 15 bp, Homo sapiens
ctaaaggtagtcata

SEQ ID NO: 45608 - DNA, 15 bp, Homo sapiens
actaaaggtagtcat

SEQ ID NO: 45609 - DNA, 15 bp, Homo sapiens
gactaaaggtagtca

SEQ ID NO: 45610 - DNA, 15 bp, Homo sapiens
ggactaaaggtagtc

SEQ ID NO: 45611 - DNA, 15 bp, Homo sapiens
aggactaaaggtagt

SEQ ID NO: 45612 - DNA, 15 bp, Homo sapiens
caggactaaaggtag

SEQ ID NO: 45613 - DNA, 15 bp, Homo sapiens
acaggactaaaggta

SEQ ID NO: 45614 - DNA, 15 bp, Homo sapiens
tacaggactaaaggt

SEQ ID NO: 45615 - DNA, 15 bp, Homo sapiens
atacaggactaaagg

SEQ ID NO: 45616 - DNA, 15 bp, Homo sapiens
aatacaggactaaag

SEQ ID NO: 45617 - DNA, 15 bp, Homo sapiens
caatacaggactaaa

SEQ ID NO: 45618 - DNA, 15 bp, Homo sapiens
acaatacaggactaa

SEQ ID NO: 45619 - DNA, 15 bp, Homo sapiens
aacaatacaggacta

SEQ ID NO: 45620 - DNA, 15 bp, Homo sapiens
taacaatacaggact

SEQ ID NO: 45621 - DNA, 15 bp, Homo sapiens
ataacaatacaggac

SEQ ID NO: 45622 - DNA, 15 bp, Homo sapiens
aataacaatacagga

SEQ ID NO: 45623 - DNA, 15 bp, Homo sapiens
taataacaatacagg

SEQ ID NO: 45624 - DNA, 15 bp, Homo sapiens
ataataacaatacag

SEQ ID NO: 45625 - DNA, 15 bp, Homo sapiens
aataataacaataca

SEQ ID NO: 45626 - DNA, 15 bp, Homo sapiens
taataataacaatac

SEQ ID NO: 45627 - DNA, 15 bp, Homo sapiens
ttaataataacaata

SEQ ID NO: 45628 - DNA, 15 bp, Homo sapiens
attaataataacaat

SEQ ID NO: 45629 - DNA, 15 bp, Homo sapiens
gattaataataacaa

SEQ ID NO: 45630 - DNA, 15 bp, Homo sapiens
tgattaataataaca

SEQ ID NO: 45631 - DNA, 15 bp, Homo sapiens
atgattaataataac

SEQ ID NO: 45632 - DNA, 15 bp, Homo sapiens
tatgattaataataa

SEQ ID NO: 45633 - DNA, 15 bp, Homo sapiens
ttatgattaataata

SEQ ID NO: 45634 - DNA, 15 bp, Homo sapiens
attatgattaataat

SEQ ID NO: 45635 - DNA, 15 bp, Homo sapiens
aattatgattaataa

SEQ ID NO: 45636 - DNA, 15 bp, Homo sapiens
caattatgattaata

SEQ ID NO: 45637 - DNA, 15 bp, Homo sapiens
tcaattatgattaat

SEQ ID NO: 45638 - DNA, 15 bp, Homo sapiens
ctcaattatgattaa

SEQ ID NO: 45639 - DNA, 15 bp, Homo sapiens
actcaattatgatta

SEQ ID NO: 45640 - DNA, 15 bp, Homo sapiens
cactcaattatgatt

SEQ ID NO: 45641 - DNA, 15 bp, Homo sapiens
tcactcaattatgat

SEQ ID NO: 45642 - DNA, 15 bp, Homo sapiens
ctcactcaattatga

SEQ ID NO: 45643 - DNA, 15 bp, Homo sapiens
gctcactcaattatg

SEQ ID NO: 45644 - DNA, 15 bp, Homo sapiens
cgctcactcaattat

SEQ ID NO: 45645 - DNA, 15 bp, Homo sapiens
gcgctcactcaatta

SEQ ID NO: 45646 - DNA, 15 bp, Homo sapiens
agcgctcactcaatt

SEQ ID NO: 45647 - DNA, 15 bp, Homo sapiens
gagcgctcactcaat

SEQ ID NO: 45648 - DNA, 15 bp, Homo sapiens
ggagcgctcactcaa

SEQ ID NO: 45649 - DNA, 15 bp, Homo sapiens
aggagcgctcactca

SEQ ID NO: 45650 - DNA, 15 bp, Homo sapiens
gaggagcgctcactc

SEQ ID NO: 45651 - DNA, 15 bp, Homo sapiens
ggaggagcgctcact

SEQ ID NO: 45652 - DNA, 15 bp, Homo sapiens
aggaggagcgctcac

SEQ ID NO: 45653 - DNA, 15 bp, Homo sapiens
aaggaggagcgctca

SEQ ID NO: 45654 - DNA, 15 bp, Homo sapiens
taaggaggagcgctc

SEQ ID NO: 45655 - DNA, 15 bp, Homo sapiens
ctaaggaggagcgct

SEQ ID NO: 45656 - DNA, 15 bp, Homo sapiens
cctaaggaggagcgc

SEQ ID NO: 45657 - DNA, 15 bp, Homo sapiens
tcctaaggaggagcg

SEQ ID NO: 45658 - DNA, 15 bp, Homo sapiens
ttcctaaggaggagc

SEQ ID NO: 45659 - DNA, 15 bp, Homo sapiens
cttcctaaggaggag

SEQ ID NO: 45660 - DNA, 15 bp, Homo sapiens
tcttcctaaggagga

SEQ ID NO: 45661 - DNA, 15 bp, Homo sapiens
ttcttcctaaggagg

SEQ ID NO: 45662 - DNA, 15 bp, Homo sapiens
gttcttcctaaggag

SEQ ID NO: 45663 - DNA, 15 bp, Homo sapiens
agttcttcctaagga

SEQ ID NO: 45664 - DNA, 15 bp, Homo sapiens
cagttcttcctaagg

SEQ ID NO: 45665 - DNA, 15 bp, Homo sapiens
acagttcttcctaag

SEQ ID NO: 45666 - DNA, 15 bp, Homo sapiens
cacagttcttcctaa

SEQ ID NO: 45667 - DNA, 15 bp, Homo sapiens
gcacagttcttccta

SEQ ID NO: 45668 - DNA, 15 bp, Homo sapiens
ggcacagttcttcct

SEQ ID NO: 45669 - DNA, 15 bp, Homo sapiens
gggcacagttcttcc

SEQ ID NO: 45670 - DNA, 15 bp, Homo sapiens
tgggcacagttcttc

SEQ ID NO: 45671 - DNA, 15 bp, Homo sapiens
ctgggcacagttctt

SEQ ID NO: 45672 - DNA, 15 bp, Homo sapiens
tctgggcacagttct

SEQ ID NO: 45673 - DNA, 15 bp, Homo sapiens
gtctgggcacagttc

SEQ ID NO: 45674 - DNA, 15 bp, Homo sapiens
agtctgggcacagtt

SEQ ID NO: 45675 - DNA, 15 bp, Homo sapiens
gagtctgggcacagt

SEQ ID NO: 45676 - DNA, 15 bp, Homo sapiens
agagtctgggcacag

SEQ ID NO: 45677 - DNA, 15 bp, Homo sapiens
cagagtctgggcaca

SEQ ID NO: 45678 - DNA, 15 bp, Homo sapiens
gcagagtctgggcac

SEQ ID NO: 45679 - DNA, 15 bp, Homo sapiens
tgcagagtctgggca

SEQ ID NO: 45680 - DNA, 15 bp, Homo sapiens
ctgcagagtctgggc

SEQ ID NO: 45681 - DNA, 15 bp, Homo sapiens
tctgcagagtctggg

SEQ ID NO: 45682 - DNA, 15 bp, Homo sapiens
gtctgcagagtctgg

SEQ ID NO: 45683 - DNA, 15 bp, Homo sapiens
ggtctgcagagtctg

SEQ ID NO: 45684 - DNA, 15 bp, Homo sapiens
tggtctgcagagtct

SEQ ID NO: 45685 - DNA, 15 bp, Homo sapiens
ctggtctgcagagtc

SEQ ID NO: 45686 - DNA, 15 bp, Homo sapiens
tctggtctgcagagt

SEQ ID NO: 45687 - DNA, 15 bp, Homo sapiens
ttctggtctgcagag

SEQ ID NO: 45688 - DNA, 15 bp, Homo sapiens
attctggtctgcaga

SEQ ID NO: 45689 - DNA, 15 bp, Homo sapiens
cattctggtctgcag

SEQ ID NO: 45690 - DNA, 15 bp, Homo sapiens
tcattctggtctgca

SEQ ID NO: 45691 - DNA, 15 bp, Homo sapiens
ctcattctggtctgc

SEQ ID NO: 45692 - DNA, 15 bp, Homo sapiens
tctcattctggtctg

SEQ ID NO: 45693 - DNA, 15 bp, Homo sapiens
atctcattctggtct

SEQ ID NO: 45694 - DNA, 15 bp, Homo sapiens
gatctcattctggtc

SEQ ID NO: 45695 - DNA, 15 bp, Homo sapiens
tgatctcattctggt

SEQ ID NO: 45696 - DNA, 15 bp, Homo sapiens
atgatctcattctgg

SEQ ID NO: 45697 - DNA, 15 bp, Homo sapiens
catgatctcattctg

SEQ ID NO: 45698 - DNA, 15 bp, Homo sapiens
acatgatctcattct

SEQ ID NO: 45699 - DNA, 15 bp, Homo sapiens
cacatgatctcattc

SEQ ID NO: 45700 - DNA, 15 bp, Homo sapiens
ccacatgatctcatt

SEQ ID NO: 45701 - DNA, 15 bp, Homo sapiens
tccacatgatctcat

SEQ ID NO: 45702 - DNA, 15 bp, Homo sapiens
ctccacatgatctca

SEQ ID NO: 45703 - DNA, 15 bp, Homo sapiens
cctccacatgatctc

SEQ ID NO: 45704 - DNA, 15 bp, Homo sapiens
ccctccacatgatct

SEQ ID NO: 45705 - DNA, 15 bp, Homo sapiens
cccctccacatgatc

SEQ ID NO: 45706 - DNA, 15 bp, Homo sapiens
ccccctccacatgat

SEQ ID NO: 45707 - DNA, 15 bp, Homo sapiens
gccccctccacatga

SEQ ID NO: 45708 - DNA, 15 bp, Homo sapiens
ggccccctccacatg

SEQ ID NO: 45709 - DNA, 15 bp, Homo sapiens
aggccccctccacat

SEQ ID NO: 45710 - DNA, 15 bp, Homo sapiens
taggccccctccaca

SEQ ID NO: 45711 - DNA, 15 bp, Homo sapiens
ataggccccctccac

SEQ ID NO: 45712 - DNA, 15 bp, Homo sapiens
tataggccccctcca

SEQ ID NO: 45713 - DNA, 15 bp, Homo sapiens
ctataggccccctcc

SEQ ID NO: 45714 - DNA, 15 bp, Homo sapiens
gctataggccccctc

SEQ ID NO: 45715 - DNA, 15 bp, Homo sapiens
tgctataggccccct

SEQ ID NO: 45716 - DNA, 15 bp, Homo sapiens
gtgctataggccccc

SEQ ID NO: 45717 - DNA, 15 bp, Homo sapiens
agtgctataggcccc

SEQ ID NO: 45718 - DNA, 15 bp, Homo sapiens
tagtgctataggccc

SEQ ID NO: 45719 - DNA, 15 bp, Homo sapiens
ctagtgctataggcc

SEQ ID NO: 45720 - DNA, 15 bp, Homo sapiens
gctagtgctataggc

SEQ ID NO: 45721 - DNA, 15 bp, Homo sapiens
tgctagtgctatagg

SEQ ID NO: 45722 - DNA, 15 bp, Homo sapiens
gtgctagtgctatag

SEQ ID NO: 45723 - DNA, 15 bp, Homo sapiens
ggtgctagtgctata

SEQ ID NO: 45724 - DNA, 15 bp, Homo sapiens
aggtgctagtgctat

SEQ ID NO: 45725 - DNA, 15 bp, Homo sapiens
caggtgctagtgcta

SEQ ID NO: 45726 - DNA, 15 bp, Homo sapiens
ccaggtgctagtgct

SEQ ID NO: 45727 - DNA, 15 bp, Homo sapiens
cccaggtgctagtgc

SEQ ID NO: 45728 - DNA, 15 bp, Homo sapiens
tcccaggtgctagtg

SEQ ID NO: 45729 - DNA, 15 bp, Homo sapiens
atcccaggtgctagt

SEQ ID NO: 45730 - DNA, 15 bp, Homo sapiens
catcccaggtgctag

SEQ ID NO: 45731 - DNA, 15 bp, Homo sapiens
acatcccaggtgcta

SEQ ID NO: 45732 - DNA, 15 bp, Homo sapiens
gacatcccaggtgct

SEQ ID NO: 45733 - DNA, 15 bp, Homo sapiens
ggacatcccaggtgc

SEQ ID NO: 45734 - DNA, 15 bp, Homo sapiens
aggacatcccaggtg

SEQ ID NO: 45735 - DNA, 15 bp, Homo sapiens
caggacatcccaggt

SEQ ID NO: 45736 - DNA, 15 bp, Homo sapiens
ccaggacatcccagg

SEQ ID NO: 45737 - DNA, 15 bp, Homo sapiens
cccaggacatcccag

SEQ ID NO: 45738 - DNA, 15 bp, Homo sapiens
gcccaggacatccca

SEQ ID NO: 45739 - DNA, 15 bp, Homo sapiens
agcccaggacatccc

SEQ ID NO: 45740 - DNA, 15 bp, Homo sapiens
gagcccaggacatcc

SEQ ID NO: 45741 - DNA, 15 bp, Homo sapiens
tgagcccaggacatc

SEQ ID NO: 45742 - DNA, 15 bp, Homo sapiens
ctgagcccaggacat

SEQ ID NO: 45743 - DNA, 15 bp, Homo sapiens
tctgagcccaggaca

SEQ ID NO: 45744 - DNA, 15 bp, Homo sapiens
atctgagcccaggac

SEQ ID NO: 45745 - DNA, 15 bp, Homo sapiens
catctgagcccagga

SEQ ID NO: 45746 - DNA, 15 bp, Homo sapiens
ccatctgagcccagg

SEQ ID NO: 45747 - DNA, 15 bp, Homo sapiens
accatctgagcccag

SEQ ID NO: 45748 - DNA, 15 bp, Homo sapiens
aaccatctgagccca

SEQ ID NO: 45749 - DNA, 15 bp, Homo sapiens
gaaccatctgagccc

SEQ ID NO: 45750 - DNA, 15 bp, Homo sapiens
agaaccatctgagcc

SEQ ID NO: 45751 - DNA, 15 bp, Homo sapiens
tagaaccatctgagc

SEQ ID NO: 45752 - DNA, 15 bp, Homo sapiens
ttagaaccatctgag

SEQ ID NO: 45753 - DNA, 15 bp, Homo sapiens
cttagaaccatctga

SEQ ID NO: 45754 - DNA, 15 bp, Homo sapiens
gcttagaaccatctg

SEQ ID NO: 45755 - DNA, 15 bp, Homo sapiens
agcttagaaccatct

SEQ ID NO: 45756 - DNA, 15 bp, Homo sapiens
tagcttagaaccatc

SEQ ID NO: 45757 - DNA, 15 bp, Homo sapiens
atagcttagaaccat

SEQ ID NO: 45758 - DNA, 15 bp, Homo sapiens
aatagcttagaacca

SEQ ID NO: 45759 - DNA, 15 bp, Homo sapiens
caatagcttagaacc

SEQ ID NO: 45760 - DNA, 15 bp, Homo sapiens
acaatagcttagaac

SEQ ID NO: 45761 - DNA, 15 bp, Homo sapiens
aacaatagcttagaa

SEQ ID NO: 45762 - DNA, 15 bp, Homo sapiens
aaacaatagcttaga

SEQ ID NO: 45763 - DNA, 15 bp, Homo sapiens
aaaacaatagcttag

SEQ ID NO: 45764 - DNA, 15 bp, Homo sapiens
gaaaacaatagctta

SEQ ID NO: 45765 - DNA, 15 bp, Homo sapiens
agaaaacaatagctt

SEQ ID NO: 45766 - DNA, 15 bp, Homo sapiens
tagaaaacaatagct

SEQ ID NO: 45767 - DNA, 15 bp, Homo sapiens
ttagaaaacaatagc

SEQ ID NO: 45768 - DNA, 15 bp, Homo sapiens
gttagaaaacaatag

SEQ ID NO: 45769 - DNA, 15 bp, Homo sapiens
ggttagaaaacaata

SEQ ID NO: 45770 - DNA, 15 bp, Homo sapiens
gggttagaaaacaat

SEQ ID NO: 45771 - DNA, 15 bp, Homo sapiens
agggttagaaaacaa

SEQ ID NO: 45772 - DNA, 15 bp, Homo sapiens
tagggttagaaaaca

SEQ ID NO: 45773 - DNA, 15 bp, Homo sapiens
atagggttagaaaac

SEQ ID NO: 45774 - DNA, 15 bp, Homo sapiens
catagggttagaaaa

SEQ ID NO: 45775 - DNA, 15 bp, Homo sapiens
tcatagggttagaaa

SEQ ID NO: 45776 - DNA, 15 bp, Homo sapiens
atcatagggttagaa

SEQ ID NO: 45777 - DNA, 15 bp, Homo sapiens
aatcatagggttaga

SEQ ID NO: 45778 - DNA, 15 bp, Homo sapiens
aaatcatagggttag

SEQ ID NO: 45779 - DNA, 15 bp, Homo sapiens
aaaatcatagggtta

SEQ ID NO: 45780 - DNA, 15 bp, Homo sapiens
taaaatcatagggtt

SEQ ID NO: 45781 - DNA, 15 bp, Homo sapiens
gtaaaatcatagggt

SEQ ID NO: 45782 - DNA, 15 bp, Homo sapiens
tgtaaaatcataggg

SEQ ID NO: 45783 - DNA, 15 bp, Homo sapiens
atgtaaaatcatagg

SEQ ID NO: 45784 - DNA, 15 bp, Homo sapiens
aatgtaaaatcatag

SEQ ID NO: 45785 - DNA, 15 bp, Homo sapiens
aaatgtaaaatcata

SEQ ID NO: 45786 - DNA, 15 bp, Homo sapiens
aaaatgtaaaatcat

SEQ ID NO: 45787 - DNA, 15 bp, Homo sapiens
taaaatgtaaaatca

SEQ ID NO: 45788 - DNA, 15 bp, Homo sapiens
gtaaaatgtaaaatc

SEQ ID NO: 45789 - DNA, 15 bp, Homo sapiens
tgtaaaatgtaaaat

SEQ ID NO: 45790 - DNA, 15 bp, Homo sapiens
ctgtaaaatgtaaaa

SEQ ID NO: 45791 - DNA, 15 bp, Homo sapiens
tctgtaaaatgtaaa

SEQ ID NO: 45792 - DNA, 15 bp, Homo sapiens
atctgtaaaatgtaa

SEQ ID NO: 45793 - DNA, 15 bp, Homo sapiens
catctgtaaaatgta

SEQ ID NO: 45794 - DNA, 15 bp, Homo sapiens
tcatctgtaaaatgt

SEQ ID NO: 45795 - DNA, 15 bp, Homo sapiens
gtcatctgtaaaatg

SEQ ID NO: 45796 - DNA, 15 bp, Homo sapiens
tgtcatctgtaaaat

SEQ ID NO: 45797 - DNA, 15 bp, Homo sapiens
ttgtcatctgtaaaa

SEQ ID NO: 45798 - DNA, 15 bp, Homo sapiens
tttgtcatctgtaaa

SEQ ID NO: 45799 - DNA, 15 bp, Homo sapiens
ttttgtcatctgtaa

SEQ ID NO: 45800 - DNA, 15 bp, Homo sapiens
gttttgtcatctgta

SEQ ID NO: 45801 - DNA, 15 bp, Homo sapiens
agttttgtcatctgt

SEQ ID NO: 45802 - DNA, 15 bp, Homo sapiens
cagttttgtcatctg

SEQ ID NO: 45803 - DNA, 15 bp, Homo sapiens
tcagttttgtcatct

SEQ ID NO: 45804 - DNA, 15 bp, Homo sapiens
ctcagttttgtcatc

SEQ ID NO: 45805 - DNA, 15 bp, Homo sapiens
tctcagttttgtcat

SEQ ID NO: 45806 - DNA, 15 bp, Homo sapiens
gtctcagttttgtca

SEQ ID NO: 45807 - DNA, 15 bp, Homo sapiens
agtctcagttttgtc

SEQ ID NO: 45808 - DNA, 15 bp, Homo sapiens
aagtctcagttttgt

SEQ ID NO: 45809 - DNA, 15 bp, Homo sapiens
caagtctcagttttg

SEQ ID NO: 45810 - DNA, 15 bp, Homo sapiens
ccaagtctcagtttt

SEQ ID NO: 45811 - DNA, 15 bp, Homo sapiens
tccaagtctcagttt

SEQ ID NO: 45812 - DNA, 15 bp, Homo sapiens
atccaagtctcagtt

SEQ ID NO: 45813 - DNA, 15 bp, Homo sapiens
tatccaagtctcagt

SEQ ID NO: 45814 - DNA, 15 bp, Homo sapiens
atatccaagtctcag

SEQ ID NO: 45815 - DNA, 15 bp, Homo sapiens
catatccaagtctca

SEQ ID NO: 45816 - DNA, 15 bp, Homo sapiens
acatatccaagtctc

SEQ ID NO: 45817 - DNA, 15 bp, Homo sapiens
aacatatccaagtct

SEQ ID NO: 45818 - DNA, 15 bp, Homo sapiens
aaacatatccaagtc

SEQ ID NO: 45819 - DNA, 15 bp, Homo sapiens
aaaacatatccaagt

SEQ ID NO: 45820 - DNA, 15 bp, Homo sapiens
aaaaacatatccaag

SEQ ID NO: 45821 - DNA, 15 bp, Homo sapiens
caaaaacatatccaa

SEQ ID NO: 45822 - DNA, 15 bp, Homo sapiens
tcaaaaacatatcca

SEQ ID NO: 45823 - DNA, 15 bp, Homo sapiens
ttcaaaaacatatcc

SEQ ID NO: 45824 - DNA, 15 bp, Homo sapiens
tttcaaaaacatatc

SEQ ID NO: 45825 - DNA, 15 bp, Homo sapiens
gtttcaaaaacatat

SEQ ID NO: 45826 - DNA, 15 bp, Homo sapiens
agtttcaaaaacata

SEQ ID NO: 45827 - DNA, 15 bp, Homo sapiens
aagtttcaaaaacat

SEQ ID NO: 45828 - DNA, 15 bp, Homo sapiens
caagtttcaaaaaca

SEQ ID NO: 45829 - DNA, 15 bp, Homo sapiens
ccaagtttcaaaaac

SEQ ID NO: 45830 - DNA, 15 bp, Homo sapiens
gccaagtttcaaaaa

SEQ ID NO: 45831 - DNA, 15 bp, Homo sapiens
tgccaagtttcaaaa

SEQ ID NO: 45832 - DNA, 15 bp, Homo sapiens
ttgccaagtttcaaa

SEQ ID NO: 45833 - DNA, 15 bp, Homo sapiens
cttgccaagtttcaa

SEQ ID NO: 45834 - DNA, 15 bp, Homo sapiens
ccttgccaagtttca

SEQ ID NO: 45835 - DNA, 15 bp, Homo sapiens
tccttgccaagtttc

SEQ ID NO: 45836 - DNA, 15 bp, Homo sapiens
ttccttgccaagttt

SEQ ID NO: 45837 - DNA, 15 bp, Homo sapiens
gttccttgccaagtt

SEQ ID NO: 45838 - DNA, 15 bp, Homo sapiens
agttccttgccaagt

SEQ ID NO: 45839 - DNA, 15 bp, Homo sapiens
gagttccttgccaag

SEQ ID NO: 45840 - DNA, 15 bp, Homo sapiens
tgagttccttgccaa

SEQ ID NO: 45841 - DNA, 15 bp, Homo sapiens
atgagttccttgcca

SEQ ID NO: 45842 - DNA, 15 bp, Homo sapiens
catgagttccttgcc

SEQ ID NO: 45843 - DNA, 15 bp, Homo sapiens
tcatgagttccttgc

SEQ ID NO: 45844 - DNA, 15 bp, Homo sapiens
ctcatgagttccttg

SEQ ID NO: 45845 - DNA, 15 bp, Homo sapiens
actcatgagttcctt

SEQ ID NO: 45846 - DNA, 15 bp, Homo sapiens
tactcatgagttcct

SEQ ID NO: 45847 - DNA, 15 bp, Homo sapiens
ttactcatgagttcc

SEQ ID NO: 45848 - DNA, 15 bp, Homo sapiens
tttactcatgagttc

SEQ ID NO: 45849 - DNA, 15 bp, Homo sapiens
ttttactcatgagtt

SEQ ID NO: 45850 - DNA, 15 bp, Homo sapiens
attttactcatgagt

SEQ ID NO: 45851 - DNA, 15 bp, Homo sapiens
aattttactcatgag

SEQ ID NO: 45852 - DNA, 15 bp, Homo sapiens
taattttactcatga

SEQ ID NO: 45853 - DNA, 15 bp, Homo sapiens
ttaattttactcatg

SEQ ID NO: 45854 - DNA, 15 bp, Homo sapiens
attaattttactcat

SEQ ID NO: 45855 - DNA, 15 bp, Homo sapiens
cattaattttactca

SEQ ID NO: 45856 - DNA, 15 bp, Homo sapiens
ccattaattttactc

SEQ ID NO: 45857 - DNA, 15 bp, Homo sapiens
tccattaattttact

SEQ ID NO: 45858 - DNA, 15 bp, Homo sapiens
ttccattaattttac

SEQ ID NO: 45859 - DNA, 15 bp, Homo sapiens
gttccattaatttta

SEQ ID NO: 45860 - DNA, 15 bp, Homo sapiens
ggttccattaatttt

SEQ ID NO: 45861 - DNA, 15 bp, Homo sapiens
tggttccattaattt

SEQ ID NO: 45862 - DNA, 15 bp, Homo sapiens
atggttccattaatt

SEQ ID NO: 45863 - DNA, 15 bp, Homo sapiens
tatggttccattaat

SEQ ID NO: 45864 - DNA, 15 bp, Homo sapiens
ttatggttccattaa

SEQ ID NO: 45865 - DNA, 15 bp, Homo sapiens
attatggttccatta

SEQ ID NO: 45866 - DNA, 15 bp, Homo sapiens
aattatggttccatt

SEQ ID NO: 45867 - DNA, 15 bp, Homo sapiens
gaattatggttccat

SEQ ID NO: 45868 - DNA, 15 bp, Homo sapiens
agaattatggttcca

SEQ ID NO: 45869 - DNA, 15 bp, Homo sapiens
tagaattatggttcc

SEQ ID NO: 45870 - DNA, 15 bp, Homo sapiens
ttagaattatggttc

SEQ ID NO: 45871 - DNA, 15 bp, Homo sapiens
attagaattatggtt

SEQ ID NO: 45872 - DNA, 15 bp, Homo sapiens
gattagaattatggt

SEQ ID NO: 45873 - DNA, 15 bp, Homo sapiens
ggattagaattatgg

SEQ ID NO: 45874 - DNA, 15 bp, Homo sapiens
tggattagaattatg

SEQ ID NO: 45875 - DNA, 15 bp, Homo sapiens
ctggattagaattat

SEQ ID NO: 45876 - DNA, 15 bp, Homo sapiens
actggattagaatta

SEQ ID NO: 45877 - DNA, 15 bp, Homo sapiens
aactggattagaatt

SEQ ID NO: 45878 - DNA, 15 bp, Homo sapiens
caactggattagaat

SEQ ID NO: 45879 - DNA, 15 bp, Homo sapiens
acaactggattagaa

SEQ ID NO: 45880 - DNA, 15 bp, Homo sapiens
cacaactggattaga

SEQ ID NO: 45881 - DNA, 15 bp, Homo sapiens
acacaactggattag

SEQ ID NO: 45882 - DNA, 15 bp, Homo sapiens
aacacaactggatta

SEQ ID NO: 45883 - DNA, 15 bp, Homo sapiens
aaacacaactggatt

SEQ ID NO: 45884 - DNA, 15 bp, Homo sapiens
caaacacaactggat

SEQ ID NO: 45885 - DNA, 15 bp, Homo sapiens
tcaaacacaactgga

SEQ ID NO: 45886 - DNA, 15 bp, Homo sapiens
atcaaacacaactgg

SEQ ID NO: 45887 - DNA, 15 bp, Homo sapiens
aatcaaacacaactg

SEQ ID NO: 45888 - DNA, 15 bp, Homo sapiens
gaatcaaacacaact

SEQ ID NO: 45889 - DNA, 15 bp, Homo sapiens
ggaatcaaacacaac

SEQ ID NO: 45890 - DNA, 15 bp, Homo sapiens
gggaatcaaacacaa

SEQ ID NO: 45891 - DNA, 15 bp, Homo sapiens
tgggaatcaaacaca

SEQ ID NO: 45892 - DNA, 15 bp, Homo sapiens
ttgggaatcaaacac

SEQ ID NO: 45893 - DNA, 15 bp, Homo sapiens
cttgggaatcaaaca

SEQ ID NO: 45894 - DNA, 15 bp, Homo sapiens
gcttgggaatcaaac

SEQ ID NO: 45895 - DNA, 15 bp, Homo sapiens
ggcttgggaatcaaa

SEQ ID NO: 45896 - DNA, 15 bp, Homo sapiens
gggcttgggaatcaa

SEQ ID NO: 45897 - DNA, 15 bp, Homo sapiens
tgggcttgggaatca

SEQ ID NO: 45898 - DNA, 15 bp, Homo sapiens
ttgggcttgggaatc

SEQ ID NO: 45899 - DNA, 15 bp, Homo sapiens
cttgggcttgggaat

SEQ ID NO: 45900 - DNA, 15 bp, Homo sapiens
tcttgggcttgggaa

SEQ ID NO: 45901 - DNA, 15 bp, Homo sapiens
atcttgggcttggga

SEQ ID NO: 45902 - DNA, 15 bp, Homo sapiens
tatcttgggcttggg

SEQ ID NO: 45903 - DNA, 15 bp, Homo sapiens
atatcttgggcttgg

SEQ ID NO: 45904 - DNA, 15 bp, Homo sapiens
aatatcttgggcttg

SEQ ID NO: 45905 - DNA, 15 bp, Homo sapiens
caatatcttgggctt

SEQ ID NO: 45906 - DNA, 15 bp, Homo sapiens
gcaatatcttgggct

SEQ ID NO: 45907 - DNA, 15 bp, Homo sapiens
ggcaatatcttgggc

SEQ ID NO: 45908 - DNA, 15 bp, Homo sapiens
cggcaatatcttggg

SEQ ID NO: 45909 - DNA, 15 bp, Homo sapiens
acggcaatatcttgg

SEQ ID NO: 45910 - DNA, 15 bp, Homo sapiens
gacggcaatatcttg

SEQ ID NO: 45911 - DNA, 15 bp, Homo sapiens
agacggcaatatctt

SEQ ID NO: 45912 - DNA, 15 bp, Homo sapiens
cagacggcaatatct

SEQ ID NO: 45913 - DNA, 15 bp, Homo sapiens
acagacggcaatatc

SEQ ID NO: 45914 - DNA, 15 bp, Homo sapiens
gacagacggcaatat

SEQ ID NO: 45915 - DNA, 15 bp, Homo sapiens
tgacagacggcaata

SEQ ID NO: 45916 - DNA, 15 bp, Homo sapiens
ttgacagacggcaat

SEQ ID NO: 45917 - DNA, 15 bp, Homo sapiens
gttgacagacggcaa

SEQ ID NO: 45918 - DNA, 15 bp, Homo sapiens
tgttgacagacggca

SEQ ID NO: 45919 - DNA, 15 bp, Homo sapiens
atgttgacagacggc

SEQ ID NO: 45920 - DNA, 15 bp, Homo sapiens
aatgttgacagacgg

SEQ ID NO: 45921 - DNA, 15 bp, Homo sapiens
taatgttgacagacg

SEQ ID NO: 45922 - DNA, 15 bp, Homo sapiens
ataatgttgacagac

SEQ ID NO: 45923 - DNA, 15 bp, Homo sapiens
gataatgttgacaga

SEQ ID NO: 45924 - DNA, 15 bp, Homo sapiens
tgataatgttgacag

SEQ ID NO: 45925 - DNA, 15 bp, Homo sapiens
atgataatgttgaca

SEQ ID NO: 45926 - DNA, 15 bp, Homo sapiens
catgataatgttgac

SEQ ID NO: 45927 - DNA, 15 bp, Homo sapiens
gcatgataatgttga

SEQ ID NO: 45928 - DNA, 15 bp, Homo sapiens
agcatgataatgttg

SEQ ID NO: 45929 - DNA, 15 bp, Homo sapiens
aagcatgataatgtt

SEQ ID NO: 45930 - DNA, 15 bp, Homo sapiens
gaagcatgataatgt

SEQ ID NO: 45931 - DNA, 15 bp, Homo sapiens
agaagcatgataatg

SEQ ID NO: 45932 - DNA, 15 bp, Homo sapiens
aagaagcatgataat

SEQ ID NO: 45933 - DNA, 15 bp, Homo sapiens
aaagaagcatgataa

SEQ ID NO: 45934 - DNA, 15 bp, Homo sapiens
taaagaagcatgata

SEQ ID NO: 45935 - DNA, 15 bp, Homo sapiens
gtaaagaagcatgat

SEQ ID NO: 45936 - DNA, 15 bp, Homo sapiens
agtaaagaagcatga

SEQ ID NO: 45937 - DNA, 15 bp, Homo sapiens
aagtaaagaagcatg

SEQ ID NO: 45938 - DNA, 15 bp, Homo sapiens
aaagtaaagaagcat

SEQ ID NO: 45939 - DNA, 15 bp, Homo sapiens
taaagtaaagaagca

SEQ ID NO: 45940 - DNA, 15 bp, Homo sapiens
ttaaagtaaagaagc

SEQ ID NO: 45941 - DNA, 15 bp, Homo sapiens
attaaagtaaagaag

SEQ ID NO: 45942 - DNA, 15 bp, Homo sapiens
tattaaagtaaagaa

SEQ ID NO: 45943 - DNA, 15 bp, Homo sapiens
ttattaaagtaaaga

SEQ ID NO: 45944 - DNA, 15 bp, Homo sapiens
cttattaaagtaaag

SEQ ID NO: 45945 - DNA, 15 bp, Homo sapiens
tcttattaaagtaaa

SEQ ID NO: 45946 - DNA, 15 bp, Homo sapiens
ctcttattaaagtaa

SEQ ID NO: 45947 - DNA, 15 bp, Homo sapiens
actcttattaaagta

SEQ ID NO: 45948 - DNA, 15 bp, Homo sapiens
tactcttattaaagt

SEQ ID NO: 45949 - DNA, 15 bp, Homo sapiens
ttactcttattaaag

SEQ ID NO: 45950 - DNA, 15 bp, Homo sapiens
tttactcttattaaa

SEQ ID NO: 45951 - DNA, 15 bp, Homo sapiens
gtttactcttattaa

SEQ ID NO: 45952 - DNA, 15 bp, Homo sapiens
tgtttactcttatta

SEQ ID NO: 45953 - DNA, 15 bp, Homo sapiens
ctgtttactcttatt

SEQ ID NO: 45954 - DNA, 15 bp, Homo sapiens
cctgtttactcttat

SEQ ID NO: 45955 - DNA, 15 bp, Homo sapiens
gcctgtttactctta

SEQ ID NO: 45956 - DNA, 15 bp, Homo sapiens
tgcctgtttactctt

SEQ ID NO: 45957 - DNA, 15 bp, Homo sapiens
atgcctgtttactct

SEQ ID NO: 45958 - DNA, 15 bp, Homo sapiens
catgcctgtttactc

SEQ ID NO: 45959 - DNA, 15 bp, Homo sapiens
tcatgcctgtttact

SEQ ID NO: 45960 - DNA, 15 bp, Homo sapiens
atcatgcctgtttac

SEQ ID NO: 45961 - DNA, 15 bp, Homo sapiens
tatcatgcctgttta

SEQ ID NO: 45962 - DNA, 15 bp, Homo sapiens
ctatcatgcctgttt

SEQ ID NO: 45963 - DNA, 15 bp, Homo sapiens
actatcatgcctgtt

SEQ ID NO: 45964 - DNA, 15 bp, Homo sapiens
cactatcatgcctgt

SEQ ID NO: 45965 - DNA, 15 bp, Homo sapiens
acactatcatgcctg

SEQ ID NO: 45966 - DNA, 15 bp, Homo sapiens
aacactatcatgcct

SEQ ID NO: 45967 - DNA, 15 bp, Homo sapiens
caacactatcatgcc

SEQ ID NO: 45968 - DNA, 15 bp, Homo sapiens
tcaacactatcatgc

SEQ ID NO: 45969 - DNA, 15 bp, Homo sapiens
ttcaacactatcatg

SEQ ID NO: 45970 - DNA, 15 bp, Homo sapiens
attcaacactatcat

SEQ ID NO: 45971 - DNA, 15 bp, Homo sapiens
cattcaacactatca

SEQ ID NO: 45972 - DNA, 15 bp, Homo sapiens
tcattcaacactatc

SEQ ID NO: 45973 - DNA, 15 bp, Homo sapiens
gtcattcaacactat

SEQ ID NO: 45974 - DNA, 15 bp, Homo sapiens
tgtcattcaacacta

SEQ ID NO: 45975 - DNA, 15 bp, Homo sapiens
ttgtcattcaacact

SEQ ID NO: 45976 - DNA, 15 bp, Homo sapiens
tttgtcattcaacac

SEQ ID NO: 45977 - DNA, 15 bp, Homo sapiens
ctttgtcattcaaca

SEQ ID NO: 45978 - DNA, 15 bp, Homo sapiens
gctttgtcattcaac

SEQ ID NO: 45979 - DNA, 15 bp, Homo sapiens
agctttgtcattcaa

SEQ ID NO: 45980 - DNA, 15 bp, Homo sapiens
gagctttgtcattca

SEQ ID NO: 45981 - DNA, 15 bp, Homo sapiens
ggagctttgtcattc

SEQ ID NO: 45982 - DNA, 15 bp, Homo sapiens
gggagctttgtcatt

SEQ ID NO: 45983 - DNA, 15 bp, Homo sapiens
agggagctttgtcat

SEQ ID NO: 45984 - DNA, 15 bp, Homo sapiens
tagggagctttgtca

SEQ ID NO: 45985 - DNA, 15 bp, Homo sapiens
ctagggagctttgtc

SEQ ID NO: 45986 - DNA, 15 bp, Homo sapiens
actagggagctttgt

SEQ ID NO: 45987 - DNA, 15 bp, Homo sapiens
cactagggagctttg

SEQ ID NO: 45988 - DNA, 15 bp, Homo sapiens
ccactagggagcttt

SEQ ID NO: 45989 - DNA, 15 bp, Homo sapiens
gccactagggagctt

SEQ ID NO: 45990 - DNA, 15 bp, Homo sapiens
agccactagggagct

SEQ ID NO: 45991 - DNA, 15 bp, Homo sapiens
aagccactagggagc

SEQ ID NO: 45992 - DNA, 15 bp, Homo sapiens
gaagccactagggag

SEQ ID NO: 45993 - DNA, 15 bp, Homo sapiens
ggaagccactaggga

SEQ ID NO: 45994 - DNA, 15 bp, Homo sapiens
aggaagccactaggg

SEQ ID NO: 45995 - DNA, 15 bp, Homo sapiens
aaggaagccactagg

SEQ ID NO: 45996 - DNA, 15 bp, Homo sapiens
taaggaagccactag

SEQ ID NO: 45997 - DNA, 15 bp, Homo sapiens
gtaaggaagccacta

SEQ ID NO: 45998 - DNA, 15 bp, Homo sapiens
tgtaaggaagccact

SEQ ID NO: 45999 - DNA, 15 bp, Homo sapiens
gtgtaaggaagccac

SEQ ID NO: 46000 - DNA, 15 bp, Homo sapiens
ggtgtaaggaagcca

SEQ ID NO: 46001 - DNA, 15 bp, Homo sapiens
gggtgtaaggaagcc

SEQ ID NO: 46002 - DNA, 15 bp, Homo sapiens
ggggtgtaaggaagc

SEQ ID NO: 46003 - DNA, 15 bp, Homo sapiens
aggggtgtaaggaag

SEQ ID NO: 46004 - DNA, 15 bp, Homo sapiens
caggggtgtaaggaa

SEQ ID NO: 46005 - DNA, 15 bp, Homo sapiens
ccaggggtgtaagga

SEQ ID NO: 46006 - DNA, 15 bp, Homo sapiens
gccaggggtgtaagg

SEQ ID NO: 46007 - DNA, 15 bp, Homo sapiens
agccaggggtgtaag

SEQ ID NO: 46008 - DNA, 15 bp, Homo sapiens
tagccaggggtgtaa

SEQ ID NO: 46009 - DNA, 15 bp, Homo sapiens
atagccaggggtgta

SEQ ID NO: 46010 - DNA, 15 bp, Homo sapiens
tatagccaggggtgt

SEQ ID NO: 46011 - DNA, 15 bp, Homo sapiens
ttatagccaggggtg

SEQ ID NO: 46012 - DNA, 15 bp, Homo sapiens
attatagccaggggt

SEQ ID NO: 46013 - DNA, 15 bp, Homo sapiens
gattatagccagggg

SEQ ID NO: 46014 - DNA, 15 bp, Homo sapiens
tgattatagccaggg

SEQ ID NO: 46015 - DNA, 15 bp, Homo sapiens
gtgattatagccagg

SEQ ID NO: 46016 - DNA, 15 bp, Homo sapiens
agtgattatagccag

SEQ ID NO: 46017 - DNA, 15 bp, Homo sapiens
cagtgattatagcca

SEQ ID NO: 46018 - DNA, 15 bp, Homo sapiens
tcagtgattatagcc

SEQ ID NO: 46019 - DNA, 15 bp, Homo sapiens
gtcagtgattatagc

SEQ ID NO: 46020 - DNA, 15 bp, Homo sapiens
agtcagtgattatag

SEQ ID NO: 46021 - DNA, 15 bp, Homo sapiens
aagtcagtgattata

SEQ ID NO: 46022 - DNA, 15 bp, Homo sapiens
aaagtcagtgattat

SEQ ID NO: 46023 - DNA, 15 bp, Homo sapiens
gaaagtcagtgatta

SEQ ID NO: 46024 - DNA, 15 bp, Homo sapiens
tgaaagtcagtgatt

SEQ ID NO: 46025 - DNA, 15 bp, Homo sapiens
gtgaaagtcagtgat

SEQ ID NO: 46026 - DNA, 15 bp, Homo sapiens
ggtgaaagtcagtga

SEQ ID NO: 46027 - DNA, 15 bp, Homo sapiens
aggtgaaagtcagtg

SEQ ID NO: 46028 - DNA, 15 bp, Homo sapiens
gaggtgaaagtcagt

SEQ ID NO: 46029 - DNA, 15 bp, Homo sapiens
ggaggtgaaagtcag

SEQ ID NO: 46030 - DNA, 15 bp, Homo sapiens
aggaggtgaaagtca

SEQ ID NO: 46031 - DNA, 15 bp, Homo sapiens
caggaggtgaaagtc

SEQ ID NO: 46032 - DNA, 15 bp, Homo sapiens
gcaggaggtgaaagt

SEQ ID NO: 46033 - DNA, 15 bp, Homo sapiens
ggcaggaggtgaaag

SEQ ID NO: 46034 - DNA, 15 bp, Homo sapiens
gggcaggaggtgaaa

SEQ ID NO: 46035 - DNA, 15 bp, Homo sapiens
agggcaggaggtgaa

SEQ ID NO: 46036 - DNA, 15 bp, Homo sapiens
cagggcaggaggtga

SEQ ID NO: 46037 - DNA, 15 bp, Homo sapiens
gcagggcaggaggtg

SEQ ID NO: 46038 - DNA, 15 bp, Homo sapiens
tgcagggcaggaggt

SEQ ID NO: 46039 - DNA, 15 bp, Homo sapiens
atgcagggcaggagg

SEQ ID NO: 46040 - DNA, 15 bp, Homo sapiens
gatgcagggcaggag

SEQ ID NO: 46041 - DNA, 15 bp, Homo sapiens
agatgcagggcagga

SEQ ID NO: 46042 - DNA, 15 bp, Homo sapiens
tagatgcagggcagg

SEQ ID NO: 46043 - DNA, 15 bp, Homo sapiens
atagatgcagggcag

SEQ ID NO: 46044 - DNA, 15 bp, Homo sapiens
aatagatgcagggca

SEQ ID NO: 46045 - DNA, 15 bp, Homo sapiens
gaatagatgcagggc

SEQ ID NO: 46046 - DNA, 15 bp, Homo sapiens
agaatagatgcaggg

SEQ ID NO: 46047 - DNA, 15 bp, Homo sapiens
cagaatagatgcagg

SEQ ID NO: 46048 - DNA, 15 bp, Homo sapiens
tcagaatagatgcag

SEQ ID NO: 46049 - DNA, 15 bp, Homo sapiens
gtcagaatagatgca

SEQ ID NO: 46050 - DNA, 15 bp, Homo sapiens
ggtcagaatagatgc

SEQ ID NO: 46051 - DNA, 15 bp, Homo sapiens
aggtcagaatagatg

SEQ ID NO: 46052 - DNA, 15 bp, Homo sapiens
taggtcagaatagat

SEQ ID NO: 46053 - DNA, 15 bp, Homo sapiens
gtaggtcagaataga

SEQ ID NO: 46054 - DNA, 15 bp, Homo sapiens
tgtaggtcagaatag

SEQ ID NO: 46055 - DNA, 15 bp, Homo sapiens
gtgtaggtcagaata

SEQ ID NO: 46056 - DNA, 15 bp, Homo sapiens
agtgtaggtcagaat

SEQ ID NO: 46057 - DNA, 15 bp, Homo sapiens
cagtgtaggtcagaa

SEQ ID NO: 46058 - DNA, 15 bp, Homo sapiens
ccagtgtaggtcaga

SEQ ID NO: 46059 - DNA, 15 bp, Homo sapiens
cccagtgtaggtcag

SEQ ID NO: 46060 - DNA, 15 bp, Homo sapiens
ccccagtgtaggtca

SEQ ID NO: 46061 - DNA, 15 bp, Homo sapiens
tccccagtgtaggtc

SEQ ID NO: 46062 - DNA, 15 bp, Homo sapiens
ttccccagtgtaggt

SEQ ID NO: 46063 - DNA, 15 bp, Homo sapiens
tttccccagtgtagg

SEQ ID NO: 46064 - DNA, 15 bp, Homo sapiens
ttttccccagtgtag

SEQ ID NO: 46065 - DNA, 15 bp, Homo sapiens
gttttccccagtgta

SEQ ID NO: 46066 - DNA, 15 bp, Homo sapiens
tgttttccccagtgt

SEQ ID NO: 46067 - DNA, 15 bp, Homo sapiens
ctgttttccccagtg

SEQ ID NO: 46068 - DNA, 15 bp, Homo sapiens
actgttttccccagt

SEQ ID NO: 46069 - DNA, 15 bp, Homo sapiens
tactgttttccccag

SEQ ID NO: 46070 - DNA, 15 bp, Homo sapiens
atactgttttcccca

SEQ ID NO: 46071 - DNA, 15 bp, Homo sapiens
catactgttttcccc

SEQ ID NO: 46072 - DNA, 15 bp, Homo sapiens
acatactgttttccc

SEQ ID NO: 46073 - DNA, 15 bp, Homo sapiens
cacatactgttttcc

SEQ ID NO: 46074 - DNA, 15 bp, Homo sapiens
ccacatactgttttc

SEQ ID NO: 46075 - DNA, 15 bp, Homo sapiens
accacatactgtttt

SEQ ID NO: 46076 - DNA, 15 bp, Homo sapiens
gaccacatactgttt

SEQ ID NO: 46077 - DNA, 15 bp, Homo sapiens
agaccacatactgtt

SEQ ID NO: 46078 - DNA, 15 bp, Homo sapiens
gagaccacatactgt

SEQ ID NO: 46079 - DNA, 15 bp, Homo sapiens
tgagaccacatactg

SEQ ID NO: 46080 - DNA, 15 bp, Homo sapiens
ttgagaccacatact

SEQ ID NO: 46081 - DNA, 15 bp, Homo sapiens
attgagaccacatac

SEQ ID NO: 46082 - DNA, 15 bp, Homo sapiens
gattgagaccacata

SEQ ID NO: 46083 - DNA, 15 bp, Homo sapiens
ggattgagaccacat

SEQ ID NO: 46084 - DNA, 15 bp, Homo sapiens
aggattgagaccaca

SEQ ID NO: 46085 - DNA, 15 bp, Homo sapiens
taggattgagaccac

SEQ ID NO: 46086 - DNA, 15 bp, Homo sapiens
ataggattgagacca

SEQ ID NO: 46087 - DNA, 15 bp, Homo sapiens
cataggattgagacc

SEQ ID NO: 46088 - DNA, 15 bp, Homo sapiens
ccataggattgagac

SEQ ID NO: 46089 - DNA, 15 bp, Homo sapiens
gccataggattgaga

SEQ ID NO: 46090 - DNA, 15 bp, Homo sapiens
agccataggattgag

SEQ ID NO: 46091 - DNA, 15 bp, Homo sapiens
aagccataggattga

SEQ ID NO: 46092 - DNA, 15 bp, Homo sapiens
gaagccataggattg

SEQ ID NO: 46093 - DNA, 15 bp, Homo sapiens
agaagccataggatt

SEQ ID NO: 46094 - DNA, 15 bp, Homo sapiens
tagaagccataggat

SEQ ID NO: 46095 - DNA, 15 bp, Homo sapiens
gtagaagccatagga

SEQ ID NO: 46096 - DNA, 15 bp, Homo sapiens
agtagaagccatagg

SEQ ID NO: 46097 - DNA, 15 bp, Homo sapiens
tagtagaagccatag

SEQ ID NO: 46098 - DNA, 15 bp, Homo sapiens
ctagtagaagccata

SEQ ID NO: 46099 - DNA, 15 bp, Homo sapiens
actagtagaagccat

SEQ ID NO: 46100 - DNA, 15 bp, Homo sapiens
cactagtagaagcca

SEQ ID NO: 46101 - DNA, 15 bp, Homo sapiens
acactagtagaagcc

SEQ ID NO: 46102 - DNA, 15 bp, Homo sapiens
tacactagtagaagc

SEQ ID NO: 46103 - DNA, 15 bp, Homo sapiens
ctacactagtagaag

SEQ ID NO: 46104 - DNA, 15 bp, Homo sapiens
tctacactagtagaa

SEQ ID NO: 46105 - DNA, 15 bp, Homo sapiens
ttctacactagtaga

SEQ ID NO: 46106 - DNA, 15 bp, Homo sapiens
cttctacactagtag

SEQ ID NO: 46107 - DNA, 15 bp, Homo sapiens
acttctacactagta

SEQ ID NO: 46108 - DNA, 15 bp, Homo sapiens
cacttctacactagt

SEQ ID NO: 46109 - DNA, 15 bp, Homo sapiens
acacttctacactag

SEQ ID NO: 46110 - DNA, 15 bp, Homo sapiens
aacacttctacacta

SEQ ID NO: 46111 - DNA, 15 bp, Homo sapiens
taacacttctacact

SEQ ID NO: 46112 - DNA, 15 bp, Homo sapiens
ttaacacttctacac

SEQ ID NO: 46113 - DNA, 15 bp, Homo sapiens
attaacacttctaca

SEQ ID NO: 46114 - DNA, 15 bp, Homo sapiens
cattaacacttctac

SEQ ID NO: 46115 - DNA, 15 bp, Homo sapiens
tcattaacacttcta

SEQ ID NO: 46116 - DNA, 15 bp, Homo sapiens
gtcattaacacttct

SEQ ID NO: 46117 - DNA, 15 bp, Homo sapiens
tgtcattaacacttc

SEQ ID NO: 46118 - DNA, 15 bp, Homo sapiens
atgtcattaacactt

SEQ ID NO: 46119 - DNA, 15 bp, Homo sapiens
gatgtcattaacact

SEQ ID NO: 46120 - DNA, 15 bp, Homo sapiens
agatgtcattaacac

SEQ ID NO: 46121 - DNA, 15 bp, Homo sapiens
aagatgtcattaaca

SEQ ID NO: 46122 - DNA, 15 bp, Homo sapiens
caagatgtcattaac

SEQ ID NO: 46123 - DNA, 15 bp, Homo sapiens
acaagatgtcattaa

SEQ ID NO: 46124 - DNA, 15 bp, Homo sapiens
aacaagatgtcatta

SEQ ID NO: 46125 - DNA, 15 bp, Homo sapiens
taacaagatgtcatt

SEQ ID NO: 46126 - DNA, 15 bp, Homo sapiens
ataacaagatgtcat

SEQ ID NO: 46127 - DNA, 15 bp, Homo sapiens
aataacaagatgtca

SEQ ID NO: 46128 - DNA, 15 bp, Homo sapiens
taataacaagatgtc

SEQ ID NO: 46129 - DNA, 15 bp, Homo sapiens
ttaataacaagatgt

SEQ ID NO: 46130 - DNA, 15 bp, Homo sapiens
gttaataacaagatg

SEQ ID NO: 46131 - DNA, 15 bp, Homo sapiens
tgttaataacaagat

SEQ ID NO: 46132 - DNA, 15 bp, Homo sapiens
atgttaataacaaga

SEQ ID NO: 46133 - DNA, 15 bp, Homo sapiens
gatgttaataacaag

SEQ ID NO: 46134 - DNA, 15 bp, Homo sapiens
agatgttaataacaa

SEQ ID NO: 46135 - DNA, 15 bp, Homo sapiens
aagatgttaataaca

SEQ ID NO: 46136 - DNA, 15 bp, Homo sapiens
taagatgttaataac

SEQ ID NO: 46137 - DNA, 15 bp, Homo sapiens
ataagatgttaataa

SEQ ID NO: 46138 - DNA, 15 bp, Homo sapiens
aataagatgttaata

SEQ ID NO: 46139 - DNA, 15 bp, Homo sapiens
caataagatgttaat

SEQ ID NO: 46140 - DNA, 15 bp, Homo sapiens
acaataagatgttaa

SEQ ID NO: 46141 - DNA, 15 bp, Homo sapiens
aacaataagatgtta

SEQ ID NO: 46142 - DNA, 15 bp, Homo sapiens
taacaataagatgtt

SEQ ID NO: 46143 - DNA, 15 bp, Homo sapiens
ttaacaataagatgt

SEQ ID NO: 46144 - DNA, 15 bp, Homo sapiens
attaacaataagatg

SEQ ID NO: 46145 - DNA, 15 bp, Homo sapiens
aattaacaataagat

SEQ ID NO: 46146 - DNA, 15 bp, Homo sapiens
aaattaacaataaga

SEQ ID NO: 46147 - DNA, 15 bp, Homo sapiens
caaattaacaataag

SEQ ID NO: 46148 - DNA, 15 bp, Homo sapiens
acaaattaacaataa

SEQ ID NO: 46149 - DNA, 15 bp, Homo sapiens
cacaaattaacaata

SEQ ID NO: 46150 - DNA, 15 bp, Homo sapiens
ccacaaattaacaat

SEQ ID NO: 46151 - DNA, 15 bp, Homo sapiens
accacaaattaacaa

SEQ ID NO: 46152 - DNA, 15 bp, Homo sapiens
gaccacaaattaaca

SEQ ID NO: 46153 - DNA, 15 bp, Homo sapiens
agaccacaaattaac

SEQ ID NO: 46154 - DNA, 15 bp, Homo sapiens
tagaccacaaattaa

SEQ ID NO: 46155 - DNA, 15 bp, Homo sapiens
atagaccacaaatta

SEQ ID NO: 46156 - DNA, 15 bp, Homo sapiens
tatagaccacaaatt

SEQ ID NO: 46157 - DNA, 15 bp, Homo sapiens
atatagaccacaaat

SEQ ID NO: 46158 - DNA, 15 bp, Homo sapiens
aatatagaccacaaa

SEQ ID NO: 46159 - DNA, 15 bp, Homo sapiens
aaatatagaccacaa

SEQ ID NO: 46160 - DNA, 15 bp, Homo sapiens
aaaatatagaccaca

SEQ ID NO: 46161 - DNA, 15 bp, Homo sapiens
taaaatatagaccac

SEQ ID NO: 46162 - DNA, 15 bp, Homo sapiens
ttaaaatatagacca

SEQ ID NO: 46163 - DNA, 15 bp, Homo sapiens
tttaaaatatagacc

SEQ ID NO: 46164 - DNA, 15 bp, Homo sapiens
gtttaaaatatagac

SEQ ID NO: 46165 - DNA, 15 bp, Homo sapiens
tgtttaaaatataga

SEQ ID NO: 46166 - DNA, 15 bp, Homo sapiens
ctgtttaaaatatag

SEQ ID NO: 46167 - DNA, 15 bp, Homo sapiens
tctgtttaaaatata

SEQ ID NO: 46168 - DNA, 15 bp, Homo sapiens
atctgtttaaaatat

SEQ ID NO: 46169 - DNA, 15 bp, Homo sapiens
tatctgtttaaaata

SEQ ID NO: 46170 - DNA, 15 bp, Homo sapiens
ttatctgtttaaaat

SEQ ID NO: 46171 - DNA, 15 bp, Homo sapiens
tttatctgtttaaaa

SEQ ID NO: 46172 - DNA, 15 bp, Homo sapiens
atttatctgtttaaa

SEQ ID NO: 46173 - DNA, 15 bp, Homo sapiens
aatttatctgtttaa

SEQ ID NO: 46174 - DNA, 15 bp, Homo sapiens
gaatttatctgttta

SEQ ID NO: 46175 - DNA, 15 bp, Homo sapiens
agaatttatctgttt

SEQ ID NO: 46176 - DNA, 15 bp, Homo sapiens
cagaatttatctgtt

SEQ ID NO: 46177 - DNA, 15 bp, Homo sapiens
tcagaatttatctgt

SEQ ID NO: 46178 - DNA, 15 bp, Homo sapiens
atcagaatttatctg

SEQ ID NO: 46179 - DNA, 15 bp, Homo sapiens
catcagaatttatct

SEQ ID NO: 46180 - DNA, 15 bp, Homo sapiens
gcatcagaatttatc

SEQ ID NO: 46181 - DNA, 15 bp, Homo sapiens
agcatcagaatttat

SEQ ID NO: 46182 - DNA, 15 bp, Homo sapiens
aagcatcagaattta

SEQ ID NO: 46183 - DNA, 15 bp, Homo sapiens
aaagcatcagaattt

SEQ ID NO: 46184 - DNA, 15 bp, Homo sapiens
aaaagcatcagaatt

SEQ ID NO: 46185 - DNA, 15 bp, Homo sapiens
taaaagcatcagaat

SEQ ID NO: 46186 - DNA, 15 bp, Homo sapiens
ttaaaagcatcagaa

SEQ ID NO: 46187 - DNA, 15 bp, Homo sapiens
tttaaaagcatcaga

SEQ ID NO: 46188 - DNA, 15 bp, Homo sapiens
ctttaaaagcatcag

SEQ ID NO: 46189 - DNA, 15 bp, Homo sapiens
tctttaaaagcatca

SEQ ID NO: 46190 - DNA, 15 bp, Homo sapiens
ttctttaaaagcatc

SEQ ID NO: 46191 - DNA, 15 bp, Homo sapiens
gttctttaaaagcat

SEQ ID NO: 46192 - DNA, 15 bp, Homo sapiens
ggttctttaaaagca

SEQ ID NO: 46193 - DNA, 15 bp, Homo sapiens
tggttctttaaaagc

SEQ ID NO: 46194 - DNA, 15 bp, Homo sapiens
ctggttctttaaaag

SEQ ID NO: 46195 - DNA, 15 bp, Homo sapiens
tctggttctttaaaa

SEQ ID NO: 46196 - DNA, 15 bp, Homo sapiens
gtctggttctttaaa

SEQ ID NO: 46197 - DNA, 15 bp, Homo sapiens
tgtctggttctttaa

SEQ ID NO: 46198 - DNA, 15 bp, Homo sapiens
ttgtctggttcttta

SEQ ID NO: 46199 - DNA, 15 bp, Homo sapiens
attgtctggttcttt

SEQ ID NO: 46200 - DNA, 15 bp, Homo sapiens
tattgtctggttctt

SEQ ID NO: 46201 - DNA, 15 bp, Homo sapiens
ttattgtctggttct

SEQ ID NO: 46202 - DNA, 15 bp, Homo sapiens
tttattgtctggttc

SEQ ID NO: 46203 - DNA, 15 bp, Homo sapiens
atttattgtctggtt

SEQ ID NO: 46204 - DNA, 15 bp, Homo sapiens
tatttattgtctggt

SEQ ID NO: 46205 - DNA, 15 bp, Homo sapiens
ttatttattgtctgg

SEQ ID NO: 46206 - DNA, 15 bp, Homo sapiens
tttatttattgtctg

SEQ ID NO: 46207 - DNA, 15 bp, Homo sapiens
atttatttattgtct

SEQ ID NO: 46208 - DNA, 15 bp, Homo sapiens
tatttatttattgtc

SEQ ID NO: 46209 - DNA, 15 bp, Homo sapiens
atatttatttattgt

SEQ ID NO: 46210 - DNA, 15 bp, Homo sapiens
gatatttatttattg

SEQ ID NO: 46211 - DNA, 15 bp, Homo sapiens
tgatatttatttatt

SEQ ID NO: 46212 - DNA, 15 bp, Homo sapiens
ttgatatttatttat

SEQ ID NO: 46213 - DNA, 15 bp, Homo sapiens
attgatatttattta

SEQ ID NO: 46214 - DNA, 15 bp, Homo sapiens
aattgatatttattt

SEQ ID NO: 46215 - DNA, 15 bp, Homo sapiens
aaattgatatttatt

SEQ ID NO: 46216 - DNA, 15 bp, Homo sapiens
aaaattgatatttat

SEQ ID NO: 46217 - DNA, 15 bp, Homo sapiens
taaaattgatattta

SEQ ID NO: 46218 - DNA, 15 bp, Homo sapiens
ataaaattgatattt

SEQ ID NO: 46219 - DNA, 15 bp, Homo sapiens
aataaaattgatatt

SEQ ID NO: 46220 - DNA, 15 bp, Homo sapiens
aaataaaattgatat

SEQ ID NO: 46221 - DNA, 15 bp, Homo sapiens
aaaataaaattgata

SEQ ID NO: 46222 - DNA, 15 bp, Homo sapiens
caaaataaaattgat

SEQ ID NO: 46223 - DNA, 15 bp, Homo sapiens
acaaaataaaattga

SEQ ID NO: 46224 - DNA, 15 bp, Homo sapiens
tacaaaataaaattg

SEQ ID NO: 46225 - DNA, 15 bp, Homo sapiens
ctacaaaataaaatt

SEQ ID NO: 46226 - DNA, 15 bp, Homo sapiens
actacaaaataaaat

SEQ ID NO: 46227 - DNA, 15 bp, Homo sapiens
aactacaaaataaaa

SEQ ID NO: 46228 - DNA, 15 bp, Homo sapiens
gaactacaaaataaa

SEQ ID NO: 46229 - DNA, 15 bp, Homo sapiens
tgaactacaaaataa

SEQ ID NO: 46230 - DNA, 15 bp, Homo sapiens
ttgaactacaaaata

SEQ ID NO: 46231 - DNA, 15 bp, Homo sapiens
tttgaactacaaaat

SEQ ID NO: 46232 - DNA, 15 bp, Homo sapiens
ttttgaactacaaaa

SEQ ID NO: 46233 - DNA, 15 bp, Homo sapiens
tttttgaactacaaa

SEQ ID NO: 46234 - DNA, 15 bp, Homo sapiens
ctttttgaactacaa

SEQ ID NO: 46235 - DNA, 15 bp, Homo sapiens
actttttgaactaca

SEQ ID NO: 46236 - DNA, 15 bp, Homo sapiens
aactttttgaactac

SEQ ID NO: 46237 - DNA, 15 bp, Homo sapiens
caactttttgaacta

SEQ ID NO: 46238 - DNA, 15 bp, Homo sapiens
gcaactttttgaact

SEQ ID NO: 46239 - DNA, 15 bp, Homo sapiens
agcaactttttgaac

SEQ ID NO: 46240 - DNA, 15 bp, Homo sapiens
cagcaactttttgaa

SEQ ID NO: 46241 - DNA, 15 bp, Homo sapiens
acagcaactttttga

SEQ ID NO: 46242 - DNA, 15 bp, Homo sapiens
gacagcaactttttg

SEQ ID NO: 46243 - DNA, 15 bp, Homo sapiens
ggacagcaacttttt

SEQ ID NO: 46244 - DNA, 15 bp, Homo sapiens
tggacagcaactttt

SEQ ID NO: 46245 - DNA, 15 bp, Homo sapiens
atggacagcaacttt

SEQ ID NO: 46246 - DNA, 15 bp, Homo sapiens
aatggacagcaactt

SEQ ID NO: 46247 - DNA, 15 bp, Homo sapiens
aaatggacagcaact

SEQ ID NO: 46248 - DNA, 15 bp, Homo sapiens
caaatggacagcaac

SEQ ID NO: 46249 - DNA, 15 bp, Homo sapiens
tcaaatggacagcaa

SEQ ID NO: 46250 - DNA, 15 bp, Homo sapiens
atcaaatggacagca

SEQ ID NO: 46251 - DNA, 15 bp, Homo sapiens
tatcaaatggacagc

SEQ ID NO: 46252 - DNA, 15 bp, Homo sapiens
atatcaaatggacag

SEQ ID NO: 46253 - DNA, 15 bp, Homo sapiens
aatatcaaatggaca

SEQ ID NO: 46254 - DNA, 15 bp, Homo sapiens
gaatatcaaatggac

SEQ ID NO: 46255 - DNA, 15 bp, Homo sapiens
tgaatatcaaatgga

SEQ ID NO: 46256 - DNA, 15 bp, Homo sapiens
ctgaatatcaaatgg

SEQ ID NO: 46257 - DNA, 15 bp, Homo sapiens
tctgaatatcaaatg

SEQ ID NO: 46258 - DNA, 15 bp, Homo sapiens
atctgaatatcaaat

SEQ ID NO: 46259 - DNA, 15 bp, Homo sapiens
catctgaatatcaaa

SEQ ID NO: 46260 - DNA, 15 bp, Homo sapiens
tcatctgaatatcaa

SEQ ID NO: 46261 - DNA, 15 bp, Homo sapiens
atcatctgaatatca

SEQ ID NO: 46262 - DNA, 15 bp, Homo sapiens
catcatctgaatatc

SEQ ID NO: 46263 - DNA, 15 bp, Homo sapiens
gcatcatctgaatat

SEQ ID NO: 46264 - DNA, 15 bp, Homo sapiens
tgcatcatctgaata

SEQ ID NO: 46265 - DNA, 15 bp, Homo sapiens
ttgcatcatctgaat

SEQ ID NO: 46266 - DNA, 15 bp, Homo sapiens
tttgcatcatctgaa

SEQ ID NO: 46267 - DNA, 15 bp, Homo sapiens
atttgcatcatctga

SEQ ID NO: 46268 - DNA, 15 bp, Homo sapiens
tatttgcatcatctg

SEQ ID NO: 46269 - DNA, 15 bp, Homo sapiens
atatttgcatcatct

SEQ ID NO: 46270 - DNA, 15 bp, Homo sapiens
aatatttgcatcatc

SEQ ID NO: 46271 - DNA, 15 bp, Homo sapiens
aaatatttgcatcat

SEQ ID NO: 46272 - DNA, 15 bp, Homo sapiens
gaaatatttgcatca

SEQ ID NO: 46273 - DNA, 15 bp, Homo sapiens
tgaaatatttgcatc

SEQ ID NO: 46274 - DNA, 15 bp, Homo sapiens
atgaaatatttgcat

SEQ ID NO: 46275 - DNA, 15 bp, Homo sapiens
catgaaatatttgca

SEQ ID NO: 46276 - DNA, 15 bp, Homo sapiens
acatgaaatatttgc

SEQ ID NO: 46277 - DNA, 15 bp, Homo sapiens
gacatgaaatatttg

SEQ ID NO: 46278 - DNA, 15 bp, Homo sapiens
ggacatgaaatattt

SEQ ID NO: 46279 - DNA, 15 bp, Homo sapiens
aggacatgaaatatt

SEQ ID NO: 46280 - DNA, 15 bp, Homo sapiens
caggacatgaaatat

SEQ ID NO: 46281 - DNA, 15 bp, Homo sapiens
tcaggacatgaaata

SEQ ID NO: 46282 - DNA, 15 bp, Homo sapiens
ttcaggacatgaaat

SEQ ID NO: 46283 - DNA, 15 bp, Homo sapiens
cttcaggacatgaaa

SEQ ID NO: 46284 - DNA, 15 bp, Homo sapiens
tcttcaggacatgaa

SEQ ID NO: 46285 - DNA, 15 bp, Homo sapiens
ttcttcaggacatga

SEQ ID NO: 46286 - DNA, 15 bp, Homo sapiens
tttcttcaggacatg

SEQ ID NO: 46287 - DNA, 15 bp, Homo sapiens
ttttcttcaggacat

SEQ ID NO: 46288 - DNA, 15 bp, Homo sapiens
cttttcttcaggaca

SEQ ID NO: 46289 - DNA, 15 bp, Homo sapiens
acttttcttcaggac

SEQ ID NO: 46290 - DNA, 15 bp, Homo sapiens
gacttttcttcagga

SEQ ID NO: 46291 - DNA, 15 bp, Homo sapiens
ggacttttcttcagg

SEQ ID NO: 46292 - DNA, 15 bp, Homo sapiens
tggacttttcttcag

SEQ ID NO: 46293 - DNA, 15 bp, Homo sapiens
atggacttttcttca

SEQ ID NO: 46294 - DNA, 15 bp, Homo sapiens
tatggacttttcttc

SEQ ID NO: 46295 - DNA, 15 bp, Homo sapiens
ttatggacttttctt

SEQ ID NO: 46296 - DNA, 15 bp, Homo sapiens
tttatggacttttct

SEQ ID NO: 46297 - DNA, 15 bp, Homo sapiens
atttatggacttttc

SEQ ID NO: 46298 - DNA, 15 bp, Homo sapiens
catttatggactttt

SEQ ID NO: 46299 - DNA, 15 bp, Homo sapiens
tcatttatggacttt

SEQ ID NO: 46300 - DNA, 15 bp, Homo sapiens
ctcatttatggactt

SEQ ID NO: 46301 - DNA, 15 bp, Homo sapiens
actcatttatggact

SEQ ID NO: 46302 - DNA, 15 bp, Homo sapiens
tactcatttatggac

SEQ ID NO: 46303 - DNA, 15 bp, Homo sapiens
ttactcatttatgga

SEQ ID NO: 46304 - DNA, 15 bp, Homo sapiens
tttactcatttatgg

SEQ ID NO: 46305 - DNA, 15 bp, Homo sapiens
ctttactcatttatg

SEQ ID NO: 46306 - DNA, 15 bp, Homo sapiens
cctttactcatttat

SEQ ID NO: 46307 - DNA, 15 bp, Homo sapiens
acctttactcattta

SEQ ID NO: 46308 - DNA, 15 bp, Homo sapiens
tacctttactcattt

SEQ ID NO: 46309 - DNA, 15 bp, Homo sapiens
ctacctttactcatt

SEQ ID NO: 46310 - DNA, 15 bp, Homo sapiens
gctacctttactcat

SEQ ID NO: 46311 - DNA, 15 bp, Homo sapiens
tgctacctttactca

SEQ ID NO: 46312 - DNA, 15 bp, Homo sapiens
ctgctacctttactc

SEQ ID NO: 46313 - DNA, 15 bp, Homo sapiens
gctgctacctttact

SEQ ID NO: 46314 - DNA, 15 bp, Homo sapiens
tgctgctacctttac

SEQ ID NO: 46315 - DNA, 15 bp, Homo sapiens
gtgctgctaccttta

SEQ ID NO: 46316 - DNA, 15 bp, Homo sapiens
agtgctgctaccttt

SEQ ID NO: 46317 - DNA, 15 bp, Homo sapiens
gagtgctgctacctt

SEQ ID NO: 46318 - DNA, 15 bp, Homo sapiens
ggagtgctgctacct

SEQ ID NO: 46319 - DNA, 15 bp, Homo sapiens
aggagtgctgctacc

SEQ ID NO: 46320 - DNA, 15 bp, Homo sapiens
caggagtgctgctac

SEQ ID NO: 46321 - DNA, 15 bp, Homo sapiens
ccaggagtgctgcta

SEQ ID NO: 46322 - DNA, 15 bp, Homo sapiens
tccaggagtgctgct

SEQ ID NO: 46323 - DNA, 15 bp, Homo sapiens
gtccaggagtgctgc

SEQ ID NO: 46324 - DNA, 15 bp, Homo sapiens
ggtccaggagtgctg

SEQ ID NO: 46325 - DNA, 15 bp, Homo sapiens
gggtccaggagtgct

SEQ ID NO: 46326 - DNA, 15 bp, Homo sapiens
agggtccaggagtgc

SEQ ID NO: 46327 - DNA, 15 bp, Homo sapiens
tagggtccaggagtg

SEQ ID NO: 46328 - DNA, 15 bp, Homo sapiens
ttagggtccaggagt

SEQ ID NO: 46329 - DNA, 15 bp, Homo sapiens
tttagggtccaggag

SEQ ID NO: 46330 - DNA, 15 bp, Homo sapiens
gtttagggtccagga

SEQ ID NO: 46331 - DNA, 15 bp, Homo sapiens
cgtttagggtccagg

SEQ ID NO: 46332 - DNA, 15 bp, Homo sapiens
tcgtttagggtccag

SEQ ID NO: 46333 - DNA, 15 bp, Homo sapiens
ctcgtttagggtcca

SEQ ID NO: 46334 - DNA, 15 bp, Homo sapiens
actcgtttagggtcc

SEQ ID NO: 46335 - DNA, 15 bp, Homo sapiens
cactcgtttagggtc

SEQ ID NO: 46336 - DNA, 15 bp, Homo sapiens
acactcgtttagggt

SEQ ID NO: 46337 - DNA, 15 bp, Homo sapiens
gacactcgtttaggg

SEQ ID NO: 46338 - DNA, 15 bp, Homo sapiens
agacactcgtttagg

SEQ ID NO: 46339 - DNA, 15 bp, Homo sapiens
aagacactcgtttag

SEQ ID NO: 46340 - DNA, 15 bp, Homo sapiens
gaagacactcgttta

SEQ ID NO: 46341 - DNA, 15 bp, Homo sapiens
cgaagacactcgttt

SEQ ID NO: 46342 - DNA, 15 bp, Homo sapiens
acgaagacactcgtt

SEQ ID NO: 46343 - DNA, 15 bp, Homo sapiens
cacgaagacactcgt

SEQ ID NO: 46344 - DNA, 15 bp, Homo sapiens
acacgaagacactcg

SEQ ID NO: 46345 - DNA, 15 bp, Homo sapiens
cacacgaagacactc

SEQ ID NO: 46346 - DNA, 15 bp, Homo sapiens
acacacgaagacact

SEQ ID NO: 46347 - DNA, 15 bp, Homo sapiens
cacacacgaagacac

SEQ ID NO: 46348 - DNA, 15 bp, Homo sapiens
acacacacgaagaca

SEQ ID NO: 46349 - DNA, 15 bp, Homo sapiens
cacacacacgaagac

SEQ ID NO: 46350 - DNA, 15 bp, Homo sapiens
acacacacacgaaga

SEQ ID NO: 46351 - DNA, 15 bp, Homo sapiens
cacacacacacgaag

SEQ ID NO: 46352 - DNA, 15 bp, Homo sapiens
acacacacacacgaa

SEQ ID NO: 46353 - DNA, 15 bp, Homo sapiens
cacacacacacacga

SEQ ID NO: 46354 - DNA, 15 bp, Homo sapiens
acacacacacacacg

SEQ ID NO: 46355 - DNA, 15 bp, Homo sapiens
cacacacacacacac

SEQ ID NO: 46356 - DNA, 15 bp, Homo sapiens
acacacacacacaca

SEQ ID NO: 46357 - DNA, 15 bp, Homo sapiens
tacacacacacacac

SEQ ID NO: 46358 - DNA, 15 bp, Homo sapiens
ctacacacacacaca

SEQ ID NO: 46359 - DNA, 15 bp, Homo sapiens
tctacacacacacac

SEQ ID NO: 46360 - DNA, 15 bp, Homo sapiens
ttctacacacacaca

SEQ ID NO: 46361 - DNA, 15 bp, Homo sapiens
tttctacacacacac

SEQ ID NO: 46362 - DNA, 15 bp, Homo sapiens
ctttctacacacaca

SEQ ID NO: 46363 - DNA, 15 bp, Homo sapiens
tctttctacacacac

SEQ ID NO: 46364 - DNA, 15 bp, Homo sapiens
atctttctacacaca

SEQ ID NO: 46365 - DNA, 15 bp, Homo sapiens
tatctttctacacac

SEQ ID NO: 46366 - DNA, 15 bp, Homo sapiens
ctatctttctacaca

SEQ ID NO: 46367 - DNA, 15 bp, Homo sapiens
tctatctttctacac

SEQ ID NO: 46368 - DNA, 15 bp, Homo sapiens
ctctatctttctaca

SEQ ID NO: 46369 - DNA, 15 bp, Homo sapiens
tctctatctttctac

SEQ ID NO: 46370 - DNA, 15 bp, Homo sapiens
ctctctatctttcta

SEQ ID NO: 46371 - DNA, 15 bp, Homo sapiens
tctctctatctttct

SEQ ID NO: 46372 - DNA, 15 bp, Homo sapiens
ctctctctatctttc

SEQ ID NO: 46373 - DNA, 15 bp, Homo sapiens
tctctctctatcttt

SEQ ID NO: 46374 - DNA, 15 bp, Homo sapiens
gtctctctctatctt

SEQ ID NO: 46375 - DNA, 15 bp, Homo sapiens
tgtctctctctatct

SEQ ID NO: 46376 - DNA, 15 bp, Homo sapiens
ttgtctctctctatc

SEQ ID NO: 46377 - DNA, 15 bp, Homo sapiens
attgtctctctctat

SEQ ID NO: 46378 - DNA, 15 bp, Homo sapiens
tattgtctctctcta

SEQ ID NO: 46379 - DNA, 15 bp, Homo sapiens
atattgtctctctct

SEQ ID NO: 46380 - DNA, 15 bp, Homo sapiens
catattgtctctctc

SEQ ID NO: 46381 - DNA, 15 bp, Homo sapiens
tcatattgtctctct

SEQ ID NO: 46382 - DNA, 15 bp, Homo sapiens
ctcatattgtctctc

SEQ ID NO: 46383 - DNA, 15 bp, Homo sapiens
gctcatattgtctct

SEQ ID NO: 46384 - DNA, 15 bp, Homo sapiens
tgctcatattgtctc

SEQ ID NO: 46385 - DNA, 15 bp, Homo sapiens
ctgctcatattgtct

SEQ ID NO: 46386 - DNA, 15 bp, Homo sapiens
cctgctcatattgtc

SEQ ID NO: 46387 - DNA, 15 bp, Homo sapiens
tcctgctcatattgt

SEQ ID NO: 46388 - DNA, 15 bp, Homo sapiens
ttcctgctcatattg

SEQ ID NO: 46389 - DNA, 15 bp, Homo sapiens
cttcctgctcatatt

SEQ ID NO: 46390 - DNA, 15 bp, Homo sapiens
tcttcctgctcatat

SEQ ID NO: 46391 - DNA, 15 bp, Homo sapiens
ttcttcctgctcata

SEQ ID NO: 46392 - DNA, 15 bp, Homo sapiens
tttcttcctgctcat

SEQ ID NO: 46393 - DNA, 15 bp, Homo sapiens
ctttcttcctgctca

SEQ ID NO: 46394 - DNA, 15 bp, Homo sapiens
tctttcttcctgctc

SEQ ID NO: 46395 - DNA, 15 bp, Homo sapiens
ttctttcttcctgct

SEQ ID NO: 46396 - DNA, 15 bp, Homo sapiens
tttctttcttcctgc

SEQ ID NO: 46397 - DNA, 15 bp, Homo sapiens
ttttctttcttcctg

SEQ ID NO: 46398 - DNA, 15 bp, Homo sapiens
cttttctttcttcct

SEQ ID NO: 46399 - DNA, 15 bp, Homo sapiens
ccttttctttcttcc

SEQ ID NO: 46400 - DNA, 15 bp, Homo sapiens
gccttttctttcttc

SEQ ID NO: 46401 - DNA, 15 bp, Homo sapiens
tgccttttctttctt

SEQ ID NO: 46402 - DNA, 15 bp, Homo sapiens
ttgccttttctttct

SEQ ID NO: 46403 - DNA, 15 bp, Homo sapiens
tttgccttttctttc

SEQ ID NO: 46404 - DNA, 15 bp, Homo sapiens
atttgccttttcttt

SEQ ID NO: 46405 - DNA, 15 bp, Homo sapiens
tatttgccttttctt

SEQ ID NO: 46406 - DNA, 15 bp, Homo sapiens
ctatttgccttttct

SEQ ID NO: 46407 - DNA, 15 bp, Homo sapiens
actatttgccttttc

SEQ ID NO: 46408 - DNA, 15 bp, Homo sapiens
gactatttgcctttt

SEQ ID NO: 46409 - DNA, 15 bp, Homo sapiens
tgactatttgccttt

SEQ ID NO: 46410 - DNA, 15 bp, Homo sapiens
atgactatttgcctt

SEQ ID NO: 46411 - DNA, 15 bp, Homo sapiens
aatgactatttgcct

SEQ ID NO: 46412 - DNA, 15 bp, Homo sapiens
aaatgactatttgcc

SEQ ID NO: 46413 - DNA, 15 bp, Homo sapiens
caaatgactatttgc

SEQ ID NO: 46414 - DNA, 15 bp, Homo sapiens
gcaaatgactatttg

SEQ ID NO: 46415 - DNA, 15 bp, Homo sapiens
agcaaatgactattt

SEQ ID NO: 46416 - DNA, 15 bp, Homo sapiens
tagcaaatgactatt

SEQ ID NO: 46417 - DNA, 15 bp, Homo sapiens
ttagcaaatgactat

SEQ ID NO: 46418 - DNA, 15 bp, Homo sapiens
attagcaaatgacta

SEQ ID NO: 46419 - DNA, 15 bp, Homo sapiens
tattagcaaatgact

SEQ ID NO: 46420 - DNA, 15 bp, Homo sapiens
atattagcaaatgac

SEQ ID NO: 46421 - DNA, 15 bp, Homo sapiens
aatattagcaaatga

SEQ ID NO: 46422 - DNA, 15 bp, Homo sapiens
gaatattagcaaatg

SEQ ID NO: 46423 - DNA, 15 bp, Homo sapiens
ggaatattagcaaat

SEQ ID NO: 46424 - DNA, 15 bp, Homo sapiens
tggaatattagcaaa

SEQ ID NO: 46425 - DNA, 15 bp, Homo sapiens
atggaatattagcaa

SEQ ID NO: 46426 - DNA, 15 bp, Homo sapiens
catggaatattagca

SEQ ID NO: 46427 - DNA, 15 bp, Homo sapiens
tcatggaatattagc

SEQ ID NO: 46428 - DNA, 15 bp, Homo sapiens
ttcatggaatattag

SEQ ID NO: 46429 - DNA, 15 bp, Homo sapiens
attcatggaatatta

SEQ ID NO: 46430 - DNA, 15 bp, Homo sapiens
tattcatggaatatt

SEQ ID NO: 46431 - DNA, 15 bp, Homo sapiens
ttattcatggaatat

SEQ ID NO: 46432 - DNA, 15 bp, Homo sapiens
tttattcatggaata

SEQ ID NO: 46433 - DNA, 15 bp, Homo sapiens
ctttattcatggaat

SEQ ID NO: 46434 - DNA, 15 bp, Homo sapiens
cctttattcatggaa

SEQ ID NO: 46435 - DNA, 15 bp, Homo sapiens
acctttattcatgga

SEQ ID NO: 46436 - DNA, 15 bp, Homo sapiens
tacctttattcatgg

SEQ ID NO: 46437 - DNA, 15 bp, Homo sapiens
ttacctttattcatg

SEQ ID NO: 46438 - DNA, 15 bp, Homo sapiens
attacctttattcat

SEQ ID NO: 46439 - DNA, 15 bp, Homo sapiens
aattacctttattca

SEQ ID NO: 46440 - DNA, 15 bp, Homo sapiens
aaattacctttattc

SEQ ID NO: 46441 - DNA, 15 bp, Homo sapiens
taaattacctttatt

SEQ ID NO: 46442 - DNA, 15 bp, Homo sapiens
ataaattacctttat

SEQ ID NO: 46443 - DNA, 15 bp, Homo sapiens
tataaattaccttta

SEQ ID NO: 46444 - DNA, 15 bp, Homo sapiens
ctataaattaccttt

SEQ ID NO: 46445 - DNA, 15 bp, Homo sapiens
cctataaattacctt

SEQ ID NO: 46446 - DNA, 15 bp, Homo sapiens
tcctataaattacct

SEQ ID NO: 46447 - DNA, 15 bp, Homo sapiens
ttcctataaattacc

SEQ ID NO: 46448 - DNA, 15 bp, Homo sapiens
attcctataaattac

SEQ ID NO: 46449 - DNA, 15 bp, Homo sapiens
tattcctataaatta

SEQ ID NO: 46450 - DNA, 15 bp, Homo sapiens
atattcctataaatt

SEQ ID NO: 46451 - DNA, 15 bp, Homo sapiens
aatattcctataaat

SEQ ID NO: 46452 - DNA, 15 bp, Homo sapiens
aaatattcctataaa

SEQ ID NO: 46453 - DNA, 15 bp, Homo sapiens
aaaatattcctataa

SEQ ID NO: 46454 - DNA, 15 bp, Homo sapiens
aaaaatattcctata

SEQ ID NO: 46455 - DNA, 15 bp, Homo sapiens
gaaaaatattcctat

SEQ ID NO: 46456 - DNA, 15 bp, Homo sapiens
agaaaaatattccta

SEQ ID NO: 46457 - DNA, 15 bp, Homo sapiens
tagaaaaatattcct

SEQ ID NO: 46458 - DNA, 15 bp, Homo sapiens
ctagaaaaatattcc

SEQ ID NO: 46459 - DNA, 15 bp, Homo sapiens
tctagaaaaatattc

SEQ ID NO: 46460 - DNA, 15 bp, Homo sapiens
ctctagaaaaatatt

SEQ ID NO: 46461 - DNA, 15 bp, Homo sapiens
gctctagaaaaatat

SEQ ID NO: 46462 - DNA, 15 bp, Homo sapiens
tgctctagaaaaata

SEQ ID NO: 46463 - DNA, 15 bp, Homo sapiens
ttgctctagaaaaat

SEQ ID NO: 46464 - DNA, 15 bp, Homo sapiens
tttgctctagaaaaa

SEQ ID NO: 46465 - DNA, 15 bp, Homo sapiens
atttgctctagaaaa

SEQ ID NO: 46466 - DNA, 15 bp, Homo sapiens
aatttgctctagaaa

SEQ ID NO: 46467 - DNA, 15 bp, Homo sapiens
aaatttgctctagaa

SEQ ID NO: 46468 - DNA, 15 bp, Homo sapiens
gaaatttgctctaga

SEQ ID NO: 46469 - DNA, 15 bp, Homo sapiens
agaaatttgctctag

SEQ ID NO: 46470 - DNA, 15 bp, Homo sapiens
aagaaatttgctcta

SEQ ID NO: 46471 - DNA, 15 bp, Homo sapiens
taagaaatttgctct

SEQ ID NO: 46472 - DNA, 15 bp, Homo sapiens
ttaagaaatttgctc

SEQ ID NO: 46473 - DNA, 15 bp, Homo sapiens
attaagaaatttgct

SEQ ID NO: 46474 - DNA, 15 bp, Homo sapiens
cattaagaaatttgc

SEQ ID NO: 46475 - DNA, 15 bp, Homo sapiens
tcattaagaaatttg

SEQ ID NO: 46476 - DNA, 15 bp, Homo sapiens
gtcattaagaaattt

SEQ ID NO: 46477 - DNA, 15 bp, Homo sapiens
agtcattaagaaatt

SEQ ID NO: 46478 - DNA, 15 bp, Homo sapiens
cagtcattaagaaat

SEQ ID NO: 46479 - DNA, 15 bp, Homo sapiens
gcagtcattaagaaa

SEQ ID NO: 46480 - DNA, 15 bp, Homo sapiens
cgcagtcattaagaa

SEQ ID NO: 46481 - DNA, 15 bp, Homo sapiens
acgcagtcattaaga

SEQ ID NO: 46482 - DNA, 15 bp, Homo sapiens
aacgcagtcattaag

SEQ ID NO: 46483 - DNA, 15 bp, Homo sapiens
caacgcagtcattaa

SEQ ID NO: 46484 - DNA, 15 bp, Homo sapiens
gcaacgcagtcatta

SEQ ID NO: 46485 - DNA, 15 bp, Homo sapiens
tgcaacgcagtcatt

SEQ ID NO: 46486 - DNA, 15 bp, Homo sapiens
atgcaacgcagtcat

SEQ ID NO: 46487 - DNA, 15 bp, Homo sapiens
aatgcaacgcagtca

SEQ ID NO: 46488 - DNA, 15 bp, Homo sapiens
aaatgcaacgcagtc

SEQ ID NO: 46489 - DNA, 15 bp, Homo sapiens
aaaatgcaacgcagt

SEQ ID NO: 46490 - DNA, 15 bp, Homo sapiens
caaaatgcaacgcag

SEQ ID NO: 46491 - DNA, 15 bp, Homo sapiens
acaaaatgcaacgca

SEQ ID NO: 46492 - DNA, 15 bp, Homo sapiens
gacaaaatgcaacgc

SEQ ID NO: 46493 - DNA, 15 bp, Homo sapiens
tgacaaaatgcaacg

SEQ ID NO: 46494 - DNA, 15 bp, Homo sapiens
atgacaaaatgcaac

SEQ ID NO: 46495 - DNA, 15 bp, Homo sapiens
aatgacaaaatgcaa

SEQ ID NO: 46496 - DNA, 15 bp, Homo sapiens
taatgacaaaatgca

SEQ ID NO: 46497 - DNA, 15 bp, Homo sapiens
ataatgacaaaatgc

SEQ ID NO: 46498 - DNA, 15 bp, Homo sapiens
aataatgacaaaatg

SEQ ID NO: 46499 - DNA, 15 bp, Homo sapiens
taataatgacaaaat

SEQ ID NO: 46500 - DNA, 15 bp, Homo sapiens
ataataatgacaaaa

SEQ ID NO: 46501 - DNA, 15 bp, Homo sapiens
aataataatgacaaa

SEQ ID NO: 46502 - DNA, 15 bp, Homo sapiens
taataataatgacaa

SEQ ID NO: 46503 - DNA, 15 bp, Homo sapiens
ttaataataatgaca

SEQ ID NO: 46504 - DNA, 15 bp, Homo sapiens
gttaataataatgac

SEQ ID NO: 46505 - DNA, 15 bp, Homo sapiens
agttaataataatga

SEQ ID NO: 46506 - DNA, 15 bp, Homo sapiens
cagttaataataatg

SEQ ID NO: 46507 - DNA, 15 bp, Homo sapiens
gcagttaataataat

SEQ ID NO: 46508 - DNA, 15 bp, Homo sapiens
agcagttaataataa

SEQ ID NO: 46509 - DNA, 15 bp, Homo sapiens
aagcagttaataata

SEQ ID NO: 46510 - DNA, 15 bp, Homo sapiens
aaagcagttaataat

SEQ ID NO: 46511 - DNA, 15 bp, Homo sapiens
aaaagcagttaataa

SEQ ID NO: 46512 - DNA, 15 bp, Homo sapiens
aaaaagcagttaata

SEQ ID NO: 46513 - DNA, 15 bp, Homo sapiens
aaaaaagcagttaat

SEQ ID NO: 46514 - DNA, 15 bp, Homo sapiens
caaaaaagcagttaa

SEQ ID NO: 46515 - DNA, 15 bp, Homo sapiens
gcaaaaaagcagtta

SEQ ID NO: 46516 - DNA, 15 bp, Homo sapiens
cgcaaaaaagcagtt

SEQ ID NO: 46517 - DNA, 15 bp, Homo sapiens
acgcaaaaaagcagt

SEQ ID NO: 46518 - DNA, 15 bp, Homo sapiens
aacgcaaaaaagcag

SEQ ID NO: 46519 - DNA, 15 bp, Homo sapiens
caacgcaaaaaagca

SEQ ID NO: 46520 - DNA, 15 bp, Homo sapiens
tcaacgcaaaaaagc

SEQ ID NO: 46521 - DNA, 15 bp, Homo sapiens
atcaacgcaaaaaag

SEQ ID NO: 46522 - DNA, 15 bp, Homo sapiens
aatcaacgcaaaaaa

SEQ ID NO: 46523 - DNA, 15 bp, Homo sapiens
aaatcaacgcaaaaa

SEQ ID NO: 46524 - DNA, 15 bp, Homo sapiens
aaaatcaacgcaaaa

SEQ ID NO: 46525 - DNA, 15 bp, Homo sapiens
aaaaatcaacgcaaa

SEQ ID NO: 46526 - DNA, 15 bp, Homo sapiens
aaaaaatcaacgcaa

SEQ ID NO: 46527 - DNA, 15 bp, Homo sapiens
aaaaaaatcaacgca

SEQ ID NO: 46528 - DNA, 15 bp, Homo sapiens
aaaaaaaatcaacgc

SEQ ID NO: 46529 - DNA, 15 bp, Homo sapiens
aaaaaaaaatcaacg

SEQ ID NO: 46530 - DNA, 15 bp, Homo sapiens
gaaaaaaaaatcaac

SEQ ID NO: 46531 - DNA, 15 bp, Homo sapiens
agaaaaaaaaatcaa

SEQ ID NO: 46532 - DNA, 15 bp, Homo sapiens
cagaaaaaaaaatca

SEQ ID NO: 46533 - DNA, 15 bp, Homo sapiens
tcagaaaaaaaaatc

SEQ ID NO: 46534 - DNA, 15 bp, Homo sapiens
gtcagaaaaaaaaat

SEQ ID NO: 46535 - DNA, 15 bp, Homo sapiens
tgtcagaaaaaaaaa

SEQ ID NO: 46536 - DNA, 15 bp, Homo sapiens
ctgtcagaaaaaaaa

SEQ ID NO: 46537 - DNA, 15 bp, Homo sapiens
tctgtcagaaaaaaa

SEQ ID NO: 46538 - DNA, 15 bp, Homo sapiens
atctgtcagaaaaaa

SEQ ID NO: 46539 - DNA, 15 bp, Homo sapiens
tatctgtcagaaaaa

SEQ ID NO: 46540 - DNA, 15 bp, Homo sapiens
ttatctgtcagaaaa

SEQ ID NO: 46541 - DNA, 15 bp, Homo sapiens
attatctgtcagaaa

SEQ ID NO: 46542 - DNA, 15 bp, Homo sapiens
tattatctgtcagaa

SEQ ID NO: 46543 - DNA, 15 bp, Homo sapiens
ttattatctgtcaga

SEQ ID NO: 46544 - DNA, 15 bp, Homo sapiens
attattatctgtcag

SEQ ID NO: 46545 - DNA, 15 bp, Homo sapiens
cattattatctgtca

SEQ ID NO: 46546 - DNA, 15 bp, Homo sapiens
tcattattatctgtc

SEQ ID NO: 46547 - DNA, 15 bp, Homo sapiens
atcattattatctgt

SEQ ID NO: 46548 - DNA, 15 bp, Homo sapiens
tatcattattatctg

SEQ ID NO: 46549 - DNA, 15 bp, Homo sapiens
ttatcattattatct

SEQ ID NO: 46550 - DNA, 15 bp, Homo sapiens
cttatcattattatc

SEQ ID NO: 46551 - DNA, 15 bp, Homo sapiens
tcttatcattattat

SEQ ID NO: 46552 - DNA, 15 bp, Homo sapiens
ttcttatcattatta

SEQ ID NO: 46553 - DNA, 15 bp, Homo sapiens
tttcttatcattatt

SEQ ID NO: 46554 - DNA, 15 bp, Homo sapiens
atttcttatcattat

SEQ ID NO: 46555 - DNA, 15 bp, Homo sapiens
gatttcttatcatta

SEQ ID NO: 46556 - DNA, 15 bp, Homo sapiens
tgatttcttatcatt

SEQ ID NO: 46557 - DNA, 15 bp, Homo sapiens
ttgatttcttatcat

SEQ ID NO: 46558 - DNA, 15 bp, Homo sapiens
cttgatttcttatca

SEQ ID NO: 46559 - DNA, 15 bp, Homo sapiens
ccttgatttcttatc

SEQ ID NO: 46560 - DNA, 15 bp, Homo sapiens
accttgatttcttat

SEQ ID NO: 46561 - DNA, 15 bp, Homo sapiens
taccttgatttctta

SEQ ID NO: 46562 - DNA, 15 bp, Homo sapiens
ttaccttgatttctt

SEQ ID NO: 46563 - DNA, 15 bp, Homo sapiens
cttaccttgatttct

SEQ ID NO: 46564 - DNA, 15 bp, Homo sapiens
acttaccttgatttc

SEQ ID NO: 46565 - DNA, 15 bp, Homo sapiens
cacttaccttgattt

SEQ ID NO: 46566 - DNA, 15 bp, Homo sapiens
tcacttaccttgatt

SEQ ID NO: 46567 - DNA, 15 bp, Homo sapiens
gtcacttaccttgat

SEQ ID NO: 46568 - DNA, 15 bp, Homo sapiens
agtcacttaccttga

SEQ ID NO: 46569 - DNA, 15 bp, Homo sapiens
cagtcacttaccttg

SEQ ID NO: 46570 - DNA, 15 bp, Homo sapiens
tcagtcacttacctt

SEQ ID NO: 46571 - DNA, 15 bp, Homo sapiens
atcagtcacttacct

SEQ ID NO: 46572 - DNA, 15 bp, Homo sapiens
aatcagtcacttacc

SEQ ID NO: 46573 - DNA, 15 bp, Homo sapiens
aaatcagtcacttac

SEQ ID NO: 46574 - DNA, 15 bp, Homo sapiens
gaaatcagtcactta

SEQ ID NO: 46575 - DNA, 15 bp, Homo sapiens
tgaaatcagtcactt

SEQ ID NO: 46576 - DNA, 15 bp, Homo sapiens
ttgaaatcagtcact

SEQ ID NO: 46577 - DNA, 15 bp, Homo sapiens
gttgaaatcagtcac

SEQ ID NO: 46578 - DNA, 15 bp, Homo sapiens
tgttgaaatcagtca

SEQ ID NO: 46579 - DNA, 15 bp, Homo sapiens
ttgttgaaatcagtc

SEQ ID NO: 46580 - DNA, 15 bp, Homo sapiens
attgttgaaatcagt

SEQ ID NO: 46581 - DNA, 15 bp, Homo sapiens
cattgttgaaatcag

SEQ ID NO: 46582 - DNA, 15 bp, Homo sapiens
gcattgttgaaatca

SEQ ID NO: 46583 - DNA, 15 bp, Homo sapiens
tgcattgttgaaatc

SEQ ID NO: 46584 - DNA, 15 bp, Homo sapiens
ctgcattgttgaaat

SEQ ID NO: 46585 - DNA, 15 bp, Homo sapiens
gctgcattgttgaaa

SEQ ID NO: 46586 - DNA, 15 bp, Homo sapiens
tgctgcattgttgaa

SEQ ID NO: 46587 - DNA, 15 bp, Homo sapiens
atgctgcattgttga

SEQ ID NO: 46588 - DNA, 15 bp, Homo sapiens
gatgctgcattgttg

SEQ ID NO: 46589 - DNA, 15 bp, Homo sapiens
agatgctgcattgtt

SEQ ID NO: 46590 - DNA, 15 bp, Homo sapiens
aagatgctgcattgt

SEQ ID NO: 46591 - DNA, 15 bp, Homo sapiens
aaagatgctgcattg

SEQ ID NO: 46592 - DNA, 15 bp, Homo sapiens
aaaagatgctgcatt

SEQ ID NO: 46593 - DNA, 15 bp, Homo sapiens
gaaaagatgctgcat

SEQ ID NO: 46594 - DNA, 15 bp, Homo sapiens
agaaaagatgctgca

SEQ ID NO: 46595 - DNA, 15 bp, Homo sapiens
tagaaaagatgctgc

SEQ ID NO: 46596 - DNA, 15 bp, Homo sapiens
ctagaaaagatgctg

SEQ ID NO: 46597 - DNA, 15 bp, Homo sapiens
tctagaaaagatgct

SEQ ID NO: 46598 - DNA, 15 bp, Homo sapiens
ttctagaaaagatgc

SEQ ID NO: 46599 - DNA, 15 bp, Homo sapiens
attctagaaaagatg

SEQ ID NO: 46600 - DNA, 15 bp, Homo sapiens
tattctagaaaagat

SEQ ID NO: 46601 - DNA, 15 bp, Homo sapiens
ttattctagaaaaga

SEQ ID NO: 46602 - DNA, 15 bp, Homo sapiens
gttattctagaaaag

SEQ ID NO: 46603 - DNA, 15 bp, Homo sapiens
agttattctagaaaa

SEQ ID NO: 46604 - DNA, 15 bp, Homo sapiens
gagttattctagaaa

SEQ ID NO: 46605 - DNA, 15 bp, Homo sapiens
ggagttattctagaa

SEQ ID NO: 46606 - DNA, 15 bp, Homo sapiens
tggagttattctaga

SEQ ID NO: 46607 - DNA, 15 bp, Homo sapiens
atggagttattctag

SEQ ID NO: 46608 - DNA, 15 bp, Homo sapiens
tatggagttattcta

SEQ ID NO: 46609 - DNA, 15 bp, Homo sapiens
ttatggagttattct

SEQ ID NO: 46610 - DNA, 15 bp, Homo sapiens
attatggagttattc

SEQ ID NO: 46611 - DNA, 15 bp, Homo sapiens
tattatggagttatt

SEQ ID NO: 46612 - DNA, 15 bp, Homo sapiens
atattatggagttat

SEQ ID NO: 46613 - DNA, 15 bp, Homo sapiens
aatattatggagtta

SEQ ID NO: 46614 - DNA, 15 bp, Homo sapiens
gaatattatggagtt

SEQ ID NO: 46615 - DNA, 15 bp, Homo sapiens
tgaatattatggagt

SEQ ID NO: 46616 - DNA, 15 bp, Homo sapiens
atgaatattatggag

SEQ ID NO: 46617 - DNA, 15 bp, Homo sapiens
tatgaatattatgga

SEQ ID NO: 46618 - DNA, 15 bp, Homo sapiens
atatgaatattatgg

SEQ ID NO: 46619 - DNA, 15 bp, Homo sapiens
gatatgaatattatg

SEQ ID NO: 46620 - DNA, 15 bp, Homo sapiens
tgatatgaatattat

SEQ ID NO: 46621 - DNA, 15 bp, Homo sapiens
ttgatatgaatatta

SEQ ID NO: 46622 - DNA, 15 bp, Homo sapiens
tttgatatgaatatt

SEQ ID NO: 46623 - DNA, 15 bp, Homo sapiens
ctttgatatgaatat

SEQ ID NO: 46624 - DNA, 15 bp, Homo sapiens
cctttgatatgaata

SEQ ID NO: 46625 - DNA, 15 bp, Homo sapiens
gcctttgatatgaat

SEQ ID NO: 46626 - DNA, 15 bp, Homo sapiens
tgcctttgatatgaa

SEQ ID NO: 46627 - DNA, 15 bp, Homo sapiens
gtgcctttgatatga

SEQ ID NO: 46628 - DNA, 15 bp, Homo sapiens
tgtgcctttgatatg

SEQ ID NO: 46629 - DNA, 15 bp, Homo sapiens
ttgtgcctttgatat

SEQ ID NO: 46630 - DNA, 15 bp, Homo sapiens
tttgtgcctttgata

SEQ ID NO: 46631 - DNA, 15 bp, Homo sapiens
ctttgtgcctttgat

SEQ ID NO: 46632 - DNA, 15 bp, Homo sapiens
gctttgtgcctttga

SEQ ID NO: 46633 - DNA, 15 bp, Homo sapiens
tgctttgtgcctttg

SEQ ID NO: 46634 - DNA, 15 bp, Homo sapiens
ctgctttgtgccttt

SEQ ID NO: 46635 - DNA, 15 bp, Homo sapiens
tctgctttgtgcctt

SEQ ID NO: 46636 - DNA, 15 bp, Homo sapiens
ctctgctttgtgcct

SEQ ID NO: 46637 - DNA, 15 bp, Homo sapiens
tctctgctttgtgcc

SEQ ID NO: 46638 - DNA, 15 bp, Homo sapiens
ttctctgctttgtgc

SEQ ID NO: 46639 - DNA, 15 bp, Homo sapiens
attctctgctttgtg

SEQ ID NO: 46640 - DNA, 15 bp, Homo sapiens
tattctctgctttgt

SEQ ID NO: 46641 - DNA, 15 bp, Homo sapiens
gtattctctgctttg

SEQ ID NO: 46642 - DNA, 15 bp, Homo sapiens
agtattctctgcttt

SEQ ID NO: 46643 - DNA, 15 bp, Homo sapiens
aagtattctctgctt

SEQ ID NO: 46644 - DNA, 15 bp, Homo sapiens
aaagtattctctgct

SEQ ID NO: 46645 - DNA, 15 bp, Homo sapiens
gaaagtattctctgc

SEQ ID NO: 46646 - DNA, 15 bp, Homo sapiens
tgaaagtattctctg

SEQ ID NO: 46647 - DNA, 15 bp, Homo sapiens
atgaaagtattctct

SEQ ID NO: 46648 - DNA, 15 bp, Homo sapiens
catgaaagtattctc

SEQ ID NO: 46649 - DNA, 15 bp, Homo sapiens
gcatgaaagtattct

SEQ ID NO: 46650 - DNA, 15 bp, Homo sapiens
tgcatgaaagtattc

SEQ ID NO: 46651 - DNA, 15 bp, Homo sapiens
gtgcatgaaagtatt

SEQ ID NO: 46652 - DNA, 15 bp, Homo sapiens
tgtgcatgaaagtat

SEQ ID NO: 46653 - DNA, 15 bp, Homo sapiens
atgtgcatgaaagta

SEQ ID NO: 46654 - DNA, 15 bp, Homo sapiens
aatgtgcatgaaagt

SEQ ID NO: 46655 - DNA, 15 bp, Homo sapiens
caatgtgcatgaaag

SEQ ID NO: 46656 - DNA, 15 bp, Homo sapiens
gcaatgtgcatgaaa

SEQ ID NO: 46657 - DNA, 15 bp, Homo sapiens
tgcaatgtgcatgaa

SEQ ID NO: 46658 - DNA, 15 bp, Homo sapiens
gtgcaatgtgcatga

SEQ ID NO: 46659 - DNA, 15 bp, Homo sapiens
agtgcaatgtgcatg

SEQ ID NO: 46660 - DNA, 15 bp, Homo sapiens
aagtgcaatgtgcat

SEQ ID NO: 46661 - DNA, 15 bp, Homo sapiens
gaagtgcaatgtgca

SEQ ID NO: 46662 - DNA, 15 bp, Homo sapiens
tgaagtgcaatgtgc

SEQ ID NO: 46663 - DNA, 15 bp, Homo sapiens
atgaagtgcaatgtg

SEQ ID NO: 46664 - DNA, 15 bp, Homo sapiens
tatgaagtgcaatgt

SEQ ID NO: 46665 - DNA, 15 bp, Homo sapiens
atatgaagtgcaatg

SEQ ID NO: 46666 - DNA, 15 bp, Homo sapiens
tatatgaagtgcaat

SEQ ID NO: 46667 - DNA, 15 bp, Homo sapiens
ttatatgaagtgcaa

SEQ ID NO: 46668 - DNA, 15 bp, Homo sapiens
tttatatgaagtgca

SEQ ID NO: 46669 - DNA, 15 bp, Homo sapiens
ttttatatgaagtgc

SEQ ID NO: 46670 - DNA, 15 bp, Homo sapiens
attttatatgaagtg

SEQ ID NO: 46671 - DNA, 15 bp, Homo sapiens
tattttatatgaagt

SEQ ID NO: 46672 - DNA, 15 bp, Homo sapiens
ttattttatatgaag

SEQ ID NO: 46673 - DNA, 15 bp, Homo sapiens
attattttatatgaa

SEQ ID NO: 46674 - DNA, 15 bp, Homo sapiens
tattattttatatga

SEQ ID NO: 46675 - DNA, 15 bp, Homo sapiens
atattattttatatg

SEQ ID NO: 46676 - DNA, 15 bp, Homo sapiens
tatattattttatat

SEQ ID NO: 46677 - DNA, 15 bp, Homo sapiens
atatattattttata

SEQ ID NO: 46678 - DNA, 15 bp, Homo sapiens
tatatattattttat

SEQ ID NO: 46679 - DNA, 15 bp, Homo sapiens
gtatatattatttta

SEQ ID NO: 46680 - DNA, 15 bp, Homo sapiens
tgtatatattatttt

SEQ ID NO: 46681 - DNA, 15 bp, Homo sapiens
ttgtatatattattt

SEQ ID NO: 46682 - DNA, 15 bp, Homo sapiens
attgtatatattatt

SEQ ID NO: 46683 - DNA, 15 bp, Homo sapiens
gattgtatatattat

SEQ ID NO: 46684 - DNA, 15 bp, Homo sapiens
ggattgtatatatta

SEQ ID NO: 46685 - DNA, 15 bp, Homo sapiens
tggattgtatatatt

SEQ ID NO: 46686 - DNA, 15 bp, Homo sapiens
atggattgtatatat

SEQ ID NO: 46687 - DNA, 15 bp, Homo sapiens
aatggattgtatata

SEQ ID NO: 46688 - DNA, 15 bp, Homo sapiens
gaatggattgtatat

SEQ ID NO: 46689 - DNA, 15 bp, Homo sapiens
agaatggattgtata

SEQ ID NO: 46690 - DNA, 15 bp, Homo sapiens
aagaatggattgtat

SEQ ID NO: 46691 - DNA, 15 bp, Homo sapiens
aaagaatggattgta

SEQ ID NO: 46692 - DNA, 15 bp, Homo sapiens
aaaagaatggattgt

SEQ ID NO: 46693 - DNA, 15 bp, Homo sapiens
aaaaagaatggattg

SEQ ID NO: 46694 - DNA, 15 bp, Homo sapiens
gaaaaagaatggatt

SEQ ID NO: 46695 - DNA, 15 bp, Homo sapiens
agaaaaagaatggat

SEQ ID NO: 46696 - DNA, 15 bp, Homo sapiens
gagaaaaagaatgga

SEQ ID NO: 46697 - DNA, 15 bp, Homo sapiens
agagaaaaagaatgg

SEQ ID NO: 46698 - DNA, 15 bp, Homo sapiens
aagagaaaaagaatg

SEQ ID NO: 46699 - DNA, 15 bp, Homo sapiens
aaagagaaaaagaat

SEQ ID NO: 46700 - DNA, 15 bp, Homo sapiens
taaagagaaaaagaa

SEQ ID NO: 46701 - DNA, 15 bp, Homo sapiens
ttaaagagaaaaaga

SEQ ID NO: 46702 - DNA, 15 bp, Homo sapiens
tttaaagagaaaaag

SEQ ID NO: 46703 - DNA, 15 bp, Homo sapiens
ttttaaagagaaaaa

SEQ ID NO: 46704 - DNA, 15 bp, Homo sapiens
attttaaagagaaaa

SEQ ID NO: 46705 - DNA, 15 bp, Homo sapiens
tattttaaagagaaa

SEQ ID NO: 46706 - DNA, 15 bp, Homo sapiens
atattttaaagagaa

SEQ ID NO: 46707 - DNA, 15 bp, Homo sapiens
aatattttaaagaga

SEQ ID NO: 46708 - DNA, 15 bp, Homo sapiens
taatattttaaagag

SEQ ID NO: 46709 - DNA, 15 bp, Homo sapiens
gtaatattttaaaga

SEQ ID NO: 46710 - DNA, 15 bp, Homo sapiens
agtaatattttaaag

SEQ ID NO: 46711 - DNA, 15 bp, Homo sapiens
tagtaatattttaaa

SEQ ID NO: 46712 - DNA, 15 bp, Homo sapiens
atagtaatattttaa

SEQ ID NO: 46713 - DNA, 15 bp, Homo sapiens
tatagtaatatttta

SEQ ID NO: 46714 - DNA, 15 bp, Homo sapiens
ttatagtaatatttt

SEQ ID NO: 46715 - DNA, 15 bp, Homo sapiens
attatagtaatattt

SEQ ID NO: 46716 - DNA, 15 bp, Homo sapiens
aattatagtaatatt

SEQ ID NO: 46717 - DNA, 15 bp, Homo sapiens
aaattatagtaatat

SEQ ID NO: 46718 - DNA, 15 bp, Homo sapiens
caaattatagtaata

SEQ ID NO: 46719 - DNA, 15 bp, Homo sapiens
tcaaattatagtaat

SEQ ID NO: 46720 - DNA, 15 bp, Homo sapiens
atcaaattatagtaa

SEQ ID NO: 46721 - DNA, 15 bp, Homo sapiens
aatcaaattatagta

SEQ ID NO: 46722 - DNA, 15 bp, Homo sapiens
aaatcaaattatagt

SEQ ID NO: 46723 - DNA, 15 bp, Homo sapiens
aaaatcaaattatag

SEQ ID NO: 46724 - DNA, 15 bp, Homo sapiens
taaaatcaaattata

SEQ ID NO: 46725 - DNA, 15 bp, Homo sapiens
ttaaaatcaaattat

SEQ ID NO: 46726 - DNA, 15 bp, Homo sapiens
tttaaaatcaaatta

SEQ ID NO: 46727 - DNA, 15 bp, Homo sapiens
ttttaaaatcaaatt

SEQ ID NO: 46728 - DNA, 15 bp, Homo sapiens
tttttaaaatcaaat

SEQ ID NO: 46729 - DNA, 15 bp, Homo sapiens
gtttttaaaatcaaa

SEQ ID NO: 46730 - DNA, 15 bp, Homo sapiens
ggtttttaaaatcaa

SEQ ID NO: 46731 - DNA, 15 bp, Homo sapiens
aggtttttaaaatca

SEQ ID NO: 46732 - DNA, 15 bp, Homo sapiens
aaggtttttaaaatc

SEQ ID NO: 46733 - DNA, 15 bp, Homo sapiens
aaaggtttttaaaat

SEQ ID NO: 46734 - DNA, 15 bp, Homo sapiens
aaaaggtttttaaaa

SEQ ID NO: 46735 - DNA, 15 bp, Homo sapiens
caaaaggtttttaaa

SEQ ID NO: 46736 - DNA, 15 bp, Homo sapiens
ccaaaaggtttttaa

SEQ ID NO: 46737 - DNA, 15 bp, Homo sapiens
tccaaaaggttttta

SEQ ID NO: 46738 - DNA, 15 bp, Homo sapiens
ttccaaaaggttttt

SEQ ID NO: 46739 - DNA, 15 bp, Homo sapiens
attccaaaaggtttt

SEQ ID NO: 46740 - DNA, 15 bp, Homo sapiens
tattccaaaaggttt

SEQ ID NO: 46741 - DNA, 15 bp, Homo sapiens
atattccaaaaggtt

SEQ ID NO: 46742 - DNA, 15 bp, Homo sapiens
gatattccaaaaggt

SEQ ID NO: 46743 - DNA, 15 bp, Homo sapiens
ggatattccaaaagg

SEQ ID NO: 46744 - DNA, 15 bp, Homo sapiens
gggatattccaaaag

SEQ ID NO: 46745 - DNA, 15 bp, Homo sapiens
agggatattccaaaa

SEQ ID NO: 46746 - DNA, 15 bp, Homo sapiens
aagggatattccaaa

SEQ ID NO: 46747 - DNA, 15 bp, Homo sapiens
gaagggatattccaa

SEQ ID NO: 46748 - DNA, 15 bp, Homo sapiens
agaagggatattcca

SEQ ID NO: 46749 - DNA, 15 bp, Homo sapiens
tagaagggatattcc

SEQ ID NO: 46750 - DNA, 15 bp, Homo sapiens
ctagaagggatattc

SEQ ID NO: 46751 - DNA, 15 bp, Homo sapiens
cctagaagggatatt

SEQ ID NO: 46752 - DNA, 15 bp, Homo sapiens
acctagaagggatat

SEQ ID NO: 46753 - DNA, 15 bp, Homo sapiens
aacctagaagggata

SEQ ID NO: 46754 - DNA, 15 bp, Homo sapiens
taacctagaagggat

SEQ ID NO: 46755 - DNA, 15 bp, Homo sapiens
ctaacctagaaggga

SEQ ID NO: 46756 - DNA, 15 bp, Homo sapiens
cctaacctagaaggg

SEQ ID NO: 46757 - DNA, 15 bp, Homo sapiens
acctaacctagaagg

SEQ ID NO: 46758 - DNA, 15 bp, Homo sapiens
aacctaacctagaag

SEQ ID NO: 46759 - DNA, 15 bp, Homo sapiens
gaacctaacctagaa

SEQ ID NO: 46760 - DNA, 15 bp, Homo sapiens
tgaacctaacctaga

SEQ ID NO: 46761 - DNA, 15 bp, Homo sapiens
ttgaacctaacctag

SEQ ID NO: 46762 - DNA, 15 bp, Homo sapiens
tttgaacctaaccta

SEQ ID NO: 46763 - DNA, 15 bp, Homo sapiens
atttgaacctaacct

SEQ ID NO: 46764 - DNA, 15 bp, Homo sapiens
catttgaacctaacc

SEQ ID NO: 46765 - DNA, 15 bp, Homo sapiens
acatttgaacctaac

SEQ ID NO: 46766 - DNA, 15 bp, Homo sapiens
gacatttgaacctaa

SEQ ID NO: 46767 - DNA, 15 bp, Homo sapiens
ggacatttgaaccta

SEQ ID NO: 46768 - DNA, 15 bp, Homo sapiens
gggacatttgaacct

SEQ ID NO: 46769 - DNA, 15 bp, Homo sapiens
ggggacatttgaacc

SEQ ID NO: 46770 - DNA, 15 bp, Homo sapiens
aggggacatttgaac

SEQ ID NO: 46771 - DNA, 15 bp, Homo sapiens
gaggggacatttgaa

SEQ ID NO: 46772 - DNA, 15 bp, Homo sapiens
agaggggacatttga

SEQ ID NO: 46773 - DNA, 15 bp, Homo sapiens
cagaggggacatttg

SEQ ID NO: 46774 - DNA, 15 bp, Homo sapiens
acagaggggacattt

SEQ ID NO: 46775 - DNA, 15 bp, Homo sapiens
tacagaggggacatt

SEQ ID NO: 46776 - DNA, 15 bp, Homo sapiens
atacagaggggacat

SEQ ID NO: 46777 - DNA, 15 bp, Homo sapiens
aatacagaggggaca

SEQ ID NO: 46778 - DNA, 15 bp, Homo sapiens
gaatacagaggggac

SEQ ID NO: 46779 - DNA, 15 bp, Homo sapiens
tgaatacagagggga

SEQ ID NO: 46780 - DNA, 15 bp, Homo sapiens
ctgaatacagagggg

SEQ ID NO: 46781 - DNA, 15 bp, Homo sapiens
cctgaatacagaggg

SEQ ID NO: 46782 - DNA, 15 bp, Homo sapiens
tcctgaatacagagg

SEQ ID NO: 46783 - DNA, 15 bp, Homo sapiens
ttcctgaatacagag

SEQ ID NO: 46784 - DNA, 15 bp, Homo sapiens
attcctgaatacaga

SEQ ID NO: 46785 - DNA, 15 bp, Homo sapiens
cattcctgaatacag

SEQ ID NO: 46786 - DNA, 15 bp, Homo sapiens
ccattcctgaataca

SEQ ID NO: 46787 - DNA, 15 bp, Homo sapiens
gccattcctgaatac

SEQ ID NO: 46788 - DNA, 15 bp, Homo sapiens
tgccattcctgaata

SEQ ID NO: 46789 - DNA, 15 bp, Homo sapiens
gtgccattcctgaat

SEQ ID NO: 46790 - DNA, 15 bp, Homo sapiens
tgtgccattcctgaa

SEQ ID NO: 46791 - DNA, 15 bp, Homo sapiens
ctgtgccattcctga

SEQ ID NO: 46792 - DNA, 15 bp, Homo sapiens
tctgtgccattcctg

SEQ ID NO: 46793 - DNA, 15 bp, Homo sapiens
ttctgtgccattcct

SEQ ID NO: 46794 - DNA, 15 bp, Homo sapiens
gttctgtgccattcc

SEQ ID NO: 46795 - DNA, 15 bp, Homo sapiens
agttctgtgccattc

SEQ ID NO: 46796 - DNA, 15 bp, Homo sapiens
gagttctgtgccatt

SEQ ID NO: 46797 - DNA, 15 bp, Homo sapiens
ggagttctgtgccat

SEQ ID NO: 46798 - DNA, 15 bp, Homo sapiens
aggagttctgtgcca

SEQ ID NO: 46799 - DNA, 15 bp, Homo sapiens
caggagttctgtgcc

SEQ ID NO: 46800 - DNA, 15 bp, Homo sapiens
tcaggagttctgtgc

SEQ ID NO: 46801 - DNA, 15 bp, Homo sapiens
gtcaggagttctgtg

SEQ ID NO: 46802 - DNA, 15 bp, Homo sapiens
ggtcaggagttctgt

SEQ ID NO: 46803 - DNA, 15 bp, Homo sapiens
aggtcaggagttctg

SEQ ID NO: 46804 - DNA, 15 bp, Homo sapiens
taggtcaggagttct

SEQ ID NO: 46805 - DNA, 15 bp, Homo sapiens
ttaggtcaggagttc

SEQ ID NO: 46806 - DNA, 15 bp, Homo sapiens
cttaggtcaggagtt

SEQ ID NO: 46807 - DNA, 15 bp, Homo sapiens
tcttaggtcaggagt

SEQ ID NO: 46808 - DNA, 15 bp, Homo sapiens
ctcttaggtcaggag

SEQ ID NO: 46809 - DNA, 15 bp, Homo sapiens
cctcttaggtcagga

SEQ ID NO: 46810 - DNA, 15 bp, Homo sapiens
ccctcttaggtcagg

SEQ ID NO: 46811 - DNA, 15 bp, Homo sapiens
tccctcttaggtcag

SEQ ID NO: 46812 - DNA, 15 bp, Homo sapiens
ctccctcttaggtca

SEQ ID NO: 46813 - DNA, 15 bp, Homo sapiens
cctccctcttaggtc

SEQ ID NO: 46814 - DNA, 15 bp, Homo sapiens
tcctccctcttaggt

SEQ ID NO: 46815 - DNA, 15 bp, Homo sapiens
ctcctccctcttagg

SEQ ID NO: 46816 - DNA, 15 bp, Homo sapiens
cctcctccctcttag

SEQ ID NO: 46817 - DNA, 15 bp, Homo sapiens
tcctcctccctctta

SEQ ID NO: 46818 - DNA, 15 bp, Homo sapiens
ttcctcctccctctt

SEQ ID NO: 46819 - DNA, 15 bp, Homo sapiens
tttcctcctccctct

SEQ ID NO: 46820 - DNA, 15 bp, Homo sapiens
ttttcctcctccctc

SEQ ID NO: 46821 - DNA, 15 bp, Homo sapiens
cttttcctcctccct

SEQ ID NO: 46822 - DNA, 15 bp, Homo sapiens
acttttcctcctccc

SEQ ID NO: 46823 - DNA, 15 bp, Homo sapiens
aacttttcctcctcc

SEQ ID NO: 46824 - DNA, 15 bp, Homo sapiens
caacttttcctcctc

SEQ ID NO: 46825 - DNA, 15 bp, Homo sapiens
tcaacttttcctcct

SEQ ID NO: 46826 - DNA, 15 bp, Homo sapiens
ttcaacttttcctcc

SEQ ID NO: 46827 - DNA, 15 bp, Homo sapiens
gttcaacttttcctc

SEQ ID NO: 46828 - DNA, 15 bp, Homo sapiens
tgttcaacttttcct

SEQ ID NO: 46829 - DNA, 15 bp, Homo sapiens
ttgttcaacttttcc

SEQ ID NO: 46830 - DNA, 15 bp, Homo sapiens
gttgttcaacttttc

SEQ ID NO: 46831 - DNA, 15 bp, Homo sapiens
tgttgttcaactttt

SEQ ID NO: 46832 - DNA, 15 bp, Homo sapiens
ttgttgttcaacttt

SEQ ID NO: 46833 - DNA, 15 bp, Homo sapiens
cttgttgttcaactt

SEQ ID NO: 46834 - DNA, 15 bp, Homo sapiens
acttgttgttcaact

SEQ ID NO: 46835 - DNA, 15 bp, Homo sapiens
tacttgttgttcaac

SEQ ID NO: 46836 - DNA, 15 bp, Homo sapiens
atacttgttgttcaa

SEQ ID NO: 46837 - DNA, 15 bp, Homo sapiens
tatacttgttgttca

SEQ ID NO: 46838 - DNA, 15 bp, Homo sapiens
ttatacttgttgttc

SEQ ID NO: 46839 - DNA, 15 bp, Homo sapiens
attatacttgttgtt

SEQ ID NO: 46840 - DNA, 15 bp, Homo sapiens
aattatacttgttgt

SEQ ID NO: 46841 - DNA, 15 bp, Homo sapiens
aaattatacttgttg

SEQ ID NO: 46842 - DNA, 15 bp, Homo sapiens
gaaattatacttgtt

SEQ ID NO: 46843 - DNA, 15 bp, Homo sapiens
tgaaattatacttgt

SEQ ID NO: 46844 - DNA, 15 bp, Homo sapiens
atgaaattatacttg

SEQ ID NO: 46845 - DNA, 15 bp, Homo sapiens
catgaaattatactt

SEQ ID NO: 46846 - DNA, 15 bp, Homo sapiens
ccatgaaattatact

SEQ ID NO: 46847 - DNA, 15 bp, Homo sapiens
cccatgaaattatac

SEQ ID NO: 46848 - DNA, 15 bp, Homo sapiens
gcccatgaaattata

SEQ ID NO: 46849 - DNA, 15 bp, Homo sapiens
tgcccatgaaattat

SEQ ID NO: 46850 - DNA, 15 bp, Homo sapiens
atgcccatgaaatta

SEQ ID NO: 46851 - DNA, 15 bp, Homo sapiens
aatgcccatgaaatt

SEQ ID NO: 46852 - DNA, 15 bp, Homo sapiens
caatgcccatgaaat

SEQ ID NO: 46853 - DNA, 15 bp, Homo sapiens
ccaatgcccatgaaa

SEQ ID NO: 46854 - DNA, 15 bp, Homo sapiens
tccaatgcccatgaa

SEQ ID NO: 46855 - DNA, 15 bp, Homo sapiens
ctccaatgcccatga

SEQ ID NO: 46856 - DNA, 15 bp, Homo sapiens
tctccaatgcccatg

SEQ ID NO: 46857 - DNA, 15 bp, Homo sapiens
ctctccaatgcccat

SEQ ID NO: 46858 - DNA, 15 bp, Homo sapiens
cctctccaatgccca

SEQ ID NO: 46859 - DNA, 15 bp, Homo sapiens
acctctccaatgccc

SEQ ID NO: 46860 - DNA, 15 bp, Homo sapiens
gacctctccaatgcc

SEQ ID NO: 46861 - DNA, 15 bp, Homo sapiens
agacctctccaatgc

SEQ ID NO: 46862 - DNA, 15 bp, Homo sapiens
gagacctctccaatg

SEQ ID NO: 46863 - DNA, 15 bp, Homo sapiens
agagacctctccaat

SEQ ID NO: 46864 - DNA, 15 bp, Homo sapiens
tagagacctctccaa

SEQ ID NO: 46865 - DNA, 15 bp, Homo sapiens
ttagagacctctcca

SEQ ID NO: 46866 - DNA, 15 bp, Homo sapiens
tttagagacctctcc

SEQ ID NO: 46867 - DNA, 15 bp, Homo sapiens
gtttagagacctctc

SEQ ID NO: 46868 - DNA, 15 bp, Homo sapiens
ggtttagagacctct

SEQ ID NO: 46869 - DNA, 15 bp, Homo sapiens
gggtttagagacctc

SEQ ID NO: 46870 - DNA, 15 bp, Homo sapiens
ggggtttagagacct

SEQ ID NO: 46871 - DNA, 15 bp, Homo sapiens
tggggtttagagacc

SEQ ID NO: 46872 - DNA, 15 bp, Homo sapiens
ttggggtttagagac

SEQ ID NO: 46873 - DNA, 15 bp, Homo sapiens
tttggggtttagaga

SEQ ID NO: 46874 - DNA, 15 bp, Homo sapiens
atttggggtttagag

SEQ ID NO: 46875 - DNA, 15 bp, Homo sapiens
aatttggggtttaga

SEQ ID NO: 46876 - DNA, 15 bp, Homo sapiens
gaatttggggtttag

SEQ ID NO: 46877 - DNA, 15 bp, Homo sapiens
agaatttggggttta

SEQ ID NO: 46878 - DNA, 15 bp, Homo sapiens
aagaatttggggttt

SEQ ID NO: 46879 - DNA, 15 bp, Homo sapiens
caagaatttggggtt

SEQ ID NO: 46880 - DNA, 15 bp, Homo sapiens
gcaagaatttggggt

SEQ ID NO: 46881 - DNA, 15 bp, Homo sapiens
ggcaagaatttgggg

SEQ ID NO: 46882 - DNA, 15 bp, Homo sapiens
tggcaagaatttggg

SEQ ID NO: 46883 - DNA, 15 bp, Homo sapiens
gtggcaagaatttgg

SEQ ID NO: 46884 - DNA, 15 bp, Homo sapiens
tgtggcaagaatttg

SEQ ID NO: 46885 - DNA, 15 bp, Homo sapiens
ctgtggcaagaattt

SEQ ID NO: 46886 - DNA, 15 bp, Homo sapiens
cctgtggcaagaatt

SEQ ID NO: 46887 - DNA, 15 bp, Homo sapiens
gcctgtggcaagaat

SEQ ID NO: 46888 - DNA, 15 bp, Homo sapiens
tgcctgtggcaagaa

SEQ ID NO: 46889 - DNA, 15 bp, Homo sapiens
ttgcctgtggcaaga

SEQ ID NO: 46890 - DNA, 15 bp, Homo sapiens
tttgcctgtggcaag

SEQ ID NO: 46891 - DNA, 15 bp, Homo sapiens
ctttgcctgtggcaa

SEQ ID NO: 46892 - DNA, 15 bp, Homo sapiens
tctttgcctgtggca

SEQ ID NO: 46893 - DNA, 15 bp, Homo sapiens
ctctttgcctgtggc

SEQ ID NO: 46894 - DNA, 15 bp, Homo sapiens
actctttgcctgtgg

SEQ ID NO: 46895 - DNA, 15 bp, Homo sapiens
tactctttgcctgtg

SEQ ID NO: 46896 - DNA, 15 bp, Homo sapiens
ctactctttgcctgt

SEQ ID NO: 46897 - DNA, 15 bp, Homo sapiens
tctactctttgcctg

SEQ ID NO: 46898 - DNA, 15 bp, Homo sapiens
ctctactctttgcct

SEQ ID NO: 46899 - DNA, 15 bp, Homo sapiens
tctctactctttgcc

SEQ ID NO: 46900 - DNA, 15 bp, Homo sapiens
gtctctactctttgc

SEQ ID NO: 46901 - DNA, 15 bp, Homo sapiens
ggtctctactctttg

SEQ ID NO: 46902 - DNA, 15 bp, Homo sapiens
aggtctctactcttt

SEQ ID NO: 46903 - DNA, 15 bp, Homo sapiens
taggtctctactctt

SEQ ID NO: 46904 - DNA, 15 bp, Homo sapiens
ttaggtctctactct

SEQ ID NO: 46905 - DNA, 15 bp, Homo sapiens
tttaggtctctactc

SEQ ID NO: 46906 - DNA, 15 bp, Homo sapiens
ctttaggtctctact

SEQ ID NO: 46907 - DNA, 15 bp, Homo sapiens
actttaggtctctac

SEQ ID NO: 46908 - DNA, 15 bp, Homo sapiens
cactttaggtctcta

SEQ ID NO: 46909 - DNA, 15 bp, Homo sapiens
acactttaggtctct

SEQ ID NO: 46910 - DNA, 15 bp, Homo sapiens
gacactttaggtctc

SEQ ID NO: 46911 - DNA, 15 bp, Homo sapiens
tgacactttaggtct

SEQ ID NO: 46912 - DNA, 15 bp, Homo sapiens
atgacactttaggtc

SEQ ID NO: 46913 - DNA, 15 bp, Homo sapiens
aatgacactttaggt

SEQ ID NO: 46914 - DNA, 15 bp, Homo sapiens
taatgacactttagg

SEQ ID NO: 46915 - DNA, 15 bp, Homo sapiens
ataatgacactttag

SEQ ID NO: 46916 - DNA, 15 bp, Homo sapiens
aataatgacacttta

SEQ ID NO: 46917 - DNA, 15 bp, Homo sapiens
caataatgacacttt

SEQ ID NO: 46918 - DNA, 15 bp, Homo sapiens
gcaataatgacactt

SEQ ID NO: 46919 - DNA, 15 bp, Homo sapiens
tgcaataatgacact

SEQ ID NO: 46920 - DNA, 15 bp, Homo sapiens
atgcaataatgacac

SEQ ID NO: 46921 - DNA, 15 bp, Homo sapiens
tatgcaataatgaca

SEQ ID NO: 46922 - DNA, 15 bp, Homo sapiens
atatgcaataatgac

SEQ ID NO: 46923 - DNA, 15 bp, Homo sapiens
aatatgcaataatga

SEQ ID NO: 46924 - DNA, 15 bp, Homo sapiens
aaatatgcaataatg

SEQ ID NO: 46925 - DNA, 15 bp, Homo sapiens
gaaatatgcaataat

SEQ ID NO: 46926 - DNA, 15 bp, Homo sapiens
agaaatatgcaataa

SEQ ID NO: 46927 - DNA, 15 bp, Homo sapiens
cagaaatatgcaata

SEQ ID NO: 46928 - DNA, 15 bp, Homo sapiens
acagaaatatgcaat

SEQ ID NO: 46929 - DNA, 15 bp, Homo sapiens
aacagaaatatgcaa

SEQ ID NO: 46930 - DNA, 15 bp, Homo sapiens
gaacagaaatatgca

SEQ ID NO: 46931 - DNA, 15 bp, Homo sapiens
tgaacagaaatatgc

SEQ ID NO: 46932 - DNA, 15 bp, Homo sapiens
ctgaacagaaatatg

SEQ ID NO: 46933 - DNA, 15 bp, Homo sapiens
gctgaacagaaatat

SEQ ID NO: 46934 - DNA, 15 bp, Homo sapiens
agctgaacagaaata

SEQ ID NO: 46935 - DNA, 15 bp, Homo sapiens
tagctgaacagaaat

SEQ ID NO: 46936 - DNA, 15 bp, Homo sapiens
ttagctgaacagaaa

SEQ ID NO: 46937 - DNA, 15 bp, Homo sapiens
tttagctgaacagaa

SEQ ID NO: 46938 - DNA, 15 bp, Homo sapiens
ctttagctgaacaga

SEQ ID NO: 46939 - DNA, 15 bp, Homo sapiens
tctttagctgaacag

SEQ ID NO: 46940 - DNA, 15 bp, Homo sapiens
atctttagctgaaca

SEQ ID NO: 46941 - DNA, 15 bp, Homo sapiens
aatctttagctgaac

SEQ ID NO: 46942 - DNA, 15 bp, Homo sapiens
aaatctttagctgaa

SEQ ID NO: 46943 - DNA, 15 bp, Homo sapiens
aaaatctttagctga

SEQ ID NO: 46944 - DNA, 15 bp, Homo sapiens
caaaatctttagctg

SEQ ID NO: 46945 - DNA, 15 bp, Homo sapiens
tcaaaatctttagct

SEQ ID NO: 46946 - DNA, 15 bp, Homo sapiens
ttcaaaatctttagc

SEQ ID NO: 46947 - DNA, 15 bp, Homo sapiens
attcaaaatctttag

SEQ ID NO: 46948 - DNA, 15 bp, Homo sapiens
aattcaaaatcttta

SEQ ID NO: 46949 - DNA, 15 bp, Homo sapiens
gaattcaaaatcttt

SEQ ID NO: 46950 - DNA, 15 bp, Homo sapiens
agaattcaaaatctt

SEQ ID NO: 46951 - DNA, 15 bp, Homo sapiens
gagaattcaaaatct

SEQ ID NO: 46952 - DNA, 15 bp, Homo sapiens
tgagaattcaaaatc

SEQ ID NO: 46953 - DNA, 15 bp, Homo sapiens
atgagaattcaaaat

SEQ ID NO: 46954 - DNA, 15 bp, Homo sapiens
tatgagaattcaaaa

SEQ ID NO: 46955 - DNA, 15 bp, Homo sapiens
atatgagaattcaaa

SEQ ID NO: 46956 - DNA, 15 bp, Homo sapiens
tatatgagaattcaa

SEQ ID NO: 46957 - DNA, 15 bp, Homo sapiens
ctatatgagaattca

SEQ ID NO: 46958 - DNA, 15 bp, Homo sapiens
tctatatgagaattc

SEQ ID NO: 46959 - DNA, 15 bp, Homo sapiens
ttctatatgagaatt

SEQ ID NO: 46960 - DNA, 15 bp, Homo sapiens
gttctatatgagaat

SEQ ID NO: 46961 - DNA, 15 bp, Homo sapiens
tgttctatatgagaa

SEQ ID NO: 46962 - DNA, 15 bp, Homo sapiens
gtgttctatatgaga

SEQ ID NO: 46963 - DNA, 15 bp, Homo sapiens
tgtgttctatatgag

SEQ ID NO: 46964 - DNA, 15 bp, Homo sapiens
atgtgttctatatga

SEQ ID NO: 46965 - DNA, 15 bp, Homo sapiens
tatgtgttctatatg

SEQ ID NO: 46966 - DNA, 15 bp, Homo sapiens
atatgtgttctatat

SEQ ID NO: 46967 - DNA, 15 bp, Homo sapiens
gatatgtgttctata

SEQ ID NO: 46968 - DNA, 15 bp, Homo sapiens
tgatatgtgttctat

SEQ ID NO: 46969 - DNA, 15 bp, Homo sapiens
ctgatatgtgttcta

SEQ ID NO: 46970 - DNA, 15 bp, Homo sapiens
gctgatatgtgttct

SEQ ID NO: 46971 - DNA, 15 bp, Homo sapiens
agctgatatgtgttc

SEQ ID NO: 46972 - DNA, 15 bp, Homo sapiens
tagctgatatgtgtt

SEQ ID NO: 46973 - DNA, 15 bp, Homo sapiens
ttagctgatatgtgt

SEQ ID NO: 46974 - DNA, 15 bp, Homo sapiens
attagctgatatgtg

SEQ ID NO: 46975 - DNA, 15 bp, Homo sapiens
gattagctgatatgt

SEQ ID NO: 46976 - DNA, 15 bp, Homo sapiens
tgattagctgatatg

SEQ ID NO: 46977 - DNA, 15 bp, Homo sapiens
gtgattagctgatat

SEQ ID NO: 46978 - DNA, 15 bp, Homo sapiens
tgtgattagctgata

SEQ ID NO: 46979 - DNA, 15 bp, Homo sapiens
ctgtgattagctgat

SEQ ID NO: 46980 - DNA, 15 bp, Homo sapiens
actgtgattagctga

SEQ ID NO: 46981 - DNA, 15 bp, Homo sapiens
gactgtgattagctg

SEQ ID NO: 46982 - DNA, 15 bp, Homo sapiens
agactgtgattagct

SEQ ID NO: 46983 - DNA, 15 bp, Homo sapiens
cagactgtgattagc

SEQ ID NO: 46984 - DNA, 15 bp, Homo sapiens
ccagactgtgattag

SEQ ID NO: 46985 - DNA, 15 bp, Homo sapiens
accagactgtgatta

SEQ ID NO: 46986 - DNA, 15 bp, Homo sapiens
taccagactgtgatt

SEQ ID NO: 46987 - DNA, 15 bp, Homo sapiens
ataccagactgtgat

SEQ ID NO: 46988 - DNA, 15 bp, Homo sapiens
cataccagactgtga

SEQ ID NO: 46989 - DNA, 15 bp, Homo sapiens
tcataccagactgtg

SEQ ID NO: 46990 - DNA, 15 bp, Homo sapiens
ttcataccagactgt

SEQ ID NO: 46991 - DNA, 15 bp, Homo sapiens
cttcataccagactg

SEQ ID NO: 46992 - DNA, 15 bp, Homo sapiens
catgtaccctaaaac

SEQ ID NO: 46993 - DNA, 15 bp, Homo sapiens
acatgtaccctaaaa

SEQ ID NO: 46994 - DNA, 15 bp, Homo sapiens
cacatgtaccctaaa

SEQ ID NO: 46995 - DNA, 15 bp, Homo sapiens
gcacatgtaccctaa

SEQ ID NO: 46996 - DNA, 15 bp, Homo sapiens
tgcacatgtacccta

SEQ ID NO: 46997 - DNA, 15 bp, Homo sapiens
gtgcacatgtaccct

SEQ ID NO: 46998 - DNA, 15 bp, Homo sapiens
tgtgcacatgtaccc

SEQ ID NO: 46999 - DNA, 15 bp, Homo sapiens
ttgtgcacatgtacc

SEQ ID NO: 47000 - DNA, 15 bp, Homo sapiens
attgtgcacatgtac

SEQ ID NO: 47001 - DNA, 15 bp, Homo sapiens
cattgtgcacatgta

SEQ ID NO: 47002 - DNA, 15 bp, Homo sapiens
acattgtgcacatgt

SEQ ID NO: 47003 - DNA, 15 bp, Homo sapiens
cacattgtgcacatg

SEQ ID NO: 47004 - DNA, 15 bp, Homo sapiens
gcacattgtgcacat

SEQ ID NO: 47005 - DNA, 15 bp, Homo sapiens
tgcacattgtgcaca

SEQ ID NO: 47006 - DNA, 15 bp, Homo sapiens
ctgcacattgtgcac

SEQ ID NO: 47007 - DNA, 15 bp, Homo sapiens
cctgcacattgtgca

SEQ ID NO: 47008 - DNA, 15 bp, Homo sapiens
acctgcacattgtgc

SEQ ID NO: 47009 - DNA, 15 bp, Homo sapiens
aacctgcacattgtg

SEQ ID NO: 47010 - DNA, 15 bp, Homo sapiens
aaacctgcacattgt

SEQ ID NO: 47011 - DNA, 15 bp, Homo sapiens
caaacctgcacattg

SEQ ID NO: 47012 - DNA, 15 bp, Homo sapiens
gcaaacctgcacatt

SEQ ID NO: 47013 - DNA, 15 bp, Homo sapiens
agcaaacctgcacat

SEQ ID NO: 47014 - DNA, 15 bp, Homo sapiens
tagcaaacctgcaca

SEQ ID NO: 47015 - DNA, 15 bp, Homo sapiens
gtagcaaacctgcac

SEQ ID NO: 47016 - DNA, 15 bp, Homo sapiens
tgtagcaaacctgca

SEQ ID NO: 47017 - DNA, 15 bp, Homo sapiens
atgtagcaaacctgc

SEQ ID NO: 47018 - DNA, 15 bp, Homo sapiens
tatgtagcaaacctg

SEQ ID NO: 47019 - DNA, 15 bp, Homo sapiens
atatgtagcaaacct

SEQ ID NO: 47020 - DNA, 15 bp, Homo sapiens
tatatgtagcaaacc

SEQ ID NO: 47021 - DNA, 15 bp, Homo sapiens
atatatgtagcaaac

SEQ ID NO: 47022 - DNA, 15 bp, Homo sapiens
tatatatgtagcaaa

SEQ ID NO: 47023 - DNA, 15 bp, Homo sapiens
gtatatatgtagcaa

SEQ ID NO: 47024 - DNA, 15 bp, Homo sapiens
tgtatatatgtagca

SEQ ID NO: 47025 - DNA, 15 bp, Homo sapiens
gtgtatatatgtagc

SEQ ID NO: 47026 - DNA, 15 bp, Homo sapiens
tgtgtatatatgtag

SEQ ID NO: 47027 - DNA, 15 bp, Homo sapiens
atgtgtatatatgta

SEQ ID NO: 47028 - DNA, 15 bp, Homo sapiens
catgtgtatatatgt

SEQ ID NO: 47029 - DNA, 15 bp, Homo sapiens
acatgtgtatatatg

SEQ ID NO: 47030 - DNA, 15 bp, Homo sapiens
tacatgtgtatatat

SEQ ID NO: 47031 - DNA, 15 bp, Homo sapiens
gtacatgtgtatata

SEQ ID NO: 47032 - DNA, 15 bp, Homo sapiens
ggtacatgtgtatat

SEQ ID NO: 47033 - DNA, 15 bp, Homo sapiens
tggtacatgtgtata

SEQ ID NO: 47034 - DNA, 15 bp, Homo sapiens
atggtacatgtgtat

SEQ ID NO: 47035 - DNA, 15 bp, Homo sapiens
catggtacatgtgta

SEQ ID NO: 47036 - DNA, 15 bp, Homo sapiens
acatggtacatgtgt

SEQ ID NO: 47037 - DNA, 15 bp, Homo sapiens
aacatggtacatgtg

SEQ ID NO: 47038 - DNA, 15 bp, Homo sapiens
caacatggtacatgt

SEQ ID NO: 47039 - DNA, 15 bp, Homo sapiens
ccaacatggtacatg

SEQ ID NO: 47040 - DNA, 15 bp, Homo sapiens
accaacatggtacat

SEQ ID NO: 47041 - DNA, 15 bp, Homo sapiens
caccaacatggtaca

SEQ ID NO: 47042 - DNA, 15 bp, Homo sapiens
acaccaacatggtac

SEQ ID NO: 47043 - DNA, 15 bp, Homo sapiens
cacaccaacatggta

SEQ ID NO: 47044 - DNA, 15 bp, Homo sapiens
gcacaccaacatggt

SEQ ID NO: 47045 - DNA, 15 bp, Homo sapiens
agcacaccaacatgg

SEQ ID NO: 47046 - DNA, 15 bp, Homo sapiens
cagcacaccaacatg

SEQ ID NO: 47047 - DNA, 15 bp, Homo sapiens
gcagcacaccaacat

SEQ ID NO: 47048 - DNA, 15 bp, Homo sapiens
tgcagcacaccaaca

SEQ ID NO: 47049 - DNA, 15 bp, Homo sapiens
gtgcagcacaccaac

SEQ ID NO: 47050 - DNA, 15 bp, Homo sapiens
ggtgcagcacaccaa

SEQ ID NO: 47051 - DNA, 15 bp, Homo sapiens
gggtgcagcacacca

SEQ ID NO: 47052 - DNA, 15 bp, Homo sapiens
tgggtgcagcacacc

SEQ ID NO: 47053 - DNA, 15 bp, Homo sapiens
atgggtgcagcacac

SEQ ID NO: 47054 - DNA, 15 bp, Homo sapiens
gatgggtgcagcaca

SEQ ID NO: 47055 - DNA, 15 bp, Homo sapiens
tgatgggtgcagcac

SEQ ID NO: 47056 - DNA, 15 bp, Homo sapiens
ttgatgggtgcagca

SEQ ID NO: 47057 - DNA, 15 bp, Homo sapiens
gttgatgggtgcagc

SEQ ID NO: 47058 - DNA, 15 bp, Homo sapiens
agttgatgggtgcag

SEQ ID NO: 47059 - DNA, 15 bp, Homo sapiens
gagttgatgggtgca

SEQ ID NO: 47060 - DNA, 15 bp, Homo sapiens
cgagttgatgggtgc

SEQ ID NO: 47061 - DNA, 15 bp, Homo sapiens
acgagttgatgggtg

SEQ ID NO: 47062 - DNA, 15 bp, Homo sapiens
gacgagttgatgggt

SEQ ID NO: 47063 - DNA, 15 bp, Homo sapiens
tgacgagttgatggg

SEQ ID NO: 47064 - DNA, 15 bp, Homo sapiens
atgacgagttgatgg

SEQ ID NO: 47065 - DNA, 15 bp, Homo sapiens
aatgacgagttgatg

SEQ ID NO: 47066 - DNA, 15 bp, Homo sapiens
aaatgacgagttgat

SEQ ID NO: 47067 - DNA, 15 bp, Homo sapiens
taaatgacgagttga

SEQ ID NO: 47068 - DNA, 15 bp, Homo sapiens
ttaaatgacgagttg

SEQ ID NO: 47069 - DNA, 15 bp, Homo sapiens
gttaaatgacgagtt

SEQ ID NO: 47070 - DNA, 15 bp, Homo sapiens
tgttaaatgacgagt

SEQ ID NO: 47071 - DNA, 15 bp, Homo sapiens
atgttaaatgacgag

SEQ ID NO: 47072 - DNA, 15 bp, Homo sapiens
aatgttaaatgacga

SEQ ID NO: 47073 - DNA, 15 bp, Homo sapiens
taatgttaaatgacg

SEQ ID NO: 47074 - DNA, 15 bp, Homo sapiens
ctaatgttaaatgac

SEQ ID NO: 47075 - DNA, 15 bp, Homo sapiens
cctaatgttaaatga

SEQ ID NO: 47076 - DNA, 15 bp, Homo sapiens
acctaatgttaaatg

SEQ ID NO: 47077 - DNA, 15 bp, Homo sapiens
tacctaatgttaaat

SEQ ID NO: 47078 - DNA, 15 bp, Homo sapiens
atacctaatgttaaa

SEQ ID NO: 47079 - DNA, 15 bp, Homo sapiens
aatacctaatgttaa

SEQ ID NO: 47080 - DNA, 15 bp, Homo sapiens
aaatacctaatgtta

SEQ ID NO: 47081 - DNA, 15 bp, Homo sapiens
gaaatacctaatgtt

SEQ ID NO: 47082 - DNA, 15 bp, Homo sapiens
agaaatacctaatgt

SEQ ID NO: 47083 - DNA, 15 bp, Homo sapiens
gagaaatacctaatg

SEQ ID NO: 47084 - DNA, 15 bp, Homo sapiens
ggagaaatacctaat

SEQ ID NO: 47085 - DNA, 15 bp, Homo sapiens
aggagaaatacctaa

SEQ ID NO: 47086 - DNA, 15 bp, Homo sapiens
caggagaaataccta

SEQ ID NO: 47087 - DNA, 15 bp, Homo sapiens
tcaggagaaatacct

SEQ ID NO: 47088 - DNA, 15 bp, Homo sapiens
atcaggagaaatacc

SEQ ID NO: 47089 - DNA, 15 bp, Homo sapiens
catcaggagaaatac

SEQ ID NO: 47090 - DNA, 15 bp, Homo sapiens
gcatcaggagaaata

SEQ ID NO: 47091 - DNA, 15 bp, Homo sapiens
agcatcaggagaaat

SEQ ID NO: 47092 - DNA, 15 bp, Homo sapiens
tagcatcaggagaaa

SEQ ID NO: 47093 - DNA, 15 bp, Homo sapiens
atagcatcaggagaa

SEQ ID NO: 47094 - DNA, 15 bp, Homo sapiens
gatagcatcaggaga

SEQ ID NO: 47095 - DNA, 15 bp, Homo sapiens
ggatagcatcaggag

SEQ ID NO: 47096 - DNA, 15 bp, Homo sapiens
gggatagcatcagga

SEQ ID NO: 47097 - DNA, 15 bp, Homo sapiens
agggatagcatcagg

SEQ ID NO: 47098 - DNA, 15 bp, Homo sapiens
gagggatagcatcag

SEQ ID NO: 47099 - DNA, 15 bp, Homo sapiens
ggagggatagcatca

SEQ ID NO: 47100 - DNA, 15 bp, Homo sapiens
gggagggatagcatc

SEQ ID NO: 47101 - DNA, 15 bp, Homo sapiens
ggggagggatagcat

SEQ ID NO: 47102 - DNA, 15 bp, Homo sapiens
gggggagggatagca

SEQ ID NO: 47103 - DNA, 15 bp, Homo sapiens
ggggggagggatagc

SEQ ID NO: 47104 - DNA, 15 bp, Homo sapiens
aggggggagggatag

SEQ ID NO: 47105 - DNA, 15 bp, Homo sapiens
gaggggggagggata

SEQ ID NO: 47106 - DNA, 15 bp, Homo sapiens
ggaggggggagggat

SEQ ID NO: 47107 - DNA, 15 bp, Homo sapiens
gggaggggggaggga

SEQ ID NO: 47108 - DNA, 15 bp, Homo sapiens
ggggaggggggaggg

SEQ ID NO: 47109 - DNA, 15 bp, Homo sapiens
gggggaggggggagg

SEQ ID NO: 47110 - DNA, 15 bp, Homo sapiens
ggggggaggggggag

SEQ ID NO: 47111 - DNA, 15 bp, Homo sapiens
tggggggagggggga

SEQ ID NO: 47112 - DNA, 15 bp, Homo sapiens
gtggggggagggggg

SEQ ID NO: 47113 - DNA, 15 bp, Homo sapiens
ggtggggggaggggg

SEQ ID NO: 47114 - DNA, 15 bp, Homo sapiens
gggtggggggagggg

SEQ ID NO: 47115 - DNA, 15 bp, Homo sapiens
ggggtggggggaggg

SEQ ID NO: 47116 - DNA, 15 bp, Homo sapiens
tggggtggggggagg

SEQ ID NO: 47117 - DNA, 15 bp, Homo sapiens
gtggggtggggggag

SEQ ID NO: 47118 - DNA, 15 bp, Homo sapiens
tgtggggtgggggga

SEQ ID NO: 47119 - DNA, 15 bp, Homo sapiens
ttgtggggtgggggg

SEQ ID NO: 47120 - DNA, 15 bp, Homo sapiens
gttgtggggtggggg

SEQ ID NO: 47121 - DNA, 15 bp, Homo sapiens
tgttgtggggtgggg

SEQ ID NO: 47122 - DNA, 15 bp, Homo sapiens
ctgttgtggggtggg

SEQ ID NO: 47123 - DNA, 15 bp, Homo sapiens
cctgttgtggggtgg

SEQ ID NO: 47124 - DNA, 15 bp, Homo sapiens
gcctgttgtggggtg

SEQ ID NO: 47125 - DNA, 15 bp, Homo sapiens
ggcctgttgtggggt

SEQ ID NO: 47126 - DNA, 15 bp, Homo sapiens
gggcctgttgtgggg

SEQ ID NO: 47127 - DNA, 15 bp, Homo sapiens
ggggcctgttgtggg

SEQ ID NO: 47128 - DNA, 15 bp, Homo sapiens
tggggcctgttgtgg

SEQ ID NO: 47129 - DNA, 15 bp, Homo sapiens
ctggggcctgttgtg

SEQ ID NO: 47130 - DNA, 15 bp, Homo sapiens
actggggcctgttgt

SEQ ID NO: 47131 - DNA, 15 bp, Homo sapiens
cactggggcctgttg

SEQ ID NO: 47132 - DNA, 15 bp, Homo sapiens
acactggggcctgtt

SEQ ID NO: 47133 - DNA, 15 bp, Homo sapiens
cacactggggcctgt

SEQ ID NO: 47134 - DNA, 15 bp, Homo sapiens
acacactggggcctg

SEQ ID NO: 47135 - DNA, 15 bp, Homo sapiens
tcacacactggggcc

SEQ ID NO: 47136 - DNA, 15 bp, Homo sapiens
atcacacactggggc

SEQ ID NO: 47137 - DNA, 15 bp, Homo sapiens
catcacacactgggg

SEQ ID NO: 47138 - DNA, 15 bp, Homo sapiens
acatcacacactggg

SEQ ID NO: 47139 - DNA, 15 bp, Homo sapiens
aacatcacacactgg

SEQ ID NO: 47140 - DNA, 15 bp, Homo sapiens
gaacatcacacactg

SEQ ID NO: 47141 - DNA, 15 bp, Homo sapiens
ggaacatcacacact

SEQ ID NO: 47142 - DNA, 15 bp, Homo sapiens
gggaacatcacacac

SEQ ID NO: 47143 - DNA, 15 bp, Homo sapiens
ggggaacatcacaca

SEQ ID NO: 47144 - DNA, 15 bp, Homo sapiens
aggggaacatcacac

SEQ ID NO: 47145 - DNA, 15 bp, Homo sapiens
aaggggaacatcaca

SEQ ID NO: 47146 - DNA, 15 bp, Homo sapiens
gaaggggaacatcac

SEQ ID NO: 47147 - DNA, 15 bp, Homo sapiens
ggaaggggaacatca

SEQ ID NO: 47148 - DNA, 15 bp, Homo sapiens
aggaaggggaacatc

SEQ ID NO: 47149 - DNA, 15 bp, Homo sapiens
caggaaggggaacat

SEQ ID NO: 47150 - DNA, 15 bp, Homo sapiens
acaggaaggggaaca

SEQ ID NO: 47151 - DNA, 15 bp, Homo sapiens
cacaggaaggggaac

SEQ ID NO: 47152 - DNA, 15 bp, Homo sapiens
acacaggaaggggaa

SEQ ID NO: 47153 - DNA, 15 bp, Homo sapiens
gacacaggaagggga

SEQ ID NO: 47154 - DNA, 15 bp, Homo sapiens
ggacacaggaagggg

SEQ ID NO: 47155 - DNA, 15 bp, Homo sapiens
tggacacaggaaggg

SEQ ID NO: 47156 - DNA, 15 bp, Homo sapiens
atggacacaggaagg

SEQ ID NO: 47157 - DNA, 15 bp, Homo sapiens
catggacacaggaag

SEQ ID NO: 47158 - DNA, 15 bp, Homo sapiens
acatggacacaggaa

SEQ ID NO: 47159 - DNA, 15 bp, Homo sapiens
cacatggacacagga

SEQ ID NO: 47160 - DNA, 15 bp, Homo sapiens
acacatggacacagg

SEQ ID NO: 47161 - DNA, 15 bp, Homo sapiens
aacacatggacacag

SEQ ID NO: 47162 - DNA, 15 bp, Homo sapiens
gaacacatggacaca

SEQ ID NO: 47163 - DNA, 15 bp, Homo sapiens
agaacacatggacac

SEQ ID NO: 47164 - DNA, 15 bp, Homo sapiens
gagaacacatggaca

SEQ ID NO: 47165 - DNA, 15 bp, Homo sapiens
tgagaacacatggac

SEQ ID NO: 47166 - DNA, 15 bp, Homo sapiens
atgagaacacatgga

SEQ ID NO: 47167 - DNA, 15 bp, Homo sapiens
aatgagaacacatgg

SEQ ID NO: 47168 - DNA, 15 bp, Homo sapiens
caatgagaacacatg

SEQ ID NO: 47169 - DNA, 15 bp, Homo sapiens
acaatgagaacacat

SEQ ID NO: 47170 - DNA, 15 bp, Homo sapiens
aacaatgagaacaca

SEQ ID NO: 47171 - DNA, 15 bp, Homo sapiens
gaacaatgagaacac

SEQ ID NO: 47172 - DNA, 15 bp, Homo sapiens
tgaacaatgagaaca

SEQ ID NO: 47173 - DNA, 15 bp, Homo sapiens
ttgaacaatgagaac

SEQ ID NO: 47174 - DNA, 15 bp, Homo sapiens
attgaacaatgagaa

SEQ ID NO: 47175 - DNA, 15 bp, Homo sapiens
aattgaacaatgaga

SEQ ID NO: 47176 - DNA, 15 bp, Homo sapiens
gaattgaacaatgag

SEQ ID NO: 47177 - DNA, 15 bp, Homo sapiens
ggaattgaacaatga

SEQ ID NO: 47178 - DNA, 15 bp, Homo sapiens
gggaattgaacaatg

SEQ ID NO: 47179 - DNA, 15 bp, Homo sapiens
tgggaattgaacaat

SEQ ID NO: 47180 - DNA, 15 bp, Homo sapiens
gtgggaattgaacaa

SEQ ID NO: 47181 - DNA, 15 bp, Homo sapiens
ggtgggaattgaaca

SEQ ID NO: 47182 - DNA, 15 bp, Homo sapiens
aggtgggaattgaac

SEQ ID NO: 47183 - DNA, 15 bp, Homo sapiens
taggtgggaattgaa

SEQ ID NO: 47184 - DNA, 15 bp, Homo sapiens
ataggtgggaattga

SEQ ID NO: 47185 - DNA, 15 bp, Homo sapiens
cataggtgggaattg

SEQ ID NO: 47186 - DNA, 15 bp, Homo sapiens
tcataggtgggaatt

SEQ ID NO: 47187 - DNA, 15 bp, Homo sapiens
ctcataggtgggaat

SEQ ID NO: 47188 - DNA, 15 bp, Homo sapiens
actcataggtgggaa

SEQ ID NO: 47189 - DNA, 15 bp, Homo sapiens
cactcataggtggga

SEQ ID NO: 47190 - DNA, 15 bp, Homo sapiens
tcactcataggtggg

SEQ ID NO: 47191 - DNA, 15 bp, Homo sapiens
ctcactcataggtgg

SEQ ID NO: 47192 - DNA, 15 bp, Homo sapiens
tctcactcataggtg

SEQ ID NO: 47193 - DNA, 15 bp, Homo sapiens
ttctcactcataggt

SEQ ID NO: 47194 - DNA, 15 bp, Homo sapiens
gttctcactcatagg

SEQ ID NO: 47195 - DNA, 15 bp, Homo sapiens
tgttctcactcatag

SEQ ID NO: 47196 - DNA, 15 bp, Homo sapiens
atgttctcactcata

SEQ ID NO: 47197 - DNA, 15 bp, Homo sapiens
catgttctcactcat

SEQ ID NO: 47198 - DNA, 15 bp, Homo sapiens
acatgttctcactca

SEQ ID NO: 47199 - DNA, 15 bp, Homo sapiens
tacatgttctcactc

SEQ ID NO: 47200 - DNA, 15 bp, Homo sapiens
ctacatgttctcact

SEQ ID NO: 47201 - DNA, 15 bp, Homo sapiens
actacatgttctcac

SEQ ID NO: 47202 - DNA, 15 bp, Homo sapiens
cactacatgttctca

SEQ ID NO: 47203 - DNA, 15 bp, Homo sapiens
acactacatgttctc

SEQ ID NO: 47204 - DNA, 15 bp, Homo sapiens
aacactacatgttct

SEQ ID NO: 47205 - DNA, 15 bp, Homo sapiens
aaacactacatgttc

SEQ ID NO: 47206 - DNA, 15 bp, Homo sapiens
caaacactacatgtt

SEQ ID NO: 47207 - DNA, 15 bp, Homo sapiens
ccaaacactacatgt

SEQ ID NO: 47208 - DNA, 15 bp, Homo sapiens
accaaacactacatg

SEQ ID NO: 47209 - DNA, 15 bp, Homo sapiens
aaccaaacactacat

SEQ ID NO: 47210 - DNA, 15 bp, Homo sapiens
aaaccaaacactaca

SEQ ID NO: 47211 - DNA, 15 bp, Homo sapiens
aaaaccaaacactac

SEQ ID NO: 47212 - DNA, 15 bp, Homo sapiens
aaaaaccaaacacta

SEQ ID NO: 47213 - DNA, 15 bp, Homo sapiens
aaaaaaccaaacact

SEQ ID NO: 47214 - DNA, 15 bp, Homo sapiens
caaaaaaccaaacac

SEQ ID NO: 47215 - DNA, 15 bp, Homo sapiens
acaaaaaaccaaaca

SEQ ID NO: 47216 - DNA, 15 bp, Homo sapiens
gacaaaaaaccaaac

SEQ ID NO: 47217 - DNA, 15 bp, Homo sapiens
ggacaaaaaaccaaa

SEQ ID NO: 47218 - DNA, 15 bp, Homo sapiens
aggacaaaaaaccaa

SEQ ID NO: 47219 - DNA, 15 bp, Homo sapiens
gaggacaaaaaacca

SEQ ID NO: 47220 - DNA, 15 bp, Homo sapiens
cgaggacaaaaaacc

SEQ ID NO: 47221 - DNA, 15 bp, Homo sapiens
gcgaggacaaaaaac

SEQ ID NO: 47222 - DNA, 15 bp, Homo sapiens
cgcgaggacaaaaaa

SEQ ID NO: 47223 - DNA, 15 bp, Homo sapiens
tcgcgaggacaaaaa

SEQ ID NO: 47224 - DNA, 15 bp, Homo sapiens
atcgcgaggacaaaa

SEQ ID NO: 47225 - DNA, 15 bp, Homo sapiens
tatcgcgaggacaaa

SEQ ID NO: 47226 - DNA, 15 bp, Homo sapiens
ctatcgcgaggacaa

SEQ ID NO: 47227 - DNA, 15 bp, Homo sapiens
actatcgcgaggaca

SEQ ID NO: 47228 - DNA, 15 bp, Homo sapiens
aactatcgcgaggac

SEQ ID NO: 47229 - DNA, 15 bp, Homo sapiens
aaactatcgcgagga

SEQ ID NO: 47230 - DNA, 15 bp, Homo sapiens
caaactatcgcgagg

SEQ ID NO: 47231 - DNA, 15 bp, Homo sapiens
gcaaactatcgcgag

SEQ ID NO: 47232 - DNA, 15 bp, Homo sapiens
agcaaactatcgcga

SEQ ID NO: 47233 - DNA, 15 bp, Homo sapiens
cagcaaactatcgcg

SEQ ID NO: 47234 - DNA, 15 bp, Homo sapiens
tcagcaaactatcgc

SEQ ID NO: 47235 - DNA, 15 bp, Homo sapiens
ctcagcaaactatcg

SEQ ID NO: 47236 - DNA, 15 bp, Homo sapiens
tctcagcaaactatc

SEQ ID NO: 47237 - DNA, 15 bp, Homo sapiens
ttctcagcaaactat

SEQ ID NO: 47238 - DNA, 15 bp, Homo sapiens
attctcagcaaacta

SEQ ID NO: 47239 - DNA, 15 bp, Homo sapiens
cattctcagcaaact

SEQ ID NO: 47240 - DNA, 15 bp, Homo sapiens
tcattctcagcaaac

SEQ ID NO: 47241 - DNA, 15 bp, Homo sapiens
atcattctcagcaaa

SEQ ID NO: 47242 - DNA, 15 bp, Homo sapiens
catcattctcagcaa

SEQ ID NO: 47243 - DNA, 15 bp, Homo sapiens
ccatcattctcagca

SEQ ID NO: 47244 - DNA, 15 bp, Homo sapiens
accatcattctcagc

SEQ ID NO: 47245 - DNA, 15 bp, Homo sapiens
aaccatcattctcag

SEQ ID NO: 47246 - DNA, 15 bp, Homo sapiens
aaaccatcattctca

SEQ ID NO: 47247 - DNA, 15 bp, Homo sapiens
gaaaccatcattctc

SEQ ID NO: 47248 - DNA, 15 bp, Homo sapiens
ggaaaccatcattct

SEQ ID NO: 47249 - DNA, 15 bp, Homo sapiens
tggaaaccatcattc

SEQ ID NO: 47250 - DNA, 15 bp, Homo sapiens
ctggaaaccatcatt

SEQ ID NO: 47251 - DNA, 15 bp, Homo sapiens
actggaaaccatcat

SEQ ID NO: 47252 - DNA, 15 bp, Homo sapiens
aactggaaaccatca

SEQ ID NO: 47253 - DNA, 15 bp, Homo sapiens
aaactggaaaccatc

SEQ ID NO: 47254 - DNA, 15 bp, Homo sapiens
gaaactggaaaccat

SEQ ID NO: 47255 - DNA, 15 bp, Homo sapiens
tgaaactggaaacca

SEQ ID NO: 47256 - DNA, 15 bp, Homo sapiens
atgaaactggaaacc

SEQ ID NO: 47257 - DNA, 15 bp, Homo sapiens
gatgaaactggaaac

SEQ ID NO: 47258 - DNA, 15 bp, Homo sapiens
ggatgaaactggaaa

SEQ ID NO: 47259 - DNA, 15 bp, Homo sapiens
tggatgaaactggaa

SEQ ID NO: 47260 - DNA, 15 bp, Homo sapiens
atggatgaaactgga

SEQ ID NO: 47261 - DNA, 15 bp, Homo sapiens
catggatgaaactgg

SEQ ID NO: 47262 - DNA, 15 bp, Homo sapiens
acatggatgaaactg

SEQ ID NO: 47263 - DNA, 15 bp, Homo sapiens
gacatggatgaaact

SEQ ID NO: 47264 - DNA, 15 bp, Homo sapiens
ggacatggatgaaac

SEQ ID NO: 47265 - DNA, 15 bp, Homo sapiens
gggacatggatgaaa

SEQ ID NO: 47266 - DNA, 15 bp, Homo sapiens
agggacatggatgaa

SEQ ID NO: 47267 - DNA, 15 bp, Homo sapiens
tagggacatggatga

SEQ ID NO: 47268 - DNA, 15 bp, Homo sapiens
gtagggacatggatg

SEQ ID NO: 47269 - DNA, 15 bp, Homo sapiens
tgtagggacatggat

SEQ ID NO: 47270 - DNA, 15 bp, Homo sapiens
ttgtagggacatgga

SEQ ID NO: 47271 - DNA, 15 bp, Homo sapiens
tttgtagggacatgg

SEQ ID NO: 47272 - DNA, 15 bp, Homo sapiens
ctttgtagggacatg

SEQ ID NO: 47273 - DNA, 15 bp, Homo sapiens
cctttgtagggacat

SEQ ID NO: 47274 - DNA, 15 bp, Homo sapiens
tcctttgtagggaca

SEQ ID NO: 47275 - DNA, 15 bp, Homo sapiens
gtcctttgtagggac

SEQ ID NO: 47276 - DNA, 15 bp, Homo sapiens
tgtcctttgtaggga

SEQ ID NO: 47277 - DNA, 15 bp, Homo sapiens
atgtcctttgtaggg

SEQ ID NO: 47278 - DNA, 15 bp, Homo sapiens
catgtcctttgtagg

SEQ ID NO: 47279 - DNA, 15 bp, Homo sapiens
tcatgtcctttgtag

SEQ ID NO: 47280 - DNA, 15 bp, Homo sapiens
ttcatgtcctttgta

SEQ ID NO: 47281 - DNA, 15 bp, Homo sapiens
gttcatgtcctttgt

SEQ ID NO: 47282 - DNA, 15 bp, Homo sapiens
agttcatgtcctttg

SEQ ID NO: 47283 - DNA, 15 bp, Homo sapiens
gagttcatgtccttt

SEQ ID NO: 47284 - DNA, 15 bp, Homo sapiens
tgagttcatgtcctt

SEQ ID NO: 47285 - DNA, 15 bp, Homo sapiens
atgagttcatgtcct

SEQ ID NO: 47286 - DNA, 15 bp, Homo sapiens
gatgagttcatgtcc

SEQ ID NO: 47287 - DNA, 15 bp, Homo sapiens
tgatgagttcatgtc

SEQ ID NO: 47288 - DNA, 15 bp, Homo sapiens
atgatgagttcatgt

SEQ ID NO: 47289 - DNA, 15 bp, Homo sapiens
aatgatgagttcatg

SEQ ID NO: 47290 - DNA, 15 bp, Homo sapiens
aaatgatgagttcat

SEQ ID NO: 47291 - DNA, 15 bp, Homo sapiens
aaaatgatgagttca

SEQ ID NO: 47292 - DNA, 15 bp, Homo sapiens
aaaaatgatgagttc

SEQ ID NO: 47293 - DNA, 15 bp, Homo sapiens
aaaaaatgatgagtt

SEQ ID NO: 47294 - DNA, 15 bp, Homo sapiens
taaaaaatgatgagt

SEQ ID NO: 47295 - DNA, 15 bp, Homo sapiens
ataaaaaatgatgag

SEQ ID NO: 47296 - DNA, 15 bp, Homo sapiens
cataaaaaatgatga

SEQ ID NO: 47297 - DNA, 15 bp, Homo sapiens
ccataaaaaatgatg

SEQ ID NO: 47298 - DNA, 15 bp, Homo sapiens
gccataaaaaatgat

SEQ ID NO: 47299 - DNA, 15 bp, Homo sapiens
agccataaaaaatga

SEQ ID NO: 47300 - DNA, 15 bp, Homo sapiens
cagccataaaaaatg

SEQ ID NO: 47301 - DNA, 15 bp, Homo sapiens
gcagccataaaaaat

SEQ ID NO: 47302 - DNA, 15 bp, Homo sapiens
tgcagccataaaaaa

SEQ ID NO: 47303 - DNA, 15 bp, Homo sapiens
atgcagccataaaaa

SEQ ID NO: 47304 - DNA, 15 bp, Homo sapiens
tatgcagccataaaa

SEQ ID NO: 47305 - DNA, 15 bp, Homo sapiens
ctatgcagccataaa

SEQ ID NO: 47306 - DNA, 15 bp, Homo sapiens
actatgcagccataa

SEQ ID NO: 47307 - DNA, 15 bp, Homo sapiens
tactatgcagccata

SEQ ID NO: 47308 - DNA, 15 bp, Homo sapiens
atactatgcagccat

SEQ ID NO: 47309 - DNA, 15 bp, Homo sapiens
aatactatgcagcca

SEQ ID NO: 47310 - DNA, 15 bp, Homo sapiens
gaatactatgcagcc

SEQ ID NO: 47311 - DNA, 15 bp, Homo sapiens
ggaatactatgcagc

SEQ ID NO: 47312 - DNA, 15 bp, Homo sapiens
tggaatactatgcag

SEQ ID NO: 47313 - DNA, 15 bp, Homo sapiens
atggaatactatgca

SEQ ID NO: 47314 - DNA, 15 bp, Homo sapiens
catggaatactatgc

SEQ ID NO: 47315 - DNA, 15 bp, Homo sapiens
ccatggaatactatg

SEQ ID NO: 47316 - DNA, 15 bp, Homo sapiens
accatggaatactat

SEQ ID NO: 47317 - DNA, 15 bp, Homo sapiens
caccatggaatacta

SEQ ID NO: 47318 - DNA, 15 bp, Homo sapiens
acaccatggaatact

SEQ ID NO: 47319 - DNA, 15 bp, Homo sapiens
tacaccatggaatac

SEQ ID NO: 47320 - DNA, 15 bp, Homo sapiens
atacaccatggaata

SEQ ID NO: 47321 - DNA, 15 bp, Homo sapiens
tatacaccatggaat

SEQ ID NO: 47322 - DNA, 15 bp, Homo sapiens
atatacaccatggaa

SEQ ID NO: 47323 - DNA, 15 bp, Homo sapiens
catatacaccatgga

SEQ ID NO: 47324 - DNA, 15 bp, Homo sapiens
acatatacaccatgg

SEQ ID NO: 47325 - DNA, 15 bp, Homo sapiens
cacatatacaccatg

SEQ ID NO: 47326 - DNA, 15 bp, Homo sapiens
gcacatatacaccat

SEQ ID NO: 47327 - DNA, 15 bp, Homo sapiens
ggcacatatacacca

SEQ ID NO: 47328 - DNA, 15 bp, Homo sapiens
tggcacatatacacc

SEQ ID NO: 47329 - DNA, 15 bp, Homo sapiens
gtggcacatatacac

SEQ ID NO: 47330 - DNA, 15 bp, Homo sapiens
tgtggcacatataca

SEQ ID NO: 47331 - DNA, 15 bp, Homo sapiens
atgtggcacatatac

SEQ ID NO: 47332 - DNA, 15 bp, Homo sapiens
aatgtggcacatata

SEQ ID NO: 47333 - DNA, 15 bp, Homo sapiens
aaatgtggcacatat

SEQ ID NO: 47334 - DNA, 15 bp, Homo sapiens
aaaatgtggcacata

SEQ ID NO: 47335 - DNA, 15 bp, Homo sapiens
gaaaatgtggcacat

SEQ ID NO: 47336 - DNA, 15 bp, Homo sapiens
agaaaatgtggcaca

SEQ ID NO: 47337 - DNA, 15 bp, Homo sapiens
aagaaaatgtggcac

SEQ ID NO: 47338 - DNA, 15 bp, Homo sapiens
taagaaaatgtggca

SEQ ID NO: 47339 - DNA, 15 bp, Homo sapiens
ttaagaaaatgtggc

SEQ ID NO: 47340 - DNA, 15 bp, Homo sapiens
attaagaaaatgtgg

SEQ ID NO: 47341 - DNA, 15 bp, Homo sapiens
gattaagaaaatgtg

SEQ ID NO: 47342 - DNA, 15 bp, Homo sapiens
ggattaagaaaatgt

SEQ ID NO: 47343 - DNA, 15 bp, Homo sapiens
tggattaagaaaatg

SEQ ID NO: 47344 - DNA, 15 bp, Homo sapiens
ctggattaagaaaat

SEQ ID NO: 47345 - DNA, 15 bp, Homo sapiens
actggattaagaaaa

SEQ ID NO: 47346 - DNA, 15 bp, Homo sapiens
gactggattaagaaa

SEQ ID NO: 47347 - DNA, 15 bp, Homo sapiens
agactggattaagaa

SEQ ID NO: 47348 - DNA, 15 bp, Homo sapiens
tagactggattaaga

SEQ ID NO: 47349 - DNA, 15 bp, Homo sapiens
atagactggattaag

SEQ ID NO: 47350 - DNA, 15 bp, Homo sapiens
gatagactggattaa

SEQ ID NO: 47351 - DNA, 15 bp, Homo sapiens
tgatagactggatta

SEQ ID NO: 47352 - DNA, 15 bp, Homo sapiens
gtgatagactggatt

SEQ ID NO: 47353 - DNA, 15 bp, Homo sapiens
agtgatagactggat

SEQ ID NO: 47354 - DNA, 15 bp, Homo sapiens
cagtgatagactgga

SEQ ID NO: 47355 - DNA, 15 bp, Homo sapiens
acagtgatagactgg

SEQ ID NO: 47356 - DNA, 15 bp, Homo sapiens
aacagtgatagactg

SEQ ID NO: 47357 - DNA, 15 bp, Homo sapiens
caacagtgatagact

SEQ ID NO: 47358 - DNA, 15 bp, Homo sapiens
ccaacagtgatagac

SEQ ID NO: 47359 - DNA, 15 bp, Homo sapiens
tccaacagtgataga

SEQ ID NO: 47360 - DNA, 15 bp, Homo sapiens
gtccaacagtgatag

SEQ ID NO: 47361 - DNA, 15 bp, Homo sapiens
tgtccaacagtgata

SEQ ID NO: 47362 - DNA, 15 bp, Homo sapiens
atgtccaacagtgat

SEQ ID NO: 47363 - DNA, 15 bp, Homo sapiens
aatgtccaacagtga

SEQ ID NO: 47364 - DNA, 15 bp, Homo sapiens
aaatgtccaacagtg

SEQ ID NO: 47365 - DNA, 15 bp, Homo sapiens
caaatgtccaacagt

SEQ ID NO: 47366 - DNA, 15 bp, Homo sapiens
ccaaatgtccaacag

SEQ ID NO: 47367 - DNA, 15 bp, Homo sapiens
cccaaatgtccaaca

SEQ ID NO: 47368 - DNA, 15 bp, Homo sapiens
acccaaatgtccaac

SEQ ID NO: 47369 - DNA, 15 bp, Homo sapiens
aacccaaatgtccaa

SEQ ID NO: 47370 - DNA, 15 bp, Homo sapiens
caacccaaatgtcca

SEQ ID NO: 47371 - DNA, 15 bp, Homo sapiens
ccaacccaaatgtcc

SEQ ID NO: 47372 - DNA, 15 bp, Homo sapiens
accaacccaaatgtc

SEQ ID NO: 47373 - DNA, 15 bp, Homo sapiens
aaccaacccaaatgt

SEQ ID NO: 47374 - DNA, 15 bp, Homo sapiens
gaaccaacccaaatg

SEQ ID NO: 47375 - DNA, 15 bp, Homo sapiens
ggaaccaacccaaat

SEQ ID NO: 47376 - DNA, 15 bp, Homo sapiens
tggaaccaacccaaa

SEQ ID NO: 47377 - DNA, 15 bp, Homo sapiens
ttggaaccaacccaa

SEQ ID NO: 47378 - DNA, 15 bp, Homo sapiens
cttggaaccaaccca

SEQ ID NO: 47379 - DNA, 15 bp, Homo sapiens
acttggaaccaaccc

SEQ ID NO: 47380 - DNA, 15 bp, Homo sapiens
gacttggaaccaacc

SEQ ID NO: 47381 - DNA, 15 bp, Homo sapiens
agacttggaaccaac

SEQ ID NO: 47382 - DNA, 15 bp, Homo sapiens
aagacttggaaccaa

SEQ ID NO: 47383 - DNA, 15 bp, Homo sapiens
aaagacttggaacca

SEQ ID NO: 47384 - DNA, 15 bp, Homo sapiens
caaagacttggaacc

SEQ ID NO: 47385 - DNA, 15 bp, Homo sapiens
gcaaagacttggaac

SEQ ID NO: 47386 - DNA, 15 bp, Homo sapiens
agcaaagacttggaa

SEQ ID NO: 47387 - DNA, 15 bp, Homo sapiens
tagcaaagacttgga

SEQ ID NO: 47388 - DNA, 15 bp, Homo sapiens
atagcaaagacttgg

SEQ ID NO: 47389 - DNA, 15 bp, Homo sapiens
aatagcaaagacttg

SEQ ID NO: 47390 - DNA, 15 bp, Homo sapiens
caatagcaaagactt

SEQ ID NO: 47391 - DNA, 15 bp, Homo sapiens
acaatagcaaagact

SEQ ID NO: 47392 - DNA, 15 bp, Homo sapiens
cacaatagcaaagac

SEQ ID NO: 47393 - DNA, 15 bp, Homo sapiens
tcacaatagcaaaga

SEQ ID NO: 47394 - DNA, 15 bp, Homo sapiens
ttcacaatagcaaag

SEQ ID NO: 47395 - DNA, 15 bp, Homo sapiens
attcacaatagcaaa

SEQ ID NO: 47396 - DNA, 15 bp, Homo sapiens
tattcacaatagcaa

SEQ ID NO: 47397 - DNA, 15 bp, Homo sapiens
ctattcacaatagca

SEQ ID NO: 47398 - DNA, 15 bp, Homo sapiens
actattcacaatagc

SEQ ID NO: 47399 - DNA, 15 bp, Homo sapiens
cactattcacaatag

SEQ ID NO: 47400 - DNA, 15 bp, Homo sapiens
gcactattcacaata

SEQ ID NO: 47401 - DNA, 15 bp, Homo sapiens
ggcactattcacaat

SEQ ID NO: 47402 - DNA, 15 bp, Homo sapiens
tggcactattcacaa

SEQ ID NO: 47403 - DNA, 15 bp, Homo sapiens
gtggcactattcaca

SEQ ID NO: 47404 - DNA, 15 bp, Homo sapiens
tgtggcactattcac

SEQ ID NO: 47405 - DNA, 15 bp, Homo sapiens
ttgtggcactattca

SEQ ID NO: 47406 - DNA, 15 bp, Homo sapiens
attgtggcactattc

SEQ ID NO: 47407 - DNA, 15 bp, Homo sapiens
tattgtggcactatt

SEQ ID NO: 47408 - DNA, 15 bp, Homo sapiens
ttattgtggcactat

SEQ ID NO: 47409 - DNA, 15 bp, Homo sapiens
tttattgtggcacta

SEQ ID NO: 47410 - DNA, 15 bp, Homo sapiens
gtttattgtggcact

SEQ ID NO: 47411 - DNA, 15 bp, Homo sapiens
tgtttattgtggcac

SEQ ID NO: 47412 - DNA, 15 bp, Homo sapiens
atgtttattgtggca

SEQ ID NO: 47413 - DNA, 15 bp, Homo sapiens
tatgtttattgtggc

SEQ ID NO: 47414 - DNA, 15 bp, Homo sapiens
gtatgtttattgtgg

SEQ ID NO: 47415 - DNA, 15 bp, Homo sapiens
cgtatgtttattgtg

SEQ ID NO: 47416 - DNA, 15 bp, Homo sapiens
acgtatgtttattgt

SEQ ID NO: 47417 - DNA, 15 bp, Homo sapiens
cacgtatgtttattg

SEQ ID NO: 47418 - DNA, 15 bp, Homo sapiens
acacgtatgtttatt

SEQ ID NO: 47419 - DNA, 15 bp, Homo sapiens
cacacgtatgtttat

SEQ ID NO: 47420 - DNA, 15 bp, Homo sapiens
gcacacgtatgttta

SEQ ID NO: 47421 - DNA, 15 bp, Homo sapiens
tgcacacgtatgttt

SEQ ID NO: 47422 - DNA, 15 bp, Homo sapiens
atgcacacgtatgtt

SEQ ID NO: 47423 - DNA, 15 bp, Homo sapiens
catgcacacgtatgt

SEQ ID NO: 47424 - DNA, 15 bp, Homo sapiens
acatgcacacgtatg

SEQ ID NO: 47425 - DNA, 15 bp, Homo sapiens
tacatgcacacgtat

SEQ ID NO: 47426 - DNA, 15 bp, Homo sapiens
atacatgcacacgta

SEQ ID NO: 47427 - DNA, 15 bp, Homo sapiens
gatacatgcacacgt

SEQ ID NO: 47428 - DNA, 15 bp, Homo sapiens
ggatacatgcacacg

SEQ ID NO: 47429 - DNA, 15 bp, Homo sapiens
aggatacatgcacac

SEQ ID NO: 47430 - DNA, 15 bp, Homo sapiens
aaggatacatgcaca

SEQ ID NO: 47431 - DNA, 15 bp, Homo sapiens
taaggatacatgcac

SEQ ID NO: 47432 - DNA, 15 bp, Homo sapiens
ataaggatacatgca

SEQ ID NO: 47433 - DNA, 15 bp, Homo sapiens
tataaggatacatgc

SEQ ID NO: 47434 - DNA, 15 bp, Homo sapiens
ctataaggatacatg

SEQ ID NO: 47435 - DNA, 15 bp, Homo sapiens
gctataaggatacat

SEQ ID NO: 47436 - DNA, 15 bp, Homo sapiens
tgctataaggataca

SEQ ID NO: 47437 - DNA, 15 bp, Homo sapiens
ctgctataaggatac

SEQ ID NO: 47438 - DNA, 15 bp, Homo sapiens
gctgctataaggata

SEQ ID NO: 47439 - DNA, 15 bp, Homo sapiens
tgctgctataaggat

SEQ ID NO: 47440 - DNA, 15 bp, Homo sapiens
atgctgctataagga

SEQ ID NO: 47441 - DNA, 15 bp, Homo sapiens
catgctgctataagg

SEQ ID NO: 47442 - DNA, 15 bp, Homo sapiens
tcatgctgctataag

SEQ ID NO: 47443 - DNA, 15 bp, Homo sapiens
atcatgctgctataa

SEQ ID NO: 47444 - DNA, 15 bp, Homo sapiens
aatcatgctgctata

SEQ ID NO: 47445 - DNA, 15 bp, Homo sapiens
aaatcatgctgctat

SEQ ID NO: 47446 - DNA, 15 bp, Homo sapiens
taaatcatgctgcta

SEQ ID NO: 47447 - DNA, 15 bp, Homo sapiens
ataaatcatgctgct

SEQ ID NO: 47448 - DNA, 15 bp, Homo sapiens
tataaatcatgctgc

SEQ ID NO: 47449 - DNA, 15 bp, Homo sapiens
ttataaatcatgctg

SEQ ID NO: 47450 - DNA, 15 bp, Homo sapiens
attataaatcatgct

SEQ ID NO: 47451 - DNA, 15 bp, Homo sapiens
gattataaatcatgc

SEQ ID NO: 47452 - DNA, 15 bp, Homo sapiens
ggattataaatcatg

SEQ ID NO: 47453 - DNA, 15 bp, Homo sapiens
aggattataaatcat

SEQ ID NO: 47454 - DNA, 15 bp, Homo sapiens
aaggattataaatca

SEQ ID NO: 47455 - DNA, 15 bp, Homo sapiens
aaaggattataaatc

SEQ ID NO: 47456 - DNA, 15 bp, Homo sapiens
caaaggattataaat

SEQ ID NO: 47457 - DNA, 15 bp, Homo sapiens
ccaaaggattataaa

SEQ ID NO: 47458 - DNA, 15 bp, Homo sapiens
cccaaaggattataa

SEQ ID NO: 47459 - DNA, 15 bp, Homo sapiens
acccaaaggattata

SEQ ID NO: 47460 - DNA, 15 bp, Homo sapiens
tacccaaaggattat

SEQ ID NO: 47461 - DNA, 15 bp, Homo sapiens
atacccaaaggatta

SEQ ID NO: 47462 - DNA, 15 bp, Homo sapiens
tatacccaaaggatt

SEQ ID NO: 47463 - DNA, 15 bp, Homo sapiens
atatacccaaaggat

SEQ ID NO: 47464 - DNA, 15 bp, Homo sapiens
tatatacccaaagga

SEQ ID NO: 47465 - DNA, 15 bp, Homo sapiens
gtatatacccaaagg

SEQ ID NO: 47466 - DNA, 15 bp, Homo sapiens
ggtatatacccaaag

SEQ ID NO: 47467 - DNA, 15 bp, Homo sapiens
gggtatatacccaaa

SEQ ID NO: 47468 - DNA, 15 bp, Homo sapiens
tgggtatatacccaa

SEQ ID NO: 47469 - DNA, 15 bp, Homo sapiens
ctgggtatataccca

SEQ ID NO: 47470 - DNA, 15 bp, Homo sapiens
actgggtatataccc

SEQ ID NO: 47471 - DNA, 15 bp, Homo sapiens
tactgggtatatacc

SEQ ID NO: 47472 - DNA, 15 bp, Homo sapiens
ttactgggtatatac

SEQ ID NO: 47473 - DNA, 15 bp, Homo sapiens
attactgggtatata

SEQ ID NO: 47474 - DNA, 15 bp, Homo sapiens
cattactgggtatat

SEQ ID NO: 47475 - DNA, 15 bp, Homo sapiens
ccattactgggtata

SEQ ID NO: 47476 - DNA, 15 bp, Homo sapiens
cccattactgggtat

SEQ ID NO: 47477 - DNA, 15 bp, Homo sapiens
tcccattactgggta

SEQ ID NO: 47478 - DNA, 15 bp, Homo sapiens
atcccattactgggt

SEQ ID NO: 47479 - DNA, 15 bp, Homo sapiens
catcccattactggg

SEQ ID NO: 47480 - DNA, 15 bp, Homo sapiens
ccatcccattactgg

SEQ ID NO: 47481 - DNA, 15 bp, Homo sapiens
gccatcccattactg

SEQ ID NO: 47482 - DNA, 15 bp, Homo sapiens
agccatcccattact

SEQ ID NO: 47483 - DNA, 15 bp, Homo sapiens
cagccatcccattac

SEQ ID NO: 47484 - DNA, 15 bp, Homo sapiens
ccagccatcccatta

SEQ ID NO: 47485 - DNA, 15 bp, Homo sapiens
cccagccatcccatt

SEQ ID NO: 47486 - DNA, 15 bp, Homo sapiens
acccagccatcccat

SEQ ID NO: 47487 - DNA, 15 bp, Homo sapiens
gacccagccatccca

SEQ ID NO: 47488 - DNA, 15 bp, Homo sapiens
tgacccagccatccc

SEQ ID NO: 47489 - DNA, 15 bp, Homo sapiens
ttgacccagccatcc

SEQ ID NO: 47490 - DNA, 15 bp, Homo sapiens
tttgacccagccatc

SEQ ID NO: 47491 - DNA, 15 bp, Homo sapiens
atttgacccagccat

SEQ ID NO: 47492 - DNA, 15 bp, Homo sapiens
catttgacccagcca

SEQ ID NO: 47493 - DNA, 15 bp, Homo sapiens
ccatttgacccagcc

SEQ ID NO: 47494 - DNA, 15 bp, Homo sapiens
accatttgacccagc

SEQ ID NO: 47495 - DNA, 15 bp, Homo sapiens
taccatttgacccag

SEQ ID NO: 47496 - DNA, 15 bp, Homo sapiens
ataccatttgaccca

SEQ ID NO: 47497 - DNA, 15 bp, Homo sapiens
aataccatttgaccc

SEQ ID NO: 47498 - DNA, 15 bp, Homo sapiens
aaataccatttgacc

SEQ ID NO: 47499 - DNA, 15 bp, Homo sapiens
gaaataccatttgac

SEQ ID NO: 47500 - DNA, 15 bp, Homo sapiens
agaaataccatttga

SEQ ID NO: 47501 - DNA, 15 bp, Homo sapiens
tagaaataccatttg

SEQ ID NO: 47502 - DNA, 15 bp, Homo sapiens
ctagaaataccattt

SEQ ID NO: 47503 - DNA, 15 bp, Homo sapiens
tctagaaataccatt

SEQ ID NO: 47504 - DNA, 15 bp, Homo sapiens
ttctagaaataccat

SEQ ID NO: 47505 - DNA, 15 bp, Homo sapiens
attctagaaatacca

SEQ ID NO: 47506 - DNA, 15 bp, Homo sapiens
aattctagaaatacc

SEQ ID NO: 47507 - DNA, 15 bp, Homo sapiens
aaattctagaaatac

SEQ ID NO: 47508 - DNA, 15 bp, Homo sapiens
aaaattctagaaata

SEQ ID NO: 47509 - DNA, 15 bp, Homo sapiens
taaaattctagaaat

SEQ ID NO: 47510 - DNA, 15 bp, Homo sapiens
ttaaaattctagaaa

SEQ ID NO: 47511 - DNA, 15 bp, Homo sapiens
tttaaaattctagaa

SEQ ID NO: 47512 - DNA, 15 bp, Homo sapiens
ttttaaaattctaga

SEQ ID NO: 47513 - DNA, 15 bp, Homo sapiens
gttttaaaattctag

SEQ ID NO: 47514 - DNA, 15 bp, Homo sapiens
tgttttaaaattcta

SEQ ID NO: 47515 - DNA, 15 bp, Homo sapiens
atgttttaaaattct

SEQ ID NO: 47516 - DNA, 15 bp, Homo sapiens
aatgttttaaaattc

SEQ ID NO: 47517 - DNA, 15 bp, Homo sapiens
aaatgttttaaaatt

SEQ ID NO: 47518 - DNA, 15 bp, Homo sapiens
aaaatgttttaaaat

SEQ ID NO: 47519 - DNA, 15 bp, Homo sapiens
gaaaatgttttaaaa

SEQ ID NO: 47520 - DNA, 15 bp, Homo sapiens
tgaaaatgttttaaa

SEQ ID NO: 47521 - DNA, 15 bp, Homo sapiens
atgaaaatgttttaa

SEQ ID NO: 47522 - DNA, 15 bp, Homo sapiens
aatgaaaatgtttta

SEQ ID NO: 47523 - DNA, 15 bp, Homo sapiens
taatgaaaatgtttt

SEQ ID NO: 47524 - DNA, 15 bp, Homo sapiens
gtaatgaaaatgttt

SEQ ID NO: 47525 - DNA, 15 bp, Homo sapiens
agtaatgaaaatgtt

SEQ ID NO: 47526 - DNA, 15 bp, Homo sapiens
tagtaatgaaaatgt

SEQ ID NO: 47527 - DNA, 15 bp, Homo sapiens
ctagtaatgaaaatg

SEQ ID NO: 47528 - DNA, 15 bp, Homo sapiens
tctagtaatgaaaat

SEQ ID NO: 47529 - DNA, 15 bp, Homo sapiens
ttctagtaatgaaaa

SEQ ID NO: 47530 - DNA, 15 bp, Homo sapiens
tttctagtaatgaaa

SEQ ID NO: 47531 - DNA, 15 bp, Homo sapiens
ttttctagtaatgaa

SEQ ID NO: 47532 - DNA, 15 bp, Homo sapiens
tttttctagtaatga

SEQ ID NO: 47533 - DNA, 15 bp, Homo sapiens
ctttttctagtaatg

SEQ ID NO: 47534 - DNA, 15 bp, Homo sapiens
tctttttctagtaat

SEQ ID NO: 47535 - DNA, 15 bp, Homo sapiens
ttctttttctagtaa

SEQ ID NO: 47536 - DNA, 15 bp, Homo sapiens
tttctttttctagta

SEQ ID NO: 47537 - DNA, 15 bp, Homo sapiens
gtttctttttctagt

SEQ ID NO: 47538 - DNA, 15 bp, Homo sapiens
ggtttctttttctag

SEQ ID NO: 47539 - DNA, 15 bp, Homo sapiens
gggtttctttttcta

SEQ ID NO: 47540 - DNA, 15 bp, Homo sapiens
ggggtttctttttct

SEQ ID NO: 47541 - DNA, 15 bp, Homo sapiens
aggggtttctttttc

SEQ ID NO: 47542 - DNA, 15 bp, Homo sapiens
aaggggtttcttttt

SEQ ID NO: 47543 - DNA, 15 bp, Homo sapiens
caaggggtttctttt

SEQ ID NO: 47544 - DNA, 15 bp, Homo sapiens
gcaaggggtttcttt

SEQ ID NO: 47545 - DNA, 15 bp, Homo sapiens
ggcaaggggtttctt

SEQ ID NO: 47546 - DNA, 15 bp, Homo sapiens
gggcaaggggtttct

SEQ ID NO: 47547 - DNA, 15 bp, Homo sapiens
ggggcaaggggtttc

SEQ ID NO: 47548 - DNA, 15 bp, Homo sapiens
aggggcaaggggttt

SEQ ID NO: 47549 - DNA, 15 bp, Homo sapiens
gaggggcaaggggtt

SEQ ID NO: 47550 - DNA, 15 bp, Homo sapiens
cgaggggcaaggggt

SEQ ID NO: 47551 - DNA, 15 bp, Homo sapiens
ccgaggggcaagggg

SEQ ID NO: 47552 - DNA, 15 bp, Homo sapiens
gccgaggggcaaggg

SEQ ID NO: 47553 - DNA, 15 bp, Homo sapiens
ggccgaggggcaagg

SEQ ID NO: 47554 - DNA, 15 bp, Homo sapiens
tggccgaggggcaag

SEQ ID NO: 47555 - DNA, 15 bp, Homo sapiens
atggccgaggggcaa

SEQ ID NO: 47556 - DNA, 15 bp, Homo sapiens
gatggccgaggggca

SEQ ID NO: 47557 - DNA, 15 bp, Homo sapiens
tgatggccgaggggc

SEQ ID NO: 47558 - DNA, 15 bp, Homo sapiens
gtgatggccgagggg

SEQ ID NO: 47559 - DNA, 15 bp, Homo sapiens
agtgatggccgaggg

SEQ ID NO: 47560 - DNA, 15 bp, Homo sapiens
aagtgatggccgagg

SEQ ID NO: 47561 - DNA, 15 bp, Homo sapiens
aaagtgatggccgag

SEQ ID NO: 47562 - DNA, 15 bp, Homo sapiens
gaaagtgatggccga

SEQ ID NO: 47563 - DNA, 15 bp, Homo sapiens
agaaagtgatggccg

SEQ ID NO: 47564 - DNA, 15 bp, Homo sapiens
tagaaagtgatggcc

SEQ ID NO: 47565 - DNA, 15 bp, Homo sapiens
ctagaaagtgatggc

SEQ ID NO: 47566 - DNA, 15 bp, Homo sapiens
actagaaagtgatgg

SEQ ID NO: 47567 - DNA, 15 bp, Homo sapiens
tactagaaagtgatg

SEQ ID NO: 47568 - DNA, 15 bp, Homo sapiens
gtactagaaagtgat

SEQ ID NO: 47569 - DNA, 15 bp, Homo sapiens
ggtactagaaagtga

SEQ ID NO: 47570 - DNA, 15 bp, Homo sapiens
aggtactagaaagtg

SEQ ID NO: 47571 - DNA, 15 bp, Homo sapiens
gaggtactagaaagt

SEQ ID NO: 47572 - DNA, 15 bp, Homo sapiens
tgaggtactagaaag

SEQ ID NO: 47573 - DNA, 15 bp, Homo sapiens
atgaggtactagaaa

SEQ ID NO: 47574 - DNA, 15 bp, Homo sapiens
gatgaggtactagaa

SEQ ID NO: 47575 - DNA, 15 bp, Homo sapiens
ggatgaggtactaga

SEQ ID NO: 47576 - DNA, 15 bp, Homo sapiens
aggatgaggtactag

SEQ ID NO: 47577 - DNA, 15 bp, Homo sapiens
gaggatgaggtacta

SEQ ID NO: 47578 - DNA, 15 bp, Homo sapiens
ggaggatgaggtact

SEQ ID NO: 47579 - DNA, 15 bp, Homo sapiens
aggaggatgaggtac

SEQ ID NO: 47580 - DNA, 15 bp, Homo sapiens
gaggaggatgaggta

SEQ ID NO: 47581 - DNA, 15 bp, Homo sapiens
ggaggaggatgaggt

SEQ ID NO: 47582 - DNA, 15 bp, Homo sapiens
gggaggaggatgagg

SEQ ID NO: 47583 - DNA, 15 bp, Homo sapiens
agggaggaggatgag

SEQ ID NO: 47584 - DNA, 15 bp, Homo sapiens
tagggaggaggatga

SEQ ID NO: 47585 - DNA, 15 bp, Homo sapiens
atagggaggaggatg

SEQ ID NO: 47586 - DNA, 15 bp, Homo sapiens
gatagggaggaggat

SEQ ID NO: 47587 - DNA, 15 bp, Homo sapiens
ggatagggaggagga

SEQ ID NO: 47588 - DNA, 15 bp, Homo sapiens
gggatagggaggagg

SEQ ID NO: 47589 - DNA, 15 bp, Homo sapiens
agggatagggaggag

SEQ ID NO: 47590 - DNA, 15 bp, Homo sapiens
tagggatagggagga

SEQ ID NO: 47591 - DNA, 15 bp, Homo sapiens
ctagggatagggagg

SEQ ID NO: 47592 - DNA, 15 bp, Homo sapiens
cctagggatagggag

SEQ ID NO: 47593 - DNA, 15 bp, Homo sapiens
gcctagggataggga

SEQ ID NO: 47594 - DNA, 15 bp, Homo sapiens
tgcctagggataggg

SEQ ID NO: 47595 - DNA, 15 bp, Homo sapiens
ttgcctagggatagg

SEQ ID NO: 47596 - DNA, 15 bp, Homo sapiens
gttgcctagggatag

SEQ ID NO: 47597 - DNA, 15 bp, Homo sapiens
tgttgcctagggata

SEQ ID NO: 47598 - DNA, 15 bp, Homo sapiens
gtgttgcctagggat

SEQ ID NO: 47599 - DNA, 15 bp, Homo sapiens
agtgttgcctaggga

SEQ ID NO: 47600 - DNA, 15 bp, Homo sapiens
tagtgttgcctaggg

SEQ ID NO: 47601 - DNA, 15 bp, Homo sapiens
ttagtgttgcctagg

SEQ ID NO: 47602 - DNA, 15 bp, Homo sapiens
attagtgttgcctag

SEQ ID NO: 47603 - DNA, 15 bp, Homo sapiens
gattagtgttgccta

SEQ ID NO: 47604 - DNA, 15 bp, Homo sapiens
agattagtgttgcct

SEQ ID NO: 47605 - DNA, 15 bp, Homo sapiens
cagattagtgttgcc

SEQ ID NO: 47606 - DNA, 15 bp, Homo sapiens
gcagattagtgttgc

SEQ ID NO: 47607 - DNA, 15 bp, Homo sapiens
agcagattagtgttg

SEQ ID NO: 47608 - DNA, 15 bp, Homo sapiens
aagcagattagtgtt

SEQ ID NO: 47609 - DNA, 15 bp, Homo sapiens
aaagcagattagtgt

SEQ ID NO: 47610 - DNA, 15 bp, Homo sapiens
gaaagcagattagtg

SEQ ID NO: 47611 - DNA, 15 bp, Homo sapiens
agaaagcagattagt

SEQ ID NO: 47612 - DNA, 15 bp, Homo sapiens
cagaaagcagattag

SEQ ID NO: 47613 - DNA, 15 bp, Homo sapiens
tcagaaagcagatta

SEQ ID NO: 47614 - DNA, 15 bp, Homo sapiens
gtcagaaagcagatt

SEQ ID NO: 47615 - DNA, 15 bp, Homo sapiens
agtcagaaagcagat

SEQ ID NO: 47616 - DNA, 15 bp, Homo sapiens
cagtcagaaagcaga

SEQ ID NO: 47617 - DNA, 15 bp, Homo sapiens
acagtcagaaagcag

SEQ ID NO: 47618 - DNA, 15 bp, Homo sapiens
tacagtcagaaagca

SEQ ID NO: 47619 - DNA, 15 bp, Homo sapiens
ctacagtcagaaagc

SEQ ID NO: 47620 - DNA, 15 bp, Homo sapiens
tctacagtcagaaag

SEQ ID NO: 47621 - DNA, 15 bp, Homo sapiens
atctacagtcagaaa

SEQ ID NO: 47622 - DNA, 15 bp, Homo sapiens
aatctacagtcagaa

SEQ ID NO: 47623 - DNA, 15 bp, Homo sapiens
aaatctacagtcaga

SEQ ID NO: 47624 - DNA, 15 bp, Homo sapiens
caaatctacagtcag

SEQ ID NO: 47625 - DNA, 15 bp, Homo sapiens
gcaaatctacagtca

SEQ ID NO: 47626 - DNA, 15 bp, Homo sapiens
ggcaaatctacagtc

SEQ ID NO: 47627 - DNA, 15 bp, Homo sapiens
aggcaaatctacagt

SEQ ID NO: 47628 - DNA, 15 bp, Homo sapiens
taggcaaatctacag

SEQ ID NO: 47629 - DNA, 15 bp, Homo sapiens
ataggcaaatctaca

SEQ ID NO: 47630 - DNA, 15 bp, Homo sapiens
aataggcaaatctac

SEQ ID NO: 47631 - DNA, 15 bp, Homo sapiens
gaataggcaaatcta

SEQ ID NO: 47632 - DNA, 15 bp, Homo sapiens
agaataggcaaatct

SEQ ID NO: 47633 - DNA, 15 bp, Homo sapiens
cagaataggcaaatc

SEQ ID NO: 47634 - DNA, 15 bp, Homo sapiens
tcagaataggcaaat

SEQ ID NO: 47635 - DNA, 15 bp, Homo sapiens
ttcagaataggcaaa

SEQ ID NO: 47636 - DNA, 15 bp, Homo sapiens
gttcagaataggcaa

SEQ ID NO: 47637 - DNA, 15 bp, Homo sapiens
tgttcagaataggca

SEQ ID NO: 47638 - DNA, 15 bp, Homo sapiens
atgttcagaataggc

SEQ ID NO: 47639 - DNA, 15 bp, Homo sapiens
catgttcagaatagg

SEQ ID NO: 47640 - DNA, 15 bp, Homo sapiens
acatgttcagaatag

SEQ ID NO: 47641 - DNA, 15 bp, Homo sapiens
gacatgttcagaata

SEQ ID NO: 47642 - DNA, 15 bp, Homo sapiens
tgacatgttcagaat

SEQ ID NO: 47643 - DNA, 15 bp, Homo sapiens
atgacatgttcagaa

SEQ ID NO: 47644 - DNA, 15 bp, Homo sapiens
tatgacatgttcaga

SEQ ID NO: 47645 - DNA, 15 bp, Homo sapiens
atatgacatgttcag

SEQ ID NO: 47646 - DNA, 15 bp, Homo sapiens
aatatgacatgttca

SEQ ID NO: 47647 - DNA, 15 bp, Homo sapiens
taatatgacatgttc

SEQ ID NO: 47648 - DNA, 15 bp, Homo sapiens
ttaatatgacatgtt

SEQ ID NO: 47649 - DNA, 15 bp, Homo sapiens
attaatatgacatgt

SEQ ID NO: 47650 - DNA, 15 bp, Homo sapiens
tattaatatgacatg

SEQ ID NO: 47651 - DNA, 15 bp, Homo sapiens
ttattaatatgacat

SEQ ID NO: 47652 - DNA, 15 bp, Homo sapiens
attattaatatgaca

SEQ ID NO: 47653 - DNA, 15 bp, Homo sapiens
tattattaatatgac

SEQ ID NO: 47654 - DNA, 15 bp, Homo sapiens
atattattaatatga

SEQ ID NO: 47655 - DNA, 15 bp, Homo sapiens
gatattattaatatg

SEQ ID NO: 47656 - DNA, 15 bp, Homo sapiens
tgatattattaatat

SEQ ID NO: 47657 - DNA, 15 bp, Homo sapiens
atgatattattaata

SEQ ID NO: 47658 - DNA, 15 bp, Homo sapiens
tatgatattattaat

SEQ ID NO: 47659 - DNA, 15 bp, Homo sapiens
atatgatattattaa

SEQ ID NO: 47660 - DNA, 15 bp, Homo sapiens
tatatgatattatta

SEQ ID NO: 47661 - DNA, 15 bp, Homo sapiens
ttatatgatattatt

SEQ ID NO: 47662 - DNA, 15 bp, Homo sapiens
attatatgatattat

SEQ ID NO: 47663 - DNA, 15 bp, Homo sapiens
tattatatgatatta

SEQ ID NO: 47664 - DNA, 15 bp, Homo sapiens
atattatatgatatt

SEQ ID NO: 47665 - DNA, 15 bp, Homo sapiens
catattatatgatat

SEQ ID NO: 47666 - DNA, 15 bp, Homo sapiens
acatattatatgata

SEQ ID NO: 47667 - DNA, 15 bp, Homo sapiens
cacatattatatgat

SEQ ID NO: 47668 - DNA, 15 bp, Homo sapiens
tcacatattatatga

SEQ ID NO: 47669 - DNA, 15 bp, Homo sapiens
atcacatattatatg

SEQ ID NO: 47670 - DNA, 15 bp, Homo sapiens
gatcacatattatat

SEQ ID NO: 47671 - DNA, 15 bp, Homo sapiens
ggatcacatattata

SEQ ID NO: 47672 - DNA, 15 bp, Homo sapiens
aggatcacatattat

SEQ ID NO: 47673 - DNA, 15 bp, Homo sapiens
aaggatcacatatta

SEQ ID NO: 47674 - DNA, 15 bp, Homo sapiens
aaaggatcacatatt

SEQ ID NO: 47675 - DNA, 15 bp, Homo sapiens
caaaggatcacatat

SEQ ID NO: 47676 - DNA, 15 bp, Homo sapiens
tcaaaggatcacata

SEQ ID NO: 47677 - DNA, 15 bp, Homo sapiens
ctcaaaggatcacat

SEQ ID NO: 47678 - DNA, 15 bp, Homo sapiens
tctcaaaggatcaca

SEQ ID NO: 47679 - DNA, 15 bp, Homo sapiens
atctcaaaggatcac

SEQ ID NO: 47680 - DNA, 15 bp, Homo sapiens
aatctcaaaggatca

SEQ ID NO: 47681 - DNA, 15 bp, Homo sapiens
caatctcaaaggatc

SEQ ID NO: 47682 - DNA, 15 bp, Homo sapiens
ccaatctcaaaggat

SEQ ID NO: 47683 - DNA, 15 bp, Homo sapiens
gccaatctcaaagga

SEQ ID NO: 47684 - DNA, 15 bp, Homo sapiens
agccaatctcaaagg

SEQ ID NO: 47685 - DNA, 15 bp, Homo sapiens
aagccaatctcaaag

SEQ ID NO: 47686 - DNA, 15 bp, Homo sapiens
gaagccaatctcaaa

SEQ ID NO: 47687 - DNA, 15 bp, Homo sapiens
agaagccaatctcaa

SEQ ID NO: 47688 - DNA, 15 bp, Homo sapiens
aagaagccaatctca

SEQ ID NO: 47689 - DNA, 15 bp, Homo sapiens
aaagaagccaatctc

SEQ ID NO: 47690 - DNA, 15 bp, Homo sapiens
taaagaagccaatct

SEQ ID NO: 47691 - DNA, 15 bp, Homo sapiens
ttaaagaagccaatc

SEQ ID NO: 47692 - DNA, 15 bp, Homo sapiens
gttaaagaagccaat

SEQ ID NO: 47693 - DNA, 15 bp, Homo sapiens
agttaaagaagccaa

SEQ ID NO: 47694 - DNA, 15 bp, Homo sapiens
aagttaaagaagcca

SEQ ID NO: 47695 - DNA, 15 bp, Homo sapiens
taagttaaagaagcc

SEQ ID NO: 47696 - DNA, 15 bp, Homo sapiens
ttaagttaaagaagc

SEQ ID NO: 47697 - DNA, 15 bp, Homo sapiens
cttaagttaaagaag

SEQ ID NO: 47698 - DNA, 15 bp, Homo sapiens
gcttaagttaaagaa

SEQ ID NO: 47699 - DNA, 15 bp, Homo sapiens
tgcttaagttaaaga

SEQ ID NO: 47700 - DNA, 15 bp, Homo sapiens
atgcttaagttaaag

SEQ ID NO: 47701 - DNA, 15 bp, Homo sapiens
catgcttaagttaaa

SEQ ID NO: 47702 - DNA, 15 bp, Homo sapiens
acatgcttaagttaa

SEQ ID NO: 47703 - DNA, 15 bp, Homo sapiens
cacatgcttaagtta

SEQ ID NO: 47704 - DNA, 15 bp, Homo sapiens
acacatgcttaagtt

SEQ ID NO: 47705 - DNA, 15 bp, Homo sapiens
aacacatgcttaagt

SEQ ID NO: 47706 - DNA, 15 bp, Homo sapiens
aaacacatgcttaag

SEQ ID NO: 47707 - DNA, 15 bp, Homo sapiens
aaaacacatgcttaa

SEQ ID NO: 47708 - DNA, 15 bp, Homo sapiens
aaaaacacatgctta

SEQ ID NO: 47709 - DNA, 15 bp, Homo sapiens
aaaaaacacatgctt

SEQ ID NO: 47710 - DNA, 15 bp, Homo sapiens
caaaaaacacatgct

SEQ ID NO: 47711 - DNA, 15 bp, Homo sapiens
gcaaaaaacacatgc

SEQ ID NO: 47712 - DNA, 15 bp, Homo sapiens
tgcaaaaaacacatg

SEQ ID NO: 47713 - DNA, 15 bp, Homo sapiens
ctgcaaaaaacacat

SEQ ID NO: 47714 - DNA, 15 bp, Homo sapiens
actgcaaaaaacaca

SEQ ID NO: 47715 - DNA, 15 bp, Homo sapiens
aactgcaaaaaacac

SEQ ID NO: 47716 - DNA, 15 bp, Homo sapiens
gaactgcaaaaaaca

SEQ ID NO: 47717 - DNA, 15 bp, Homo sapiens
tgaactgcaaaaaac

SEQ ID NO: 47718 - DNA, 15 bp, Homo sapiens
atgaactgcaaaaaa

SEQ ID NO: 47719 - DNA, 15 bp, Homo sapiens
gatgaactgcaaaaa

SEQ ID NO: 47720 - DNA, 15 bp, Homo sapiens
ggatgaactgcaaaa

SEQ ID NO: 47721 - DNA, 15 bp, Homo sapiens
tggatgaactgcaaa

SEQ ID NO: 47722 - DNA, 15 bp, Homo sapiens
gtggatgaactgcaa

SEQ ID NO: 47723 - DNA, 15 bp, Homo sapiens
tgtggatgaactgca

SEQ ID NO: 47724 - DNA, 15 bp, Homo sapiens
atgtggatgaactgc

SEQ ID NO: 47725 - DNA, 15 bp, Homo sapiens
catgtggatgaactg

SEQ ID NO: 47726 - DNA, 15 bp, Homo sapiens
acatgtggatgaact

SEQ ID NO: 47727 - DNA, 15 bp, Homo sapiens
tacatgtggatgaac

SEQ ID NO: 47728 - DNA, 15 bp, Homo sapiens
atacatgtggatgaa

SEQ ID NO: 47729 - DNA, 15 bp, Homo sapiens
aatacatgtggatga

SEQ ID NO: 47730 - DNA, 15 bp, Homo sapiens
aaatacatgtggatg

SEQ ID NO: 47731 - DNA, 15 bp, Homo sapiens
aaaatacatgtggat

SEQ ID NO: 47732 - DNA, 15 bp, Homo sapiens
aaaaatacatgtgga

SEQ ID NO: 47733 - DNA, 15 bp, Homo sapiens
taaaaatacatgtgg

SEQ ID NO: 47734 - DNA, 15 bp, Homo sapiens
ataaaaatacatgtg

SEQ ID NO: 47735 - DNA, 15 bp, Homo sapiens
aataaaaatacatgt

SEQ ID NO: 47736 - DNA, 15 bp, Homo sapiens
caataaaaatacatg

SEQ ID NO: 47737 - DNA, 15 bp, Homo sapiens
gcaataaaaatacat

SEQ ID NO: 47738 - DNA, 15 bp, Homo sapiens
agcaataaaaataca

SEQ ID NO: 47739 - DNA, 15 bp, Homo sapiens
tagcaataaaaatac

SEQ ID NO: 47740 - DNA, 15 bp, Homo sapiens
ttagcaataaaaata

SEQ ID NO: 47741 - DNA, 15 bp, Homo sapiens
tttagcaataaaaat

SEQ ID NO: 47742 - DNA, 15 bp, Homo sapiens
atttagcaataaaaa

SEQ ID NO: 47743 - DNA, 15 bp, Homo sapiens
tatttagcaataaaa

SEQ ID NO: 47744 - DNA, 15 bp, Homo sapiens
ttatttagcaataaa

SEQ ID NO: 47745 - DNA, 15 bp, Homo sapiens
attatttagcaataa

SEQ ID NO: 47746 - DNA, 15 bp, Homo sapiens
tattatttagcaata

SEQ ID NO: 47747 - DNA, 15 bp, Homo sapiens
atattatttagcaat

SEQ ID NO: 47748 - DNA, 15 bp, Homo sapiens
aatattatttagcaa

SEQ ID NO: 47749 - DNA, 15 bp, Homo sapiens
aaatattatttagca

SEQ ID NO: 47750 - DNA, 15 bp, Homo sapiens
gaaatattatttagc

SEQ ID NO: 47751 - DNA, 15 bp, Homo sapiens
cgaaatattatttag

SEQ ID NO: 47752 - DNA, 15 bp, Homo sapiens
acgaaatattattta

SEQ ID NO: 47753 - DNA, 15 bp, Homo sapiens
aacgaaatattattt

SEQ ID NO: 47754 - DNA, 15 bp, Homo sapiens
taacgaaatattatt

SEQ ID NO: 47755 - DNA, 15 bp, Homo sapiens
ataacgaaatattat

SEQ ID NO: 47756 - DNA, 15 bp, Homo sapiens
tataacgaaatatta

SEQ ID NO: 47757 - DNA, 15 bp, Homo sapiens
atataacgaaatatt

SEQ ID NO: 47758 - DNA, 15 bp, Homo sapiens
catataacgaaatat

SEQ ID NO: 47759 - DNA, 15 bp, Homo sapiens
ccatataacgaaata

SEQ ID NO: 47760 - DNA, 15 bp, Homo sapiens
tccatataacgaaat

SEQ ID NO: 47761 - DNA, 15 bp, Homo sapiens
atccatataacgaaa

SEQ ID NO: 47762 - DNA, 15 bp, Homo sapiens
tatccatataacgaa

SEQ ID NO: 47763 - DNA, 15 bp, Homo sapiens
atatccatataacga

SEQ ID NO: 47764 - DNA, 15 bp, Homo sapiens
tatatccatataacg

SEQ ID NO: 47765 - DNA, 15 bp, Homo sapiens
ttatatccatataac

SEQ ID NO: 47766 - DNA, 15 bp, Homo sapiens
attatatccatataa

SEQ ID NO: 47767 - DNA, 15 bp, Homo sapiens
tattatatccatata

SEQ ID NO: 47768 - DNA, 15 bp, Homo sapiens
gtattatatccatat

SEQ ID NO: 47769 - DNA, 15 bp, Homo sapiens
tgtattatatccata

SEQ ID NO: 47770 - DNA, 15 bp, Homo sapiens
atgtattatatccat

SEQ ID NO: 47771 - DNA, 15 bp, Homo sapiens
catgtattatatcca

SEQ ID NO: 47772 - DNA, 15 bp, Homo sapiens
acatgtattatatcc

SEQ ID NO: 47773 - DNA, 15 bp, Homo sapiens
aacatgtattatatc

SEQ ID NO: 47774 - DNA, 15 bp, Homo sapiens
taacatgtattatat

SEQ ID NO: 47775 - DNA, 15 bp, Homo sapiens
ataacatgtattata

SEQ ID NO: 47776 - DNA, 15 bp, Homo sapiens
cataacatgtattat

SEQ ID NO: 47777 - DNA, 15 bp, Homo sapiens
acataacatgtatta

SEQ ID NO: 47778 - DNA, 15 bp, Homo sapiens
tacataacatgtatt

SEQ ID NO: 47779 - DNA, 15 bp, Homo sapiens
atacataacatgtat

SEQ ID NO: 47780 - DNA, 15 bp, Homo sapiens
gatacataacatgta

SEQ ID NO: 47781 - DNA, 15 bp, Homo sapiens
agatacataacatgt

SEQ ID NO: 47782 - DNA, 15 bp, Homo sapiens
cagatacataacatg

SEQ ID NO: 47783 - DNA, 15 bp, Homo sapiens
acagatacataacat

SEQ ID NO: 47784 - DNA, 15 bp, Homo sapiens
aacagatacataaca

SEQ ID NO: 47785 - DNA, 15 bp, Homo sapiens
gaacagatacataac

SEQ ID NO: 47786 - DNA, 15 bp, Homo sapiens
tgaacagatacataa

SEQ ID NO: 47787 - DNA, 15 bp, Homo sapiens
atgaacagatacata

SEQ ID NO: 47788 - DNA, 15 bp, Homo sapiens
gatgaacagatacat

SEQ ID NO: 47789 - DNA, 15 bp, Homo sapiens
tgatgaacagataca

SEQ ID NO: 47790 - DNA, 15 bp, Homo sapiens
ctgatgaacagatac

SEQ ID NO: 47791 - DNA, 15 bp, Homo sapiens
actgatgaacagata

SEQ ID NO: 47792 - DNA, 15 bp, Homo sapiens
aactgatgaacagat

SEQ ID NO: 47793 - DNA, 15 bp, Homo sapiens
caactgatgaacaga

SEQ ID NO: 47794 - DNA, 15 bp, Homo sapiens
tcaactgatgaacag

SEQ ID NO: 47795 - DNA, 15 bp, Homo sapiens
atcaactgatgaaca

SEQ ID NO: 47796 - DNA, 15 bp, Homo sapiens
catcaactgatgaac

SEQ ID NO: 47797 - DNA, 15 bp, Homo sapiens
ccatcaactgatgaa

SEQ ID NO: 47798 - DNA, 15 bp, Homo sapiens
tccatcaactgatga

SEQ ID NO: 47799 - DNA, 15 bp, Homo sapiens
gtccatcaactgatg

SEQ ID NO: 47800 - DNA, 15 bp, Homo sapiens
tgtccatcaactgat

SEQ ID NO: 47801 - DNA, 15 bp, Homo sapiens
atgtccatcaactga

SEQ ID NO: 47802 - DNA, 15 bp, Homo sapiens
aatgtccatcaactg

SEQ ID NO: 47803 - DNA, 15 bp, Homo sapiens
aaatgtccatcaact

SEQ ID NO: 47804 - DNA, 15 bp, Homo sapiens
caaatgtccatcaac

SEQ ID NO: 47805 - DNA, 15 bp, Homo sapiens
ccaaatgtccatcaa

SEQ ID NO: 47806 - DNA, 15 bp, Homo sapiens
tccaaatgtccatca

SEQ ID NO: 47807 - DNA, 15 bp, Homo sapiens
atccaaatgtccatc

SEQ ID NO: 47808 - DNA, 15 bp, Homo sapiens
aatccaaatgtccat

SEQ ID NO: 47809 - DNA, 15 bp, Homo sapiens
caatccaaatgtcca

SEQ ID NO: 47810 - DNA, 15 bp, Homo sapiens
acaatccaaatgtcc

SEQ ID NO: 47811 - DNA, 15 bp, Homo sapiens
aacaatccaaatgtc

SEQ ID NO: 47812 - DNA, 15 bp, Homo sapiens
gaacaatccaaatgt

SEQ ID NO: 47813 - DNA, 15 bp, Homo sapiens
ggaacaatccaaatg

SEQ ID NO: 47814 - DNA, 15 bp, Homo sapiens
gggaacaatccaaat

SEQ ID NO: 47815 - DNA, 15 bp, Homo sapiens
tgggaacaatccaaa

SEQ ID NO: 47816 - DNA, 15 bp, Homo sapiens
gtgggaacaatccaa

SEQ ID NO: 47817 - DNA, 15 bp, Homo sapiens
agtgggaacaatcca

SEQ ID NO: 47818 - DNA, 15 bp, Homo sapiens
aagtgggaacaatcc

SEQ ID NO: 47819 - DNA, 15 bp, Homo sapiens
aaagtgggaacaatc

SEQ ID NO: 47820 - DNA, 15 bp, Homo sapiens
aaaagtgggaacaat

SEQ ID NO: 47821 - DNA, 15 bp, Homo sapiens
caaaagtgggaacaa

SEQ ID NO: 47822 - DNA, 15 bp, Homo sapiens
tcaaaagtgggaaca

SEQ ID NO: 47823 - DNA, 15 bp, Homo sapiens
ctcaaaagtgggaac

SEQ ID NO: 47824 - DNA, 15 bp, Homo sapiens
gctcaaaagtgggaa

SEQ ID NO: 47825 - DNA, 15 bp, Homo sapiens
agctcaaaagtggga

SEQ ID NO: 47826 - DNA, 15 bp, Homo sapiens
tagctcaaaagtggg

SEQ ID NO: 47827 - DNA, 15 bp, Homo sapiens
atagctcaaaagtgg

SEQ ID NO: 47828 - DNA, 15 bp, Homo sapiens
aatagctcaaaagtg

SEQ ID NO: 47829 - DNA, 15 bp, Homo sapiens
taatagctcaaaagt

SEQ ID NO: 47830 - DNA, 15 bp, Homo sapiens
gtaatagctcaaaag

SEQ ID NO: 47831 - DNA, 15 bp, Homo sapiens
tgtaatagctcaaaa

SEQ ID NO: 47832 - DNA, 15 bp, Homo sapiens
ttgtaatagctcaaa

SEQ ID NO: 47833 - DNA, 15 bp, Homo sapiens
tttgtaatagctcaa

SEQ ID NO: 47834 - DNA, 15 bp, Homo sapiens
atttgtaatagctca

SEQ ID NO: 47835 - DNA, 15 bp, Homo sapiens
tatttgtaatagctc

SEQ ID NO: 47836 - DNA, 15 bp, Homo sapiens
ttatttgtaatagct

SEQ ID NO: 47837 - DNA, 15 bp, Homo sapiens
attatttgtaatagc

SEQ ID NO: 47838 - DNA, 15 bp, Homo sapiens
aattatttgtaatag

SEQ ID NO: 47839 - DNA, 15 bp, Homo sapiens
gaattatttgtaata

SEQ ID NO: 47840 - DNA, 15 bp, Homo sapiens
agaattatttgtaat

SEQ ID NO: 47841 - DNA, 15 bp, Homo sapiens
cagaattatttgtaa

SEQ ID NO: 47842 - DNA, 15 bp, Homo sapiens
gcagaattatttgta

SEQ ID NO: 47843 - DNA, 15 bp, Homo sapiens
agcagaattatttgt

SEQ ID NO: 47844 - DNA, 15 bp, Homo sapiens
cagcagaattatttg

SEQ ID NO: 47845 - DNA, 15 bp, Homo sapiens
acagcagaattattt

SEQ ID NO: 47846 - DNA, 15 bp, Homo sapiens
cacagcagaattatt

SEQ ID NO: 47847 - DNA, 15 bp, Homo sapiens
tcacagcagaattat

SEQ ID NO: 47848 - DNA, 15 bp, Homo sapiens
ttcacagcagaatta

SEQ ID NO: 47849 - DNA, 15 bp, Homo sapiens
gttcacagcagaatt

SEQ ID NO: 47850 - DNA, 15 bp, Homo sapiens
tgttcacagcagaat

SEQ ID NO: 47851 - DNA, 15 bp, Homo sapiens
atgttcacagcagaa

SEQ ID NO: 47852 - DNA, 15 bp, Homo sapiens
aatgttcacagcaga

SEQ ID NO: 47853 - DNA, 15 bp, Homo sapiens
aaatgttcacagcag

SEQ ID NO: 47854 - DNA, 15 bp, Homo sapiens
caaatgttcacagca

SEQ ID NO: 47855 - DNA, 15 bp, Homo sapiens
acaaatgttcacagc

SEQ ID NO: 47856 - DNA, 15 bp, Homo sapiens
tacaaatgttcacag

SEQ ID NO: 47857 - DNA, 15 bp, Homo sapiens
atacaaatgttcaca

SEQ ID NO: 47858 - DNA, 15 bp, Homo sapiens
tatacaaatgttcac

SEQ ID NO: 47859 - DNA, 15 bp, Homo sapiens
gtatacaaatgttca

SEQ ID NO: 47860 - DNA, 15 bp, Homo sapiens
tgtatacaaatgttc

SEQ ID NO: 47861 - DNA, 15 bp, Homo sapiens
ctgtatacaaatgtt

SEQ ID NO: 47862 - DNA, 15 bp, Homo sapiens
tctgtatacaaatgt

SEQ ID NO: 47863 - DNA, 15 bp, Homo sapiens
atctgtatacaaatg

SEQ ID NO: 47864 - DNA, 15 bp, Homo sapiens
aatctgtatacaaat

SEQ ID NO: 47865 - DNA, 15 bp, Homo sapiens
aaatctgtatacaaa

SEQ ID NO: 47866 - DNA, 15 bp, Homo sapiens
aaaatctgtatacaa

SEQ ID NO: 47867 - DNA, 15 bp, Homo sapiens
aaaaatctgtataca

SEQ ID NO: 47868 - DNA, 15 bp, Homo sapiens
caaaaatctgtatac

SEQ ID NO: 47869 - DNA, 15 bp, Homo sapiens
acaaaaatctgtata

SEQ ID NO: 47870 - DNA, 15 bp, Homo sapiens
cacaaaaatctgtat

SEQ ID NO: 47871 - DNA, 15 bp, Homo sapiens
acacaaaaatctgta

SEQ ID NO: 47872 - DNA, 15 bp, Homo sapiens
cacacaaaaatctgt

SEQ ID NO: 47873 - DNA, 15 bp, Homo sapiens
ccacacaaaaatctg

SEQ ID NO: 47874 - DNA, 15 bp, Homo sapiens
tccacacaaaaatct

SEQ ID NO: 47875 - DNA, 15 bp, Homo sapiens
gtccacacaaaaatc

SEQ ID NO: 47876 - DNA, 15 bp, Homo sapiens
tgtccacacaaaaat

SEQ ID NO: 47877 - DNA, 15 bp, Homo sapiens
atgtccacacaaaaa

SEQ ID NO: 47878 - DNA, 15 bp, Homo sapiens
catgtccacacaaaa

SEQ ID NO: 47879 - DNA, 15 bp, Homo sapiens
acatgtccacacaaa

SEQ ID NO: 47880 - DNA, 15 bp, Homo sapiens
gacatgtccacacaa

SEQ ID NO: 47881 - DNA, 15 bp, Homo sapiens
agacatgtccacaca

SEQ ID NO: 47882 - DNA, 15 bp, Homo sapiens
aagacatgtccacac

SEQ ID NO: 47883 - DNA, 15 bp, Homo sapiens
gaagacatgtccaca

SEQ ID NO: 47884 - DNA, 15 bp, Homo sapiens
tgaagacatgtccac

SEQ ID NO: 47885 - DNA, 15 bp, Homo sapiens
atgaagacatgtcca

SEQ ID NO: 47886 - DNA, 15 bp, Homo sapiens
aatgaagacatgtcc

SEQ ID NO: 47887 - DNA, 15 bp, Homo sapiens
aaatgaagacatgtc

SEQ ID NO: 47888 - DNA, 15 bp, Homo sapiens
gaaatgaagacatgt

SEQ ID NO: 47889 - DNA, 15 bp, Homo sapiens
agaaatgaagacatg

SEQ ID NO: 47890 - DNA, 15 bp, Homo sapiens
gagaaatgaagacat

SEQ ID NO: 47891 - DNA, 15 bp, Homo sapiens
agagaaatgaagaca

SEQ ID NO: 47892 - DNA, 15 bp, Homo sapiens
aagagaaatgaagac

SEQ ID NO: 47893 - DNA, 15 bp, Homo sapiens
caagagaaatgaaga

SEQ ID NO: 47894 - DNA, 15 bp, Homo sapiens
ccaagagaaatgaag

SEQ ID NO: 47895 - DNA, 15 bp, Homo sapiens
cccaagagaaatgaa

SEQ ID NO: 47896 - DNA, 15 bp, Homo sapiens
acccaagagaaatga

SEQ ID NO: 47897 - DNA, 15 bp, Homo sapiens
tacccaagagaaatg

SEQ ID NO: 47898 - DNA, 15 bp, Homo sapiens
gtacccaagagaaat

SEQ ID NO: 47899 - DNA, 15 bp, Homo sapiens
tgtacccaagagaaa

SEQ ID NO: 47900 - DNA, 15 bp, Homo sapiens
atgtacccaagagaa

SEQ ID NO: 47901 - DNA, 15 bp, Homo sapiens
catgtacccaagaga

SEQ ID NO: 47902 - DNA, 15 bp, Homo sapiens
acatgtacccaagag

SEQ ID NO: 47903 - DNA, 15 bp, Homo sapiens
gacatgtacccaaga

SEQ ID NO: 47904 - DNA, 15 bp, Homo sapiens
agacatgtacccaag

SEQ ID NO: 47905 - DNA, 15 bp, Homo sapiens
tagacatgtacccaa

SEQ ID NO: 47906 - DNA, 15 bp, Homo sapiens
ttagacatgtaccca

SEQ ID NO: 47907 - DNA, 15 bp, Homo sapiens
cttagacatgtaccc

SEQ ID NO: 47908 - DNA, 15 bp, Homo sapiens
acttagacatgtacc

SEQ ID NO: 47909 - DNA, 15 bp, Homo sapiens
cacttagacatgtac

SEQ ID NO: 47910 - DNA, 15 bp, Homo sapiens
acacttagacatgta

SEQ ID NO: 47911 - DNA, 15 bp, Homo sapiens
cacacttagacatgt

SEQ ID NO: 47912 - DNA, 15 bp, Homo sapiens
ccacacttagacatg

SEQ ID NO: 47913 - DNA, 15 bp, Homo sapiens
tccacacttagacat

SEQ ID NO: 47914 - DNA, 15 bp, Homo sapiens
ttccacacttagaca

SEQ ID NO: 47915 - DNA, 15 bp, Homo sapiens
attccacacttagac

SEQ ID NO: 47916 - DNA, 15 bp, Homo sapiens
aattccacacttaga

SEQ ID NO: 47917 - DNA, 15 bp, Homo sapiens
caattccacacttag

SEQ ID NO: 47918 - DNA, 15 bp, Homo sapiens
gcaattccacactta

SEQ ID NO: 47919 - DNA, 15 bp, Homo sapiens
agcaattccacactt

SEQ ID NO: 47920 - DNA, 15 bp, Homo sapiens
cagcaattccacact

SEQ ID NO: 47921 - DNA, 15 bp, Homo sapiens
acagcaattccacac

SEQ ID NO: 47922 - DNA, 15 bp, Homo sapiens
tacagcaattccaca

SEQ ID NO: 47923 - DNA, 15 bp, Homo sapiens
atacagcaattccac

SEQ ID NO: 47924 - DNA, 15 bp, Homo sapiens
gatacagcaattcca

SEQ ID NO: 47925 - DNA, 15 bp, Homo sapiens
tgatacagcaattcc

SEQ ID NO: 47926 - DNA, 15 bp, Homo sapiens
gtgatacagcaattc

SEQ ID NO: 47927 - DNA, 15 bp, Homo sapiens
tgtgatacagcaatt

SEQ ID NO: 47928 - DNA, 15 bp, Homo sapiens
atgtgatacagcaat

SEQ ID NO: 47929 - DNA, 15 bp, Homo sapiens
catgtgatacagcaa

SEQ ID NO: 47930 - DNA, 15 bp, Homo sapiens
ccatgtgatacagca

SEQ ID NO: 47931 - DNA, 15 bp, Homo sapiens
accatgtgatacagc

SEQ ID NO: 47932 - DNA, 15 bp, Homo sapiens
taccatgtgatacag

SEQ ID NO: 47933 - DNA, 15 bp, Homo sapiens
ttaccatgtgataca

SEQ ID NO: 47934 - DNA, 15 bp, Homo sapiens
gttaccatgtgatac

SEQ ID NO: 47935 - DNA, 15 bp, Homo sapiens
agttaccatgtgata

SEQ ID NO: 47936 - DNA, 15 bp, Homo sapiens
gagttaccatgtgat

SEQ ID NO: 47937 - DNA, 15 bp, Homo sapiens
agagttaccatgtga

SEQ ID NO: 47938 - DNA, 15 bp, Homo sapiens
tagagttaccatgtg

SEQ ID NO: 47939 - DNA, 15 bp, Homo sapiens
atagagttaccatgt

SEQ ID NO: 47940 - DNA, 15 bp, Homo sapiens
catagagttaccatg

SEQ ID NO: 47941 - DNA, 15 bp, Homo sapiens
acatagagttaccat

SEQ ID NO: 47942 - DNA, 15 bp, Homo sapiens
aacatagagttacca

SEQ ID NO: 47943 - DNA, 15 bp, Homo sapiens
aaacatagagttacc

SEQ ID NO: 47944 - DNA, 15 bp, Homo sapiens
taaacatagagttac

SEQ ID NO: 47945 - DNA, 15 bp, Homo sapiens
ttaaacatagagtta

SEQ ID NO: 47946 - DNA, 15 bp, Homo sapiens
gttaaacatagagtt

SEQ ID NO: 47947 - DNA, 15 bp, Homo sapiens
agttaaacatagagt

SEQ ID NO: 47948 - DNA, 15 bp, Homo sapiens
tagttaaacatagag

SEQ ID NO: 47949 - DNA, 15 bp, Homo sapiens
atagttaaacataga

SEQ ID NO: 47950 - DNA, 15 bp, Homo sapiens
aatagttaaacatag

SEQ ID NO: 47951 - DNA, 15 bp, Homo sapiens
gaatagttaaacata

SEQ ID NO: 47952 - DNA, 15 bp, Homo sapiens
agaatagttaaacat

SEQ ID NO: 47953 - DNA, 15 bp, Homo sapiens
tagaatagttaaaca

SEQ ID NO: 47954 - DNA, 15 bp, Homo sapiens
ctagaatagttaaac

SEQ ID NO: 47955 - DNA, 15 bp, Homo sapiens
cctagaatagttaaa

SEQ ID NO: 47956 - DNA, 15 bp, Homo sapiens
tcctagaatagttaa

SEQ ID NO: 47957 - DNA, 15 bp, Homo sapiens
ttcctagaatagtta

SEQ ID NO: 47958 - DNA, 15 bp, Homo sapiens
gttcctagaatagtt

SEQ ID NO: 47959 - DNA, 15 bp, Homo sapiens
agttcctagaatagt

SEQ ID NO: 47960 - DNA, 15 bp, Homo sapiens
cagttcctagaatag

SEQ ID NO: 47961 - DNA, 15 bp, Homo sapiens
gcagttcctagaata

SEQ ID NO: 47962 - DNA, 15 bp, Homo sapiens
ggcagttcctagaat

SEQ ID NO: 47963 - DNA, 15 bp, Homo sapiens
tggcagttcctagaa

SEQ ID NO: 47964 - DNA, 15 bp, Homo sapiens
ctggcagttcctaga

SEQ ID NO: 47965 - DNA, 15 bp, Homo sapiens
tctggcagttcctag

SEQ ID NO: 47966 - DNA, 15 bp, Homo sapiens
gtctggcagttccta

SEQ ID NO: 47967 - DNA, 15 bp, Homo sapiens
agtctggcagttcct

SEQ ID NO: 47968 - DNA, 15 bp, Homo sapiens
tagtctggcagttcc

SEQ ID NO: 47969 - DNA, 15 bp, Homo sapiens
atagtctggcagttc

SEQ ID NO: 47970 - DNA, 15 bp, Homo sapiens
aatagtctggcagtt

SEQ ID NO: 47971 - DNA, 15 bp, Homo sapiens
aaatagtctggcagt

SEQ ID NO: 47972 - DNA, 15 bp, Homo sapiens
aaaatagtctggcag

SEQ ID NO: 47973 - DNA, 15 bp, Homo sapiens
gaaaatagtctggca

SEQ ID NO: 47974 - DNA, 15 bp, Homo sapiens
ggaaaatagtctggc

SEQ ID NO: 47975 - DNA, 15 bp, Homo sapiens
tggaaaatagtctgg

SEQ ID NO: 47976 - DNA, 15 bp, Homo sapiens
gtggaaaatagtctg

SEQ ID NO: 47977 - DNA, 15 bp, Homo sapiens
tgtggaaaatagtct

SEQ ID NO: 47978 - DNA, 15 bp, Homo sapiens
ctgtggaaaatagtc

SEQ ID NO: 47979 - DNA, 15 bp, Homo sapiens
actgtggaaaatagt

SEQ ID NO: 47980 - DNA, 15 bp, Homo sapiens
cactgtggaaaatag

SEQ ID NO: 47981 - DNA, 15 bp, Homo sapiens
ccactgtggaaaata

SEQ ID NO: 47982 - DNA, 15 bp, Homo sapiens
gccactgtggaaaat

SEQ ID NO: 47983 - DNA, 15 bp, Homo sapiens
agccactgtggaaaa

SEQ ID NO: 47984 - DNA, 15 bp, Homo sapiens
cagccactgtggaaa

SEQ ID NO: 47985 - DNA, 15 bp, Homo sapiens
gcagccactgtggaa

SEQ ID NO: 47986 - DNA, 15 bp, Homo sapiens
tgcagccactgtgga

SEQ ID NO: 47987 - DNA, 15 bp, Homo sapiens
gtgcagccactgtgg

SEQ ID NO: 47988 - DNA, 15 bp, Homo sapiens
ggtgcagccactgtg

SEQ ID NO: 47989 - DNA, 15 bp, Homo sapiens
tggtgcagccactgt

SEQ ID NO: 47990 - DNA, 15 bp, Homo sapiens
atggtgcagccactg

SEQ ID NO: 47991 - DNA, 15 bp, Homo sapiens
aatggtgcagccact

SEQ ID NO: 47992 - DNA, 15 bp, Homo sapiens
aaatggtgcagccac

SEQ ID NO: 47993 - DNA, 15 bp, Homo sapiens
taaatggtgcagcca

SEQ ID NO: 47994 - DNA, 15 bp, Homo sapiens
gtaaatggtgcagcc

SEQ ID NO: 47995 - DNA, 15 bp, Homo sapiens
tgtaaatggtgcagc

SEQ ID NO: 47996 - DNA, 15 bp, Homo sapiens
atgtaaatggtgcag

SEQ ID NO: 47997 - DNA, 15 bp, Homo sapiens
aatgtaaatggtgca

SEQ ID NO: 47998 - DNA, 15 bp, Homo sapiens
aaatgtaaatggtgc

SEQ ID NO: 47999 - DNA, 15 bp, Homo sapiens
gaaatgtaaatggtg

SEQ ID NO: 48000 - DNA, 15 bp, Homo sapiens
agaaatgtaaatggt

SEQ ID NO: 48001 - DNA, 15 bp, Homo sapiens
cagaaatgtaaatgg

SEQ ID NO: 48002 - DNA, 15 bp, Homo sapiens
gcagaaatgtaaatg

SEQ ID NO: 48003 - DNA, 15 bp, Homo sapiens
agcagaaatgtaaat

SEQ ID NO: 48004 - DNA, 15 bp, Homo sapiens
tagcagaaatgtaaa

SEQ ID NO: 48005 - DNA, 15 bp, Homo sapiens
ttagcagaaatgtaa

SEQ ID NO: 48006 - DNA, 15 bp, Homo sapiens
gttagcagaaatgta

SEQ ID NO: 48007 - DNA, 15 bp, Homo sapiens
tgttagcagaaatgt

SEQ ID NO: 48008 - DNA, 15 bp, Homo sapiens
ctgttagcagaaatg

SEQ ID NO: 48009 - DNA, 15 bp, Homo sapiens
actgttagcagaaat

SEQ ID NO: 48010 - DNA, 15 bp, Homo sapiens
cactgttagcagaaa

SEQ ID NO: 48011 - DNA, 15 bp, Homo sapiens
acactgttagcagaa

SEQ ID NO: 48012 - DNA, 15 bp, Homo sapiens
tacactgttagcaga

SEQ ID NO: 48013 - DNA, 15 bp, Homo sapiens
atacactgttagcag

SEQ ID NO: 48014 - DNA, 15 bp, Homo sapiens
catacactgttagca

SEQ ID NO: 48015 - DNA, 15 bp, Homo sapiens
tcatacactgttagc

SEQ ID NO: 48016 - DNA, 15 bp, Homo sapiens
ctcatacactgttag

SEQ ID NO: 48017 - DNA, 15 bp, Homo sapiens
cctcatacactgtta

SEQ ID NO: 48018 - DNA, 15 bp, Homo sapiens
ccctcatacactgtt

SEQ ID NO: 48019 - DNA, 15 bp, Homo sapiens
accctcatacactgt

SEQ ID NO: 48020 - DNA, 15 bp, Homo sapiens
aaccctcatacactg

SEQ ID NO: 48021 - DNA, 15 bp, Homo sapiens
gaaccctcatacact

SEQ ID NO: 48022 - DNA, 15 bp, Homo sapiens
agaaccctcatacac

SEQ ID NO: 48023 - DNA, 15 bp, Homo sapiens
tagaaccctcataca

SEQ ID NO: 48024 - DNA, 15 bp, Homo sapiens
ttagaaccctcatac

SEQ ID NO: 48025 - DNA, 15 bp, Homo sapiens
attagaaccctcata

SEQ ID NO: 48026 - DNA, 15 bp, Homo sapiens
aattagaaccctcat

SEQ ID NO: 48027 - DNA, 15 bp, Homo sapiens
aaattagaaccctca

SEQ ID NO: 48028 - DNA, 15 bp, Homo sapiens
gaaattagaaccctc

SEQ ID NO: 48029 - DNA, 15 bp, Homo sapiens
agaaattagaaccct

SEQ ID NO: 48030 - DNA, 15 bp, Homo sapiens
gagaaattagaaccc

SEQ ID NO: 48031 - DNA, 15 bp, Homo sapiens
ggagaaattagaacc

SEQ ID NO: 48032 - DNA, 15 bp, Homo sapiens
tggagaaattagaac

SEQ ID NO: 48033 - DNA, 15 bp, Homo sapiens
gtggagaaattagaa

SEQ ID NO: 48034 - DNA, 15 bp, Homo sapiens
tgtggagaaattaga

SEQ ID NO: 48035 - DNA, 15 bp, Homo sapiens
atgtggagaaattag

SEQ ID NO: 48036 - DNA, 15 bp, Homo sapiens
gatgtggagaaatta

SEQ ID NO: 48037 - DNA, 15 bp, Homo sapiens
ggatgtggagaaatt

SEQ ID NO: 48038 - DNA, 15 bp, Homo sapiens
aggatgtggagaaat

SEQ ID NO: 48039 - DNA, 15 bp, Homo sapiens
gaggatgtggagaaa

SEQ ID NO: 48040 - DNA, 15 bp, Homo sapiens
tgaggatgtggagaa

SEQ ID NO: 48041 - DNA, 15 bp, Homo sapiens
gtgaggatgtggaga

SEQ ID NO: 48042 - DNA, 15 bp, Homo sapiens
ggtgaggatgtggag

SEQ ID NO: 48043 - DNA, 15 bp, Homo sapiens
tggtgaggatgtgga

SEQ ID NO: 48044 - DNA, 15 bp, Homo sapiens
ctggtgaggatgtgg

SEQ ID NO: 48045 - DNA, 15 bp, Homo sapiens
gctggtgaggatgtg

SEQ ID NO: 48046 - DNA, 15 bp, Homo sapiens
tgctggtgaggatgt

SEQ ID NO: 48047 - DNA, 15 bp, Homo sapiens
gtgctggtgaggatg

SEQ ID NO: 48048 - DNA, 15 bp, Homo sapiens
agtgctggtgaggat

SEQ ID NO: 48049 - DNA, 15 bp, Homo sapiens
aagtgctggtgagga

SEQ ID NO: 48050 - DNA, 15 bp, Homo sapiens
caagtgctggtgagg

SEQ ID NO: 48051 - DNA, 15 bp, Homo sapiens
acaagtgctggtgag

SEQ ID NO: 48052 - DNA, 15 bp, Homo sapiens
aacaagtgctggtga

SEQ ID NO: 48053 - DNA, 15 bp, Homo sapiens
taacaagtgctggtg

SEQ ID NO: 48054 - DNA, 15 bp, Homo sapiens
ataacaagtgctggt

SEQ ID NO: 48055 - DNA, 15 bp, Homo sapiens
aataacaagtgctgg

SEQ ID NO: 48056 - DNA, 15 bp, Homo sapiens
aaataacaagtgctg

SEQ ID NO: 48057 - DNA, 15 bp, Homo sapiens
taaataacaagtgct

SEQ ID NO: 48058 - DNA, 15 bp, Homo sapiens
ctaaataacaagtgc

SEQ ID NO: 48059 - DNA, 15 bp, Homo sapiens
gctaaataacaagtg

SEQ ID NO: 48060 - DNA, 15 bp, Homo sapiens
tgctaaataacaagt

SEQ ID NO: 48061 - DNA, 15 bp, Homo sapiens
atgctaaataacaag

SEQ ID NO: 48062 - DNA, 15 bp, Homo sapiens
gatgctaaataacaa

SEQ ID NO: 48063 - DNA, 15 bp, Homo sapiens
agatgctaaataaca

SEQ ID NO: 48064 - DNA, 15 bp, Homo sapiens
cagatgctaaataac

SEQ ID NO: 48065 - DNA, 15 bp, Homo sapiens
acagatgctaaataa

SEQ ID NO: 48066 - DNA, 15 bp, Homo sapiens
cacagatgctaaata

SEQ ID NO: 48067 - DNA, 15 bp, Homo sapiens
tcacagatgctaaat

SEQ ID NO: 48068 - DNA, 15 bp, Homo sapiens
atcacagatgctaaa

SEQ ID NO: 48069 - DNA, 15 bp, Homo sapiens
tatcacagatgctaa

SEQ ID NO: 48070 - DNA, 15 bp, Homo sapiens
atatcacagatgcta

SEQ ID NO: 48071 - DNA, 15 bp, Homo sapiens
gatatcacagatgct

SEQ ID NO: 48072 - DNA, 15 bp, Homo sapiens
agatatcacagatgc

SEQ ID NO: 48073 - DNA, 15 bp, Homo sapiens
gagatatcacagatg

SEQ ID NO: 48074 - DNA, 15 bp, Homo sapiens
agagatatcacagat

SEQ ID NO: 48075 - DNA, 15 bp, Homo sapiens
gagagatatcacaga

SEQ ID NO: 48076 - DNA, 15 bp, Homo sapiens
tgagagatatcacag

SEQ ID NO: 48077 - DNA, 15 bp, Homo sapiens
atgagagatatcaca

SEQ ID NO: 48078 - DNA, 15 bp, Homo sapiens
tatgagagatatcac

SEQ ID NO: 48079 - DNA, 15 bp, Homo sapiens
ctatgagagatatca

SEQ ID NO: 48080 - DNA, 15 bp, Homo sapiens
cctatgagagatatc

SEQ ID NO: 48081 - DNA, 15 bp, Homo sapiens
acctatgagagatat

SEQ ID NO: 48082 - DNA, 15 bp, Homo sapiens
tacctatgagagata

SEQ ID NO: 48083 - DNA, 15 bp, Homo sapiens
ctacctatgagagat

SEQ ID NO: 48084 - DNA, 15 bp, Homo sapiens
tctacctatgagaga

SEQ ID NO: 48085 - DNA, 15 bp, Homo sapiens
ttctacctatgagag

SEQ ID NO: 48086 - DNA, 15 bp, Homo sapiens
attctacctatgaga

SEQ ID NO: 48087 - DNA, 15 bp, Homo sapiens
tattctacctatgag

SEQ ID NO: 48088 - DNA, 15 bp, Homo sapiens
ttattctacctatga

SEQ ID NO: 48089 - DNA, 15 bp, Homo sapiens
attattctacctatg

SEQ ID NO: 48090 - DNA, 15 bp, Homo sapiens
cattattctacctat

SEQ ID NO: 48091 - DNA, 15 bp, Homo sapiens
tcattattctaccta

SEQ ID NO: 48092 - DNA, 15 bp, Homo sapiens
gtcattattctacct

SEQ ID NO: 48093 - DNA, 15 bp, Homo sapiens
ggtcattattctacc

SEQ ID NO: 48094 - DNA, 15 bp, Homo sapiens
gggtcattattctac

SEQ ID NO: 48095 - DNA, 15 bp, Homo sapiens
ggggtcattattcta

SEQ ID NO: 48096 - DNA, 15 bp, Homo sapiens
gggggtcattattct

SEQ ID NO: 48097 - DNA, 15 bp, Homo sapiens
tgggggtcattattc

SEQ ID NO: 48098 - DNA, 15 bp, Homo sapiens
ttgggggtcattatt

SEQ ID NO: 48099 - DNA, 15 bp, Homo sapiens
tttgggggtcattat

SEQ ID NO: 48100 - DNA, 15 bp, Homo sapiens
ctttgggggtcatta

SEQ ID NO: 48101 - DNA, 15 bp, Homo sapiens
tctttgggggtcatt

SEQ ID NO: 48102 - DNA, 15 bp, Homo sapiens
atctttgggggtcat

SEQ ID NO: 48103 - DNA, 15 bp, Homo sapiens
tatctttgggggtca

SEQ ID NO: 48104 - DNA, 15 bp, Homo sapiens
atatctttgggggtc

SEQ ID NO: 48105 - DNA, 15 bp, Homo sapiens
gatatctttgggggt

SEQ ID NO: 48106 - DNA, 15 bp, Homo sapiens
ggatatctttggggg

SEQ ID NO: 48107 - DNA, 15 bp, Homo sapiens
tggatatctttgggg

SEQ ID NO: 48108 - DNA, 15 bp, Homo sapiens
ctggatatctttggg

SEQ ID NO: 48109 - DNA, 15 bp, Homo sapiens
cctggatatctttgg

SEQ ID NO: 48110 - DNA, 15 bp, Homo sapiens
acctggatatctttg

SEQ ID NO: 48111 - DNA, 15 bp, Homo sapiens
gacctggatatcttt

SEQ ID NO: 48112 - DNA, 15 bp, Homo sapiens
ggacctggatatctt

SEQ ID NO: 48113 - DNA, 15 bp, Homo sapiens
aggacctggatatct

SEQ ID NO: 48114 - DNA, 15 bp, Homo sapiens
aaggacctggatatc

SEQ ID NO: 48115 - DNA, 15 bp, Homo sapiens
taaggacctggatat

SEQ ID NO: 48116 - DNA, 15 bp, Homo sapiens
ataaggacctggata

SEQ ID NO: 48117 - DNA, 15 bp, Homo sapiens
gataaggacctggat

SEQ ID NO: 48118 - DNA, 15 bp, Homo sapiens
ggataaggacctgga

SEQ ID NO: 48119 - DNA, 15 bp, Homo sapiens
gggataaggacctgg

SEQ ID NO: 48120 - DNA, 15 bp, Homo sapiens
agggataaggacctg

SEQ ID NO: 48121 - DNA, 15 bp, Homo sapiens
tagggataaggacct

SEQ ID NO: 48122 - DNA, 15 bp, Homo sapiens
ctagggataaggacc

SEQ ID NO: 48123 - DNA, 15 bp, Homo sapiens
tctagggataaggac

SEQ ID NO: 48124 - DNA, 15 bp, Homo sapiens
ttctagggataagga

SEQ ID NO: 48125 - DNA, 15 bp, Homo sapiens
gttctagggataagg

SEQ ID NO: 48126 - DNA, 15 bp, Homo sapiens
ggttctagggataag

SEQ ID NO: 48127 - DNA, 15 bp, Homo sapiens
aggttctagggataa

SEQ ID NO: 48128 - DNA, 15 bp, Homo sapiens
caggttctagggata

SEQ ID NO: 48129 - DNA, 15 bp, Homo sapiens
acaggttctagggat

SEQ ID NO: 48130 - DNA, 15 bp, Homo sapiens
cacaggttctaggga

SEQ ID NO: 48131 - DNA, 15 bp, Homo sapiens
tcacaggttctaggg

SEQ ID NO: 48132 - DNA, 15 bp, Homo sapiens
ttcacaggttctagg

SEQ ID NO: 48133 - DNA, 15 bp, Homo sapiens
attcacaggttctag

SEQ ID NO: 48134 - DNA, 15 bp, Homo sapiens
cattcacaggttcta

SEQ ID NO: 48135 - DNA, 15 bp, Homo sapiens
acattcacaggttct

SEQ ID NO: 48136 - DNA, 15 bp, Homo sapiens
aacattcacaggttc

SEQ ID NO: 48137 - DNA, 15 bp, Homo sapiens
taacattcacaggtt

SEQ ID NO: 48138 - DNA, 15 bp, Homo sapiens
gtaacattcacaggt

SEQ ID NO: 48139 - DNA, 15 bp, Homo sapiens
ggtaacattcacagg

SEQ ID NO: 48140 - DNA, 15 bp, Homo sapiens
aggtaacattcacag

SEQ ID NO: 48141 - DNA, 15 bp, Homo sapiens
aaggtaacattcaca

SEQ ID NO: 48142 - DNA, 15 bp, Homo sapiens
caaggtaacattcac

SEQ ID NO: 48143 - DNA, 15 bp, Homo sapiens
acaaggtaacattca

SEQ ID NO: 48144 - DNA, 15 bp, Homo sapiens
tacaaggtaacattc

SEQ ID NO: 48145 - DNA, 15 bp, Homo sapiens
atacaaggtaacatt

SEQ ID NO: 48146 - DNA, 15 bp, Homo sapiens
catacaaggtaacat

SEQ ID NO: 48147 - DNA, 15 bp, Homo sapiens
ccatacaaggtaaca

SEQ ID NO: 48148 - DNA, 15 bp, Homo sapiens
cccatacaaggtaac

SEQ ID NO: 48149 - DNA, 15 bp, Homo sapiens
tcccatacaaggtaa

SEQ ID NO: 48150 - DNA, 15 bp, Homo sapiens
ttcccatacaaggta

SEQ ID NO: 48151 - DNA, 15 bp, Homo sapiens
tttcccatacaaggt

SEQ ID NO: 48152 - DNA, 15 bp, Homo sapiens
ttttcccatacaagg

SEQ ID NO: 48153 - DNA, 15 bp, Homo sapiens
cttttcccatacaag

SEQ ID NO: 48154 - DNA, 15 bp, Homo sapiens
ccttttcccatacaa

SEQ ID NO: 48155 - DNA, 15 bp, Homo sapiens
cccttttcccataca

SEQ ID NO: 48156 - DNA, 15 bp, Homo sapiens
acccttttcccatac

SEQ ID NO: 48157 - DNA, 15 bp, Homo sapiens
gacccttttcccata

SEQ ID NO: 48158 - DNA, 15 bp, Homo sapiens
agacccttttcccat

SEQ ID NO: 48159 - DNA, 15 bp, Homo sapiens
tagacccttttccca

SEQ ID NO: 48160 - DNA, 15 bp, Homo sapiens
atagacccttttccc

SEQ ID NO: 48161 - DNA, 15 bp, Homo sapiens
catagacccttttcc

SEQ ID NO: 48162 - DNA, 15 bp, Homo sapiens
gcatagacccttttc

SEQ ID NO: 48163 - DNA, 15 bp, Homo sapiens
tgcatagaccctttt

SEQ ID NO: 48164 - DNA, 15 bp, Homo sapiens
ctgcatagacccttt

SEQ ID NO: 48165 - DNA, 15 bp, Homo sapiens
tctgcatagaccctt

SEQ ID NO: 48166 - DNA, 15 bp, Homo sapiens
gtctgcatagaccct

SEQ ID NO: 48167 - DNA, 15 bp, Homo sapiens
cgtctgcatagaccc

SEQ ID NO: 48168 - DNA, 15 bp, Homo sapiens
acgtctgcatagacc

SEQ ID NO: 48169 - DNA, 15 bp, Homo sapiens
cacgtctgcatagac

SEQ ID NO: 48170 - DNA, 15 bp, Homo sapiens
tcacgtctgcataga

SEQ ID NO: 48171 - DNA, 15 bp, Homo sapiens
atcacgtctgcatag

SEQ ID NO: 48172 - DNA, 15 bp, Homo sapiens
aatcacgtctgcata

SEQ ID NO: 48173 - DNA, 15 bp, Homo sapiens
gaatcacgtctgcat

SEQ ID NO: 48174 - DNA, 15 bp, Homo sapiens
tgaatcacgtctgca

SEQ ID NO: 48175 - DNA, 15 bp, Homo sapiens
ctgaatcacgtctgc

SEQ ID NO: 48176 - DNA, 15 bp, Homo sapiens
actgaatcacgtctg

SEQ ID NO: 48177 - DNA, 15 bp, Homo sapiens
aactgaatcacgtct

SEQ ID NO: 48178 - DNA, 15 bp, Homo sapiens
taactgaatcacgtc

SEQ ID NO: 48179 - DNA, 15 bp, Homo sapiens
ttaactgaatcacgt

SEQ ID NO: 48180 - DNA, 15 bp, Homo sapiens
gttaactgaatcacg

SEQ ID NO: 48181 - DNA, 15 bp, Homo sapiens
tgttaactgaatcac

SEQ ID NO: 48182 - DNA, 15 bp, Homo sapiens
ttgttaactgaatca

SEQ ID NO: 48183 - DNA, 15 bp, Homo sapiens
attgttaactgaatc

SEQ ID NO: 48184 - DNA, 15 bp, Homo sapiens
tattgttaactgaat

SEQ ID NO: 48185 - DNA, 15 bp, Homo sapiens
atattgttaactgaa

SEQ ID NO: 48186 - DNA, 15 bp, Homo sapiens
gatattgttaactga

SEQ ID NO: 48187 - DNA, 15 bp, Homo sapiens
cgatattgttaactg

SEQ ID NO: 48188 - DNA, 15 bp, Homo sapiens
tcgatattgttaact

SEQ ID NO: 48189 - DNA, 15 bp, Homo sapiens
ctcgatattgttaac

SEQ ID NO: 48190 - DNA, 15 bp, Homo sapiens
tctcgatattgttaa

SEQ ID NO: 48191 - DNA, 15 bp, Homo sapiens
atctcgatattgtta

SEQ ID NO: 48192 - DNA, 15 bp, Homo sapiens
catctcgatattgtt

SEQ ID NO: 48193 - DNA, 15 bp, Homo sapiens
ccatctcgatattgt

SEQ ID NO: 48194 - DNA, 15 bp, Homo sapiens
cccatctcgatattg

SEQ ID NO: 48195 - DNA, 15 bp, Homo sapiens
ccccatctcgatatt

SEQ ID NO: 48196 - DNA, 15 bp, Homo sapiens
cccccatctcgatat

SEQ ID NO: 48197 - DNA, 15 bp, Homo sapiens
tcccccatctcgata

SEQ ID NO: 48198 - DNA, 15 bp, Homo sapiens
ctcccccatctcgat

SEQ ID NO: 48199 - DNA, 15 bp, Homo sapiens
tctcccccatctcga

SEQ ID NO: 48200 - DNA, 15 bp, Homo sapiens
gtctcccccatctcg

SEQ ID NO: 48201 - DNA, 15 bp, Homo sapiens
agtctcccccatctc

SEQ ID NO: 48202 - DNA, 15 bp, Homo sapiens
tagtctcccccatct

SEQ ID NO: 48203 - DNA, 15 bp, Homo sapiens
atagtctcccccatc

SEQ ID NO: 48204 - DNA, 15 bp, Homo sapiens
gatagtctcccccat

SEQ ID NO: 48205 - DNA, 15 bp, Homo sapiens
ggatagtctccccca

SEQ ID NO: 48206 - DNA, 15 bp, Homo sapiens
aggatagtctccccc

SEQ ID NO: 48207 - DNA, 15 bp, Homo sapiens
caggatagtctcccc

SEQ ID NO: 48208 - DNA, 15 bp, Homo sapiens
ccaggatagtctccc

SEQ ID NO: 48209 - DNA, 15 bp, Homo sapiens
tccaggatagtctcc

SEQ ID NO: 48210 - DNA, 15 bp, Homo sapiens
atccaggatagtctc

SEQ ID NO: 48211 - DNA, 15 bp, Homo sapiens
aatccaggatagtct

SEQ ID NO: 48212 - DNA, 15 bp, Homo sapiens
taatccaggatagtc

SEQ ID NO: 48213 - DNA, 15 bp, Homo sapiens
ataatccaggatagt

SEQ ID NO: 48214 - DNA, 15 bp, Homo sapiens
gataatccaggatag

SEQ ID NO: 48215 - DNA, 15 bp, Homo sapiens
ggataatccaggata

SEQ ID NO: 48216 - DNA, 15 bp, Homo sapiens
tggataatccaggat

SEQ ID NO: 48217 - DNA, 15 bp, Homo sapiens
ctggataatccagga

SEQ ID NO: 48218 - DNA, 15 bp, Homo sapiens
cctggataatccagg

SEQ ID NO: 48219 - DNA, 15 bp, Homo sapiens
acctggataatccag

SEQ ID NO: 48220 - DNA, 15 bp, Homo sapiens
cacctggataatcca

SEQ ID NO: 48221 - DNA, 15 bp, Homo sapiens
ccacctggataatcc

SEQ ID NO: 48222 - DNA, 15 bp, Homo sapiens
cccacctggataatc

SEQ ID NO: 48223 - DNA, 15 bp, Homo sapiens
gcccacctggataat

SEQ ID NO: 48224 - DNA, 15 bp, Homo sapiens
ggcccacctggataa

SEQ ID NO: 48225 - DNA, 15 bp, Homo sapiens
gggcccacctggata

SEQ ID NO: 48226 - DNA, 15 bp, Homo sapiens
agggcccacctggat

SEQ ID NO: 48227 - DNA, 15 bp, Homo sapiens
tagggcccacctgga

SEQ ID NO: 48228 - DNA, 15 bp, Homo sapiens
ttagggcccacctgg

SEQ ID NO: 48229 - DNA, 15 bp, Homo sapiens
tttagggcccacctg

SEQ ID NO: 48230 - DNA, 15 bp, Homo sapiens
atttagggcccacct

SEQ ID NO: 48231 - DNA, 15 bp, Homo sapiens
catttagggcccacc

SEQ ID NO: 48232 - DNA, 15 bp, Homo sapiens
gcatttagggcccac

SEQ ID NO: 48233 - DNA, 15 bp, Homo sapiens
tgcatttagggccca

SEQ ID NO: 48234 - DNA, 15 bp, Homo sapiens
ctgcatttagggccc

SEQ ID NO: 48235 - DNA, 15 bp, Homo sapiens
actgcatttagggcc

SEQ ID NO: 48236 - DNA, 15 bp, Homo sapiens
gactgcatttagggc

SEQ ID NO: 48237 - DNA, 15 bp, Homo sapiens
tgactgcatttaggg

SEQ ID NO: 48238 - DNA, 15 bp, Homo sapiens
atgactgcatttagg

SEQ ID NO: 48239 - DNA, 15 bp, Homo sapiens
catgactgcatttag

SEQ ID NO: 48240 - DNA, 15 bp, Homo sapiens
acatgactgcattta

SEQ ID NO: 48241 - DNA, 15 bp, Homo sapiens
cacatgactgcattt

SEQ ID NO: 48242 - DNA, 15 bp, Homo sapiens
acacatgactgcatt

SEQ ID NO: 48243 - DNA, 15 bp, Homo sapiens
cacacatgactgcat

SEQ ID NO: 48244 - DNA, 15 bp, Homo sapiens
acacacatgactgca

SEQ ID NO: 48245 - DNA, 15 bp, Homo sapiens
aacacacatgactgc

SEQ ID NO: 48246 - DNA, 15 bp, Homo sapiens
gaacacacatgactg

SEQ ID NO: 48247 - DNA, 15 bp, Homo sapiens
agaacacacatgact

SEQ ID NO: 48248 - DNA, 15 bp, Homo sapiens
aagaacacacatgac

SEQ ID NO: 48249 - DNA, 15 bp, Homo sapiens
taagaacacacatga

SEQ ID NO: 48250 - DNA, 15 bp, Homo sapiens
ttaagaacacacatg

SEQ ID NO: 48251 - DNA, 15 bp, Homo sapiens
tttaagaacacacat

SEQ ID NO: 48252 - DNA, 15 bp, Homo sapiens
ttttaagaacacaca

SEQ ID NO: 48253 - DNA, 15 bp, Homo sapiens
cttttaagaacacac

SEQ ID NO: 48254 - DNA, 15 bp, Homo sapiens
ccttttaagaacaca

SEQ ID NO: 48255 - DNA, 15 bp, Homo sapiens
cccttttaagaacac

SEQ ID NO: 48256 - DNA, 15 bp, Homo sapiens
tcccttttaagaaca

SEQ ID NO: 48257 - DNA, 15 bp, Homo sapiens
atcccttttaagaac

SEQ ID NO: 48258 - DNA, 15 bp, Homo sapiens
catcccttttaagaa

SEQ ID NO: 48259 - DNA, 15 bp, Homo sapiens
ccatcccttttaaga

SEQ ID NO: 48260 - DNA, 15 bp, Homo sapiens
accatcccttttaag

SEQ ID NO: 48261 - DNA, 15 bp, Homo sapiens
aaccatcccttttaa

SEQ ID NO: 48262 - DNA, 15 bp, Homo sapiens
caaccatccctttta

SEQ ID NO: 48263 - DNA, 15 bp, Homo sapiens
gcaaccatccctttt

SEQ ID NO: 48264 - DNA, 15 bp, Homo sapiens
agcaaccatcccttt

SEQ ID NO: 48265 - DNA, 15 bp, Homo sapiens
tagcaaccatccctt

SEQ ID NO: 48266 - DNA, 15 bp, Homo sapiens
ttagcaaccatccct

SEQ ID NO: 48267 - DNA, 15 bp, Homo sapiens
cttagcaaccatccc

SEQ ID NO: 48268 - DNA, 15 bp, Homo sapiens
tcttagcaaccatcc

SEQ ID NO: 48269 - DNA, 15 bp, Homo sapiens
ttcttagcaaccatc

SEQ ID NO: 48270 - DNA, 15 bp, Homo sapiens
cttcttagcaaccat

SEQ ID NO: 48271 - DNA, 15 bp, Homo sapiens
tcttcttagcaacca

SEQ ID NO: 48272 - DNA, 15 bp, Homo sapiens
ttcttcttagcaacc

SEQ ID NO: 48273 - DNA, 15 bp, Homo sapiens
cttcttcttagcaac

SEQ ID NO: 48274 - DNA, 15 bp, Homo sapiens
ccttcttcttagcaa

SEQ ID NO: 48275 - DNA, 15 bp, Homo sapiens
gccttcttcttagca

SEQ ID NO: 48276 - DNA, 15 bp, Homo sapiens
tgccttcttcttagc

SEQ ID NO: 48277 - DNA, 15 bp, Homo sapiens
ctgccttcttcttag

SEQ ID NO: 48278 - DNA, 15 bp, Homo sapiens
tctgccttcttctta

SEQ ID NO: 48279 - DNA, 15 bp, Homo sapiens
ctctgccttcttctt

SEQ ID NO: 48280 - DNA, 15 bp, Homo sapiens
cctctgccttcttct

SEQ ID NO: 48281 - DNA, 15 bp, Homo sapiens
ccctctgccttcttc

SEQ ID NO: 48282 - DNA, 15 bp, Homo sapiens
cccctctgccttctt

SEQ ID NO: 48283 - DNA, 15 bp, Homo sapiens
ccccctctgccttct

SEQ ID NO: 48284 - DNA, 15 bp, Homo sapiens
tccccctctgccttc

SEQ ID NO: 48285 - DNA, 15 bp, Homo sapiens
atccccctctgcctt

SEQ ID NO: 48286 - DNA, 15 bp, Homo sapiens
aatccccctctgcct

SEQ ID NO: 48287 - DNA, 15 bp, Homo sapiens
aaatccccctctgcc

SEQ ID NO: 48288 - DNA, 15 bp, Homo sapiens
caaatccccctctgc

SEQ ID NO: 48289 - DNA, 15 bp, Homo sapiens
gcaaatccccctctg

SEQ ID NO: 48290 - DNA, 15 bp, Homo sapiens
ggcaaatccccctct

SEQ ID NO: 48291 - DNA, 15 bp, Homo sapiens
aggcaaatccccctc

SEQ ID NO: 48292 - DNA, 15 bp, Homo sapiens
caggcaaatccccct

SEQ ID NO: 48293 - DNA, 15 bp, Homo sapiens
acaggcaaatccccc

SEQ ID NO: 48294 - DNA, 15 bp, Homo sapiens
tacaggcaaatcccc

SEQ ID NO: 48295 - DNA, 15 bp, Homo sapiens
ctacaggcaaatccc

SEQ ID NO: 48296 - DNA, 15 bp, Homo sapiens
tctacaggcaaatcc

SEQ ID NO: 48297 - DNA, 15 bp, Homo sapiens
ctctacaggcaaatc

SEQ ID NO: 48298 - DNA, 15 bp, Homo sapiens
tctctacaggcaaat

SEQ ID NO: 48299 - DNA, 15 bp, Homo sapiens
ctctctacaggcaaa

SEQ ID NO: 48300 - DNA, 15 bp, Homo sapiens
tctctctacaggcaa

SEQ ID NO: 48301 - DNA, 15 bp, Homo sapiens
ttctctctacaggca

SEQ ID NO: 48302 - DNA, 15 bp, Homo sapiens
cttctctctacaggc

SEQ ID NO: 48303 - DNA, 15 bp, Homo sapiens
tcttctctctacagg

SEQ ID NO: 48304 - DNA, 15 bp, Homo sapiens
ctcttctctctacag

SEQ ID NO: 48305 - DNA, 15 bp, Homo sapiens
actcttctctctaca

SEQ ID NO: 48306 - DNA, 15 bp, Homo sapiens
tactcttctctctac

SEQ ID NO: 48307 - DNA, 15 bp, Homo sapiens
ctactcttctctcta

SEQ ID NO: 48308 - DNA, 15 bp, Homo sapiens
tctactcttctctct

SEQ ID NO: 48309 - DNA, 15 bp, Homo sapiens
ctctactcttctctc

SEQ ID NO: 48310 - DNA, 15 bp, Homo sapiens
cctctactcttctct

SEQ ID NO: 48311 - DNA, 15 bp, Homo sapiens
gcctctactcttctc

SEQ ID NO: 48312 - DNA, 15 bp, Homo sapiens
tgcctctactcttct

SEQ ID NO: 48313 - DNA, 15 bp, Homo sapiens
ttgcctctactcttc

SEQ ID NO: 48314 - DNA, 15 bp, Homo sapiens
cttgcctctactctt

SEQ ID NO: 48315 - DNA, 15 bp, Homo sapiens
ccttgcctctactct

SEQ ID NO: 48316 - DNA, 15 bp, Homo sapiens
accttgcctctactc

SEQ ID NO: 48317 - DNA, 15 bp, Homo sapiens
caccttgcctctact

SEQ ID NO: 48318 - DNA, 15 bp, Homo sapiens
tcaccttgcctctac

SEQ ID NO: 48319 - DNA, 15 bp, Homo sapiens
gtcaccttgcctcta

SEQ ID NO: 48320 - DNA, 15 bp, Homo sapiens
agtcaccttgcctct

SEQ ID NO: 48321 - DNA, 15 bp, Homo sapiens
tagtcaccttgcctc

SEQ ID NO: 48322 - DNA, 15 bp, Homo sapiens
gtagtcaccttgcct

SEQ ID NO: 48323 - DNA, 15 bp, Homo sapiens
tgtagtcaccttgcc

SEQ ID NO: 48324 - DNA, 15 bp, Homo sapiens
ctgtagtcaccttgc

SEQ ID NO: 48325 - DNA, 15 bp, Homo sapiens
tctgtagtcaccttg

SEQ ID NO: 48326 - DNA, 15 bp, Homo sapiens
ttctgtagtcacctt

SEQ ID NO: 48327 - DNA, 15 bp, Homo sapiens
tttctgtagtcacct

SEQ ID NO: 48328 - DNA, 15 bp, Homo sapiens
ttttctgtagtcacc

SEQ ID NO: 48329 - DNA, 15 bp, Homo sapiens
tttttctgtagtcac

SEQ ID NO: 48330 - DNA, 15 bp, Homo sapiens
ttttttctgtagtca

SEQ ID NO: 48331 - DNA, 15 bp, Homo sapiens
tttttttctgtagtc

SEQ ID NO: 48332 - DNA, 15 bp, Homo sapiens
ctttttttctgtagt

SEQ ID NO: 48333 - DNA, 15 bp, Homo sapiens
tctttttttctgtag

SEQ ID NO: 48334 - DNA, 15 bp, Homo sapiens
ttctttttttctgta

SEQ ID NO: 48335 - DNA, 15 bp, Homo sapiens
attctttttttctgt

SEQ ID NO: 48336 - DNA, 15 bp, Homo sapiens
cattctttttttctg

SEQ ID NO: 48337 - DNA, 15 bp, Homo sapiens
ccattctttttttct

SEQ ID NO: 48338 - DNA, 15 bp, Homo sapiens
tccattctttttttc

SEQ ID NO: 48339 - DNA, 15 bp, Homo sapiens
ttccattcttttttt

SEQ ID NO: 48340 - DNA, 15 bp, Homo sapiens
attccattctttttt

SEQ ID NO: 48341 - DNA, 15 bp, Homo sapiens
cattccattcttttt

SEQ ID NO: 48342 - DNA, 15 bp, Homo sapiens
tcattccattctttt

SEQ ID NO: 48343 - DNA, 15 bp, Homo sapiens
gtcattccattcttt

SEQ ID NO: 48344 - DNA, 15 bp, Homo sapiens
tgtcattccattctt

SEQ ID NO: 48345 - DNA, 15 bp, Homo sapiens
atgtcattccattct

SEQ ID NO: 48346 - DNA, 15 bp, Homo sapiens
aatgtcattccattc

SEQ ID NO: 48347 - DNA, 15 bp, Homo sapiens
caatgtcattccatt

SEQ ID NO: 48348 - DNA, 15 bp, Homo sapiens
gcaatgtcattccat

SEQ ID NO: 48349 - DNA, 15 bp, Homo sapiens
ggcaatgtcattcca

SEQ ID NO: 48350 - DNA, 15 bp, Homo sapiens
tggcaatgtcattcc

SEQ ID NO: 48351 - DNA, 15 bp, Homo sapiens
gtggcaatgtcattc

SEQ ID NO: 48352 - DNA, 15 bp, Homo sapiens
tgtggcaatgtcatt

SEQ ID NO: 48353 - DNA, 15 bp, Homo sapiens
ctgtggcaatgtcat

SEQ ID NO: 48354 - DNA, 15 bp, Homo sapiens
gctgtggcaatgtca

SEQ ID NO: 48355 - DNA, 15 bp, Homo sapiens
ggctgtggcaatgtc

SEQ ID NO: 48356 - DNA, 15 bp, Homo sapiens
cggctgtggcaatgt

SEQ ID NO: 48357 - DNA, 15 bp, Homo sapiens
tcggctgtggcaatg

SEQ ID NO: 48358 - DNA, 15 bp, Homo sapiens
ctcggctgtggcaat

SEQ ID NO: 48359 - DNA, 15 bp, Homo sapiens
cctcggctgtggcaa

SEQ ID NO: 48360 - DNA, 15 bp, Homo sapiens
tcctcggctgtggca

SEQ ID NO: 48361 - DNA, 15 bp, Homo sapiens
ctcctcggctgtggc

SEQ ID NO: 48362 - DNA, 15 bp, Homo sapiens
actcctcggctgtgg

SEQ ID NO: 48363 - DNA, 15 bp, Homo sapiens
cactcctcggctgtg

SEQ ID NO: 48364 - DNA, 15 bp, Homo sapiens
acactcctcggctgt

SEQ ID NO: 48365 - DNA, 15 bp, Homo sapiens
gacactcctcggctg

SEQ ID NO: 48366 - DNA, 15 bp, Homo sapiens
tgacactcctcggct

SEQ ID NO: 48367 - DNA, 15 bp, Homo sapiens
ctgacactcctcggc

SEQ ID NO: 48368 - DNA, 15 bp, Homo sapiens
gctgacactcctcgg

SEQ ID NO: 48369 - DNA, 15 bp, Homo sapiens
tgctgacactcctcg

SEQ ID NO: 48370 - DNA, 15 bp, Homo sapiens
ctgctgacactcctc

SEQ ID NO: 48371 - DNA, 15 bp, Homo sapiens
gctgctgacactcct

SEQ ID NO: 48372 - DNA, 15 bp, Homo sapiens
agctgctgacactcc

SEQ ID NO: 48373 - DNA, 15 bp, Homo sapiens
tagctgctgacactc

SEQ ID NO: 48374 - DNA, 15 bp, Homo sapiens
atagctgctgacact

SEQ ID NO: 48375 - DNA, 15 bp, Homo sapiens
gatagctgctgacac

SEQ ID NO: 48376 - DNA, 15 bp, Homo sapiens
tgatagctgctgaca

SEQ ID NO: 48377 - DNA, 15 bp, Homo sapiens
ttgatagctgctgac

SEQ ID NO: 48378 - DNA, 15 bp, Homo sapiens
cttgatagctgctga

SEQ ID NO: 48379 - DNA, 15 bp, Homo sapiens
tcttgatagctgctg

SEQ ID NO: 48380 - DNA, 15 bp, Homo sapiens
ctcttgatagctgct

SEQ ID NO: 48381 - DNA, 15 bp, Homo sapiens
gctcttgatagctgc

SEQ ID NO: 48382 - DNA, 15 bp, Homo sapiens
agctcttgatagctg

SEQ ID NO: 48383 - DNA, 15 bp, Homo sapiens
cagctcttgatagct

SEQ ID NO: 48384 - DNA, 15 bp, Homo sapiens
ccagctcttgatagc

SEQ ID NO: 48385 - DNA, 15 bp, Homo sapiens
tccagctcttgatag

SEQ ID NO: 48386 - DNA, 15 bp, Homo sapiens
ttccagctcttgata

SEQ ID NO: 48387 - DNA, 15 bp, Homo sapiens
cttccagctcttgat

SEQ ID NO: 48388 - DNA, 15 bp, Homo sapiens
tcttccagctcttga

SEQ ID NO: 48389 - DNA, 15 bp, Homo sapiens
ttcttccagctcttg

SEQ ID NO: 48390 - DNA, 15 bp, Homo sapiens
cttcttccagctctt

SEQ ID NO: 48391 - DNA, 15 bp, Homo sapiens
gcttcttccagctct

SEQ ID NO: 48392 - DNA, 15 bp, Homo sapiens
tgcttcttccagctc

SEQ ID NO: 48393 - DNA, 15 bp, Homo sapiens
ctgcttcttccagct

SEQ ID NO: 48394 - DNA, 15 bp, Homo sapiens
cctgcttcttccagc

SEQ ID NO: 48395 - DNA, 15 bp, Homo sapiens
ccctgcttcttccag

SEQ ID NO: 48396 - DNA, 15 bp, Homo sapiens
cccctgcttcttcca

SEQ ID NO: 48397 - DNA, 15 bp, Homo sapiens
ccccctgcttcttcc

SEQ ID NO: 48398 - DNA, 15 bp, Homo sapiens
tccccctgcttcttc

SEQ ID NO: 48399 - DNA, 15 bp, Homo sapiens
ttccccctgcttctt

SEQ ID NO: 48400 - DNA, 15 bp, Homo sapiens
tttccccctgcttct

SEQ ID NO: 48401 - DNA, 15 bp, Homo sapiens
atttccccctgcttc

SEQ ID NO: 48402 - DNA, 15 bp, Homo sapiens
aatttccccctgctt

SEQ ID NO: 48403 - DNA, 15 bp, Homo sapiens
aaatttccccctgct

SEQ ID NO: 48404 - DNA, 15 bp, Homo sapiens
gaaatttccccctgc

SEQ ID NO: 48405 - DNA, 15 bp, Homo sapiens
agaaatttccccctg

SEQ ID NO: 48406 - DNA, 15 bp, Homo sapiens
gagaaatttccccct

SEQ ID NO: 48407 - DNA, 15 bp, Homo sapiens
agagaaatttccccc

SEQ ID NO: 48408 - DNA, 15 bp, Homo sapiens
gagagaaatttcccc

SEQ ID NO: 48409 - DNA, 15 bp, Homo sapiens
agagagaaatttccc

SEQ ID NO: 48410 - DNA, 15 bp, Homo sapiens
aagagagaaatttcc

SEQ ID NO: 48411 - DNA, 15 bp, Homo sapiens
taagagagaaatttc

SEQ ID NO: 48412 - DNA, 15 bp, Homo sapiens
ctaagagagaaattt

SEQ ID NO: 48413 - DNA, 15 bp, Homo sapiens
cctaagagagaaatt

SEQ ID NO: 48414 - DNA, 15 bp, Homo sapiens
ccctaagagagaaat

SEQ ID NO: 48415 - DNA, 15 bp, Homo sapiens
gccctaagagagaaa

SEQ ID NO: 48416 - DNA, 15 bp, Homo sapiens
ggccctaagagagaa

SEQ ID NO: 48417 - DNA, 15 bp, Homo sapiens
aggccctaagagaga

SEQ ID NO: 48418 - DNA, 15 bp, Homo sapiens
aaggccctaagagag

SEQ ID NO: 48419 - DNA, 15 bp, Homo sapiens
taaggccctaagaga

SEQ ID NO: 48420 - DNA, 15 bp, Homo sapiens
ctaaggccctaagag

SEQ ID NO: 48421 - DNA, 15 bp, Homo sapiens
cctaaggccctaaga

SEQ ID NO: 48422 - DNA, 15 bp, Homo sapiens
tcctaaggccctaag

SEQ ID NO: 48423 - DNA, 15 bp, Homo sapiens
ctcctaaggccctaa

SEQ ID NO: 48424 - DNA, 15 bp, Homo sapiens
cctcctaaggcccta

SEQ ID NO: 48425 - DNA, 15 bp, Homo sapiens
ccctcctaaggccct

SEQ ID NO: 48426 - DNA, 15 bp, Homo sapiens
tccctcctaaggccc

SEQ ID NO: 48427 - DNA, 15 bp, Homo sapiens
ttccctcctaaggcc

SEQ ID NO: 48428 - DNA, 15 bp, Homo sapiens
gttccctcctaaggc

SEQ ID NO: 48429 - DNA, 15 bp, Homo sapiens
tgttccctcctaagg

SEQ ID NO: 48430 - DNA, 15 bp, Homo sapiens
gtgttccctcctaag

SEQ ID NO: 48431 - DNA, 15 bp, Homo sapiens
tgtgttccctcctaa

SEQ ID NO: 48432 - DNA, 15 bp, Homo sapiens
ctgtgttccctccta

SEQ ID NO: 48433 - DNA, 15 bp, Homo sapiens
gctgtgttccctcct

SEQ ID NO: 48434 - DNA, 15 bp, Homo sapiens
ggctgtgttccctcc

SEQ ID NO: 48435 - DNA, 15 bp, Homo sapiens
gggctgtgttccctc

SEQ ID NO: 48436 - DNA, 15 bp, Homo sapiens
agggctgtgttccct

SEQ ID NO: 48437 - DNA, 15 bp, Homo sapiens
cagggctgtgttccc

SEQ ID NO: 48438 - DNA, 15 bp, Homo sapiens
acagggctgtgttcc

SEQ ID NO: 48439 - DNA, 15 bp, Homo sapiens
gacagggctgtgttc

SEQ ID NO: 48440 - DNA, 15 bp, Homo sapiens
tgacagggctgtgtt

SEQ ID NO: 48441 - DNA, 15 bp, Homo sapiens
ctgacagggctgtgt

SEQ ID NO: 48442 - DNA, 15 bp, Homo sapiens
gctgacagggctgtg

SEQ ID NO: 48443 - DNA, 15 bp, Homo sapiens
tgctgacagggctgt

SEQ ID NO: 48444 - DNA, 15 bp, Homo sapiens
gtgctgacagggctg

SEQ ID NO: 48445 - DNA, 15 bp, Homo sapiens
ggtgctgacagggct

SEQ ID NO: 48446 - DNA, 15 bp, Homo sapiens
aggtgctgacagggc

SEQ ID NO: 48447 - DNA, 15 bp, Homo sapiens
aaggtgctgacaggg

SEQ ID NO: 48448 - DNA, 15 bp, Homo sapiens
caaggtgctgacagg

SEQ ID NO: 48449 - DNA, 15 bp, Homo sapiens
tcaaggtgctgacag

SEQ ID NO: 48450 - DNA, 15 bp, Homo sapiens
atcaaggtgctgaca

SEQ ID NO: 48451 - DNA, 15 bp, Homo sapiens
aatcaaggtgctgac

SEQ ID NO: 48452 - DNA, 15 bp, Homo sapiens
aaatcaaggtgctga

SEQ ID NO: 48453 - DNA, 15 bp, Homo sapiens
gaaatcaaggtgctg

SEQ ID NO: 48454 - DNA, 15 bp, Homo sapiens
ggaaatcaaggtgct

SEQ ID NO: 48455 - DNA, 15 bp, Homo sapiens
tggaaatcaaggtgc

SEQ ID NO: 48456 - DNA, 15 bp, Homo sapiens
gtggaaatcaaggtg

SEQ ID NO: 48457 - DNA, 15 bp, Homo sapiens
ggtggaaatcaaggt

SEQ ID NO: 48458 - DNA, 15 bp, Homo sapiens
gggtggaaatcaagg

SEQ ID NO: 48459 - DNA, 15 bp, Homo sapiens
tgggtggaaatcaag

SEQ ID NO: 48460 - DNA, 15 bp, Homo sapiens
ctgggtggaaatcaa

SEQ ID NO: 48461 - DNA, 15 bp, Homo sapiens
gctgggtggaaatca

SEQ ID NO: 48462 - DNA, 15 bp, Homo sapiens
cgctgggtggaaatc

SEQ ID NO: 48463 - DNA, 15 bp, Homo sapiens
tcgctgggtggaaat

SEQ ID NO: 48464 - DNA, 15 bp, Homo sapiens
ttcgctgggtggaaa

SEQ ID NO: 48465 - DNA, 15 bp, Homo sapiens
cttcgctgggtggaa

SEQ ID NO: 48466 - DNA, 15 bp, Homo sapiens
gcttcgctgggtgga

SEQ ID NO: 48467 - DNA, 15 bp, Homo sapiens
agcttcgctgggtgg

SEQ ID NO: 48468 - DNA, 15 bp, Homo sapiens
cagcttcgctgggtg

SEQ ID NO: 48469 - DNA, 15 bp, Homo sapiens
tcagcttcgctgggt

SEQ ID NO: 48470 - DNA, 15 bp, Homo sapiens
atcagcttcgctggg

SEQ ID NO: 48471 - DNA, 15 bp, Homo sapiens
aatcagcttcgctgg

SEQ ID NO: 48472 - DNA, 15 bp, Homo sapiens
aaatcagcttcgctg

SEQ ID NO: 48473 - DNA, 15 bp, Homo sapiens
aaaatcagcttcgct

SEQ ID NO: 48474 - DNA, 15 bp, Homo sapiens
caaaatcagcttcgc

SEQ ID NO: 48475 - DNA, 15 bp, Homo sapiens
ccaaaatcagcttcg

SEQ ID NO: 48476 - DNA, 15 bp, Homo sapiens
cccaaaatcagcttc

SEQ ID NO: 48477 - DNA, 15 bp, Homo sapiens
gcccaaaatcagctt

SEQ ID NO: 48478 - DNA, 15 bp, Homo sapiens
tgcccaaaatcagct

SEQ ID NO: 48479 - DNA, 15 bp, Homo sapiens
atgcccaaaatcagc

SEQ ID NO: 48480 - DNA, 15 bp, Homo sapiens
catgcccaaaatcag

SEQ ID NO: 48481 - DNA, 15 bp, Homo sapiens
acatgcccaaaatca

SEQ ID NO: 48482 - DNA, 15 bp, Homo sapiens
cacatgcccaaaatc

SEQ ID NO: 48483 - DNA, 15 bp, Homo sapiens
tcacatgcccaaaat

SEQ ID NO: 48484 - DNA, 15 bp, Homo sapiens
ctcacatgcccaaaa

SEQ ID NO: 48485 - DNA, 15 bp, Homo sapiens
cctcacatgcccaaa

SEQ ID NO: 48486 - DNA, 15 bp, Homo sapiens
ccctcacatgcccaa

SEQ ID NO: 48487 - DNA, 15 bp, Homo sapiens
cccctcacatgccca

SEQ ID NO: 48488 - DNA, 15 bp, Homo sapiens
tcccctcacatgccc

SEQ ID NO: 48489 - DNA, 15 bp, Homo sapiens
atcccctcacatgcc

SEQ ID NO: 48490 - DNA, 15 bp, Homo sapiens
tatcccctcacatgc

SEQ ID NO: 48491 - DNA, 15 bp, Homo sapiens
gtatcccctcacatg

SEQ ID NO: 48492 - DNA, 15 bp, Homo sapiens
tgtatcccctcacat

SEQ ID NO: 48493 - DNA, 15 bp, Homo sapiens
atgtatcccctcaca

SEQ ID NO: 48494 - DNA, 15 bp, Homo sapiens
gatgtatcccctcac

SEQ ID NO: 48495 - DNA, 15 bp, Homo sapiens
agatgtatcccctca

SEQ ID NO: 48496 - DNA, 15 bp, Homo sapiens
gagatgtatcccctc

SEQ ID NO: 48497 - DNA, 15 bp, Homo sapiens
agagatgtatcccct

SEQ ID NO: 48498 - DNA, 15 bp, Homo sapiens
gagagatgtatcccc

SEQ ID NO: 48499 - DNA, 15 bp, Homo sapiens
agagagatgtatccc

SEQ ID NO: 48500 - DNA, 15 bp, Homo sapiens
aagagagatgtatcc

SEQ ID NO: 48501 - DNA, 15 bp, Homo sapiens
caagagagatgtatc

SEQ ID NO: 48502 - DNA, 15 bp, Homo sapiens
acaagagagatgtat

SEQ ID NO: 48503 - DNA, 15 bp, Homo sapiens
aacaagagagatgta

SEQ ID NO: 48504 - DNA, 15 bp, Homo sapiens
aaacaagagagatgt

SEQ ID NO: 48505 - DNA, 15 bp, Homo sapiens
aaaacaagagagatg

SEQ ID NO: 48506 - DNA, 15 bp, Homo sapiens
taaaacaagagagat

SEQ ID NO: 48507 - DNA, 15 bp, Homo sapiens
ttaaaacaagagaga

SEQ ID NO: 48508 - DNA, 15 bp, Homo sapiens
attaaaacaagagag

SEQ ID NO: 48509 - DNA, 15 bp, Homo sapiens
aattaaaacaagaga

SEQ ID NO: 48510 - DNA, 15 bp, Homo sapiens
caattaaaacaagag

SEQ ID NO: 48511 - DNA, 15 bp, Homo sapiens
acaattaaaacaaga

SEQ ID NO: 48512 - DNA, 15 bp, Homo sapiens
cacaattaaaacaag

SEQ ID NO: 48513 - DNA, 15 bp, Homo sapiens
ccacaattaaaacaa

SEQ ID NO: 48514 - DNA, 15 bp, Homo sapiens
accacaattaaaaca

SEQ ID NO: 48515 - DNA, 15 bp, Homo sapiens
taccacaattaaaac

SEQ ID NO: 48516 - DNA, 15 bp, Homo sapiens
ttaccacaattaaaa

SEQ ID NO: 48517 - DNA, 15 bp, Homo sapiens
attaccacaattaaa

SEQ ID NO: 48518 - DNA, 15 bp, Homo sapiens
aattaccacaattaa

SEQ ID NO: 48519 - DNA, 15 bp, Homo sapiens
caattaccacaatta

SEQ ID NO: 48520 - DNA, 15 bp, Homo sapiens
acaattaccacaatt

SEQ ID NO: 48521 - DNA, 15 bp, Homo sapiens
aacaattaccacaat

SEQ ID NO: 48522 - DNA, 15 bp, Homo sapiens
taacaattaccacaa

SEQ ID NO: 48523 - DNA, 15 bp, Homo sapiens
gtaacaattaccaca

SEQ ID NO: 48524 - DNA, 15 bp, Homo sapiens
tgtaacaattaccac

SEQ ID NO: 48525 - DNA, 15 bp, Homo sapiens
ctgtaacaattacca

SEQ ID NO: 48526 - DNA, 15 bp, Homo sapiens
gctgtaacaattacc

SEQ ID NO: 48527 - DNA, 15 bp, Homo sapiens
tgctgtaacaattac

SEQ ID NO: 48528 - DNA, 15 bp, Homo sapiens
ctgctgtaacaatta

SEQ ID NO: 48529 - DNA, 15 bp, Homo sapiens
actgctgtaacaatt

SEQ ID NO: 48530 - DNA, 15 bp, Homo sapiens
gactgctgtaacaat

SEQ ID NO: 48531 - DNA, 15 bp, Homo sapiens
tgactgctgtaacaa

SEQ ID NO: 48532 - DNA, 15 bp, Homo sapiens
atgactgctgtaaca

SEQ ID NO: 48533 - DNA, 15 bp, Homo sapiens
tatgactgctgtaac

SEQ ID NO: 48534 - DNA, 15 bp, Homo sapiens
ctatgactgctgtaa

SEQ ID NO: 48535 - DNA, 15 bp, Homo sapiens
cctatgactgctgta

SEQ ID NO: 48536 - DNA, 15 bp, Homo sapiens
tcctatgactgctgt

SEQ ID NO: 48537 - DNA, 15 bp, Homo sapiens
ttcctatgactgctg

SEQ ID NO: 48538 - DNA, 15 bp, Homo sapiens
tttcctatgactgct

SEQ ID NO: 48539 - DNA, 15 bp, Homo sapiens
gtttcctatgactgc

SEQ ID NO: 48540 - DNA, 15 bp, Homo sapiens
ggtttcctatgactg

SEQ ID NO: 48541 - DNA, 15 bp, Homo sapiens
tggtttcctatgact

SEQ ID NO: 48542 - DNA, 15 bp, Homo sapiens
ttggtttcctatgac

SEQ ID NO: 48543 - DNA, 15 bp, Homo sapiens
attggtttcctatga

SEQ ID NO: 48544 - DNA, 15 bp, Homo sapiens
tattggtttcctatg

SEQ ID NO: 48545 - DNA, 15 bp, Homo sapiens
gtattggtttcctat

SEQ ID NO: 48546 - DNA, 15 bp, Homo sapiens
tgtattggtttccta

SEQ ID NO: 48547 - DNA, 15 bp, Homo sapiens
ttgtattggtttcct

SEQ ID NO: 48548 - DNA, 15 bp, Homo sapiens
attgtattggtttcc

SEQ ID NO: 48549 - DNA, 15 bp, Homo sapiens
tattgtattggtttc

SEQ ID NO: 48550 - DNA, 15 bp, Homo sapiens
ctattgtattggttt

SEQ ID NO: 48551 - DNA, 15 bp, Homo sapiens
gctattgtattggtt

SEQ ID NO: 48552 - DNA, 15 bp, Homo sapiens
ggctattgtattggt

SEQ ID NO: 48553 - DNA, 15 bp, Homo sapiens
tggctattgtattgg

SEQ ID NO: 48554 - DNA, 15 bp, Homo sapiens
atggctattgtattg

SEQ ID NO: 48555 - DNA, 15 bp, Homo sapiens
gatggctattgtatt

SEQ ID NO: 48556 - DNA, 15 bp, Homo sapiens
ggatggctattgtat

SEQ ID NO: 48557 - DNA, 15 bp, Homo sapiens
aggatggctattgta

SEQ ID NO: 48558 - DNA, 15 bp, Homo sapiens
taggatggctattgt

SEQ ID NO: 48559 - DNA, 15 bp, Homo sapiens
ctaggatggctattg

SEQ ID NO: 48560 - DNA, 15 bp, Homo sapiens
cctaggatggctatt

SEQ ID NO: 48561 - DNA, 15 bp, Homo sapiens
ccctaggatggctat

SEQ ID NO: 48562 - DNA, 15 bp, Homo sapiens
tccctaggatggcta

SEQ ID NO: 48563 - DNA, 15 bp, Homo sapiens
ctccctaggatggct

SEQ ID NO: 48564 - DNA, 15 bp, Homo sapiens
gctccctaggatggc

SEQ ID NO: 48565 - DNA, 15 bp, Homo sapiens
tgctccctaggatgg

SEQ ID NO: 48566 - DNA, 15 bp, Homo sapiens
ctgctccctaggatg

SEQ ID NO: 48567 - DNA, 15 bp, Homo sapiens
cctgctccctaggat

SEQ ID NO: 48568 - DNA, 15 bp, Homo sapiens
tcctgctccctagga

SEQ ID NO: 48569 - DNA, 15 bp, Homo sapiens
ttcctgctccctagg

SEQ ID NO: 48570 - DNA, 15 bp, Homo sapiens
cttcctgctccctag

SEQ ID NO: 48571 - DNA, 15 bp, Homo sapiens
acttcctgctcccta

SEQ ID NO: 48572 - DNA, 15 bp, Homo sapiens
cacttcctgctccct

SEQ ID NO: 48573 - DNA, 15 bp, Homo sapiens
ccacttcctgctccc

SEQ ID NO: 48574 - DNA, 15 bp, Homo sapiens
tccacttcctgctcc

SEQ ID NO: 48575 - DNA, 15 bp, Homo sapiens
ttccacttcctgctc

SEQ ID NO: 48576 - DNA, 15 bp, Homo sapiens
attccacttcctgct

SEQ ID NO: 48577 - DNA, 15 bp, Homo sapiens
gattccacttcctgc

SEQ ID NO: 48578 - DNA, 15 bp, Homo sapiens
agattccacttcctg

SEQ ID NO: 48579 - DNA, 15 bp, Homo sapiens
gagattccacttcct

SEQ ID NO: 48580 - DNA, 15 bp, Homo sapiens
tgagattccacttcc

SEQ ID NO: 48581 - DNA, 15 bp, Homo sapiens
atgagattccacttc

SEQ ID NO: 48582 - DNA, 15 bp, Homo sapiens
aatgagattccactt

SEQ ID NO: 48583 - DNA, 15 bp, Homo sapiens
caatgagattccact

SEQ ID NO: 48584 - DNA, 15 bp, Homo sapiens
acaatgagattccac

SEQ ID NO: 48585 - DNA, 15 bp, Homo sapiens
cacaatgagattcca

SEQ ID NO: 48586 - DNA, 15 bp, Homo sapiens
ccacaatgagattcc

SEQ ID NO: 48587 - DNA, 15 bp, Homo sapiens
accacaatgagattc

SEQ ID NO: 48588 - DNA, 15 bp, Homo sapiens
aaccacaatgagatt

SEQ ID NO: 48589 - DNA, 15 bp, Homo sapiens
aaaccacaatgagat

SEQ ID NO: 48590 - DNA, 15 bp, Homo sapiens
aaaaccacaatgaga

SEQ ID NO: 48591 - DNA, 15 bp, Homo sapiens
caaaaccacaatgag

SEQ ID NO: 48592 - DNA, 15 bp, Homo sapiens
tcaaaaccacaatga

SEQ ID NO: 48593 - DNA, 15 bp, Homo sapiens
atcaaaaccacaatg

SEQ ID NO: 48594 - DNA, 15 bp, Homo sapiens
aatcaaaaccacaat

SEQ ID NO: 48595 - DNA, 15 bp, Homo sapiens
aaatcaaaaccacaa

SEQ ID NO: 48596 - DNA, 15 bp, Homo sapiens
caaatcaaaaccaca

SEQ ID NO: 48597 - DNA, 15 bp, Homo sapiens
gcaaatcaaaaccac

SEQ ID NO: 48598 - DNA, 15 bp, Homo sapiens
tgcaaatcaaaacca

SEQ ID NO: 48599 - DNA, 15 bp, Homo sapiens
atgcaaatcaaaacc

SEQ ID NO: 48600 - DNA, 15 bp, Homo sapiens
aatgcaaatcaaaac

SEQ ID NO: 48601 - DNA, 15 bp, Homo sapiens
aaatgcaaatcaaaa

SEQ ID NO: 48602 - DNA, 15 bp, Homo sapiens
gaaatgcaaatcaaa

SEQ ID NO: 48603 - DNA, 15 bp, Homo sapiens
agaaatgcaaatcaa

SEQ ID NO: 48604 - DNA, 15 bp, Homo sapiens
gagaaatgcaaatca

SEQ ID NO: 48605 - DNA, 15 bp, Homo sapiens
agagaaatgcaaatc

SEQ ID NO: 48606 - DNA, 15 bp, Homo sapiens
cagagaaatgcaaat

SEQ ID NO: 48607 - DNA, 15 bp, Homo sapiens
tcagagaaatgcaaa

SEQ ID NO: 48608 - DNA, 15 bp, Homo sapiens
ctcagagaaatgcaa

SEQ ID NO: 48609 - DNA, 15 bp, Homo sapiens
cctcagagaaatgca

SEQ ID NO: 48610 - DNA, 15 bp, Homo sapiens
tcctcagagaaatgc

SEQ ID NO: 48611 - DNA, 15 bp, Homo sapiens
gtcctcagagaaatg

SEQ ID NO: 48612 - DNA, 15 bp, Homo sapiens
ggtcctcagagaaat

SEQ ID NO: 48613 - DNA, 15 bp, Homo sapiens
tggtcctcagagaaa

SEQ ID NO: 48614 - DNA, 15 bp, Homo sapiens
ctggtcctcagagaa

SEQ ID NO: 48615 - DNA, 15 bp, Homo sapiens
actggtcctcagaga

SEQ ID NO: 48616 - DNA, 15 bp, Homo sapiens
cactggtcctcagag

SEQ ID NO: 48617 - DNA, 15 bp, Homo sapiens
tcactggtcctcaga

SEQ ID NO: 48618 - DNA, 15 bp, Homo sapiens
atcactggtcctcag

SEQ ID NO: 48619 - DNA, 15 bp, Homo sapiens
catcactggtcctca

SEQ ID NO: 48620 - DNA, 15 bp, Homo sapiens
acatcactggtcctc

SEQ ID NO: 48621 - DNA, 15 bp, Homo sapiens
aacatcactggtcct

SEQ ID NO: 48622 - DNA, 15 bp, Homo sapiens
aaacatcactggtcc

SEQ ID NO: 48623 - DNA, 15 bp, Homo sapiens
caaacatcactggtc

SEQ ID NO: 48624 - DNA, 15 bp, Homo sapiens
ccaaacatcactggt

SEQ ID NO: 48625 - DNA, 15 bp, Homo sapiens
gccaaacatcactgg

SEQ ID NO: 48626 - DNA, 15 bp, Homo sapiens
agccaaacatcactg

SEQ ID NO: 48627 - DNA, 15 bp, Homo sapiens
aagccaaacatcact

SEQ ID NO: 48628 - DNA, 15 bp, Homo sapiens
gaagccaaacatcac

SEQ ID NO: 48629 - DNA, 15 bp, Homo sapiens
agaagccaaacatca

SEQ ID NO: 48630 - DNA, 15 bp, Homo sapiens
aagaagccaaacatc

SEQ ID NO: 48631 - DNA, 15 bp, Homo sapiens
aaagaagccaaacat

SEQ ID NO: 48632 - DNA, 15 bp, Homo sapiens
aaaagaagccaaaca

SEQ ID NO: 48633 - DNA, 15 bp, Homo sapiens
aaaaagaagccaaac

SEQ ID NO: 48634 - DNA, 15 bp, Homo sapiens
taaaaagaagccaaa

SEQ ID NO: 48635 - DNA, 15 bp, Homo sapiens
ctaaaaagaagccaa

SEQ ID NO: 48636 - DNA, 15 bp, Homo sapiens
cctaaaaagaagcca

SEQ ID NO: 48637 - DNA, 15 bp, Homo sapiens
acctaaaaagaagcc

SEQ ID NO: 48638 - DNA, 15 bp, Homo sapiens
cacctaaaaagaagc

SEQ ID NO: 48639 - DNA, 15 bp, Homo sapiens
gcacctaaaaagaag

SEQ ID NO: 48640 - DNA, 15 bp, Homo sapiens
agcacctaaaaagaa

SEQ ID NO: 48641 - DNA, 15 bp, Homo sapiens
aagcacctaaaaaga

SEQ ID NO: 48642 - DNA, 15 bp, Homo sapiens
caagcacctaaaaag

SEQ ID NO: 48643 - DNA, 15 bp, Homo sapiens
acaagcacctaaaaa

SEQ ID NO: 48644 - DNA, 15 bp, Homo sapiens
aacaagcacctaaaa

SEQ ID NO: 48645 - DNA, 15 bp, Homo sapiens
caacaagcacctaaa

SEQ ID NO: 48646 - DNA, 15 bp, Homo sapiens
ccaacaagcacctaa

SEQ ID NO: 48647 - DNA, 15 bp, Homo sapiens
gccaacaagcaccta

SEQ ID NO: 48648 - DNA, 15 bp, Homo sapiens
ggccaacaagcacct

SEQ ID NO: 48649 - DNA, 15 bp, Homo sapiens
tggccaacaagcacc

SEQ ID NO: 48650 - DNA, 15 bp, Homo sapiens
atggccaacaagcac

SEQ ID NO: 48651 - DNA, 15 bp, Homo sapiens
aatggccaacaagca

SEQ ID NO: 48652 - DNA, 15 bp, Homo sapiens
aaatggccaacaagc

SEQ ID NO: 48653 - DNA, 15 bp, Homo sapiens
caaatggccaacaag

SEQ ID NO: 48654 - DNA, 15 bp, Homo sapiens
gcaaatggccaacaa

SEQ ID NO: 48655 - DNA, 15 bp, Homo sapiens
tgcaaatggccaaca

SEQ ID NO: 48656 - DNA, 15 bp, Homo sapiens
gtgcaaatggccaac

SEQ ID NO: 48657 - DNA, 15 bp, Homo sapiens
tgtgcaaatggccaa

SEQ ID NO: 48658 - DNA, 15 bp, Homo sapiens
atgtgcaaatggcca

SEQ ID NO: 48659 - DNA, 15 bp, Homo sapiens
gatgtgcaaatggcc

SEQ ID NO: 48660 - DNA, 15 bp, Homo sapiens
agatgtgcaaatggc

SEQ ID NO: 48661 - DNA, 15 bp, Homo sapiens
aagatgtgcaaatgg

SEQ ID NO: 48662 - DNA, 15 bp, Homo sapiens
gaagatgtgcaaatg

SEQ ID NO: 48663 - DNA, 15 bp, Homo sapiens
agaagatgtgcaaat

SEQ ID NO: 48664 - DNA, 15 bp, Homo sapiens
aagaagatgtgcaaa

SEQ ID NO: 48665 - DNA, 15 bp, Homo sapiens
gaagaagatgtgcaa

SEQ ID NO: 48666 - DNA, 15 bp, Homo sapiens
tgaagaagatgtgca

SEQ ID NO: 48667 - DNA, 15 bp, Homo sapiens
ctgaagaagatgtgc

SEQ ID NO: 48668 - DNA, 15 bp, Homo sapiens
tctgaagaagatgtg

SEQ ID NO: 48669 - DNA, 15 bp, Homo sapiens
ttctgaagaagatgt

SEQ ID NO: 48670 - DNA, 15 bp, Homo sapiens
tttctgaagaagatg

SEQ ID NO: 48671 - DNA, 15 bp, Homo sapiens
ttttctgaagaagat

SEQ ID NO: 48672 - DNA, 15 bp, Homo sapiens
tttttctgaagaaga

SEQ ID NO: 48673 - DNA, 15 bp, Homo sapiens
atttttctgaagaag

SEQ ID NO: 48674 - DNA, 15 bp, Homo sapiens
tatttttctgaagaa

SEQ ID NO: 48675 - DNA, 15 bp, Homo sapiens
atatttttctgaaga

SEQ ID NO: 48676 - DNA, 15 bp, Homo sapiens
gatatttttctgaag

SEQ ID NO: 48677 - DNA, 15 bp, Homo sapiens
agatatttttctgaa

SEQ ID NO: 48678 - DNA, 15 bp, Homo sapiens
tagatatttttctga

SEQ ID NO: 48679 - DNA, 15 bp, Homo sapiens
atagatatttttctg

SEQ ID NO: 48680 - DNA, 15 bp, Homo sapiens
aatagatatttttct

SEQ ID NO: 48681 - DNA, 15 bp, Homo sapiens
gaatagatatttttc

SEQ ID NO: 48682 - DNA, 15 bp, Homo sapiens
tgaatagatattttt

SEQ ID NO: 48683 - DNA, 15 bp, Homo sapiens
ctgaatagatatttt

SEQ ID NO: 48684 - DNA, 15 bp, Homo sapiens
tctgaatagatattt

SEQ ID NO: 48685 - DNA, 15 bp, Homo sapiens
atctgaatagatatt

SEQ ID NO: 48686 - DNA, 15 bp, Homo sapiens
gatctgaatagatat

SEQ ID NO: 48687 - DNA, 15 bp, Homo sapiens
agatctgaatagata

SEQ ID NO: 48688 - DNA, 15 bp, Homo sapiens
aagatctgaatagat

SEQ ID NO: 48689 - DNA, 15 bp, Homo sapiens
aaagatctgaataga

SEQ ID NO: 48690 - DNA, 15 bp, Homo sapiens
gaaagatctgaatag

SEQ ID NO: 48691 - DNA, 15 bp, Homo sapiens
tgaaagatctgaata

SEQ ID NO: 48692 - DNA, 15 bp, Homo sapiens
atgaaagatctgaat

SEQ ID NO: 48693 - DNA, 15 bp, Homo sapiens
aatgaaagatctgaa

SEQ ID NO: 48694 - DNA, 15 bp, Homo sapiens
aaatgaaagatctga

SEQ ID NO: 48695 - DNA, 15 bp, Homo sapiens
caaatgaaagatctg

SEQ ID NO: 48696 - DNA, 15 bp, Homo sapiens
ccaaatgaaagatct

SEQ ID NO: 48697 - DNA, 15 bp, Homo sapiens
tccaaatgaaagatc

SEQ ID NO: 48698 - DNA, 15 bp, Homo sapiens
ttccaaatgaaagat

SEQ ID NO: 48699 - DNA, 15 bp, Homo sapiens
tttccaaatgaaaga

SEQ ID NO: 48700 - DNA, 15 bp, Homo sapiens
atttccaaatgaaag

SEQ ID NO: 48701 - DNA, 15 bp, Homo sapiens
tatttccaaatgaaa

SEQ ID NO: 48702 - DNA, 15 bp, Homo sapiens
ttatttccaaatgaa

SEQ ID NO: 48703 - DNA, 15 bp, Homo sapiens
tttatttccaaatga

SEQ ID NO: 48704 - DNA, 15 bp, Homo sapiens
atttatttccaaatg

SEQ ID NO: 48705 - DNA, 15 bp, Homo sapiens
tatttatttccaaat

SEQ ID NO: 48706 - DNA, 15 bp, Homo sapiens
ttatttatttccaaa

SEQ ID NO: 48707 - DNA, 15 bp, Homo sapiens
attatttatttccaa

SEQ ID NO: 48708 - DNA, 15 bp, Homo sapiens
tattatttatttcca

SEQ ID NO: 48709 - DNA, 15 bp, Homo sapiens
atattatttatttcc

SEQ ID NO: 48710 - DNA, 15 bp, Homo sapiens
tatattatttatttc

SEQ ID NO: 48711 - DNA, 15 bp, Homo sapiens
ttatattatttattt

SEQ ID NO: 48712 - DNA, 15 bp, Homo sapiens
gttatattatttatt

SEQ ID NO: 48713 - DNA, 15 bp, Homo sapiens
tgttatattatttat

SEQ ID NO: 48714 - DNA, 15 bp, Homo sapiens
ttgttatattattta

SEQ ID NO: 48715 - DNA, 15 bp, Homo sapiens
tttgttatattattt

SEQ ID NO: 48716 - DNA, 15 bp, Homo sapiens
ttttgttatattatt

SEQ ID NO: 48717 - DNA, 15 bp, Homo sapiens
attttgttatattat

SEQ ID NO: 48718 - DNA, 15 bp, Homo sapiens
tattttgttatatta

SEQ ID NO: 48719 - DNA, 15 bp, Homo sapiens
atattttgttatatt

SEQ ID NO: 48720 - DNA, 15 bp, Homo sapiens
catattttgttatat

SEQ ID NO: 48721 - DNA, 15 bp, Homo sapiens
acatattttgttata

SEQ ID NO: 48722 - DNA, 15 bp, Homo sapiens
tacatattttgttat

SEQ ID NO: 48723 - DNA, 15 bp, Homo sapiens
atacatattttgtta

SEQ ID NO: 48724 - DNA, 15 bp, Homo sapiens
aatacatattttgtt

SEQ ID NO: 48725 - DNA, 15 bp, Homo sapiens
gaatacatattttgt

SEQ ID NO: 48726 - DNA, 15 bp, Homo sapiens
tgaatacatattttg

SEQ ID NO: 48727 - DNA, 15 bp, Homo sapiens
ctgaatacatatttt

SEQ ID NO: 48728 - DNA, 15 bp, Homo sapiens
gctgaatacatattt

SEQ ID NO: 48729 - DNA, 15 bp, Homo sapiens
ggctgaatacatatt

SEQ ID NO: 48730 - DNA, 15 bp, Homo sapiens
gggctgaatacatat

SEQ ID NO: 48731 - DNA, 15 bp, Homo sapiens
agggctgaatacata

SEQ ID NO: 48732 - DNA, 15 bp, Homo sapiens
aagggctgaatacat

SEQ ID NO: 48733 - DNA, 15 bp, Homo sapiens
aaagggctgaataca

SEQ ID NO: 48734 - DNA, 15 bp, Homo sapiens
aaaagggctgaatac

SEQ ID NO: 48735 - DNA, 15 bp, Homo sapiens
aaaaagggctgaata

SEQ ID NO: 48736 - DNA, 15 bp, Homo sapiens
taaaaagggctgaat

SEQ ID NO: 48737 - DNA, 15 bp, Homo sapiens
ttaaaaagggctgaa

SEQ ID NO: 48738 - DNA, 15 bp, Homo sapiens
tttaaaaagggctga

SEQ ID NO: 48739 - DNA, 15 bp, Homo sapiens
ttttaaaaagggctg

SEQ ID NO: 48740 - DNA, 15 bp, Homo sapiens
gttttaaaaagggct

SEQ ID NO: 48741 - DNA, 15 bp, Homo sapiens
agttttaaaaagggc

SEQ ID NO: 48742 - DNA, 15 bp, Homo sapiens
cagttttaaaaaggg

SEQ ID NO: 48743 - DNA, 15 bp, Homo sapiens
ccagttttaaaaagg

SEQ ID NO: 48744 - DNA, 15 bp, Homo sapiens
cccagttttaaaaag

SEQ ID NO: 48745 - DNA, 15 bp, Homo sapiens
tcccagttttaaaaa

SEQ ID NO: 48746 - DNA, 15 bp, Homo sapiens
atcccagttttaaaa

SEQ ID NO: 48747 - DNA, 15 bp, Homo sapiens
tatcccagttttaaa

SEQ ID NO: 48748 - DNA, 15 bp, Homo sapiens
atatcccagttttaa

SEQ ID NO: 48749 - DNA, 15 bp, Homo sapiens
tatatcccagtttta

SEQ ID NO: 48750 - DNA, 15 bp, Homo sapiens
atatatcccagtttt

SEQ ID NO: 48751 - DNA, 15 bp, Homo sapiens
catatatcccagttt

SEQ ID NO: 48752 - DNA, 15 bp, Homo sapiens
acatatatcccagtt

SEQ ID NO: 48753 - DNA, 15 bp, Homo sapiens
gacatatatcccagt

SEQ ID NO: 48754 - DNA, 15 bp, Homo sapiens
agacatatatcccag

SEQ ID NO: 48755 - DNA, 15 bp, Homo sapiens
tagacatatatccca

SEQ ID NO: 48756 - DNA, 15 bp, Homo sapiens
gtagacatatatccc

SEQ ID NO: 48757 - DNA, 15 bp, Homo sapiens
agtagacatatatcc

SEQ ID NO: 48758 - DNA, 15 bp, Homo sapiens
cagtagacatatatc

SEQ ID NO: 48759 - DNA, 15 bp, Homo sapiens
tcagtagacatatat

SEQ ID NO: 48760 - DNA, 15 bp, Homo sapiens
atcagtagacatata

SEQ ID NO: 48761 - DNA, 15 bp, Homo sapiens
aatcagtagacatat

SEQ ID NO: 48762 - DNA, 15 bp, Homo sapiens
taatcagtagacata

SEQ ID NO: 48763 - DNA, 15 bp, Homo sapiens
ataatcagtagacat

SEQ ID NO: 48764 - DNA, 15 bp, Homo sapiens
aataatcagtagaca

SEQ ID NO: 48765 - DNA, 15 bp, Homo sapiens
caataatcagtagac

SEQ ID NO: 48766 - DNA, 15 bp, Homo sapiens
tcaataatcagtaga

SEQ ID NO: 48767 - DNA, 15 bp, Homo sapiens
ctcaataatcagtag

SEQ ID NO: 48768 - DNA, 15 bp, Homo sapiens
actcaataatcagta

SEQ ID NO: 48769 - DNA, 15 bp, Homo sapiens
aactcaataatcagt

SEQ ID NO: 48770 - DNA, 15 bp, Homo sapiens
caactcaataatcag

SEQ ID NO: 48771 - DNA, 15 bp, Homo sapiens
acaactcaataatca

SEQ ID NO: 48772 - DNA, 15 bp, Homo sapiens
tacaactcaataatc

SEQ ID NO: 48773 - DNA, 15 bp, Homo sapiens
ctacaactcaataat

SEQ ID NO: 48774 - DNA, 15 bp, Homo sapiens
cctacaactcaataa

SEQ ID NO: 48775 - DNA, 15 bp, Homo sapiens
tcctacaactcaata

SEQ ID NO: 48776 - DNA, 15 bp, Homo sapiens
ttcctacaactcaat

SEQ ID NO: 48777 - DNA, 15 bp, Homo sapiens
attcctacaactcaa

SEQ ID NO: 48778 - DNA, 15 bp, Homo sapiens
aattcctacaactca

SEQ ID NO: 48779 - DNA, 15 bp, Homo sapiens
gaattcctacaactc

SEQ ID NO: 48780 - DNA, 15 bp, Homo sapiens
agaattcctacaact

SEQ ID NO: 48781 - DNA, 15 bp, Homo sapiens
aagaattcctacaac

SEQ ID NO: 48782 - DNA, 15 bp, Homo sapiens
aaagaattcctacaa

SEQ ID NO: 48783 - DNA, 15 bp, Homo sapiens
taaagaattcctaca

SEQ ID NO: 48784 - DNA, 15 bp, Homo sapiens
ataaagaattcctac

SEQ ID NO: 48785 - DNA, 15 bp, Homo sapiens
tataaagaattccta

SEQ ID NO: 48786 - DNA, 15 bp, Homo sapiens
atataaagaattcct

SEQ ID NO: 48787 - DNA, 15 bp, Homo sapiens
tatataaagaattcc

SEQ ID NO: 48788 - DNA, 15 bp, Homo sapiens
atatataaagaattc

SEQ ID NO: 48789 - DNA, 15 bp, Homo sapiens
aatatataaagaatt

SEQ ID NO: 48790 - DNA, 15 bp, Homo sapiens
gaatatataaagaat

SEQ ID NO: 48791 - DNA, 15 bp, Homo sapiens
agaatatataaagaa

SEQ ID NO: 48792 - DNA, 15 bp, Homo sapiens
tagaatatataaaga

SEQ ID NO: 48793 - DNA, 15 bp, Homo sapiens
ctagaatatataaag

SEQ ID NO: 48794 - DNA, 15 bp, Homo sapiens
tctagaatatataaa

SEQ ID NO: 48795 - DNA, 15 bp, Homo sapiens
atctagaatatataa

SEQ ID NO: 48796 - DNA, 15 bp, Homo sapiens
tatctagaatatata

SEQ ID NO: 48797 - DNA, 15 bp, Homo sapiens
atatctagaatatat

SEQ ID NO: 48798 - DNA, 15 bp, Homo sapiens
tatatctagaatata

SEQ ID NO: 48799 - DNA, 15 bp, Homo sapiens
ttatatctagaatat

SEQ ID NO: 48800 - DNA, 15 bp, Homo sapiens
cttatatctagaata

SEQ ID NO: 48801 - DNA, 15 bp, Homo sapiens
acttatatctagaat

SEQ ID NO: 48802 - DNA, 15 bp, Homo sapiens
aacttatatctagaa

SEQ ID NO: 48803 - DNA, 15 bp, Homo sapiens
gaacttatatctaga

SEQ ID NO: 48804 - DNA, 15 bp, Homo sapiens
ggaacttatatctag

SEQ ID NO: 48805 - DNA, 15 bp, Homo sapiens
aggaacttatatcta

SEQ ID NO: 48806 - DNA, 15 bp, Homo sapiens
aaggaacttatatct

SEQ ID NO: 48807 - DNA, 15 bp, Homo sapiens
taaggaacttatatc

SEQ ID NO: 48808 - DNA, 15 bp, Homo sapiens
ataaggaacttatat

SEQ ID NO: 48809 - DNA, 15 bp, Homo sapiens
gataaggaacttata

SEQ ID NO: 48810 - DNA, 15 bp, Homo sapiens
tgataaggaacttat

SEQ ID NO: 48811 - DNA, 15 bp, Homo sapiens
ctgataaggaactta

SEQ ID NO: 48812 - DNA, 15 bp, Homo sapiens
tctgataaggaactt

SEQ ID NO: 48813 - DNA, 15 bp, Homo sapiens
ctctgataaggaact

SEQ ID NO: 48814 - DNA, 15 bp, Homo sapiens
tctctgataaggaac

SEQ ID NO: 48815 - DNA, 15 bp, Homo sapiens
atctctgataaggaa

SEQ ID NO: 48816 - DNA, 15 bp, Homo sapiens
tatctctgataagga

SEQ ID NO: 48817 - DNA, 15 bp, Homo sapiens
gtatctctgataagg

SEQ ID NO: 48818 - DNA, 15 bp, Homo sapiens
tgtatctctgataag

SEQ ID NO: 48819 - DNA, 15 bp, Homo sapiens
ttgtatctctgataa

SEQ ID NO: 48820 - DNA, 15 bp, Homo sapiens
attgtatctctgata

SEQ ID NO: 48821 - DNA, 15 bp, Homo sapiens
aattgtatctctgat

SEQ ID NO: 48822 - DNA, 15 bp, Homo sapiens
aaattgtatctctga

SEQ ID NO: 48823 - DNA, 15 bp, Homo sapiens
caaattgtatctctg

SEQ ID NO: 48824 - DNA, 15 bp, Homo sapiens
gcaaattgtatctct

SEQ ID NO: 48825 - DNA, 15 bp, Homo sapiens
tgcaaattgtatctc

SEQ ID NO: 48826 - DNA, 15 bp, Homo sapiens
ttgcaaattgtatct

SEQ ID NO: 48827 - DNA, 15 bp, Homo sapiens
cttgcaaattgtatc

SEQ ID NO: 48828 - DNA, 15 bp, Homo sapiens
gcttgcaaattgtat

SEQ ID NO: 48829 - DNA, 15 bp, Homo sapiens
tgcttgcaaattgta

SEQ ID NO: 48830 - DNA, 15 bp, Homo sapiens
ttgcttgcaaattgt

SEQ ID NO: 48831 - DNA, 15 bp, Homo sapiens
attgcttgcaaattg

SEQ ID NO: 48832 - DNA, 15 bp, Homo sapiens
aattgcttgcaaatt

SEQ ID NO: 48833 - DNA, 15 bp, Homo sapiens
aaattgcttgcaaat

SEQ ID NO: 48834 - DNA, 15 bp, Homo sapiens
gaaattgcttgcaaa

SEQ ID NO: 48835 - DNA, 15 bp, Homo sapiens
agaaattgcttgcaa

SEQ ID NO: 48836 - DNA, 15 bp, Homo sapiens
gagaaattgcttgca

SEQ ID NO: 48837 - DNA, 15 bp, Homo sapiens
agagaaattgcttgc

SEQ ID NO: 48838 - DNA, 15 bp, Homo sapiens
gagagaaattgcttg

SEQ ID NO: 48839 - DNA, 15 bp, Homo sapiens
tgagagaaattgctt

SEQ ID NO: 48840 - DNA, 15 bp, Homo sapiens
atgagagaaattgct

SEQ ID NO: 48841 - DNA, 15 bp, Homo sapiens
aatgagagaaattgc

SEQ ID NO: 48842 - DNA, 15 bp, Homo sapiens
gaatgagagaaattg

SEQ ID NO: 48843 - DNA, 15 bp, Homo sapiens
agaatgagagaaatt

SEQ ID NO: 48844 - DNA, 15 bp, Homo sapiens
aagaatgagagaaat

SEQ ID NO: 48845 - DNA, 15 bp, Homo sapiens
aaagaatgagagaaa

SEQ ID NO: 48846 - DNA, 15 bp, Homo sapiens
caaagaatgagagaa

SEQ ID NO: 48847 - DNA, 15 bp, Homo sapiens
ccaaagaatgagaga

SEQ ID NO: 48848 - DNA, 15 bp, Homo sapiens
cccaaagaatgagag

SEQ ID NO: 48849 - DNA, 15 bp, Homo sapiens
acccaaagaatgaga

SEQ ID NO: 48850 - DNA, 15 bp, Homo sapiens
aacccaaagaatgag

SEQ ID NO: 48851 - DNA, 15 bp, Homo sapiens
caacccaaagaatga

SEQ ID NO: 48852 - DNA, 15 bp, Homo sapiens
acaacccaaagaatg

SEQ ID NO: 48853 - DNA, 15 bp, Homo sapiens
gacaacccaaagaat

SEQ ID NO: 48854 - DNA, 15 bp, Homo sapiens
agacaacccaaagaa

SEQ ID NO: 48855 - DNA, 15 bp, Homo sapiens
aagacaacccaaaga

SEQ ID NO: 48856 - DNA, 15 bp, Homo sapiens
aaagacaacccaaag

SEQ ID NO: 48857 - DNA, 15 bp, Homo sapiens
gaaagacaacccaaa

SEQ ID NO: 48858 - DNA, 15 bp, Homo sapiens
agaaagacaacccaa

SEQ ID NO: 48859 - DNA, 15 bp, Homo sapiens
tagaaagacaaccca

SEQ ID NO: 48860 - DNA, 15 bp, Homo sapiens
ttagaaagacaaccc

SEQ ID NO: 48861 - DNA, 15 bp, Homo sapiens
gttagaaagacaacc

SEQ ID NO: 48862 - DNA, 15 bp, Homo sapiens
agttagaaagacaac

SEQ ID NO: 48863 - DNA, 15 bp, Homo sapiens
aagttagaaagacaa

SEQ ID NO: 48864 - DNA, 15 bp, Homo sapiens
gaagttagaaagaca

SEQ ID NO: 48865 - DNA, 15 bp, Homo sapiens
agaagttagaaagac

SEQ ID NO: 48866 - DNA, 15 bp, Homo sapiens
aagaagttagaaaga

SEQ ID NO: 48867 - DNA, 15 bp, Homo sapiens
caagaagttagaaag

SEQ ID NO: 48868 - DNA, 15 bp, Homo sapiens
tcaagaagttagaaa

SEQ ID NO: 48869 - DNA, 15 bp, Homo sapiens
atcaagaagttagaa

SEQ ID NO: 48870 - DNA, 15 bp, Homo sapiens
tatcaagaagttaga

SEQ ID NO: 48871 - DNA, 15 bp, Homo sapiens
ttatcaagaagttag

SEQ ID NO: 48872 - DNA, 15 bp, Homo sapiens
attatcaagaagtta

SEQ ID NO: 48873 - DNA, 15 bp, Homo sapiens
aattatcaagaagtt

SEQ ID NO: 48874 - DNA, 15 bp, Homo sapiens
taattatcaagaagt

SEQ ID NO: 48875 - DNA, 15 bp, Homo sapiens
ataattatcaagaag

SEQ ID NO: 48876 - DNA, 15 bp, Homo sapiens
gataattatcaagaa

SEQ ID NO: 48877 - DNA, 15 bp, Homo sapiens
agataattatcaaga

SEQ ID NO: 48878 - DNA, 15 bp, Homo sapiens
aagataattatcaag

SEQ ID NO: 48879 - DNA, 15 bp, Homo sapiens
aaagataattatcaa

SEQ ID NO: 48880 - DNA, 15 bp, Homo sapiens
caaagataattatca

SEQ ID NO: 48881 - DNA, 15 bp, Homo sapiens
tcaaagataattatc

SEQ ID NO: 48882 - DNA, 15 bp, Homo sapiens
ttcaaagataattat

SEQ ID NO: 48883 - DNA, 15 bp, Homo sapiens
cttcaaagataatta

SEQ ID NO: 48884 - DNA, 15 bp, Homo sapiens
gcttcaaagataatt

SEQ ID NO: 48885 - DNA, 15 bp, Homo sapiens
tgcttcaaagataat

SEQ ID NO: 48886 - DNA, 15 bp, Homo sapiens
gtgcttcaaagataa

SEQ ID NO: 48887 - DNA, 15 bp, Homo sapiens
agtgcttcaaagata

SEQ ID NO: 48888 - DNA, 15 bp, Homo sapiens
cagtgcttcaaagat

SEQ ID NO: 48889 - DNA, 15 bp, Homo sapiens
tcagtgcttcaaaga

SEQ ID NO: 48890 - DNA, 15 bp, Homo sapiens
ttcagtgcttcaaag

SEQ ID NO: 48891 - DNA, 15 bp, Homo sapiens
cttcagtgcttcaaa

SEQ ID NO: 48892 - DNA, 15 bp, Homo sapiens
acttcagtgcttcaa

SEQ ID NO: 48893 - DNA, 15 bp, Homo sapiens
cacttcagtgcttca

SEQ ID NO: 48894 - DNA, 15 bp, Homo sapiens
acacttcagtgcttc

SEQ ID NO: 48895 - DNA, 15 bp, Homo sapiens
aacacttcagtgctt

SEQ ID NO: 48896 - DNA, 15 bp, Homo sapiens
aaacacttcagtgct

SEQ ID NO: 48897 - DNA, 15 bp, Homo sapiens
taaacacttcagtgc

SEQ ID NO: 48898 - DNA, 15 bp, Homo sapiens
ttaaacacttcagtg

SEQ ID NO: 48899 - DNA, 15 bp, Homo sapiens
attaaacacttcagt

SEQ ID NO: 48900 - DNA, 15 bp, Homo sapiens
aattaaacacttcag

SEQ ID NO: 48901 - DNA, 15 bp, Homo sapiens
aaattaaacacttca

SEQ ID NO: 48902 - DNA, 15 bp, Homo sapiens
aaaattaaacacttc

SEQ ID NO: 48903 - DNA, 15 bp, Homo sapiens
caaaattaaacactt

SEQ ID NO: 48904 - DNA, 15 bp, Homo sapiens
ccaaaattaaacact

SEQ ID NO: 48905 - DNA, 15 bp, Homo sapiens
accaaaattaaacac

SEQ ID NO: 48906 - DNA, 15 bp, Homo sapiens
caccaaaattaaaca

SEQ ID NO: 48907 - DNA, 15 bp, Homo sapiens
tcaccaaaattaaac

SEQ ID NO: 48908 - DNA, 15 bp, Homo sapiens
atcaccaaaattaaa

SEQ ID NO: 48909 - DNA, 15 bp, Homo sapiens
catcaccaaaattaa

SEQ ID NO: 48910 - DNA, 15 bp, Homo sapiens
acatcaccaaaatta

SEQ ID NO: 48911 - DNA, 15 bp, Homo sapiens
gacatcaccaaaatt

SEQ ID NO: 48912 - DNA, 15 bp, Homo sapiens
agacatcaccaaaat

SEQ ID NO: 48913 - DNA, 15 bp, Homo sapiens
tagacatcaccaaaa

SEQ ID NO: 48914 - DNA, 15 bp, Homo sapiens
ctagacatcaccaaa

SEQ ID NO: 48915 - DNA, 15 bp, Homo sapiens
actagacatcaccaa

SEQ ID NO: 48916 - DNA, 15 bp, Homo sapiens
aactagacatcacca

SEQ ID NO: 48917 - DNA, 15 bp, Homo sapiens
aaactagacatcacc

SEQ ID NO: 48918 - DNA, 15 bp, Homo sapiens
caaactagacatcac

SEQ ID NO: 48919 - DNA, 15 bp, Homo sapiens
acaaactagacatca

SEQ ID NO: 48920 - DNA, 15 bp, Homo sapiens
aacaaactagacatc

SEQ ID NO: 48921 - DNA, 15 bp, Homo sapiens
gaacaaactagacat

SEQ ID NO: 48922 - DNA, 15 bp, Homo sapiens
agaacaaactagaca

SEQ ID NO: 48923 - DNA, 15 bp, Homo sapiens
aagaacaaactagac

SEQ ID NO: 48924 - DNA, 15 bp, Homo sapiens
aaagaacaaactaga

SEQ ID NO: 48925 - DNA, 15 bp, Homo sapiens
aaaagaacaaactag

SEQ ID NO: 48926 - DNA, 15 bp, Homo sapiens
caaaagaacaaacta

SEQ ID NO: 48927 - DNA, 15 bp, Homo sapiens
acaaaagaacaaact

SEQ ID NO: 48928 - DNA, 15 bp, Homo sapiens
aacaaaagaacaaac

SEQ ID NO: 48929 - DNA, 15 bp, Homo sapiens
caacaaaagaacaaa

SEQ ID NO: 48930 - DNA, 15 bp, Homo sapiens
gcaacaaaagaacaa

SEQ ID NO: 48931 - DNA, 15 bp, Homo sapiens
agcaacaaaagaaca

SEQ ID NO: 48932 - DNA, 15 bp, Homo sapiens
aagcaacaaaagaac

SEQ ID NO: 48933 - DNA, 15 bp, Homo sapiens
gaagcaacaaaagaa

SEQ ID NO: 48934 - DNA, 15 bp, Homo sapiens
agaagcaacaaaaga

SEQ ID NO: 48935 - DNA, 15 bp, Homo sapiens
cagaagcaacaaaag

SEQ ID NO: 48936 - DNA, 15 bp, Homo sapiens
tcagaagcaacaaaa

SEQ ID NO: 48937 - DNA, 15 bp, Homo sapiens
ttcagaagcaacaaa

SEQ ID NO: 48938 - DNA, 15 bp, Homo sapiens
attcagaagcaacaa

SEQ ID NO: 48939 - DNA, 15 bp, Homo sapiens
aattcagaagcaaca

SEQ ID NO: 48940 - DNA, 15 bp, Homo sapiens
caattcagaagcaac

SEQ ID NO: 48941 - DNA, 15 bp, Homo sapiens
ccaattcagaagcaa

SEQ ID NO: 48942 - DNA, 15 bp, Homo sapiens
accaattcagaagca

SEQ ID NO: 48943 - DNA, 15 bp, Homo sapiens
caccaattcagaagc

SEQ ID NO: 48944 - DNA, 15 bp, Homo sapiens
acaccaattcagaag

SEQ ID NO: 48945 - DNA, 15 bp, Homo sapiens
gacaccaattcagaa

SEQ ID NO: 48946 - DNA, 15 bp, Homo sapiens
tgacaccaattcaga

SEQ ID NO: 48947 - DNA, 15 bp, Homo sapiens
atgacaccaattcag

SEQ ID NO: 48948 - DNA, 15 bp, Homo sapiens
tatgacaccaattca

SEQ ID NO: 48949 - DNA, 15 bp, Homo sapiens
atatgacaccaattc

SEQ ID NO: 48950 - DNA, 15 bp, Homo sapiens
gatatgacaccaatt

SEQ ID NO: 48951 - DNA, 15 bp, Homo sapiens
agatatgacaccaat

SEQ ID NO: 48952 - DNA, 15 bp, Homo sapiens
tagatatgacaccaa

SEQ ID NO: 48953 - DNA, 15 bp, Homo sapiens
ttagatatgacacca

SEQ ID NO: 48954 - DNA, 15 bp, Homo sapiens
cttagatatgacacc

SEQ ID NO: 48955 - DNA, 15 bp, Homo sapiens
tcttagatatgacac

SEQ ID NO: 48956 - DNA, 15 bp, Homo sapiens
ttcttagatatgaca

SEQ ID NO: 48957 - DNA, 15 bp, Homo sapiens
tttcttagatatgac

SEQ ID NO: 48958 - DNA, 15 bp, Homo sapiens
gtttcttagatatga

SEQ ID NO: 48959 - DNA, 15 bp, Homo sapiens
ggtttcttagatatg

SEQ ID NO: 48960 - DNA, 15 bp, Homo sapiens
tggtttcttagatat

SEQ ID NO: 48961 - DNA, 15 bp, Homo sapiens
atggtttcttagata

SEQ ID NO: 48962 - DNA, 15 bp, Homo sapiens
aatggtttcttagat

SEQ ID NO: 48963 - DNA, 15 bp, Homo sapiens
caatggtttcttaga

SEQ ID NO: 48964 - DNA, 15 bp, Homo sapiens
gcaatggtttcttag

SEQ ID NO: 48965 - DNA, 15 bp, Homo sapiens
ggcaatggtttctta

SEQ ID NO: 48966 - DNA, 15 bp, Homo sapiens
tggcaatggtttctt

SEQ ID NO: 48967 - DNA, 15 bp, Homo sapiens
ttggcaatggtttct

SEQ ID NO: 48968 - DNA, 15 bp, Homo sapiens
tttggcaatggtttc

SEQ ID NO: 48969 - DNA, 15 bp, Homo sapiens
atttggcaatggttt

SEQ ID NO: 48970 - DNA, 15 bp, Homo sapiens
gatttggcaatggtt

SEQ ID NO: 48971 - DNA, 15 bp, Homo sapiens
ggatttggcaatggt

SEQ ID NO: 48972 - DNA, 15 bp, Homo sapiens
tggatttggcaatgg

SEQ ID NO: 48973 - DNA, 15 bp, Homo sapiens
ttggatttggcaatg

SEQ ID NO: 48974 - DNA, 15 bp, Homo sapiens
cttggatttggcaat

SEQ ID NO: 48975 - DNA, 15 bp, Homo sapiens
ccttggatttggcaa

SEQ ID NO: 48976 - DNA, 15 bp, Homo sapiens
accttggatttggca

SEQ ID NO: 48977 - DNA, 15 bp, Homo sapiens
gaccttggatttggc

SEQ ID NO: 48978 - DNA, 15 bp, Homo sapiens
agaccttggatttgg

SEQ ID NO: 48979 - DNA, 15 bp, Homo sapiens
aagaccttggatttg

SEQ ID NO: 48980 - DNA, 15 bp, Homo sapiens
caagaccttggattt

SEQ ID NO: 48981 - DNA, 15 bp, Homo sapiens
tcaagaccttggatt

SEQ ID NO: 48982 - DNA, 15 bp, Homo sapiens
atcaagaccttggat

SEQ ID NO: 48983 - DNA, 15 bp, Homo sapiens
tatcaagaccttgga

SEQ ID NO: 48984 - DNA, 15 bp, Homo sapiens
ttatcaagaccttgg

SEQ ID NO: 48985 - DNA, 15 bp, Homo sapiens
attatcaagaccttg

SEQ ID NO: 48986 - DNA, 15 bp, Homo sapiens
aattatcaagacctt

SEQ ID NO: 48987 - DNA, 15 bp, Homo sapiens
taattatcaagacct

SEQ ID NO: 48988 - DNA, 15 bp, Homo sapiens
gtaattatcaagacc

SEQ ID NO: 48989 - DNA, 15 bp, Homo sapiens
ggtaattatcaagac

SEQ ID NO: 48990 - DNA, 15 bp, Homo sapiens
aggtaattatcaaga

SEQ ID NO: 48991 - DNA, 15 bp, Homo sapiens
aaggtaattatcaag

SEQ ID NO: 48992 - DNA, 15 bp, Homo sapiens
aaaggtaattatcaa

SEQ ID NO: 48993 - DNA, 15 bp, Homo sapiens
caaaggtaattatca

SEQ ID NO: 48994 - DNA, 15 bp, Homo sapiens
tcaaaggtaattatc

SEQ ID NO: 48995 - DNA, 15 bp, Homo sapiens
ttcaaaggtaattat

SEQ ID NO: 48996 - DNA, 15 bp, Homo sapiens
gttcaaaggtaatta

SEQ ID NO: 48997 - DNA, 15 bp, Homo sapiens
ggttcaaaggtaatt

SEQ ID NO: 48998 - DNA, 15 bp, Homo sapiens
tggttcaaaggtaat

SEQ ID NO: 48999 - DNA, 15 bp, Homo sapiens
gtggttcaaaggtaa

SEQ ID NO: 49000 - DNA, 15 bp, Homo sapiens
agtggttcaaaggta

SEQ ID NO: 49001 - DNA, 15 bp, Homo sapiens
tagtggttcaaaggt

SEQ ID NO: 49002 - DNA, 15 bp, Homo sapiens
ttagtggttcaaagg

SEQ ID NO: 49003 - DNA, 15 bp, Homo sapiens
tttagtggttcaaag

SEQ ID NO: 49004 - DNA, 15 bp, Homo sapiens
ctttagtggttcaaa

SEQ ID NO: 49005 - DNA, 15 bp, Homo sapiens
actttagtggttcaa

SEQ ID NO: 49006 - DNA, 15 bp, Homo sapiens
cactttagtggttca

SEQ ID NO: 49007 - DNA, 15 bp, Homo sapiens
acactttagtggttc

SEQ ID NO: 49008 - DNA, 15 bp, Homo sapiens
aacactttagtggtt

SEQ ID NO: 49009 - DNA, 15 bp, Homo sapiens
aaacactttagtggt

SEQ ID NO: 49010 - DNA, 15 bp, Homo sapiens
taaacactttagtgg

SEQ ID NO: 49011 - DNA, 15 bp, Homo sapiens
ttaaacactttagtg

SEQ ID NO: 49012 - DNA, 15 bp, Homo sapiens
attaaacactttagt

SEQ ID NO: 49013 - DNA, 15 bp, Homo sapiens
aattaaacactttag

SEQ ID NO: 49014 - DNA, 15 bp, Homo sapiens
aaattaaacacttta

SEQ ID NO: 49015 - DNA, 15 bp, Homo sapiens
aaaattaaacacttt

SEQ ID NO: 49016 - DNA, 15 bp, Homo sapiens
taaactagacatcac

SEQ ID NO: 49017 - DNA, 15 bp, Homo sapiens
ataaactagacatca

SEQ ID NO: 49018 - DNA, 15 bp, Homo sapiens
aataaactagacatc

SEQ ID NO: 49019 - DNA, 15 bp, Homo sapiens
gaataaactagacat

SEQ ID NO: 49020 - DNA, 15 bp, Homo sapiens
agaataaactagaca

SEQ ID NO: 49021 - DNA, 15 bp, Homo sapiens
aagaataaactagac

SEQ ID NO: 49022 - DNA, 15 bp, Homo sapiens
aaagaataaactaga

SEQ ID NO: 49023 - DNA, 15 bp, Homo sapiens
aaaagaataaactag

SEQ ID NO: 49024 - DNA, 15 bp, Homo sapiens
caaaagaataaacta

SEQ ID NO: 49025 - DNA, 15 bp, Homo sapiens
acaaaagaataaact

SEQ ID NO: 49026 - DNA, 15 bp, Homo sapiens
aacaaaagaataaac

SEQ ID NO: 49027 - DNA, 15 bp, Homo sapiens
caacaaaagaataaa

SEQ ID NO: 49028 - DNA, 15 bp, Homo sapiens
gcaacaaaagaataa

SEQ ID NO: 49029 - DNA, 15 bp, Homo sapiens
agcaacaaaagaata

SEQ ID NO: 49030 - DNA, 15 bp, Homo sapiens
aagcaacaaaagaat

SEQ ID NO: 49031 - DNA, 15 bp, Homo sapiens
agtttcttagatatg

SEQ ID NO: 49032 - DNA, 15 bp, Homo sapiens
tagtttcttagatat

SEQ ID NO: 49033 - DNA, 15 bp, Homo sapiens
atagtttcttagata

SEQ ID NO: 49034 - DNA, 15 bp, Homo sapiens
aatagtttcttagat

SEQ ID NO: 49035 - DNA, 15 bp, Homo sapiens
caatagtttcttaga

SEQ ID NO: 49036 - DNA, 15 bp, Homo sapiens
gcaatagtttcttag

SEQ ID NO: 49037 - DNA, 15 bp, Homo sapiens
ggcaatagtttctta

SEQ ID NO: 49038 - DNA, 15 bp, Homo sapiens
tggcaatagtttctt

SEQ ID NO: 49039 - DNA, 15 bp, Homo sapiens
ttggcaatagtttct

SEQ ID NO: 49040 - DNA, 15 bp, Homo sapiens
tttggcaatagtttc

SEQ ID NO: 49041 - DNA, 15 bp, Homo sapiens
atttggcaatagttt

SEQ ID NO: 49042 - DNA, 15 bp, Homo sapiens
gatttggcaatagtt

SEQ ID NO: 49043 - DNA, 15 bp, Homo sapiens
ggatttggcaatagt

SEQ ID NO: 49044 - DNA, 15 bp, Homo sapiens
tggatttggcaatag

SEQ ID NO: 49045 - DNA, 15 bp, Homo sapiens
ttggatttggcaata

SEQ ID NO: 49046 - DNA, 15 bp, Homo sapiens
cgaccttggatttgg

SEQ ID NO: 49047 - DNA, 15 bp, Homo sapiens
acgaccttggatttg

SEQ ID NO: 49048 - DNA, 15 bp, Homo sapiens
cacgaccttggattt

SEQ ID NO: 49049 - DNA, 15 bp, Homo sapiens
tcacgaccttggatt

SEQ ID NO: 49050 - DNA, 15 bp, Homo sapiens
ttcacgaccttggat

SEQ ID NO: 49051 - DNA, 15 bp, Homo sapiens
gttcacgaccttgga

SEQ ID NO: 49052 - DNA, 15 bp, Homo sapiens
tgttcacgaccttgg

SEQ ID NO: 49053 - DNA, 15 bp, Homo sapiens
atgttcacgaccttg

SEQ ID NO: 49054 - DNA, 15 bp, Homo sapiens
aatgttcacgacctt

SEQ ID NO: 49055 - DNA, 15 bp, Homo sapiens
taatgttcacgacct

SEQ ID NO: 49056 - DNA, 15 bp, Homo sapiens
gtaatgttcacgacc

SEQ ID NO: 49057 - DNA, 15 bp, Homo sapiens
tgtaatgttcacgac

SEQ ID NO: 49058 - DNA, 15 bp, Homo sapiens
gtgtaatgttcacga

SEQ ID NO: 49059 - DNA, 15 bp, Homo sapiens
agtgtaatgttcacg

SEQ ID NO: 49060 - DNA, 15 bp, Homo sapiens
aagtgtaatgttcac

SEQ ID NO: 49061 - DNA, 15 bp, Homo sapiens
caagtgtaatgttca

SEQ ID NO: 49062 - DNA, 15 bp, Homo sapiens
acaagtgtaatgttc

SEQ ID NO: 49063 - DNA, 15 bp, Homo sapiens
aacaagtgtaatgtt

SEQ ID NO: 49064 - DNA, 15 bp, Homo sapiens
aaacaagtgtaatgt

SEQ ID NO: 49065 - DNA, 15 bp, Homo sapiens
aaaacaagtgtaatg

SEQ ID NO: 49066 - DNA, 15 bp, Homo sapiens
gaaaacaagtgtaat

SEQ ID NO: 49067 - DNA, 15 bp, Homo sapiens
agaaaacaagtgtaa

SEQ ID NO: 49068 - DNA, 15 bp, Homo sapiens
aagaaaacaagtgta

SEQ ID NO: 49069 - DNA, 15 bp, Homo sapiens
aaagaaaacaagtgt

SEQ ID NO: 49070 - DNA, 15 bp, Homo sapiens
aaaagaaaacaagtg

SEQ ID NO: 49071 - DNA, 15 bp, Homo sapiens
taaaagaaaacaagt

SEQ ID NO: 49072 - DNA, 15 bp, Homo sapiens
ttaaaagaaaacaag

SEQ ID NO: 49073 - DNA, 15 bp, Homo sapiens
attaaaagaaaacaa

SEQ ID NO: 49074 - DNA, 15 bp, Homo sapiens
cattaaaagaaaaca

SEQ ID NO: 49075 - DNA, 15 bp, Homo sapiens
ccattaaaagaaaac

SEQ ID NO: 49076 - DNA, 15 bp, Homo sapiens
gccattaaaagaaaa

SEQ ID NO: 49077 - DNA, 15 bp, Homo sapiens
agccattaaaagaaa

SEQ ID NO: 49078 - DNA, 15 bp, Homo sapiens
gagccattaaaagaa

SEQ ID NO: 49079 - DNA, 15 bp, Homo sapiens
agagccattaaaaga

SEQ ID NO: 49080 - DNA, 15 bp, Homo sapiens
cagagccattaaaag

SEQ ID NO: 49081 - DNA, 15 bp, Homo sapiens
ccagagccattaaaa

SEQ ID NO: 49082 - DNA, 15 bp, Homo sapiens
gccagagccattaaa

SEQ ID NO: 49083 - DNA, 15 bp, Homo sapiens
ggccagagccattaa

SEQ ID NO: 49084 - DNA, 15 bp, Homo sapiens
tggccagagccatta

SEQ ID NO: 49085 - DNA, 15 bp, Homo sapiens
atggccagagccatt

SEQ ID NO: 49086 - DNA, 15 bp, Homo sapiens
catggccagagccat

SEQ ID NO: 49087 - DNA, 15 bp, Homo sapiens
acatggccagagcca

SEQ ID NO: 49088 - DNA, 15 bp, Homo sapiens
cacatggccagagcc

SEQ ID NO: 49089 - DNA, 15 bp, Homo sapiens
tcacatggccagagc

SEQ ID NO: 49090 - DNA, 15 bp, Homo sapiens
ttcacatggccagag

SEQ ID NO: 49091 - DNA, 15 bp, Homo sapiens
cttcacatggccaga

SEQ ID NO: 49092 - DNA, 15 bp, Homo sapiens
acttcacatggccag

SEQ ID NO: 49093 - DNA, 15 bp, Homo sapiens
cacttcacatggcca

SEQ ID NO: 49094 - DNA, 15 bp, Homo sapiens
gcacttcacatggcc

SEQ ID NO: 49095 - DNA, 15 bp, Homo sapiens
ggcacttcacatggc

SEQ ID NO: 49096 - DNA, 15 bp, Homo sapiens
tggcacttcacatgg

SEQ ID NO: 49097 - DNA, 15 bp, Homo sapiens
ctggcacttcacatg

SEQ ID NO: 49098 - DNA, 15 bp, Homo sapiens
gctggcacttcacat

SEQ ID NO: 49099 - DNA, 15 bp, Homo sapiens
agctggcacttcaca

SEQ ID NO: 49100 - DNA, 15 bp, Homo sapiens
aagctggcacttcac

SEQ ID NO: 49101 - DNA, 15 bp, Homo sapiens
gaagctggcacttca

SEQ ID NO: 49102 - DNA, 15 bp, Homo sapiens
ggaagctggcacttc

SEQ ID NO: 49103 - DNA, 15 bp, Homo sapiens
gggaagctggcactt

SEQ ID NO: 49104 - DNA, 15 bp, Homo sapiens
ggggaagctggcact

SEQ ID NO: 49105 - DNA, 15 bp, Homo sapiens
aggggaagctggcac

SEQ ID NO: 49106 - DNA, 15 bp, Homo sapiens
aaggggaagctggca

SEQ ID NO: 49107 - DNA, 15 bp, Homo sapiens
gaaggggaagctggc

SEQ ID NO: 49108 - DNA, 15 bp, Homo sapiens
tgaaggggaagctgg

SEQ ID NO: 49109 - DNA, 15 bp, Homo sapiens
atgaaggggaagctg

SEQ ID NO: 49110 - DNA, 15 bp, Homo sapiens
gatgaaggggaagct

SEQ ID NO: 49111 - DNA, 15 bp, Homo sapiens
agatgaaggggaagc

SEQ ID NO: 49112 - DNA, 15 bp, Homo sapiens
aagatgaaggggaag

SEQ ID NO: 49113 - DNA, 15 bp, Homo sapiens
aaagatgaaggggaa

SEQ ID NO: 49114 - DNA, 15 bp, Homo sapiens
gaaagatgaagggga

SEQ ID NO: 49115 - DNA, 15 bp, Homo sapiens
tgaaagatgaagggg

SEQ ID NO: 49116 - DNA, 15 bp, Homo sapiens
ctgaaagatgaaggg

SEQ ID NO: 49117 - DNA, 15 bp, Homo sapiens
actgaaagatgaagg

SEQ ID NO: 49118 - DNA, 15 bp, Homo sapiens
tactgaaagatgaag

SEQ ID NO: 49119 - DNA, 15 bp, Homo sapiens
atactgaaagatgaa

SEQ ID NO: 49120 - DNA, 15 bp, Homo sapiens
catactgaaagatga

SEQ ID NO: 49121 - DNA, 15 bp, Homo sapiens
tcatactgaaagatg

SEQ ID NO: 49122 - DNA, 15 bp, Homo sapiens
ctcatactgaaagat

SEQ ID NO: 49123 - DNA, 15 bp, Homo sapiens
actcatactgaaaga

SEQ ID NO: 49124 - DNA, 15 bp, Homo sapiens
cactcatactgaaag

SEQ ID NO: 49125 - DNA, 15 bp, Homo sapiens
acactcatactgaaa

SEQ ID NO: 49126 - DNA, 15 bp, Homo sapiens
tacactcatactgaa

SEQ ID NO: 49127 - DNA, 15 bp, Homo sapiens
ttacactcatactga

SEQ ID NO: 49128 - DNA, 15 bp, Homo sapiens
tttacactcatactg

SEQ ID NO: 49129 - DNA, 15 bp, Homo sapiens
atttacactcatact

SEQ ID NO: 49130 - DNA, 15 bp, Homo sapiens
aatttacactcatac

SEQ ID NO: 49131 - DNA, 15 bp, Homo sapiens
aaatttacactcata

SEQ ID NO: 49132 - DNA, 15 bp, Homo sapiens
gaaatttacactcat

SEQ ID NO: 49133 - DNA, 15 bp, Homo sapiens
ggaaatttacactca

SEQ ID NO: 49134 - DNA, 15 bp, Homo sapiens
aggaaatttacactc

SEQ ID NO: 49135 - DNA, 15 bp, Homo sapiens
taggaaatttacact

SEQ ID NO: 49136 - DNA, 15 bp, Homo sapiens
ttaggaaatttacac

SEQ ID NO: 49137 - DNA, 15 bp, Homo sapiens
cttaggaaatttaca

SEQ ID NO: 49138 - DNA, 15 bp, Homo sapiens
ccttaggaaatttac

SEQ ID NO: 49139 - DNA, 15 bp, Homo sapiens
gccttaggaaattta

SEQ ID NO: 49140 - DNA, 15 bp, Homo sapiens
ggccttaggaaattt

SEQ ID NO: 49141 - DNA, 15 bp, Homo sapiens
aggccttaggaaatt

SEQ ID NO: 49142 - DNA, 15 bp, Homo sapiens
aaggccttaggaaat

SEQ ID NO: 49143 - DNA, 15 bp, Homo sapiens
gaaggccttaggaaa

SEQ ID NO: 49144 - DNA, 15 bp, Homo sapiens
ggaaggccttaggaa

SEQ ID NO: 49145 - DNA, 15 bp, Homo sapiens
gggaaggccttagga

SEQ ID NO: 49146 - DNA, 15 bp, Homo sapiens
tgggaaggccttagg

SEQ ID NO: 49147 - DNA, 15 bp, Homo sapiens
ctgggaaggccttag

SEQ ID NO: 49148 - DNA, 15 bp, Homo sapiens
tctgggaaggcctta

SEQ ID NO: 49149 - DNA, 15 bp, Homo sapiens
ttctgggaaggcctt

SEQ ID NO: 49150 - DNA, 15 bp, Homo sapiens
tttctgggaaggcct

SEQ ID NO: 49151 - DNA, 15 bp, Homo sapiens
gtttctgggaaggcc

SEQ ID NO: 49152 - DNA, 15 bp, Homo sapiens
agtttctgggaaggc

SEQ ID NO: 49153 - DNA, 15 bp, Homo sapiens
aagtttctgggaagg

SEQ ID NO: 49154 - DNA, 15 bp, Homo sapiens
taagtttctgggaag

SEQ ID NO: 49155 - DNA, 15 bp, Homo sapiens
ctaagtttctgggaa

SEQ ID NO: 49156 - DNA, 15 bp, Homo sapiens
gctaagtttctggga

SEQ ID NO: 49157 - DNA, 15 bp, Homo sapiens
tgctaagtttctggg

SEQ ID NO: 49158 - DNA, 15 bp, Homo sapiens
ctgctaagtttctgg

SEQ ID NO: 49159 - DNA, 15 bp, Homo sapiens
tctgctaagtttctg

SEQ ID NO: 49160 - DNA, 15 bp, Homo sapiens
atctgctaagtttct

SEQ ID NO: 49161 - DNA, 15 bp, Homo sapiens
catctgctaagtttc

SEQ ID NO: 49162 - DNA, 15 bp, Homo sapiens
gcatctgctaagttt

SEQ ID NO: 49163 - DNA, 15 bp, Homo sapiens
agcatctgctaagtt

SEQ ID NO: 49164 - DNA, 15 bp, Homo sapiens
gagcatctgctaagt

SEQ ID NO: 49165 - DNA, 15 bp, Homo sapiens
agagcatctgctaag

SEQ ID NO: 49166 - DNA, 15 bp, Homo sapiens
tagagcatctgctaa

SEQ ID NO: 49167 - DNA, 15 bp, Homo sapiens
ttagagcatctgcta

SEQ ID NO: 49168 - DNA, 15 bp, Homo sapiens
attagagcatctgct

SEQ ID NO: 49169 - DNA, 15 bp, Homo sapiens
gattagagcatctgc

SEQ ID NO: 49170 - DNA, 15 bp, Homo sapiens
ggattagagcatctg

SEQ ID NO: 49171 - DNA, 15 bp, Homo sapiens
aggattagagcatct

SEQ ID NO: 49172 - DNA, 15 bp, Homo sapiens
aaggattagagcatc

SEQ ID NO: 49173 - DNA, 15 bp, Homo sapiens
gaaggattagagcat

SEQ ID NO: 49174 - DNA, 15 bp, Homo sapiens
ggaaggattagagca

SEQ ID NO: 49175 - DNA, 15 bp, Homo sapiens
aggaaggattagagc

SEQ ID NO: 49176 - DNA, 15 bp, Homo sapiens
caggaaggattagag

SEQ ID NO: 49177 - DNA, 15 bp, Homo sapiens
acaggaaggattaga

SEQ ID NO: 49178 - DNA, 15 bp, Homo sapiens
tacaggaaggattag

SEQ ID NO: 49179 - DNA, 15 bp, Homo sapiens
gtacaggaaggatta

SEQ ID NO: 49180 - DNA, 15 bp, Homo sapiens
tgtacaggaaggatt

SEQ ID NO: 49181 - DNA, 15 bp, Homo sapiens
ctgtacaggaaggat

SEQ ID NO: 49182 - DNA, 15 bp, Homo sapiens
gctgtacaggaagga

SEQ ID NO: 49183 - DNA, 15 bp, Homo sapiens
ggctgtacaggaagg

SEQ ID NO: 49184 - DNA, 15 bp, Homo sapiens
aggctgtacaggaag

SEQ ID NO: 49185 - DNA, 15 bp, Homo sapiens
caggctgtacaggaa

SEQ ID NO: 49186 - DNA, 15 bp, Homo sapiens
gcaggctgtacagga

SEQ ID NO: 49187 - DNA, 15 bp, Homo sapiens
tgcaggctgtacagg

SEQ ID NO: 49188 - DNA, 15 bp, Homo sapiens
ctgcaggctgtacag

SEQ ID NO: 49189 - DNA, 15 bp, Homo sapiens
tctgcaggctgtaca

SEQ ID NO: 49190 - DNA, 15 bp, Homo sapiens
ttctgcaggctgtac

SEQ ID NO: 49191 - DNA, 15 bp, Homo sapiens
attctgcaggctgta

SEQ ID NO: 49192 - DNA, 15 bp, Homo sapiens
aattctgcaggctgt

SEQ ID NO: 49193 - DNA, 15 bp, Homo sapiens
caattctgcaggctg

SEQ ID NO: 49194 - DNA, 15 bp, Homo sapiens
acaattctgcaggct

SEQ ID NO: 49195 - DNA, 15 bp, Homo sapiens
cacaattctgcaggc

SEQ ID NO: 49196 - DNA, 15 bp, Homo sapiens
tcacaattctgcagg

SEQ ID NO: 49197 - DNA, 15 bp, Homo sapiens
gtcacaattctgcag

SEQ ID NO: 49198 - DNA, 15 bp, Homo sapiens
ggtcacaattctgca

SEQ ID NO: 49199 - DNA, 15 bp, Homo sapiens
gggtcacaattctgc

SEQ ID NO: 49200 - DNA, 15 bp, Homo sapiens
tgggtcacaattctg

SEQ ID NO: 49201 - DNA, 15 bp, Homo sapiens
ttgggtcacaattct

SEQ ID NO: 49202 - DNA, 15 bp, Homo sapiens
gttgggtcacaattc

SEQ ID NO: 49203 - DNA, 15 bp, Homo sapiens
agttgggtcacaatt

SEQ ID NO: 49204 - DNA, 15 bp, Homo sapiens
tagttgggtcacaat

SEQ ID NO: 49205 - DNA, 15 bp, Homo sapiens
ttagttgggtcacaa

SEQ ID NO: 49206 - DNA, 15 bp, Homo sapiens
tttagttgggtcaca

SEQ ID NO: 49207 - DNA, 15 bp, Homo sapiens
gtttagttgggtcac

SEQ ID NO: 49208 - DNA, 15 bp, Homo sapiens
ggtttagttgggtca

SEQ ID NO: 49209 - DNA, 15 bp, Homo sapiens
aggtttagttgggtc

SEQ ID NO: 49210 - DNA, 15 bp, Homo sapiens
gaggtttagttgggt

SEQ ID NO: 49211 - DNA, 15 bp, Homo sapiens
agaggtttagttggg

SEQ ID NO: 49212 - DNA, 15 bp, Homo sapiens
aagaggtttagttgg

SEQ ID NO: 49213 - DNA, 15 bp, Homo sapiens
aaagaggtttagttg

SEQ ID NO: 49214 - DNA, 15 bp, Homo sapiens
aaaagaggtttagtt

SEQ ID NO: 49215 - DNA, 15 bp, Homo sapiens
gaaaagaggtttagt

SEQ ID NO: 49216 - DNA, 15 bp, Homo sapiens
agaaaagaggtttag

SEQ ID NO: 49217 - DNA, 15 bp, Homo sapiens
aagaaaagaggttta

SEQ ID NO: 49218 - DNA, 15 bp, Homo sapiens
aaagaaaagaggttt

SEQ ID NO: 49219 - DNA, 15 bp, Homo sapiens
taaagaaaagaggtt

SEQ ID NO: 49220 - DNA, 15 bp, Homo sapiens
ataaagaaaagaggt

SEQ ID NO: 49221 - DNA, 15 bp, Homo sapiens
tataaagaaaagagg

SEQ ID NO: 49222 - DNA, 15 bp, Homo sapiens
ttataaagaaaagag

SEQ ID NO: 49223 - DNA, 15 bp, Homo sapiens
cttataaagaaaaga

SEQ ID NO: 49224 - DNA, 15 bp, Homo sapiens
acttataaagaaaag

SEQ ID NO: 49225 - DNA, 15 bp, Homo sapiens
aacttataaagaaaa

SEQ ID NO: 49226 - DNA, 15 bp, Homo sapiens
taacttataaagaaa

SEQ ID NO: 49227 - DNA, 15 bp, Homo sapiens
gtaacttataaagaa

SEQ ID NO: 49228 - DNA, 15 bp, Homo sapiens
ggtaacttataaaga

SEQ ID NO: 49229 - DNA, 15 bp, Homo sapiens
gggtaacttataaag

SEQ ID NO: 49230 - DNA, 15 bp, Homo sapiens
tgggtaacttataaa

SEQ ID NO: 49231 - DNA, 15 bp, Homo sapiens
ctgggtaacttataa

SEQ ID NO: 49232 - DNA, 15 bp, Homo sapiens
actgggtaacttata

SEQ ID NO: 49233 - DNA, 15 bp, Homo sapiens
gactgggtaacttat

SEQ ID NO: 49234 - DNA, 15 bp, Homo sapiens
agactgggtaactta

SEQ ID NO: 49235 - DNA, 15 bp, Homo sapiens
gagactgggtaactt

SEQ ID NO: 49236 - DNA, 15 bp, Homo sapiens
tgagactgggtaact

SEQ ID NO: 49237 - DNA, 15 bp, Homo sapiens
ctgagactgggtaac

SEQ ID NO: 49238 - DNA, 15 bp, Homo sapiens
cctgagactgggtaa

SEQ ID NO: 49239 - DNA, 15 bp, Homo sapiens
acctgagactgggta

SEQ ID NO: 49240 - DNA, 15 bp, Homo sapiens
tacctgagactgggt

SEQ ID NO: 49241 - DNA, 15 bp, Homo sapiens
atacctgagactggg

SEQ ID NO: 49242 - DNA, 15 bp, Homo sapiens
aatacctgagactgg

SEQ ID NO: 49243 - DNA, 15 bp, Homo sapiens
aaatacctgagactg

SEQ ID NO: 49244 - DNA, 15 bp, Homo sapiens
gaaatacctgagact

SEQ ID NO: 49245 - DNA, 15 bp, Homo sapiens
agaaatacctgagac

SEQ ID NO: 49246 - DNA, 15 bp, Homo sapiens
aagaaatacctgaga

SEQ ID NO: 49247 - DNA, 15 bp, Homo sapiens
aaagaaatacctgag

SEQ ID NO: 49248 - DNA, 15 bp, Homo sapiens
taaagaaatacctga

SEQ ID NO: 49249 - DNA, 15 bp, Homo sapiens
ataaagaaatacctg

SEQ ID NO: 49250 - DNA, 15 bp, Homo sapiens
tataaagaaatacct

SEQ ID NO: 49251 - DNA, 15 bp, Homo sapiens
ctataaagaaatacc

SEQ ID NO: 49252 - DNA, 15 bp, Homo sapiens
gctataaagaaatac

SEQ ID NO: 49253 - DNA, 15 bp, Homo sapiens
tgctataaagaaata

SEQ ID NO: 49254 - DNA, 15 bp, Homo sapiens
ctgctataaagaaat

SEQ ID NO: 49255 - DNA, 15 bp, Homo sapiens
actgctataaagaaa

SEQ ID NO: 49256 - DNA, 15 bp, Homo sapiens
cactgctataaagaa

SEQ ID NO: 49257 - DNA, 15 bp, Homo sapiens
acactgctataaaga

SEQ ID NO: 49258 - DNA, 15 bp, Homo sapiens
cacactgctataaag

SEQ ID NO: 49259 - DNA, 15 bp, Homo sapiens
tcacactgctataaa

SEQ ID NO: 49260 - DNA, 15 bp, Homo sapiens
ctcacactgctataa

SEQ ID NO: 49261 - DNA, 15 bp, Homo sapiens
tctcacactgctata

SEQ ID NO: 49262 - DNA, 15 bp, Homo sapiens
atctcacactgctat

SEQ ID NO: 49263 - DNA, 15 bp, Homo sapiens
catctcacactgcta

SEQ ID NO: 49264 - DNA, 15 bp, Homo sapiens
tcatctcacactgct

SEQ ID NO: 49265 - DNA, 15 bp, Homo sapiens
ttcatctcacactgc

SEQ ID NO: 49266 - DNA, 15 bp, Homo sapiens
gttcatctcacactg

SEQ ID NO: 49267 - DNA, 15 bp, Homo sapiens
agttcatctcacact

SEQ ID NO: 49268 - DNA, 15 bp, Homo sapiens
tagttcatctcacac

SEQ ID NO: 49269 - DNA, 15 bp, Homo sapiens
ttagttcatctcaca

SEQ ID NO: 49270 - DNA, 15 bp, Homo sapiens
attagttcatctcac

SEQ ID NO: 49271 - DNA, 15 bp, Homo sapiens
tattagttcatctca

SEQ ID NO: 49272 - DNA, 15 bp, Homo sapiens
gtattagttcatctc

SEQ ID NO: 49273 - DNA, 15 bp, Homo sapiens
tgtattagttcatct

SEQ ID NO: 49274 - DNA, 15 bp, Homo sapiens
gtgtattagttcatc

SEQ ID NO: 49275 - DNA, 15 bp, Homo sapiens
agtgtattagttcat

SEQ ID NO: 49276 - DNA, 15 bp, Homo sapiens
gagtgtattagttca

SEQ ID NO: 49277 - DNA, 15 bp, Homo sapiens
tgagtgtattagttc

SEQ ID NO: 49278 - DNA, 15 bp, Homo sapiens
gtgagtgtattagtt

SEQ ID NO: 49279 - DNA, 15 bp, Homo sapiens
cgtgagtgtattagt

SEQ ID NO: 49280 - DNA, 15 bp, Homo sapiens
ccgtgagtgtattag

SEQ ID NO: 49281 - DNA, 15 bp, Homo sapiens
accgtgagtgtatta

SEQ ID NO: 49282 - DNA, 15 bp, Homo sapiens
aaccgtgagtgtatt

SEQ ID NO: 49283 - DNA, 15 bp, Homo sapiens
taaccgtgagtgtat

SEQ ID NO: 49284 - DNA, 15 bp, Homo sapiens
ctaaccgtgagtgta

SEQ ID NO: 49285 - DNA, 15 bp, Homo sapiens
actaaccgtgagtgt

SEQ ID NO: 49286 - DNA, 15 bp, Homo sapiens
gactaaccgtgagtg

SEQ ID NO: 49287 - DNA, 15 bp, Homo sapiens
agactaaccgtgagt

SEQ ID NO: 49288 - DNA, 15 bp, Homo sapiens
tagactaaccgtgag

SEQ ID NO: 49289 - DNA, 15 bp, Homo sapiens
gtagactaaccgtga

SEQ ID NO: 49290 - DNA, 15 bp, Homo sapiens
cgtagactaaccgtg

SEQ ID NO: 49291 - DNA, 15 bp, Homo sapiens
tcgtagactaaccgt

SEQ ID NO: 49292 - DNA, 15 bp, Homo sapiens
atcgtagactaaccg

SEQ ID NO: 49293 - DNA, 15 bp, Homo sapiens
gatcgtagactaacc

SEQ ID NO: 49294 - DNA, 15 bp, Homo sapiens
ggatcgtagactaac

SEQ ID NO: 49295 - DNA, 15 bp, Homo sapiens
tggatcgtagactaa

SEQ ID NO: 49296 - DNA, 15 bp, Homo sapiens
gtggatcgtagacta

SEQ ID NO: 49297 - DNA, 15 bp, Homo sapiens
agtggatcgtagact

SEQ ID NO: 49298 - DNA, 15 bp, Homo sapiens
aagtggatcgtagac

SEQ ID NO: 49299 - DNA, 15 bp, Homo sapiens
aaagtggatcgtaga

SEQ ID NO: 49300 - DNA, 15 bp, Homo sapiens
caaagtggatcgtag

SEQ ID NO: 49301 - DNA, 15 bp, Homo sapiens
tcaaagtggatcgta

SEQ ID NO: 49302 - DNA, 15 bp, Homo sapiens
ctcaaagtggatcgt

SEQ ID NO: 49303 - DNA, 15 bp, Homo sapiens
actcaaagtggatcg

SEQ ID NO: 49304 - DNA, 15 bp, Homo sapiens
tactcaaagtggatc

SEQ ID NO: 49305 - DNA, 15 bp, Homo sapiens
ttactcaaagtggat

SEQ ID NO: 49306 - DNA, 15 bp, Homo sapiens
tttactcaaagtgga

SEQ ID NO: 49307 - DNA, 15 bp, Homo sapiens
atttactcaaagtgg

SEQ ID NO: 49308 - DNA, 15 bp, Homo sapiens
aatttactcaaagtg

SEQ ID NO: 49309 - DNA, 15 bp, Homo sapiens
aaatttactcaaagt

SEQ ID NO: 49310 - DNA, 15 bp, Homo sapiens
aaaatttactcaaag

SEQ ID NO: 49311 - DNA, 15 bp, Homo sapiens
aaaaatttactcaaa

SEQ ID NO: 49312 - DNA, 15 bp, Homo sapiens
caaaaatttactcaa

SEQ ID NO: 49313 - DNA, 15 bp, Homo sapiens
acaaaaatttactca

SEQ ID NO: 49314 - DNA, 15 bp, Homo sapiens
tacaaaaatttactc

SEQ ID NO: 49315 - DNA, 15 bp, Homo sapiens
ctacaaaaatttact

SEQ ID NO: 49316 - DNA, 15 bp, Homo sapiens
cctacaaaaatttac

SEQ ID NO: 49317 - DNA, 15 bp, Homo sapiens
ccctacaaaaattta

SEQ ID NO: 49318 - DNA, 15 bp, Homo sapiens
cccctacaaaaattt

SEQ ID NO: 49319 - DNA, 15 bp, Homo sapiens
acccctacaaaaatt

SEQ ID NO: 49320 - DNA, 15 bp, Homo sapiens
cacccctacaaaaat

SEQ ID NO: 49321 - DNA, 15 bp, Homo sapiens
tcacccctacaaaaa

SEQ ID NO: 49322 - DNA, 15 bp, Homo sapiens
ttcacccctacaaaa

SEQ ID NO: 49323 - DNA, 15 bp, Homo sapiens
attcacccctacaaa

SEQ ID NO: 49324 - DNA, 15 bp, Homo sapiens
aattcacccctacaa

SEQ ID NO: 49325 - DNA, 15 bp, Homo sapiens
taattcacccctaca

SEQ ID NO: 49326 - DNA, 15 bp, Homo sapiens
ctaattcacccctac

SEQ ID NO: 49327 - DNA, 15 bp, Homo sapiens
cctaattcaccccta

SEQ ID NO: 49328 - DNA, 15 bp, Homo sapiens
ccctaattcacccct

SEQ ID NO: 49329 - DNA, 15 bp, Homo sapiens
cccctaattcacccc

SEQ ID NO: 49330 - DNA, 15 bp, Homo sapiens
acccctaattcaccc

SEQ ID NO: 49331 - DNA, 15 bp, Homo sapiens
gacccctaattcacc

SEQ ID NO: 49332 - DNA, 15 bp, Homo sapiens
ggacccctaattcac

SEQ ID NO: 49333 - DNA, 15 bp, Homo sapiens
tggacccctaattca

SEQ ID NO: 49334 - DNA, 15 bp, Homo sapiens
ttggacccctaattc

SEQ ID NO: 49335 - DNA, 15 bp, Homo sapiens
tttggacccctaatt

SEQ ID NO: 49336 - DNA, 15 bp, Homo sapiens
atttggacccctaat

SEQ ID NO: 49337 - DNA, 15 bp, Homo sapiens
aatttggacccctaa

SEQ ID NO: 49338 - DNA, 15 bp, Homo sapiens
caatttggaccccta

SEQ ID NO: 49339 - DNA, 15 bp, Homo sapiens
tcaatttggacccct

SEQ ID NO: 49340 - DNA, 15 bp, Homo sapiens
atcaatttggacccc

SEQ ID NO: 49341 - DNA, 15 bp, Homo sapiens
aatcaatttggaccc

SEQ ID NO: 49342 - DNA, 15 bp, Homo sapiens
gaatcaatttggacc

SEQ ID NO: 49343 - DNA, 15 bp, Homo sapiens
ggaatcaatttggac

SEQ ID NO: 49344 - DNA, 15 bp, Homo sapiens
aggaatcaatttgga

SEQ ID NO: 49345 - DNA, 15 bp, Homo sapiens
taggaatcaatttgg

SEQ ID NO: 49346 - DNA, 15 bp, Homo sapiens
ataggaatcaatttg

SEQ ID NO: 49347 - DNA, 15 bp, Homo sapiens
gataggaatcaattt

SEQ ID NO: 49348 - DNA, 15 bp, Homo sapiens
agataggaatcaatt

SEQ ID NO: 49349 - DNA, 15 bp, Homo sapiens
cagataggaatcaat

SEQ ID NO: 49350 - DNA, 15 bp, Homo sapiens
gcagataggaatcaa

SEQ ID NO: 49351 - DNA, 15 bp, Homo sapiens
tgcagataggaatca

SEQ ID NO: 49352 - DNA, 15 bp, Homo sapiens
atgcagataggaatc

SEQ ID NO: 49353 - DNA, 15 bp, Homo sapiens
catgcagataggaat

SEQ ID NO: 49354 - DNA, 15 bp, Homo sapiens
ccatgcagataggaa

SEQ ID NO: 49355 - DNA, 15 bp, Homo sapiens
tccatgcagatagga

SEQ ID NO: 49356 - DNA, 15 bp, Homo sapiens
atccatgcagatagg

SEQ ID NO: 49357 - DNA, 15 bp, Homo sapiens
tatccatgcagatag

SEQ ID NO: 49358 - DNA, 15 bp, Homo sapiens
ctatccatgcagata

SEQ ID NO: 49359 - DNA, 15 bp, Homo sapiens
gctatccatgcagat

SEQ ID NO: 49360 - DNA, 15 bp, Homo sapiens
ggctatccatgcaga

SEQ ID NO: 49361 - DNA, 15 bp, Homo sapiens
tggctatccatgcag

SEQ ID NO: 49362 - DNA, 15 bp, Homo sapiens
ctggctatccatgca

SEQ ID NO: 49363 - DNA, 15 bp, Homo sapiens
actggctatccatgc

SEQ ID NO: 49364 - DNA, 15 bp, Homo sapiens
aactggctatccatg

SEQ ID NO: 49365 - DNA, 15 bp, Homo sapiens
caactggctatccat

SEQ ID NO: 49366 - DNA, 15 bp, Homo sapiens
acaactggctatcca

SEQ ID NO: 49367 - DNA, 15 bp, Homo sapiens
aacaactggctatcc

SEQ ID NO: 49368 - DNA, 15 bp, Homo sapiens
gaacaactggctatc

SEQ ID NO: 49369 - DNA, 15 bp, Homo sapiens
ggaacaactggctat

SEQ ID NO: 49370 - DNA, 15 bp, Homo sapiens
tggaacaactggcta

SEQ ID NO: 49371 - DNA, 15 bp, Homo sapiens
ctggaacaactggct

SEQ ID NO: 49372 - DNA, 15 bp, Homo sapiens
gctggaacaactggc

SEQ ID NO: 49373 - DNA, 15 bp, Homo sapiens
tgctggaacaactgg

SEQ ID NO: 49374 - DNA, 15 bp, Homo sapiens
atgctggaacaactg

SEQ ID NO: 49375 - DNA, 15 bp, Homo sapiens
gatgctggaacaact

SEQ ID NO: 49376 - DNA, 15 bp, Homo sapiens
tgatgctggaacaac

SEQ ID NO: 49377 - DNA, 15 bp, Homo sapiens
atgatgctggaacaa

SEQ ID NO: 49378 - DNA, 15 bp, Homo sapiens
aatgatgctggaaca

SEQ ID NO: 49379 - DNA, 15 bp, Homo sapiens
aaatgatgctggaac

SEQ ID NO: 49380 - DNA, 15 bp, Homo sapiens
caaatgatgctggaa

SEQ ID NO: 49381 - DNA, 15 bp, Homo sapiens
acaaatgatgctgga

SEQ ID NO: 49382 - DNA, 15 bp, Homo sapiens
cacaaatgatgctgg

SEQ ID NO: 49383 - DNA, 15 bp, Homo sapiens
ccacaaatgatgctg

SEQ ID NO: 49384 - DNA, 15 bp, Homo sapiens
tccacaaatgatgct

SEQ ID NO: 49385 - DNA, 15 bp, Homo sapiens
ttccacaaatgatgc

SEQ ID NO: 49386 - DNA, 15 bp, Homo sapiens
gttccacaaatgatg

SEQ ID NO: 49387 - DNA, 15 bp, Homo sapiens
tgttccacaaatgat

SEQ ID NO: 49388 - DNA, 15 bp, Homo sapiens
ttgttccacaaatga

SEQ ID NO: 49389 - DNA, 15 bp, Homo sapiens
gttgttccacaaatg

SEQ ID NO: 49390 - DNA, 15 bp, Homo sapiens
agttgttccacaaat

SEQ ID NO: 49391 - DNA, 15 bp, Homo sapiens
tagttgttccacaaa

SEQ ID NO: 49392 - DNA, 15 bp, Homo sapiens
atagttgttccacaa

SEQ ID NO: 49393 - DNA, 15 bp, Homo sapiens
aatagttgttccaca

SEQ ID NO: 49394 - DNA, 15 bp, Homo sapiens
aaatagttgttccac

SEQ ID NO: 49395 - DNA, 15 bp, Homo sapiens
aaaatagttgttcca

SEQ ID NO: 49396 - DNA, 15 bp, Homo sapiens
aaaaatagttgttcc

SEQ ID NO: 49397 - DNA, 15 bp, Homo sapiens
aaaaaatagttgttc

SEQ ID NO: 49398 - DNA, 15 bp, Homo sapiens
gaaaaaatagttgtt

SEQ ID NO: 49399 - DNA, 15 bp, Homo sapiens
ggaaaaaatagttgt

SEQ ID NO: 49400 - DNA, 15 bp, Homo sapiens
gggaaaaaatagttg

SEQ ID NO: 49401 - DNA, 15 bp, Homo sapiens
ggggaaaaaatagtt

SEQ ID NO: 49402 - DNA, 15 bp, Homo sapiens
tggggaaaaaatagt

SEQ ID NO: 49403 - DNA, 15 bp, Homo sapiens
atggggaaaaaatag

SEQ ID NO: 49404 - DNA, 15 bp, Homo sapiens
aatggggaaaaaata

SEQ ID NO: 49405 - DNA, 15 bp, Homo sapiens
caatggggaaaaaat

SEQ ID NO: 49406 - DNA, 15 bp, Homo sapiens
tcaatggggaaaaaa

SEQ ID NO: 49407 - DNA, 15 bp, Homo sapiens
atcaatggggaaaaa

SEQ ID NO: 49408 - DNA, 15 bp, Homo sapiens
aatcaatggggaaaa

SEQ ID NO: 49409 - DNA, 15 bp, Homo sapiens
taatcaatggggaaa

SEQ ID NO: 49410 - DNA, 15 bp, Homo sapiens
ttaatcaatggggaa

SEQ ID NO: 49411 - DNA, 15 bp, Homo sapiens
attaatcaatgggga

SEQ ID NO: 49412 - DNA, 15 bp, Homo sapiens
gattaatcaatgggg

SEQ ID NO: 49413 - DNA, 15 bp, Homo sapiens
agattaatcaatggg

SEQ ID NO: 49414 - DNA, 15 bp, Homo sapiens
gagattaatcaatgg

SEQ ID NO: 49415 - DNA, 15 bp, Homo sapiens
tgagattaatcaatg

SEQ ID NO: 49416 - DNA, 15 bp, Homo sapiens
ctgagattaatcaat

SEQ ID NO: 49417 - DNA, 15 bp, Homo sapiens
tctgagattaatcaa

SEQ ID NO: 49418 - DNA, 15 bp, Homo sapiens
ttctgagattaatca

SEQ ID NO: 49419 - DNA, 15 bp, Homo sapiens
attctgagattaatc

SEQ ID NO: 49420 - DNA, 15 bp, Homo sapiens
gattctgagattaat

SEQ ID NO: 49421 - DNA, 15 bp, Homo sapiens
ggattctgagattaa

SEQ ID NO: 49422 - DNA, 15 bp, Homo sapiens
aggattctgagatta

SEQ ID NO: 49423 - DNA, 15 bp, Homo sapiens
aaggattctgagatt

SEQ ID NO: 49424 - DNA, 15 bp, Homo sapiens
taaggattctgagat

SEQ ID NO: 49425 - DNA, 15 bp, Homo sapiens
ataaggattctgaga

SEQ ID NO: 49426 - DNA, 15 bp, Homo sapiens
gataaggattctgag

SEQ ID NO: 49427 - DNA, 15 bp, Homo sapiens
tgataaggattctga

SEQ ID NO: 49428 - DNA, 15 bp, Homo sapiens
ttgataaggattctg

SEQ ID NO: 49429 - DNA, 15 bp, Homo sapiens
tttgataaggattct

SEQ ID NO: 49430 - DNA, 15 bp, Homo sapiens
ttttgataaggattc

SEQ ID NO: 49431 - DNA, 15 bp, Homo sapiens
attttgataaggatt

SEQ ID NO: 49432 - DNA, 15 bp, Homo sapiens
gattttgataaggat

SEQ ID NO: 49433 - DNA, 15 bp, Homo sapiens
tgattttgataagga

SEQ ID NO: 49434 - DNA, 15 bp, Homo sapiens
ttgattttgataagg

SEQ ID NO: 49435 - DNA, 15 bp, Homo sapiens
attgattttgataag

SEQ ID NO: 49436 - DNA, 15 bp, Homo sapiens
aattgattttgataa

SEQ ID NO: 49437 - DNA, 15 bp, Homo sapiens
aaattgattttgata

SEQ ID NO: 49438 - DNA, 15 bp, Homo sapiens
taaattgattttgat

SEQ ID NO: 49439 - DNA, 15 bp, Homo sapiens
gtaaattgattttga

SEQ ID NO: 49440 - DNA, 15 bp, Homo sapiens
agtaaattgattttg

SEQ ID NO: 49441 - DNA, 15 bp, Homo sapiens
cagtaaattgatttt

SEQ ID NO: 49442 - DNA, 15 bp, Homo sapiens
acagtaaattgattt

SEQ ID NO: 49443 - DNA, 15 bp, Homo sapiens
tacagtaaattgatt

SEQ ID NO: 49444 - DNA, 15 bp, Homo sapiens
ttacagtaaattgat

SEQ ID NO: 49445 - DNA, 15 bp, Homo sapiens
attacagtaaattga

SEQ ID NO: 49446 - DNA, 15 bp, Homo sapiens
aattacagtaaattg

SEQ ID NO: 49447 - DNA, 15 bp, Homo sapiens
taattacagtaaatt

SEQ ID NO: 49448 - DNA, 15 bp, Homo sapiens
ttaattacagtaaat

SEQ ID NO: 49449 - DNA, 15 bp, Homo sapiens
cttaattacagtaaa

SEQ ID NO: 49450 - DNA, 15 bp, Homo sapiens
tcttaattacagtaa

SEQ ID NO: 49451 - DNA, 15 bp, Homo sapiens
ctcttaattacagta

SEQ ID NO: 49452 - DNA, 15 bp, Homo sapiens
cctcttaattacagt

SEQ ID NO: 49453 - DNA, 15 bp, Homo sapiens
ccctcttaattacag

SEQ ID NO: 49454 - DNA, 15 bp, Homo sapiens
accctcttaattaca

SEQ ID NO: 49455 - DNA, 15 bp, Homo sapiens
aaccctcttaattac

SEQ ID NO: 49456 - DNA, 15 bp, Homo sapiens
aaaccctcttaatta

SEQ ID NO: 49457 - DNA, 15 bp, Homo sapiens
taaaccctcttaatt

SEQ ID NO: 49458 - DNA, 15 bp, Homo sapiens
ataaaccctcttaat

SEQ ID NO: 49459 - DNA, 15 bp, Homo sapiens
aataaaccctcttaa

SEQ ID NO: 49460 - DNA, 15 bp, Homo sapiens
aaataaaccctctta

SEQ ID NO: 49461 - DNA, 15 bp, Homo sapiens
caaataaaccctctt

SEQ ID NO: 49462 - DNA, 15 bp, Homo sapiens
acaaataaaccctct

SEQ ID NO: 49463 - DNA, 15 bp, Homo sapiens
cacaaataaaccctc

SEQ ID NO: 49464 - DNA, 15 bp, Homo sapiens
ccacaaataaaccct

SEQ ID NO: 49465 - DNA, 15 bp, Homo sapiens
tccacaaataaaccc

SEQ ID NO: 49466 - DNA, 15 bp, Homo sapiens
gtccacaaataaacc

SEQ ID NO: 49467 - DNA, 15 bp, Homo sapiens
agtccacaaataaac

SEQ ID NO: 49468 - DNA, 15 bp, Homo sapiens
gagtccacaaataaa

SEQ ID NO: 49469 - DNA, 15 bp, Homo sapiens
agagtccacaaataa

SEQ ID NO: 49470 - DNA, 15 bp, Homo sapiens
gagagtccacaaata

SEQ ID NO: 49471 - DNA, 15 bp, Homo sapiens
tgagagtccacaaat

SEQ ID NO: 49472 - DNA, 15 bp, Homo sapiens
ttgagagtccacaaa

SEQ ID NO: 49473 - DNA, 15 bp, Homo sapiens
attgagagtccacaa

SEQ ID NO: 49474 - DNA, 15 bp, Homo sapiens
cattgagagtccaca

SEQ ID NO: 49475 - DNA, 15 bp, Homo sapiens
gcattgagagtccac

SEQ ID NO: 49476 - DNA, 15 bp, Homo sapiens
agcattgagagtcca

SEQ ID NO: 49477 - DNA, 15 bp, Homo sapiens
tagcattgagagtcc

SEQ ID NO: 49478 - DNA, 15 bp, Homo sapiens
atagcattgagagtc

SEQ ID NO: 49479 - DNA, 15 bp, Homo sapiens
aatagcattgagagt

SEQ ID NO: 49480 - DNA, 15 bp, Homo sapiens
gaatagcattgagag

SEQ ID NO: 49481 - DNA, 15 bp, Homo sapiens
ggaatagcattgaga

SEQ ID NO: 49482 - DNA, 15 bp, Homo sapiens
tggaatagcattgag

SEQ ID NO: 49483 - DNA, 15 bp, Homo sapiens
atggaatagcattga

SEQ ID NO: 49484 - DNA, 15 bp, Homo sapiens
aatggaatagcattg

SEQ ID NO: 49485 - DNA, 15 bp, Homo sapiens
caatggaatagcatt

SEQ ID NO: 49486 - DNA, 15 bp, Homo sapiens
tcaatggaatagcat

SEQ ID NO: 49487 - DNA, 15 bp, Homo sapiens
gtcaatggaatagca

SEQ ID NO: 49488 - DNA, 15 bp, Homo sapiens
ggtcaatggaatagc

SEQ ID NO: 49489 - DNA, 15 bp, Homo sapiens
aggtcaatggaatag

SEQ ID NO: 49490 - DNA, 15 bp, Homo sapiens
taggtcaatggaata

SEQ ID NO: 49491 - DNA, 15 bp, Homo sapiens
gtaggtcaatggaat

SEQ ID NO: 49492 - DNA, 15 bp, Homo sapiens
tgtaggtcaatggaa

SEQ ID NO: 49493 - DNA, 15 bp, Homo sapiens
gtgtaggtcaatgga

SEQ ID NO: 49494 - DNA, 15 bp, Homo sapiens
tgtgtaggtcaatgg

SEQ ID NO: 49495 - DNA, 15 bp, Homo sapiens
atgtgtaggtcaatg

SEQ ID NO: 49496 - DNA, 15 bp, Homo sapiens
gatgtgtaggtcaat

SEQ ID NO: 49497 - DNA, 15 bp, Homo sapiens
agatgtgtaggtcaa

SEQ ID NO: 49498 - DNA, 15 bp, Homo sapiens
tagatgtgtaggtca

SEQ ID NO: 49499 - DNA, 15 bp, Homo sapiens
atagatgtgtaggtc

SEQ ID NO: 49500 - DNA, 15 bp, Homo sapiens
gatagatgtgtaggt

SEQ ID NO: 49501 - DNA, 15 bp, Homo sapiens
agatagatgtgtagg

SEQ ID NO: 49502 - DNA, 15 bp, Homo sapiens
aagatagatgtgtag

SEQ ID NO: 49503 - DNA, 15 bp, Homo sapiens
aaagatagatgtgta

SEQ ID NO: 49504 - DNA, 15 bp, Homo sapiens
taaagatagatgtgt

SEQ ID NO: 49505 - DNA, 15 bp, Homo sapiens
ataaagatagatgtg

SEQ ID NO: 49506 - DNA, 15 bp, Homo sapiens
cataaagatagatgt

SEQ ID NO: 49507 - DNA, 15 bp, Homo sapiens
gcataaagatagatg

SEQ ID NO: 49508 - DNA, 15 bp, Homo sapiens
ggcataaagatagat

SEQ ID NO: 49509 - DNA, 15 bp, Homo sapiens
tggcataaagataga

SEQ ID NO: 49510 - DNA, 15 bp, Homo sapiens
ctggcataaagatag

SEQ ID NO: 49511 - DNA, 15 bp, Homo sapiens
actggcataaagata

SEQ ID NO: 49512 - DNA, 15 bp, Homo sapiens
tactggcataaagat

SEQ ID NO: 49513 - DNA, 15 bp, Homo sapiens
ttactggcataaaga

SEQ ID NO: 49514 - DNA, 15 bp, Homo sapiens
gttactggcataaag

SEQ ID NO: 49515 - DNA, 15 bp, Homo sapiens
tgttactggcataaa

SEQ ID NO: 49516 - DNA, 15 bp, Homo sapiens
gtgttactggcataa

SEQ ID NO: 49517 - DNA, 15 bp, Homo sapiens
tgtgttactggcata

SEQ ID NO: 49518 - DNA, 15 bp, Homo sapiens
gtgtgttactggcat

SEQ ID NO: 49519 - DNA, 15 bp, Homo sapiens
agtgtgttactggca

SEQ ID NO: 49520 - DNA, 15 bp, Homo sapiens
cagtgtgttactggc

SEQ ID NO: 49521 - DNA, 15 bp, Homo sapiens
acagtgtgttactgg

SEQ ID NO: 49522 - DNA, 15 bp, Homo sapiens
aacagtgtgttactg

SEQ ID NO: 49523 - DNA, 15 bp, Homo sapiens
aaacagtgtgttact

SEQ ID NO: 49524 - DNA, 15 bp, Homo sapiens
aaaacagtgtgttac

SEQ ID NO: 49525 - DNA, 15 bp, Homo sapiens
caaaacagtgtgtta

SEQ ID NO: 49526 - DNA, 15 bp, Homo sapiens
tcaaaacagtgtgtt

SEQ ID NO: 49527 - DNA, 15 bp, Homo sapiens
atcaaaacagtgtgt

SEQ ID NO: 49528 - DNA, 15 bp, Homo sapiens
aatcaaaacagtgtg

SEQ ID NO: 49529 - DNA, 15 bp, Homo sapiens
taatcaaaacagtgt

SEQ ID NO: 49530 - DNA, 15 bp, Homo sapiens
gtaatcaaaacagtg

SEQ ID NO: 49531 - DNA, 15 bp, Homo sapiens
ggtaatcaaaacagt

SEQ ID NO: 49532 - DNA, 15 bp, Homo sapiens
cggtaatcaaaacag

SEQ ID NO: 49533 - DNA, 15 bp, Homo sapiens
acggtaatcaaaaca

SEQ ID NO: 49534 - DNA, 15 bp, Homo sapiens
tacggtaatcaaaac

SEQ ID NO: 49535 - DNA, 15 bp, Homo sapiens
ctacggtaatcaaaa

SEQ ID NO: 49536 - DNA, 15 bp, Homo sapiens
actacggtaatcaaa

SEQ ID NO: 49537 - DNA, 15 bp, Homo sapiens
aactacggtaatcaa

SEQ ID NO: 49538 - DNA, 15 bp, Homo sapiens
aaactacggtaatca

SEQ ID NO: 49539 - DNA, 15 bp, Homo sapiens
aaaactacggtaatc

SEQ ID NO: 49540 - DNA, 15 bp, Homo sapiens
taaaactacggtaat

SEQ ID NO: 49541 - DNA, 15 bp, Homo sapiens
ataaaactacggtaa

SEQ ID NO: 49542 - DNA, 15 bp, Homo sapiens
tataaaactacggta

SEQ ID NO: 49543 - DNA, 15 bp, Homo sapiens
ctataaaactacggt

SEQ ID NO: 49544 - DNA, 15 bp, Homo sapiens
actataaaactacgg

SEQ ID NO: 49545 - DNA, 15 bp, Homo sapiens
tactataaaactacg

SEQ ID NO: 49546 - DNA, 15 bp, Homo sapiens
ttactataaaactac

SEQ ID NO: 49547 - DNA, 15 bp, Homo sapiens
cttactataaaacta

SEQ ID NO: 49548 - DNA, 15 bp, Homo sapiens
acttactataaaact

SEQ ID NO: 49549 - DNA, 15 bp, Homo sapiens
aacttactataaaac

SEQ ID NO: 49550 - DNA, 15 bp, Homo sapiens
aaacttactataaaa

SEQ ID NO: 49551 - DNA, 15 bp, Homo sapiens
aaaacttactataaa

SEQ ID NO: 49552 - DNA, 15 bp, Homo sapiens
caaaacttactataa

SEQ ID NO: 49553 - DNA, 15 bp, Homo sapiens
tcaaaacttactata

SEQ ID NO: 49554 - DNA, 15 bp, Homo sapiens
ttcaaaacttactat

SEQ ID NO: 49555 - DNA, 15 bp, Homo sapiens
tttcaaaacttacta

SEQ ID NO: 49556 - DNA, 15 bp, Homo sapiens
atttcaaaacttact

SEQ ID NO: 49557 - DNA, 15 bp, Homo sapiens
gatttcaaaacttac

SEQ ID NO: 49558 - DNA, 15 bp, Homo sapiens
tgatttcaaaactta

SEQ ID NO: 49559 - DNA, 15 bp, Homo sapiens
ttgatttcaaaactt

SEQ ID NO: 49560 - DNA, 15 bp, Homo sapiens
cttgatttcaaaact

SEQ ID NO: 49561 - DNA, 15 bp, Homo sapiens
tcttgatttcaaaac

SEQ ID NO: 49562 - DNA, 15 bp, Homo sapiens
ttcttgatttcaaaa

SEQ ID NO: 49563 - DNA, 15 bp, Homo sapiens
cttcttgatttcaaa

SEQ ID NO: 49564 - DNA, 15 bp, Homo sapiens
acttcttgatttcaa

SEQ ID NO: 49565 - DNA, 15 bp, Homo sapiens
cacttcttgatttca

SEQ ID NO: 49566 - DNA, 15 bp, Homo sapiens
acacttcttgatttc

SEQ ID NO: 49567 - DNA, 15 bp, Homo sapiens
cacacttcttgattt

SEQ ID NO: 49568 - DNA, 15 bp, Homo sapiens
tcacacttcttgatt

SEQ ID NO: 49569 - DNA, 15 bp, Homo sapiens
atcacacttcttgat

SEQ ID NO: 49570 - DNA, 15 bp, Homo sapiens
aatcacacttcttga

SEQ ID NO: 49571 - DNA, 15 bp, Homo sapiens
gaatcacacttcttg

SEQ ID NO: 49572 - DNA, 15 bp, Homo sapiens
agaatcacacttctt

SEQ ID NO: 49573 - DNA, 15 bp, Homo sapiens
tagaatcacacttct

SEQ ID NO: 49574 - DNA, 15 bp, Homo sapiens
gtagaatcacacttc

SEQ ID NO: 49575 - DNA, 15 bp, Homo sapiens
agtagaatcacactt

SEQ ID NO: 49576 - DNA, 15 bp, Homo sapiens
tagtagaatcacact

SEQ ID NO: 49577 - DNA, 15 bp, Homo sapiens
gtagtagaatcacac

SEQ ID NO: 49578 - DNA, 15 bp, Homo sapiens
agtagtagaatcaca

SEQ ID NO: 49579 - DNA, 15 bp, Homo sapiens
tagtagtagaatcac

SEQ ID NO: 49580 - DNA, 15 bp, Homo sapiens
ctagtagtagaatca

SEQ ID NO: 49581 - DNA, 15 bp, Homo sapiens
cctagtagtagaatc

SEQ ID NO: 49582 - DNA, 15 bp, Homo sapiens
ccctagtagtagaat

SEQ ID NO: 49583 - DNA, 15 bp, Homo sapiens
tccctagtagtagaa

SEQ ID NO: 49584 - DNA, 15 bp, Homo sapiens
atccctagtagtaga

SEQ ID NO: 49585 - DNA, 15 bp, Homo sapiens
aatccctagtagtag

SEQ ID NO: 49586 - DNA, 15 bp, Homo sapiens
caatccctagtagta

SEQ ID NO: 49587 - DNA, 15 bp, Homo sapiens
acaatccctagtagt

SEQ ID NO: 49588 - DNA, 15 bp, Homo sapiens
gacaatccctagtag

SEQ ID NO: 49589 - DNA, 15 bp, Homo sapiens
agacaatccctagta

SEQ ID NO: 49590 - DNA, 15 bp, Homo sapiens
tagacaatccctagt

SEQ ID NO: 49591 - DNA, 15 bp, Homo sapiens
atagacaatccctag

SEQ ID NO: 49592 - DNA, 15 bp, Homo sapiens
aatagacaatcccta

SEQ ID NO: 49593 - DNA, 15 bp, Homo sapiens
gaatagacaatccct

SEQ ID NO: 49594 - DNA, 15 bp, Homo sapiens
agaatagacaatccc

SEQ ID NO: 49595 - DNA, 15 bp, Homo sapiens
cagaatagacaatcc

SEQ ID NO: 49596 - DNA, 15 bp, Homo sapiens
ccagaatagacaatc

SEQ ID NO: 49597 - DNA, 15 bp, Homo sapiens
cccagaatagacaat

SEQ ID NO: 49598 - DNA, 15 bp, Homo sapiens
acccagaatagacaa

SEQ ID NO: 49599 - DNA, 15 bp, Homo sapiens
gacccagaatagaca

SEQ ID NO: 49600 - DNA, 15 bp, Homo sapiens
agacccagaatagac

SEQ ID NO: 49601 - DNA, 15 bp, Homo sapiens
gagacccagaataga

SEQ ID NO: 49602 - DNA, 15 bp, Homo sapiens
agagacccagaatag

SEQ ID NO: 49603 - DNA, 15 bp, Homo sapiens
aagagacccagaata

SEQ ID NO: 49604 - DNA, 15 bp, Homo sapiens
caagagacccagaat

SEQ ID NO: 49605 - DNA, 15 bp, Homo sapiens
ccaagagacccagaa

SEQ ID NO: 49606 - DNA, 15 bp, Homo sapiens
tccaagagacccaga

SEQ ID NO: 49607 - DNA, 15 bp, Homo sapiens
atccaagagacccag

SEQ ID NO: 49608 - DNA, 15 bp, Homo sapiens
aatccaagagaccca

SEQ ID NO: 49609 - DNA, 15 bp, Homo sapiens
aaatccaagagaccc

SEQ ID NO: 49610 - DNA, 15 bp, Homo sapiens
aaaatccaagagacc

SEQ ID NO: 49611 - DNA, 15 bp, Homo sapiens
gaaaatccaagagac

SEQ ID NO: 49612 - DNA, 15 bp, Homo sapiens
tgaaaatccaagaga

SEQ ID NO: 49613 - DNA, 15 bp, Homo sapiens
atgaaaatccaagag

SEQ ID NO: 49614 - DNA, 15 bp, Homo sapiens
tatgaaaatccaaga

SEQ ID NO: 49615 - DNA, 15 bp, Homo sapiens
atatgaaaatccaag

SEQ ID NO: 49616 - DNA, 15 bp, Homo sapiens
tatatgaaaatccaa

SEQ ID NO: 49617 - DNA, 15 bp, Homo sapiens
ttatatgaaaatcca

SEQ ID NO: 49618 - DNA, 15 bp, Homo sapiens
tttatatgaaaatcc

SEQ ID NO: 49619 - DNA, 15 bp, Homo sapiens
atttatatgaaaatc

SEQ ID NO: 49620 - DNA, 15 bp, Homo sapiens
aatttatatgaaaat

SEQ ID NO: 49621 - DNA, 15 bp, Homo sapiens
caatttatatgaaaa

SEQ ID NO: 49622 - DNA, 15 bp, Homo sapiens
acaatttatatgaaa

SEQ ID NO: 49623 - DNA, 15 bp, Homo sapiens
aacaatttatatgaa

SEQ ID NO: 49624 - DNA, 15 bp, Homo sapiens
aaacaatttatatga

SEQ ID NO: 49625 - DNA, 15 bp, Homo sapiens
taaacaatttatatg

SEQ ID NO: 49626 - DNA, 15 bp, Homo sapiens
ttaaacaatttatat

SEQ ID NO: 49627 - DNA, 15 bp, Homo sapiens
gttaaacaatttata

SEQ ID NO: 49628 - DNA, 15 bp, Homo sapiens
agttaaacaatttat

SEQ ID NO: 49629 - DNA, 15 bp, Homo sapiens
aagttaaacaattta

SEQ ID NO: 49630 - DNA, 15 bp, Homo sapiens
gaagttaaacaattt

SEQ ID NO: 49631 - DNA, 15 bp, Homo sapiens
agaagttaaacaatt

SEQ ID NO: 49632 - DNA, 15 bp, Homo sapiens
cagaagttaaacaat

SEQ ID NO: 49633 - DNA, 15 bp, Homo sapiens
gcagaagttaaacaa

SEQ ID NO: 49634 - DNA, 15 bp, Homo sapiens
tgcagaagttaaaca

SEQ ID NO: 49635 - DNA, 15 bp, Homo sapiens
ttgcagaagttaaac

SEQ ID NO: 49636 - DNA, 15 bp, Homo sapiens
tttgcagaagttaaa

SEQ ID NO: 49637 - DNA, 15 bp, Homo sapiens
ctttgcagaagttaa

SEQ ID NO: 49638 - DNA, 15 bp, Homo sapiens
tctttgcagaagtta

SEQ ID NO: 49639 - DNA, 15 bp, Homo sapiens
ttctttgcagaagtt

SEQ ID NO: 49640 - DNA, 15 bp, Homo sapiens
cttctttgcagaagt

SEQ ID NO: 49641 - DNA, 15 bp, Homo sapiens
acttctttgcagaag

SEQ ID NO: 49642 - DNA, 15 bp, Homo sapiens
gacttctttgcagaa

SEQ ID NO: 49643 - DNA, 15 bp, Homo sapiens
tgacttctttgcaga

SEQ ID NO: 49644 - DNA, 15 bp, Homo sapiens
ctgacttctttgcag

SEQ ID NO: 49645 - DNA, 15 bp, Homo sapiens
gctgacttctttgca

SEQ ID NO: 49646 - DNA, 15 bp, Homo sapiens
agctgacttctttgc

SEQ ID NO: 49647 - DNA, 15 bp, Homo sapiens
tagctgacttctttg

SEQ ID NO: 49648 - DNA, 15 bp, Homo sapiens
ctagctgacttcttt

SEQ ID NO: 49649 - DNA, 15 bp, Homo sapiens
tctagctgacttctt

SEQ ID NO: 49650 - DNA, 15 bp, Homo sapiens
ttctagctgacttct

SEQ ID NO: 49651 - DNA, 15 bp, Homo sapiens
attctagctgacttc

SEQ ID NO: 49652 - DNA, 15 bp, Homo sapiens
cattctagctgactt

SEQ ID NO: 49653 - DNA, 15 bp, Homo sapiens
gcattctagctgact

SEQ ID NO: 49654 - DNA, 15 bp, Homo sapiens
agcattctagctgac

SEQ ID NO: 49655 - DNA, 15 bp, Homo sapiens
tagcattctagctga

SEQ ID NO: 49656 - DNA, 15 bp, Homo sapiens
ctagcattctagctg

SEQ ID NO: 49657 - DNA, 15 bp, Homo sapiens
cctagcattctagct

SEQ ID NO: 49658 - DNA, 15 bp, Homo sapiens
tcctagcattctagc

SEQ ID NO: 49659 - DNA, 15 bp, Homo sapiens
ttcctagcattctag

SEQ ID NO: 49660 - DNA, 15 bp, Homo sapiens
attcctagcattcta

SEQ ID NO: 49661 - DNA, 15 bp, Homo sapiens
aattcctagcattct

SEQ ID NO: 49662 - DNA, 15 bp, Homo sapiens
caattcctagcattc

SEQ ID NO: 49663 - DNA, 15 bp, Homo sapiens
gcaattcctagcatt

SEQ ID NO: 49664 - DNA, 15 bp, Homo sapiens
tgcaattcctagcat

SEQ ID NO: 49665 - DNA, 15 bp, Homo sapiens
atgcaattcctagca

SEQ ID NO: 49666 - DNA, 15 bp, Homo sapiens
aatgcaattcctagc

SEQ ID NO: 49667 - DNA, 15 bp, Homo sapiens
caatgcaattcctag

SEQ ID NO: 49668 - DNA, 15 bp, Homo sapiens
tcaatgcaattccta

SEQ ID NO: 49669 - DNA, 15 bp, Homo sapiens
gtcaatgcaattcct

SEQ ID NO: 49670 - DNA, 15 bp, Homo sapiens
agtcaatgcaattcc

SEQ ID NO: 49671 - DNA, 15 bp, Homo sapiens
gagtcaatgcaattc

SEQ ID NO: 49672 - DNA, 15 bp, Homo sapiens
agagtcaatgcaatt

SEQ ID NO: 49673 - DNA, 15 bp, Homo sapiens
cagagtcaatgcaat

SEQ ID NO: 49674 - DNA, 15 bp, Homo sapiens
acagagtcaatgcaa

SEQ ID NO: 49675 - DNA, 15 bp, Homo sapiens
tacagagtcaatgca

SEQ ID NO: 49676 - DNA, 15 bp, Homo sapiens
ctacagagtcaatgc

SEQ ID NO: 49677 - DNA, 15 bp, Homo sapiens
tctacagagtcaatg

SEQ ID NO: 49678 - DNA, 15 bp, Homo sapiens
atctacagagtcaat

SEQ ID NO: 49679 - DNA, 15 bp, Homo sapiens
gatctacagagtcaa

SEQ ID NO: 49680 - DNA, 15 bp, Homo sapiens
tgatctacagagtca

SEQ ID NO: 49681 - DNA, 15 bp, Homo sapiens
ctgatctacagagtc

SEQ ID NO: 49682 - DNA, 15 bp, Homo sapiens
actgatctacagagt

SEQ ID NO: 49683 - DNA, 15 bp, Homo sapiens
aactgatctacagag

SEQ ID NO: 49684 - DNA, 15 bp, Homo sapiens
aaactgatctacaga

SEQ ID NO: 49685 - DNA, 15 bp, Homo sapiens
taaactgatctacag

SEQ ID NO: 49686 - DNA, 15 bp, Homo sapiens
ttaaactgatctaca

SEQ ID NO: 49687 - DNA, 15 bp, Homo sapiens
cttaaactgatctac

SEQ ID NO: 49688 - DNA, 15 bp, Homo sapiens
ccttaaactgatcta

SEQ ID NO: 49689 - DNA, 15 bp, Homo sapiens
tccttaaactgatct

SEQ ID NO: 49690 - DNA, 15 bp, Homo sapiens
ttccttaaactgatc

SEQ ID NO: 49691 - DNA, 15 bp, Homo sapiens
attccttaaactgat

SEQ ID NO: 49692 - DNA, 15 bp, Homo sapiens
tattccttaaactga

SEQ ID NO: 49693 - DNA, 15 bp, Homo sapiens
atattccttaaactg

SEQ ID NO: 49694 - DNA, 15 bp, Homo sapiens
aatattccttaaact

SEQ ID NO: 49695 - DNA, 15 bp, Homo sapiens
caatattccttaaac

SEQ ID NO: 49696 - DNA, 15 bp, Homo sapiens
gcaatattccttaaa

SEQ ID NO: 49697 - DNA, 15 bp, Homo sapiens
ggcaatattccttaa

SEQ ID NO: 49698 - DNA, 15 bp, Homo sapiens
cggcaatattcctta

SEQ ID NO: 49699 - DNA, 15 bp, Homo sapiens
acggcaatattcctt

SEQ ID NO: 49700 - DNA, 15 bp, Homo sapiens
gacggcaatattcct

SEQ ID NO: 49701 - DNA, 15 bp, Homo sapiens
agacggcaatattcc

SEQ ID NO: 49702 - DNA, 15 bp, Homo sapiens
aagacggcaatattc

SEQ ID NO: 49703 - DNA, 15 bp, Homo sapiens
taagacggcaatatt

SEQ ID NO: 49704 - DNA, 15 bp, Homo sapiens
ttaagacggcaatat

SEQ ID NO: 49705 - DNA, 15 bp, Homo sapiens
gttaagacggcaata

SEQ ID NO: 49706 - DNA, 15 bp, Homo sapiens
tgttaagacggcaat

SEQ ID NO: 49707 - DNA, 15 bp, Homo sapiens
ttgttaagacggcaa

SEQ ID NO: 49708 - DNA, 15 bp, Homo sapiens
attgttaagacggca

SEQ ID NO: 49709 - DNA, 15 bp, Homo sapiens
tattgttaagacggc

SEQ ID NO: 49710 - DNA, 15 bp, Homo sapiens
atattgttaagacgg

SEQ ID NO: 49711 - DNA, 15 bp, Homo sapiens
aatattgttaagacg

SEQ ID NO: 49712 - DNA, 15 bp, Homo sapiens
taatattgttaagac

SEQ ID NO: 49713 - DNA, 15 bp, Homo sapiens
ttaatattgttaaga

SEQ ID NO: 49714 - DNA, 15 bp, Homo sapiens
cttaatattgttaag

SEQ ID NO: 49715 - DNA, 15 bp, Homo sapiens
acttaatattgttaa

SEQ ID NO: 49716 - DNA, 15 bp, Homo sapiens
gacttaatattgtta

SEQ ID NO: 49717 - DNA, 15 bp, Homo sapiens
agacttaatattgtt

SEQ ID NO: 49718 - DNA, 15 bp, Homo sapiens
aagacttaatattgt

SEQ ID NO: 49719 - DNA, 15 bp, Homo sapiens
gaagacttaatattg

SEQ ID NO: 49720 - DNA, 15 bp, Homo sapiens
agaagacttaatatt

SEQ ID NO: 49721 - DNA, 15 bp, Homo sapiens
cagaagacttaatat

SEQ ID NO: 49722 - DNA, 15 bp, Homo sapiens
tcagaagacttaata

SEQ ID NO: 49723 - DNA, 15 bp, Homo sapiens
atcagaagacttaat

SEQ ID NO: 49724 - DNA, 15 bp, Homo sapiens
aatcagaagacttaa

SEQ ID NO: 49725 - DNA, 15 bp, Homo sapiens
gaatcagaagactta

SEQ ID NO: 49726 - DNA, 15 bp, Homo sapiens
cgaatcagaagactt

SEQ ID NO: 49727 - DNA, 15 bp, Homo sapiens
acgaatcagaagact

SEQ ID NO: 49728 - DNA, 15 bp, Homo sapiens
cacgaatcagaagac

SEQ ID NO: 49729 - DNA, 15 bp, Homo sapiens
tcacgaatcagaaga

SEQ ID NO: 49730 - DNA, 15 bp, Homo sapiens
atcacgaatcagaag

SEQ ID NO: 49731 - DNA, 15 bp, Homo sapiens
gatcacgaatcagaa

SEQ ID NO: 49732 - DNA, 15 bp, Homo sapiens
ggatcacgaatcaga

SEQ ID NO: 49733 - DNA, 15 bp, Homo sapiens
tggatcacgaatcag

SEQ ID NO: 49734 - DNA, 15 bp, Homo sapiens
gtggatcacgaatca

SEQ ID NO: 49735 - DNA, 15 bp, Homo sapiens
agtggatcacgaatc

SEQ ID NO: 49736 - DNA, 15 bp, Homo sapiens
aagtggatcacgaat

SEQ ID NO: 49737 - DNA, 15 bp, Homo sapiens
taagtggatcacgaa

SEQ ID NO: 49738 - DNA, 15 bp, Homo sapiens
ataagtggatcacga

SEQ ID NO: 49739 - DNA, 15 bp, Homo sapiens
aataagtggatcacg

SEQ ID NO: 49740 - DNA, 15 bp, Homo sapiens
aaataagtggatcac

SEQ ID NO: 49741 - DNA, 15 bp, Homo sapiens
caaataagtggatca

SEQ ID NO: 49742 - DNA, 15 bp, Homo sapiens
gcaaataagtggatc

SEQ ID NO: 49743 - DNA, 15 bp, Homo sapiens
cgcaaataagtggat

SEQ ID NO: 49744 - DNA, 15 bp, Homo sapiens
acgcaaataagtgga

SEQ ID NO: 49745 - DNA, 15 bp, Homo sapiens
gacgcaaataagtgg

SEQ ID NO: 49746 - DNA, 15 bp, Homo sapiens
agacgcaaataagtg

SEQ ID NO: 49747 - DNA, 15 bp, Homo sapiens
cagacgcaaataagt

SEQ ID NO: 49748 - DNA, 15 bp, Homo sapiens
gcagacgcaaataag

SEQ ID NO: 49749 - DNA, 15 bp, Homo sapiens
agcagacgcaaataa

SEQ ID NO: 49750 - DNA, 15 bp, Homo sapiens
aagcagacgcaaata

SEQ ID NO: 49751 - DNA, 15 bp, Homo sapiens
aaagcagacgcaaat

SEQ ID NO: 49752 - DNA, 15 bp, Homo sapiens
taaagcagacgcaaa

SEQ ID NO: 49753 - DNA, 15 bp, Homo sapiens
ttaaagcagacgcaa

SEQ ID NO: 49754 - DNA, 15 bp, Homo sapiens
attaaagcagacgca

SEQ ID NO: 49755 - DNA, 15 bp, Homo sapiens
aattaaagcagacgc

SEQ ID NO: 49756 - DNA, 15 bp, Homo sapiens
aaattaaagcagacg

SEQ ID NO: 49757 - DNA, 15 bp, Homo sapiens
taaattaaagcagac

SEQ ID NO: 49758 - DNA, 15 bp, Homo sapiens
ataaattaaagcaga

SEQ ID NO: 49759 - DNA, 15 bp, Homo sapiens
aataaattaaagcag

SEQ ID NO: 49760 - DNA, 15 bp, Homo sapiens
aaataaattaaagca

SEQ ID NO: 49761 - DNA, 15 bp, Homo sapiens
gaaataaattaaagc

SEQ ID NO: 49762 - DNA, 15 bp, Homo sapiens
tgaaataaattaaag

SEQ ID NO: 49763 - DNA, 15 bp, Homo sapiens
ttgaaataaattaaa

SEQ ID NO: 49764 - DNA, 15 bp, Homo sapiens
gttgaaataaattaa

SEQ ID NO: 49765 - DNA, 15 bp, Homo sapiens
tgttgaaataaatta

SEQ ID NO: 49766 - DNA, 15 bp, Homo sapiens
ttgttgaaataaatt

SEQ ID NO: 49767 - DNA, 15 bp, Homo sapiens
cttgttgaaataaat

SEQ ID NO: 49768 - DNA, 15 bp, Homo sapiens
ccttgttgaaataaa

SEQ ID NO: 49769 - DNA, 15 bp, Homo sapiens
accttgttgaaataa

SEQ ID NO: 49770 - DNA, 15 bp, Homo sapiens
aaccttgttgaaata

SEQ ID NO: 49771 - DNA, 15 bp, Homo sapiens
aaaccttgttgaaat

SEQ ID NO: 49772 - DNA, 15 bp, Homo sapiens
aaaaccttgttgaaa

SEQ ID NO: 49773 - DNA, 15 bp, Homo sapiens
taaaaccttgttgaa

SEQ ID NO: 49774 - DNA, 15 bp, Homo sapiens
ataaaaccttgttga

SEQ ID NO: 49775 - DNA, 15 bp, Homo sapiens
tataaaaccttgttg

SEQ ID NO: 49776 - DNA, 15 bp, Homo sapiens
ctataaaaccttgtt

SEQ ID NO: 49777 - DNA, 15 bp, Homo sapiens
gctataaaaccttgt

SEQ ID NO: 49778 - DNA, 15 bp, Homo sapiens
agctataaaaccttg

SEQ ID NO: 49779 - DNA, 15 bp, Homo sapiens
aagctataaaacctt

SEQ ID NO: 49780 - DNA, 15 bp, Homo sapiens
aaagctataaaacct

SEQ ID NO: 49781 - DNA, 15 bp, Homo sapiens
gaaagctataaaacc

SEQ ID NO: 49782 - DNA, 15 bp, Homo sapiens
tgaaagctataaaac

SEQ ID NO: 49783 - DNA, 15 bp, Homo sapiens
ctgaaagctataaaa

SEQ ID NO: 49784 - DNA, 15 bp, Homo sapiens
tctgaaagctataaa

SEQ ID NO: 49785 - DNA, 15 bp, Homo sapiens
ttctgaaagctataa

SEQ ID NO: 49786 - DNA, 15 bp, Homo sapiens
attctgaaagctata

SEQ ID NO: 49787 - DNA, 15 bp, Homo sapiens
tattctgaaagctat

SEQ ID NO: 49788 - DNA, 15 bp, Homo sapiens
atattctgaaagcta

SEQ ID NO: 49789 - DNA, 15 bp, Homo sapiens
aatattctgaaagct

SEQ ID NO: 49790 - DNA, 15 bp, Homo sapiens
aaatattctgaaagc

SEQ ID NO: 49791 - DNA, 15 bp, Homo sapiens
aaaatattctgaaag

SEQ ID NO: 49792 - DNA, 15 bp, Homo sapiens
caaaatattctgaaa

SEQ ID NO: 49793 - DNA, 15 bp, Homo sapiens
gcaaaatattctgaa

SEQ ID NO: 49794 - DNA, 15 bp, Homo sapiens
tgcaaaatattctga

SEQ ID NO: 49795 - DNA, 15 bp, Homo sapiens
ttgcaaaatattctg

SEQ ID NO: 49796 - DNA, 15 bp, Homo sapiens
attgcaaaatattct

SEQ ID NO: 49797 - DNA, 15 bp, Homo sapiens
aattgcaaaatattc

SEQ ID NO: 49798 - DNA, 15 bp, Homo sapiens
aaattgcaaaatatt

SEQ ID NO: 49799 - DNA, 15 bp, Homo sapiens
aaaattgcaaaatat

SEQ ID NO: 49800 - DNA, 15 bp, Homo sapiens
aaaaattgcaaaata

SEQ ID NO: 49801 - DNA, 15 bp, Homo sapiens
aaaaaattgcaaaat

SEQ ID NO: 49802 - DNA, 15 bp, Homo sapiens
caaaaaattgcaaaa

SEQ ID NO: 49803 - DNA, 15 bp, Homo sapiens
acaaaaaattgcaaa

SEQ ID NO: 49804 - DNA, 15 bp, Homo sapiens
aacaaaaaattgcaa

SEQ ID NO: 49805 - DNA, 15 bp, Homo sapiens
taacaaaaaattgca

SEQ ID NO: 49806 - DNA, 15 bp, Homo sapiens
ttaacaaaaaattgc

SEQ ID NO: 49807 - DNA, 15 bp, Homo sapiens
tttaacaaaaaattg

SEQ ID NO: 49808 - DNA, 15 bp, Homo sapiens
atttaacaaaaaatt

SEQ ID NO: 49809 - DNA, 15 bp, Homo sapiens
aatttaacaaaaaat

SEQ ID NO: 49810 - DNA, 15 bp, Homo sapiens
caatttaacaaaaaa

SEQ ID NO: 49811 - DNA, 15 bp, Homo sapiens
tcaatttaacaaaaa

SEQ ID NO: 49812 - DNA, 15 bp, Homo sapiens
atcaatttaacaaaa

SEQ ID NO: 49813 - DNA, 15 bp, Homo sapiens
aatcaatttaacaaa

SEQ ID NO: 49814 - DNA, 15 bp, Homo sapiens
caatcaatttaacaa

SEQ ID NO: 49815 - DNA, 15 bp, Homo sapiens
gcaatcaatttaaca

SEQ ID NO: 49816 - DNA, 15 bp, Homo sapiens
agcaatcaatttaac

SEQ ID NO: 49817 - DNA, 15 bp, Homo sapiens
tagcaatcaatttaa

SEQ ID NO: 49818 - DNA, 15 bp, Homo sapiens
gtagcaatcaattta

SEQ ID NO: 49819 - DNA, 15 bp, Homo sapiens
cgtagcaatcaattt

SEQ ID NO: 49820 - DNA, 15 bp, Homo sapiens
acgtagcaatcaatt

SEQ ID NO: 49821 - DNA, 15 bp, Homo sapiens
tacgtagcaatcaat

SEQ ID NO: 49822 - DNA, 15 bp, Homo sapiens
atacgtagcaatcaa

SEQ ID NO: 49823 - DNA, 15 bp, Homo sapiens
aatacgtagcaatca

SEQ ID NO: 49824 - DNA, 15 bp, Homo sapiens
aaatacgtagcaatc

SEQ ID NO: 49825 - DNA, 15 bp, Homo sapiens
aaaatacgtagcaat

SEQ ID NO: 49826 - DNA, 15 bp, Homo sapiens
taaaatacgtagcaa

SEQ ID NO: 49827 - DNA, 15 bp, Homo sapiens
ataaaatacgtagca

SEQ ID NO: 49828 - DNA, 15 bp, Homo sapiens
aataaaatacgtagc

SEQ ID NO: 49829 - DNA, 15 bp, Homo sapiens
taataaaatacgtag

SEQ ID NO: 49830 - DNA, 15 bp, Homo sapiens
ataataaaatacgta

SEQ ID NO: 49831 - DNA, 15 bp, Homo sapiens
aataataaaatacgt

SEQ ID NO: 49832 - DNA, 15 bp, Homo sapiens
aaataataaaatacg

SEQ ID NO: 49833 - DNA, 15 bp, Homo sapiens
aaaataataaaatac

SEQ ID NO: 49834 - DNA, 15 bp, Homo sapiens
aaaaataataaaata

SEQ ID NO: 49835 - DNA, 15 bp, Homo sapiens
caaaaataataaaat

SEQ ID NO: 49836 - DNA, 15 bp, Homo sapiens
tcaaaaataataaaa

SEQ ID NO: 49837 - DNA, 15 bp, Homo sapiens
atcaaaaataataaa

SEQ ID NO: 49838 - DNA, 15 bp, Homo sapiens
catcaaaaataataa

SEQ ID NO: 49839 - DNA, 15 bp, Homo sapiens
acatcaaaaataata

SEQ ID NO: 49840 - DNA, 15 bp, Homo sapiens
aacatcaaaaataat

SEQ ID NO: 49841 - DNA, 15 bp, Homo sapiens
taacatcaaaaataa

SEQ ID NO: 49842 - DNA, 15 bp, Homo sapiens
ataacatcaaaaata

SEQ ID NO: 49843 - DNA, 15 bp, Homo sapiens
gataacatcaaaaat

SEQ ID NO: 49844 - DNA, 15 bp, Homo sapiens
tgataacatcaaaaa

SEQ ID NO: 49845 - DNA, 15 bp, Homo sapiens
atgataacatcaaaa

SEQ ID NO: 49846 - DNA, 15 bp, Homo sapiens
tatgataacatcaaa

SEQ ID NO: 49847 - DNA, 15 bp, Homo sapiens
ttatgataacatcaa

SEQ ID NO: 49848 - DNA, 15 bp, Homo sapiens
tttatgataacatca

SEQ ID NO: 49849 - DNA, 15 bp, Homo sapiens
atttatgataacatc

SEQ ID NO: 49850 - DNA, 15 bp, Homo sapiens
catttatgataacat

SEQ ID NO: 49851 - DNA, 15 bp, Homo sapiens
ccatttatgataaca

SEQ ID NO: 49852 - DNA, 15 bp, Homo sapiens
tccatttatgataac

SEQ ID NO: 49853 - DNA, 15 bp, Homo sapiens
ttccatttatgataa

SEQ ID NO: 49854 - DNA, 15 bp, Homo sapiens
attccatttatgata

SEQ ID NO: 49855 - DNA, 15 bp, Homo sapiens
aattccatttatgat

SEQ ID NO: 49856 - DNA, 15 bp, Homo sapiens
caattccatttatga

SEQ ID NO: 49857 - DNA, 15 bp, Homo sapiens
acaattccatttatg

SEQ ID NO: 49858 - DNA, 15 bp, Homo sapiens
aacaattccatttat

SEQ ID NO: 49859 - DNA, 15 bp, Homo sapiens
aaacaattccattta

SEQ ID NO: 49860 - DNA, 15 bp, Homo sapiens
aaaacaattccattt

SEQ ID NO: 49861 - DNA, 15 bp, Homo sapiens
gaaaacaattccatt

SEQ ID NO: 49862 - DNA, 15 bp, Homo sapiens
agaaaacaattccat

SEQ ID NO: 49863 - DNA, 15 bp, Homo sapiens
aagaaaacaattcca

SEQ ID NO: 49864 - DNA, 15 bp, Homo sapiens
taagaaaacaattcc

SEQ ID NO: 49865 - DNA, 15 bp, Homo sapiens
ttaagaaaacaattc

SEQ ID NO: 49866 - DNA, 15 bp, Homo sapiens
attaagaaaacaatt

SEQ ID NO: 49867 - DNA, 15 bp, Homo sapiens
aattaagaaaacaat

SEQ ID NO: 49868 - DNA, 15 bp, Homo sapiens
aaattaagaaaacaa

SEQ ID NO: 49869 - DNA, 15 bp, Homo sapiens
aaaattaagaaaaca

SEQ ID NO: 49870 - DNA, 15 bp, Homo sapiens
taaaattaagaaaac

SEQ ID NO: 49871 - DNA, 15 bp, Homo sapiens
ataaaattaagaaaa

SEQ ID NO: 49872 - DNA, 15 bp, Homo sapiens
aataaaattaagaaa

SEQ ID NO: 49873 - DNA, 15 bp, Homo sapiens
aaataaaattaagaa

SEQ ID NO: 49874 - DNA, 15 bp, Homo sapiens
aaaataaaattaaga

SEQ ID NO: 49875 - DNA, 15 bp, Homo sapiens
gaaaataaaattaag

SEQ ID NO: 49876 - DNA, 15 bp, Homo sapiens
tgaaaataaaattaa

SEQ ID NO: 49877 - DNA, 15 bp, Homo sapiens
ctgaaaataaaatta

SEQ ID NO: 49878 - DNA, 15 bp, Homo sapiens
actgaaaataaaatt

SEQ ID NO: 49879 - DNA, 15 bp, Homo sapiens
aactgaaaataaaat

SEQ ID NO: 49880 - DNA, 15 bp, Homo sapiens
aaactgaaaataaaa

SEQ ID NO: 49881 - DNA, 15 bp, Homo sapiens
caaactgaaaataaa

SEQ ID NO: 49882 - DNA, 15 bp, Homo sapiens
gcaaactgaaaataa

SEQ ID NO: 49883 - DNA, 15 bp, Homo sapiens
ggcaaactgaaaata

SEQ ID NO: 49884 - DNA, 15 bp, Homo sapiens
gggcaaactgaaaat

SEQ ID NO: 49885 - DNA, 15 bp, Homo sapiens
tgggcaaactgaaaa

SEQ ID NO: 49886 - DNA, 15 bp, Homo sapiens
atgggcaaactgaaa

SEQ ID NO: 49887 - DNA, 15 bp, Homo sapiens
aatgggcaaactgaa

SEQ ID NO: 49888 - DNA, 15 bp, Homo sapiens
caatgggcaaactga

SEQ ID NO: 49889 - DNA, 15 bp, Homo sapiens
gcaatgggcaaactg

SEQ ID NO: 49890 - DNA, 15 bp, Homo sapiens
agcaatgggcaaact

SEQ ID NO: 49891 - DNA, 15 bp, Homo sapiens
tagcaatgggcaaac

SEQ ID NO: 49892 - DNA, 15 bp, Homo sapiens
gtagcaatgggcaaa

SEQ ID NO: 49893 - DNA, 15 bp, Homo sapiens
agtagcaatgggcaa

SEQ ID NO: 49894 - DNA, 15 bp, Homo sapiens
tagtagcaatgggca

SEQ ID NO: 49895 - DNA, 15 bp, Homo sapiens
atagtagcaatgggc

SEQ ID NO: 49896 - DNA, 15 bp, Homo sapiens
gatagtagcaatggg

SEQ ID NO: 49897 - DNA, 15 bp, Homo sapiens
cgatagtagcaatgg

SEQ ID NO: 49898 - DNA, 15 bp, Homo sapiens
gcgatagtagcaatg

SEQ ID NO: 49899 - DNA, 15 bp, Homo sapiens
tgcgatagtagcaat

SEQ ID NO: 49900 - DNA, 15 bp, Homo sapiens
ttgcgatagtagcaa

SEQ ID NO: 49901 - DNA, 15 bp, Homo sapiens
tttgcgatagtagca

SEQ ID NO: 49902 - DNA, 15 bp, Homo sapiens
ttttgcgatagtagc

SEQ ID NO: 49903 - DNA, 15 bp, Homo sapiens
attttgcgatagtag

SEQ ID NO: 49904 - DNA, 15 bp, Homo sapiens
tattttgcgatagta

SEQ ID NO: 49905 - DNA, 15 bp, Homo sapiens
gtattttgcgatagt

SEQ ID NO: 49906 - DNA, 15 bp, Homo sapiens
tgtattttgcgatag

SEQ ID NO: 49907 - DNA, 15 bp, Homo sapiens
ttgtattttgcgata

SEQ ID NO: 49908 - DNA, 15 bp, Homo sapiens
gttgtattttgcgat

SEQ ID NO: 49909 - DNA, 15 bp, Homo sapiens
agttgtattttgcga

SEQ ID NO: 49910 - DNA, 15 bp, Homo sapiens
aagttgtattttgcg

SEQ ID NO: 49911 - DNA, 15 bp, Homo sapiens
aaagttgtattttgc

SEQ ID NO: 49912 - DNA, 15 bp, Homo sapiens
aaaagttgtattttg

SEQ ID NO: 49913 - DNA, 15 bp, Homo sapiens
aaaaagttgtatttt

SEQ ID NO: 49914 - DNA, 15 bp, Homo sapiens
aaaaaagttgtattt

SEQ ID NO: 49915 - DNA, 15 bp, Homo sapiens
aaaaaaagttgtatt

SEQ ID NO: 49916 - DNA, 15 bp, Homo sapiens
caaaaaaagttgtat

SEQ ID NO: 49917 - DNA, 15 bp, Homo sapiens
acaaaaaaagttgta

SEQ ID NO: 49918 - DNA, 15 bp, Homo sapiens
tacaaaaaaagttgt

SEQ ID NO: 49919 - DNA, 15 bp, Homo sapiens
atacaaaaaaagttg

SEQ ID NO: 49920 - DNA, 15 bp, Homo sapiens
tatacaaaaaaagtt

SEQ ID NO: 49921 - DNA, 15 bp, Homo sapiens
atatacaaaaaaagt

SEQ ID NO: 49922 - DNA, 15 bp, Homo sapiens
aatatacaaaaaaag

SEQ ID NO: 49923 - DNA, 15 bp, Homo sapiens
caatatacaaaaaaa

SEQ ID NO: 49924 - DNA, 15 bp, Homo sapiens
tcaatatacaaaaaa

SEQ ID NO: 49925 - DNA, 15 bp, Homo sapiens
atcaatatacaaaaa

SEQ ID NO: 49926 - DNA, 15 bp, Homo sapiens
gatcaatatacaaaa

SEQ ID NO: 49927 - DNA, 15 bp, Homo sapiens
agatcaatatacaaa

SEQ ID NO: 49928 - DNA, 15 bp, Homo sapiens
aagatcaatatacaa

SEQ ID NO: 49929 - DNA, 15 bp, Homo sapiens
aaagatcaatataca

SEQ ID NO: 49930 - DNA, 15 bp, Homo sapiens
aaaagatcaatatac

SEQ ID NO: 49931 - DNA, 15 bp, Homo sapiens
taaaagatcaatata

SEQ ID NO: 49932 - DNA, 15 bp, Homo sapiens
ataaaagatcaatat

SEQ ID NO: 49933 - DNA, 15 bp, Homo sapiens
gataaaagatcaata

SEQ ID NO: 49934 - DNA, 15 bp, Homo sapiens
ggataaaagatcaat

SEQ ID NO: 49935 - DNA, 15 bp, Homo sapiens
aggataaaagatcaa

SEQ ID NO: 49936 - DNA, 15 bp, Homo sapiens
taggataaaagatca

SEQ ID NO: 49937 - DNA, 15 bp, Homo sapiens
ttaggataaaagatc

SEQ ID NO: 49938 - DNA, 15 bp, Homo sapiens
tttaggataaaagat

SEQ ID NO: 49939 - DNA, 15 bp, Homo sapiens
gtttaggataaaaga

SEQ ID NO: 49940 - DNA, 15 bp, Homo sapiens
ggtttaggataaaag

SEQ ID NO: 49941 - DNA, 15 bp, Homo sapiens
aggtttaggataaaa

SEQ ID NO: 49942 - DNA, 15 bp, Homo sapiens
taggtttaggataaa

SEQ ID NO: 49943 - DNA, 15 bp, Homo sapiens
ctaggtttaggataa

SEQ ID NO: 49944 - DNA, 15 bp, Homo sapiens
gctaggtttaggata

SEQ ID NO: 49945 - DNA, 15 bp, Homo sapiens
agctaggtttaggat

SEQ ID NO: 49946 - DNA, 15 bp, Homo sapiens
cagctaggtttagga

SEQ ID NO: 49947 - DNA, 15 bp, Homo sapiens
tcagctaggtttagg

SEQ ID NO: 49948 - DNA, 15 bp, Homo sapiens
ttcagctaggtttag

SEQ ID NO: 49949 - DNA, 15 bp, Homo sapiens
gttcagctaggttta

SEQ ID NO: 49950 - DNA, 15 bp, Homo sapiens
agttcagctaggttt

SEQ ID NO: 49951 - DNA, 15 bp, Homo sapiens
tagttcagctaggtt

SEQ ID NO: 49952 - DNA, 15 bp, Homo sapiens
gtagttcagctaggt

SEQ ID NO: 49953 - DNA, 15 bp, Homo sapiens
agtagttcagctagg

SEQ ID NO: 49954 - DNA, 15 bp, Homo sapiens
aagtagttcagctag

SEQ ID NO: 49955 - DNA, 15 bp, Homo sapiens
taagtagttcagcta

SEQ ID NO: 49956 - DNA, 15 bp, Homo sapiens
ataagtagttcagct

SEQ ID NO: 49957 - DNA, 15 bp, Homo sapiens
cataagtagttcagc

SEQ ID NO: 49958 - DNA, 15 bp, Homo sapiens
tcataagtagttcag

SEQ ID NO: 49959 - DNA, 15 bp, Homo sapiens
ctcataagtagttca

SEQ ID NO: 49960 - DNA, 15 bp, Homo sapiens
actcataagtagttc

SEQ ID NO: 49961 - DNA, 15 bp, Homo sapiens
aactcataagtagtt

SEQ ID NO: 49962 - DNA, 15 bp, Homo sapiens
gaactcataagtagt

SEQ ID NO: 49963 - DNA, 15 bp, Homo sapiens
tgaactcataagtag

SEQ ID NO: 49964 - DNA, 15 bp, Homo sapiens
ttgaactcataagta

SEQ ID NO: 49965 - DNA, 15 bp, Homo sapiens
attgaactcataagt

SEQ ID NO: 49966 - DNA, 15 bp, Homo sapiens
tattgaactcataag

SEQ ID NO: 49967 - DNA, 15 bp, Homo sapiens
ctattgaactcataa

SEQ ID NO: 49968 - DNA, 15 bp, Homo sapiens
actattgaactcata

SEQ ID NO: 49969 - DNA, 15 bp, Homo sapiens
aactattgaactcat

SEQ ID NO: 49970 - DNA, 15 bp, Homo sapiens
aaactattgaactca

SEQ ID NO: 49971 - DNA, 15 bp, Homo sapiens
aaaactattgaactc

SEQ ID NO: 49972 - DNA, 15 bp, Homo sapiens
aaaaactattgaact

SEQ ID NO: 49973 - DNA, 15 bp, Homo sapiens
aaaaaactattgaac

SEQ ID NO: 49974 - DNA, 15 bp, Homo sapiens
taaaaaactattgaa

SEQ ID NO: 49975 - DNA, 15 bp, Homo sapiens
ctaaaaaactattga

SEQ ID NO: 49976 - DNA, 15 bp, Homo sapiens
actaaaaaactattg

SEQ ID NO: 49977 - DNA, 15 bp, Homo sapiens
cactaaaaaactatt

SEQ ID NO: 49978 - DNA, 15 bp, Homo sapiens
ccactaaaaaactat

SEQ ID NO: 49979 - DNA, 15 bp, Homo sapiens
cccactaaaaaacta

SEQ ID NO: 49980 - DNA, 15 bp, Homo sapiens
gcccactaaaaaact

SEQ ID NO: 49981 - DNA, 15 bp, Homo sapiens
agcccactaaaaaac

SEQ ID NO: 49982 - DNA, 15 bp, Homo sapiens
gagcccactaaaaaa

SEQ ID NO: 49983 - DNA, 15 bp, Homo sapiens
agagcccactaaaaa

SEQ ID NO: 49984 - DNA, 15 bp, Homo sapiens
aagagcccactaaaa

SEQ ID NO: 49985 - DNA, 15 bp, Homo sapiens
aaagagcccactaaa

SEQ ID NO: 49986 - DNA, 15 bp, Homo sapiens
taaagagcccactaa

SEQ ID NO: 49987 - DNA, 15 bp, Homo sapiens
ctaaagagcccacta

SEQ ID NO: 49988 - DNA, 15 bp, Homo sapiens
cctaaagagcccact

SEQ ID NO: 49989 - DNA, 15 bp, Homo sapiens
tcctaaagagcccac

SEQ ID NO: 49990 - DNA, 15 bp, Homo sapiens
atcctaaagagccca

SEQ ID NO: 49991 - DNA, 15 bp, Homo sapiens
aatcctaaagagccc

SEQ ID NO: 49992 - DNA, 15 bp, Homo sapiens
aaatcctaaagagcc

SEQ ID NO: 49993 - DNA, 15 bp, Homo sapiens
aaaatcctaaagagc

SEQ ID NO: 49994 - DNA, 15 bp, Homo sapiens
aaaaatcctaaagag

SEQ ID NO: 49995 - DNA, 15 bp, Homo sapiens
aaaaaatcctaaaga

SEQ ID NO: 49996 - DNA, 15 bp, Homo sapiens
taaaaaatcctaaag

SEQ ID NO: 49997 - DNA, 15 bp, Homo sapiens
ataaaaaatcctaaa

SEQ ID NO: 49998 - DNA, 15 bp, Homo sapiens
tataaaaaatcctaa

SEQ ID NO: 49999 - DNA, 15 bp, Homo sapiens
gtataaaaaatccta

SEQ ID NO: 50000 - DNA, 15 bp, Homo sapiens
tgtataaaaaatcct

SEQ ID NO: 50001 - DNA, 15 bp, Homo sapiens
ttgtataaaaaatcc

SEQ ID NO: 50002 - DNA, 15 bp, Homo sapiens
cttgtataaaaaatc

SEQ ID NO: 50003 - DNA, 15 bp, Homo sapiens
tcttgtataaaaaat

SEQ ID NO: 50004 - DNA, 15 bp, Homo sapiens
gtcttgtataaaaaa

SEQ ID NO: 50005 - DNA, 15 bp, Homo sapiens
ggtcttgtataaaaa

SEQ ID NO: 50006 - DNA, 15 bp, Homo sapiens
tggtcttgtataaaa

SEQ ID NO: 50007 - DNA, 15 bp, Homo sapiens
atggtcttgtataaa

SEQ ID NO: 50008 - DNA, 15 bp, Homo sapiens
tatggtcttgtataa

SEQ ID NO: 50009 - DNA, 15 bp, Homo sapiens
atatggtcttgtata

SEQ ID NO: 50010 - DNA, 15 bp, Homo sapiens
gatatggtcttgtat

SEQ ID NO: 50011 - DNA, 15 bp, Homo sapiens
tgatatggtcttgta

SEQ ID NO: 50012 - DNA, 15 bp, Homo sapiens
atgatatggtcttgt

SEQ ID NO: 50013 - DNA, 15 bp, Homo sapiens
gatgatatggtcttg

SEQ ID NO: 50014 - DNA, 15 bp, Homo sapiens
agatgatatggtctt

SEQ ID NO: 50015 - DNA, 15 bp, Homo sapiens
cagatgatatggtct

SEQ ID NO: 50016 - DNA, 15 bp, Homo sapiens
gcagatgatatggtc

SEQ ID NO: 50017 - DNA, 15 bp, Homo sapiens
tgcagatgatatggt

SEQ ID NO: 50018 - DNA, 15 bp, Homo sapiens
ttgcagatgatatgg

SEQ ID NO: 50019 - DNA, 15 bp, Homo sapiens
tttgcagatgatatg

SEQ ID NO: 50020 - DNA, 15 bp, Homo sapiens
atttgcagatgatat

SEQ ID NO: 50021 - DNA, 15 bp, Homo sapiens
tatttgcagatgata

SEQ ID NO: 50022 - DNA, 15 bp, Homo sapiens
ctatttgcagatgat

SEQ ID NO: 50023 - DNA, 15 bp, Homo sapiens
tctatttgcagatga

SEQ ID NO: 50024 - DNA, 15 bp, Homo sapiens
ttctatttgcagatg

SEQ ID NO: 50025 - DNA, 15 bp, Homo sapiens
tttctatttgcagat

SEQ ID NO: 50026 - DNA, 15 bp, Homo sapiens
atttctatttgcaga

SEQ ID NO: 50027 - DNA, 15 bp, Homo sapiens
tatttctatttgcag

SEQ ID NO: 50028 - DNA, 15 bp, Homo sapiens
ttatttctatttgca

SEQ ID NO: 50029 - DNA, 15 bp, Homo sapiens
gttatttctatttgc

SEQ ID NO: 50030 - DNA, 15 bp, Homo sapiens
agttatttctatttg

SEQ ID NO: 50031 - DNA, 15 bp, Homo sapiens
tagttatttctattt

SEQ ID NO: 50032 - DNA, 15 bp, Homo sapiens
atagttatttctatt

SEQ ID NO: 50033 - DNA, 15 bp, Homo sapiens
tatagttatttctat

SEQ ID NO: 50034 - DNA, 15 bp, Homo sapiens
gtatagttatttcta

SEQ ID NO: 50035 - DNA, 15 bp, Homo sapiens
tgtatagttatttct

SEQ ID NO: 50036 - DNA, 15 bp, Homo sapiens
atgtatagttatttc

SEQ ID NO: 50037 - DNA, 15 bp, Homo sapiens
aatgtatagttattt

SEQ ID NO: 50038 - DNA, 15 bp, Homo sapiens
aaatgtatagttatt

SEQ ID NO: 50039 - DNA, 15 bp, Homo sapiens
aaaatgtatagttat

SEQ ID NO: 50040 - DNA, 15 bp, Homo sapiens
gaaaatgtatagtta

SEQ ID NO: 50041 - DNA, 15 bp, Homo sapiens
ggaaaatgtatagtt

SEQ ID NO: 50042 - DNA, 15 bp, Homo sapiens
aggaaaatgtatagt

SEQ ID NO: 50043 - DNA, 15 bp, Homo sapiens
aaggaaaatgtatag

SEQ ID NO: 50044 - DNA, 15 bp, Homo sapiens
aaaggaaaatgtata

SEQ ID NO: 50045 - DNA, 15 bp, Homo sapiens
gaaaggaaaatgtat

SEQ ID NO: 50046 - DNA, 15 bp, Homo sapiens
ggaaaggaaaatgta

SEQ ID NO: 50047 - DNA, 15 bp, Homo sapiens
tggaaaggaaaatgt

SEQ ID NO: 50048 - DNA, 15 bp, Homo sapiens
ttggaaaggaaaatg

SEQ ID NO: 50049 - DNA, 15 bp, Homo sapiens
attggaaaggaaaat

SEQ ID NO: 50050 - DNA, 15 bp, Homo sapiens
gattggaaaggaaaa

SEQ ID NO: 50051 - DNA, 15 bp, Homo sapiens
agattggaaaggaaa

SEQ ID NO: 50052 - DNA, 15 bp, Homo sapiens
tagattggaaaggaa

SEQ ID NO: 50053 - DNA, 15 bp, Homo sapiens
ctagattggaaagga

SEQ ID NO: 50054 - DNA, 15 bp, Homo sapiens
gctagattggaaagg

SEQ ID NO: 50055 - DNA, 15 bp, Homo sapiens
agctagattggaaag

SEQ ID NO: 50056 - DNA, 15 bp, Homo sapiens
cagctagattggaaa

SEQ ID NO: 50057 - DNA, 15 bp, Homo sapiens
gcagctagattggaa

SEQ ID NO: 50058 - DNA, 15 bp, Homo sapiens
ggcagctagattgga

SEQ ID NO: 50059 - DNA, 15 bp, Homo sapiens
aggcagctagattgg

SEQ ID NO: 50060 - DNA, 15 bp, Homo sapiens
aaggcagctagattg

SEQ ID NO: 50061 - DNA, 15 bp, Homo sapiens
aaaggcagctagatt

SEQ ID NO: 50062 - DNA, 15 bp, Homo sapiens
aaaaggcagctagat

SEQ ID NO: 50063 - DNA, 15 bp, Homo sapiens
aaaaaggcagctaga

SEQ ID NO: 50064 - DNA, 15 bp, Homo sapiens
aaaaaaggcagctag

SEQ ID NO: 50065 - DNA, 15 bp, Homo sapiens
taaaaaaggcagcta

SEQ ID NO: 50066 - DNA, 15 bp, Homo sapiens
ataaaaaaggcagct

SEQ ID NO: 50067 - DNA, 15 bp, Homo sapiens
aataaaaaaggcagc

SEQ ID NO: 50068 - DNA, 15 bp, Homo sapiens
aaataaaaaaggcag

SEQ ID NO: 50069 - DNA, 15 bp, Homo sapiens
aaaataaaaaaggca

SEQ ID NO: 50070 - DNA, 15 bp, Homo sapiens
taaaataaaaaaggc

SEQ ID NO: 50071 - DNA, 15 bp, Homo sapiens
ataaaataaaaaagg

SEQ ID NO: 50072 - DNA, 15 bp, Homo sapiens
aataaaataaaaaag

SEQ ID NO: 50073 - DNA, 15 bp, Homo sapiens
aaataaaataaaaaa

SEQ ID NO: 50074 - DNA, 15 bp, Homo sapiens
aaaataaaataaaaa

SEQ ID NO: 50075 - DNA, 15 bp, Homo sapiens
gataaaataaaataa

SEQ ID NO: 50076 - DNA, 15 bp, Homo sapiens
agataaaataaaata

SEQ ID NO: 50077 - DNA, 15 bp, Homo sapiens
aagataaaataaaat

SEQ ID NO: 50078 - DNA, 15 bp, Homo sapiens
taagataaaataaaa

SEQ ID NO: 50079 - DNA, 15 bp, Homo sapiens
ataagataaaataaa

SEQ ID NO: 50080 - DNA, 15 bp, Homo sapiens
aataagataaaataa

SEQ ID NO: 50081 - DNA, 15 bp, Homo sapiens
caataagataaaata

SEQ ID NO: 50082 - DNA, 15 bp, Homo sapiens
gcaataagataaaat

SEQ ID NO: 50083 - DNA, 15 bp, Homo sapiens
ggcaataagataaaa

SEQ ID NO: 50084 - DNA, 15 bp, Homo sapiens
aggcaataagataaa

SEQ ID NO: 50085 - DNA, 15 bp, Homo sapiens
taggcaataagataa

SEQ ID NO: 50086 - DNA, 15 bp, Homo sapiens
ttaggcaataagata

SEQ ID NO: 50087 - DNA, 15 bp, Homo sapiens
attaggcaataagat

SEQ ID NO: 50088 - DNA, 15 bp, Homo sapiens
aattaggcaataaga

SEQ ID NO: 50089 - DNA, 15 bp, Homo sapiens
caattaggcaataag

SEQ ID NO: 50090 - DNA, 15 bp, Homo sapiens
acaattaggcaataa

SEQ ID NO: 50091 - DNA, 15 bp, Homo sapiens
aacaattaggcaata

SEQ ID NO: 50092 - DNA, 15 bp, Homo sapiens
aaacaattaggcaat

SEQ ID NO: 50093 - DNA, 15 bp, Homo sapiens
aaaacaattaggcaa

SEQ ID NO: 50094 - DNA, 15 bp, Homo sapiens
caaaacaattaggca

SEQ ID NO: 50095 - DNA, 15 bp, Homo sapiens
ccaaaacaattaggc

SEQ ID NO: 50096 - DNA, 15 bp, Homo sapiens
gccaaaacaattagg

SEQ ID NO: 50097 - DNA, 15 bp, Homo sapiens
ggccaaaacaattag

SEQ ID NO: 50098 - DNA, 15 bp, Homo sapiens
gggccaaaacaatta

SEQ ID NO: 50099 - DNA, 15 bp, Homo sapiens
tgggccaaaacaatt

SEQ ID NO: 50100 - DNA, 15 bp, Homo sapiens
ttgggccaaaacaat

SEQ ID NO: 50101 - DNA, 15 bp, Homo sapiens
tttgggccaaaacaa

SEQ ID NO: 50102 - DNA, 15 bp, Homo sapiens
gtttgggccaaaaca

SEQ ID NO: 50103 - DNA, 15 bp, Homo sapiens
ggtttgggccaaaac

SEQ ID NO: 50104 - DNA, 15 bp, Homo sapiens
aggtttgggccaaaa

SEQ ID NO: 50105 - DNA, 15 bp, Homo sapiens
gaggtttgggccaaa

SEQ ID NO: 50106 - DNA, 15 bp, Homo sapiens
ggaggtttgggccaa

SEQ ID NO: 50107 - DNA, 15 bp, Homo sapiens
tggaggtttgggcca

SEQ ID NO: 50108 - DNA, 15 bp, Homo sapiens
ctggaggtttgggcc

SEQ ID NO: 50109 - DNA, 15 bp, Homo sapiens
actggaggtttgggc

SEQ ID NO: 50110 - DNA, 15 bp, Homo sapiens
tactggaggtttggg

SEQ ID NO: 50111 - DNA, 15 bp, Homo sapiens
gtactggaggtttgg

SEQ ID NO: 50112 - DNA, 15 bp, Homo sapiens
tgtactggaggtttg

SEQ ID NO: 50113 - DNA, 15 bp, Homo sapiens
ttgtactggaggttt

SEQ ID NO: 50114 - DNA, 15 bp, Homo sapiens
attgtactggaggtt

SEQ ID NO: 50115 - DNA, 15 bp, Homo sapiens
cattgtactggaggt

SEQ ID NO: 50116 - DNA, 15 bp, Homo sapiens
acattgtactggagg

SEQ ID NO: 50117 - DNA, 15 bp, Homo sapiens
aacattgtactggag

SEQ ID NO: 50118 - DNA, 15 bp, Homo sapiens
caacattgtactgga

SEQ ID NO: 50119 - DNA, 15 bp, Homo sapiens
tcaacattgtactgg

SEQ ID NO: 50120 - DNA, 15 bp, Homo sapiens
ctcaacattgtactg

SEQ ID NO: 50121 - DNA, 15 bp, Homo sapiens
actcaacattgtact

SEQ ID NO: 50122 - DNA, 15 bp, Homo sapiens
tactcaacattgtac

SEQ ID NO: 50123 - DNA, 15 bp, Homo sapiens
ctactcaacattgta

SEQ ID NO: 50124 - DNA, 15 bp, Homo sapiens
tctactcaacattgt

SEQ ID NO: 50125 - DNA, 15 bp, Homo sapiens
ttctactcaacattg

SEQ ID NO: 50126 - DNA, 15 bp, Homo sapiens
cttctactcaacatt

SEQ ID NO: 50127 - DNA, 15 bp, Homo sapiens
acttctactcaacat

SEQ ID NO: 50128 - DNA, 15 bp, Homo sapiens
cacttctactcaaca

SEQ ID NO: 50129 - DNA, 15 bp, Homo sapiens
ccacttctactcaac

SEQ ID NO: 50130 - DNA, 15 bp, Homo sapiens
accacttctactcaa

SEQ ID NO: 50131 - DNA, 15 bp, Homo sapiens
caccacttctactca

SEQ ID NO: 50132 - DNA, 15 bp, Homo sapiens
tcaccacttctactc

SEQ ID NO: 50133 - DNA, 15 bp, Homo sapiens
ctcaccacttctact

SEQ ID NO: 50134 - DNA, 15 bp, Homo sapiens
tctcaccacttctac

SEQ ID NO: 50135 - DNA, 15 bp, Homo sapiens
ctctcaccacttcta

SEQ ID NO: 50136 - DNA, 15 bp, Homo sapiens
gctctcaccacttct

SEQ ID NO: 50137 - DNA, 15 bp, Homo sapiens
tgctctcaccacttc

SEQ ID NO: 50138 - DNA, 15 bp, Homo sapiens
gtgctctcaccactt

SEQ ID NO: 50139 - DNA, 15 bp, Homo sapiens
tgtgctctcaccact

SEQ ID NO: 50140 - DNA, 15 bp, Homo sapiens
gtgtgctctcaccac

SEQ ID NO: 50141 - DNA, 15 bp, Homo sapiens
tgtgtgctctcacca

SEQ ID NO: 50142 - DNA, 15 bp, Homo sapiens
atgtgtgctctcacc

SEQ ID NO: 50143 - DNA, 15 bp, Homo sapiens
gatgtgtgctctcac

SEQ ID NO: 50144 - DNA, 15 bp, Homo sapiens
ggatgtgtgctctca

SEQ ID NO: 50145 - DNA, 15 bp, Homo sapiens
aggatgtgtgctctc

SEQ ID NO: 50146 - DNA, 15 bp, Homo sapiens
aaggatgtgtgctct

SEQ ID NO: 50147 - DNA, 15 bp, Homo sapiens
caaggatgtgtgctc

SEQ ID NO: 50148 - DNA, 15 bp, Homo sapiens
acaaggatgtgtgct

SEQ ID NO: 50149 - DNA, 15 bp, Homo sapiens
gacaaggatgtgtgc

SEQ ID NO: 50150 - DNA, 15 bp, Homo sapiens
agacaaggatgtgtg

SEQ ID NO: 50151 - DNA, 15 bp, Homo sapiens
aagacaaggatgtgt

SEQ ID NO: 50152 - DNA, 15 bp, Homo sapiens
taagacaaggatgtg

SEQ ID NO: 50153 - DNA, 15 bp, Homo sapiens
ataagacaaggatgt

SEQ ID NO: 50154 - DNA, 15 bp, Homo sapiens
aataagacaaggatg

SEQ ID NO: 50155 - DNA, 15 bp, Homo sapiens
gaataagacaaggat

SEQ ID NO: 50156 - DNA, 15 bp, Homo sapiens
ggaataagacaagga

SEQ ID NO: 50157 - DNA, 15 bp, Homo sapiens
aggaataagacaagg

SEQ ID NO: 50158 - DNA, 15 bp, Homo sapiens
taggaataagacaag

SEQ ID NO: 50159 - DNA, 15 bp, Homo sapiens
ataggaataagacaa

SEQ ID NO: 50160 - DNA, 15 bp, Homo sapiens
gataggaataagaca

SEQ ID NO: 50161 - DNA, 15 bp, Homo sapiens
agataggaataagac

SEQ ID NO: 50162 - DNA, 15 bp, Homo sapiens
aagataggaataaga

SEQ ID NO: 50163 - DNA, 15 bp, Homo sapiens
taagataggaataag

SEQ ID NO: 50164 - DNA, 15 bp, Homo sapiens
ctaagataggaataa

SEQ ID NO: 50165 - DNA, 15 bp, Homo sapiens
cctaagataggaata

SEQ ID NO: 50166 - DNA, 15 bp, Homo sapiens
ccctaagataggaat

SEQ ID NO: 50167 - DNA, 15 bp, Homo sapiens
cccctaagataggaa

SEQ ID NO: 50168 - DNA, 15 bp, Homo sapiens
ccccctaagatagga

SEQ ID NO: 50169 - DNA, 15 bp, Homo sapiens
tccccctaagatagg

SEQ ID NO: 50170 - DNA, 15 bp, Homo sapiens
ttccccctaagatag

SEQ ID NO: 50171 - DNA, 15 bp, Homo sapiens
tttccccctaagata

SEQ ID NO: 50172 - DNA, 15 bp, Homo sapiens
ctttccccctaagat

SEQ ID NO: 50173 - DNA, 15 bp, Homo sapiens
gctttccccctaaga

SEQ ID NO: 50174 - DNA, 15 bp, Homo sapiens
tgctttccccctaag

SEQ ID NO: 50175 - DNA, 15 bp, Homo sapiens
atgctttccccctaa

SEQ ID NO: 50176 - DNA, 15 bp, Homo sapiens
aatgctttcccccta

SEQ ID NO: 50177 - DNA, 15 bp, Homo sapiens
aaatgctttccccct

SEQ ID NO: 50178 - DNA, 15 bp, Homo sapiens
taaatgctttccccc

SEQ ID NO: 50179 - DNA, 15 bp, Homo sapiens
ctaaatgctttcccc

SEQ ID NO: 50180 - DNA, 15 bp, Homo sapiens
actaaatgctttccc

SEQ ID NO: 50181 - DNA, 15 bp, Homo sapiens
gactaaatgctttcc

SEQ ID NO: 50182 - DNA, 15 bp, Homo sapiens
agactaaatgctttc

SEQ ID NO: 50183 - DNA, 15 bp, Homo sapiens
aagactaaatgcttt

SEQ ID NO: 50184 - DNA, 15 bp, Homo sapiens
aaagactaaatgctt

SEQ ID NO: 50185 - DNA, 15 bp, Homo sapiens
gaaagactaaatgct

SEQ ID NO: 50186 - DNA, 15 bp, Homo sapiens
tgaaagactaaatgc

SEQ ID NO: 50187 - DNA, 15 bp, Homo sapiens
gtgaaagactaaatg

SEQ ID NO: 50188 - DNA, 15 bp, Homo sapiens
ggtgaaagactaaat

SEQ ID NO: 50189 - DNA, 15 bp, Homo sapiens
tggtgaaagactaaa

SEQ ID NO: 50190 - DNA, 15 bp, Homo sapiens
atggtgaaagactaa

SEQ ID NO: 50191 - DNA, 15 bp, Homo sapiens
aatggtgaaagacta

SEQ ID NO: 50192 - DNA, 15 bp, Homo sapiens
taatggtgaaagact

SEQ ID NO: 50193 - DNA, 15 bp, Homo sapiens
ttaatggtgaaagac

SEQ ID NO: 50194 - DNA, 15 bp, Homo sapiens
cttaatggtgaaaga

SEQ ID NO: 50195 - DNA, 15 bp, Homo sapiens
acttaatggtgaaag

SEQ ID NO: 50196 - DNA, 15 bp, Homo sapiens
tacttaatggtgaaa

SEQ ID NO: 50197 - DNA, 15 bp, Homo sapiens
atacttaatggtgaa

SEQ ID NO: 50198 - DNA, 15 bp, Homo sapiens
catacttaatggtga

SEQ ID NO: 50199 - DNA, 15 bp, Homo sapiens
ccatacttaatggtg

SEQ ID NO: 50200 - DNA, 15 bp, Homo sapiens
gccatacttaatggt

SEQ ID NO: 50201 - DNA, 15 bp, Homo sapiens
tgccatacttaatgg

SEQ ID NO: 50202 - DNA, 15 bp, Homo sapiens
atgccatacttaatg

SEQ ID NO: 50203 - DNA, 15 bp, Homo sapiens
aatgccatacttaat

SEQ ID NO: 50204 - DNA, 15 bp, Homo sapiens
taatgccatacttaa

SEQ ID NO: 50205 - DNA, 15 bp, Homo sapiens
ctaatgccatactta

SEQ ID NO: 50206 - DNA, 15 bp, Homo sapiens
gctaatgccatactt

SEQ ID NO: 50207 - DNA, 15 bp, Homo sapiens
agctaatgccatact

SEQ ID NO: 50208 - DNA, 15 bp, Homo sapiens
tagctaatgccatac

SEQ ID NO: 50209 - DNA, 15 bp, Homo sapiens
atagctaatgccata

SEQ ID NO: 50210 - DNA, 15 bp, Homo sapiens
catagctaatgccat

SEQ ID NO: 50211 - DNA, 15 bp, Homo sapiens
tcatagctaatgcca

SEQ ID NO: 50212 - DNA, 15 bp, Homo sapiens
gtcatagctaatgcc

SEQ ID NO: 50213 - DNA, 15 bp, Homo sapiens
agtcatagctaatgc

SEQ ID NO: 50214 - DNA, 15 bp, Homo sapiens
aagtcatagctaatg

SEQ ID NO: 50215 - DNA, 15 bp, Homo sapiens
aaagtcatagctaat

SEQ ID NO: 50216 - DNA, 15 bp, Homo sapiens
aaaagtcatagctaa

SEQ ID NO: 50217 - DNA, 15 bp, Homo sapiens
aaaaagtcatagcta

SEQ ID NO: 50218 - DNA, 15 bp, Homo sapiens
gaaaaagtcatagct

SEQ ID NO: 50219 - DNA, 15 bp, Homo sapiens
tgaaaaagtcatagc

SEQ ID NO: 50220 - DNA, 15 bp, Homo sapiens
gtgaaaaagtcatag

SEQ ID NO: 50221 - DNA, 15 bp, Homo sapiens
tgtgaaaaagtcata

SEQ ID NO: 50222 - DNA, 15 bp, Homo sapiens
ttgtgaaaaagtcat

SEQ ID NO: 50223 - DNA, 15 bp, Homo sapiens
cttgtgaaaaagtca

SEQ ID NO: 50224 - DNA, 15 bp, Homo sapiens
acttgtgaaaaagtc

SEQ ID NO: 50225 - DNA, 15 bp, Homo sapiens
cacttgtgaaaaagt

SEQ ID NO: 50226 - DNA, 15 bp, Homo sapiens
acacttgtgaaaaag

SEQ ID NO: 50227 - DNA, 15 bp, Homo sapiens
gacacttgtgaaaaa

SEQ ID NO: 50228 - DNA, 15 bp, Homo sapiens
ggacacttgtgaaaa

SEQ ID NO: 50229 - DNA, 15 bp, Homo sapiens
aggacacttgtgaaa

SEQ ID NO: 50230 - DNA, 15 bp, Homo sapiens
aaggacacttgtgaa

SEQ ID NO: 50231 - DNA, 15 bp, Homo sapiens
aaaggacacttgtga

SEQ ID NO: 50232 - DNA, 15 bp, Homo sapiens
taaaggacacttgtg

SEQ ID NO: 50233 - DNA, 15 bp, Homo sapiens
ataaaggacacttgt

SEQ ID NO: 50234 - DNA, 15 bp, Homo sapiens
aataaaggacacttg

SEQ ID NO: 50235 - DNA, 15 bp, Homo sapiens
taataaaggacactt

SEQ ID NO: 50236 - DNA, 15 bp, Homo sapiens
ataataaaggacact

SEQ ID NO: 50237 - DNA, 15 bp, Homo sapiens
cataataaaggacac

SEQ ID NO: 50238 - DNA, 15 bp, Homo sapiens
acataataaaggaca

SEQ ID NO: 50239 - DNA, 15 bp, Homo sapiens
aacataataaaggac

SEQ ID NO: 50240 - DNA, 15 bp, Homo sapiens
caacataataaagga

SEQ ID NO: 50241 - DNA, 15 bp, Homo sapiens
tcaacataataaagg

SEQ ID NO: 50242 - DNA, 15 bp, Homo sapiens
ctcaacataataaag

SEQ ID NO: 50243 - DNA, 15 bp, Homo sapiens
cctcaacataataaa

SEQ ID NO: 50244 - DNA, 15 bp, Homo sapiens
tcctcaacataataa

SEQ ID NO: 50245 - DNA, 15 bp, Homo sapiens
ttcctcaacataata

SEQ ID NO: 50246 - DNA, 15 bp, Homo sapiens
attcctcaacataat

SEQ ID NO: 50247 - DNA, 15 bp, Homo sapiens
aattcctcaacataa

SEQ ID NO: 50248 - DNA, 15 bp, Homo sapiens
gaattcctcaacata

SEQ ID NO: 50249 - DNA, 15 bp, Homo sapiens
ggaattcctcaacat

SEQ ID NO: 50250 - DNA, 15 bp, Homo sapiens
gggaattcctcaaca

SEQ ID NO: 50251 - DNA, 15 bp, Homo sapiens
agggaattcctcaac

SEQ ID NO: 50252 - DNA, 15 bp, Homo sapiens
aagggaattcctcaa

SEQ ID NO: 50253 - DNA, 15 bp, Homo sapiens
gaagggaattcctca

SEQ ID NO: 50254 - DNA, 15 bp, Homo sapiens
agaagggaattcctc

SEQ ID NO: 50255 - DNA, 15 bp, Homo sapiens
tagaagggaattcct

SEQ ID NO: 50256 - DNA, 15 bp, Homo sapiens
ttagaagggaattcc

SEQ ID NO: 50257 - DNA, 15 bp, Homo sapiens
attagaagggaattc

SEQ ID NO: 50258 - DNA, 15 bp, Homo sapiens
gattagaagggaatt

SEQ ID NO: 50259 - DNA, 15 bp, Homo sapiens
ggattagaagggaat

SEQ ID NO: 50260 - DNA, 15 bp, Homo sapiens
aggattagaagggaa

SEQ ID NO: 50261 - DNA, 15 bp, Homo sapiens
taggattagaaggga

SEQ ID NO: 50262 - DNA, 15 bp, Homo sapiens
ctaggattagaaggg

SEQ ID NO: 50263 - DNA, 15 bp, Homo sapiens
actaggattagaagg

SEQ ID NO: 50264 - DNA, 15 bp, Homo sapiens
aactaggattagaag

SEQ ID NO: 50265 - DNA, 15 bp, Homo sapiens
aaactaggattagaa

SEQ ID NO: 50266 - DNA, 15 bp, Homo sapiens
caaactaggattaga

SEQ ID NO: 50267 - DNA, 15 bp, Homo sapiens
acaaactaggattag

SEQ ID NO: 50268 - DNA, 15 bp, Homo sapiens
tacaaactaggatta

SEQ ID NO: 50269 - DNA, 15 bp, Homo sapiens
ctacaaactaggatt

SEQ ID NO: 50270 - DNA, 15 bp, Homo sapiens
tctacaaactaggat

SEQ ID NO: 50271 - DNA, 15 bp, Homo sapiens
ctctacaaactagga

SEQ ID NO: 50272 - DNA, 15 bp, Homo sapiens
actctacaaactagg

SEQ ID NO: 50273 - DNA, 15 bp, Homo sapiens
ctattttatctggga

SEQ ID NO: 50274 - DNA, 15 bp, Homo sapiens
tctattttatctggg

SEQ ID NO: 50275 - DNA, 15 bp, Homo sapiens
ttctattttatctgg

SEQ ID NO: 50276 - DNA, 15 bp, Homo sapiens
tttctattttatctg

SEQ ID NO: 50277 - DNA, 15 bp, Homo sapiens
ttttctattttatct

SEQ ID NO: 50278 - DNA, 15 bp, Homo sapiens
attttctattttatc

SEQ ID NO: 50279 - DNA, 15 bp, Homo sapiens
cattttctattttat

SEQ ID NO: 50280 - DNA, 15 bp, Homo sapiens
ccattttctatttta

SEQ ID NO: 50281 - DNA, 15 bp, Homo sapiens
accattttctatttt

SEQ ID NO: 50282 - DNA, 15 bp, Homo sapiens
aaccattttctattt

SEQ ID NO: 50283 - DNA, 15 bp, Homo sapiens
aaaccattttctatt

SEQ ID NO: 50284 - DNA, 15 bp, Homo sapiens
taaaccattttctat

SEQ ID NO: 50285 - DNA, 15 bp, Homo sapiens
ttaaaccattttcta

SEQ ID NO: 50286 - DNA, 15 bp, Homo sapiens
tttaaaccattttct

SEQ ID NO: 50287 - DNA, 15 bp, Homo sapiens
ctttaaaccattttc

SEQ ID NO: 50288 - DNA, 15 bp, Homo sapiens
actttaaaccatttt

SEQ ID NO: 50289 - DNA, 15 bp, Homo sapiens
cactttaaaccattt

SEQ ID NO: 50290 - DNA, 15 bp, Homo sapiens
tcactttaaaccatt

SEQ ID NO: 50291 - DNA, 15 bp, Homo sapiens
gtcactttaaaccat

SEQ ID NO: 50292 - DNA, 15 bp, Homo sapiens
tgtcactttaaacca

SEQ ID NO: 50293 - DNA, 15 bp, Homo sapiens
ttgtcactttaaacc

SEQ ID NO: 50294 - DNA, 15 bp, Homo sapiens
attgtcactttaaac

SEQ ID NO: 50295 - DNA, 15 bp, Homo sapiens
tattgtcactttaaa

SEQ ID NO: 50296 - DNA, 15 bp, Homo sapiens
ctattgtcactttaa

SEQ ID NO: 50297 - DNA, 15 bp, Homo sapiens
gctattgtcacttta

SEQ ID NO: 50298 - DNA, 15 bp, Homo sapiens
tgctattgtcacttt

SEQ ID NO: 50299 - DNA, 15 bp, Homo sapiens
ttgctattgtcactt

SEQ ID NO: 50300 - DNA, 15 bp, Homo sapiens
tttgctattgtcact

SEQ ID NO: 50301 - DNA, 15 bp, Homo sapiens
ctttgctattgtcac

SEQ ID NO: 50302 - DNA, 15 bp, Homo sapiens
tctttgctattgtca

SEQ ID NO: 50303 - DNA, 15 bp, Homo sapiens
ctctttgctattgtc

SEQ ID NO: 50304 - DNA, 15 bp, Homo sapiens
gctctttgctattgt

SEQ ID NO: 50305 - DNA, 15 bp, Homo sapiens
agctctttgctattg

SEQ ID NO: 50306 - DNA, 15 bp, Homo sapiens
gagctctttgctatt

SEQ ID NO: 50307 - DNA, 15 bp, Homo sapiens
cgagctctttgctat

SEQ ID NO: 50308 - DNA, 15 bp, Homo sapiens
gcgagctctttgcta

SEQ ID NO: 50309 - DNA, 15 bp, Homo sapiens
agcgagctctttgct

SEQ ID NO: 50310 - DNA, 15 bp, Homo sapiens
gagcgagctctttgc

SEQ ID NO: 50311 - DNA, 15 bp, Homo sapiens
ggagcgagctctttg

SEQ ID NO: 50312 - DNA, 15 bp, Homo sapiens
tggagcgagctcttt

SEQ ID NO: 50313 - DNA, 15 bp, Homo sapiens
atggagcgagctctt

SEQ ID NO: 50314 - DNA, 15 bp, Homo sapiens
aatggagcgagctct

SEQ ID NO: 50315 - DNA, 15 bp, Homo sapiens
aaatggagcgagctc

SEQ ID NO: 50316 - DNA, 15 bp, Homo sapiens
gaaatggagcgagct

SEQ ID NO: 50317 - DNA, 15 bp, Homo sapiens
tgaaatggagcgagc

SEQ ID NO: 50318 - DNA, 15 bp, Homo sapiens
atgaaatggagcgag

SEQ ID NO: 50319 - DNA, 15 bp, Homo sapiens
aatgaaatggagcga

SEQ ID NO: 50320 - DNA, 15 bp, Homo sapiens
taatgaaatggagcg

SEQ ID NO: 50321 - DNA, 15 bp, Homo sapiens
ctaatgaaatggagc

SEQ ID NO: 50322 - DNA, 15 bp, Homo sapiens
cctaatgaaatggag

SEQ ID NO: 50323 - DNA, 15 bp, Homo sapiens
acctaatgaaatgga

SEQ ID NO: 50324 - DNA, 15 bp, Homo sapiens
gacctaatgaaatgg

SEQ ID NO: 50325 - DNA, 15 bp, Homo sapiens
tgacctaatgaaatg

SEQ ID NO: 50326 - DNA, 15 bp, Homo sapiens
gtgacctaatgaaat

SEQ ID NO: 50327 - DNA, 15 bp, Homo sapiens
ggtgacctaatgaaa

SEQ ID NO: 50328 - DNA, 15 bp, Homo sapiens
tggtgacctaatgaa

SEQ ID NO: 50329 - DNA, 15 bp, Homo sapiens
gtggtgacctaatga

SEQ ID NO: 50330 - DNA, 15 bp, Homo sapiens
agtggtgacctaatg

SEQ ID NO: 50331 - DNA, 15 bp, Homo sapiens
aagtggtgacctaat

SEQ ID NO: 50332 - DNA, 15 bp, Homo sapiens
caagtggtgacctaa

SEQ ID NO: 50333 - DNA, 15 bp, Homo sapiens
ccaagtggtgaccta

SEQ ID NO: 50334 - DNA, 15 bp, Homo sapiens
gccaagtggtgacct

SEQ ID NO: 50335 - DNA, 15 bp, Homo sapiens
agccaagtggtgacc

SEQ ID NO: 50336 - DNA, 15 bp, Homo sapiens
cagccaagtggtgac

SEQ ID NO: 50337 - DNA, 15 bp, Homo sapiens
acagccaagtggtga

SEQ ID NO: 50338 - DNA, 15 bp, Homo sapiens
tacagccaagtggtg

SEQ ID NO: 50339 - DNA, 15 bp, Homo sapiens
gtacagccaagtggt

SEQ ID NO: 50340 - DNA, 15 bp, Homo sapiens
ggtacagccaagtgg

SEQ ID NO: 50341 - DNA, 15 bp, Homo sapiens
cggtacagccaagtg

SEQ ID NO: 50342 - DNA, 15 bp, Homo sapiens
gcggtacagccaagt

SEQ ID NO: 50343 - DNA, 15 bp, Homo sapiens
agcggtacagccaag

SEQ ID NO: 50344 - DNA, 15 bp, Homo sapiens
tagcggtacagccaa

SEQ ID NO: 50345 - DNA, 15 bp, Homo sapiens
ttagcggtacagcca

SEQ ID NO: 50346 - DNA, 15 bp, Homo sapiens
gttagcggtacagcc

SEQ ID NO: 50347 - DNA, 15 bp, Homo sapiens
tgttagcggtacagc

SEQ ID NO: 50348 - DNA, 15 bp, Homo sapiens
ctgttagcggtacag

SEQ ID NO: 50349 - DNA, 15 bp, Homo sapiens
cctgttagcggtaca

SEQ ID NO: 50350 - DNA, 15 bp, Homo sapiens
acctgttagcggtac

SEQ ID NO: 50351 - DNA, 15 bp, Homo sapiens
aacctgttagcggta

SEQ ID NO: 50352 - DNA, 15 bp, Homo sapiens
caacctgttagcggt

SEQ ID NO: 50353 - DNA, 15 bp, Homo sapiens
acaacctgttagcgg

SEQ ID NO: 50354 - DNA, 15 bp, Homo sapiens
cacaacctgttagcg

SEQ ID NO: 50355 - DNA, 15 bp, Homo sapiens
acacaacctgttagc

SEQ ID NO: 50356 - DNA, 15 bp, Homo sapiens
cacacaacctgttag

SEQ ID NO: 50357 - DNA, 15 bp, Homo sapiens
tcacacaacctgtta

SEQ ID NO: 50358 - DNA, 15 bp, Homo sapiens
gtcacacaacctgtt

SEQ ID NO: 50359 - DNA, 15 bp, Homo sapiens
agtcacacaacctgt

SEQ ID NO: 50360 - DNA, 15 bp, Homo sapiens
gagtcacacaacctg

SEQ ID NO: 50361 - DNA, 15 bp, Homo sapiens
tgagtcacacaacct

SEQ ID NO: 50362 - DNA, 15 bp, Homo sapiens
ctgagtcacacaacc

SEQ ID NO: 50363 - DNA, 15 bp, Homo sapiens
cctgagtcacacaac

SEQ ID NO: 50364 - DNA, 15 bp, Homo sapiens
tcctgagtcacacaa

SEQ ID NO: 50365 - DNA, 15 bp, Homo sapiens
ttcctgagtcacaca

SEQ ID NO: 50366 - DNA, 15 bp, Homo sapiens
tttcctgagtcacac

SEQ ID NO: 50367 - DNA, 15 bp, Homo sapiens
ttttcctgagtcaca

SEQ ID NO: 50368 - DNA, 15 bp, Homo sapiens
tttttcctgagtcac

SEQ ID NO: 50369 - DNA, 15 bp, Homo sapiens
atttttcctgagtca

SEQ ID NO: 50370 - DNA, 15 bp, Homo sapiens
gatttttcctgagtc

SEQ ID NO: 50371 - DNA, 15 bp, Homo sapiens
ggatttttcctgagt

SEQ ID NO: 50372 - DNA, 15 bp, Homo sapiens
tggatttttcctgag

SEQ ID NO: 50373 - DNA, 15 bp, Homo sapiens
atggatttttcctga

SEQ ID NO: 50374 - DNA, 15 bp, Homo sapiens
aatggatttttcctg

SEQ ID NO: 50375 - DNA, 15 bp, Homo sapiens
aaatggatttttcct

SEQ ID NO: 50376 - DNA, 15 bp, Homo sapiens
taaatggatttttcc

SEQ ID NO: 50377 - DNA, 15 bp, Homo sapiens
ttaaatggatttttc

SEQ ID NO: 50378 - DNA, 15 bp, Homo sapiens
gttaaatggattttt

SEQ ID NO: 50379 - DNA, 15 bp, Homo sapiens
ggttaaatggatttt

SEQ ID NO: 50380 - DNA, 15 bp, Homo sapiens
gggttaaatggattt

SEQ ID NO: 50381 - DNA, 15 bp, Homo sapiens
ggggttaaatggatt

SEQ ID NO: 50382 - DNA, 15 bp, Homo sapiens
aggggttaaatggat

SEQ ID NO: 50383 - DNA, 15 bp, Homo sapiens
caggggttaaatgga

SEQ ID NO: 50384 - DNA, 15 bp, Homo sapiens
tcaggggttaaatgg

SEQ ID NO: 50385 - DNA, 15 bp, Homo sapiens
ttcaggggttaaatg

SEQ ID NO: 50386 - DNA, 15 bp, Homo sapiens
tttcaggggttaaat

SEQ ID NO: 50387 - DNA, 15 bp, Homo sapiens
ttttcaggggttaaa

SEQ ID NO: 50388 - DNA, 15 bp, Homo sapiens
gttttcaggggttaa

SEQ ID NO: 50389 - DNA, 15 bp, Homo sapiens
ggttttcaggggtta

SEQ ID NO: 50390 - DNA, 15 bp, Homo sapiens
aggttttcaggggtt

SEQ ID NO: 50391 - DNA, 15 bp, Homo sapiens
gaggttttcaggggt

SEQ ID NO: 50392 - DNA, 15 bp, Homo sapiens
tgaggttttcagggg

SEQ ID NO: 50393 - DNA, 15 bp, Homo sapiens
ctgaggttttcaggg

SEQ ID NO: 50394 - DNA, 15 bp, Homo sapiens
actgaggttttcagg

SEQ ID NO: 50395 - DNA, 15 bp, Homo sapiens
aactgaggttttcag

SEQ ID NO: 50396 - DNA, 15 bp, Homo sapiens
aaactgaggttttca

SEQ ID NO: 50397 - DNA, 15 bp, Homo sapiens
gaaactgaggttttc

SEQ ID NO: 50398 - DNA, 15 bp, Homo sapiens
ggaaactgaggtttt

SEQ ID NO: 50399 - DNA, 15 bp, Homo sapiens
aggaaactgaggttt

SEQ ID NO: 50400 - DNA, 15 bp, Homo sapiens
aaggaaactgaggtt

SEQ ID NO: 50401 - DNA, 15 bp, Homo sapiens
caaggaaactgaggt

SEQ ID NO: 50402 - DNA, 15 bp, Homo sapiens
acaaggaaactgagg

SEQ ID NO: 50403 - DNA, 15 bp, Homo sapiens
gacaaggaaactgag

SEQ ID NO: 50404 - DNA, 15 bp, Homo sapiens
agacaaggaaactga

SEQ ID NO: 50405 - DNA, 15 bp, Homo sapiens
aagacaaggaaactg

SEQ ID NO: 50406 - DNA, 15 bp, Homo sapiens
aaagacaaggaaact

SEQ ID NO: 50407 - DNA, 15 bp, Homo sapiens
taaagacaaggaaac

SEQ ID NO: 50408 - DNA, 15 bp, Homo sapiens
ttaaagacaaggaaa

SEQ ID NO: 50409 - DNA, 15 bp, Homo sapiens
tttaaagacaaggaa

SEQ ID NO: 50410 - DNA, 15 bp, Homo sapiens
ttttaaagacaagga

SEQ ID NO: 50411 - DNA, 15 bp, Homo sapiens
attttaaagacaagg

SEQ ID NO: 50412 - DNA, 15 bp, Homo sapiens
tattttaaagacaag

SEQ ID NO: 50413 - DNA, 15 bp, Homo sapiens
ctattttaaagacaa

SEQ ID NO: 50414 - DNA, 15 bp, Homo sapiens
cctattttaaagaca

SEQ ID NO: 50415 - DNA, 15 bp, Homo sapiens
ccctattttaaagac

SEQ ID NO: 50416 - DNA, 15 bp, Homo sapiens
tccctattttaaaga

SEQ ID NO: 50417 - DNA, 15 bp, Homo sapiens
atccctattttaaag

SEQ ID NO: 50418 - DNA, 15 bp, Homo sapiens
tatccctattttaaa

SEQ ID NO: 50419 - DNA, 15 bp, Homo sapiens
ttatccctattttaa

SEQ ID NO: 50420 - DNA, 15 bp, Homo sapiens
attatccctatttta

SEQ ID NO: 50421 - DNA, 15 bp, Homo sapiens
tattatccctatttt

SEQ ID NO: 50422 - DNA, 15 bp, Homo sapiens
gtattatccctattt

SEQ ID NO: 50423 - DNA, 15 bp, Homo sapiens
ggtattatccctatt

SEQ ID NO: 50424 - DNA, 15 bp, Homo sapiens
aggtattatccctat

SEQ ID NO: 50425 - DNA, 15 bp, Homo sapiens
gaggtattatcccta

SEQ ID NO: 50426 - DNA, 15 bp, Homo sapiens
ggaggtattatccct

SEQ ID NO: 50427 - DNA, 15 bp, Homo sapiens
gggaggtattatccc

SEQ ID NO: 50428 - DNA, 15 bp, Homo sapiens
tgggaggtattatcc

SEQ ID NO: 50429 - DNA, 15 bp, Homo sapiens
ttgggaggtattatc

SEQ ID NO: 50430 - DNA, 15 bp, Homo sapiens
tttgggaggtattat

SEQ ID NO: 50431 - DNA, 15 bp, Homo sapiens
ttttgggaggtatta

SEQ ID NO: 50432 - DNA, 15 bp, Homo sapiens
tttttgggaggtatt

SEQ ID NO: 50433 - DNA, 15 bp, Homo sapiens
gtttttgggaggtat

SEQ ID NO: 50434 - DNA, 15 bp, Homo sapiens
tgtttttgggaggta

SEQ ID NO: 50435 - DNA, 15 bp, Homo sapiens
atgtttttgggaggt

SEQ ID NO: 50436 - DNA, 15 bp, Homo sapiens
aatgtttttgggagg

SEQ ID NO: 50437 - DNA, 15 bp, Homo sapiens
taatgtttttgggag

SEQ ID NO: 50438 - DNA, 15 bp, Homo sapiens
ataatgtttttggga

SEQ ID NO: 50439 - DNA, 15 bp, Homo sapiens
cataatgtttttggg

SEQ ID NO: 50440 - DNA, 15 bp, Homo sapiens
tcataatgtttttgg

SEQ ID NO: 50441 - DNA, 15 bp, Homo sapiens
atcataatgtttttg

SEQ ID NO: 50442 - DNA, 15 bp, Homo sapiens
catcataatgttttt

SEQ ID NO: 50443 - DNA, 15 bp, Homo sapiens
tcatcataatgtttt

SEQ ID NO: 50444 - DNA, 15 bp, Homo sapiens
atcatcataatgttt

SEQ ID NO: 50445 - DNA, 15 bp, Homo sapiens
aatcatcataatgtt

SEQ ID NO: 50446 - DNA, 15 bp, Homo sapiens
gaatcatcataatgt

SEQ ID NO: 50447 - DNA, 15 bp, Homo sapiens
tgaatcatcataatg

SEQ ID NO: 50448 - DNA, 15 bp, Homo sapiens
ctgaatcatcataat

SEQ ID NO: 50449 - DNA, 15 bp, Homo sapiens
cctgaatcatcataa

SEQ ID NO: 50450 - DNA, 15 bp, Homo sapiens
ccctgaatcatcata

SEQ ID NO: 50451 - DNA, 15 bp, Homo sapiens
tccctgaatcatcat

SEQ ID NO: 50452 - DNA, 15 bp, Homo sapiens
ttccctgaatcatca

SEQ ID NO: 50453 - DNA, 15 bp, Homo sapiens
attccctgaatcatc

SEQ ID NO: 50454 - DNA, 15 bp, Homo sapiens
tattccctgaatcat

SEQ ID NO: 50455 - DNA, 15 bp, Homo sapiens
ttattccctgaatca

SEQ ID NO: 50456 - DNA, 15 bp, Homo sapiens
attattccctgaatc

SEQ ID NO: 50457 - DNA, 15 bp, Homo sapiens
gattattccctgaat

SEQ ID NO: 50458 - DNA, 15 bp, Homo sapiens
ggattattccctgaa

SEQ ID NO: 50459 - DNA, 15 bp, Homo sapiens
tggattattccctga

SEQ ID NO: 50460 - DNA, 15 bp, Homo sapiens
gtggattattccctg

SEQ ID NO: 50461 - DNA, 15 bp, Homo sapiens
cgtggattattccct

SEQ ID NO: 50462 - DNA, 15 bp, Homo sapiens
acgtggattattccc

SEQ ID NO: 50463 - DNA, 15 bp, Homo sapiens
aacgtggattattcc

SEQ ID NO: 50464 - DNA, 15 bp, Homo sapiens
taacgtggattattc

SEQ ID NO: 50465 - DNA, 15 bp, Homo sapiens
ataacgtggattatt

SEQ ID NO: 50466 - DNA, 15 bp, Homo sapiens
cataacgtggattat

SEQ ID NO: 50467 - DNA, 15 bp, Homo sapiens
gcataacgtggatta

SEQ ID NO: 50468 - DNA, 15 bp, Homo sapiens
tgcataacgtggatt

SEQ ID NO: 50469 - DNA, 15 bp, Homo sapiens
atgcataacgtggat

SEQ ID NO: 50470 - DNA, 15 bp, Homo sapiens
aatgcataacgtgga

SEQ ID NO: 50471 - DNA, 15 bp, Homo sapiens
aaatgcataacgtgg

SEQ ID NO: 50472 - DNA, 15 bp, Homo sapiens
taaatgcataacgtg

SEQ ID NO: 50473 - DNA, 15 bp, Homo sapiens
ttaaatgcataacgt

SEQ ID NO: 50474 - DNA, 15 bp, Homo sapiens
cttaaatgcataacg

SEQ ID NO: 50475 - DNA, 15 bp, Homo sapiens
gcttaaatgcataac

SEQ ID NO: 50476 - DNA, 15 bp, Homo sapiens
ggcttaaatgcataa

SEQ ID NO: 50477 - DNA, 15 bp, Homo sapiens
cggcttaaatgcata

SEQ ID NO: 50478 - DNA, 15 bp, Homo sapiens
acggcttaaatgcat

SEQ ID NO: 50479 - DNA, 15 bp, Homo sapiens
cacggcttaaatgca

SEQ ID NO: 50480 - DNA, 15 bp, Homo sapiens
acacggcttaaatgc

SEQ ID NO: 50481 - DNA, 15 bp, Homo sapiens
gacacggcttaaatg

SEQ ID NO: 50482 - DNA, 15 bp, Homo sapiens
cgacacggcttaaat

SEQ ID NO: 50483 - DNA, 15 bp, Homo sapiens
ccgacacggcttaaa

SEQ ID NO: 50484 - DNA, 15 bp, Homo sapiens
cccgacacggcttaa

SEQ ID NO: 50485 - DNA, 15 bp, Homo sapiens
gcccgacacggctta

SEQ ID NO: 50486 - DNA, 15 bp, Homo sapiens
tgcccgacacggctt

SEQ ID NO: 50487 - DNA, 15 bp, Homo sapiens
gtgcccgacacggct

SEQ ID NO: 50488 - DNA, 15 bp, Homo sapiens
tgtgcccgacacggc

SEQ ID NO: 50489 - DNA, 15 bp, Homo sapiens
ctgtgcccgacacgg

SEQ ID NO: 50490 - DNA, 15 bp, Homo sapiens
tctgtgcccgacacg

SEQ ID NO: 50491 - DNA, 15 bp, Homo sapiens
ttctgtgcccgacac

SEQ ID NO: 50492 - DNA, 15 bp, Homo sapiens
attctgtgcccgaca

SEQ ID NO: 50493 - DNA, 15 bp, Homo sapiens
gattctgtgcccgac

SEQ ID NO: 50494 - DNA, 15 bp, Homo sapiens
tgattctgtgcccga

SEQ ID NO: 50495 - DNA, 15 bp, Homo sapiens
ttgattctgtgcccg

SEQ ID NO: 50496 - DNA, 15 bp, Homo sapiens
attgattctgtgccc

SEQ ID NO: 50497 - DNA, 15 bp, Homo sapiens
aattgattctgtgcc

SEQ ID NO: 50498 - DNA, 15 bp, Homo sapiens
caattgattctgtgc

SEQ ID NO: 50499 - DNA, 15 bp, Homo sapiens
gcaattgattctgtg

SEQ ID NO: 50500 - DNA, 15 bp, Homo sapiens
agcaattgattctgt

SEQ ID NO: 50501 - DNA, 15 bp, Homo sapiens
tagcaattgattctg

SEQ ID NO: 50502 - DNA, 15 bp, Homo sapiens
ttagcaattgattct

SEQ ID NO: 50503 - DNA, 15 bp, Homo sapiens
tttagcaattgattc

SEQ ID NO: 50504 - DNA, 15 bp, Homo sapiens
ctttagcaattgatt

SEQ ID NO: 50505 - DNA, 15 bp, Homo sapiens
tctttagcaattgat

SEQ ID NO: 50506 - DNA, 15 bp, Homo sapiens
ctctttagcaattga

SEQ ID NO: 50507 - DNA, 15 bp, Homo sapiens
tctctttagcaattg

SEQ ID NO: 50508 - DNA, 15 bp, Homo sapiens
ctctctttagcaatt

SEQ ID NO: 50509 - DNA, 15 bp, Homo sapiens
tctctctttagcaat

SEQ ID NO: 50510 - DNA, 15 bp, Homo sapiens
atctctctttagcaa

SEQ ID NO: 50511 - DNA, 15 bp, Homo sapiens
catctctctttagca

SEQ ID NO: 50512 - DNA, 15 bp, Homo sapiens
acatctctctttagc

SEQ ID NO: 50513 - DNA, 15 bp, Homo sapiens
tacatctctctttag

SEQ ID NO: 50514 - DNA, 15 bp, Homo sapiens
atacatctctcttta

SEQ ID NO: 50515 - DNA, 15 bp, Homo sapiens
tatacatctctcttt

SEQ ID NO: 50516 - DNA, 15 bp, Homo sapiens
atatacatctctctt

SEQ ID NO: 50517 - DNA, 15 bp, Homo sapiens
catatacatctctct

SEQ ID NO: 50518 - DNA, 15 bp, Homo sapiens
acatatacatctctc

SEQ ID NO: 50519 - DNA, 15 bp, Homo sapiens
aacatatacatctct

SEQ ID NO: 50520 - DNA, 15 bp, Homo sapiens
aaacatatacatctc

SEQ ID NO: 50521 - DNA, 15 bp, Homo sapiens
aaaacatatacatct

SEQ ID NO: 50522 - DNA, 15 bp, Homo sapiens
aaaaacatatacatc

SEQ ID NO: 50523 - DNA, 15 bp, Homo sapiens
gaaaaacatatacat

SEQ ID NO: 50524 - DNA, 15 bp, Homo sapiens
tgaaaaacatataca

SEQ ID NO: 50525 - DNA, 15 bp, Homo sapiens
ttgaaaaacatatac

SEQ ID NO: 50526 - DNA, 15 bp, Homo sapiens
attgaaaaacatata

SEQ ID NO: 50527 - DNA, 15 bp, Homo sapiens
gattgaaaaacatat

SEQ ID NO: 50528 - DNA, 15 bp, Homo sapiens
ggattgaaaaacata

SEQ ID NO: 50529 - DNA, 15 bp, Homo sapiens
tggattgaaaaacat

SEQ ID NO: 50530 - DNA, 15 bp, Homo sapiens
gtggattgaaaaaca

SEQ ID NO: 50531 - DNA, 15 bp, Homo sapiens
agtggattgaaaaac

SEQ ID NO: 50532 - DNA, 15 bp, Homo sapiens
tagtggattgaaaaa

SEQ ID NO: 50533 - DNA, 15 bp, Homo sapiens
atagtggattgaaaa

SEQ ID NO: 50534 - DNA, 15 bp, Homo sapiens
tatagtggattgaaa

SEQ ID NO: 50535 - DNA, 15 bp, Homo sapiens
atatagtggattgaa

SEQ ID NO: 50536 - DNA, 15 bp, Homo sapiens
gatatagtggattga

SEQ ID NO: 50537 - DNA, 15 bp, Homo sapiens
tgatatagtggattg

SEQ ID NO: 50538 - DNA, 15 bp, Homo sapiens
atgatatagtggatt

SEQ ID NO: 50539 - DNA, 15 bp, Homo sapiens
aatgatatagtggat

SEQ ID NO: 50540 - DNA, 15 bp, Homo sapiens
gaatgatatagtgga

SEQ ID NO: 50541 - DNA, 15 bp, Homo sapiens
tgaatgatatagtgg

SEQ ID NO: 50542 - DNA, 15 bp, Homo sapiens
ttgaatgatatagtg

SEQ ID NO: 50543 - DNA, 15 bp, Homo sapiens
cttgaatgatatagt

SEQ ID NO: 50544 - DNA, 15 bp, Homo sapiens
acttgaatgatatag

SEQ ID NO: 50545 - DNA, 15 bp, Homo sapiens
aacttgaatgatata

SEQ ID NO: 50546 - DNA, 15 bp, Homo sapiens
aaacttgaatgatat

SEQ ID NO: 50547 - DNA, 15 bp, Homo sapiens
aaaacttgaatgata

SEQ ID NO: 50548 - DNA, 15 bp, Homo sapiens
taaaacttgaatgat

SEQ ID NO: 50549 - DNA, 15 bp, Homo sapiens
gtaaaacttgaatga

SEQ ID NO: 50550 - DNA, 15 bp, Homo sapiens
cgtaaaacttgaatg

SEQ ID NO: 50551 - DNA, 15 bp, Homo sapiens
ccgtaaaacttgaat

SEQ ID NO: 50552 - DNA, 15 bp, Homo sapiens
gccgtaaaacttgaa

SEQ ID NO: 50553 - DNA, 15 bp, Homo sapiens
tgccgtaaaacttga

SEQ ID NO: 50554 - DNA, 15 bp, Homo sapiens
ctgccgtaaaacttg

SEQ ID NO: 50555 - DNA, 15 bp, Homo sapiens
actgccgtaaaactt

SEQ ID NO: 50556 - DNA, 15 bp, Homo sapiens
gactgccgtaaaact

SEQ ID NO: 50557 - DNA, 15 bp, Homo sapiens
agactgccgtaaaac

SEQ ID NO: 50558 - DNA, 15 bp, Homo sapiens
aagactgccgtaaaa

SEQ ID NO: 50559 - DNA, 15 bp, Homo sapiens
aaagactgccgtaaa

SEQ ID NO: 50560 - DNA, 15 bp, Homo sapiens
gaaagactgccgtaa

SEQ ID NO: 50561 - DNA, 15 bp, Homo sapiens
ggaaagactgccgta

SEQ ID NO: 50562 - DNA, 15 bp, Homo sapiens
aggaaagactgccgt

SEQ ID NO: 50563 - DNA, 15 bp, Homo sapiens
taggaaagactgccg

SEQ ID NO: 50564 - DNA, 15 bp, Homo sapiens
gtaggaaagactgcc

SEQ ID NO: 50565 - DNA, 15 bp, Homo sapiens
agtaggaaagactgc

SEQ ID NO: 50566 - DNA, 15 bp, Homo sapiens
tagtaggaaagactg

SEQ ID NO: 50567 - DNA, 15 bp, Homo sapiens
ttagtaggaaagact

SEQ ID NO: 50568 - DNA, 15 bp, Homo sapiens
gttagtaggaaagac

SEQ ID NO: 50569 - DNA, 15 bp, Homo sapiens
ggttagtaggaaaga

SEQ ID NO: 50570 - DNA, 15 bp, Homo sapiens
tggttagtaggaaag

SEQ ID NO: 50571 - DNA, 15 bp, Homo sapiens
gtggttagtaggaaa

SEQ ID NO: 50572 - DNA, 15 bp, Homo sapiens
agtggttagtaggaa

SEQ ID NO: 50573 - DNA, 15 bp, Homo sapiens
aagtggttagtagga

SEQ ID NO: 50574 - DNA, 15 bp, Homo sapiens
aaagtggttagtagg

SEQ ID NO: 50575 - DNA, 15 bp, Homo sapiens
gaaagtggttagtag

SEQ ID NO: 50576 - DNA, 15 bp, Homo sapiens
ggaaagtggttagta

SEQ ID NO: 50577 - DNA, 15 bp, Homo sapiens
tggaaagtggttagt

SEQ ID NO: 50578 - DNA, 15 bp, Homo sapiens
ttggaaagtggttag

SEQ ID NO: 50579 - DNA, 15 bp, Homo sapiens
gttggaaagtggtta

SEQ ID NO: 50580 - DNA, 15 bp, Homo sapiens
agttggaaagtggtt

SEQ ID NO: 50581 - DNA, 15 bp, Homo sapiens
tagttggaaagtggt

SEQ ID NO: 50582 - DNA, 15 bp, Homo sapiens
atagttggaaagtgg

SEQ ID NO: 50583 - DNA, 15 bp, Homo sapiens
tatagttggaaagtg

SEQ ID NO: 50584 - DNA, 15 bp, Homo sapiens
gtatagttggaaagt

SEQ ID NO: 50585 - DNA, 15 bp, Homo sapiens
agtatagttggaaag

SEQ ID NO: 50586 - DNA, 15 bp, Homo sapiens
gagtatagttggaaa

SEQ ID NO: 50587 - DNA, 15 bp, Homo sapiens
ggagtatagttggaa

SEQ ID NO: 50588 - DNA, 15 bp, Homo sapiens
tggagtatagttgga

SEQ ID NO: 50589 - DNA, 15 bp, Homo sapiens
ctggagtatagttgg

SEQ ID NO: 50590 - DNA, 15 bp, Homo sapiens
tctggagtatagttg

SEQ ID NO: 50591 - DNA, 15 bp, Homo sapiens
ctctggagtatagtt

SEQ ID NO: 50592 - DNA, 15 bp, Homo sapiens
tctctggagtatagt

SEQ ID NO: 50593 - DNA, 15 bp, Homo sapiens
ttctctggagtatag

SEQ ID NO: 50594 - DNA, 15 bp, Homo sapiens
gttctctggagtata

SEQ ID NO: 50595 - DNA, 15 bp, Homo sapiens
ggttctctggagtat

SEQ ID NO: 50596 - DNA, 15 bp, Homo sapiens
gggttctctggagta

SEQ ID NO: 50597 - DNA, 15 bp, Homo sapiens
agggttctctggagt

SEQ ID NO: 50598 - DNA, 15 bp, Homo sapiens
gagggttctctggag

SEQ ID NO: 50599 - DNA, 15 bp, Homo sapiens
tgagggttctctgga

SEQ ID NO: 50600 - DNA, 15 bp, Homo sapiens
ttgagggttctctgg

SEQ ID NO: 50601 - DNA, 15 bp, Homo sapiens
gttgagggttctctg

SEQ ID NO: 50602 - DNA, 15 bp, Homo sapiens
agttgagggttctct

SEQ ID NO: 50603 - DNA, 15 bp, Homo sapiens
aagttgagggttctc

SEQ ID NO: 50604 - DNA, 15 bp, Homo sapiens
gaagttgagggttct

SEQ ID NO: 50605 - DNA, 15 bp, Homo sapiens
ggaagttgagggttc

SEQ ID NO: 50606 - DNA, 15 bp, Homo sapiens
tggaagttgagggtt

SEQ ID NO: 50607 - DNA, 15 bp, Homo sapiens
gtggaagttgagggt

SEQ ID NO: 50608 - DNA, 15 bp, Homo sapiens
tgtggaagttgaggg

SEQ ID NO: 50609 - DNA, 15 bp, Homo sapiens
ctgtggaagttgagg

SEQ ID NO: 50610 - DNA, 15 bp, Homo sapiens
tctgtggaagttgag

SEQ ID NO: 50611 - DNA, 15 bp, Homo sapiens
ttctgtggaagttga

SEQ ID NO: 50612 - DNA, 15 bp, Homo sapiens
cttctgtggaagttg

SEQ ID NO: 50613 - DNA, 15 bp, Homo sapiens
tcttctgtggaagtt

SEQ ID NO: 50614 - DNA, 15 bp, Homo sapiens
ctcttctgtggaagt

SEQ ID NO: 50615 - DNA, 15 bp, Homo sapiens
gctcttctgtggaag

SEQ ID NO: 50616 - DNA, 15 bp, Homo sapiens
agctcttctgtggaa

SEQ ID NO: 50617 - DNA, 15 bp, Homo sapiens
aagctcttctgtgga

SEQ ID NO: 50618 - DNA, 15 bp, Homo sapiens
gaagctcttctgtgg

SEQ ID NO: 50619 - DNA, 15 bp, Homo sapiens
tgaagctcttctgtg

SEQ ID NO: 50620 - DNA, 15 bp, Homo sapiens
ctgaagctcttctgt

SEQ ID NO: 50621 - DNA, 15 bp, Homo sapiens
cctgaagctcttctg

SEQ ID NO: 50622 - DNA, 15 bp, Homo sapiens
ccctgaagctcttct

SEQ ID NO: 50623 - DNA, 15 bp, Homo sapiens
cccctgaagctcttc

SEQ ID NO: 50624 - DNA, 15 bp, Homo sapiens
acccctgaagctctt

SEQ ID NO: 50625 - DNA, 15 bp, Homo sapiens
aacccctgaagctct

SEQ ID NO: 50626 - DNA, 15 bp, Homo sapiens
aaacccctgaagctc

SEQ ID NO: 50627 - DNA, 15 bp, Homo sapiens
aaaacccctgaagct

SEQ ID NO: 50628 - DNA, 15 bp, Homo sapiens
caaaacccctgaagc

SEQ ID NO: 50629 - DNA, 15 bp, Homo sapiens
gcaaaacccctgaag

SEQ ID NO: 50630 - DNA, 15 bp, Homo sapiens
tgcaaaacccctgaa

SEQ ID NO: 50631 - DNA, 15 bp, Homo sapiens
ttgcaaaacccctga

SEQ ID NO: 50632 - DNA, 15 bp, Homo sapiens
tttgcaaaacccctg

SEQ ID NO: 50633 - DNA, 15 bp, Homo sapiens
gtttgcaaaacccct

SEQ ID NO: 50634 - DNA, 15 bp, Homo sapiens
tgtttgcaaaacccc

SEQ ID NO: 50635 - DNA, 15 bp, Homo sapiens
atgtttgcaaaaccc

SEQ ID NO: 50636 - DNA, 15 bp, Homo sapiens
aatgtttgcaaaacc

SEQ ID NO: 50637 - DNA, 15 bp, Homo sapiens
aaatgtttgcaaaac

SEQ ID NO: 50638 - DNA, 15 bp, Homo sapiens
aaaatgtttgcaaaa

SEQ ID NO: 50639 - DNA, 15 bp, Homo sapiens
aaaaatgtttgcaaa

SEQ ID NO: 50640 - DNA, 15 bp, Homo sapiens
aaaaaatgtttgcaa

SEQ ID NO: 50641 - DNA, 15 bp, Homo sapiens
gaaaaaatgtttgca

SEQ ID NO: 50642 - DNA, 15 bp, Homo sapiens
tgaaaaaatgtttgc

SEQ ID NO: 50643 - DNA, 15 bp, Homo sapiens
atgaaaaaatgtttg

SEQ ID NO: 50644 - DNA, 15 bp, Homo sapiens
aatgaaaaaatgttt

SEQ ID NO: 50645 - DNA, 15 bp, Homo sapiens
aaatgaaaaaatgtt

SEQ ID NO: 50646 - DNA, 15 bp, Homo sapiens
aaaatgaaaaaatgt

SEQ ID NO: 50647 - DNA, 15 bp, Homo sapiens
aaaaatgaaaaaatg

SEQ ID NO: 50648 - DNA, 15 bp, Homo sapiens
aaaaaatgaaaaaat

SEQ ID NO: 50649 - DNA, 15 bp, Homo sapiens
aaaaaaatgaaaaaa

SEQ ID NO: 50650 - DNA, 15 bp, Homo sapiens
aaaaaaaatgaaaaa

SEQ ID NO: 50651 - DNA, 15 bp, Homo sapiens
gaaaaaaaatgaaaa

SEQ ID NO: 50652 - DNA, 15 bp, Homo sapiens
agaaaaaaaatgaaa

SEQ ID NO: 50653 - DNA, 15 bp, Homo sapiens
cagaaaaaaaatgaa

SEQ ID NO: 50654 - DNA, 15 bp, Homo sapiens
tcagaaaaaaaatga

SEQ ID NO: 50655 - DNA, 15 bp, Homo sapiens
ttcagaaaaaaaatg

SEQ ID NO: 50656 - DNA, 15 bp, Homo sapiens
attcagaaaaaaaat

SEQ ID NO: 50657 - DNA, 15 bp, Homo sapiens
tattcagaaaaaaaa

SEQ ID NO: 50658 - DNA, 15 bp, Homo sapiens
gtattcagaaaaaaa

SEQ ID NO: 50659 - DNA, 15 bp, Homo sapiens
tgtattcagaaaaaa

SEQ ID NO: 50660 - DNA, 15 bp, Homo sapiens
gtgtattcagaaaaa

SEQ ID NO: 50661 - DNA, 15 bp, Homo sapiens
agtgtattcagaaaa

SEQ ID NO: 50662 - DNA, 15 bp, Homo sapiens
tagtgtattcagaaa

SEQ ID NO: 50663 - DNA, 15 bp, Homo sapiens
ttagtgtattcagaa

SEQ ID NO: 50664 - DNA, 15 bp, Homo sapiens
attagtgtattcaga

SEQ ID NO: 50665 - DNA, 15 bp, Homo sapiens
gattagtgtattcag

SEQ ID NO: 50666 - DNA, 15 bp, Homo sapiens
agattagtgtattca

SEQ ID NO: 50667 - DNA, 15 bp, Homo sapiens
gagattagtgtattc

SEQ ID NO: 50668 - DNA, 15 bp, Homo sapiens
agagattagtgtatt

SEQ ID NO: 50669 - DNA, 15 bp, Homo sapiens
aagagattagtgtat

SEQ ID NO: 50670 - DNA, 15 bp, Homo sapiens
aaagagattagtgta

SEQ ID NO: 50671 - DNA, 15 bp, Homo sapiens
gaaagagattagtgt

SEQ ID NO: 50672 - DNA, 15 bp, Homo sapiens
agaaagagattagtg

SEQ ID NO: 50673 - DNA, 15 bp, Homo sapiens
aagaaagagattagt

SEQ ID NO: 50674 - DNA, 15 bp, Homo sapiens
gaagaaagagattag

SEQ ID NO: 50675 - DNA, 15 bp, Homo sapiens
tgaagaaagagatta

SEQ ID NO: 50676 - DNA, 15 bp, Homo sapiens
ttgaagaaagagatt

SEQ ID NO: 50677 - DNA, 15 bp, Homo sapiens
tttgaagaaagagat

SEQ ID NO: 50678 - DNA, 15 bp, Homo sapiens
gtttgaagaaagaga

SEQ ID NO: 50679 - DNA, 15 bp, Homo sapiens
ggtttgaagaaagag

SEQ ID NO: 50680 - DNA, 15 bp, Homo sapiens
aggtttgaagaaaga

SEQ ID NO: 50681 - DNA, 15 bp, Homo sapiens
caggtttgaagaaag

SEQ ID NO: 50682 - DNA, 15 bp, Homo sapiens
acaggtttgaagaaa

SEQ ID NO: 50683 - DNA, 15 bp, Homo sapiens
cacaggtttgaagaa

SEQ ID NO: 50684 - DNA, 15 bp, Homo sapiens
tcacaggtttgaaga

SEQ ID NO: 50685 - DNA, 15 bp, Homo sapiens
atcacaggtttgaag

SEQ ID NO: 50686 - DNA, 15 bp, Homo sapiens
tatcacaggtttgaa

SEQ ID NO: 50687 - DNA, 15 bp, Homo sapiens
ttatcacaggtttga

SEQ ID NO: 50688 - DNA, 15 bp, Homo sapiens
tttatcacaggtttg

SEQ ID NO: 50689 - DNA, 15 bp, Homo sapiens
ctttatcacaggttt

SEQ ID NO: 50690 - DNA, 15 bp, Homo sapiens
actttatcacaggtt

SEQ ID NO: 50691 - DNA, 15 bp, Homo sapiens
tactttatcacaggt

SEQ ID NO: 50692 - DNA, 15 bp, Homo sapiens
ttactttatcacagg

SEQ ID NO: 50693 - DNA, 15 bp, Homo sapiens
attactttatcacag

SEQ ID NO: 50694 - DNA, 15 bp, Homo sapiens
tattactttatcaca

SEQ ID NO: 50695 - DNA, 15 bp, Homo sapiens
atattactttatcac

SEQ ID NO: 50696 - DNA, 15 bp, Homo sapiens
tatattactttatca

SEQ ID NO: 50697 - DNA, 15 bp, Homo sapiens
gtatattactttatc

SEQ ID NO: 50698 - DNA, 15 bp, Homo sapiens
tgtatattactttat

SEQ ID NO: 50699 - DNA, 15 bp, Homo sapiens
gtgtatattacttta

SEQ ID NO: 50700 - DNA, 15 bp, Homo sapiens
tgtgtatattacttt

SEQ ID NO: 50701 - DNA, 15 bp, Homo sapiens
gtgtgtatattactt

SEQ ID NO: 50702 - DNA, 15 bp, Homo sapiens
agtgtgtatattact

SEQ ID NO: 50703 - DNA, 15 bp, Homo sapiens
gagtgtgtatattac

SEQ ID NO: 50704 - DNA, 15 bp, Homo sapiens
tgagtgtgtatatta

SEQ ID NO: 50705 - DNA, 15 bp, Homo sapiens
gtgagtgtgtatatt

SEQ ID NO: 50706 - DNA, 15 bp, Homo sapiens
cgtgagtgtgtatat

SEQ ID NO: 50707 - DNA, 15 bp, Homo sapiens
acgtgagtgtgtata

SEQ ID NO: 50708 - DNA, 15 bp, Homo sapiens
cacgtgagtgtgtat

SEQ ID NO: 50709 - DNA, 15 bp, Homo sapiens
ccacgtgagtgtgta

SEQ ID NO: 50710 - DNA, 15 bp, Homo sapiens
tccacgtgagtgtgt

SEQ ID NO: 50711 - DNA, 15 bp, Homo sapiens
atccacgtgagtgtg

SEQ ID NO: 50712 - DNA, 15 bp, Homo sapiens
gatccacgtgagtgt

SEQ ID NO: 50713 - DNA, 15 bp, Homo sapiens
tgatccacgtgagtg

SEQ ID NO: 50714 - DNA, 15 bp, Homo sapiens
atgatccacgtgagt

SEQ ID NO: 50715 - DNA, 15 bp, Homo sapiens
tatgatccacgtgag

SEQ ID NO: 50716 - DNA, 15 bp, Homo sapiens
ctatgatccacgtga

SEQ ID NO: 50717 - DNA, 15 bp, Homo sapiens
cctatgatccacgtg

SEQ ID NO: 50718 - DNA, 15 bp, Homo sapiens
gcctatgatccacgt

SEQ ID NO: 50719 - DNA, 15 bp, Homo sapiens
ggcctatgatccacg

SEQ ID NO: 50720 - DNA, 15 bp, Homo sapiens
tggcctatgatccac

SEQ ID NO: 50721 - DNA, 15 bp, Homo sapiens
gtggcctatgatcca

SEQ ID NO: 50722 - DNA, 15 bp, Homo sapiens
tgtggcctatgatcc

SEQ ID NO: 50723 - DNA, 15 bp, Homo sapiens
atgtggcctatgatc

SEQ ID NO: 50724 - DNA, 15 bp, Homo sapiens
aatgtggcctatgat

SEQ ID NO: 50725 - DNA, 15 bp, Homo sapiens
aaatgtggcctatga

SEQ ID NO: 50726 - DNA, 15 bp, Homo sapiens
gaaatgtggcctatg

SEQ ID NO: 50727 - DNA, 15 bp, Homo sapiens
tgaaatgtggcctat

SEQ ID NO: 50728 - DNA, 15 bp, Homo sapiens
ttgaaatgtggccta

SEQ ID NO: 50729 - DNA, 15 bp, Homo sapiens
gttgaaatgtggcct

SEQ ID NO: 50730 - DNA, 15 bp, Homo sapiens
tgttgaaatgtggcc

SEQ ID NO: 50731 - DNA, 15 bp, Homo sapiens
atgttgaaatgtggc

SEQ ID NO: 50732 - DNA, 15 bp, Homo sapiens
catgttgaaatgtgg

SEQ ID NO: 50733 - DNA, 15 bp, Homo sapiens
acatgttgaaatgtg

SEQ ID NO: 50734 - DNA, 15 bp, Homo sapiens
aacatgttgaaatgt

SEQ ID NO: 50735 - DNA, 15 bp, Homo sapiens
caacatgttgaaatg

SEQ ID NO: 50736 - DNA, 15 bp, Homo sapiens
ccaacatgttgaaat

SEQ ID NO: 50737 - DNA, 15 bp, Homo sapiens
tccaacatgttgaaa

SEQ ID NO: 50738 - DNA, 15 bp, Homo sapiens
ctccaacatgttgaa

SEQ ID NO: 50739 - DNA, 15 bp, Homo sapiens
cctccaacatgttga

SEQ ID NO: 50740 - DNA, 15 bp, Homo sapiens
acctccaacatgttg

SEQ ID NO: 50741 - DNA, 15 bp, Homo sapiens
aacctccaacatgtt

SEQ ID NO: 50742 - DNA, 15 bp, Homo sapiens
taacctccaacatgt

SEQ ID NO: 50743 - DNA, 15 bp, Homo sapiens
ttaacctccaacatg

SEQ ID NO: 50744 - DNA, 15 bp, Homo sapiens
gttaacctccaacat

SEQ ID NO: 50745 - DNA, 15 bp, Homo sapiens
tgttaacctccaaca

SEQ ID NO: 50746 - DNA, 15 bp, Homo sapiens
atgttaacctccaac

SEQ ID NO: 50747 - DNA, 15 bp, Homo sapiens
tatgttaacctccaa

SEQ ID NO: 50748 - DNA, 15 bp, Homo sapiens
atatgttaacctcca

SEQ ID NO: 50749 - DNA, 15 bp, Homo sapiens
tatatgttaacctcc

SEQ ID NO: 50750 - DNA, 15 bp, Homo sapiens
ctatatgttaacctc

SEQ ID NO: 50751 - DNA, 15 bp, Homo sapiens
gctatatgttaacct

SEQ ID NO: 50752 - DNA, 15 bp, Homo sapiens
ggctatatgttaacc

SEQ ID NO: 50753 - DNA, 15 bp, Homo sapiens
gggctatatgttaac

SEQ ID NO: 50754 - DNA, 15 bp, Homo sapiens
tgggctatatgttaa

SEQ ID NO: 50755 - DNA, 15 bp, Homo sapiens
ctgggctatatgtta

SEQ ID NO: 50756 - DNA, 15 bp, Homo sapiens
actgggctatatgtt

SEQ ID NO: 50757 - DNA, 15 bp, Homo sapiens
aactgggctatatgt

SEQ ID NO: 50758 - DNA, 15 bp, Homo sapiens
gaactgggctatatg

SEQ ID NO: 50759 - DNA, 15 bp, Homo sapiens
tgaactgggctatat

SEQ ID NO: 50760 - DNA, 15 bp, Homo sapiens
gtgaactgggctata

SEQ ID NO: 50761 - DNA, 15 bp, Homo sapiens
agtgaactgggctat

SEQ ID NO: 50762 - DNA, 15 bp, Homo sapiens
aagtgaactgggcta

SEQ ID NO: 50763 - DNA, 15 bp, Homo sapiens
caagtgaactgggct

SEQ ID NO: 50764 - DNA, 15 bp, Homo sapiens
ccaagtgaactgggc

SEQ ID NO: 50765 - DNA, 15 bp, Homo sapiens
accaagtgaactggg

SEQ ID NO: 50766 - DNA, 15 bp, Homo sapiens
aaccaagtgaactgg

SEQ ID NO: 50767 - DNA, 15 bp, Homo sapiens
aaaccaagtgaactg

SEQ ID NO: 50768 - DNA, 15 bp, Homo sapiens
aaaaccaagtgaact

SEQ ID NO: 50769 - DNA, 15 bp, Homo sapiens
taaaaccaagtgaac

SEQ ID NO: 50770 - DNA, 15 bp, Homo sapiens
ttaaaaccaagtgaa

SEQ ID NO: 50771 - DNA, 15 bp, Homo sapiens
tttaaaaccaagtga

SEQ ID NO: 50772 - DNA, 15 bp, Homo sapiens
gtttaaaaccaagtg

SEQ ID NO: 50773 - DNA, 15 bp, Homo sapiens
tgtttaaaaccaagt

SEQ ID NO: 50774 - DNA, 15 bp, Homo sapiens
ctgtttaaaaccaag

SEQ ID NO: 50775 - DNA, 15 bp, Homo sapiens
gctgtttaaaaccaa

SEQ ID NO: 50776 - DNA, 15 bp, Homo sapiens
agctgtttaaaacca

SEQ ID NO: 50777 - DNA, 15 bp, Homo sapiens
gagctgtttaaaacc

SEQ ID NO: 50778 - DNA, 15 bp, Homo sapiens
agagctgtttaaaac

SEQ ID NO: 50779 - DNA, 15 bp, Homo sapiens
tagagctgtttaaaa

SEQ ID NO: 50780 - DNA, 15 bp, Homo sapiens
ttagagctgtttaaa

SEQ ID NO: 50781 - DNA, 15 bp, Homo sapiens
gttagagctgtttaa

SEQ ID NO: 50782 - DNA, 15 bp, Homo sapiens
cgttagagctgttta

SEQ ID NO: 50783 - DNA, 15 bp, Homo sapiens
gcgttagagctgttt

SEQ ID NO: 50784 - DNA, 15 bp, Homo sapiens
agcgttagagctgtt

SEQ ID NO: 50785 - DNA, 15 bp, Homo sapiens
aagcgttagagctgt

SEQ ID NO: 50786 - DNA, 15 bp, Homo sapiens
taagcgttagagctg

SEQ ID NO: 50787 - DNA, 15 bp, Homo sapiens
ctaagcgttagagct

SEQ ID NO: 50788 - DNA, 15 bp, Homo sapiens
actaagcgttagagc

SEQ ID NO: 50789 - DNA, 15 bp, Homo sapiens
aactaagcgttagag

SEQ ID NO: 50790 - DNA, 15 bp, Homo sapiens
aaactaagcgttaga

SEQ ID NO: 50791 - DNA, 15 bp, Homo sapiens
gaaactaagcgttag

SEQ ID NO: 50792 - DNA, 15 bp, Homo sapiens
agaaactaagcgtta

SEQ ID NO: 50793 - DNA, 15 bp, Homo sapiens
gagaaactaagcgtt

SEQ ID NO: 50794 - DNA, 15 bp, Homo sapiens
agagaaactaagcgt

SEQ ID NO: 50795 - DNA, 15 bp, Homo sapiens
tagagaaactaagcg

SEQ ID NO: 50796 - DNA, 15 bp, Homo sapiens
ctagagaaactaagc

SEQ ID NO: 50797 - DNA, 15 bp, Homo sapiens
actagagaaactaag

SEQ ID NO: 50798 - DNA, 15 bp, Homo sapiens
gactagagaaactaa

SEQ ID NO: 50799 - DNA, 15 bp, Homo sapiens
tgactagagaaacta

SEQ ID NO: 50800 - DNA, 15 bp, Homo sapiens
atgactagagaaact

SEQ ID NO: 50801 - DNA, 15 bp, Homo sapiens
gatgactagagaaac

SEQ ID NO: 50802 - DNA, 15 bp, Homo sapiens
agatgactagagaaa

SEQ ID NO: 50803 - DNA, 15 bp, Homo sapiens
gagatgactagagaa

SEQ ID NO: 50804 - DNA, 15 bp, Homo sapiens
tgagatgactagaga

SEQ ID NO: 50805 - DNA, 15 bp, Homo sapiens
ctgagatgactagag

SEQ ID NO: 50806 - DNA, 15 bp, Homo sapiens
actgagatgactaga

SEQ ID NO: 50807 - DNA, 15 bp, Homo sapiens
tactgagatgactag

SEQ ID NO: 50808 - DNA, 15 bp, Homo sapiens
gtactgagatgacta

SEQ ID NO: 50809 - DNA, 15 bp, Homo sapiens
ggtactgagatgact

SEQ ID NO: 50810 - DNA, 15 bp, Homo sapiens
gggtactgagatgac

SEQ ID NO: 50811 - DNA, 15 bp, Homo sapiens
tgggtactgagatga

SEQ ID NO: 50812 - DNA, 15 bp, Homo sapiens
atgggtactgagatg

SEQ ID NO: 50813 - DNA, 15 bp, Homo sapiens
aatgggtactgagat

SEQ ID NO: 50814 - DNA, 15 bp, Homo sapiens
aaatgggtactgaga

SEQ ID NO: 50815 - DNA, 15 bp, Homo sapiens
gaaatgggtactgag

SEQ ID NO: 50816 - DNA, 15 bp, Homo sapiens
agaaatgggtactga

SEQ ID NO: 50817 - DNA, 15 bp, Homo sapiens
tagaaatgggtactg

SEQ ID NO: 50818 - DNA, 15 bp, Homo sapiens
ctagaaatgggtact

SEQ ID NO: 50819 - DNA, 15 bp, Homo sapiens
gctagaaatgggtac

SEQ ID NO: 50820 - DNA, 15 bp, Homo sapiens
agctagaaatgggta

SEQ ID NO: 50821 - DNA, 15 bp, Homo sapiens
aagctagaaatgggt

SEQ ID NO: 50822 - DNA, 15 bp, Homo sapiens
gaagctagaaatggg

SEQ ID NO: 50823 - DNA, 15 bp, Homo sapiens
agaagctagaaatgg

SEQ ID NO: 50824 - DNA, 15 bp, Homo sapiens
gagaagctagaaatg

SEQ ID NO: 50825 - DNA, 15 bp, Homo sapiens
tgagaagctagaaat

SEQ ID NO: 50826 - DNA, 15 bp, Homo sapiens
atgagaagctagaaa

SEQ ID NO: 50827 - DNA, 15 bp, Homo sapiens
tatgagaagctagaa

SEQ ID NO: 50828 - DNA, 15 bp, Homo sapiens
ttatgagaagctaga

SEQ ID NO: 50829 - DNA, 15 bp, Homo sapiens
tttatgagaagctag

SEQ ID NO: 50830 - DNA, 15 bp, Homo sapiens
gtttatgagaagcta

SEQ ID NO: 50831 - DNA, 15 bp, Homo sapiens
agtttatgagaagct

SEQ ID NO: 50832 - DNA, 15 bp, Homo sapiens
gagtttatgagaagc

SEQ ID NO: 50833 - DNA, 15 bp, Homo sapiens
cgagtttatgagaag

SEQ ID NO: 50834 - DNA, 15 bp, Homo sapiens
acgagtttatgagaa

SEQ ID NO: 50835 - DNA, 15 bp, Homo sapiens
gacgagtttatgaga

SEQ ID NO: 50836 - DNA, 15 bp, Homo sapiens
tgacgagtttatgag

SEQ ID NO: 50837 - DNA, 15 bp, Homo sapiens
gtgacgagtttatga

SEQ ID NO: 50838 - DNA, 15 bp, Homo sapiens
agtgacgagtttatg

SEQ ID NO: 50839 - DNA, 15 bp, Homo sapiens
cagtgacgagtttat

SEQ ID NO: 50840 - DNA, 15 bp, Homo sapiens
tcagtgacgagttta

SEQ ID NO: 50841 - DNA, 15 bp, Homo sapiens
atcagtgacgagttt

SEQ ID NO: 50842 - DNA, 15 bp, Homo sapiens
aatcagtgacgagtt

SEQ ID NO: 50843 - DNA, 15 bp, Homo sapiens
aaatcagtgacgagt

SEQ ID NO: 50844 - DNA, 15 bp, Homo sapiens
caaatcagtgacgag

SEQ ID NO: 50845 - DNA, 15 bp, Homo sapiens
ccaaatcagtgacga

SEQ ID NO: 50846 - DNA, 15 bp, Homo sapiens
tccaaatcagtgacg

SEQ ID NO: 50847 - DNA, 15 bp, Homo sapiens
ttccaaatcagtgac

SEQ ID NO: 50848 - DNA, 15 bp, Homo sapiens
attccaaatcagtga

SEQ ID NO: 50849 - DNA, 15 bp, Homo sapiens
cattccaaatcagtg

SEQ ID NO: 50850 - DNA, 15 bp, Homo sapiens
acattccaaatcagt

SEQ ID NO: 50851 - DNA, 15 bp, Homo sapiens
aacattccaaatcag

SEQ ID NO: 50852 - DNA, 15 bp, Homo sapiens
caacattccaaatca

SEQ ID NO: 50853 - DNA, 15 bp, Homo sapiens
acaacattccaaatc

SEQ ID NO: 50854 - DNA, 15 bp, Homo sapiens
tacaacattccaaat

SEQ ID NO: 50855 - DNA, 15 bp, Homo sapiens
ctacaacattccaaa

SEQ ID NO: 50856 - DNA, 15 bp, Homo sapiens
cctacaacattccaa

SEQ ID NO: 50857 - DNA, 15 bp, Homo sapiens
acctacaacattcca

SEQ ID NO: 50858 - DNA, 15 bp, Homo sapiens
gacctacaacattcc

SEQ ID NO: 50859 - DNA, 15 bp, Homo sapiens
agacctacaacattc

SEQ ID NO: 50860 - DNA, 15 bp, Homo sapiens
cagacctacaacatt

SEQ ID NO: 50861 - DNA, 15 bp, Homo sapiens
gcagacctacaacat

SEQ ID NO: 50862 - DNA, 15 bp, Homo sapiens
tgcagacctacaaca

SEQ ID NO: 50863 - DNA, 15 bp, Homo sapiens
gtgcagacctacaac

SEQ ID NO: 50864 - DNA, 15 bp, Homo sapiens
tgtgcagacctacaa

SEQ ID NO: 50865 - DNA, 15 bp, Homo sapiens
atgtgcagacctaca

SEQ ID NO: 50866 - DNA, 15 bp, Homo sapiens
catgtgcagacctac

SEQ ID NO: 50867 - DNA, 15 bp, Homo sapiens
acatgtgcagaccta

SEQ ID NO: 50868 - DNA, 15 bp, Homo sapiens
gacatgtgcagacct

SEQ ID NO: 50869 - DNA, 15 bp, Homo sapiens
agacatgtgcagacc

SEQ ID NO: 50870 - DNA, 15 bp, Homo sapiens
aagacatgtgcagac

SEQ ID NO: 50871 - DNA, 15 bp, Homo sapiens
caagacatgtgcaga

SEQ ID NO: 50872 - DNA, 15 bp, Homo sapiens
acaagacatgtgcag

SEQ ID NO: 50873 - DNA, 15 bp, Homo sapiens
gacaagacatgtgca

SEQ ID NO: 50874 - DNA, 15 bp, Homo sapiens
agacaagacatgtgc

SEQ ID NO: 50875 - DNA, 15 bp, Homo sapiens
aagacaagacatgtg

SEQ ID NO: 50876 - DNA, 15 bp, Homo sapiens
caagacaagacatgt

SEQ ID NO: 50877 - DNA, 15 bp, Homo sapiens
gcaagacaagacatg

SEQ ID NO: 50878 - DNA, 15 bp, Homo sapiens
agcaagacaagacat

SEQ ID NO: 50879 - DNA, 15 bp, Homo sapiens
aagcaagacaagaca

SEQ ID NO: 50880 - DNA, 15 bp, Homo sapiens
aaagcaagacaagac

SEQ ID NO: 50881 - DNA, 15 bp, Homo sapiens
gaaagcaagacaaga

SEQ ID NO: 50882 - DNA, 15 bp, Homo sapiens
tgaaagcaagacaag

SEQ ID NO: 50883 - DNA, 15 bp, Homo sapiens
ttgaaagcaagacaa

SEQ ID NO: 50884 - DNA, 15 bp, Homo sapiens
cttgaaagcaagaca

SEQ ID NO: 50885 - DNA, 15 bp, Homo sapiens
acttgaaagcaagac

SEQ ID NO: 50886 - DNA, 15 bp, Homo sapiens
gacttgaaagcaaga

SEQ ID NO: 50887 - DNA, 15 bp, Homo sapiens
agacttgaaagcaag

SEQ ID NO: 50888 - DNA, 15 bp, Homo sapiens
cagacttgaaagcaa

SEQ ID NO: 50889 - DNA, 15 bp, Homo sapiens
acagacttgaaagca

SEQ ID NO: 50890 - DNA, 15 bp, Homo sapiens
cacagacttgaaagc

SEQ ID NO: 50891 - DNA, 15 bp, Homo sapiens
acacagacttgaaag

SEQ ID NO: 50892 - DNA, 15 bp, Homo sapiens
tacacagacttgaaa

SEQ ID NO: 50893 - DNA, 15 bp, Homo sapiens
atacacagacttgaa

SEQ ID NO: 50894 - DNA, 15 bp, Homo sapiens
catacacagacttga

SEQ ID NO: 50895 - DNA, 15 bp, Homo sapiens
gcatacacagacttg

SEQ ID NO: 50896 - DNA, 15 bp, Homo sapiens
agcatacacagactt

SEQ ID NO: 50897 - DNA, 15 bp, Homo sapiens
aagcatacacagact

SEQ ID NO: 50898 - DNA, 15 bp, Homo sapiens
caagcatacacagac

SEQ ID NO: 50899 - DNA, 15 bp, Homo sapiens
acaagcatacacaga

SEQ ID NO: 50900 - DNA, 15 bp, Homo sapiens
gacaagcatacacag

SEQ ID NO: 50901 - DNA, 15 bp, Homo sapiens
ggacaagcatacaca

SEQ ID NO: 50902 - DNA, 15 bp, Homo sapiens
aggacaagcatacac

SEQ ID NO: 50903 - DNA, 15 bp, Homo sapiens
aaggacaagcataca

SEQ ID NO: 50904 - DNA, 15 bp, Homo sapiens
taaggacaagcatac

SEQ ID NO: 50905 - DNA, 15 bp, Homo sapiens
ataaggacaagcata

SEQ ID NO: 50906 - DNA, 15 bp, Homo sapiens
tataaggacaagcat

SEQ ID NO: 50907 - DNA, 15 bp, Homo sapiens
gtataaggacaagca

SEQ ID NO: 50908 - DNA, 15 bp, Homo sapiens
tgtataaggacaagc

SEQ ID NO: 50909 - DNA, 15 bp, Homo sapiens
ttgtataaggacaag

SEQ ID NO: 50910 - DNA, 15 bp, Homo sapiens
gttgtataaggacaa

SEQ ID NO: 50911 - DNA, 15 bp, Homo sapiens
tgttgtataaggaca

SEQ ID NO: 50912 - DNA, 15 bp, Homo sapiens
ttgttgtataaggac

SEQ ID NO: 50913 - DNA, 15 bp, Homo sapiens
tttgttgtataagga

SEQ ID NO: 50914 - DNA, 15 bp, Homo sapiens
gtttgttgtataagg

SEQ ID NO: 50915 - DNA, 15 bp, Homo sapiens
agtttgttgtataag

SEQ ID NO: 50916 - DNA, 15 bp, Homo sapiens
aagtttgttgtataa

SEQ ID NO: 50917 - DNA, 15 bp, Homo sapiens
gaagtttgttgtata

SEQ ID NO: 50918 - DNA, 15 bp, Homo sapiens
agaagtttgttgtat

SEQ ID NO: 50919 - DNA, 15 bp, Homo sapiens
tagaagtttgttgta

SEQ ID NO: 50920 - DNA, 15 bp, Homo sapiens
gtagaagtttgttgt

SEQ ID NO: 50921 - DNA, 15 bp, Homo sapiens
tgtagaagtttgttg

SEQ ID NO: 50922 - DNA, 15 bp, Homo sapiens
ttgtagaagtttgtt

SEQ ID NO: 50923 - DNA, 15 bp, Homo sapiens
cttgtagaagtttgt

SEQ ID NO: 50924 - DNA, 15 bp, Homo sapiens
gcttgtagaagtttg

SEQ ID NO: 50925 - DNA, 15 bp, Homo sapiens
tgcttgtagaagttt

SEQ ID NO: 50926 - DNA, 15 bp, Homo sapiens
ttgcttgtagaagtt

SEQ ID NO: 50927 - DNA, 15 bp, Homo sapiens
gttgcttgtagaagt

SEQ ID NO: 50928 - DNA, 15 bp, Homo sapiens
agttgcttgtagaag

SEQ ID NO: 50929 - DNA, 15 bp, Homo sapiens
tagttgcttgtagaa

SEQ ID NO: 50930 - DNA, 15 bp, Homo sapiens
atagttgcttgtaga

SEQ ID NO: 50931 - DNA, 15 bp, Homo sapiens
tatagttgcttgtag

SEQ ID NO: 50932 - DNA, 15 bp, Homo sapiens
gtatagttgcttgta

SEQ ID NO: 50933 - DNA, 15 bp, Homo sapiens
tgtatagttgcttgt

SEQ ID NO: 50934 - DNA, 15 bp, Homo sapiens
ttgtatagttgcttg

SEQ ID NO: 50935 - DNA, 15 bp, Homo sapiens
gttgtatagttgctt

SEQ ID NO: 50936 - DNA, 15 bp, Homo sapiens
tgttgtatagttgct

SEQ ID NO: 50937 - DNA, 15 bp, Homo sapiens
ttgttgtatagttgc

SEQ ID NO: 50938 - DNA, 15 bp, Homo sapiens
tttgttgtatagttg

SEQ ID NO: 50939 - DNA, 15 bp, Homo sapiens
gtttgttgtatagtt

SEQ ID NO: 50940 - DNA, 15 bp, Homo sapiens
agtttgttgtatagt

SEQ ID NO: 50941 - DNA, 15 bp, Homo sapiens
tagtttgttgtatag

SEQ ID NO: 50942 - DNA, 15 bp, Homo sapiens
atagtttgttgtata

SEQ ID NO: 50943 - DNA, 15 bp, Homo sapiens
tatagtttgttgtat

SEQ ID NO: 50944 - DNA, 15 bp, Homo sapiens
gtatagtttgttgta

SEQ ID NO: 50945 - DNA, 15 bp, Homo sapiens
tgtatagtttgttgt

SEQ ID NO: 50946 - DNA, 15 bp, Homo sapiens
ttgtatagtttgttg

SEQ ID NO: 50947 - DNA, 15 bp, Homo sapiens
cttgtatagtttgtt

SEQ ID NO: 50948 - DNA, 15 bp, Homo sapiens
gcttgtatagtttgt

SEQ ID NO: 50949 - DNA, 15 bp, Homo sapiens
tgcttgtatagtttg

SEQ ID NO: 50950 - DNA, 15 bp, Homo sapiens
ttgcttgtatagttt

SEQ ID NO: 50951 - DNA, 15 bp, Homo sapiens
gttgcttgtatagtt

SEQ ID NO: 50952 - DNA, 15 bp, Homo sapiens
agttgcttgtatagt

SEQ ID NO: 50953 - DNA, 15 bp, Homo sapiens
aagttgcttgtatag

SEQ ID NO: 50954 - DNA, 15 bp, Homo sapiens
gaagttgcttgtata

SEQ ID NO: 50955 - DNA, 15 bp, Homo sapiens
tgaagttgcttgtat

SEQ ID NO: 50956 - DNA, 15 bp, Homo sapiens
gtgaagttgcttgta

SEQ ID NO: 50957 - DNA, 15 bp, Homo sapiens
agtgaagttgcttgt

SEQ ID NO: 50958 - DNA, 15 bp, Homo sapiens
tagtgaagttgcttg

SEQ ID NO: 50959 - DNA, 15 bp, Homo sapiens
ctagtgaagttgctt

SEQ ID NO: 50960 - DNA, 15 bp, Homo sapiens
cctagtgaagttgct

SEQ ID NO: 50961 - DNA, 15 bp, Homo sapiens
gcctagtgaagttgc

SEQ ID NO: 50962 - DNA, 15 bp, Homo sapiens
agcctagtgaagttg

SEQ ID NO: 50963 - DNA, 15 bp, Homo sapiens
gagcctagtgaagtt

SEQ ID NO: 50964 - DNA, 15 bp, Homo sapiens
tgagcctagtgaagt

SEQ ID NO: 50965 - DNA, 15 bp, Homo sapiens
ttgagcctagtgaag

SEQ ID NO: 50966 - DNA, 15 bp, Homo sapiens
tttgagcctagtgaa

SEQ ID NO: 50967 - DNA, 15 bp, Homo sapiens
atttgagcctagtga

SEQ ID NO: 50968 - DNA, 15 bp, Homo sapiens
catttgagcctagtg

SEQ ID NO: 50969 - DNA, 15 bp, Homo sapiens
acatttgagcctagt

SEQ ID NO: 50970 - DNA, 15 bp, Homo sapiens
tacatttgagcctag

SEQ ID NO: 50971 - DNA, 15 bp, Homo sapiens
ttacatttgagccta

SEQ ID NO: 50972 - DNA, 15 bp, Homo sapiens
tttacatttgagcct

SEQ ID NO: 50973 - DNA, 15 bp, Homo sapiens
atttacatttgagcc

SEQ ID NO: 50974 - DNA, 15 bp, Homo sapiens
aatttacatttgagc

SEQ ID NO: 50975 - DNA, 15 bp, Homo sapiens
aaatttacatttgag

SEQ ID NO: 50976 - DNA, 15 bp, Homo sapiens
aaaatttacatttga

SEQ ID NO: 50977 - DNA, 15 bp, Homo sapiens
taaaatttacatttg

SEQ ID NO: 50978 - DNA, 15 bp, Homo sapiens
ttaaaatttacattt

SEQ ID NO: 50979 - DNA, 15 bp, Homo sapiens
attaaaatttacatt

SEQ ID NO: 50980 - DNA, 15 bp, Homo sapiens
cattaaaatttacat

SEQ ID NO: 50981 - DNA, 15 bp, Homo sapiens
acattaaaatttaca

SEQ ID NO: 50982 - DNA, 15 bp, Homo sapiens
aacattaaaatttac

SEQ ID NO: 50983 - DNA, 15 bp, Homo sapiens
taacattaaaattta

SEQ ID NO: 50984 - DNA, 15 bp, Homo sapiens
ttaacattaaaattt

SEQ ID NO: 50985 - DNA, 15 bp, Homo sapiens
attaacattaaaatt

SEQ ID NO: 50986 - DNA, 15 bp, Homo sapiens
tattaacattaaaat

SEQ ID NO: 50987 - DNA, 15 bp, Homo sapiens
ttattaacattaaaa

SEQ ID NO: 50988 - DNA, 15 bp, Homo sapiens
tttattaacattaaa

SEQ ID NO: 50989 - DNA, 15 bp, Homo sapiens
ttttattaacattaa

SEQ ID NO: 50990 - DNA, 15 bp, Homo sapiens
tttttattaacatta

SEQ ID NO: 50991 - DNA, 15 bp, Homo sapiens
gtttttattaacatt

SEQ ID NO: 50992 - DNA, 15 bp, Homo sapiens
tgtttttattaacat

SEQ ID NO: 50993 - DNA, 15 bp, Homo sapiens
ctgtttttattaaca

SEQ ID NO: 50994 - DNA, 15 bp, Homo sapiens
gctgtttttattaac

SEQ ID NO: 50995 - DNA, 15 bp, Homo sapiens
agctgtttttattaa

SEQ ID NO: 50996 - DNA, 15 bp, Homo sapiens
aagctgtttttatta

SEQ ID NO: 50997 - DNA, 15 bp, Homo sapiens
gaagctgtttttatt

SEQ ID NO: 50998 - DNA, 15 bp, Homo sapiens
ggaagctgtttttat

SEQ ID NO: 50999 - DNA, 15 bp, Homo sapiens
tggaagctgttttta

SEQ ID NO: 51000 - DNA, 15 bp, Homo sapiens
ctggaagctgttttt

SEQ ID NO: 51001 - DNA, 15 bp, Homo sapiens
actggaagctgtttt

SEQ ID NO: 51002 - DNA, 15 bp, Homo sapiens
gactggaagctgttt

SEQ ID NO: 51003 - DNA, 15 bp, Homo sapiens
agactggaagctgtt

SEQ ID NO: 51004 - DNA, 15 bp, Homo sapiens
aagactggaagctgt

SEQ ID NO: 51005 - DNA, 15 bp, Homo sapiens
caagactggaagctg

SEQ ID NO: 51006 - DNA, 15 bp, Homo sapiens
ccaagactggaagct

SEQ ID NO: 51007 - DNA, 15 bp, Homo sapiens
accaagactggaagc

SEQ ID NO: 51008 - DNA, 15 bp, Homo sapiens
taccaagactggaag

SEQ ID NO: 51009 - DNA, 15 bp, Homo sapiens
ttaccaagactggaa

SEQ ID NO: 51010 - DNA, 15 bp, Homo sapiens
gttaccaagactgga

SEQ ID NO: 51011 - DNA, 15 bp, Homo sapiens
tgttaccaagactgg

SEQ ID NO: 51012 - DNA, 15 bp, Homo sapiens
gtgttaccaagactg

SEQ ID NO: 51013 - DNA, 15 bp, Homo sapiens
tgtgttaccaagact

SEQ ID NO: 51014 - DNA, 15 bp, Homo sapiens
ctgtgttaccaagac

SEQ ID NO: 51015 - DNA, 15 bp, Homo sapiens
actgtgttaccaaga

SEQ ID NO: 51016 - DNA, 15 bp, Homo sapiens
cactgtgttaccaag

SEQ ID NO: 51017 - DNA, 15 bp, Homo sapiens
tcactgtgttaccaa

SEQ ID NO: 51018 - DNA, 15 bp, Homo sapiens
ctcactgtgttacca

SEQ ID NO: 51019 - DNA, 15 bp, Homo sapiens
tctcactgtgttacc

SEQ ID NO: 51020 - DNA, 15 bp, Homo sapiens
atctcactgtgttac

SEQ ID NO: 51021 - DNA, 15 bp, Homo sapiens
gatctcactgtgtta

SEQ ID NO: 51022 - DNA, 15 bp, Homo sapiens
ggatctcactgtgtt

SEQ ID NO: 51023 - DNA, 15 bp, Homo sapiens
gggatctcactgtgt

SEQ ID NO: 51024 - DNA, 15 bp, Homo sapiens
tgggatctcactgtg

SEQ ID NO: 51025 - DNA, 15 bp, Homo sapiens
atgggatctcactgt

SEQ ID NO: 51026 - DNA, 15 bp, Homo sapiens
gatgggatctcactg

SEQ ID NO: 51027 - DNA, 15 bp, Homo sapiens
agatgggatctcact

SEQ ID NO: 51028 - DNA, 15 bp, Homo sapiens
gagatgggatctcac

SEQ ID NO: 51029 - DNA, 15 bp, Homo sapiens
agagatgggatctca

SEQ ID NO: 51030 - DNA, 15 bp, Homo sapiens
tagagatgggatctc

SEQ ID NO: 51031 - DNA, 15 bp, Homo sapiens
gtagagatgggatct

SEQ ID NO: 51032 - DNA, 15 bp, Homo sapiens
tgtagagatgggatc

SEQ ID NO: 51033 - DNA, 15 bp, Homo sapiens
ttgtagagatgggat

SEQ ID NO: 51034 - DNA, 15 bp, Homo sapiens
tttgtagagatggga

SEQ ID NO: 51035 - DNA, 15 bp, Homo sapiens
ttttgtagagatggg

SEQ ID NO: 51036 - DNA, 15 bp, Homo sapiens
tttttgtagagatgg

SEQ ID NO: 51037 - DNA, 15 bp, Homo sapiens
ttttttgtagagatg

SEQ ID NO: 51038 - DNA, 15 bp, Homo sapiens
tttttttgtagagat

SEQ ID NO: 51039 - DNA, 15 bp, Homo sapiens
ttttttttgtagaga

SEQ ID NO: 51040 - DNA, 15 bp, Homo sapiens
tttttttttgtagag

SEQ ID NO: 51041 - DNA, 15 bp, Homo sapiens
ttttttttttgtaga

SEQ ID NO: 51042 - DNA, 15 bp, Homo sapiens
tttttttttttgtag

SEQ ID NO: 51043 - DNA, 15 bp, Homo sapiens
ttttttttttttgta

SEQ ID NO: 51044 - DNA, 15 bp, Homo sapiens
tttttttttttttgt

SEQ ID NO: 51045 - DNA, 15 bp, Homo sapiens
atttttttttttttt

SEQ ID NO: 51046 - DNA, 15 bp, Homo sapiens
aattttttttttttt

SEQ ID NO: 51047 - DNA, 15 bp, Homo sapiens
aaatttttttttttt

SEQ ID NO: 51048 - DNA, 15 bp, Homo sapiens
aaaattttttttttt

SEQ ID NO: 51049 - DNA, 15 bp, Homo sapiens
aaaaatttttttttt

SEQ ID NO: 51050 - DNA, 15 bp, Homo sapiens
aaaaaattttttttt

SEQ ID NO: 51051 - DNA, 15 bp, Homo sapiens
aaaaaaatttttttt

SEQ ID NO: 51052 - DNA, 15 bp, Homo sapiens
aaaaaaaattttttt

SEQ ID NO: 51053 - DNA, 15 bp, Homo sapiens
taaaaaaaatttttt

SEQ ID NO: 51054 - DNA, 15 bp, Homo sapiens
ttaaaaaaaattttt

SEQ ID NO: 51055 - DNA, 15 bp, Homo sapiens
tttaaaaaaaatttt

SEQ ID NO: 51056 - DNA, 15 bp, Homo sapiens
atttaaaaaaaattt

SEQ ID NO: 51057 - DNA, 15 bp, Homo sapiens
tatttaaaaaaaatt

SEQ ID NO: 51058 - DNA, 15 bp, Homo sapiens
ctatttaaaaaaaat

SEQ ID NO: 51059 - DNA, 15 bp, Homo sapiens
gctatttaaaaaaaa

SEQ ID NO: 51060 - DNA, 15 bp, Homo sapiens
ggctatttaaaaaaa

SEQ ID NO: 51061 - DNA, 15 bp, Homo sapiens
tggctatttaaaaaa

SEQ ID NO: 51062 - DNA, 15 bp, Homo sapiens
ctggctatttaaaaa

SEQ ID NO: 51063 - DNA, 15 bp, Homo sapiens
cctggctatttaaaa

SEQ ID NO: 51064 - DNA, 15 bp, Homo sapiens
gcctggctatttaaa

SEQ ID NO: 51065 - DNA, 15 bp, Homo sapiens
tgcctggctatttaa

SEQ ID NO: 51066 - DNA, 15 bp, Homo sapiens
atgcctggctattta

SEQ ID NO: 51067 - DNA, 15 bp, Homo sapiens
catgcctggctattt

SEQ ID NO: 51068 - DNA, 15 bp, Homo sapiens
ccatgcctggctatt

SEQ ID NO: 51069 - DNA, 15 bp, Homo sapiens
accatgcctggctat

SEQ ID NO: 51070 - DNA, 15 bp, Homo sapiens
caccatgcctggcta

SEQ ID NO: 51071 - DNA, 15 bp, Homo sapiens
ccaccatgcctggct

SEQ ID NO: 51072 - DNA, 15 bp, Homo sapiens
gccaccatgcctggc

SEQ ID NO: 51073 - DNA, 15 bp, Homo sapiens
tgccaccatgcctgg

SEQ ID NO: 51074 - DNA, 15 bp, Homo sapiens
atgccaccatgcctg

SEQ ID NO: 51075 - DNA, 15 bp, Homo sapiens
catgccaccatgcct

SEQ ID NO: 51076 - DNA, 15 bp, Homo sapiens
acatgccaccatgcc

SEQ ID NO: 51077 - DNA, 15 bp, Homo sapiens
cacatgccaccatgc

SEQ ID NO: 51078 - DNA, 15 bp, Homo sapiens
gcacatgccaccatg

SEQ ID NO: 51079 - DNA, 15 bp, Homo sapiens
ggcacatgccaccat

SEQ ID NO: 51080 - DNA, 15 bp, Homo sapiens
aggcacatgccacca

SEQ ID NO: 51081 - DNA, 15 bp, Homo sapiens
taggcacatgccacc

SEQ ID NO: 51082 - DNA, 15 bp, Homo sapiens
ataggcacatgccac

SEQ ID NO: 51083 - DNA, 15 bp, Homo sapiens
tataggcacatgcca

SEQ ID NO: 51084 - DNA, 15 bp, Homo sapiens
ctataggcacatgcc

SEQ ID NO: 51085 - DNA, 15 bp, Homo sapiens
actataggcacatgc

SEQ ID NO: 51086 - DNA, 15 bp, Homo sapiens
gactataggcacatg

SEQ ID NO: 51087 - DNA, 15 bp, Homo sapiens
agactataggcacat

SEQ ID NO: 51088 - DNA, 15 bp, Homo sapiens
gagactataggcaca

SEQ ID NO: 51089 - DNA, 15 bp, Homo sapiens
cgagactataggcac

SEQ ID NO: 51090 - DNA, 15 bp, Homo sapiens
ccgagactataggca

SEQ ID NO: 51091 - DNA, 15 bp, Homo sapiens
tccgagactataggc

SEQ ID NO: 51092 - DNA, 15 bp, Homo sapiens
atccgagactatagg

SEQ ID NO: 51093 - DNA, 15 bp, Homo sapiens
tatccgagactatag

SEQ ID NO: 51094 - DNA, 15 bp, Homo sapiens
gtatccgagactata

SEQ ID NO: 51095 - DNA, 15 bp, Homo sapiens
ggtatccgagactat

SEQ ID NO: 51096 - DNA, 15 bp, Homo sapiens
gggtatccgagacta

SEQ ID NO: 51097 - DNA, 15 bp, Homo sapiens
tgggtatccgagact

SEQ ID NO: 51098 - DNA, 15 bp, Homo sapiens
ctgggtatccgagac

SEQ ID NO: 51099 - DNA, 15 bp, Homo sapiens
cctgggtatccgaga

SEQ ID NO: 51100 - DNA, 15 bp, Homo sapiens
tcctgggtatccgag

SEQ ID NO: 51101 - DNA, 15 bp, Homo sapiens
ctcctgggtatccga

SEQ ID NO: 51102 - DNA, 15 bp, Homo sapiens
cctcctgggtatccg

SEQ ID NO: 51103 - DNA, 15 bp, Homo sapiens
gcctcctgggtatcc

SEQ ID NO: 51104 - DNA, 15 bp, Homo sapiens
agcctcctgggtatc

SEQ ID NO: 51105 - DNA, 15 bp, Homo sapiens
cagcctcctgggtat

SEQ ID NO: 51106 - DNA, 15 bp, Homo sapiens
tcagcctcctgggta

SEQ ID NO: 51107 - DNA, 15 bp, Homo sapiens
ctcagcctcctgggt

SEQ ID NO: 51108 - DNA, 15 bp, Homo sapiens
cctcagcctcctggg

SEQ ID NO: 51109 - DNA, 15 bp, Homo sapiens
gcctcagcctcctgg

SEQ ID NO: 51110 - DNA, 15 bp, Homo sapiens
ggcctcagcctcctg

SEQ ID NO: 51111 - DNA, 15 bp, Homo sapiens
tggcctcagcctcct

SEQ ID NO: 51112 - DNA, 15 bp, Homo sapiens
ctggcctcagcctcc

SEQ ID NO: 51113 - DNA, 15 bp, Homo sapiens
actggcctcagcctc

SEQ ID NO: 51114 - DNA, 15 bp, Homo sapiens
cactggcctcagcct

SEQ ID NO: 51115 - DNA, 15 bp, Homo sapiens
tcactggcctcagcc

SEQ ID NO: 51116 - DNA, 15 bp, Homo sapiens
ttcactggcctcagc

SEQ ID NO: 51117 - DNA, 15 bp, Homo sapiens
tttcactggcctcag

SEQ ID NO: 51118 - DNA, 15 bp, Homo sapiens
atttcactggcctca

SEQ ID NO: 51119 - DNA, 15 bp, Homo sapiens
catttcactggcctc

SEQ ID NO: 51120 - DNA, 15 bp, Homo sapiens
gcatttcactggcct

SEQ ID NO: 51121 - DNA, 15 bp, Homo sapiens
agcatttcactggcc

SEQ ID NO: 51122 - DNA, 15 bp, Homo sapiens
aagcatttcactggc

SEQ ID NO: 51123 - DNA, 15 bp, Homo sapiens
caagcatttcactgg

SEQ ID NO: 51124 - DNA, 15 bp, Homo sapiens
tcaagcatttcactg

SEQ ID NO: 51125 - DNA, 15 bp, Homo sapiens
ctcaagcatttcact

SEQ ID NO: 51126 - DNA, 15 bp, Homo sapiens
actcaagcatttcac

SEQ ID NO: 51127 - DNA, 15 bp, Homo sapiens
tactcaagcatttca

SEQ ID NO: 51128 - DNA, 15 bp, Homo sapiens
gtactcaagcatttc

SEQ ID NO: 51129 - DNA, 15 bp, Homo sapiens
tgtactcaagcattt

SEQ ID NO: 51130 - DNA, 15 bp, Homo sapiens
ctgtactcaagcatt

SEQ ID NO: 51131 - DNA, 15 bp, Homo sapiens
cctgtactcaagcat

SEQ ID NO: 51132 - DNA, 15 bp, Homo sapiens
tcctgtactcaagca

SEQ ID NO: 51133 - DNA, 15 bp, Homo sapiens
ctcctgtactcaagc

SEQ ID NO: 51134 - DNA, 15 bp, Homo sapiens
actcctgtactcaag

SEQ ID NO: 51135 - DNA, 15 bp, Homo sapiens
aactcctgtactcaa

SEQ ID NO: 51136 - DNA, 15 bp, Homo sapiens
aaactcctgtactca

SEQ ID NO: 51137 - DNA, 15 bp, Homo sapiens
caaactcctgtactc

SEQ ID NO: 51138 - DNA, 15 bp, Homo sapiens
tcaaactcctgtact

SEQ ID NO: 51139 - DNA, 15 bp, Homo sapiens
ctcaaactcctgtac

SEQ ID NO: 51140 - DNA, 15 bp, Homo sapiens
tctcaaactcctgta

SEQ ID NO: 51141 - DNA, 15 bp, Homo sapiens
gtctcaaactcctgt

SEQ ID NO: 51142 - DNA, 15 bp, Homo sapiens
agtctcaaactcctg

SEQ ID NO: 51143 - DNA, 15 bp, Homo sapiens
cagtctcaaactcct

SEQ ID NO: 51144 - DNA, 15 bp, Homo sapiens
gcagtctcaaactcc

SEQ ID NO: 51145 - DNA, 15 bp, Homo sapiens
tgcagtctcaaactc

SEQ ID NO: 51146 - DNA, 15 bp, Homo sapiens
ctgcagtctcaaact

SEQ ID NO: 51147 - DNA, 15 bp, Homo sapiens
actgcagtctcaaac

SEQ ID NO: 51148 - DNA, 15 bp, Homo sapiens
cactgcagtctcaaa

SEQ ID NO: 51149 - DNA, 15 bp, Homo sapiens
tcactgcagtctcaa

SEQ ID NO: 51150 - DNA, 15 bp, Homo sapiens
ctcactgcagtctca

SEQ ID NO: 51151 - DNA, 15 bp, Homo sapiens
gctcactgcagtctc

SEQ ID NO: 51152 - DNA, 15 bp, Homo sapiens
agctcactgcagtct

SEQ ID NO: 51153 - DNA, 15 bp, Homo sapiens
tagctcactgcagtc

SEQ ID NO: 51154 - DNA, 15 bp, Homo sapiens
ctagctcactgcagt

SEQ ID NO: 51155 - DNA, 15 bp, Homo sapiens
cctagctcactgcag

SEQ ID NO: 51156 - DNA, 15 bp, Homo sapiens
tcctagctcactgca

SEQ ID NO: 51157 - DNA, 15 bp, Homo sapiens
atcctagctcactgc

SEQ ID NO: 51158 - DNA, 15 bp, Homo sapiens
gatcctagctcactg

SEQ ID NO: 51159 - DNA, 15 bp, Homo sapiens
tgatcctagctcact

SEQ ID NO: 51160 - DNA, 15 bp, Homo sapiens
atgatcctagctcac

SEQ ID NO: 51161 - DNA, 15 bp, Homo sapiens
catgatcctagctca

SEQ ID NO: 51162 - DNA, 15 bp, Homo sapiens
gcatgatcctagctc

SEQ ID NO: 51163 - DNA, 15 bp, Homo sapiens
ggcatgatcctagct

SEQ ID NO: 51164 - DNA, 15 bp, Homo sapiens
tggcatgatcctagc

SEQ ID NO: 51165 - DNA, 15 bp, Homo sapiens
gtggcatgatcctag

SEQ ID NO: 51166 - DNA, 15 bp, Homo sapiens
agtggcatgatccta

SEQ ID NO: 51167 - DNA, 15 bp, Homo sapiens
cagtggcatgatcct

SEQ ID NO: 51168 - DNA, 15 bp, Homo sapiens
gcagtggcatgatcc

SEQ ID NO: 51169 - DNA, 15 bp, Homo sapiens
tgcagtggcatgatc

SEQ ID NO: 51170 - DNA, 15 bp, Homo sapiens
atgcagtggcatgat

SEQ ID NO: 51171 - DNA, 15 bp, Homo sapiens
aatgcagtggcatga

SEQ ID NO: 51172 - DNA, 15 bp, Homo sapiens
gaatgcagtggcatg

SEQ ID NO: 51173 - DNA, 15 bp, Homo sapiens
ggaatgcagtggcat

SEQ ID NO: 51174 - DNA, 15 bp, Homo sapiens
tggaatgcagtggca

SEQ ID NO: 51175 - DNA, 15 bp, Homo sapiens
ctggaatgcagtggc

SEQ ID NO: 51176 - DNA, 15 bp, Homo sapiens
gctggaatgcagtgg

SEQ ID NO: 51177 - DNA, 15 bp, Homo sapiens
ggctggaatgcagtg

SEQ ID NO: 51178 - DNA, 15 bp, Homo sapiens
aggctggaatgcagt

SEQ ID NO: 51179 - DNA, 15 bp, Homo sapiens
caggctggaatgcag

SEQ ID NO: 51180 - DNA, 15 bp, Homo sapiens
ccaggctggaatgca

SEQ ID NO: 51181 - DNA, 15 bp, Homo sapiens
cccaggctggaatgc

SEQ ID NO: 51182 - DNA, 15 bp, Homo sapiens
gcccaggctggaatg

SEQ ID NO: 51183 - DNA, 15 bp, Homo sapiens
tgcccaggctggaat

SEQ ID NO: 51184 - DNA, 15 bp, Homo sapiens
ttgcccaggctggaa

SEQ ID NO: 51185 - DNA, 15 bp, Homo sapiens
ttctgttgcccaggc

SEQ ID NO: 51186 - DNA, 15 bp, Homo sapiens
gttctgttgcccagg

SEQ ID NO: 51187 - DNA, 15 bp, Homo sapiens
tgttctgttgcccag

SEQ ID NO: 51188 - DNA, 15 bp, Homo sapiens
ttgttctgttgccca

SEQ ID NO: 51189 - DNA, 15 bp, Homo sapiens
cttgttctgttgccc

SEQ ID NO: 51190 - DNA, 15 bp, Homo sapiens
tcttgttctgttgcc

SEQ ID NO: 51191 - DNA, 15 bp, Homo sapiens
ttcttgttctgttgc

SEQ ID NO: 51192 - DNA, 15 bp, Homo sapiens
gttcttgttctgttg

SEQ ID NO: 51193 - DNA, 15 bp, Homo sapiens
ggttcttgttctgtt

SEQ ID NO: 51194 - DNA, 15 bp, Homo sapiens
gggttcttgttctgt

SEQ ID NO: 51195 - DNA, 15 bp, Homo sapiens
cgggttcttgttctg

SEQ ID NO: 51196 - DNA, 15 bp, Homo sapiens
acgggttcttgttct

SEQ ID NO: 51197 - DNA, 15 bp, Homo sapiens
gacgggttcttgttc

SEQ ID NO: 51198 - DNA, 15 bp, Homo sapiens
agacgggttcttgtt

SEQ ID NO: 51199 - DNA, 15 bp, Homo sapiens
gagacgggttcttgt

SEQ ID NO: 51200 - DNA, 15 bp, Homo sapiens
agagacgggttcttg

SEQ ID NO: 51201 - DNA, 15 bp, Homo sapiens
aagagacgggttctt

SEQ ID NO: 51202 - DNA, 15 bp, Homo sapiens
aaagagacgggttct

SEQ ID NO: 51203 - DNA, 15 bp, Homo sapiens
taaagagacgggttc

SEQ ID NO: 51204 - DNA, 15 bp, Homo sapiens
ttaaagagacgggtt

SEQ ID NO: 51205 - DNA, 15 bp, Homo sapiens
tttaaagagacgggt

SEQ ID NO: 51206 - DNA, 15 bp, Homo sapiens
ttttaaagagacggg

SEQ ID NO: 51207 - DNA, 15 bp, Homo sapiens
tttttaaagagacgg

SEQ ID NO: 51208 - DNA, 15 bp, Homo sapiens
ttttttaaagagacg

SEQ ID NO: 51209 - DNA, 15 bp, Homo sapiens
tttttttaaagagac

SEQ ID NO: 51210 - DNA, 15 bp, Homo sapiens
ttttttttaaagaga

SEQ ID NO: 51211 - DNA, 15 bp, Homo sapiens
tttttttttaaagag

SEQ ID NO: 51212 - DNA, 15 bp, Homo sapiens
ttttttttttaaaga

SEQ ID NO: 51213 - DNA, 15 bp, Homo sapiens
ggctttttttttttt

SEQ ID NO: 51214 - DNA, 15 bp, Homo sapiens
aggcttttttttttt

SEQ ID NO: 51215 - DNA, 15 bp, Homo sapiens
gaggctttttttttt

SEQ ID NO: 51216 - DNA, 15 bp, Homo sapiens
tgaggcttttttttt

SEQ ID NO: 51217 - DNA, 15 bp, Homo sapiens
gtgaggctttttttt

SEQ ID NO: 51218 - DNA, 15 bp, Homo sapiens
agtgaggcttttttt

SEQ ID NO: 51219 - DNA, 15 bp, Homo sapiens
aagtgaggctttttt

SEQ ID NO: 51220 - DNA, 15 bp, Homo sapiens
aaagtgaggcttttt

SEQ ID NO: 51221 - DNA, 15 bp, Homo sapiens
gaaagtgaggctttt

SEQ ID NO: 51222 - DNA, 15 bp, Homo sapiens
ggaaagtgaggcttt

SEQ ID NO: 51223 - DNA, 15 bp, Homo sapiens
aggaaagtgaggctt

SEQ ID NO: 51224 - DNA, 15 bp, Homo sapiens
aaggaaagtgaggct

SEQ ID NO: 51225 - DNA, 15 bp, Homo sapiens
taaggaaagtgaggc

SEQ ID NO: 51226 - DNA, 15 bp, Homo sapiens
gtaaggaaagtgagg

SEQ ID NO: 51227 - DNA, 15 bp, Homo sapiens
agtaaggaaagtgag

SEQ ID NO: 51228 - DNA, 15 bp, Homo sapiens
cagtaaggaaagtga

SEQ ID NO: 51229 - DNA, 15 bp, Homo sapiens
acagtaaggaaagtg

SEQ ID NO: 51230 - DNA, 15 bp, Homo sapiens
aacagtaaggaaagt

SEQ ID NO: 51231 - DNA, 15 bp, Homo sapiens
taacagtaaggaaag

SEQ ID NO: 51232 - DNA, 15 bp, Homo sapiens
gtaacagtaaggaaa

SEQ ID NO: 51233 - DNA, 15 bp, Homo sapiens
tgtaacagtaaggaa

SEQ ID NO: 51234 - DNA, 15 bp, Homo sapiens
atgtaacagtaagga

SEQ ID NO: 51235 - DNA, 15 bp, Homo sapiens
catgtaacagtaagg

SEQ ID NO: 51236 - DNA, 15 bp, Homo sapiens
acatgtaacagtaag

SEQ ID NO: 51237 - DNA, 15 bp, Homo sapiens
aacatgtaacagtaa

SEQ ID NO: 51238 - DNA, 15 bp, Homo sapiens
aaacatgtaacagta

SEQ ID NO: 51239 - DNA, 15 bp, Homo sapiens
taaacatgtaacagt

SEQ ID NO: 51240 - DNA, 15 bp, Homo sapiens
ttaaacatgtaacag

SEQ ID NO: 51241 - DNA, 15 bp, Homo sapiens
attaaacatgtaaca

SEQ ID NO: 51242 - DNA, 15 bp, Homo sapiens
aattaaacatgtaac

SEQ ID NO: 51243 - DNA, 15 bp, Homo sapiens
gaattaaacatgtaa

SEQ ID NO: 51244 - DNA, 15 bp, Homo sapiens
tgaattaaacatgta

SEQ ID NO: 51245 - DNA, 15 bp, Homo sapiens
gtgaattaaacatgt

SEQ ID NO: 51246 - DNA, 15 bp, Homo sapiens
tgtgaattaaacatg

SEQ ID NO: 51247 - DNA, 15 bp, Homo sapiens
atgtgaattaaacat

SEQ ID NO: 51248 - DNA, 15 bp, Homo sapiens
catgtgaattaaaca

SEQ ID NO: 51249 - DNA, 15 bp, Homo sapiens
acatgtgaattaaac

SEQ ID NO: 51250 - DNA, 15 bp, Homo sapiens
aacatgtgaattaaa

SEQ ID NO: 51251 - DNA, 15 bp, Homo sapiens
aaacatgtgaattaa

SEQ ID NO: 51252 - DNA, 15 bp, Homo sapiens
aaaacatgtgaatta

SEQ ID NO: 51253 - DNA, 15 bp, Homo sapiens
taaaacatgtgaatt

SEQ ID NO: 51254 - DNA, 15 bp, Homo sapiens
ataaaacatgtgaat

SEQ ID NO: 51255 - DNA, 15 bp, Homo sapiens
tataaaacatgtgaa

SEQ ID NO: 51256 - DNA, 15 bp, Homo sapiens
ttataaaacatgtga

SEQ ID NO: 51257 - DNA, 15 bp, Homo sapiens
tttataaaacatgtg

SEQ ID NO: 51258 - DNA, 15 bp, Homo sapiens
ttttataaaacatgt

SEQ ID NO: 51259 - DNA, 15 bp, Homo sapiens
attttataaaacatg

SEQ ID NO: 51260 - DNA, 15 bp, Homo sapiens
cattttataaaacat

SEQ ID NO: 51261 - DNA, 15 bp, Homo sapiens
acattttataaaaca

SEQ ID NO: 51262 - DNA, 15 bp, Homo sapiens
tacattttataaaac

SEQ ID NO: 51263 - DNA, 15 bp, Homo sapiens
gtacattttataaaa

SEQ ID NO: 51264 - DNA, 15 bp, Homo sapiens
tgtacattttataaa

SEQ ID NO: 51265 - DNA, 15 bp, Homo sapiens
gtgtacattttataa

SEQ ID NO: 51266 - DNA, 15 bp, Homo sapiens
agtgtacattttata

SEQ ID NO: 51267 - DNA, 15 bp, Homo sapiens
cagtgtacattttat

SEQ ID NO: 51268 - DNA, 15 bp, Homo sapiens
tcagtgtacatttta

SEQ ID NO: 51269 - DNA, 15 bp, Homo sapiens
atcagtgtacatttt

SEQ ID NO: 51270 - DNA, 15 bp, Homo sapiens
catcagtgtacattt

SEQ ID NO: 51271 - DNA, 15 bp, Homo sapiens
tcatcagtgtacatt

SEQ ID NO: 51272 - DNA, 15 bp, Homo sapiens
ttcatcagtgtacat

SEQ ID NO: 51273 - DNA, 15 bp, Homo sapiens
tttcatcagtgtaca

SEQ ID NO: 51274 - DNA, 15 bp, Homo sapiens
atttcatcagtgtac

SEQ ID NO: 51275 - DNA, 15 bp, Homo sapiens
aatttcatcagtgta

SEQ ID NO: 51276 - DNA, 15 bp, Homo sapiens
taatttcatcagtgt

SEQ ID NO: 51277 - DNA, 15 bp, Homo sapiens
ttaatttcatcagtg

SEQ ID NO: 51278 - DNA, 15 bp, Homo sapiens
attaatttcatcagt

SEQ ID NO: 51279 - DNA, 15 bp, Homo sapiens
tattaatttcatcag

SEQ ID NO: 51280 - DNA, 15 bp, Homo sapiens
atattaatttcatca

SEQ ID NO: 51281 - DNA, 15 bp, Homo sapiens
tatattaatttcatc

SEQ ID NO: 51282 - DNA, 15 bp, Homo sapiens
atatattaatttcat

SEQ ID NO: 51283 - DNA, 15 bp, Homo sapiens
aatatattaatttca

SEQ ID NO: 51284 - DNA, 15 bp, Homo sapiens
caatatattaatttc

SEQ ID NO: 51285 - DNA, 15 bp, Homo sapiens
acaatatattaattt

SEQ ID NO: 51286 - DNA, 15 bp, Homo sapiens
aacaatatattaatt

SEQ ID NO: 51287 - DNA, 15 bp, Homo sapiens
aaacaatatattaat

SEQ ID NO: 51288 - DNA, 15 bp, Homo sapiens
aaaacaatatattaa

SEQ ID NO: 51289 - DNA, 15 bp, Homo sapiens
aaaaacaatatatta

SEQ ID NO: 51290 - DNA, 15 bp, Homo sapiens
taaaaacaatatatt

SEQ ID NO: 51291 - DNA, 15 bp, Homo sapiens
ttaaaaacaatatat

SEQ ID NO: 51292 - DNA, 15 bp, Homo sapiens
tttaaaaacaatata

SEQ ID NO: 51293 - DNA, 15 bp, Homo sapiens
ttttaaaaacaatat

SEQ ID NO: 51294 - DNA, 15 bp, Homo sapiens
tttttaaaaacaata

SEQ ID NO: 51295 - DNA, 15 bp, Homo sapiens
gtttttaaaaacaat

SEQ ID NO: 51296 - DNA, 15 bp, Homo sapiens
agtttttaaaaacaa

SEQ ID NO: 51297 - DNA, 15 bp, Homo sapiens
tagtttttaaaaaca

SEQ ID NO: 51298 - DNA, 15 bp, Homo sapiens
gtagtttttaaaaac

SEQ ID NO: 51299 - DNA, 15 bp, Homo sapiens
agtagtttttaaaaa

SEQ ID NO: 51300 - DNA, 15 bp, Homo sapiens
tagtagtttttaaaa

SEQ ID NO: 51301 - DNA, 15 bp, Homo sapiens
atagtagtttttaaa

SEQ ID NO: 51302 - DNA, 15 bp, Homo sapiens
catagtagtttttaa

SEQ ID NO: 51303 - DNA, 15 bp, Homo sapiens
tcatagtagttttta

SEQ ID NO: 51304 - DNA, 15 bp, Homo sapiens
ttcatagtagttttt

SEQ ID NO: 51305 - DNA, 15 bp, Homo sapiens
attcatagtagtttt

SEQ ID NO: 51306 - DNA, 15 bp, Homo sapiens
tattcatagtagttt

SEQ ID NO: 51307 - DNA, 15 bp, Homo sapiens
gtattcatagtagtt

SEQ ID NO: 51308 - DNA, 15 bp, Homo sapiens
agtattcatagtagt

SEQ ID NO: 51309 - DNA, 15 bp, Homo sapiens
aagtattcatagtag

SEQ ID NO: 51310 - DNA, 15 bp, Homo sapiens
taagtattcatagta

SEQ ID NO: 51311 - DNA, 15 bp, Homo sapiens
gtaagtattcatagt

SEQ ID NO: 51312 - DNA, 15 bp, Homo sapiens
agtaagtattcatag

SEQ ID NO: 51313 - DNA, 15 bp, Homo sapiens
aagtaagtattcata

SEQ ID NO: 51314 - DNA, 15 bp, Homo sapiens
taagtaagtattcat

SEQ ID NO: 51315 - DNA, 15 bp, Homo sapiens
ttaagtaagtattca

SEQ ID NO: 51316 - DNA, 15 bp, Homo sapiens
attaagtaagtattc

SEQ ID NO: 51317 - DNA, 15 bp, Homo sapiens
aattaagtaagtatt

SEQ ID NO: 51318 - DNA, 15 bp, Homo sapiens
aaattaagtaagtat

SEQ ID NO: 51319 - DNA, 15 bp, Homo sapiens
taaattaagtaagta

SEQ ID NO: 51320 - DNA, 15 bp, Homo sapiens
gtaaattaagtaagt

SEQ ID NO: 51321 - DNA, 15 bp, Homo sapiens
tgtaaattaagtaag

SEQ ID NO: 51322 - DNA, 15 bp, Homo sapiens
atgtaaattaagtaa

SEQ ID NO: 51323 - DNA, 15 bp, Homo sapiens
gatgtaaattaagta

SEQ ID NO: 51324 - DNA, 15 bp, Homo sapiens
agatgtaaattaagt

SEQ ID NO: 51325 - DNA, 15 bp, Homo sapiens
aagatgtaaattaag

SEQ ID NO: 51326 - DNA, 15 bp, Homo sapiens
taagatgtaaattaa

SEQ ID NO: 51327 - DNA, 15 bp, Homo sapiens
ctaagatgtaaatta

SEQ ID NO: 51328 - DNA, 15 bp, Homo sapiens
tctaagatgtaaatt

SEQ ID NO: 51329 - DNA, 15 bp, Homo sapiens
ttctaagatgtaaat

SEQ ID NO: 51330 - DNA, 15 bp, Homo sapiens
attctaagatgtaaa

SEQ ID NO: 51331 - DNA, 15 bp, Homo sapiens
aattctaagatgtaa

SEQ ID NO: 51332 - DNA, 15 bp, Homo sapiens
gaattctaagatgta

SEQ ID NO: 51333 - DNA, 15 bp, Homo sapiens
ggaattctaagatgt

SEQ ID NO: 51334 - DNA, 15 bp, Homo sapiens
tggaattctaagatg

SEQ ID NO: 51335 - DNA, 15 bp, Homo sapiens
atggaattctaagat

SEQ ID NO: 51336 - DNA, 15 bp, Homo sapiens
gatggaattctaaga

SEQ ID NO: 51337 - DNA, 15 bp, Homo sapiens
agatggaattctaag

SEQ ID NO: 51338 - DNA, 15 bp, Homo sapiens
tagatggaattctaa

SEQ ID NO: 51339 - DNA, 15 bp, Homo sapiens
ttagatggaattcta

SEQ ID NO: 51340 - DNA, 15 bp, Homo sapiens
cttagatggaattct

SEQ ID NO: 51341 - DNA, 15 bp, Homo sapiens
tcttagatggaattc

SEQ ID NO: 51342 - DNA, 15 bp, Homo sapiens
atcttagatggaatt

SEQ ID NO: 51343 - DNA, 15 bp, Homo sapiens
aatcttagatggaat

SEQ ID NO: 51344 - DNA, 15 bp, Homo sapiens
aaatcttagatggaa

SEQ ID NO: 51345 - DNA, 15 bp, Homo sapiens
aaaatcttagatgga

SEQ ID NO: 51346 - DNA, 15 bp, Homo sapiens
caaaatcttagatgg

SEQ ID NO: 51347 - DNA, 15 bp, Homo sapiens
tcaaaatcttagatg

SEQ ID NO: 51348 - DNA, 15 bp, Homo sapiens
atcaaaatcttagat

SEQ ID NO: 51349 - DNA, 15 bp, Homo sapiens
tatcaaaatcttaga

SEQ ID NO: 51350 - DNA, 15 bp, Homo sapiens
ttatcaaaatcttag

SEQ ID NO: 51351 - DNA, 15 bp, Homo sapiens
cttatcaaaatctta

SEQ ID NO: 51352 - DNA, 15 bp, Homo sapiens
tcttatcaaaatctt

SEQ ID NO: 51353 - DNA, 15 bp, Homo sapiens
ctcttatcaaaatct

SEQ ID NO: 51354 - DNA, 15 bp, Homo sapiens
actcttatcaaaatc

SEQ ID NO: 51355 - DNA, 15 bp, Homo sapiens
aactcttatcaaaat

SEQ ID NO: 51356 - DNA, 15 bp, Homo sapiens
aaactcttatcaaaa

SEQ ID NO: 51357 - DNA, 15 bp, Homo sapiens
aaaactcttatcaaa

SEQ ID NO: 51358 - DNA, 15 bp, Homo sapiens
caaaactcttatcaa

SEQ ID NO: 51359 - DNA, 15 bp, Homo sapiens
gcaaaactcttatca

SEQ ID NO: 51360 - DNA, 15 bp, Homo sapiens
agcaaaactcttatc

SEQ ID NO: 51361 - DNA, 15 bp, Homo sapiens
cagcaaaactcttat

SEQ ID NO: 51362 - DNA, 15 bp, Homo sapiens
gcagcaaaactctta

SEQ ID NO: 51363 - DNA, 15 bp, Homo sapiens
agcagcaaaactctt

SEQ ID NO: 51364 - DNA, 15 bp, Homo sapiens
tagcagcaaaactct

SEQ ID NO: 51365 - DNA, 15 bp, Homo sapiens
ttagcagcaaaactc

SEQ ID NO: 51366 - DNA, 15 bp, Homo sapiens
tttagcagcaaaact

SEQ ID NO: 51367 - DNA, 15 bp, Homo sapiens
ttttagcagcaaaac

SEQ ID NO: 51368 - DNA, 15 bp, Homo sapiens
cttttagcagcaaaa

SEQ ID NO: 51369 - DNA, 15 bp, Homo sapiens
acttttagcagcaaa

SEQ ID NO: 51370 - DNA, 15 bp, Homo sapiens
aacttttagcagcaa

SEQ ID NO: 51371 - DNA, 15 bp, Homo sapiens
aaacttttagcagca

SEQ ID NO: 51372 - DNA, 15 bp, Homo sapiens
caaacttttagcagc

SEQ ID NO: 51373 - DNA, 15 bp, Homo sapiens
ccaaacttttagcag

SEQ ID NO: 51374 - DNA, 15 bp, Homo sapiens
tccaaacttttagca

SEQ ID NO: 51375 - DNA, 15 bp, Homo sapiens
ttccaaacttttagc

SEQ ID NO: 51376 - DNA, 15 bp, Homo sapiens
tttttccaaactttt

SEQ ID NO: 51377 - DNA, 15 bp, Homo sapiens
gtttttccaaacttt

SEQ ID NO: 51378 - DNA, 15 bp, Homo sapiens
agtttttccaaactt

SEQ ID NO: 51379 - DNA, 15 bp, Homo sapiens
tagtttttccaaact

SEQ ID NO: 51380 - DNA, 15 bp, Homo sapiens
gtagtttttccaaac

SEQ ID NO: 51381 - DNA, 15 bp, Homo sapiens
agtagtttttccaaa

SEQ ID NO: 51382 - DNA, 15 bp, Homo sapiens
cagtagtttttccaa

SEQ ID NO: 51383 - DNA, 15 bp, Homo sapiens
ccagtagtttttcca

SEQ ID NO: 51384 - DNA, 15 bp, Homo sapiens
tccagtagtttttcc

SEQ ID NO: 51385 - DNA, 15 bp, Homo sapiens
ttccagtagtttttc

SEQ ID NO: 51386 - DNA, 15 bp, Homo sapiens
cttccagtagttttt

SEQ ID NO: 51387 - DNA, 15 bp, Homo sapiens
tcttccagtagtttt

SEQ ID NO: 51388 - DNA, 15 bp, Homo sapiens
atcttccagtagttt

SEQ ID NO: 51389 - DNA, 15 bp, Homo sapiens
tatcttccagtagtt

SEQ ID NO: 51390 - DNA, 15 bp, Homo sapiens
ttatcttccagtagt

SEQ ID NO: 51391 - DNA, 15 bp, Homo sapiens
tttatcttccagtag

SEQ ID NO: 51392 - DNA, 15 bp, Homo sapiens
gtttatcttccagta

SEQ ID NO: 51393 - DNA, 15 bp, Homo sapiens
agtttatcttccagt

SEQ ID NO: 51394 - DNA, 15 bp, Homo sapiens
gagtttatcttccag

SEQ ID NO: 51395 - DNA, 15 bp, Homo sapiens
ggagtttatcttcca

SEQ ID NO: 51396 - DNA, 15 bp, Homo sapiens
gggagtttatcttcc

SEQ ID NO: 51397 - DNA, 15 bp, Homo sapiens
agggagtttatcttc

SEQ ID NO: 51398 - DNA, 15 bp, Homo sapiens
aagggagtttatctt

SEQ ID NO: 51399 - DNA, 15 bp, Homo sapiens
taagggagtttatct

SEQ ID NO: 51400 - DNA, 15 bp, Homo sapiens
ttaagggagtttatc

SEQ ID NO: 51401 - DNA, 15 bp, Homo sapiens
attaagggagtttat

SEQ ID NO: 51402 - DNA, 15 bp, Homo sapiens
gattaagggagttta

SEQ ID NO: 51403 - DNA, 15 bp, Homo sapiens
agattaagggagttt

SEQ ID NO: 51404 - DNA, 15 bp, Homo sapiens
cagattaagggagtt

SEQ ID NO: 51405 - DNA, 15 bp, Homo sapiens
ccagattaagggagt

SEQ ID NO: 51406 - DNA, 15 bp, Homo sapiens
cccagattaagggag

SEQ ID NO: 51407 - DNA, 15 bp, Homo sapiens
acccagattaaggga

SEQ ID NO: 51408 - DNA, 15 bp, Homo sapiens
tacccagattaaggg

SEQ ID NO: 51409 - DNA, 15 bp, Homo sapiens
atacccagattaagg

SEQ ID NO: 51410 - DNA, 15 bp, Homo sapiens
aatacccagattaag

SEQ ID NO: 51411 - DNA, 15 bp, Homo sapiens
taatacccagattaa

SEQ ID NO: 51412 - DNA, 15 bp, Homo sapiens
ataatacccagatta

SEQ ID NO: 51413 - DNA, 15 bp, Homo sapiens
tataatacccagatt

SEQ ID NO: 51414 - DNA, 15 bp, Homo sapiens
atataatacccagat

SEQ ID NO: 51415 - DNA, 15 bp, Homo sapiens
tatataatacccaga

SEQ ID NO: 51416 - DNA, 15 bp, Homo sapiens
atatataatacccag

SEQ ID NO: 51417 - DNA, 15 bp, Homo sapiens
tatatataataccca

SEQ ID NO: 51418 - DNA, 15 bp, Homo sapiens
atatatataataccc

SEQ ID NO: 51419 - DNA, 15 bp, Homo sapiens
aatatatataatacc

SEQ ID NO: 51420 - DNA, 15 bp, Homo sapiens
aaatatatataatac

SEQ ID NO: 51421 - DNA, 15 bp, Homo sapiens
aaaatatatataata

SEQ ID NO: 51422 - DNA, 15 bp, Homo sapiens
aaaaatatatataat

SEQ ID NO: 51423 - DNA, 15 bp, Homo sapiens
taaaaatatatataa

SEQ ID NO: 51424 - DNA, 15 bp, Homo sapiens
ataaaaatatatata

SEQ ID NO: 51425 - DNA, 15 bp, Homo sapiens
tataaaaatatatat

SEQ ID NO: 51426 - DNA, 15 bp, Homo sapiens
atataaaaatatata

SEQ ID NO: 51427 - DNA, 15 bp, Homo sapiens
aatataaaaatatat

SEQ ID NO: 51428 - DNA, 15 bp, Homo sapiens
aaatataaaaatata

SEQ ID NO: 51429 - DNA, 15 bp, Homo sapiens
gaaatataaaaatat

SEQ ID NO: 51430 - DNA, 15 bp, Homo sapiens
agaaatataaaaata

SEQ ID NO: 51431 - DNA, 15 bp, Homo sapiens
cagaaatataaaaat

SEQ ID NO: 51432 - DNA, 15 bp, Homo sapiens
tcagaaatataaaaa

SEQ ID NO: 51433 - DNA, 15 bp, Homo sapiens
ctcagaaatataaaa

SEQ ID NO: 51434 - DNA, 15 bp, Homo sapiens
gctcagaaatataaa

SEQ ID NO: 51435 - DNA, 15 bp, Homo sapiens
agctcagaaatataa

SEQ ID NO: 51436 - DNA, 15 bp, Homo sapiens
tagctcagaaatata

SEQ ID NO: 51437 - DNA, 15 bp, Homo sapiens
ctagctcagaaatat

SEQ ID NO: 51438 - DNA, 15 bp, Homo sapiens
actagctcagaaata

SEQ ID NO: 51439 - DNA, 15 bp, Homo sapiens
aactagctcagaaat

SEQ ID NO: 51440 - DNA, 15 bp, Homo sapiens
caactagctcagaaa

SEQ ID NO: 51441 - DNA, 15 bp, Homo sapiens
tcaactagctcagaa

SEQ ID NO: 51442 - DNA, 15 bp, Homo sapiens
atcaactagctcaga

SEQ ID NO: 51443 - DNA, 15 bp, Homo sapiens
gatcaactagctcag

SEQ ID NO: 51444 - DNA, 15 bp, Homo sapiens
agatcaactagctca

SEQ ID NO: 51445 - DNA, 15 bp, Homo sapiens
aagatcaactagctc

SEQ ID NO: 51446 - DNA, 15 bp, Homo sapiens
gaagatcaactagct

SEQ ID NO: 51447 - DNA, 15 bp, Homo sapiens
ggaagatcaactagc

SEQ ID NO: 51448 - DNA, 15 bp, Homo sapiens
cggaagatcaactag

SEQ ID NO: 51449 - DNA, 15 bp, Homo sapiens
gcggaagatcaacta

SEQ ID NO: 51450 - DNA, 15 bp, Homo sapiens
tgcggaagatcaact

SEQ ID NO: 51451 - DNA, 15 bp, Homo sapiens
ttgcggaagatcaac

SEQ ID NO: 51452 - DNA, 15 bp, Homo sapiens
attgcggaagatcaa

SEQ ID NO: 51453 - DNA, 15 bp, Homo sapiens
tattgcggaagatca

SEQ ID NO: 51454 - DNA, 15 bp, Homo sapiens
atattgcggaagatc

SEQ ID NO: 51455 - DNA, 15 bp, Homo sapiens
catattgcggaagat

SEQ ID NO: 51456 - DNA, 15 bp, Homo sapiens
acatattgcggaaga

SEQ ID NO: 51457 - DNA, 15 bp, Homo sapiens
cacatattgcggaag

SEQ ID NO: 51458 - DNA, 15 bp, Homo sapiens
acacatattgcggaa

SEQ ID NO: 51459 - DNA, 15 bp, Homo sapiens
aacacatattgcgga

SEQ ID NO: 51460 - DNA, 15 bp, Homo sapiens
aaacacatattgcgg

SEQ ID NO: 51461 - DNA, 15 bp, Homo sapiens
aaaacacatattgcg

SEQ ID NO: 51462 - DNA, 15 bp, Homo sapiens
aaaaacacatattgc

SEQ ID NO: 51463 - DNA, 15 bp, Homo sapiens
aaaaaacacatattg

SEQ ID NO: 51464 - DNA, 15 bp, Homo sapiens
gaaaaaacacatatt

SEQ ID NO: 51465 - DNA, 15 bp, Homo sapiens
ggaaaaaacacatat

SEQ ID NO: 51466 - DNA, 15 bp, Homo sapiens
aggaaaaaacacata

SEQ ID NO: 51467 - DNA, 15 bp, Homo sapiens
gaggaaaaaacacat

SEQ ID NO: 51468 - DNA, 15 bp, Homo sapiens
agaggaaaaaacaca

SEQ ID NO: 51469 - DNA, 15 bp, Homo sapiens
aagaggaaaaaacac

SEQ ID NO: 51470 - DNA, 15 bp, Homo sapiens
gaagaggaaaaaaca

SEQ ID NO: 51471 - DNA, 15 bp, Homo sapiens
agaagaggaaaaaac

SEQ ID NO: 51472 - DNA, 15 bp, Homo sapiens
aagaagaggaaaaaa

SEQ ID NO: 51473 - DNA, 15 bp, Homo sapiens
taagaagaggaaaaa

SEQ ID NO: 51474 - DNA, 15 bp, Homo sapiens
ataagaagaggaaaa

SEQ ID NO: 51475 - DNA, 15 bp, Homo sapiens
aataagaagaggaaa

SEQ ID NO: 51476 - DNA, 15 bp, Homo sapiens
aaataagaagaggaa

SEQ ID NO: 51477 - DNA, 15 bp, Homo sapiens
taaataagaagagga

SEQ ID NO: 51478 - DNA, 15 bp, Homo sapiens
ataaataagaagagg

SEQ ID NO: 51479 - DNA, 15 bp, Homo sapiens
aataaataagaagag

SEQ ID NO: 51480 - DNA, 15 bp, Homo sapiens
taataaataagaaga

SEQ ID NO: 51481 - DNA, 15 bp, Homo sapiens
ttaataaataagaag

SEQ ID NO: 51482 - DNA, 15 bp, Homo sapiens
attaataaataagaa

SEQ ID NO: 51483 - DNA, 15 bp, Homo sapiens
gattaataaataaga

SEQ ID NO: 51484 - DNA, 15 bp, Homo sapiens
agattaataaataag

SEQ ID NO: 51485 - DNA, 15 bp, Homo sapiens
cagattaataaataa

SEQ ID NO: 51486 - DNA, 15 bp, Homo sapiens
acagattaataaata

SEQ ID NO: 51487 - DNA, 15 bp, Homo sapiens
cacagattaataaat

SEQ ID NO: 51488 - DNA, 15 bp, Homo sapiens
gcacagattaataaa

SEQ ID NO: 51489 - DNA, 15 bp, Homo sapiens
ggcacagattaataa

SEQ ID NO: 51490 - DNA, 15 bp, Homo sapiens
tggcacagattaata

SEQ ID NO: 51491 - DNA, 15 bp, Homo sapiens
ctggcacagattaat

SEQ ID NO: 51492 - DNA, 15 bp, Homo sapiens
cctggcacagattaa

SEQ ID NO: 51493 - DNA, 15 bp, Homo sapiens
ccctggcacagatta

SEQ ID NO: 51494 - DNA, 15 bp, Homo sapiens
accctggcacagatt

SEQ ID NO: 51495 - DNA, 15 bp, Homo sapiens
aaccctggcacagat

SEQ ID NO: 51496 - DNA, 15 bp, Homo sapiens
aaaccctggcacaga

SEQ ID NO: 51497 - DNA, 15 bp, Homo sapiens
aaaaccctggcacag

SEQ ID NO: 51498 - DNA, 15 bp, Homo sapiens
gaaaaccctggcaca

SEQ ID NO: 51499 - DNA, 15 bp, Homo sapiens
agaaaaccctggcac

SEQ ID NO: 51500 - DNA, 15 bp, Homo sapiens
aagaaaaccctggca

SEQ ID NO: 51501 - DNA, 15 bp, Homo sapiens
aaagaaaaccctggc

SEQ ID NO: 51502 - DNA, 15 bp, Homo sapiens
caaagaaaaccctgg

SEQ ID NO: 51503 - DNA, 15 bp, Homo sapiens
ccaaagaaaaccctg

SEQ ID NO: 51504 - DNA, 15 bp, Homo sapiens
cccaaagaaaaccct

SEQ ID NO: 51505 - DNA, 15 bp, Homo sapiens
ccccaaagaaaaccc

SEQ ID NO: 51506 - DNA, 15 bp, Homo sapiens
cccccaaagaaaacc

SEQ ID NO: 51507 - DNA, 15 bp, Homo sapiens
acccccaaagaaaac

SEQ ID NO: 51508 - DNA, 15 bp, Homo sapiens
aacccccaaagaaaa

SEQ ID NO: 51509 - DNA, 15 bp, Homo sapiens
gaacccccaaagaaa

SEQ ID NO: 51510 - DNA, 15 bp, Homo sapiens
tgaacccccaaagaa

SEQ ID NO: 51511 - DNA, 15 bp, Homo sapiens
atgaacccccaaaga

SEQ ID NO: 51512 - DNA, 15 bp, Homo sapiens
aatgaacccccaaag

SEQ ID NO: 51513 - DNA, 15 bp, Homo sapiens
aaatgaacccccaaa

SEQ ID NO: 51514 - DNA, 15 bp, Homo sapiens
aaaatgaacccccaa

SEQ ID NO: 51515 - DNA, 15 bp, Homo sapiens
caaaatgaaccccca

SEQ ID NO: 51516 - DNA, 15 bp, Homo sapiens
tcaaaatgaaccccc

SEQ ID NO: 51517 - DNA, 15 bp, Homo sapiens
gtcaaaatgaacccc

SEQ ID NO: 51518 - DNA, 15 bp, Homo sapiens
agtcaaaatgaaccc

SEQ ID NO: 51519 - DNA, 15 bp, Homo sapiens
tagtcaaaatgaacc

SEQ ID NO: 51520 - DNA, 15 bp, Homo sapiens
ctagtcaaaatgaac

SEQ ID NO: 51521 - DNA, 15 bp, Homo sapiens
cctagtcaaaatgaa

SEQ ID NO: 51522 - DNA, 15 bp, Homo sapiens
tcctagtcaaaatga

SEQ ID NO: 51523 - DNA, 15 bp, Homo sapiens
gtcctagtcaaaatg

SEQ ID NO: 51524 - DNA, 15 bp, Homo sapiens
agtcctagtcaaaat

SEQ ID NO: 51525 - DNA, 15 bp, Homo sapiens
gagtcctagtcaaaa

SEQ ID NO: 51526 - DNA, 15 bp, Homo sapiens
tgagtcctagtcaaa

SEQ ID NO: 51527 - DNA, 15 bp, Homo sapiens
ttgagtcctagtcaa

SEQ ID NO: 51528 - DNA, 15 bp, Homo sapiens
attgagtcctagtca

SEQ ID NO: 51529 - DNA, 15 bp, Homo sapiens
gattgagtcctagtc

SEQ ID NO: 51530 - DNA, 15 bp, Homo sapiens
ggattgagtcctagt

SEQ ID NO: 51531 - DNA, 15 bp, Homo sapiens
tggattgagtcctag

SEQ ID NO: 51532 - DNA, 15 bp, Homo sapiens
ttggattgagtccta

SEQ ID NO: 51533 - DNA, 15 bp, Homo sapiens
cttggattgagtcct

SEQ ID NO: 51534 - DNA, 15 bp, Homo sapiens
acttggattgagtcc

SEQ ID NO: 51535 - DNA, 15 bp, Homo sapiens
gacttggattgagtc

SEQ ID NO: 51536 - DNA, 15 bp, Homo sapiens
tgacttggattgagt

SEQ ID NO: 51537 - DNA, 15 bp, Homo sapiens
ctgacttggattgag

SEQ ID NO: 51538 - DNA, 15 bp, Homo sapiens
actgacttggattga

SEQ ID NO: 51539 - DNA, 15 bp, Homo sapiens
aactgacttggattg

SEQ ID NO: 51540 - DNA, 15 bp, Homo sapiens
aaactgacttggatt

SEQ ID NO: 51541 - DNA, 15 bp, Homo sapiens
aaaactgacttggat

SEQ ID NO: 51542 - DNA, 15 bp, Homo sapiens
taaaactgacttgga

SEQ ID NO: 51543 - DNA, 15 bp, Homo sapiens
ctaaaactgacttgg

SEQ ID NO: 51544 - DNA, 15 bp, Homo sapiens
tctaaaactgacttg

SEQ ID NO: 51545 - DNA, 15 bp, Homo sapiens
ttctaaaactgactt

SEQ ID NO: 51546 - DNA, 15 bp, Homo sapiens
tttctaaaactgact

SEQ ID NO: 51547 - DNA, 15 bp, Homo sapiens
ttttctaaaactgac

SEQ ID NO: 51548 - DNA, 15 bp, Homo sapiens
tttttctaaaactga

SEQ ID NO: 51549 - DNA, 15 bp, Homo sapiens
ctttttctaaaactg

SEQ ID NO: 51550 - DNA, 15 bp, Homo sapiens
actttttctaaaact

SEQ ID NO: 51551 - DNA, 15 bp, Homo sapiens
tactttttctaaaac

SEQ ID NO: 51552 - DNA, 15 bp, Homo sapiens
ttactttttctaaaa

SEQ ID NO: 51553 - DNA, 15 bp, Homo sapiens
attactttttctaaa

SEQ ID NO: 51554 - DNA, 15 bp, Homo sapiens
cattactttttctaa

SEQ ID NO: 51555 - DNA, 15 bp, Homo sapiens
acattactttttcta

SEQ ID NO: 51556 - DNA, 15 bp, Homo sapiens
cacattactttttct

SEQ ID NO: 51557 - DNA, 15 bp, Homo sapiens
acacattactttttc

SEQ ID NO: 51558 - DNA, 15 bp, Homo sapiens
gacacattacttttt

SEQ ID NO: 51559 - DNA, 15 bp, Homo sapiens
agacacattactttt

SEQ ID NO: 51560 - DNA, 15 bp, Homo sapiens
tagacacattacttt

SEQ ID NO: 51561 - DNA, 15 bp, Homo sapiens
gtagacacattactt

SEQ ID NO: 51562 - DNA, 15 bp, Homo sapiens
agtagacacattact

SEQ ID NO: 51563 - DNA, 15 bp, Homo sapiens
cagtagacacattac

SEQ ID NO: 51564 - DNA, 15 bp, Homo sapiens
acagtagacacatta

SEQ ID NO: 51565 - DNA, 15 bp, Homo sapiens
aacagtagacacatt

SEQ ID NO: 51566 - DNA, 15 bp, Homo sapiens
taacagtagacacat

SEQ ID NO: 51567 - DNA, 15 bp, Homo sapiens
ttaacagtagacaca

SEQ ID NO: 51568 - DNA, 15 bp, Homo sapiens
cttaacagtagacac

SEQ ID NO: 51569 - DNA, 15 bp, Homo sapiens
acttaacagtagaca

SEQ ID NO: 51570 - DNA, 15 bp, Homo sapiens
tacttaacagtagac

SEQ ID NO: 51571 - DNA, 15 bp, Homo sapiens
gtacttaacagtaga

SEQ ID NO: 51572 - DNA, 15 bp, Homo sapiens
tgtacttaacagtag

SEQ ID NO: 51573 - DNA, 15 bp, Homo sapiens
ctgtacttaacagta

SEQ ID NO: 51574 - DNA, 15 bp, Homo sapiens
tctgtacttaacagt

SEQ ID NO: 51575 - DNA, 15 bp, Homo sapiens
atctgtacttaacag

SEQ ID NO: 51576 - DNA, 15 bp, Homo sapiens
catctgtacttaaca

SEQ ID NO: 51577 - DNA, 15 bp, Homo sapiens
acatctgtacttaac

SEQ ID NO: 51578 - DNA, 15 bp, Homo sapiens
gacatctgtacttaa

SEQ ID NO: 51579 - DNA, 15 bp, Homo sapiens
agacatctgtactta

SEQ ID NO: 51580 - DNA, 15 bp, Homo sapiens
aagacatctgtactt

SEQ ID NO: 51581 - DNA, 15 bp, Homo sapiens
aaagacatctgtact

SEQ ID NO: 51582 - DNA, 15 bp, Homo sapiens
aaaagacatctgtac

SEQ ID NO: 51583 - DNA, 15 bp, Homo sapiens
gaaaagacatctgta

SEQ ID NO: 51584 - DNA, 15 bp, Homo sapiens
tgaaaagacatctgt

SEQ ID NO: 51585 - DNA, 15 bp, Homo sapiens
atgaaaagacatctg

SEQ ID NO: 51586 - DNA, 15 bp, Homo sapiens
aatgaaaagacatct

SEQ ID NO: 51587 - DNA, 15 bp, Homo sapiens
aaatgaaaagacatc

SEQ ID NO: 51588 - DNA, 15 bp, Homo sapiens
gaaatgaaaagacat

SEQ ID NO: 51589 - DNA, 15 bp, Homo sapiens
ggaaatgaaaagaca

SEQ ID NO: 51590 - DNA, 15 bp, Homo sapiens
aggaaatgaaaagac

SEQ ID NO: 51591 - DNA, 15 bp, Homo sapiens
aaggaaatgaaaaga

SEQ ID NO: 51592 - DNA, 15 bp, Homo sapiens
aaaggaaatgaaaag

SEQ ID NO: 51593 - DNA, 15 bp, Homo sapiens
aaaaggaaatgaaaa

SEQ ID NO: 51594 - DNA, 15 bp, Homo sapiens
caaaaggaaatgaaa

SEQ ID NO: 51595 - DNA, 15 bp, Homo sapiens
acaaaaggaaatgaa

SEQ ID NO: 51596 - DNA, 15 bp, Homo sapiens
tacaaaaggaaatga

SEQ ID NO: 51597 - DNA, 15 bp, Homo sapiens
ttacaaaaggaaatg

SEQ ID NO: 51598 - DNA, 15 bp, Homo sapiens
tttacaaaaggaaat

SEQ ID NO: 51599 - DNA, 15 bp, Homo sapiens
ttttacaaaaggaaa

SEQ ID NO: 51600 - DNA, 15 bp, Homo sapiens
tttttacaaaaggaa

SEQ ID NO: 51601 - DNA, 15 bp, Homo sapiens
atttttacaaaagga

SEQ ID NO: 51602 - DNA, 15 bp, Homo sapiens
gatttttacaaaagg

SEQ ID NO: 51603 - DNA, 15 bp, Homo sapiens
tgatttttacaaaag

SEQ ID NO: 51604 - DNA, 15 bp, Homo sapiens
ttgatttttacaaaa

SEQ ID NO: 51605 - DNA, 15 bp, Homo sapiens
tttgatttttacaaa

SEQ ID NO: 51606 - DNA, 15 bp, Homo sapiens
ttttgatttttacaa

SEQ ID NO: 51607 - DNA, 15 bp, Homo sapiens
gttttgatttttaca

SEQ ID NO: 51608 - DNA, 15 bp, Homo sapiens
agttttgatttttac

SEQ ID NO: 51609 - DNA, 15 bp, Homo sapiens
tagttttgattttta

SEQ ID NO: 51610 - DNA, 15 bp, Homo sapiens
gtagttttgattttt

SEQ ID NO: 51611 - DNA, 15 bp, Homo sapiens
tgtagttttgatttt

SEQ ID NO: 51612 - DNA, 15 bp, Homo sapiens
atgtagttttgattt

SEQ ID NO: 51613 - DNA, 15 bp, Homo sapiens
tatgtagttttgatt

SEQ ID NO: 51614 - DNA, 15 bp, Homo sapiens
ctatgtagttttgat

SEQ ID NO: 51615 - DNA, 15 bp, Homo sapiens
actatgtagttttga

SEQ ID NO: 51616 - DNA, 15 bp, Homo sapiens
aactatgtagttttg

SEQ ID NO: 51617 - DNA, 15 bp, Homo sapiens
caactatgtagtttt

SEQ ID NO: 51618 - DNA, 15 bp, Homo sapiens
tcaactatgtagttt

SEQ ID NO: 51619 - DNA, 15 bp, Homo sapiens
ctcaactatgtagtt

SEQ ID NO: 51620 - DNA, 15 bp, Homo sapiens
gctcaactatgtagt

SEQ ID NO: 51621 - DNA, 15 bp, Homo sapiens
cgctcaactatgtag

SEQ ID NO: 51622 - DNA, 15 bp, Homo sapiens
acgctcaactatgta

SEQ ID NO: 51623 - DNA, 15 bp, Homo sapiens
gacgctcaactatgt

SEQ ID NO: 51624 - DNA, 15 bp, Homo sapiens
agacgctcaactatg

SEQ ID NO: 51625 - DNA, 15 bp, Homo sapiens
gagacgctcaactat

SEQ ID NO: 51626 - DNA, 15 bp, Homo sapiens
ggagacgctcaacta

SEQ ID NO: 51627 - DNA, 15 bp, Homo sapiens
tggagacgctcaact

SEQ ID NO: 51628 - DNA, 15 bp, Homo sapiens
ttggagacgctcaac

SEQ ID NO: 51629 - DNA, 15 bp, Homo sapiens
gttggagacgctcaa

SEQ ID NO: 51630 - DNA, 15 bp, Homo sapiens
agttggagacgctca

SEQ ID NO: 51631 - DNA, 15 bp, Homo sapiens
cagttggagacgctc

SEQ ID NO: 51632 - DNA, 15 bp, Homo sapiens
tcagttggagacgct

SEQ ID NO: 51633 - DNA, 15 bp, Homo sapiens
ctcagttggagacgc

SEQ ID NO: 51634 - DNA, 15 bp, Homo sapiens
actcagttggagacg

SEQ ID NO: 51635 - DNA, 15 bp, Homo sapiens
cactcagttggagac

SEQ ID NO: 51636 - DNA, 15 bp, Homo sapiens
tcactcagttggaga

SEQ ID NO: 51637 - DNA, 15 bp, Homo sapiens
ttcactcagttggag

SEQ ID NO: 51638 - DNA, 15 bp, Homo sapiens
tttcactcagttgga

SEQ ID NO: 51639 - DNA, 15 bp, Homo sapiens
ttttcactcagttgg

SEQ ID NO: 51640 - DNA, 15 bp, Homo sapiens
attttcactcagttg

SEQ ID NO: 51641 - DNA, 15 bp, Homo sapiens
cattttcactcagtt

SEQ ID NO: 51642 - DNA, 15 bp, Homo sapiens
ccattttcactcagt

SEQ ID NO: 51643 - DNA, 15 bp, Homo sapiens
tccattttcactcag

SEQ ID NO: 51644 - DNA, 15 bp, Homo sapiens
gtccattttcactca

SEQ ID NO: 51645 - DNA, 15 bp, Homo sapiens
agtccattttcactc

SEQ ID NO: 51646 - DNA, 15 bp, Homo sapiens
aagtccattttcact

SEQ ID NO: 51647 - DNA, 15 bp, Homo sapiens
aaagtccattttcac

SEQ ID NO: 51648 - DNA, 15 bp, Homo sapiens
gaaagtccattttca

SEQ ID NO: 51649 - DNA, 15 bp, Homo sapiens
agaaagtccattttc

SEQ ID NO: 51650 - DNA, 15 bp, Homo sapiens
aagaaagtccatttt

SEQ ID NO: 51651 - DNA, 15 bp, Homo sapiens
aaagaaagtccattt

SEQ ID NO: 51652 - DNA, 15 bp, Homo sapiens
aaaagaaagtccatt

SEQ ID NO: 51653 - DNA, 15 bp, Homo sapiens
gaaaagaaagtccat

SEQ ID NO: 51654 - DNA, 15 bp, Homo sapiens
agaaaagaaagtcca

SEQ ID NO: 51655 - DNA, 15 bp, Homo sapiens
cagaaaagaaagtcc

SEQ ID NO: 51656 - DNA, 15 bp, Homo sapiens
ccagaaaagaaagtc

SEQ ID NO: 51657 - DNA, 15 bp, Homo sapiens
tccagaaaagaaagt

SEQ ID NO: 51658 - DNA, 15 bp, Homo sapiens
ttccagaaaagaaag

SEQ ID NO: 51659 - DNA, 15 bp, Homo sapiens
attccagaaaagaaa

SEQ ID NO: 51660 - DNA, 15 bp, Homo sapiens
gattccagaaaagaa

SEQ ID NO: 51661 - DNA, 15 bp, Homo sapiens
tgattccagaaaaga

SEQ ID NO: 51662 - DNA, 15 bp, Homo sapiens
atgattccagaaaag

SEQ ID NO: 51663 - DNA, 15 bp, Homo sapiens
gatgattccagaaaa

SEQ ID NO: 51664 - DNA, 15 bp, Homo sapiens
agatgattccagaaa

SEQ ID NO: 51665 - DNA, 15 bp, Homo sapiens
cagatgattccagaa

SEQ ID NO: 51666 - DNA, 15 bp, Homo sapiens
tcagatgattccaga

SEQ ID NO: 51667 - DNA, 15 bp, Homo sapiens
ttcagatgattccag

SEQ ID NO: 51668 - DNA, 15 bp, Homo sapiens
tttcagatgattcca

SEQ ID NO: 51669 - DNA, 15 bp, Homo sapiens
atttcagatgattcc

SEQ ID NO: 51670 - DNA, 15 bp, Homo sapiens
gatttcagatgattc

SEQ ID NO: 51671 - DNA, 15 bp, Homo sapiens
cgatttcagatgatt

SEQ ID NO: 51672 - DNA, 15 bp, Homo sapiens
acgatttcagatgat

SEQ ID NO: 51673 - DNA, 15 bp, Homo sapiens
gacgatttcagatga

SEQ ID NO: 51674 - DNA, 15 bp, Homo sapiens
agacgatttcagatg

SEQ ID NO: 51675 - DNA, 15 bp, Homo sapiens
aagacgatttcagat

SEQ ID NO: 51676 - DNA, 15 bp, Homo sapiens
aaagacgatttcaga

SEQ ID NO: 51677 - DNA, 15 bp, Homo sapiens
gaaagacgatttcag

SEQ ID NO: 51678 - DNA, 15 bp, Homo sapiens
tgaaagacgatttca

SEQ ID NO: 51679 - DNA, 15 bp, Homo sapiens
ttgaaagacgatttc

SEQ ID NO: 51680 - DNA, 15 bp, Homo sapiens
gttgaaagacgattt

SEQ ID NO: 51681 - DNA, 15 bp, Homo sapiens
tgttgaaagacgatt

SEQ ID NO: 51682 - DNA, 15 bp, Homo sapiens
atgttgaaagacgat

SEQ ID NO: 51683 - DNA, 15 bp, Homo sapiens
gatgttgaaagacga

SEQ ID NO: 51684 - DNA, 15 bp, Homo sapiens
tgatgttgaaagacg

SEQ ID NO: 51685 - DNA, 15 bp, Homo sapiens
atgatgttgaaagac

SEQ ID NO: 51686 - DNA, 15 bp, Homo sapiens
catgatgttgaaaga

SEQ ID NO: 51687 - DNA, 15 bp, Homo sapiens
gcatgatgttgaaag

SEQ ID NO: 51688 - DNA, 15 bp, Homo sapiens
ggcatgatgttgaaa

SEQ ID NO: 51689 - DNA, 15 bp, Homo sapiens
aggcatgatgttgaa

SEQ ID NO: 51690 - DNA, 15 bp, Homo sapiens
taggcatgatgttga

SEQ ID NO: 51691 - DNA, 15 bp, Homo sapiens
ataggcatgatgttg

SEQ ID NO: 51692 - DNA, 15 bp, Homo sapiens
tataggcatgatgtt

SEQ ID NO: 51693 - DNA, 15 bp, Homo sapiens
gtataggcatgatgt

SEQ ID NO: 51694 - DNA, 15 bp, Homo sapiens
agtataggcatgatg

SEQ ID NO: 51695 - DNA, 15 bp, Homo sapiens
aagtataggcatgat

SEQ ID NO: 51696 - DNA, 15 bp, Homo sapiens
aaagtataggcatga

SEQ ID NO: 51697 - DNA, 15 bp, Homo sapiens
taaagtataggcatg

SEQ ID NO: 51698 - DNA, 15 bp, Homo sapiens
ataaagtataggcat

SEQ ID NO: 51699 - DNA, 15 bp, Homo sapiens
tataaagtataggca

SEQ ID NO: 51700 - DNA, 15 bp, Homo sapiens
atataaagtataggc

SEQ ID NO: 51701 - DNA, 15 bp, Homo sapiens
catataaagtatagg

SEQ ID NO: 51702 - DNA, 15 bp, Homo sapiens
acatataaagtatag

SEQ ID NO: 51703 - DNA, 15 bp, Homo sapiens
aacatataaagtata

SEQ ID NO: 51704 - DNA, 15 bp, Homo sapiens
taacatataaagtat

SEQ ID NO: 51705 - DNA, 15 bp, Homo sapiens
ataacatataaagta

SEQ ID NO: 51706 - DNA, 15 bp, Homo sapiens
tataacatataaagt

SEQ ID NO: 51707 - DNA, 15 bp, Homo sapiens
atataacatataaag

SEQ ID NO: 51708 - DNA, 15 bp, Homo sapiens
catataacatataaa

SEQ ID NO: 51709 - DNA, 15 bp, Homo sapiens
acatataacatataa

SEQ ID NO: 51710 - DNA, 15 bp, Homo sapiens
gacatataacatata

SEQ ID NO: 51711 - DNA, 15 bp, Homo sapiens
tgacatataacatat

SEQ ID NO: 51712 - DNA, 15 bp, Homo sapiens
atgacatataacata

SEQ ID NO: 51713 - DNA, 15 bp, Homo sapiens
tatgacatataacat

SEQ ID NO: 51714 - DNA, 15 bp, Homo sapiens
atatgacatataaca

SEQ ID NO: 51715 - DNA, 15 bp, Homo sapiens
tatatgacatataac

SEQ ID NO: 51716 - DNA, 15 bp, Homo sapiens
atatatgacatataa

SEQ ID NO: 51717 - DNA, 15 bp, Homo sapiens
aatatatgacatata

SEQ ID NO: 51718 - DNA, 15 bp, Homo sapiens
taatatatgacatat

SEQ ID NO: 51719 - DNA, 15 bp, Homo sapiens
ataatatatgacata

SEQ ID NO: 51720 - DNA, 15 bp, Homo sapiens
tataatatatgacat

SEQ ID NO: 51721 - DNA, 15 bp, Homo sapiens
gtataatatatgaca

SEQ ID NO: 51722 - DNA, 15 bp, Homo sapiens
ggtataatatatgac

SEQ ID NO: 51723 - DNA, 15 bp, Homo sapiens
gggtataatatatga

SEQ ID NO: 51724 - DNA, 15 bp, Homo sapiens
tgggtataatatatg

SEQ ID NO: 51725 - DNA, 15 bp, Homo sapiens
ttgggtataatatat

SEQ ID NO: 51726 - DNA, 15 bp, Homo sapiens
attgggtataatata

SEQ ID NO: 51727 - DNA, 15 bp, Homo sapiens
gattgggtataatat

SEQ ID NO: 51728 - DNA, 15 bp, Homo sapiens
tgattgggtataata

SEQ ID NO: 51729 - DNA, 15 bp, Homo sapiens
atgattgggtataat

SEQ ID NO: 51730 - DNA, 15 bp, Homo sapiens
catgattgggtataa

SEQ ID NO: 51731 - DNA, 15 bp, Homo sapiens
tcatgattgggtata

SEQ ID NO: 51732 - DNA, 15 bp, Homo sapiens
atcatgattgggtat

SEQ ID NO: 51733 - DNA, 15 bp, Homo sapiens
tatcatgattgggta

SEQ ID NO: 51734 - DNA, 15 bp, Homo sapiens
atatcatgattgggt

SEQ ID NO: 51735 - DNA, 15 bp, Homo sapiens
gatatcatgattggg

SEQ ID NO: 51736 - DNA, 15 bp, Homo sapiens
agatatcatgattgg

SEQ ID NO: 51737 - DNA, 15 bp, Homo sapiens
cagatatcatgattg

SEQ ID NO: 51738 - DNA, 15 bp, Homo sapiens
gcagatatcatgatt

SEQ ID NO: 51739 - DNA, 15 bp, Homo sapiens
tgcagatatcatgat

SEQ ID NO: 51740 - DNA, 15 bp, Homo sapiens
atgcagatatcatga

SEQ ID NO: 51741 - DNA, 15 bp, Homo sapiens
catgcagatatcatg

SEQ ID NO: 51742 - DNA, 15 bp, Homo sapiens
acatgcagatatcat

SEQ ID NO: 51743 - DNA, 15 bp, Homo sapiens
cacatgcagatatca

SEQ ID NO: 51744 - DNA, 15 bp, Homo sapiens
acacatgcagatatc

SEQ ID NO: 51745 - DNA, 15 bp, Homo sapiens
gacacatgcagatat

SEQ ID NO: 51746 - DNA, 15 bp, Homo sapiens
agacacatgcagata

SEQ ID NO: 51747 - DNA, 15 bp, Homo sapiens
gagacacatgcagat

SEQ ID NO: 51748 - DNA, 15 bp, Homo sapiens
agagacacatgcaga

SEQ ID NO: 51749 - DNA, 15 bp, Homo sapiens
cagagacacatgcag

SEQ ID NO: 51750 - DNA, 15 bp, Homo sapiens
ccagagacacatgca

SEQ ID NO: 51751 - DNA, 15 bp, Homo sapiens
gccagagacacatgc

SEQ ID NO: 51752 - DNA, 15 bp, Homo sapiens
cgccagagacacatg

SEQ ID NO: 51753 - DNA, 15 bp, Homo sapiens
acgccagagacacat

SEQ ID NO: 51754 - DNA, 15 bp, Homo sapiens
aacgccagagacaca

SEQ ID NO: 51755 - DNA, 15 bp, Homo sapiens
aaacgccagagacac

SEQ ID NO: 51756 - DNA, 15 bp, Homo sapiens
caaacgccagagaca

SEQ ID NO: 51757 - DNA, 15 bp, Homo sapiens
acaaacgccagagac

SEQ ID NO: 51758 - DNA, 15 bp, Homo sapiens
gacaaacgccagaga

SEQ ID NO: 51759 - DNA, 15 bp, Homo sapiens
agacaaacgccagag

SEQ ID NO: 51760 - DNA, 15 bp, Homo sapiens
tagacaaacgccaga

SEQ ID NO: 51761 - DNA, 15 bp, Homo sapiens
atagacaaacgccag

SEQ ID NO: 51762 - DNA, 15 bp, Homo sapiens
tatagacaaacgcca

SEQ ID NO: 51763 - DNA, 15 bp, Homo sapiens
ttatagacaaacgcc

SEQ ID NO: 51764 - DNA, 15 bp, Homo sapiens
tttatagacaaacgc

SEQ ID NO: 51765 - DNA, 15 bp, Homo sapiens
atttatagacaaacg

SEQ ID NO: 51766 - DNA, 15 bp, Homo sapiens
aatttatagacaaac

SEQ ID NO: 51767 - DNA, 15 bp, Homo sapiens
taatttatagacaaa

SEQ ID NO: 51768 - DNA, 15 bp, Homo sapiens
ataatttatagacaa

SEQ ID NO: 51769 - DNA, 15 bp, Homo sapiens
cataatttatagaca

SEQ ID NO: 51770 - DNA, 15 bp, Homo sapiens
gcataatttatagac

SEQ ID NO: 51771 - DNA, 15 bp, Homo sapiens
tgcataatttataga

SEQ ID NO: 51772 - DNA, 15 bp, Homo sapiens
ttgcataatttatag

SEQ ID NO: 51773 - DNA, 15 bp, Homo sapiens
attgcataatttata

SEQ ID NO: 51774 - DNA, 15 bp, Homo sapiens
cattgcataatttat

SEQ ID NO: 51775 - DNA, 15 bp, Homo sapiens
ccattgcataattta

SEQ ID NO: 51776 - DNA, 15 bp, Homo sapiens
gccattgcataattt

SEQ ID NO: 51777 - DNA, 15 bp, Homo sapiens
ggccattgcataatt

SEQ ID NO: 51778 - DNA, 15 bp, Homo sapiens
tggccattgcataat

SEQ ID NO: 51779 - DNA, 15 bp, Homo sapiens
atggccattgcataa

SEQ ID NO: 51780 - DNA, 15 bp, Homo sapiens
aatggccattgcata

SEQ ID NO: 51781 - DNA, 15 bp, Homo sapiens
caatggccattgcat

SEQ ID NO: 51782 - DNA, 15 bp, Homo sapiens
ccaatggccattgca

SEQ ID NO: 51783 - DNA, 15 bp, Homo sapiens
gccaatggccattgc

SEQ ID NO: 51784 - DNA, 15 bp, Homo sapiens
agccaatggccattg

SEQ ID NO: 51785 - DNA, 15 bp, Homo sapiens
tagccaatggccatt

SEQ ID NO: 51786 - DNA, 15 bp, Homo sapiens
ttagccaatggccat

SEQ ID NO: 51787 - DNA, 15 bp, Homo sapiens
attagccaatggcca

SEQ ID NO: 51788 - DNA, 15 bp, Homo sapiens
tattagccaatggcc

SEQ ID NO: 51789 - DNA, 15 bp, Homo sapiens
ctattagccaatggc

SEQ ID NO: 51790 - DNA, 15 bp, Homo sapiens
gctattagccaatgg

SEQ ID NO: 51791 - DNA, 15 bp, Homo sapiens
tgctattagccaatg

SEQ ID NO: 51792 - DNA, 15 bp, Homo sapiens
ttgctattagccaat

SEQ ID NO: 51793 - DNA, 15 bp, Homo sapiens
attgctattagccaa

SEQ ID NO: 51794 - DNA, 15 bp, Homo sapiens
cattgctattagcca

SEQ ID NO: 51795 - DNA, 15 bp, Homo sapiens
tcattgctattagcc

SEQ ID NO: 51796 - DNA, 15 bp, Homo sapiens
ttcattgctattagc

SEQ ID NO: 51797 - DNA, 15 bp, Homo sapiens
gttcattgctattag

SEQ ID NO: 51798 - DNA, 15 bp, Homo sapiens
agttcattgctatta

SEQ ID NO: 51799 - DNA, 15 bp, Homo sapiens
tagttcattgctatt

SEQ ID NO: 51800 - DNA, 15 bp, Homo sapiens
atagttcattgctat

SEQ ID NO: 51801 - DNA, 15 bp, Homo sapiens
catagttcattgcta

SEQ ID NO: 51802 - DNA, 15 bp, Homo sapiens
tcatagttcattgct

SEQ ID NO: 51803 - DNA, 15 bp, Homo sapiens
gtcatagttcattgc

SEQ ID NO: 51804 - DNA, 15 bp, Homo sapiens
tgtcatagttcattg

SEQ ID NO: 51805 - DNA, 15 bp, Homo sapiens
atgtcatagttcatt

SEQ ID NO: 51806 - DNA, 15 bp, Homo sapiens
catgtcatagttcat

SEQ ID NO: 51807 - DNA, 15 bp, Homo sapiens
ccatgtcatagttca

SEQ ID NO: 51808 - DNA, 15 bp, Homo sapiens
accatgtcatagttc

SEQ ID NO: 51809 - DNA, 15 bp, Homo sapiens
gaccatgtcatagtt

SEQ ID NO: 51810 - DNA, 15 bp, Homo sapiens
agaccatgtcatagt

SEQ ID NO: 51811 - DNA, 15 bp, Homo sapiens
tagaccatgtcatag

SEQ ID NO: 51812 - DNA, 15 bp, Homo sapiens
ttagaccatgtcata

SEQ ID NO: 51813 - DNA, 15 bp, Homo sapiens
gttagaccatgtcat

SEQ ID NO: 51814 - DNA, 15 bp, Homo sapiens
agttagaccatgtca

SEQ ID NO: 51815 - DNA, 15 bp, Homo sapiens
aagttagaccatgtc

SEQ ID NO: 51816 - DNA, 15 bp, Homo sapiens
taagttagaccatgt

SEQ ID NO: 51817 - DNA, 15 bp, Homo sapiens
ttaagttagaccatg

SEQ ID NO: 51818 - DNA, 15 bp, Homo sapiens
gttaagttagaccat

SEQ ID NO: 51819 - DNA, 15 bp, Homo sapiens
tgttaagttagacca

SEQ ID NO: 51820 - DNA, 15 bp, Homo sapiens
gtgttaagttagacc

SEQ ID NO: 51821 - DNA, 15 bp, Homo sapiens
agtgttaagttagac

SEQ ID NO: 51822 - DNA, 15 bp, Homo sapiens
aagtgttaagttaga

SEQ ID NO: 51823 - DNA, 15 bp, Homo sapiens
aaagtgttaagttag

SEQ ID NO: 51824 - DNA, 15 bp, Homo sapiens
taaagtgttaagtta

SEQ ID NO: 51825 - DNA, 15 bp, Homo sapiens
ataaagtgttaagtt

SEQ ID NO: 51826 - DNA, 15 bp, Homo sapiens
aataaagtgttaagt

SEQ ID NO: 51827 - DNA, 15 bp, Homo sapiens
taataaagtgttaag

SEQ ID NO: 51828 - DNA, 15 bp, Homo sapiens
ctaataaagtgttaa

SEQ ID NO: 51829 - DNA, 15 bp, Homo sapiens
actaataaagtgtta

SEQ ID NO: 51830 - DNA, 15 bp, Homo sapiens
tactaataaagtgtt

SEQ ID NO: 51831 - DNA, 15 bp, Homo sapiens
atactaataaagtgt

SEQ ID NO: 51832 - DNA, 15 bp, Homo sapiens
tatactaataaagtg

SEQ ID NO: 51833 - DNA, 15 bp, Homo sapiens
ttatactaataaagt

SEQ ID NO: 51834 - DNA, 15 bp, Homo sapiens
attatactaataaag

SEQ ID NO: 51835 - DNA, 15 bp, Homo sapiens
cattatactaataaa

SEQ ID NO: 51836 - DNA, 15 bp, Homo sapiens
tcattatactaataa

SEQ ID NO: 51837 - DNA, 15 bp, Homo sapiens
gtcattatactaata

SEQ ID NO: 51838 - DNA, 15 bp, Homo sapiens
agtcattatactaat

SEQ ID NO: 51839 - DNA, 15 bp, Homo sapiens
cagtcattatactaa

SEQ ID NO: 51840 - DNA, 15 bp, Homo sapiens
tcagtcattatacta

SEQ ID NO: 51841 - DNA, 15 bp, Homo sapiens
ttcagtcattatact

SEQ ID NO: 51842 - DNA, 15 bp, Homo sapiens
tttcagtcattatac

SEQ ID NO: 51843 - DNA, 15 bp, Homo sapiens
gtttcagtcattata

SEQ ID NO: 51844 - DNA, 15 bp, Homo sapiens
tgtttcagtcattat

SEQ ID NO: 51845 - DNA, 15 bp, Homo sapiens
gtgtttcagtcatta

SEQ ID NO: 51846 - DNA, 15 bp, Homo sapiens
agtgtttcagtcatt

SEQ ID NO: 51847 - DNA, 15 bp, Homo sapiens
aagtgtttcagtcat

SEQ ID NO: 51848 - DNA, 15 bp, Homo sapiens
aaagtgtttcagtca

SEQ ID NO: 51849 - DNA, 15 bp, Homo sapiens
taaagtgtttcagtc

SEQ ID NO: 51850 - DNA, 15 bp, Homo sapiens
ctaaagtgtttcagt

SEQ ID NO: 51851 - DNA, 15 bp, Homo sapiens
actaaagtgtttcag

SEQ ID NO: 51852 - DNA, 15 bp, Homo sapiens
gactaaagtgtttca

SEQ ID NO: 51853 - DNA, 15 bp, Homo sapiens
agactaaagtgtttc

SEQ ID NO: 51854 - DNA, 15 bp, Homo sapiens
aagactaaagtgttt

SEQ ID NO: 51855 - DNA, 15 bp, Homo sapiens
taagactaaagtgtt

SEQ ID NO: 51856 - DNA, 15 bp, Homo sapiens
gtaagactaaagtgt

SEQ ID NO: 51857 - DNA, 15 bp, Homo sapiens
tgtaagactaaagtg

SEQ ID NO: 51858 - DNA, 15 bp, Homo sapiens
ctgtaagactaaagt

SEQ ID NO: 51859 - DNA, 15 bp, Homo sapiens
tctgtaagactaaag

SEQ ID NO: 51860 - DNA, 15 bp, Homo sapiens
ttctgtaagactaaa

SEQ ID NO: 51861 - DNA, 15 bp, Homo sapiens
attctgtaagactaa

SEQ ID NO: 51862 - DNA, 15 bp, Homo sapiens
cattctgtaagacta

SEQ ID NO: 51863 - DNA, 15 bp, Homo sapiens
acattctgtaagact

SEQ ID NO: 51864 - DNA, 15 bp, Homo sapiens
gacattctgtaagac

SEQ ID NO: 51865 - DNA, 15 bp, Homo sapiens
ggacattctgtaaga

SEQ ID NO: 51866 - DNA, 15 bp, Homo sapiens
aggacattctgtaag

SEQ ID NO: 51867 - DNA, 15 bp, Homo sapiens
taggacattctgtaa

SEQ ID NO: 51868 - DNA, 15 bp, Homo sapiens
ataggacattctgta

SEQ ID NO: 51869 - DNA, 15 bp, Homo sapiens
aataggacattctgt

SEQ ID NO: 51870 - DNA, 15 bp, Homo sapiens
aaataggacattctg

SEQ ID NO: 51871 - DNA, 15 bp, Homo sapiens
caaataggacattct

SEQ ID NO: 51872 - DNA, 15 bp, Homo sapiens
ccaaataggacattc

SEQ ID NO: 51873 - DNA, 15 bp, Homo sapiens
tccaaataggacatt

SEQ ID NO: 51874 - DNA, 15 bp, Homo sapiens
ttccaaataggacat

SEQ ID NO: 51875 - DNA, 15 bp, Homo sapiens
attccaaataggaca

SEQ ID NO: 51876 - DNA, 15 bp, Homo sapiens
aattccaaataggac

SEQ ID NO: 51877 - DNA, 15 bp, Homo sapiens
aaattccaaatagga

SEQ ID NO: 51878 - DNA, 15 bp, Homo sapiens
taaattccaaatagg

SEQ ID NO: 51879 - DNA, 15 bp, Homo sapiens
ataaattccaaatag

SEQ ID NO: 51880 - DNA, 15 bp, Homo sapiens
aataaattccaaata

SEQ ID NO: 51881 - DNA, 15 bp, Homo sapiens
gaataaattccaaat

SEQ ID NO: 51882 - DNA, 15 bp, Homo sapiens
agaataaattccaaa

SEQ ID NO: 51883 - DNA, 15 bp, Homo sapiens
aagaataaattccaa

SEQ ID NO: 51884 - DNA, 15 bp, Homo sapiens
aaagaataaattcca

SEQ ID NO: 51885 - DNA, 15 bp, Homo sapiens
caaagaataaattcc

SEQ ID NO: 51886 - DNA, 15 bp, Homo sapiens
tcaaagaataaattc

SEQ ID NO: 51887 - DNA, 15 bp, Homo sapiens
ctcaaagaataaatt

SEQ ID NO: 51888 - DNA, 15 bp, Homo sapiens
cctcaaagaataaat

SEQ ID NO: 51889 - DNA, 15 bp, Homo sapiens
tcctcaaagaataaa

SEQ ID NO: 51890 - DNA, 15 bp, Homo sapiens
ctcctcaaagaataa

SEQ ID NO: 51891 - DNA, 15 bp, Homo sapiens
cctcctcaaagaata

SEQ ID NO: 51892 - DNA, 15 bp, Homo sapiens
acctcctcaaagaat

SEQ ID NO: 51893 - DNA, 15 bp, Homo sapiens
aacctcctcaaagaa

SEQ ID NO: 51894 - DNA, 15 bp, Homo sapiens
gaacctcctcaaaga

SEQ ID NO: 51895 - DNA, 15 bp, Homo sapiens
agaacctcctcaaag

SEQ ID NO: 51896 - DNA, 15 bp, Homo sapiens
aagaacctcctcaaa

SEQ ID NO: 51897 - DNA, 15 bp, Homo sapiens
taagaacctcctcaa

SEQ ID NO: 51898 - DNA, 15 bp, Homo sapiens
gtaagaacctcctca

SEQ ID NO: 51899 - DNA, 15 bp, Homo sapiens
agtaagaacctcctc

SEQ ID NO: 51900 - DNA, 15 bp, Homo sapiens
aagtaagaacctcct

SEQ ID NO: 51901 - DNA, 15 bp, Homo sapiens
aaagtaagaacctcc

SEQ ID NO: 51902 - DNA, 15 bp, Homo sapiens
aaaagtaagaacctc

SEQ ID NO: 51903 - DNA, 15 bp, Homo sapiens
taaaagtaagaacct

SEQ ID NO: 51904 - DNA, 15 bp, Homo sapiens
ctaaaagtaagaacc

SEQ ID NO: 51905 - DNA, 15 bp, Homo sapiens
actaaaagtaagaac

SEQ ID NO: 51906 - DNA, 15 bp, Homo sapiens
tactaaaagtaagaa

SEQ ID NO: 51907 - DNA, 15 bp, Homo sapiens
ctactaaaagtaaga

SEQ ID NO: 51908 - DNA, 15 bp, Homo sapiens
cctactaaaagtaag

SEQ ID NO: 51909 - DNA, 15 bp, Homo sapiens
ccctactaaaagtaa

SEQ ID NO: 51910 - DNA, 15 bp, Homo sapiens
accctactaaaagta

SEQ ID NO: 51911 - DNA, 15 bp, Homo sapiens
gaccctactaaaagt

SEQ ID NO: 51912 - DNA, 15 bp, Homo sapiens
tgaccctactaaaag

SEQ ID NO: 51913 - DNA, 15 bp, Homo sapiens
atgaccctactaaaa

SEQ ID NO: 51914 - DNA, 15 bp, Homo sapiens
aatgaccctactaaa

SEQ ID NO: 51915 - DNA, 15 bp, Homo sapiens
aaatgaccctactaa

SEQ ID NO: 51916 - DNA, 15 bp, Homo sapiens
aaaatgaccctacta

SEQ ID NO: 51917 - DNA, 15 bp, Homo sapiens
caaaatgaccctact

SEQ ID NO: 51918 - DNA, 15 bp, Homo sapiens
tcaaaatgaccctac

SEQ ID NO: 51919 - DNA, 15 bp, Homo sapiens
atcaaaatgacccta

SEQ ID NO: 51920 - DNA, 15 bp, Homo sapiens
tatcaaaatgaccct

SEQ ID NO: 51921 - DNA, 15 bp, Homo sapiens
atatcaaaatgaccc

SEQ ID NO: 51922 - DNA, 15 bp, Homo sapiens
tatatcaaaatgacc

SEQ ID NO: 51923 - DNA, 15 bp, Homo sapiens
atatatcaaaatgac

SEQ ID NO: 51924 - DNA, 15 bp, Homo sapiens
gatatatcaaaatga

SEQ ID NO: 51925 - DNA, 15 bp, Homo sapiens
tgatatatcaaaatg

SEQ ID NO: 51926 - DNA, 15 bp, Homo sapiens
ttgatatatcaaaat

SEQ ID NO: 51927 - DNA, 15 bp, Homo sapiens
gttgatatatcaaaa

SEQ ID NO: 51928 - DNA, 15 bp, Homo sapiens
tgttgatatatcaaa

SEQ ID NO: 51929 - DNA, 15 bp, Homo sapiens
ttgttgatatatcaa

SEQ ID NO: 51930 - DNA, 15 bp, Homo sapiens
gttgttgatatatca

SEQ ID NO: 51931 - DNA, 15 bp, Homo sapiens
ggttgttgatatatc

SEQ ID NO: 51932 - DNA, 15 bp, Homo sapiens
tggttgttgatatat

SEQ ID NO: 51933 - DNA, 15 bp, Homo sapiens
ctggttgttgatata

SEQ ID NO: 51934 - DNA, 15 bp, Homo sapiens
tctggttgttgatat

SEQ ID NO: 51935 - DNA, 15 bp, Homo sapiens
gtctggttgttgata

SEQ ID NO: 51936 - DNA, 15 bp, Homo sapiens
tgtctggttgttgat

SEQ ID NO: 51937 - DNA, 15 bp, Homo sapiens
ttgtctggttgttga

SEQ ID NO: 51938 - DNA, 15 bp, Homo sapiens
gttgtctggttgttg

SEQ ID NO: 51939 - DNA, 15 bp, Homo sapiens
ggttgtctggttgtt

SEQ ID NO: 51940 - DNA, 15 bp, Homo sapiens
gggttgtctggttgt

SEQ ID NO: 51941 - DNA, 15 bp, Homo sapiens
agggttgtctggttg

SEQ ID NO: 51942 - DNA, 15 bp, Homo sapiens
cagggttgtctggtt

SEQ ID NO: 51943 - DNA, 15 bp, Homo sapiens
ccagggttgtctggt

SEQ ID NO: 51944 - DNA, 15 bp, Homo sapiens
tccagggttgtctgg

SEQ ID NO: 51945 - DNA, 15 bp, Homo sapiens
atccagggttgtctg

SEQ ID NO: 51946 - DNA, 15 bp, Homo sapiens
catccagggttgtct

SEQ ID NO: 51947 - DNA, 15 bp, Homo sapiens
tcatccagggttgtc

SEQ ID NO: 51948 - DNA, 15 bp, Homo sapiens
ttcatccagggttgt

SEQ ID NO: 51949 - DNA, 15 bp, Homo sapiens
cttcatccagggttg

SEQ ID NO: 51950 - DNA, 15 bp, Homo sapiens
gcttcatccagggtt

SEQ ID NO: 51951 - DNA, 15 bp, Homo sapiens
agcttcatccagggt

SEQ ID NO: 51952 - DNA, 15 bp, Homo sapiens
aagcttcatccaggg

SEQ ID NO: 51953 - DNA, 15 bp, Homo sapiens
taagcttcatccagg

SEQ ID NO: 51954 - DNA, 15 bp, Homo sapiens
gtaagcttcatccag

SEQ ID NO: 51955 - DNA, 15 bp, Homo sapiens
ggtaagcttcatcca

SEQ ID NO: 51956 - DNA, 15 bp, Homo sapiens
tggtaagcttcatcc

SEQ ID NO: 51957 - DNA, 15 bp, Homo sapiens
atggtaagcttcatc

SEQ ID NO: 51958 - DNA, 15 bp, Homo sapiens
tatggtaagcttcat

SEQ ID NO: 51959 - DNA, 15 bp, Homo sapiens
ctatggtaagcttca

SEQ ID NO: 51960 - DNA, 15 bp, Homo sapiens
tctatggtaagcttc

SEQ ID NO: 51961 - DNA, 15 bp, Homo sapiens
gtctatggtaagctt

SEQ ID NO: 51962 - DNA, 15 bp, Homo sapiens
ggtctatggtaagct

SEQ ID NO: 51963 - DNA, 15 bp, Homo sapiens
tggtctatggtaagc

SEQ ID NO: 51964 - DNA, 15 bp, Homo sapiens
ttggtctatggtaag

SEQ ID NO: 51965 - DNA, 15 bp, Homo sapiens
tttggtctatggtaa

SEQ ID NO: 51966 - DNA, 15 bp, Homo sapiens
atttggtctatggta

SEQ ID NO: 51967 - DNA, 15 bp, Homo sapiens
aatttggtctatggt

SEQ ID NO: 51968 - DNA, 15 bp, Homo sapiens
aaatttggtctatgg

SEQ ID NO: 51969 - DNA, 15 bp, Homo sapiens
caaatttggtctatg

SEQ ID NO: 51970 - DNA, 15 bp, Homo sapiens
ccaaatttggtctat

SEQ ID NO: 51971 - DNA, 15 bp, Homo sapiens
tccaaatttggtcta

SEQ ID NO: 51972 - DNA, 15 bp, Homo sapiens
gtccaaatttggtct

SEQ ID NO: 51973 - DNA, 15 bp, Homo sapiens
ggtccaaatttggtc

SEQ ID NO: 51974 - DNA, 15 bp, Homo sapiens
tggtccaaatttggt

SEQ ID NO: 51975 - DNA, 15 bp, Homo sapiens
ctggtccaaatttgg

SEQ ID NO: 51976 - DNA, 15 bp, Homo sapiens
tctggtccaaatttg

SEQ ID NO: 51977 - DNA, 15 bp, Homo sapiens
atctggtccaaattt

SEQ ID NO: 51978 - DNA, 15 bp, Homo sapiens
aatctggtccaaatt

SEQ ID NO: 51979 - DNA, 15 bp, Homo sapiens
aaatctggtccaaat

SEQ ID NO: 51980 - DNA, 15 bp, Homo sapiens
gaaatctggtccaaa

SEQ ID NO: 51981 - DNA, 15 bp, Homo sapiens
agaaatctggtccaa

SEQ ID NO: 51982 - DNA, 15 bp, Homo sapiens
aagaaatctggtcca

SEQ ID NO: 51983 - DNA, 15 bp, Homo sapiens
gaagaaatctggtcc

SEQ ID NO: 51984 - DNA, 15 bp, Homo sapiens
ggaagaaatctggtc

SEQ ID NO: 51985 - DNA, 15 bp, Homo sapiens
aggaagaaatctggt

SEQ ID NO: 51986 - DNA, 15 bp, Homo sapiens
gaggaagaaatctgg

SEQ ID NO: 51987 - DNA, 15 bp, Homo sapiens
ggaggaagaaatctg

SEQ ID NO: 51988 - DNA, 15 bp, Homo sapiens
aggaggaagaaatct

SEQ ID NO: 51989 - DNA, 15 bp, Homo sapiens
caggaggaagaaatc

SEQ ID NO: 51990 - DNA, 15 bp, Homo sapiens
acaggaggaagaaat

SEQ ID NO: 51991 - DNA, 15 bp, Homo sapiens
gacaggaggaagaaa

SEQ ID NO: 51992 - DNA, 15 bp, Homo sapiens
tgacaggaggaagaa

SEQ ID NO: 51993 - DNA, 15 bp, Homo sapiens
ttgacaggaggaaga

SEQ ID NO: 51994 - DNA, 15 bp, Homo sapiens
attgacaggaggaag

SEQ ID NO: 51995 - DNA, 15 bp, Homo sapiens
cattgacaggaggaa

SEQ ID NO: 51996 - DNA, 15 bp, Homo sapiens
tcattgacaggagga

SEQ ID NO: 51997 - DNA, 15 bp, Homo sapiens
atcattgacaggagg

SEQ ID NO: 51998 - DNA, 15 bp, Homo sapiens
catcattgacaggag

SEQ ID NO: 51999 - DNA, 15 bp, Homo sapiens
acatcattgacagga

SEQ ID NO: 52000 - DNA, 15 bp, Homo sapiens
aacatcattgacagg

SEQ ID NO: 52001 - DNA, 15 bp, Homo sapiens
taacatcattgacag

SEQ ID NO: 52002 - DNA, 15 bp, Homo sapiens
gtaacatcattgaca

SEQ ID NO: 52003 - DNA, 15 bp, Homo sapiens
tgtaacatcattgac

SEQ ID NO: 52004 - DNA, 15 bp, Homo sapiens
ctgtaacatcattga

SEQ ID NO: 52005 - DNA, 15 bp, Homo sapiens
actgtaacatcattg

SEQ ID NO: 52006 - DNA, 15 bp, Homo sapiens
cactgtaacatcatt

SEQ ID NO: 52007 - DNA, 15 bp, Homo sapiens
tcactgtaacatcat

SEQ ID NO: 52008 - DNA, 15 bp, Homo sapiens
ctcactgtaacatca

SEQ ID NO: 52009 - DNA, 15 bp, Homo sapiens
tctcactgtaacatc

SEQ ID NO: 52010 - DNA, 15 bp, Homo sapiens
ttctcactgtaacat

SEQ ID NO: 52011 - DNA, 15 bp, Homo sapiens
attctcactgtaaca

SEQ ID NO: 52012 - DNA, 15 bp, Homo sapiens
gattctcactgtaac

SEQ ID NO: 52013 - DNA, 15 bp, Homo sapiens
agattctcactgtaa

SEQ ID NO: 52014 - DNA, 15 bp, Homo sapiens
tagattctcactgta

SEQ ID NO: 52015 - DNA, 15 bp, Homo sapiens
ttagattctcactgt

SEQ ID NO: 52016 - DNA, 15 bp, Homo sapiens
attagattctcactg

SEQ ID NO: 52017 - DNA, 15 bp, Homo sapiens
tattagattctcact

SEQ ID NO: 52018 - DNA, 15 bp, Homo sapiens
atattagattctcac

SEQ ID NO: 52019 - DNA, 15 bp, Homo sapiens
aatattagattctca

SEQ ID NO: 52020 - DNA, 15 bp, Homo sapiens
caatattagattctc

SEQ ID NO: 52021 - DNA, 15 bp, Homo sapiens
acaatattagattct

SEQ ID NO: 52022 - DNA, 15 bp, Homo sapiens
tacaatattagattc

SEQ ID NO: 52023 - DNA, 15 bp, Homo sapiens
atacaatattagatt

SEQ ID NO: 52024 - DNA, 15 bp, Homo sapiens
aatacaatattagat

SEQ ID NO: 52025 - DNA, 15 bp, Homo sapiens
taatacaatattaga

SEQ ID NO: 52026 - DNA, 15 bp, Homo sapiens
ttaatacaatattag

SEQ ID NO: 52027 - DNA, 15 bp, Homo sapiens
tttaatacaatatta

SEQ ID NO: 52028 - DNA, 15 bp, Homo sapiens
gtttaatacaatatt

SEQ ID NO: 52029 - DNA, 15 bp, Homo sapiens
ggtttaatacaatat

SEQ ID NO: 52030 - DNA, 15 bp, Homo sapiens
gggtttaatacaata

SEQ ID NO: 52031 - DNA, 15 bp, Homo sapiens
tgggtttaatacaat

SEQ ID NO: 52032 - DNA, 15 bp, Homo sapiens
atgggtttaatacaa

SEQ ID NO: 52033 - DNA, 15 bp, Homo sapiens
catgggtttaataca

SEQ ID NO: 52034 - DNA, 15 bp, Homo sapiens
gcatgggtttaatac

SEQ ID NO: 52035 - DNA, 15 bp, Homo sapiens
ggcatgggtttaata

SEQ ID NO: 52036 - DNA, 15 bp, Homo sapiens
tggcatgggtttaat

SEQ ID NO: 52037 - DNA, 15 bp, Homo sapiens
gtggcatgggtttaa

SEQ ID NO: 52038 - DNA, 15 bp, Homo sapiens
tgtggcatgggttta

SEQ ID NO: 52039 - DNA, 15 bp, Homo sapiens
atgtggcatgggttt

SEQ ID NO: 52040 - DNA, 15 bp, Homo sapiens
catgtggcatgggtt

SEQ ID NO: 52041 - DNA, 15 bp, Homo sapiens
acatgtggcatgggt

SEQ ID NO: 52042 - DNA, 15 bp, Homo sapiens
aacatgtggcatggg

SEQ ID NO: 52043 - DNA, 15 bp, Homo sapiens
taacatgtggcatgg

SEQ ID NO: 52044 - DNA, 15 bp, Homo sapiens
ttaacatgtggcatg

SEQ ID NO: 52045 - DNA, 15 bp, Homo sapiens
tttaacatgtggcat

SEQ ID NO: 52046 - DNA, 15 bp, Homo sapiens
atttaacatgtggca

SEQ ID NO: 52047 - DNA, 15 bp, Homo sapiens
catttaacatgtggc

SEQ ID NO: 52048 - DNA, 15 bp, Homo sapiens
tcatttaacatgtgg

SEQ ID NO: 52049 - DNA, 15 bp, Homo sapiens
ttcatttaacatgtg

SEQ ID NO: 52050 - DNA, 15 bp, Homo sapiens
attcatttaacatgt

SEQ ID NO: 52051 - DNA, 15 bp, Homo sapiens
gattcatttaacatg

SEQ ID NO: 52052 - DNA, 15 bp, Homo sapiens
agattcatttaacat

SEQ ID NO: 52053 - DNA, 15 bp, Homo sapiens
cagattcatttaaca

SEQ ID NO: 52054 - DNA, 15 bp, Homo sapiens
tcagattcatttaac

SEQ ID NO: 52055 - DNA, 15 bp, Homo sapiens
ttcagattcatttaa

SEQ ID NO: 52056 - DNA, 15 bp, Homo sapiens
attcagattcattta

SEQ ID NO: 52057 - DNA, 15 bp, Homo sapiens
cattcagattcattt

SEQ ID NO: 52058 - DNA, 15 bp, Homo sapiens
tcattcagattcatt

SEQ ID NO: 52059 - DNA, 15 bp, Homo sapiens
gtcattcagattcat

SEQ ID NO: 52060 - DNA, 15 bp, Homo sapiens
tgtcattcagattca

SEQ ID NO: 52061 - DNA, 15 bp, Homo sapiens
ctgtcattcagattc

SEQ ID NO: 52062 - DNA, 15 bp, Homo sapiens
tctgtcattcagatt

SEQ ID NO: 52063 - DNA, 15 bp, Homo sapiens
gtctgtcattcagat

SEQ ID NO: 52064 - DNA, 15 bp, Homo sapiens
agtctgtcattcaga

SEQ ID NO: 52065 - DNA, 15 bp, Homo sapiens
cagtctgtcattcag

SEQ ID NO: 52066 - DNA, 15 bp, Homo sapiens
tcagtctgtcattca

SEQ ID NO: 52067 - DNA, 15 bp, Homo sapiens
gtcagtctgtcattc

SEQ ID NO: 52068 - DNA, 15 bp, Homo sapiens
agtcagtctgtcatt

SEQ ID NO: 52069 - DNA, 15 bp, Homo sapiens
aagtcagtctgtcat

SEQ ID NO: 52070 - DNA, 15 bp, Homo sapiens
taagtcagtctgtca

SEQ ID NO: 52071 - DNA, 15 bp, Homo sapiens
gtaagtcagtctgtc

SEQ ID NO: 52072 - DNA, 15 bp, Homo sapiens
ggtaagtcagtctgt

SEQ ID NO: 52073 - DNA, 15 bp, Homo sapiens
aggtaagtcagtctg

SEQ ID NO: 52074 - DNA, 15 bp, Homo sapiens
taggtaagtcagtct

SEQ ID NO: 52075 - DNA, 15 bp, Homo sapiens
ttaggtaagtcagtc

SEQ ID NO: 52076 - DNA, 15 bp, Homo sapiens
attaggtaagtcagt

SEQ ID NO: 52077 - DNA, 15 bp, Homo sapiens
aattaggtaagtcag

SEQ ID NO: 52078 - DNA, 15 bp, Homo sapiens
aaattaggtaagtca

SEQ ID NO: 52079 - DNA, 15 bp, Homo sapiens
gaaattaggtaagtc

SEQ ID NO: 52080 - DNA, 15 bp, Homo sapiens
agaaattaggtaagt

SEQ ID NO: 52081 - DNA, 15 bp, Homo sapiens
aagaaattaggtaag

SEQ ID NO: 52082 - DNA, 15 bp, Homo sapiens
caagaaattaggtaa

SEQ ID NO: 52083 - DNA, 15 bp, Homo sapiens
ccaagaaattaggta

SEQ ID NO: 52084 - DNA, 15 bp, Homo sapiens
tccaagaaattaggt

SEQ ID NO: 52085 - DNA, 15 bp, Homo sapiens
gtccaagaaattagg

SEQ ID NO: 52086 - DNA, 15 bp, Homo sapiens
agtccaagaaattag

SEQ ID NO: 52087 - DNA, 15 bp, Homo sapiens
aagtccaagaaatta

SEQ ID NO: 52088 - DNA, 15 bp, Homo sapiens
gaagtccaagaaatt

SEQ ID NO: 52089 - DNA, 15 bp, Homo sapiens
tgaagtccaagaaat

SEQ ID NO: 52090 - DNA, 15 bp, Homo sapiens
gtgaagtccaagaaa

SEQ ID NO: 52091 - DNA, 15 bp, Homo sapiens
tgtgaagtccaagaa

SEQ ID NO: 52092 - DNA, 15 bp, Homo sapiens
atgtgaagtccaaga

SEQ ID NO: 52093 - DNA, 15 bp, Homo sapiens
aatgtgaagtccaag

SEQ ID NO: 52094 - DNA, 15 bp, Homo sapiens
aaatgtgaagtccaa

SEQ ID NO: 52095 - DNA, 15 bp, Homo sapiens
aaaatgtgaagtcca

SEQ ID NO: 52096 - DNA, 15 bp, Homo sapiens
gaaaatgtgaagtcc

SEQ ID NO: 52097 - DNA, 15 bp, Homo sapiens
agaaaatgtgaagtc

SEQ ID NO: 52098 - DNA, 15 bp, Homo sapiens
aagaaaatgtgaagt

SEQ ID NO: 52099 - DNA, 15 bp, Homo sapiens
aaagaaaatgtgaag

SEQ ID NO: 52100 - DNA, 15 bp, Homo sapiens
aaaagaaaatgtgaa

SEQ ID NO: 52101 - DNA, 15 bp, Homo sapiens
gaaaagaaaatgtga

SEQ ID NO: 52102 - DNA, 15 bp, Homo sapiens
agaaaagaaaatgtg

SEQ ID NO: 52103 - DNA, 15 bp, Homo sapiens
aagaaaagaaaatgt

SEQ ID NO: 52104 - DNA, 15 bp, Homo sapiens
gaagaaaagaaaatg

SEQ ID NO: 52105 - DNA, 15 bp, Homo sapiens
agaagaaaagaaaat

SEQ ID NO: 52106 - DNA, 15 bp, Homo sapiens
aagaagaaaagaaaa

SEQ ID NO: 52107 - DNA, 15 bp, Homo sapiens
aaagaagaaaagaaa

SEQ ID NO: 52108 - DNA, 15 bp, Homo sapiens
aaaagaagaaaagaa

SEQ ID NO: 52109 - DNA, 15 bp, Homo sapiens
aaaaagaagaaaaga

SEQ ID NO: 52110 - DNA, 15 bp, Homo sapiens
caaaaagaagaaaag

SEQ ID NO: 52111 - DNA, 15 bp, Homo sapiens
tcaaaaagaagaaaa

SEQ ID NO: 52112 - DNA, 15 bp, Homo sapiens
atcaaaaagaagaaa

SEQ ID NO: 52113 - DNA, 15 bp, Homo sapiens
aatcaaaaagaagaa

SEQ ID NO: 52114 - DNA, 15 bp, Homo sapiens
aaatcaaaaagaaga

SEQ ID NO: 52115 - DNA, 15 bp, Homo sapiens
aaaatcaaaaagaag

SEQ ID NO: 52116 - DNA, 15 bp, Homo sapiens
aaaaatcaaaaagaa

SEQ ID NO: 52117 - DNA, 15 bp, Homo sapiens
taaaaatcaaaaaga

SEQ ID NO: 52118 - DNA, 15 bp, Homo sapiens
ctaaaaatcaaaaag

SEQ ID NO: 52119 - DNA, 15 bp, Homo sapiens
tctaaaaatcaaaaa

SEQ ID NO: 52120 - DNA, 15 bp, Homo sapiens
ctctaaaaatcaaaa

SEQ ID NO: 52121 - DNA, 15 bp, Homo sapiens
actctaaaaatcaaa

SEQ ID NO: 52122 - DNA, 15 bp, Homo sapiens
cactctaaaaatcaa

SEQ ID NO: 52123 - DNA, 15 bp, Homo sapiens
acactctaaaaatca

SEQ ID NO: 52124 - DNA, 15 bp, Homo sapiens
cacactctaaaaatc

SEQ ID NO: 52125 - DNA, 15 bp, Homo sapiens
acacactctaaaaat

SEQ ID NO: 52126 - DNA, 15 bp, Homo sapiens
gacacactctaaaaa

SEQ ID NO: 52127 - DNA, 15 bp, Homo sapiens
ggacacactctaaaa

SEQ ID NO: 52128 - DNA, 15 bp, Homo sapiens
tggacacactctaaa

SEQ ID NO: 52129 - DNA, 15 bp, Homo sapiens
ttggacacactctaa

SEQ ID NO: 52130 - DNA, 15 bp, Homo sapiens
cttggacacactcta

SEQ ID NO: 52131 - DNA, 15 bp, Homo sapiens
acttggacacactct

SEQ ID NO: 52132 - DNA, 15 bp, Homo sapiens
aacttggacacactc

SEQ ID NO: 52133 - DNA, 15 bp, Homo sapiens
aaacttggacacact

SEQ ID NO: 52134 - DNA, 15 bp, Homo sapiens
taaacttggacacac

SEQ ID NO: 52135 - DNA, 15 bp, Homo sapiens
gtaaacttggacaca

SEQ ID NO: 52136 - DNA, 15 bp, Homo sapiens
cgtaaacttggacac

SEQ ID NO: 52137 - DNA, 15 bp, Homo sapiens
ccgtaaacttggaca

SEQ ID NO: 52138 - DNA, 15 bp, Homo sapiens
tccgtaaacttggac

SEQ ID NO: 52139 - DNA, 15 bp, Homo sapiens
gtccgtaaacttgga

SEQ ID NO: 52140 - DNA, 15 bp, Homo sapiens
agtccgtaaacttgg

SEQ ID NO: 52141 - DNA, 15 bp, Homo sapiens
tagtccgtaaacttg

SEQ ID NO: 52142 - DNA, 15 bp, Homo sapiens
atagtccgtaaactt

SEQ ID NO: 52143 - DNA, 15 bp, Homo sapiens
catagtccgtaaact

SEQ ID NO: 52144 - DNA, 15 bp, Homo sapiens
tcatagtccgtaaac

SEQ ID NO: 52145 - DNA, 15 bp, Homo sapiens
ctcatagtccgtaaa

SEQ ID NO: 52146 - DNA, 15 bp, Homo sapiens
gctcatagtccgtaa

SEQ ID NO: 52147 - DNA, 15 bp, Homo sapiens
agctcatagtccgta

SEQ ID NO: 52148 - DNA, 15 bp, Homo sapiens
cagctcatagtccgt

SEQ ID NO: 52149 - DNA, 15 bp, Homo sapiens
tcagctcatagtccg

SEQ ID NO: 52150 - DNA, 15 bp, Homo sapiens
ttcagctcatagtcc

SEQ ID NO: 52151 - DNA, 15 bp, Homo sapiens
cttcagctcatagtc

SEQ ID NO: 52152 - DNA, 15 bp, Homo sapiens
ccttcagctcatagt

SEQ ID NO: 52153 - DNA, 15 bp, Homo sapiens
gccttcagctcatag

SEQ ID NO: 52154 - DNA, 15 bp, Homo sapiens
ggccttcagctcata

SEQ ID NO: 52155 - DNA, 15 bp, Homo sapiens
aggccttcagctcat

SEQ ID NO: 52156 - DNA, 15 bp, Homo sapiens
taggccttcagctca

SEQ ID NO: 52157 - DNA, 15 bp, Homo sapiens
ataggccttcagctc

SEQ ID NO: 52158 - DNA, 15 bp, Homo sapiens
cataggccttcagct

SEQ ID NO: 52159 - DNA, 15 bp, Homo sapiens
gcataggccttcagc

SEQ ID NO: 52160 - DNA, 15 bp, Homo sapiens
ggcataggccttcag

SEQ ID NO: 52161 - DNA, 15 bp, Homo sapiens
tggcataggccttca

SEQ ID NO: 52162 - DNA, 15 bp, Homo sapiens
ttggcataggccttc

SEQ ID NO: 52163 - DNA, 15 bp, Homo sapiens
tttggcataggcctt

SEQ ID NO: 52164 - DNA, 15 bp, Homo sapiens
ctttggcataggcct

SEQ ID NO: 52165 - DNA, 15 bp, Homo sapiens
gctttggcataggcc

SEQ ID NO: 52166 - DNA, 15 bp, Homo sapiens
tgctttggcataggc

SEQ ID NO: 52167 - DNA, 15 bp, Homo sapiens
ctgctttggcatagg

SEQ ID NO: 52168 - DNA, 15 bp, Homo sapiens
cctgctttggcatag

SEQ ID NO: 52169 - DNA, 15 bp, Homo sapiens
ccctgctttggcata

SEQ ID NO: 52170 - DNA, 15 bp, Homo sapiens
cccctgctttggcat

SEQ ID NO: 52171 - DNA, 15 bp, Homo sapiens
acccctgctttggca

SEQ ID NO: 52172 - DNA, 15 bp, Homo sapiens
cacccctgctttggc

SEQ ID NO: 52173 - DNA, 15 bp, Homo sapiens
ccacccctgctttgg

SEQ ID NO: 52174 - DNA, 15 bp, Homo sapiens
accacccctgctttg

SEQ ID NO: 52175 - DNA, 15 bp, Homo sapiens
caccacccctgcttt

SEQ ID NO: 52176 - DNA, 15 bp, Homo sapiens
ccaccacccctgctt

SEQ ID NO: 52177 - DNA, 15 bp, Homo sapiens
gccaccacccctgct

SEQ ID NO: 52178 - DNA, 15 bp, Homo sapiens
agccaccacccctgc

SEQ ID NO: 52179 - DNA, 15 bp, Homo sapiens
cagccaccacccctg

SEQ ID NO: 52180 - DNA, 15 bp, Homo sapiens
tcagccaccacccct

SEQ ID NO: 52181 - DNA, 15 bp, Homo sapiens
atcagccaccacccc

SEQ ID NO: 52182 - DNA, 15 bp, Homo sapiens
catcagccaccaccc

SEQ ID NO: 52183 - DNA, 15 bp, Homo sapiens
tcatcagccaccacc

SEQ ID NO: 52184 - DNA, 15 bp, Homo sapiens
ttcatcagccaccac

SEQ ID NO: 52185 - DNA, 15 bp, Homo sapiens
cttcatcagccacca

SEQ ID NO: 52186 - DNA, 15 bp, Homo sapiens
acttcatcagccacc

SEQ ID NO: 52187 - DNA, 15 bp, Homo sapiens
gacttcatcagccac

SEQ ID NO: 52188 - DNA, 15 bp, Homo sapiens
tgacttcatcagcca

SEQ ID NO: 52189 - DNA, 15 bp, Homo sapiens
atgacttcatcagcc

SEQ ID NO: 52190 - DNA, 15 bp, Homo sapiens
aatgacttcatcagc

SEQ ID NO: 52191 - DNA, 15 bp, Homo sapiens
aaatgacttcatcag

SEQ ID NO: 52192 - DNA, 15 bp, Homo sapiens
gaaatgacttcatca

SEQ ID NO: 52193 - DNA, 15 bp, Homo sapiens
tgaaatgacttcatc

SEQ ID NO: 52194 - DNA, 15 bp, Homo sapiens
atgaaatgacttcat

SEQ ID NO: 52195 - DNA, 15 bp, Homo sapiens
gatgaaatgacttca

SEQ ID NO: 52196 - DNA, 15 bp, Homo sapiens
tgatgaaatgacttc

SEQ ID NO: 52197 - DNA, 15 bp, Homo sapiens
ttgatgaaatgactt

SEQ ID NO: 52198 - DNA, 15 bp, Homo sapiens
attgatgaaatgact

SEQ ID NO: 52199 - DNA, 15 bp, Homo sapiens
cattgatgaaatgac

SEQ ID NO: 52200 - DNA, 15 bp, Homo sapiens
tcattgatgaaatga

SEQ ID NO: 52201 - DNA, 15 bp, Homo sapiens
ctcattgatgaaatg

SEQ ID NO: 52202 - DNA, 15 bp, Homo sapiens
tctcattgatgaaat

SEQ ID NO: 52203 - DNA, 15 bp, Homo sapiens
ttctcattgatgaaa

SEQ ID NO: 52204 - DNA, 15 bp, Homo sapiens
gttctcattgatgaa

SEQ ID NO: 52205 - DNA, 15 bp, Homo sapiens
tgttctcattgatga

SEQ ID NO: 52206 - DNA, 15 bp, Homo sapiens
ctgttctcattgatg

SEQ ID NO: 52207 - DNA, 15 bp, Homo sapiens
actgttctcattgat

SEQ ID NO: 52208 - DNA, 15 bp, Homo sapiens
cactgttctcattga

SEQ ID NO: 52209 - DNA, 15 bp, Homo sapiens
ccactgttctcattg

SEQ ID NO: 52210 - DNA, 15 bp, Homo sapiens
gccactgttctcatt

SEQ ID NO: 52211 - DNA, 15 bp, Homo sapiens
agccactgttctcat

SEQ ID NO: 52212 - DNA, 15 bp, Homo sapiens
cagccactgttctca

SEQ ID NO: 52213 - DNA, 15 bp, Homo sapiens
gcagccactgttctc

SEQ ID NO: 52214 - DNA, 15 bp, Homo sapiens
agcagccactgttct

SEQ ID NO: 52215 - DNA, 15 bp, Homo sapiens
aagcagccactgttc

SEQ ID NO: 52216 - DNA, 15 bp, Homo sapiens
aaagcagccactgtt

SEQ ID NO: 52217 - DNA, 15 bp, Homo sapiens
aaaagcagccactgt

SEQ ID NO: 52218 - DNA, 15 bp, Homo sapiens
caaaagcagccactg

SEQ ID NO: 52219 - DNA, 15 bp, Homo sapiens
ccaaaagcagccact

SEQ ID NO: 52220 - DNA, 15 bp, Homo sapiens
accaaaagcagccac

SEQ ID NO: 52221 - DNA, 15 bp, Homo sapiens
caccaaaagcagcca

SEQ ID NO: 52222 - DNA, 15 bp, Homo sapiens
ccaccaaaagcagcc

SEQ ID NO: 52223 - DNA, 15 bp, Homo sapiens
accaccaaaagcagc

SEQ ID NO: 52224 - DNA, 15 bp, Homo sapiens
caccaccaaaagcag

SEQ ID NO: 52225 - DNA, 15 bp, Homo sapiens
tcaccaccaaaagca

SEQ ID NO: 52226 - DNA, 15 bp, Homo sapiens
ctcaccaccaaaagc

SEQ ID NO: 52227 - DNA, 15 bp, Homo sapiens
tctcaccaccaaaag

SEQ ID NO: 52228 - DNA, 15 bp, Homo sapiens
ttctcaccaccaaaa

SEQ ID NO: 52229 - DNA, 15 bp, Homo sapiens
tttctcaccaccaaa

SEQ ID NO: 52230 - DNA, 15 bp, Homo sapiens
ttttctcaccaccaa

SEQ ID NO: 52231 - DNA, 15 bp, Homo sapiens
cttttctcaccacca

SEQ ID NO: 52232 - DNA, 15 bp, Homo sapiens
tcttttctcaccacc

SEQ ID NO: 52233 - DNA, 15 bp, Homo sapiens
ctcttttctcaccac

SEQ ID NO: 52234 - DNA, 15 bp, Homo sapiens
tctcttttctcacca

SEQ ID NO: 52235 - DNA, 15 bp, Homo sapiens
ctctcttttctcacc

SEQ ID NO: 52236 - DNA, 15 bp, Homo sapiens
cctctcttttctcac

SEQ ID NO: 52237 - DNA, 15 bp, Homo sapiens
acctctcttttctca

SEQ ID NO: 52238 - DNA, 15 bp, Homo sapiens
aacctctcttttctc

SEQ ID NO: 52239 - DNA, 15 bp, Homo sapiens
caacctctcttttct

SEQ ID NO: 52240 - DNA, 15 bp, Homo sapiens
tcaacctctcttttc

SEQ ID NO: 52241 - DNA, 15 bp, Homo sapiens
ttcaacctctctttt

SEQ ID NO: 52242 - DNA, 15 bp, Homo sapiens
tttcaacctctcttt

SEQ ID NO: 52243 - DNA, 15 bp, Homo sapiens
ctttcaacctctctt

SEQ ID NO: 52244 - DNA, 15 bp, Homo sapiens
cctttcaacctctct

SEQ ID NO: 52245 - DNA, 15 bp, Homo sapiens
acctttcaacctctc

SEQ ID NO: 52246 - DNA, 15 bp, Homo sapiens
aacctttcaacctct

SEQ ID NO: 52247 - DNA, 15 bp, Homo sapiens
caacctttcaacctc

SEQ ID NO: 52248 - DNA, 15 bp, Homo sapiens
ccaacctttcaacct

SEQ ID NO: 52249 - DNA, 15 bp, Homo sapiens
accaacctttcaacc

SEQ ID NO: 52250 - DNA, 15 bp, Homo sapiens
aaccaacctttcaac

SEQ ID NO: 52251 - DNA, 15 bp, Homo sapiens
taaccaacctttcaa

SEQ ID NO: 52252 - DNA, 15 bp, Homo sapiens
ttaaccaacctttca

SEQ ID NO: 52253 - DNA, 15 bp, Homo sapiens
attaaccaacctttc

SEQ ID NO: 52254 - DNA, 15 bp, Homo sapiens
aattaaccaaccttt

SEQ ID NO: 52255 - DNA, 15 bp, Homo sapiens
caattaaccaacctt

SEQ ID NO: 52256 - DNA, 15 bp, Homo sapiens
ccaattaaccaacct

SEQ ID NO: 52257 - DNA, 15 bp, Homo sapiens
tccaattaaccaacc

SEQ ID NO: 52258 - DNA, 15 bp, Homo sapiens
ttccaattaaccaac

SEQ ID NO: 52259 - DNA, 15 bp, Homo sapiens
attccaattaaccaa

SEQ ID NO: 52260 - DNA, 15 bp, Homo sapiens
gattccaattaacca

SEQ ID NO: 52261 - DNA, 15 bp, Homo sapiens
agattccaattaacc

SEQ ID NO: 52262 - DNA, 15 bp, Homo sapiens
cagattccaattaac

SEQ ID NO: 52263 - DNA, 15 bp, Homo sapiens
tcagattccaattaa

SEQ ID NO: 52264 - DNA, 15 bp, Homo sapiens
atcagattccaatta

SEQ ID NO: 52265 - DNA, 15 bp, Homo sapiens
aatcagattccaatt

SEQ ID NO: 52266 - DNA, 15 bp, Homo sapiens
gaatcagattccaat

SEQ ID NO: 52267 - DNA, 15 bp, Homo sapiens
agaatcagattccaa

SEQ ID NO: 52268 - DNA, 15 bp, Homo sapiens
aagaatcagattcca

SEQ ID NO: 52269 - DNA, 15 bp, Homo sapiens
aaagaatcagattcc

SEQ ID NO: 52270 - DNA, 15 bp, Homo sapiens
gaaagaatcagattc

SEQ ID NO: 52271 - DNA, 15 bp, Homo sapiens
ggaaagaatcagatt

SEQ ID NO: 52272 - DNA, 15 bp, Homo sapiens
aggaaagaatcagat

SEQ ID NO: 52273 - DNA, 15 bp, Homo sapiens
aaggaaagaatcaga

SEQ ID NO: 52274 - DNA, 15 bp, Homo sapiens
taaggaaagaatcag

SEQ ID NO: 52275 - DNA, 15 bp, Homo sapiens
ttaaggaaagaatca

SEQ ID NO: 52276 - DNA, 15 bp, Homo sapiens
attaaggaaagaatc

SEQ ID NO: 52277 - DNA, 15 bp, Homo sapiens
aattaaggaaagaat

SEQ ID NO: 52278 - DNA, 15 bp, Homo sapiens
aaattaaggaaagaa

SEQ ID NO: 52279 - DNA, 15 bp, Homo sapiens
gaaattaaggaaaga

SEQ ID NO: 52280 - DNA, 15 bp, Homo sapiens
tgaaattaaggaaag

SEQ ID NO: 52281 - DNA, 15 bp, Homo sapiens
atgaaattaaggaaa

SEQ ID NO: 52282 - DNA, 15 bp, Homo sapiens
gatgaaattaaggaa

SEQ ID NO: 52283 - DNA, 15 bp, Homo sapiens
tgatgaaattaagga

SEQ ID NO: 52284 - DNA, 15 bp, Homo sapiens
ttgatgaaattaagg

SEQ ID NO: 52285 - DNA, 15 bp, Homo sapiens
attgatgaaattaag

SEQ ID NO: 52286 - DNA, 15 bp, Homo sapiens
gattgatgaaattaa

SEQ ID NO: 52287 - DNA, 15 bp, Homo sapiens
tgattgatgaaatta

SEQ ID NO: 52288 - DNA, 15 bp, Homo sapiens
ctgattgatgaaatt

SEQ ID NO: 52289 - DNA, 15 bp, Homo sapiens
gctgattgatgaaat

SEQ ID NO: 52290 - DNA, 15 bp, Homo sapiens
tgctgattgatgaaa

SEQ ID NO: 52291 - DNA, 15 bp, Homo sapiens
atgctgattgatgaa

SEQ ID NO: 52292 - DNA, 15 bp, Homo sapiens
tatgctgattgatga

SEQ ID NO: 52293 - DNA, 15 bp, Homo sapiens
ctatgctgattgatg

SEQ ID NO: 52294 - DNA, 15 bp, Homo sapiens
actatgctgattgat

SEQ ID NO: 52295 - DNA, 15 bp, Homo sapiens
tactatgctgattga

SEQ ID NO: 52296 - DNA, 15 bp, Homo sapiens
gtactatgctgattg

SEQ ID NO: 52297 - DNA, 15 bp, Homo sapiens
ggtactatgctgatt

SEQ ID NO: 52298 - DNA, 15 bp, Homo sapiens
gggtactatgctgat

SEQ ID NO: 52299 - DNA, 15 bp, Homo sapiens
agggtactatgctga

SEQ ID NO: 52300 - DNA, 15 bp, Homo sapiens
cagggtactatgctg

SEQ ID NO: 52301 - DNA, 15 bp, Homo sapiens
tcagggtactatgct

SEQ ID NO: 52302 - DNA, 15 bp, Homo sapiens
ctcagggtactatgc

SEQ ID NO: 52303 - DNA, 15 bp, Homo sapiens
actcagggtactatg

SEQ ID NO: 52304 - DNA, 15 bp, Homo sapiens
gactcagggtactat

SEQ ID NO: 52305 - DNA, 15 bp, Homo sapiens
agactcagggtacta

SEQ ID NO: 52306 - DNA, 15 bp, Homo sapiens
gagactcagggtact

SEQ ID NO: 52307 - DNA, 15 bp, Homo sapiens
agagactcagggtac

SEQ ID NO: 52308 - DNA, 15 bp, Homo sapiens
gagagactcagggta

SEQ ID NO: 52309 - DNA, 15 bp, Homo sapiens
tgagagactcagggt

SEQ ID NO: 52310 - DNA, 15 bp, Homo sapiens
ctgagagactcaggg

SEQ ID NO: 52311 - DNA, 15 bp, Homo sapiens
actgagagactcagg

SEQ ID NO: 52312 - DNA, 15 bp, Homo sapiens
aactgagagactcag

SEQ ID NO: 52313 - DNA, 15 bp, Homo sapiens
aaactgagagactca

SEQ ID NO: 52314 - DNA, 15 bp, Homo sapiens
caaactgagagactc

SEQ ID NO: 52315 - DNA, 15 bp, Homo sapiens
acaaactgagagact

SEQ ID NO: 52316 - DNA, 15 bp, Homo sapiens
cacaaactgagagac

SEQ ID NO: 52317 - DNA, 15 bp, Homo sapiens
gcacaaactgagaga

SEQ ID NO: 52318 - DNA, 15 bp, Homo sapiens
tgcacaaactgagag

SEQ ID NO: 52319 - DNA, 15 bp, Homo sapiens
ttgcacaaactgaga

SEQ ID NO: 52320 - DNA, 15 bp, Homo sapiens
tttgcacaaactgag

SEQ ID NO: 52321 - DNA, 15 bp, Homo sapiens
ctttgcacaaactga

SEQ ID NO: 52322 - DNA, 15 bp, Homo sapiens
gctttgcacaaactg

SEQ ID NO: 52323 - DNA, 15 bp, Homo sapiens
cgctttgcacaaact

SEQ ID NO: 52324 - DNA, 15 bp, Homo sapiens
ccgctttgcacaaac

SEQ ID NO: 52325 - DNA, 15 bp, Homo sapiens
gccgctttgcacaaa

SEQ ID NO: 52326 - DNA, 15 bp, Homo sapiens
tgccgctttgcacaa

SEQ ID NO: 52327 - DNA, 15 bp, Homo sapiens
ctgccgctttgcaca

SEQ ID NO: 52328 - DNA, 15 bp, Homo sapiens
tctgccgctttgcac

SEQ ID NO: 52329 - DNA, 15 bp, Homo sapiens
gtctgccgctttgca

SEQ ID NO: 52330 - DNA, 15 bp, Homo sapiens
ggtctgccgctttgc

SEQ ID NO: 52331 - DNA, 15 bp, Homo sapiens
gggtctgccgctttg

SEQ ID NO: 52332 - DNA, 15 bp, Homo sapiens
tgggtctgccgcttt

SEQ ID NO: 52333 - DNA, 15 bp, Homo sapiens
gtgggtctgccgctt

SEQ ID NO: 52334 - DNA, 15 bp, Homo sapiens
ggtgggtctgccgct

SEQ ID NO: 52335 - DNA, 15 bp, Homo sapiens
aggtgggtctgccgc

SEQ ID NO: 52336 - DNA, 15 bp, Homo sapiens
aaggtgggtctgccg

SEQ ID NO: 52337 - DNA, 15 bp, Homo sapiens
caaggtgggtctgcc

SEQ ID NO: 52338 - DNA, 15 bp, Homo sapiens
ccaaggtgggtctgc

SEQ ID NO: 52339 - DNA, 15 bp, Homo sapiens
accaaggtgggtctg

SEQ ID NO: 52340 - DNA, 15 bp, Homo sapiens
gaccaaggtgggtct

SEQ ID NO: 52341 - DNA, 15 bp, Homo sapiens
agaccaaggtgggtc

SEQ ID NO: 52342 - DNA, 15 bp, Homo sapiens
cagaccaaggtgggt

SEQ ID NO: 52343 - DNA, 15 bp, Homo sapiens
acagaccaaggtggg

SEQ ID NO: 52344 - DNA, 15 bp, Homo sapiens
cacagaccaaggtgg

SEQ ID NO: 52345 - DNA, 15 bp, Homo sapiens
ccacagaccaaggtg

SEQ ID NO: 52346 - DNA, 15 bp, Homo sapiens
gccacagaccaaggt

SEQ ID NO: 52347 - DNA, 15 bp, Homo sapiens
ggccacagaccaagg

SEQ ID NO: 52348 - DNA, 15 bp, Homo sapiens
aggccacagaccaag

SEQ ID NO: 52349 - DNA, 15 bp, Homo sapiens
gaggccacagaccaa

SEQ ID NO: 52350 - DNA, 15 bp, Homo sapiens
ggaggccacagacca

SEQ ID NO: 52351 - DNA, 15 bp, Homo sapiens
tggaggccacagacc

SEQ ID NO: 52352 - DNA, 15 bp, Homo sapiens
ctggaggccacagac

SEQ ID NO: 52353 - DNA, 15 bp, Homo sapiens
tctggaggccacaga

SEQ ID NO: 52354 - DNA, 15 bp, Homo sapiens
ctctggaggccacag

SEQ ID NO: 52355 - DNA, 15 bp, Homo sapiens
cctctggaggccaca

SEQ ID NO: 52356 - DNA, 15 bp, Homo sapiens
tcctctggaggccac

SEQ ID NO: 52357 - DNA, 15 bp, Homo sapiens
ttcctctggaggcca

SEQ ID NO: 52358 - DNA, 15 bp, Homo sapiens
cttcctctggaggcc

SEQ ID NO: 52359 - DNA, 15 bp, Homo sapiens
acttcctctggaggc

SEQ ID NO: 52360 - DNA, 15 bp, Homo sapiens
tacttcctctggagg

SEQ ID NO: 52361 - DNA, 15 bp, Homo sapiens
gtacttcctctggag

SEQ ID NO: 52362 - DNA, 15 bp, Homo sapiens
agtacttcctctgga

SEQ ID NO: 52363 - DNA, 15 bp, Homo sapiens
aagtacttcctctgg

SEQ ID NO: 52364 - DNA, 15 bp, Homo sapiens
caagtacttcctctg

SEQ ID NO: 52365 - DNA, 15 bp, Homo sapiens
acaagtacttcctct

SEQ ID NO: 52366 - DNA, 15 bp, Homo sapiens
aacaagtacttcctc

SEQ ID NO: 52367 - DNA, 15 bp, Homo sapiens
gaacaagtacttcct

SEQ ID NO: 52368 - DNA, 15 bp, Homo sapiens
tgaacaagtacttcc

SEQ ID NO: 52369 - DNA, 15 bp, Homo sapiens
ttgaacaagtacttc

SEQ ID NO: 52370 - DNA, 15 bp, Homo sapiens
cttgaacaagtactt

SEQ ID NO: 52371 - DNA, 15 bp, Homo sapiens
tcttgaacaagtact

SEQ ID NO: 52372 - DNA, 15 bp, Homo sapiens
ctcttgaacaagtac

SEQ ID NO: 52373 - DNA, 15 bp, Homo sapiens
cctcttgaacaagta

SEQ ID NO: 52374 - DNA, 15 bp, Homo sapiens
ccctcttgaacaagt

SEQ ID NO: 52375 - DNA, 15 bp, Homo sapiens
tccctcttgaacaag

SEQ ID NO: 52376 - DNA, 15 bp, Homo sapiens
ctccctcttgaacaa

SEQ ID NO: 52377 - DNA, 15 bp, Homo sapiens
gctccctcttgaaca

SEQ ID NO: 52378 - DNA, 15 bp, Homo sapiens
agctccctcttgaac

SEQ ID NO: 52379 - DNA, 15 bp, Homo sapiens
tagctccctcttgaa

SEQ ID NO: 52380 - DNA, 15 bp, Homo sapiens
ttagctccctcttga

SEQ ID NO: 52381 - DNA, 15 bp, Homo sapiens
cttagctccctcttg

SEQ ID NO: 52382 - DNA, 15 bp, Homo sapiens
gcttagctccctctt

SEQ ID NO: 52383 - DNA, 15 bp, Homo sapiens
tgcttagctccctct

SEQ ID NO: 52384 - DNA, 15 bp, Homo sapiens
ctgcttagctccctc

SEQ ID NO: 52385 - DNA, 15 bp, Homo sapiens
tctgcttagctccct

SEQ ID NO: 52386 - DNA, 15 bp, Homo sapiens
ctctgcttagctccc

SEQ ID NO: 52387 - DNA, 15 bp, Homo sapiens
actctgcttagctcc

SEQ ID NO: 52388 - DNA, 15 bp, Homo sapiens
tactctgcttagctc

SEQ ID NO: 52389 - DNA, 15 bp, Homo sapiens
ttactctgcttagct

SEQ ID NO: 52390 - DNA, 15 bp, Homo sapiens
attactctgcttagc

SEQ ID NO: 52391 - DNA, 15 bp, Homo sapiens
aattactctgcttag

SEQ ID NO: 52392 - DNA, 15 bp, Homo sapiens
aaattactctgctta

SEQ ID NO: 52393 - DNA, 15 bp, Homo sapiens
taaattactctgctt

SEQ ID NO: 52394 - DNA, 15 bp, Homo sapiens
ctaaattactctgct

SEQ ID NO: 52395 - DNA, 15 bp, Homo sapiens
cctaaattactctgc

SEQ ID NO: 52396 - DNA, 15 bp, Homo sapiens
acctaaattactctg

SEQ ID NO: 52397 - DNA, 15 bp, Homo sapiens
aacctaaattactct

SEQ ID NO: 52398 - DNA, 15 bp, Homo sapiens
caacctaaattactc

SEQ ID NO: 52399 - DNA, 15 bp, Homo sapiens
ccaacctaaattact

SEQ ID NO: 52400 - DNA, 15 bp, Homo sapiens
accaacctaaattac

SEQ ID NO: 52401 - DNA, 15 bp, Homo sapiens
taccaacctaaatta

SEQ ID NO: 52402 - DNA, 15 bp, Homo sapiens
ttaccaacctaaatt

SEQ ID NO: 52403 - DNA, 15 bp, Homo sapiens
attaccaacctaaat

SEQ ID NO: 52404 - DNA, 15 bp, Homo sapiens
aattaccaacctaaa

SEQ ID NO: 52405 - DNA, 15 bp, Homo sapiens
aaattaccaacctaa

SEQ ID NO: 52406 - DNA, 15 bp, Homo sapiens
taaattaccaaccta

SEQ ID NO: 52407 - DNA, 15 bp, Homo sapiens
ctaaattaccaacct

SEQ ID NO: 52408 - DNA, 15 bp, Homo sapiens
cctaaattaccaacc

SEQ ID NO: 52409 - DNA, 15 bp, Homo sapiens
acctaaattaccaac

SEQ ID NO: 52410 - DNA, 15 bp, Homo sapiens
tacctaaattaccaa

SEQ ID NO: 52411 - DNA, 15 bp, Homo sapiens
gtacctaaattacca

SEQ ID NO: 52412 - DNA, 15 bp, Homo sapiens
agtacctaaattacc

SEQ ID NO: 52413 - DNA, 15 bp, Homo sapiens
tagtacctaaattac

SEQ ID NO: 52414 - DNA, 15 bp, Homo sapiens
atagtacctaaatta

SEQ ID NO: 52415 - DNA, 15 bp, Homo sapiens
tatagtacctaaatt

SEQ ID NO: 52416 - DNA, 15 bp, Homo sapiens
ttatagtacctaaat

SEQ ID NO: 52417 - DNA, 15 bp, Homo sapiens
cttatagtacctaaa

SEQ ID NO: 52418 - DNA, 15 bp, Homo sapiens
tcttatagtacctaa

SEQ ID NO: 52419 - DNA, 15 bp, Homo sapiens
ttcttatagtaccta

SEQ ID NO: 52420 - DNA, 15 bp, Homo sapiens
cttcttatagtacct

SEQ ID NO: 52421 - DNA, 15 bp, Homo sapiens
acttcttatagtacc

SEQ ID NO: 52422 - DNA, 15 bp, Homo sapiens
gacttcttatagtac

SEQ ID NO: 52423 - DNA, 15 bp, Homo sapiens
ggacttcttatagta

SEQ ID NO: 52424 - DNA, 15 bp, Homo sapiens
gggacttcttatagt

SEQ ID NO: 52425 - DNA, 15 bp, Homo sapiens
tgggacttcttatag

SEQ ID NO: 52426 - DNA, 15 bp, Homo sapiens
ttgggacttcttata

SEQ ID NO: 52427 - DNA, 15 bp, Homo sapiens
cttgggacttcttat

SEQ ID NO: 52428 - DNA, 15 bp, Homo sapiens
gcttgggacttctta

SEQ ID NO: 52429 - DNA, 15 bp, Homo sapiens
ggcttgggacttctt

SEQ ID NO: 52430 - DNA, 15 bp, Homo sapiens
aggcttgggacttct

SEQ ID NO: 52431 - DNA, 15 bp, Homo sapiens
aaggcttgggacttc

SEQ ID NO: 52432 - DNA, 15 bp, Homo sapiens
aaaggcttgggactt

SEQ ID NO: 52433 - DNA, 15 bp, Homo sapiens
taaaggcttgggact

SEQ ID NO: 52434 - DNA, 15 bp, Homo sapiens
ctaaaggcttgggac

SEQ ID NO: 52435 - DNA, 15 bp, Homo sapiens
gctaaaggcttggga

SEQ ID NO: 52436 - DNA, 15 bp, Homo sapiens
tgctaaaggcttggg

SEQ ID NO: 52437 - DNA, 15 bp, Homo sapiens
ctgctaaaggcttgg

SEQ ID NO: 52438 - DNA, 15 bp, Homo sapiens
actgctaaaggcttg

SEQ ID NO: 52439 - DNA, 15 bp, Homo sapiens
tactgctaaaggctt

SEQ ID NO: 52440 - DNA, 15 bp, Homo sapiens
atactgctaaaggct

SEQ ID NO: 52441 - DNA, 15 bp, Homo sapiens
catactgctaaaggc

SEQ ID NO: 52442 - DNA, 15 bp, Homo sapiens
acatactgctaaagg

SEQ ID NO: 52443 - DNA, 15 bp, Homo sapiens
aacatactgctaaag

SEQ ID NO: 52444 - DNA, 15 bp, Homo sapiens
aaacatactgctaaa

SEQ ID NO: 52445 - DNA, 15 bp, Homo sapiens
aaaacatactgctaa

SEQ ID NO: 52446 - DNA, 15 bp, Homo sapiens
aaaaacatactgcta

SEQ ID NO: 52447 - DNA, 15 bp, Homo sapiens
taaaaacatactgct

SEQ ID NO: 52448 - DNA, 15 bp, Homo sapiens
ttaaaaacatactgc

SEQ ID NO: 52449 - DNA, 15 bp, Homo sapiens
tttaaaaacatactg

SEQ ID NO: 52450 - DNA, 15 bp, Homo sapiens
ctttaaaaacatact

SEQ ID NO: 52451 - DNA, 15 bp, Homo sapiens
tctttaaaaacatac

SEQ ID NO: 52452 - DNA, 15 bp, Homo sapiens
atctttaaaaacata

SEQ ID NO: 52453 - DNA, 15 bp, Homo sapiens
catctttaaaaacat

SEQ ID NO: 52454 - DNA, 15 bp, Homo sapiens
acatctttaaaaaca

SEQ ID NO: 52455 - DNA, 15 bp, Homo sapiens
aacatctttaaaaac

SEQ ID NO: 52456 - DNA, 15 bp, Homo sapiens
caacatctttaaaaa

SEQ ID NO: 52457 - DNA, 15 bp, Homo sapiens
gcaacatctttaaaa

SEQ ID NO: 52458 - DNA, 15 bp, Homo sapiens
tgcaacatctttaaa

SEQ ID NO: 52459 - DNA, 15 bp, Homo sapiens
ctgcaacatctttaa

SEQ ID NO: 52460 - DNA, 15 bp, Homo sapiens
actgcaacatcttta

SEQ ID NO: 52461 - DNA, 15 bp, Homo sapiens
aactgcaacatcttt

SEQ ID NO: 52462 - DNA, 15 bp, Homo sapiens
caactgcaacatctt

SEQ ID NO: 52463 - DNA, 15 bp, Homo sapiens
ccaactgcaacatct

SEQ ID NO: 52464 - DNA, 15 bp, Homo sapiens
gccaactgcaacatc

SEQ ID NO: 52465 - DNA, 15 bp, Homo sapiens
tgccaactgcaacat

SEQ ID NO: 52466 - DNA, 15 bp, Homo sapiens
ttgccaactgcaaca

SEQ ID NO: 52467 - DNA, 15 bp, Homo sapiens
attgccaactgcaac

SEQ ID NO: 52468 - DNA, 15 bp, Homo sapiens
aattgccaactgcaa

SEQ ID NO: 52469 - DNA, 15 bp, Homo sapiens
aaattgccaactgca

SEQ ID NO: 52470 - DNA, 15 bp, Homo sapiens
aaaattgccaactgc

SEQ ID NO: 52471 - DNA, 15 bp, Homo sapiens
aaaaattgccaactg

SEQ ID NO: 52472 - DNA, 15 bp, Homo sapiens
taaaaattgccaact

SEQ ID NO: 52473 - DNA, 15 bp, Homo sapiens
ctaaaaattgccaac

SEQ ID NO: 52474 - DNA, 15 bp, Homo sapiens
tctaaaaattgccaa

SEQ ID NO: 52475 - DNA, 15 bp, Homo sapiens
ttctaaaaattgcca

SEQ ID NO: 52476 - DNA, 15 bp, Homo sapiens
tttctaaaaattgcc

SEQ ID NO: 52477 - DNA, 15 bp, Homo sapiens
ctttctaaaaattgc

SEQ ID NO: 52478 - DNA, 15 bp, Homo sapiens
gctttctaaaaattg

SEQ ID NO: 52479 - DNA, 15 bp, Homo sapiens
ggctttctaaaaatt

SEQ ID NO: 52480 - DNA, 15 bp, Homo sapiens
tggctttctaaaaat

SEQ ID NO: 52481 - DNA, 15 bp, Homo sapiens
ctggctttctaaaaa

SEQ ID NO: 52482 - DNA, 15 bp, Homo sapiens
gctggctttctaaaa

SEQ ID NO: 52483 - DNA, 15 bp, Homo sapiens
agctggctttctaaa

SEQ ID NO: 52484 - DNA, 15 bp, Homo sapiens
gagctggctttctaa

SEQ ID NO: 52485 - DNA, 15 bp, Homo sapiens
tgagctggctttcta

SEQ ID NO: 52486 - DNA, 15 bp, Homo sapiens
ctgagctggctttct

SEQ ID NO: 52487 - DNA, 15 bp, Homo sapiens
cctgagctggctttc

SEQ ID NO: 52488 - DNA, 15 bp, Homo sapiens
ccctgagctggcttt

SEQ ID NO: 52489 - DNA, 15 bp, Homo sapiens
accctgagctggctt

SEQ ID NO: 52490 - DNA, 15 bp, Homo sapiens
taccctgagctggct

SEQ ID NO: 52491 - DNA, 15 bp, Homo sapiens
ctaccctgagctggc

SEQ ID NO: 52492 - DNA, 15 bp, Homo sapiens
tctaccctgagctgg

SEQ ID NO: 52493 - DNA, 15 bp, Homo sapiens
atctaccctgagctg

SEQ ID NO: 52494 - DNA, 15 bp, Homo sapiens
tatctaccctgagct

SEQ ID NO: 52495 - DNA, 15 bp, Homo sapiens
atatctaccctgagc

SEQ ID NO: 52496 - DNA, 15 bp, Homo sapiens
aatatctaccctgag

SEQ ID NO: 52497 - DNA, 15 bp, Homo sapiens
aaatatctaccctga

SEQ ID NO: 52498 - DNA, 15 bp, Homo sapiens
taaatatctaccctg

SEQ ID NO: 52499 - DNA, 15 bp, Homo sapiens
ataaatatctaccct

SEQ ID NO: 52500 - DNA, 15 bp, Homo sapiens
aataaatatctaccc

SEQ ID NO: 52501 - DNA, 15 bp, Homo sapiens
aaataaatatctacc

SEQ ID NO: 52502 - DNA, 15 bp, Homo sapiens
gaaataaatatctac

SEQ ID NO: 52503 - DNA, 15 bp, Homo sapiens
tgaaataaatatcta

SEQ ID NO: 52504 - DNA, 15 bp, Homo sapiens
ttgaaataaatatct

SEQ ID NO: 52505 - DNA, 15 bp, Homo sapiens
tttgaaataaatatc

SEQ ID NO: 52506 - DNA, 15 bp, Homo sapiens
gtttgaaataaatat

SEQ ID NO: 52507 - DNA, 15 bp, Homo sapiens
agtttgaaataaata

SEQ ID NO: 52508 - DNA, 15 bp, Homo sapiens
gagtttgaaataaat

SEQ ID NO: 52509 - DNA, 15 bp, Homo sapiens
agagtttgaaataaa

SEQ ID NO: 52510 - DNA, 15 bp, Homo sapiens
cagagtttgaaataa

SEQ ID NO: 52511 - DNA, 15 bp, Homo sapiens
tcagagtttgaaata

SEQ ID NO: 52512 - DNA, 15 bp, Homo sapiens
atcagagtttgaaat

SEQ ID NO: 52513 - DNA, 15 bp, Homo sapiens
catcagagtttgaaa

SEQ ID NO: 52514 - DNA, 15 bp, Homo sapiens
ccatcagagtttgaa

SEQ ID NO: 52515 - DNA, 15 bp, Homo sapiens
accatcagagtttga

SEQ ID NO: 52516 - DNA, 15 bp, Homo sapiens
taccatcagagtttg

SEQ ID NO: 52517 - DNA, 15 bp, Homo sapiens
ataccatcagagttt

SEQ ID NO: 52518 - DNA, 15 bp, Homo sapiens
cataccatcagagtt

SEQ ID NO: 52519 - DNA, 15 bp, Homo sapiens
acataccatcagagt

SEQ ID NO: 52520 - DNA, 15 bp, Homo sapiens
tacataccatcagag

SEQ ID NO: 52521 - DNA, 15 bp, Homo sapiens
atacataccatcaga

SEQ ID NO: 52522 - DNA, 15 bp, Homo sapiens
catacataccatcag

SEQ ID NO: 52523 - DNA, 15 bp, Homo sapiens
acatacataccatca

SEQ ID NO: 52524 - DNA, 15 bp, Homo sapiens
tacatacataccatc

SEQ ID NO: 52525 - DNA, 15 bp, Homo sapiens
atacatacataccat

SEQ ID NO: 52526 - DNA, 15 bp, Homo sapiens
tatacatacatacca

SEQ ID NO: 52527 - DNA, 15 bp, Homo sapiens
ttatacatacatacc

SEQ ID NO: 52528 - DNA, 15 bp, Homo sapiens
tttatacatacatac

SEQ ID NO: 52529 - DNA, 15 bp, Homo sapiens
atttatacatacata

SEQ ID NO: 52530 - DNA, 15 bp, Homo sapiens
tatttatacatacat

SEQ ID NO: 52531 - DNA, 15 bp, Homo sapiens
atatttatacataca

SEQ ID NO: 52532 - DNA, 15 bp, Homo sapiens
aatatttatacatac

SEQ ID NO: 52533 - DNA, 15 bp, Homo sapiens
taatatttatacata

SEQ ID NO: 52534 - DNA, 15 bp, Homo sapiens
ataatatttatacat

SEQ ID NO: 52535 - DNA, 15 bp, Homo sapiens
tataatatttataca

SEQ ID NO: 52536 - DNA, 15 bp, Homo sapiens
gtataatatttatac

SEQ ID NO: 52537 - DNA, 15 bp, Homo sapiens
ggtataatatttata

SEQ ID NO: 52538 - DNA, 15 bp, Homo sapiens
aggtataatatttat

SEQ ID NO: 52539 - DNA, 15 bp, Homo sapiens
gaggtataatattta

SEQ ID NO: 52540 - DNA, 15 bp, Homo sapiens
tgaggtataatattt

SEQ ID NO: 52541 - DNA, 15 bp, Homo sapiens
atgaggtataatatt

SEQ ID NO: 52542 - DNA, 15 bp, Homo sapiens
tatgaggtataatat

SEQ ID NO: 52543 - DNA, 15 bp, Homo sapiens
atatgaggtataata

SEQ ID NO: 52544 - DNA, 15 bp, Homo sapiens
gatatgaggtataat

SEQ ID NO: 52545 - DNA, 15 bp, Homo sapiens
tgatatgaggtataa

SEQ ID NO: 52546 - DNA, 15 bp, Homo sapiens
ctgatatgaggtata

SEQ ID NO: 52547 - DNA, 15 bp, Homo sapiens
actgatatgaggtat

SEQ ID NO: 52548 - DNA, 15 bp, Homo sapiens
gactgatatgaggta

SEQ ID NO: 52549 - DNA, 15 bp, Homo sapiens
agactgatatgaggt

SEQ ID NO: 52550 - DNA, 15 bp, Homo sapiens
tagactgatatgagg

SEQ ID NO: 52551 - DNA, 15 bp, Homo sapiens
atagactgatatgag

SEQ ID NO: 52552 - DNA, 15 bp, Homo sapiens
tatagactgatatga

SEQ ID NO: 52553 - DNA, 15 bp, Homo sapiens
ttatagactgatatg

SEQ ID NO: 52554 - DNA, 15 bp, Homo sapiens
attatagactgatat

SEQ ID NO: 52555 - DNA, 15 bp, Homo sapiens
cattatagactgata

SEQ ID NO: 52556 - DNA, 15 bp, Homo sapiens
gcattatagactgat

SEQ ID NO: 52557 - DNA, 15 bp, Homo sapiens
agcattatagactga

SEQ ID NO: 52558 - DNA, 15 bp, Homo sapiens
cagcattatagactg

SEQ ID NO: 52559 - DNA, 15 bp, Homo sapiens
acagcattatagact

SEQ ID NO: 52560 - DNA, 15 bp, Homo sapiens
aacagcattatagac

SEQ ID NO: 52561 - DNA, 15 bp, Homo sapiens
aaacagcattataga

SEQ ID NO: 52562 - DNA, 15 bp, Homo sapiens
caaacagcattatag

SEQ ID NO: 52563 - DNA, 15 bp, Homo sapiens
gcaaacagcattata

SEQ ID NO: 52564 - DNA, 15 bp, Homo sapiens
agcaaacagcattat

SEQ ID NO: 52565 - DNA, 15 bp, Homo sapiens
cagcaaacagcatta

SEQ ID NO: 52566 - DNA, 15 bp, Homo sapiens
acagcaaacagcatt

SEQ ID NO: 52567 - DNA, 15 bp, Homo sapiens
gacagcaaacagcat

SEQ ID NO: 52568 - DNA, 15 bp, Homo sapiens
tgacagcaaacagca

SEQ ID NO: 52569 - DNA, 15 bp, Homo sapiens
atgacagcaaacagc

SEQ ID NO: 52570 - DNA, 15 bp, Homo sapiens
aatgacagcaaacag

SEQ ID NO: 52571 - DNA, 15 bp, Homo sapiens
taatgacagcaaaca

SEQ ID NO: 52572 - DNA, 15 bp, Homo sapiens
ttaatgacagcaaac

SEQ ID NO: 52573 - DNA, 15 bp, Homo sapiens
tttaatgacagcaaa

SEQ ID NO: 52574 - DNA, 15 bp, Homo sapiens
ctttaatgacagcaa

SEQ ID NO: 52575 - DNA, 15 bp, Homo sapiens
tctttaatgacagca

SEQ ID NO: 52576 - DNA, 15 bp, Homo sapiens
ttctttaatgacagc

SEQ ID NO: 52577 - DNA, 15 bp, Homo sapiens
tttctttaatgacag

SEQ ID NO: 52578 - DNA, 15 bp, Homo sapiens
ttttctttaatgaca

SEQ ID NO: 52579 - DNA, 15 bp, Homo sapiens
cttttctttaatgac

SEQ ID NO: 52580 - DNA, 15 bp, Homo sapiens
gcttttctttaatga

SEQ ID NO: 52581 - DNA, 15 bp, Homo sapiens
ggcttttctttaatg

SEQ ID NO: 52582 - DNA, 15 bp, Homo sapiens
aggcttttctttaat

SEQ ID NO: 52583 - DNA, 15 bp, Homo sapiens
taggcttttctttaa

SEQ ID NO: 52584 - DNA, 15 bp, Homo sapiens
gtaggcttttcttta

SEQ ID NO: 52585 - DNA, 15 bp, Homo sapiens
tgtaggcttttcttt

SEQ ID NO: 52586 - DNA, 15 bp, Homo sapiens
atgtaggcttttctt

SEQ ID NO: 52587 - DNA, 15 bp, Homo sapiens
catgtaggcttttct

SEQ ID NO: 52588 - DNA, 15 bp, Homo sapiens
tcatgtaggcttttc

SEQ ID NO: 52589 - DNA, 15 bp, Homo sapiens
ctcatgtaggctttt

SEQ ID NO: 52590 - DNA, 15 bp, Homo sapiens
tctcatgtaggcttt

SEQ ID NO: 52591 - DNA, 15 bp, Homo sapiens
gtctcatgtaggctt

SEQ ID NO: 52592 - DNA, 15 bp, Homo sapiens
tgtctcatgtaggct

SEQ ID NO: 52593 - DNA, 15 bp, Homo sapiens
atgtctcatgtaggc

SEQ ID NO: 52594 - DNA, 15 bp, Homo sapiens
aatgtctcatgtagg

SEQ ID NO: 52595 - DNA, 15 bp, Homo sapiens
taatgtctcatgtag

SEQ ID NO: 52596 - DNA, 15 bp, Homo sapiens
gtaatgtctcatgta

SEQ ID NO: 52597 - DNA, 15 bp, Homo sapiens
tgtaatgtctcatgt

SEQ ID NO: 52598 - DNA, 15 bp, Homo sapiens
ttgtaatgtctcatg

SEQ ID NO: 52599 - DNA, 15 bp, Homo sapiens
gttgtaatgtctcat

SEQ ID NO: 52600 - DNA, 15 bp, Homo sapiens
agttgtaatgtctca

SEQ ID NO: 52601 - DNA, 15 bp, Homo sapiens
cagttgtaatgtctc

SEQ ID NO: 52602 - DNA, 15 bp, Homo sapiens
tcagttgtaatgtct

SEQ ID NO: 52603 - DNA, 15 bp, Homo sapiens
atcagttgtaatgtc

SEQ ID NO: 52604 - DNA, 15 bp, Homo sapiens
tatcagttgtaatgt

SEQ ID NO: 52605 - DNA, 15 bp, Homo sapiens
gtatcagttgtaatg

SEQ ID NO: 52606 - DNA, 15 bp, Homo sapiens
ggtatcagttgtaat

SEQ ID NO: 52607 - DNA, 15 bp, Homo sapiens
tggtatcagttgtaa

SEQ ID NO: 52608 - DNA, 15 bp, Homo sapiens
gtggtatcagttgta

SEQ ID NO: 52609 - DNA, 15 bp, Homo sapiens
tgtggtatcagttgt

SEQ ID NO: 52610 - DNA, 15 bp, Homo sapiens
ctgtggtatcagttg

SEQ ID NO: 52611 - DNA, 15 bp, Homo sapiens
tctgtggtatcagtt

SEQ ID NO: 52612 - DNA, 15 bp, Homo sapiens
ttctgtggtatcagt

SEQ ID NO: 52613 - DNA, 15 bp, Homo sapiens
tttctgtggtatcag

SEQ ID NO: 52614 - DNA, 15 bp, Homo sapiens
atttctgtggtatca

SEQ ID NO: 52615 - DNA, 15 bp, Homo sapiens
tatttctgtggtatc

SEQ ID NO: 52616 - DNA, 15 bp, Homo sapiens
gtatttctgtggtat

SEQ ID NO: 52617 - DNA, 15 bp, Homo sapiens
tgtatttctgtggta

SEQ ID NO: 52618 - DNA, 15 bp, Homo sapiens
ctgtatttctgtggt

SEQ ID NO: 52619 - DNA, 15 bp, Homo sapiens
tctgtatttctgtgg

SEQ ID NO: 52620 - DNA, 15 bp, Homo sapiens
ttctgtatttctgtg

SEQ ID NO: 52621 - DNA, 15 bp, Homo sapiens
cttctgtatttctgt

SEQ ID NO: 52622 - DNA, 15 bp, Homo sapiens
tcttctgtatttctg

SEQ ID NO: 52623 - DNA, 15 bp, Homo sapiens
atcttctgtatttct

SEQ ID NO: 52624 - DNA, 15 bp, Homo sapiens
gatcttctgtatttc

SEQ ID NO: 52625 - DNA, 15 bp, Homo sapiens
tgatcttctgtattt

SEQ ID NO: 52626 - DNA, 15 bp, Homo sapiens
atgatcttctgtatt

SEQ ID NO: 52627 - DNA, 15 bp, Homo sapiens
tatgatcttctgtat

SEQ ID NO: 52628 - DNA, 15 bp, Homo sapiens
ttatgatcttctgta

SEQ ID NO: 52629 - DNA, 15 bp, Homo sapiens
cttatgatcttctgt

SEQ ID NO: 52630 - DNA, 15 bp, Homo sapiens
tcttatgatcttctg

SEQ ID NO: 52631 - DNA, 15 bp, Homo sapiens
ctcttatgatcttct

SEQ ID NO: 52632 - DNA, 15 bp, Homo sapiens
tctcttatgatcttc

SEQ ID NO: 52633 - DNA, 15 bp, Homo sapiens
atctcttatgatctt

SEQ ID NO: 52634 - DNA, 15 bp, Homo sapiens
aatctcttatgatct

SEQ ID NO: 52635 - DNA, 15 bp, Homo sapiens
taatctcttatgatc

SEQ ID NO: 52636 - DNA, 15 bp, Homo sapiens
gtaatctcttatgat

SEQ ID NO: 52637 - DNA, 15 bp, Homo sapiens
agtaatctcttatga

SEQ ID NO: 52638 - DNA, 15 bp, Homo sapiens
tagtaatctcttatg

SEQ ID NO: 52639 - DNA, 15 bp, Homo sapiens
ttagtaatctcttat

SEQ ID NO: 52640 - DNA, 15 bp, Homo sapiens
tttagtaatctctta

SEQ ID NO: 52641 - DNA, 15 bp, Homo sapiens
ttttagtaatctctt

SEQ ID NO: 52642 - DNA, 15 bp, Homo sapiens
tttttagtaatctct

SEQ ID NO: 52643 - DNA, 15 bp, Homo sapiens
gtttttagtaatctc

SEQ ID NO: 52644 - DNA, 15 bp, Homo sapiens
tgtttttagtaatct

SEQ ID NO: 52645 - DNA, 15 bp, Homo sapiens
ttgtttttagtaatc

SEQ ID NO: 52646 - DNA, 15 bp, Homo sapiens
tttgtttttagtaat

SEQ ID NO: 52647 - DNA, 15 bp, Homo sapiens
gtttgtttttagtaa

SEQ ID NO: 52648 - DNA, 15 bp, Homo sapiens
cgtttgtttttagta

SEQ ID NO: 52649 - DNA, 15 bp, Homo sapiens
gcgtttgtttttagt

SEQ ID NO: 52650 - DNA, 15 bp, Homo sapiens
ggcgtttgtttttag

SEQ ID NO: 52651 - DNA, 15 bp, Homo sapiens
tggcgtttgttttta

SEQ ID NO: 52652 - DNA, 15 bp, Homo sapiens
ttggcgtttgttttt

SEQ ID NO: 52653 - DNA, 15 bp, Homo sapiens
gttggcgtttgtttt

SEQ ID NO: 52654 - DNA, 15 bp, Homo sapiens
tgttggcgtttgttt

SEQ ID NO: 52655 - DNA, 15 bp, Homo sapiens
ttgttggcgtttgtt

SEQ ID NO: 52656 - DNA, 15 bp, Homo sapiens
tttgttggcgtttgt

SEQ ID NO: 52657 - DNA, 15 bp, Homo sapiens
atttgttggcgtttg

SEQ ID NO: 52658 - DNA, 15 bp, Homo sapiens
aatttgttggcgttt

SEQ ID NO: 52659 - DNA, 15 bp, Homo sapiens
caatttgttggcgtt

SEQ ID NO: 52660 - DNA, 15 bp, Homo sapiens
ccaatttgttggcgt

SEQ ID NO: 52661 - DNA, 15 bp, Homo sapiens
tccaatttgttggcg

SEQ ID NO: 52662 - DNA, 15 bp, Homo sapiens
atccaatttgttggc

SEQ ID NO: 52663 - DNA, 15 bp, Homo sapiens
catccaatttgttgg

SEQ ID NO: 52664 - DNA, 15 bp, Homo sapiens
tcatccaatttgttg

SEQ ID NO: 52665 - DNA, 15 bp, Homo sapiens
gtcatccaatttgtt

SEQ ID NO: 52666 - DNA, 15 bp, Homo sapiens
ggtcatccaatttgt

SEQ ID NO: 52667 - DNA, 15 bp, Homo sapiens
aggtcatccaatttg

SEQ ID NO: 52668 - DNA, 15 bp, Homo sapiens
taggtcatccaattt

SEQ ID NO: 52669 - DNA, 15 bp, Homo sapiens
ctaggtcatccaatt

SEQ ID NO: 52670 - DNA, 15 bp, Homo sapiens
tctaggtcatccaat

SEQ ID NO: 52671 - DNA, 15 bp, Homo sapiens
ttctaggtcatccaa

SEQ ID NO: 52672 - DNA, 15 bp, Homo sapiens
cttctaggtcatcca

SEQ ID NO: 52673 - DNA, 15 bp, Homo sapiens
tcttctaggtcatcc

SEQ ID NO: 52674 - DNA, 15 bp, Homo sapiens
ttcttctaggtcatc

SEQ ID NO: 52675 - DNA, 15 bp, Homo sapiens
tttcttctaggtcat

SEQ ID NO: 52676 - DNA, 15 bp, Homo sapiens
atttcttctaggtca

SEQ ID NO: 52677 - DNA, 15 bp, Homo sapiens
catttcttctaggtc

SEQ ID NO: 52678 - DNA, 15 bp, Homo sapiens
ccatttcttctaggt

SEQ ID NO: 52679 - DNA, 15 bp, Homo sapiens
tccatttcttctagg

SEQ ID NO: 52680 - DNA, 15 bp, Homo sapiens
atccatttcttctag

SEQ ID NO: 52681 - DNA, 15 bp, Homo sapiens
tatccatttcttcta

SEQ ID NO: 52682 - DNA, 15 bp, Homo sapiens
ttatccatttcttct

SEQ ID NO: 52683 - DNA, 15 bp, Homo sapiens
tttatccatttcttc

SEQ ID NO: 52684 - DNA, 15 bp, Homo sapiens
atttatccatttctt

SEQ ID NO: 52685 - DNA, 15 bp, Homo sapiens
aatttatccatttct

SEQ ID NO: 52686 - DNA, 15 bp, Homo sapiens
gaatttatccatttc

SEQ ID NO: 52687 - DNA, 15 bp, Homo sapiens
ggaatttatccattt

SEQ ID NO: 52688 - DNA, 15 bp, Homo sapiens
aggaatttatccatt

SEQ ID NO: 52689 - DNA, 15 bp, Homo sapiens
taggaatttatccat

SEQ ID NO: 52690 - DNA, 15 bp, Homo sapiens
ataggaatttatcca

SEQ ID NO: 52691 - DNA, 15 bp, Homo sapiens
tataggaatttatcc

SEQ ID NO: 52692 - DNA, 15 bp, Homo sapiens
ttataggaatttatc

SEQ ID NO: 52693 - DNA, 15 bp, Homo sapiens
tttataggaatttat

SEQ ID NO: 52694 - DNA, 15 bp, Homo sapiens
ttttataggaattta

SEQ ID NO: 52695 - DNA, 15 bp, Homo sapiens
tttttataggaattt

SEQ ID NO: 52696 - DNA, 15 bp, Homo sapiens
atttttataggaatt

SEQ ID NO: 52697 - DNA, 15 bp, Homo sapiens
tatttttataggaat

SEQ ID NO: 52698 - DNA, 15 bp, Homo sapiens
gtatttttataggaa

SEQ ID NO: 52699 - DNA, 15 bp, Homo sapiens
tgtatttttatagga

SEQ ID NO: 52700 - DNA, 15 bp, Homo sapiens
ttgtatttttatagg

SEQ ID NO: 52701 - DNA, 15 bp, Homo sapiens
gttgtatttttatag

SEQ ID NO: 52702 - DNA, 15 bp, Homo sapiens
ggttgtatttttata

SEQ ID NO: 52703 - DNA, 15 bp, Homo sapiens
aggttgtatttttat

SEQ ID NO: 52704 - DNA, 15 bp, Homo sapiens
caggttgtattttta

SEQ ID NO: 52705 - DNA, 15 bp, Homo sapiens
gcaggttgtattttt

SEQ ID NO: 52706 - DNA, 15 bp, Homo sapiens
ggcaggttgtatttt

SEQ ID NO: 52707 - DNA, 15 bp, Homo sapiens
tggcaggttgtattt

SEQ ID NO: 52708 - DNA, 15 bp, Homo sapiens
ttggcaggttgtatt

SEQ ID NO: 52709 - DNA, 15 bp, Homo sapiens
cttggcaggttgtat

SEQ ID NO: 52710 - DNA, 15 bp, Homo sapiens
ccttggcaggttgta

SEQ ID NO: 52711 - DNA, 15 bp, Homo sapiens
accttggcaggttgt

SEQ ID NO: 52712 - DNA, 15 bp, Homo sapiens
aaccttggcaggttg

SEQ ID NO: 52713 - DNA, 15 bp, Homo sapiens
caaccttggcaggtt

SEQ ID NO: 52714 - DNA, 15 bp, Homo sapiens
tcaaccttggcaggt

SEQ ID NO: 52715 - DNA, 15 bp, Homo sapiens
ttcaaccttggcagg

SEQ ID NO: 52716 - DNA, 15 bp, Homo sapiens
attcaaccttggcag

SEQ ID NO: 52717 - DNA, 15 bp, Homo sapiens
gattcaaccttggca

SEQ ID NO: 52718 - DNA, 15 bp, Homo sapiens
tgattcaaccttggc

SEQ ID NO: 52719 - DNA, 15 bp, Homo sapiens
gtgattcaaccttgg

SEQ ID NO: 52720 - DNA, 15 bp, Homo sapiens
cgtgattcaaccttg

SEQ ID NO: 52721 - DNA, 15 bp, Homo sapiens
ccgtgattcaacctt

SEQ ID NO: 52722 - DNA, 15 bp, Homo sapiens
tccgtgattcaacct

SEQ ID NO: 52723 - DNA, 15 bp, Homo sapiens
ctccgtgattcaacc

SEQ ID NO: 52724 - DNA, 15 bp, Homo sapiens
tctccgtgattcaac

SEQ ID NO: 52725 - DNA, 15 bp, Homo sapiens
ttctccgtgattcaa

SEQ ID NO: 52726 - DNA, 15 bp, Homo sapiens
tttctccgtgattca

SEQ ID NO: 52727 - DNA, 15 bp, Homo sapiens
atttctccgtgattc

SEQ ID NO: 52728 - DNA, 15 bp, Homo sapiens
tatttctccgtgatt

SEQ ID NO: 52729 - DNA, 15 bp, Homo sapiens
ttatttctccgtgat

SEQ ID NO: 52730 - DNA, 15 bp, Homo sapiens
tttatttctccgtga

SEQ ID NO: 52731 - DNA, 15 bp, Homo sapiens
ctttatttctccgtg

SEQ ID NO: 52732 - DNA, 15 bp, Homo sapiens
tctttatttctccgt

SEQ ID NO: 52733 - DNA, 15 bp, Homo sapiens
ctctttatttctccg

SEQ ID NO: 52734 - DNA, 15 bp, Homo sapiens
tctctttatttctcc

SEQ ID NO: 52735 - DNA, 15 bp, Homo sapiens
ttctctttatttctc

SEQ ID NO: 52736 - DNA, 15 bp, Homo sapiens
tttctctttatttct

SEQ ID NO: 52737 - DNA, 15 bp, Homo sapiens
atttctctttatttc

SEQ ID NO: 52738 - DNA, 15 bp, Homo sapiens
tatttctctttattt

SEQ ID NO: 52739 - DNA, 15 bp, Homo sapiens
ttatttctctttatt

SEQ ID NO: 52740 - DNA, 15 bp, Homo sapiens
tttatttctctttat

SEQ ID NO: 52741 - DNA, 15 bp, Homo sapiens
atttatttctcttta

SEQ ID NO: 52742 - DNA, 15 bp, Homo sapiens
gatttatttctcttt

SEQ ID NO: 52743 - DNA, 15 bp, Homo sapiens
agatttatttctctt

SEQ ID NO: 52744 - DNA, 15 bp, Homo sapiens
cagatttatttctct

SEQ ID NO: 52745 - DNA, 15 bp, Homo sapiens
tcagatttatttctc

SEQ ID NO: 52746 - DNA, 15 bp, Homo sapiens
ttcagatttatttct

SEQ ID NO: 52747 - DNA, 15 bp, Homo sapiens
gttcagatttatttc

SEQ ID NO: 52748 - DNA, 15 bp, Homo sapiens
tgttcagatttattt

SEQ ID NO: 52749 - DNA, 15 bp, Homo sapiens
atgttcagatttatt

SEQ ID NO: 52750 - DNA, 15 bp, Homo sapiens
tatgttcagatttat

SEQ ID NO: 52751 - DNA, 15 bp, Homo sapiens
gtatgttcagattta

SEQ ID NO: 52752 - DNA, 15 bp, Homo sapiens
ggtatgttcagattt

SEQ ID NO: 52753 - DNA, 15 bp, Homo sapiens
tggtatgttcagatt

SEQ ID NO: 52754 - DNA, 15 bp, Homo sapiens
ttggtatgttcagat

SEQ ID NO: 52755 - DNA, 15 bp, Homo sapiens
attggtatgttcaga

SEQ ID NO: 52756 - DNA, 15 bp, Homo sapiens
tattggtatgttcag

SEQ ID NO: 52757 - DNA, 15 bp, Homo sapiens
ttattggtatgttca

SEQ ID NO: 52758 - DNA, 15 bp, Homo sapiens
attattggtatgttc

SEQ ID NO: 52759 - DNA, 15 bp, Homo sapiens
cattattggtatgtt

SEQ ID NO: 52760 - DNA, 15 bp, Homo sapiens
tcattattggtatgt

SEQ ID NO: 52761 - DNA, 15 bp, Homo sapiens
ctcattattggtatg

SEQ ID NO: 52762 - DNA, 15 bp, Homo sapiens
actcattattggtat

SEQ ID NO: 52763 - DNA, 15 bp, Homo sapiens
tactcattattggta

SEQ ID NO: 52764 - DNA, 15 bp, Homo sapiens
ttactcattattggt

SEQ ID NO: 52765 - DNA, 15 bp, Homo sapiens
cttactcattattgg

SEQ ID NO: 52766 - DNA, 15 bp, Homo sapiens
ccttactcattattg

SEQ ID NO: 52767 - DNA, 15 bp, Homo sapiens
tccttactcattatt

SEQ ID NO: 52768 - DNA, 15 bp, Homo sapiens
ctccttactcattat

SEQ ID NO: 52769 - DNA, 15 bp, Homo sapiens
tctccttactcatta

SEQ ID NO: 52770 - DNA, 15 bp, Homo sapiens
atctccttactcatt

SEQ ID NO: 52771 - DNA, 15 bp, Homo sapiens
aatctccttactcat

SEQ ID NO: 52772 - DNA, 15 bp, Homo sapiens
caatctccttactca

SEQ ID NO: 52773 - DNA, 15 bp, Homo sapiens
tcaatctccttactc

SEQ ID NO: 52774 - DNA, 15 bp, Homo sapiens
ttcaatctccttact

SEQ ID NO: 52775 - DNA, 15 bp, Homo sapiens
attcaatctccttac

SEQ ID NO: 52776 - DNA, 15 bp, Homo sapiens
gattcaatctcctta

SEQ ID NO: 52777 - DNA, 15 bp, Homo sapiens
tgattcaatctcctt

SEQ ID NO: 52778 - DNA, 15 bp, Homo sapiens
ctgattcaatctcct

SEQ ID NO: 52779 - DNA, 15 bp, Homo sapiens
actgattcaatctcc

SEQ ID NO: 52780 - DNA, 15 bp, Homo sapiens
tactgattcaatctc

SEQ ID NO: 52781 - DNA, 15 bp, Homo sapiens
ttactgattcaatct

SEQ ID NO: 52782 - DNA, 15 bp, Homo sapiens
attactgattcaatc

SEQ ID NO: 52783 - DNA, 15 bp, Homo sapiens
tattactgattcaat

SEQ ID NO: 52784 - DNA, 15 bp, Homo sapiens
ttattactgattcaa

SEQ ID NO: 52785 - DNA, 15 bp, Homo sapiens
tttattactgattca

SEQ ID NO: 52786 - DNA, 15 bp, Homo sapiens
ttttattactgattc

SEQ ID NO: 52787 - DNA, 15 bp, Homo sapiens
tttttattactgatt

SEQ ID NO: 52788 - DNA, 15 bp, Homo sapiens
ctttttattactgat

SEQ ID NO: 52789 - DNA, 15 bp, Homo sapiens
actttttattactga

SEQ ID NO: 52790 - DNA, 15 bp, Homo sapiens
gactttttattactg

SEQ ID NO: 52791 - DNA, 15 bp, Homo sapiens
agactttttattact

SEQ ID NO: 52792 - DNA, 15 bp, Homo sapiens
gagactttttattac

SEQ ID NO: 52793 - DNA, 15 bp, Homo sapiens
ggagactttttatta

SEQ ID NO: 52794 - DNA, 15 bp, Homo sapiens
gggagactttttatt

SEQ ID NO: 52795 - DNA, 15 bp, Homo sapiens
tgggagactttttat

SEQ ID NO: 52796 - DNA, 15 bp, Homo sapiens
atgggagacttttta

SEQ ID NO: 52797 - DNA, 15 bp, Homo sapiens
catgggagacttttt

SEQ ID NO: 52798 - DNA, 15 bp, Homo sapiens
tcatgggagactttt

SEQ ID NO: 52799 - DNA, 15 bp, Homo sapiens
ttcatgggagacttt

SEQ ID NO: 52800 - DNA, 15 bp, Homo sapiens
tttcatgggagactt

SEQ ID NO: 52801 - DNA, 15 bp, Homo sapiens
ctttcatgggagact

SEQ ID NO: 52802 - DNA, 15 bp, Homo sapiens
tctttcatgggagac

SEQ ID NO: 52803 - DNA, 15 bp, Homo sapiens
ttctttcatgggaga

SEQ ID NO: 52804 - DNA, 15 bp, Homo sapiens
tttctttcatgggag

SEQ ID NO: 52805 - DNA, 15 bp, Homo sapiens
ttttctttcatggga

SEQ ID NO: 52806 - DNA, 15 bp, Homo sapiens
cttttctttcatggg

SEQ ID NO: 52807 - DNA, 15 bp, Homo sapiens
gcttttctttcatgg

SEQ ID NO: 52808 - DNA, 15 bp, Homo sapiens
ggcttttctttcatg

SEQ ID NO: 52809 - DNA, 15 bp, Homo sapiens
gggcttttctttcat

SEQ ID NO: 52810 - DNA, 15 bp, Homo sapiens
tgggcttttctttca

SEQ ID NO: 52811 - DNA, 15 bp, Homo sapiens
ctgggcttttctttc

SEQ ID NO: 52812 - DNA, 15 bp, Homo sapiens
cctgggcttttcttt

SEQ ID NO: 52813 - DNA, 15 bp, Homo sapiens
tcctgggcttttctt

SEQ ID NO: 52814 - DNA, 15 bp, Homo sapiens
gtcctgggcttttct

SEQ ID NO: 52815 - DNA, 15 bp, Homo sapiens
ggtcctgggcttttc

SEQ ID NO: 52816 - DNA, 15 bp, Homo sapiens
aggtcctgggctttt

SEQ ID NO: 52817 - DNA, 15 bp, Homo sapiens
caggtcctgggcttt

SEQ ID NO: 52818 - DNA, 15 bp, Homo sapiens
tcaggtcctgggctt

SEQ ID NO: 52819 - DNA, 15 bp, Homo sapiens
atcaggtcctgggct

SEQ ID NO: 52820 - DNA, 15 bp, Homo sapiens
tatcaggtcctgggc

SEQ ID NO: 52821 - DNA, 15 bp, Homo sapiens
ctatcaggtcctggg

SEQ ID NO: 52822 - DNA, 15 bp, Homo sapiens
gctatcaggtcctgg

SEQ ID NO: 52823 - DNA, 15 bp, Homo sapiens
agctatcaggtcctg

SEQ ID NO: 52824 - DNA, 15 bp, Homo sapiens
aagctatcaggtcct

SEQ ID NO: 52825 - DNA, 15 bp, Homo sapiens
gaagctatcaggtcc

SEQ ID NO: 52826 - DNA, 15 bp, Homo sapiens
tgaagctatcaggtc

SEQ ID NO: 52827 - DNA, 15 bp, Homo sapiens
atgaagctatcaggt

SEQ ID NO: 52828 - DNA, 15 bp, Homo sapiens
aatgaagctatcagg

SEQ ID NO: 52829 - DNA, 15 bp, Homo sapiens
caatgaagctatcag

SEQ ID NO: 52830 - DNA, 15 bp, Homo sapiens
gcaatgaagctatca

SEQ ID NO: 52831 - DNA, 15 bp, Homo sapiens
agcaatgaagctatc

SEQ ID NO: 52832 - DNA, 15 bp, Homo sapiens
cagcaatgaagctat

SEQ ID NO: 52833 - DNA, 15 bp, Homo sapiens
tcagcaatgaagcta

SEQ ID NO: 52834 - DNA, 15 bp, Homo sapiens
ttcagcaatgaagct

SEQ ID NO: 52835 - DNA, 15 bp, Homo sapiens
attcagcaatgaagc

SEQ ID NO: 52836 - DNA, 15 bp, Homo sapiens
aattcagcaatgaag

SEQ ID NO: 52837 - DNA, 15 bp, Homo sapiens
aaattcagcaatgaa

SEQ ID NO: 52838 - DNA, 15 bp, Homo sapiens
aaaattcagcaatga

SEQ ID NO: 52839 - DNA, 15 bp, Homo sapiens
taaaattcagcaatg

SEQ ID NO: 52840 - DNA, 15 bp, Homo sapiens
gtaaaattcagcaat

SEQ ID NO: 52841 - DNA, 15 bp, Homo sapiens
ggtaaaattcagcaa

SEQ ID NO: 52842 - DNA, 15 bp, Homo sapiens
tggtaaaattcagca

SEQ ID NO: 52843 - DNA, 15 bp, Homo sapiens
ctggtaaaattcagc

SEQ ID NO: 52844 - DNA, 15 bp, Homo sapiens
tctggtaaaattcag

SEQ ID NO: 52845 - DNA, 15 bp, Homo sapiens
gtctggtaaaattca

SEQ ID NO: 52846 - DNA, 15 bp, Homo sapiens
tgtctggtaaaattc

SEQ ID NO: 52847 - DNA, 15 bp, Homo sapiens
atgtctggtaaaatt

SEQ ID NO: 52848 - DNA, 15 bp, Homo sapiens
aatgtctggtaaaat

SEQ ID NO: 52849 - DNA, 15 bp, Homo sapiens
aaatgtctggtaaaa

SEQ ID NO: 52850 - DNA, 15 bp, Homo sapiens
taaatgtctggtaaa

SEQ ID NO: 52851 - DNA, 15 bp, Homo sapiens
ttaaatgtctggtaa

SEQ ID NO: 52852 - DNA, 15 bp, Homo sapiens
tttaaatgtctggta

SEQ ID NO: 52853 - DNA, 15 bp, Homo sapiens
ctttaaatgtctggt

SEQ ID NO: 52854 - DNA, 15 bp, Homo sapiens
tctttaaatgtctgg

SEQ ID NO: 52855 - DNA, 15 bp, Homo sapiens
ttctttaaatgtctg

SEQ ID NO: 52856 - DNA, 15 bp, Homo sapiens
tttctttaaatgtct

SEQ ID NO: 52857 - DNA, 15 bp, Homo sapiens
ttttctttaaatgtc

SEQ ID NO: 52858 - DNA, 15 bp, Homo sapiens
tttttctttaaatgt

SEQ ID NO: 52859 - DNA, 15 bp, Homo sapiens
gtttttctttaaatg

SEQ ID NO: 52860 - DNA, 15 bp, Homo sapiens
agtttttctttaaat

SEQ ID NO: 52861 - DNA, 15 bp, Homo sapiens
tagtttttctttaaa

SEQ ID NO: 52862 - DNA, 15 bp, Homo sapiens
ctagtttttctttaa

SEQ ID NO: 52863 - DNA, 15 bp, Homo sapiens
actagtttttcttta

SEQ ID NO: 52864 - DNA, 15 bp, Homo sapiens
tactagtttttcttt

SEQ ID NO: 52865 - DNA, 15 bp, Homo sapiens
gtactagtttttctt

SEQ ID NO: 52866 - DNA, 15 bp, Homo sapiens
ggtactagtttttct

SEQ ID NO: 52867 - DNA, 15 bp, Homo sapiens
tggtactagtttttc

SEQ ID NO: 52868 - DNA, 15 bp, Homo sapiens
ctggtactagttttt

SEQ ID NO: 52869 - DNA, 15 bp, Homo sapiens
actggtactagtttt

SEQ ID NO: 52870 - DNA, 15 bp, Homo sapiens
gactggtactagttt

SEQ ID NO: 52871 - DNA, 15 bp, Homo sapiens
ggactggtactagtt

SEQ ID NO: 52872 - DNA, 15 bp, Homo sapiens
aggactggtactagt

SEQ ID NO: 52873 - DNA, 15 bp, Homo sapiens
gaggactggtactag

SEQ ID NO: 52874 - DNA, 15 bp, Homo sapiens
ggaggactggtacta

SEQ ID NO: 52875 - DNA, 15 bp, Homo sapiens
aggaggactggtact

SEQ ID NO: 52876 - DNA, 15 bp, Homo sapiens
gaggaggactggtac

SEQ ID NO: 52877 - DNA, 15 bp, Homo sapiens
tgaggaggactggta

SEQ ID NO: 52878 - DNA, 15 bp, Homo sapiens
ttgaggaggactggt

SEQ ID NO: 52879 - DNA, 15 bp, Homo sapiens
tttgaggaggactgg

SEQ ID NO: 52880 - DNA, 15 bp, Homo sapiens
atttgaggaggactg

SEQ ID NO: 52881 - DNA, 15 bp, Homo sapiens
aatttgaggaggact

SEQ ID NO: 52882 - DNA, 15 bp, Homo sapiens
gaatttgaggaggac

SEQ ID NO: 52883 - DNA, 15 bp, Homo sapiens
agaatttgaggagga

SEQ ID NO: 52884 - DNA, 15 bp, Homo sapiens
aagaatttgaggagg

SEQ ID NO: 52885 - DNA, 15 bp, Homo sapiens
gaagaatttgaggag

SEQ ID NO: 52886 - DNA, 15 bp, Homo sapiens
ggaagaatttgagga

SEQ ID NO: 52887 - DNA, 15 bp, Homo sapiens
tggaagaatttgagg

SEQ ID NO: 52888 - DNA, 15 bp, Homo sapiens
gtggaagaatttgag

SEQ ID NO: 52889 - DNA, 15 bp, Homo sapiens
tgtggaagaatttga

SEQ ID NO: 52890 - DNA, 15 bp, Homo sapiens
ttgtggaagaatttg

SEQ ID NO: 52891 - DNA, 15 bp, Homo sapiens
tttgtggaagaattt

SEQ ID NO: 52892 - DNA, 15 bp, Homo sapiens
ttttgtggaagaatt

SEQ ID NO: 52893 - DNA, 15 bp, Homo sapiens
attttgtggaagaat

SEQ ID NO: 52894 - DNA, 15 bp, Homo sapiens
aattttgtggaagaa

SEQ ID NO: 52895 - DNA, 15 bp, Homo sapiens
taattttgtggaaga

SEQ ID NO: 52896 - DNA, 15 bp, Homo sapiens
ttaattttgtggaag

SEQ ID NO: 52897 - DNA, 15 bp, Homo sapiens
tttaattttgtggaa

SEQ ID NO: 52898 - DNA, 15 bp, Homo sapiens
ctttaattttgtgga

SEQ ID NO: 52899 - DNA, 15 bp, Homo sapiens
gctttaattttgtgg

SEQ ID NO: 52900 - DNA, 15 bp, Homo sapiens
cgctttaattttgtg

SEQ ID NO: 52901 - DNA, 15 bp, Homo sapiens
ccgctttaattttgt

SEQ ID NO: 52902 - DNA, 15 bp, Homo sapiens
tccgctttaattttg

SEQ ID NO: 52903 - DNA, 15 bp, Homo sapiens
ctccgctttaatttt

SEQ ID NO: 52904 - DNA, 15 bp, Homo sapiens
cctccgctttaattt

SEQ ID NO: 52905 - DNA, 15 bp, Homo sapiens
ccctccgctttaatt

SEQ ID NO: 52906 - DNA, 15 bp, Homo sapiens
tccctccgctttaat

SEQ ID NO: 52907 - DNA, 15 bp, Homo sapiens
ttccctccgctttaa

SEQ ID NO: 52908 - DNA, 15 bp, Homo sapiens
attccctccgcttta

SEQ ID NO: 52909 - DNA, 15 bp, Homo sapiens
tattccctccgcttt

SEQ ID NO: 52910 - DNA, 15 bp, Homo sapiens
gtattccctccgctt

SEQ ID NO: 52911 - DNA, 15 bp, Homo sapiens
agtattccctccgct

SEQ ID NO: 52912 - DNA, 15 bp, Homo sapiens
aagtattccctccgc

SEQ ID NO: 52913 - DNA, 15 bp, Homo sapiens
gaagtattccctccg

SEQ ID NO: 52914 - DNA, 15 bp, Homo sapiens
tgaagtattccctcc

SEQ ID NO: 52915 - DNA, 15 bp, Homo sapiens
gtgaagtattccctc

SEQ ID NO: 52916 - DNA, 15 bp, Homo sapiens
tgtgaagtattccct

SEQ ID NO: 52917 - DNA, 15 bp, Homo sapiens
gtgtgaagtattccc

SEQ ID NO: 52918 - DNA, 15 bp, Homo sapiens
agtgtgaagtattcc

SEQ ID NO: 52919 - DNA, 15 bp, Homo sapiens
gagtgtgaagtattc

SEQ ID NO: 52920 - DNA, 15 bp, Homo sapiens
tgagtgtgaagtatt

SEQ ID NO: 52921 - DNA, 15 bp, Homo sapiens
atgagtgtgaagtat

SEQ ID NO: 52922 - DNA, 15 bp, Homo sapiens
aatgagtgtgaagta

SEQ ID NO: 52923 - DNA, 15 bp, Homo sapiens
aaatgagtgtgaagt

SEQ ID NO: 52924 - DNA, 15 bp, Homo sapiens
aaaatgagtgtgaag

SEQ ID NO: 52925 - DNA, 15 bp, Homo sapiens
taaaatgagtgtgaa

SEQ ID NO: 52926 - DNA, 15 bp, Homo sapiens
gtaaaatgagtgtga

SEQ ID NO: 52927 - DNA, 15 bp, Homo sapiens
tgtaaaatgagtgtg

SEQ ID NO: 52928 - DNA, 15 bp, Homo sapiens
ttgtaaaatgagtgt

SEQ ID NO: 52929 - DNA, 15 bp, Homo sapiens
cttgtaaaatgagtg

SEQ ID NO: 52930 - DNA, 15 bp, Homo sapiens
ccttgtaaaatgagt

SEQ ID NO: 52931 - DNA, 15 bp, Homo sapiens
gccttgtaaaatgag

SEQ ID NO: 52932 - DNA, 15 bp, Homo sapiens
ggccttgtaaaatga

SEQ ID NO: 52933 - DNA, 15 bp, Homo sapiens
tggccttgtaaaatg

SEQ ID NO: 52934 - DNA, 15 bp, Homo sapiens
ttggccttgtaaaat

SEQ ID NO: 52935 - DNA, 15 bp, Homo sapiens
attggccttgtaaaa

SEQ ID NO: 52936 - DNA, 15 bp, Homo sapiens
tattggccttgtaaa

SEQ ID NO: 52937 - DNA, 15 bp, Homo sapiens
atattggccttgtaa

SEQ ID NO: 52938 - DNA, 15 bp, Homo sapiens
aatattggccttgta

SEQ ID NO: 52939 - DNA, 15 bp, Homo sapiens
taatattggccttgt

SEQ ID NO: 52940 - DNA, 15 bp, Homo sapiens
gtaatattggccttg

SEQ ID NO: 52941 - DNA, 15 bp, Homo sapiens
ggtaatattggcctt

SEQ ID NO: 52942 - DNA, 15 bp, Homo sapiens
aggtaatattggcct

SEQ ID NO: 52943 - DNA, 15 bp, Homo sapiens
aaggtaatattggcc

SEQ ID NO: 52944 - DNA, 15 bp, Homo sapiens
caaggtaatattggc

SEQ ID NO: 52945 - DNA, 15 bp, Homo sapiens
tcaaggtaatattgg

SEQ ID NO: 52946 - DNA, 15 bp, Homo sapiens
atcaaggtaatattg

SEQ ID NO: 52947 - DNA, 15 bp, Homo sapiens
tatcaaggtaatatt

SEQ ID NO: 52948 - DNA, 15 bp, Homo sapiens
gtatcaaggtaatat

SEQ ID NO: 52949 - DNA, 15 bp, Homo sapiens
ggtatcaaggtaata

SEQ ID NO: 52950 - DNA, 15 bp, Homo sapiens
tggtatcaaggtaat

SEQ ID NO: 52951 - DNA, 15 bp, Homo sapiens
ttggtatcaaggtaa

SEQ ID NO: 52952 - DNA, 15 bp, Homo sapiens
tttggtatcaaggta

SEQ ID NO: 52953 - DNA, 15 bp, Homo sapiens
ctttggtatcaaggt

SEQ ID NO: 52954 - DNA, 15 bp, Homo sapiens
gctttggtatcaagg

SEQ ID NO: 52955 - DNA, 15 bp, Homo sapiens
ggctttggtatcaag

SEQ ID NO: 52956 - DNA, 15 bp, Homo sapiens
tggctttggtatcaa

SEQ ID NO: 52957 - DNA, 15 bp, Homo sapiens
ctggctttggtatca

SEQ ID NO: 52958 - DNA, 15 bp, Homo sapiens
tctggctttggtatc

SEQ ID NO: 52959 - DNA, 15 bp, Homo sapiens
ttctggctttggtat

SEQ ID NO: 52960 - DNA, 15 bp, Homo sapiens
tttctggctttggta

SEQ ID NO: 52961 - DNA, 15 bp, Homo sapiens
ttttctggctttggt

SEQ ID NO: 52962 - DNA, 15 bp, Homo sapiens
cttttctggctttgg

SEQ ID NO: 52963 - DNA, 15 bp, Homo sapiens
ccttttctggctttg

SEQ ID NO: 52964 - DNA, 15 bp, Homo sapiens
tccttttctggcttt

SEQ ID NO: 52965 - DNA, 15 bp, Homo sapiens
atccttttctggctt

SEQ ID NO: 52966 - DNA, 15 bp, Homo sapiens
tatccttttctggct

SEQ ID NO: 52967 - DNA, 15 bp, Homo sapiens
gtatccttttctggc

SEQ ID NO: 52968 - DNA, 15 bp, Homo sapiens
agtatccttttctgg

SEQ ID NO: 52969 - DNA, 15 bp, Homo sapiens
tagtatccttttctg

SEQ ID NO: 52970 - DNA, 15 bp, Homo sapiens
gtagtatccttttct

SEQ ID NO: 52971 - DNA, 15 bp, Homo sapiens
tgtagtatccttttc

SEQ ID NO: 52972 - DNA, 15 bp, Homo sapiens
ttgtagtatcctttt

SEQ ID NO: 52973 - DNA, 15 bp, Homo sapiens
cttgtagtatccttt

SEQ ID NO: 52974 - DNA, 15 bp, Homo sapiens
tcttgtagtatcctt

SEQ ID NO: 52975 - DNA, 15 bp, Homo sapiens
ttcttgtagtatcct

SEQ ID NO: 52976 - DNA, 15 bp, Homo sapiens
tttcttgtagtatcc

SEQ ID NO: 52977 - DNA, 15 bp, Homo sapiens
ttttcttgtagtatc

SEQ ID NO: 52978 - DNA, 15 bp, Homo sapiens
attttcttgtagtat

SEQ ID NO: 52979 - DNA, 15 bp, Homo sapiens
gattttcttgtagta

SEQ ID NO: 52980 - DNA, 15 bp, Homo sapiens
tgattttcttgtagt

SEQ ID NO: 52981 - DNA, 15 bp, Homo sapiens
ttgattttcttgtag

SEQ ID NO: 52982 - DNA, 15 bp, Homo sapiens
tttgattttcttgta

SEQ ID NO: 52983 - DNA, 15 bp, Homo sapiens
ctttgattttcttgt

SEQ ID NO: 52984 - DNA, 15 bp, Homo sapiens
cctttgattttcttg

SEQ ID NO: 52985 - DNA, 15 bp, Homo sapiens
gcctttgattttctt

SEQ ID NO: 52986 - DNA, 15 bp, Homo sapiens
ggcctttgattttct

SEQ ID NO: 52987 - DNA, 15 bp, Homo sapiens
tggcctttgattttc

SEQ ID NO: 52988 - DNA, 15 bp, Homo sapiens
ttggcctttgatttt

SEQ ID NO: 52989 - DNA, 15 bp, Homo sapiens
attggcctttgattt

SEQ ID NO: 52990 - DNA, 15 bp, Homo sapiens
tattggcctttgatt

SEQ ID NO: 52991 - DNA, 15 bp, Homo sapiens
atattggcctttgat

SEQ ID NO: 52992 - DNA, 15 bp, Homo sapiens
gatattggcctttga

SEQ ID NO: 52993 - DNA, 15 bp, Homo sapiens
ggatattggcctttg

SEQ ID NO: 52994 - DNA, 15 bp, Homo sapiens
tggatattggccttt

SEQ ID NO: 52995 - DNA, 15 bp, Homo sapiens
atggatattggcctt

SEQ ID NO: 52996 - DNA, 15 bp, Homo sapiens
catggatattggcct

SEQ ID NO: 52997 - DNA, 15 bp, Homo sapiens
tcatggatattggcc

SEQ ID NO: 52998 - DNA, 15 bp, Homo sapiens
atcatggatattggc

SEQ ID NO: 52999 - DNA, 15 bp, Homo sapiens
tatcatggatattgg

SEQ ID NO: 53000 - DNA, 15 bp, Homo sapiens
ttatcatggatattg

SEQ ID NO: 53001 - DNA, 15 bp, Homo sapiens
tttatcatggatatt

SEQ ID NO: 53002 - DNA, 15 bp, Homo sapiens
gtttatcatggatat

SEQ ID NO: 53003 - DNA, 15 bp, Homo sapiens
tgtttatcatggata

SEQ ID NO: 53004 - DNA, 15 bp, Homo sapiens
atgtttatcatggat

SEQ ID NO: 53005 - DNA, 15 bp, Homo sapiens
catgtttatcatgga

SEQ ID NO: 53006 - DNA, 15 bp, Homo sapiens
ccatgtttatcatgg

SEQ ID NO: 53007 - DNA, 15 bp, Homo sapiens
tccatgtttatcatg

SEQ ID NO: 53008 - DNA, 15 bp, Homo sapiens
gtccatgtttatcat

SEQ ID NO: 53009 - DNA, 15 bp, Homo sapiens
cgtccatgtttatca

SEQ ID NO: 53010 - DNA, 15 bp, Homo sapiens
acgtccatgtttatc

SEQ ID NO: 53011 - DNA, 15 bp, Homo sapiens
cacgtccatgtttat

SEQ ID NO: 53012 - DNA, 15 bp, Homo sapiens
tcacgtccatgttta

SEQ ID NO: 53013 - DNA, 15 bp, Homo sapiens
ttcacgtccatgttt

SEQ ID NO: 53014 - DNA, 15 bp, Homo sapiens
tttcacgtccatgtt

SEQ ID NO: 53015 - DNA, 15 bp, Homo sapiens
ttttcacgtccatgt

SEQ ID NO: 53016 - DNA, 15 bp, Homo sapiens
attttcacgtccatg

SEQ ID NO: 53017 - DNA, 15 bp, Homo sapiens
cattttcacgtccat

SEQ ID NO: 53018 - DNA, 15 bp, Homo sapiens
gcattttcacgtcca

SEQ ID NO: 53019 - DNA, 15 bp, Homo sapiens
agcattttcacgtcc

SEQ ID NO: 53020 - DNA, 15 bp, Homo sapiens
gagcattttcacgtc

SEQ ID NO: 53021 - DNA, 15 bp, Homo sapiens
tgagcattttcacgt

SEQ ID NO: 53022 - DNA, 15 bp, Homo sapiens
ttgagcattttcacg

SEQ ID NO: 53023 - DNA, 15 bp, Homo sapiens
gttgagcattttcac

SEQ ID NO: 53024 - DNA, 15 bp, Homo sapiens
tgttgagcattttca

SEQ ID NO: 53025 - DNA, 15 bp, Homo sapiens
ttgttgagcattttc

SEQ ID NO: 53026 - DNA, 15 bp, Homo sapiens
tttgttgagcatttt

SEQ ID NO: 53027 - DNA, 15 bp, Homo sapiens
ttttgttgagcattt

SEQ ID NO: 53028 - DNA, 15 bp, Homo sapiens
tttttgttgagcatt

SEQ ID NO: 53029 - DNA, 15 bp, Homo sapiens
atttttgttgagcat

SEQ ID NO: 53030 - DNA, 15 bp, Homo sapiens
tatttttgttgagca

SEQ ID NO: 53031 - DNA, 15 bp, Homo sapiens
gtatttttgttgagc

SEQ ID NO: 53032 - DNA, 15 bp, Homo sapiens
agtatttttgttgag

SEQ ID NO: 53033 - DNA, 15 bp, Homo sapiens
tagtatttttgttga

SEQ ID NO: 53034 - DNA, 15 bp, Homo sapiens
ctagtatttttgttg

SEQ ID NO: 53035 - DNA, 15 bp, Homo sapiens
actagtatttttgtt

SEQ ID NO: 53036 - DNA, 15 bp, Homo sapiens
tactagtatttttgt

SEQ ID NO: 53037 - DNA, 15 bp, Homo sapiens
ttactagtatttttg

SEQ ID NO: 53038 - DNA, 15 bp, Homo sapiens
tttactagtattttt

SEQ ID NO: 53039 - DNA, 15 bp, Homo sapiens
gtttactagtatttt

SEQ ID NO: 53040 - DNA, 15 bp, Homo sapiens
ggtttactagtattt

SEQ ID NO: 53041 - DNA, 15 bp, Homo sapiens
tggtttactagtatt

SEQ ID NO: 53042 - DNA, 15 bp, Homo sapiens
ttggtttactagtat

SEQ ID NO: 53043 - DNA, 15 bp, Homo sapiens
tttggtttactagta

SEQ ID NO: 53044 - DNA, 15 bp, Homo sapiens
atttggtttactagt

SEQ ID NO: 53045 - DNA, 15 bp, Homo sapiens
aatttggtttactag

SEQ ID NO: 53046 - DNA, 15 bp, Homo sapiens
caatttggtttacta

SEQ ID NO: 53047 - DNA, 15 bp, Homo sapiens
tcaatttggtttact

SEQ ID NO: 53048 - DNA, 15 bp, Homo sapiens
ttcaatttggtttac

SEQ ID NO: 53049 - DNA, 15 bp, Homo sapiens
attcaatttggttta

SEQ ID NO: 53050 - DNA, 15 bp, Homo sapiens
tattcaatttggttt

SEQ ID NO: 53051 - DNA, 15 bp, Homo sapiens
ctattcaatttggtt

SEQ ID NO: 53052 - DNA, 15 bp, Homo sapiens
gctattcaatttggt

SEQ ID NO: 53053 - DNA, 15 bp, Homo sapiens
tgctattcaatttgg

SEQ ID NO: 53054 - DNA, 15 bp, Homo sapiens
gtgctattcaatttg

SEQ ID NO: 53055 - DNA, 15 bp, Homo sapiens
tgtgctattcaattt

SEQ ID NO: 53056 - DNA, 15 bp, Homo sapiens
atgtgctattcaatt

SEQ ID NO: 53057 - DNA, 15 bp, Homo sapiens
aatgtgctattcaat

SEQ ID NO: 53058 - DNA, 15 bp, Homo sapiens
taatgtgctattcaa

SEQ ID NO: 53059 - DNA, 15 bp, Homo sapiens
ttaatgtgctattca

SEQ ID NO: 53060 - DNA, 15 bp, Homo sapiens
tttaatgtgctattc

SEQ ID NO: 53061 - DNA, 15 bp, Homo sapiens
ttttaatgtgctatt

SEQ ID NO: 53062 - DNA, 15 bp, Homo sapiens
cttttaatgtgctat

SEQ ID NO: 53063 - DNA, 15 bp, Homo sapiens
tcttttaatgtgcta

SEQ ID NO: 53064 - DNA, 15 bp, Homo sapiens
ttcttttaatgtgct

SEQ ID NO: 53065 - DNA, 15 bp, Homo sapiens
attcttttaatgtgc

SEQ ID NO: 53066 - DNA, 15 bp, Homo sapiens
gattcttttaatgtg

SEQ ID NO: 53067 - DNA, 15 bp, Homo sapiens
tgattcttttaatgt

SEQ ID NO: 53068 - DNA, 15 bp, Homo sapiens
atgattcttttaatg

SEQ ID NO: 53069 - DNA, 15 bp, Homo sapiens
aatgattcttttaat

SEQ ID NO: 53070 - DNA, 15 bp, Homo sapiens
gaatgattcttttaa

SEQ ID NO: 53071 - DNA, 15 bp, Homo sapiens
tgaatgattctttta

SEQ ID NO: 53072 - DNA, 15 bp, Homo sapiens
gtgaatgattctttt

SEQ ID NO: 53073 - DNA, 15 bp, Homo sapiens
ggtgaatgattcttt

SEQ ID NO: 53074 - DNA, 15 bp, Homo sapiens
tggtgaatgattctt

SEQ ID NO: 53075 - DNA, 15 bp, Homo sapiens
atggtgaatgattct

SEQ ID NO: 53076 - DNA, 15 bp, Homo sapiens
catggtgaatgattc

SEQ ID NO: 53077 - DNA, 15 bp, Homo sapiens
tcatggtgaatgatt

SEQ ID NO: 53078 - DNA, 15 bp, Homo sapiens
atcatggtgaatgat

SEQ ID NO: 53079 - DNA, 15 bp, Homo sapiens
gatcatggtgaatga

SEQ ID NO: 53080 - DNA, 15 bp, Homo sapiens
tgatcatggtgaatg

SEQ ID NO: 53081 - DNA, 15 bp, Homo sapiens
ttgatcatggtgaat

SEQ ID NO: 53082 - DNA, 15 bp, Homo sapiens
cttgatcatggtgaa

SEQ ID NO: 53083 - DNA, 15 bp, Homo sapiens
acttgatcatggtga

SEQ ID NO: 53084 - DNA, 15 bp, Homo sapiens
cacttgatcatggtg

SEQ ID NO: 53085 - DNA, 15 bp, Homo sapiens
tcacttgatcatggt

SEQ ID NO: 53086 - DNA, 15 bp, Homo sapiens
ctcacttgatcatgg

SEQ ID NO: 53087 - DNA, 15 bp, Homo sapiens
tctcacttgatcatg

SEQ ID NO: 53088 - DNA, 15 bp, Homo sapiens
atctcacttgatcat

SEQ ID NO: 53089 - DNA, 15 bp, Homo sapiens
aatctcacttgatca

SEQ ID NO: 53090 - DNA, 15 bp, Homo sapiens
aaatctcacttgatc

SEQ ID NO: 53091 - DNA, 15 bp, Homo sapiens
taaatctcacttgat

SEQ ID NO: 53092 - DNA, 15 bp, Homo sapiens
ataaatctcacttga

SEQ ID NO: 53093 - DNA, 15 bp, Homo sapiens
gataaatctcacttg

SEQ ID NO: 53094 - DNA, 15 bp, Homo sapiens
ggataaatctcactt

SEQ ID NO: 53095 - DNA, 15 bp, Homo sapiens
gggataaatctcact

SEQ ID NO: 53096 - DNA, 15 bp, Homo sapiens
agggataaatctcac

SEQ ID NO: 53097 - DNA, 15 bp, Homo sapiens
tagggataaatctca

SEQ ID NO: 53098 - DNA, 15 bp, Homo sapiens
ctagggataaatctc

SEQ ID NO: 53099 - DNA, 15 bp, Homo sapiens
cctagggataaatct

SEQ ID NO: 53100 - DNA, 15 bp, Homo sapiens
tcctagggataaatc

SEQ ID NO: 53101 - DNA, 15 bp, Homo sapiens
atcctagggataaat

SEQ ID NO: 53102 - DNA, 15 bp, Homo sapiens
catcctagggataaa

SEQ ID NO: 53103 - DNA, 15 bp, Homo sapiens
acatcctagggataa

SEQ ID NO: 53104 - DNA, 15 bp, Homo sapiens
tacatcctagggata

SEQ ID NO: 53105 - DNA, 15 bp, Homo sapiens
ttacatcctagggat

SEQ ID NO: 53106 - DNA, 15 bp, Homo sapiens
cttacatcctaggga

SEQ ID NO: 53107 - DNA, 15 bp, Homo sapiens
ccttacatcctaggg

SEQ ID NO: 53108 - DNA, 15 bp, Homo sapiens
tccttacatcctagg

SEQ ID NO: 53109 - DNA, 15 bp, Homo sapiens
atccttacatcctag

SEQ ID NO: 53110 - DNA, 15 bp, Homo sapiens
catccttacatccta

SEQ ID NO: 53111 - DNA, 15 bp, Homo sapiens
ccatccttacatcct

SEQ ID NO: 53112 - DNA, 15 bp, Homo sapiens
accatccttacatcc

SEQ ID NO: 53113 - DNA, 15 bp, Homo sapiens
aaccatccttacatc

SEQ ID NO: 53114 - DNA, 15 bp, Homo sapiens
gaaccatccttacat

SEQ ID NO: 53115 - DNA, 15 bp, Homo sapiens
tgaaccatccttaca

SEQ ID NO: 53116 - DNA, 15 bp, Homo sapiens
ttgaaccatccttac

SEQ ID NO: 53117 - DNA, 15 bp, Homo sapiens
gttgaaccatcctta

SEQ ID NO: 53118 - DNA, 15 bp, Homo sapiens
tgttgaaccatcctt

SEQ ID NO: 53119 - DNA, 15 bp, Homo sapiens
atgttgaaccatcct

SEQ ID NO: 53120 - DNA, 15 bp, Homo sapiens
tatgttgaaccatcc

SEQ ID NO: 53121 - DNA, 15 bp, Homo sapiens
ctatgttgaaccatc

SEQ ID NO: 53122 - DNA, 15 bp, Homo sapiens
cctatgttgaaccat

SEQ ID NO: 53123 - DNA, 15 bp, Homo sapiens
gcctatgttgaacca

SEQ ID NO: 53124 - DNA, 15 bp, Homo sapiens
tgcctatgttgaacc

SEQ ID NO: 53125 - DNA, 15 bp, Homo sapiens
atgcctatgttgaac

SEQ ID NO: 53126 - DNA, 15 bp, Homo sapiens
catgcctatgttgaa

SEQ ID NO: 53127 - DNA, 15 bp, Homo sapiens
acatgcctatgttga

SEQ ID NO: 53128 - DNA, 15 bp, Homo sapiens
gacatgcctatgttg

SEQ ID NO: 53129 - DNA, 15 bp, Homo sapiens
tgacatgcctatgtt

SEQ ID NO: 53130 - DNA, 15 bp, Homo sapiens
ttgacatgcctatgt

SEQ ID NO: 53131 - DNA, 15 bp, Homo sapiens
attgacatgcctatg

SEQ ID NO: 53132 - DNA, 15 bp, Homo sapiens
tattgacatgcctat

SEQ ID NO: 53133 - DNA, 15 bp, Homo sapiens
ttattgacatgccta

SEQ ID NO: 53134 - DNA, 15 bp, Homo sapiens
tttattgacatgcct

SEQ ID NO: 53135 - DNA, 15 bp, Homo sapiens
atttattgacatgcc

SEQ ID NO: 53136 - DNA, 15 bp, Homo sapiens
catttattgacatgc

SEQ ID NO: 53137 - DNA, 15 bp, Homo sapiens
acatttattgacatg

SEQ ID NO: 53138 - DNA, 15 bp, Homo sapiens
tacatttattgacat

SEQ ID NO: 53139 - DNA, 15 bp, Homo sapiens
ttacatttattgaca

SEQ ID NO: 53140 - DNA, 15 bp, Homo sapiens
attacatttattgac

SEQ ID NO: 53141 - DNA, 15 bp, Homo sapiens
tattacatttattga

SEQ ID NO: 53142 - DNA, 15 bp, Homo sapiens
atattacatttattg

SEQ ID NO: 53143 - DNA, 15 bp, Homo sapiens
tatattacatttatt

SEQ ID NO: 53144 - DNA, 15 bp, Homo sapiens
gtatattacatttat

SEQ ID NO: 53145 - DNA, 15 bp, Homo sapiens
ggtatattacattta

SEQ ID NO: 53146 - DNA, 15 bp, Homo sapiens
tggtatattacattt

SEQ ID NO: 53147 - DNA, 15 bp, Homo sapiens
gtggtatattacatt

SEQ ID NO: 53148 - DNA, 15 bp, Homo sapiens
tgtggtatattacat

SEQ ID NO: 53149 - DNA, 15 bp, Homo sapiens
atgtggtatattaca

SEQ ID NO: 53150 - DNA, 15 bp, Homo sapiens
aatgtggtatattac

SEQ ID NO: 53151 - DNA, 15 bp, Homo sapiens
taatgtggtatatta

SEQ ID NO: 53152 - DNA, 15 bp, Homo sapiens
ttaatgtggtatatt

SEQ ID NO: 53153 - DNA, 15 bp, Homo sapiens
gttaatgtggtatat

SEQ ID NO: 53154 - DNA, 15 bp, Homo sapiens
tgttaatgtggtata

SEQ ID NO: 53155 - DNA, 15 bp, Homo sapiens
ctgttaatgtggtat

SEQ ID NO: 53156 - DNA, 15 bp, Homo sapiens
tctgttaatgtggta

SEQ ID NO: 53157 - DNA, 15 bp, Homo sapiens
ttctgttaatgtggt

SEQ ID NO: 53158 - DNA, 15 bp, Homo sapiens
attctgttaatgtgg

SEQ ID NO: 53159 - DNA, 15 bp, Homo sapiens
cattctgttaatgtg

SEQ ID NO: 53160 - DNA, 15 bp, Homo sapiens
tcattctgttaatgt

SEQ ID NO: 53161 - DNA, 15 bp, Homo sapiens
ttcattctgttaatg

SEQ ID NO: 53162 - DNA, 15 bp, Homo sapiens
tttcattctgttaat

SEQ ID NO: 53163 - DNA, 15 bp, Homo sapiens
ctttcattctgttaa

SEQ ID NO: 53164 - DNA, 15 bp, Homo sapiens
tctttcattctgtta

SEQ ID NO: 53165 - DNA, 15 bp, Homo sapiens
gtctttcattctgtt

SEQ ID NO: 53166 - DNA, 15 bp, Homo sapiens
tgtctttcattctgt

SEQ ID NO: 53167 - DNA, 15 bp, Homo sapiens
ttgtctttcattctg

SEQ ID NO: 53168 - DNA, 15 bp, Homo sapiens
tttgtctttcattct

SEQ ID NO: 53169 - DNA, 15 bp, Homo sapiens
ttttgtctttcattc

SEQ ID NO: 53170 - DNA, 15 bp, Homo sapiens
tttttgtctttcatt

SEQ ID NO: 53171 - DNA, 15 bp, Homo sapiens
gtttttgtctttcat

SEQ ID NO: 53172 - DNA, 15 bp, Homo sapiens
ggtttttgtctttca

SEQ ID NO: 53173 - DNA, 15 bp, Homo sapiens
tggtttttgtctttc

SEQ ID NO: 53174 - DNA, 15 bp, Homo sapiens
atggtttttgtcttt

SEQ ID NO: 53175 - DNA, 15 bp, Homo sapiens
tatggtttttgtctt

SEQ ID NO: 53176 - DNA, 15 bp, Homo sapiens
atatggtttttgtct

SEQ ID NO: 53177 - DNA, 15 bp, Homo sapiens
catatggtttttgtc

SEQ ID NO: 53178 - DNA, 15 bp, Homo sapiens
ccatatggtttttgt

SEQ ID NO: 53179 - DNA, 15 bp, Homo sapiens
accatatggtttttg

SEQ ID NO: 53180 - DNA, 15 bp, Homo sapiens
aaccatatggttttt

SEQ ID NO: 53181 - DNA, 15 bp, Homo sapiens
taaccatatggtttt

SEQ ID NO: 53182 - DNA, 15 bp, Homo sapiens
ataaccatatggttt

SEQ ID NO: 53183 - DNA, 15 bp, Homo sapiens
gataaccatatggtt

SEQ ID NO: 53184 - DNA, 15 bp, Homo sapiens
agataaccatatggt

SEQ ID NO: 53185 - DNA, 15 bp, Homo sapiens
gagataaccatatgg

SEQ ID NO: 53186 - DNA, 15 bp, Homo sapiens
tgagataaccatatg

SEQ ID NO: 53187 - DNA, 15 bp, Homo sapiens
ttgagataaccatat

SEQ ID NO: 53188 - DNA, 15 bp, Homo sapiens
attgagataaccata

SEQ ID NO: 53189 - DNA, 15 bp, Homo sapiens
tattgagataaccat

SEQ ID NO: 53190 - DNA, 15 bp, Homo sapiens
ctattgagataacca

SEQ ID NO: 53191 - DNA, 15 bp, Homo sapiens
tctattgagataacc

SEQ ID NO: 53192 - DNA, 15 bp, Homo sapiens
atctattgagataac

SEQ ID NO: 53193 - DNA, 15 bp, Homo sapiens
catctattgagataa

SEQ ID NO: 53194 - DNA, 15 bp, Homo sapiens
gcatctattgagata

SEQ ID NO: 53195 - DNA, 15 bp, Homo sapiens
agcatctattgagat

SEQ ID NO: 53196 - DNA, 15 bp, Homo sapiens
cagcatctattgaga

SEQ ID NO: 53197 - DNA, 15 bp, Homo sapiens
tcagcatctattgag

SEQ ID NO: 53198 - DNA, 15 bp, Homo sapiens
ttcagcatctattga

SEQ ID NO: 53199 - DNA, 15 bp, Homo sapiens
tttcagcatctattg

SEQ ID NO: 53200 - DNA, 15 bp, Homo sapiens
ttttcagcatctatt

SEQ ID NO: 53201 - DNA, 15 bp, Homo sapiens
tttttcagcatctat

SEQ ID NO: 53202 - DNA, 15 bp, Homo sapiens
ctttttcagcatcta

SEQ ID NO: 53203 - DNA, 15 bp, Homo sapiens
gctttttcagcatct

SEQ ID NO: 53204 - DNA, 15 bp, Homo sapiens
tgctttttcagcatc

SEQ ID NO: 53205 - DNA, 15 bp, Homo sapiens
atgctttttcagcat

SEQ ID NO: 53206 - DNA, 15 bp, Homo sapiens
aatgctttttcagca

SEQ ID NO: 53207 - DNA, 15 bp, Homo sapiens
aaatgctttttcagc

SEQ ID NO: 53208 - DNA, 15 bp, Homo sapiens
taaatgctttttcag

SEQ ID NO: 53209 - DNA, 15 bp, Homo sapiens
ttaaatgctttttca

SEQ ID NO: 53210 - DNA, 15 bp, Homo sapiens
gttaaatgctttttc

SEQ ID NO: 53211 - DNA, 15 bp, Homo sapiens
tgttaaatgcttttt

SEQ ID NO: 53212 - DNA, 15 bp, Homo sapiens
ttgttaaatgctttt

SEQ ID NO: 53213 - DNA, 15 bp, Homo sapiens
tttgttaaatgcttt

SEQ ID NO: 53214 - DNA, 15 bp, Homo sapiens
ttttgttaaatgctt

SEQ ID NO: 53215 - DNA, 15 bp, Homo sapiens
attttgttaaatgct

SEQ ID NO: 53216 - DNA, 15 bp, Homo sapiens
aattttgttaaatgc

SEQ ID NO: 53217 - DNA, 15 bp, Homo sapiens
gaattttgttaaatg

SEQ ID NO: 53218 - DNA, 15 bp, Homo sapiens
tgaattttgttaaat

SEQ ID NO: 53219 - DNA, 15 bp, Homo sapiens
ttgaattttgttaaa

SEQ ID NO: 53220 - DNA, 15 bp, Homo sapiens
attgaattttgttaa

SEQ ID NO: 53221 - DNA, 15 bp, Homo sapiens
tattgaattttgtta

SEQ ID NO: 53222 - DNA, 15 bp, Homo sapiens
atattgaattttgtt

SEQ ID NO: 53223 - DNA, 15 bp, Homo sapiens
gatattgaattttgt

SEQ ID NO: 53224 - DNA, 15 bp, Homo sapiens
ggatattgaattttg

SEQ ID NO: 53225 - DNA, 15 bp, Homo sapiens
aggatattgaatttt

SEQ ID NO: 53226 - DNA, 15 bp, Homo sapiens
aaggatattgaattt

SEQ ID NO: 53227 - DNA, 15 bp, Homo sapiens
aaaggatattgaatt

SEQ ID NO: 53228 - DNA, 15 bp, Homo sapiens
gaaaggatattgaat

SEQ ID NO: 53229 - DNA, 15 bp, Homo sapiens
ggaaaggatattgaa

SEQ ID NO: 53230 - DNA, 15 bp, Homo sapiens
aggaaaggatattga

SEQ ID NO: 53231 - DNA, 15 bp, Homo sapiens
caggaaaggatattg

SEQ ID NO: 53232 - DNA, 15 bp, Homo sapiens
tcaggaaaggatatt

SEQ ID NO: 53233 - DNA, 15 bp, Homo sapiens
gtcaggaaaggatat

SEQ ID NO: 53234 - DNA, 15 bp, Homo sapiens
tgtcaggaaaggata

SEQ ID NO: 53235 - DNA, 15 bp, Homo sapiens
ctgtcaggaaaggat

SEQ ID NO: 53236 - DNA, 15 bp, Homo sapiens
tctgtcaggaaagga

SEQ ID NO: 53237 - DNA, 15 bp, Homo sapiens
ttctgtcaggaaagg

SEQ ID NO: 53238 - DNA, 15 bp, Homo sapiens
tttctgtcaggaaag

SEQ ID NO: 53239 - DNA, 15 bp, Homo sapiens
gtttctgtcaggaaa

SEQ ID NO: 53240 - DNA, 15 bp, Homo sapiens
agtttctgtcaggaa

SEQ ID NO: 53241 - DNA, 15 bp, Homo sapiens
gagtttctgtcagga

SEQ ID NO: 53242 - DNA, 15 bp, Homo sapiens
agagtttctgtcagg

SEQ ID NO: 53243 - DNA, 15 bp, Homo sapiens
gagagtttctgtcag

SEQ ID NO: 53244 - DNA, 15 bp, Homo sapiens
tgagagtttctgtca

SEQ ID NO: 53245 - DNA, 15 bp, Homo sapiens
ttgagagtttctgtc

SEQ ID NO: 53246 - DNA, 15 bp, Homo sapiens
gttgagagtttctgt

SEQ ID NO: 53247 - DNA, 15 bp, Homo sapiens
tgttgagagtttctg

SEQ ID NO: 53248 - DNA, 15 bp, Homo sapiens
ttgttgagagtttct

SEQ ID NO: 53249 - DNA, 15 bp, Homo sapiens
tttgttgagagtttc

SEQ ID NO: 53250 - DNA, 15 bp, Homo sapiens
atttgttgagagttt

SEQ ID NO: 53251 - DNA, 15 bp, Homo sapiens
aatttgttgagagtt

SEQ ID NO: 53252 - DNA, 15 bp, Homo sapiens
taatttgttgagagt

SEQ ID NO: 53253 - DNA, 15 bp, Homo sapiens
ctaatttgttgagag

SEQ ID NO: 53254 - DNA, 15 bp, Homo sapiens
cctaatttgttgaga

SEQ ID NO: 53255 - DNA, 15 bp, Homo sapiens
acctaatttgttgag

SEQ ID NO: 53256 - DNA, 15 bp, Homo sapiens
tacctaatttgttga

SEQ ID NO: 53257 - DNA, 15 bp, Homo sapiens
atacctaatttgttg

SEQ ID NO: 53258 - DNA, 15 bp, Homo sapiens
tatacctaatttgtt

SEQ ID NO: 53259 - DNA, 15 bp, Homo sapiens
ttatacctaatttgt

SEQ ID NO: 53260 - DNA, 15 bp, Homo sapiens
tttatacctaatttg

SEQ ID NO: 53261 - DNA, 15 bp, Homo sapiens
ttttatacctaattt

SEQ ID NO: 53262 - DNA, 15 bp, Homo sapiens
tttttatacctaatt

SEQ ID NO: 53263 - DNA, 15 bp, Homo sapiens
ctttttatacctaat

SEQ ID NO: 53264 - DNA, 15 bp, Homo sapiens
tctttttatacctaa

SEQ ID NO: 53265 - DNA, 15 bp, Homo sapiens
ttctttttataccta

SEQ ID NO: 53266 - DNA, 15 bp, Homo sapiens
attctttttatacct

SEQ ID NO: 53267 - DNA, 15 bp, Homo sapiens
cattctttttatacc

SEQ ID NO: 53268 - DNA, 15 bp, Homo sapiens
acattctttttatac

SEQ ID NO: 53269 - DNA, 15 bp, Homo sapiens
tacattctttttata

SEQ ID NO: 53270 - DNA, 15 bp, Homo sapiens
gtacattctttttat

SEQ ID NO: 53271 - DNA, 15 bp, Homo sapiens
ggtacattcttttta

SEQ ID NO: 53272 - DNA, 15 bp, Homo sapiens
aggtacattcttttt

SEQ ID NO: 53273 - DNA, 15 bp, Homo sapiens
gaggtacattctttt

SEQ ID NO: 53274 - DNA, 15 bp, Homo sapiens
tgaggtacattcttt

SEQ ID NO: 53275 - DNA, 15 bp, Homo sapiens
ttgaggtacattctt

SEQ ID NO: 53276 - DNA, 15 bp, Homo sapiens
attgaggtacattct

SEQ ID NO: 53277 - DNA, 15 bp, Homo sapiens
tattgaggtacattc

SEQ ID NO: 53278 - DNA, 15 bp, Homo sapiens
gtattgaggtacatt

SEQ ID NO: 53279 - DNA, 15 bp, Homo sapiens
tgtattgaggtacat

SEQ ID NO: 53280 - DNA, 15 bp, Homo sapiens
ttgtattgaggtaca

SEQ ID NO: 53281 - DNA, 15 bp, Homo sapiens
attgtattgaggtac

SEQ ID NO: 53282 - DNA, 15 bp, Homo sapiens
tattgtattgaggta

SEQ ID NO: 53283 - DNA, 15 bp, Homo sapiens
ttattgtattgaggt

SEQ ID NO: 53284 - DNA, 15 bp, Homo sapiens
tttattgtattgagg

SEQ ID NO: 53285 - DNA, 15 bp, Homo sapiens
ctttattgtattgag

SEQ ID NO: 53286 - DNA, 15 bp, Homo sapiens
cctttattgtattga

SEQ ID NO: 53287 - DNA, 15 bp, Homo sapiens
acctttattgtattg

SEQ ID NO: 53288 - DNA, 15 bp, Homo sapiens
tacctttattgtatt

SEQ ID NO: 53289 - DNA, 15 bp, Homo sapiens
ttacctttattgtat

SEQ ID NO: 53290 - DNA, 15 bp, Homo sapiens
gttacctttattgta

SEQ ID NO: 53291 - DNA, 15 bp, Homo sapiens
tgttacctttattgt

SEQ ID NO: 53292 - DNA, 15 bp, Homo sapiens
atgttacctttattg

SEQ ID NO: 53293 - DNA, 15 bp, Homo sapiens
tatgttacctttatt

SEQ ID NO: 53294 - DNA, 15 bp, Homo sapiens
atatgttacctttat

SEQ ID NO: 53295 - DNA, 15 bp, Homo sapiens
catatgttaccttta

SEQ ID NO: 53296 - DNA, 15 bp, Homo sapiens
tcatatgttaccttt

SEQ ID NO: 53297 - DNA, 15 bp, Homo sapiens
gtcatatgttacctt

SEQ ID NO: 53298 - DNA, 15 bp, Homo sapiens
tgtcatatgttacct

SEQ ID NO: 53299 - DNA, 15 bp, Homo sapiens
ttgtcatatgttacc

SEQ ID NO: 53300 - DNA, 15 bp, Homo sapiens
cttgtcatatgttac

SEQ ID NO: 53301 - DNA, 15 bp, Homo sapiens
gcttgtcatatgtta

SEQ ID NO: 53302 - DNA, 15 bp, Homo sapiens
ggcttgtcatatgtt

SEQ ID NO: 53303 - DNA, 15 bp, Homo sapiens
gggcttgtcatatgt

SEQ ID NO: 53304 - DNA, 15 bp, Homo sapiens
tgggcttgtcatatg

SEQ ID NO: 53305 - DNA, 15 bp, Homo sapiens
gtgggcttgtcatat

SEQ ID NO: 53306 - DNA, 15 bp, Homo sapiens
tgtgggcttgtcata

SEQ ID NO: 53307 - DNA, 15 bp, Homo sapiens
ctgtgggcttgtcat

SEQ ID NO: 53308 - DNA, 15 bp, Homo sapiens
gctgtgggcttgtca

SEQ ID NO: 53309 - DNA, 15 bp, Homo sapiens
agctgtgggcttgtc

SEQ ID NO: 53310 - DNA, 15 bp, Homo sapiens
tagctgtgggcttgt

SEQ ID NO: 53311 - DNA, 15 bp, Homo sapiens
ttagctgtgggcttg

SEQ ID NO: 53312 - DNA, 15 bp, Homo sapiens
tttagctgtgggctt

SEQ ID NO: 53313 - DNA, 15 bp, Homo sapiens
atttagctgtgggct

SEQ ID NO: 53314 - DNA, 15 bp, Homo sapiens
gatttagctgtgggc

SEQ ID NO: 53315 - DNA, 15 bp, Homo sapiens
tgatttagctgtggg

SEQ ID NO: 53316 - DNA, 15 bp, Homo sapiens
atgatttagctgtgg

SEQ ID NO: 53317 - DNA, 15 bp, Homo sapiens
tatgatttagctgtg

SEQ ID NO: 53318 - DNA, 15 bp, Homo sapiens
gtatgatttagctgt

SEQ ID NO: 53319 - DNA, 15 bp, Homo sapiens
agtatgatttagctg

SEQ ID NO: 53320 - DNA, 15 bp, Homo sapiens
gagtatgatttagct

SEQ ID NO: 53321 - DNA, 15 bp, Homo sapiens
tgagtatgatttagc

SEQ ID NO: 53322 - DNA, 15 bp, Homo sapiens
ttgagtatgatttag

SEQ ID NO: 53323 - DNA, 15 bp, Homo sapiens
cttgagtatgattta

SEQ ID NO: 53324 - DNA, 15 bp, Homo sapiens
ccttgagtatgattt

SEQ ID NO: 53325 - DNA, 15 bp, Homo sapiens
cccttgagtatgatt

SEQ ID NO: 53326 - DNA, 15 bp, Homo sapiens
acccttgagtatgat

SEQ ID NO: 53327 - DNA, 15 bp, Homo sapiens
cacccttgagtatga

SEQ ID NO: 53328 - DNA, 15 bp, Homo sapiens
tcacccttgagtatg

SEQ ID NO: 53329 - DNA, 15 bp, Homo sapiens
ctcacccttgagtat

SEQ ID NO: 53330 - DNA, 15 bp, Homo sapiens
tctcacccttgagta

SEQ ID NO: 53331 - DNA, 15 bp, Homo sapiens
ttctcacccttgagt

SEQ ID NO: 53332 - DNA, 15 bp, Homo sapiens
attctcacccttgag

SEQ ID NO: 53333 - DNA, 15 bp, Homo sapiens
aattctcacccttga

SEQ ID NO: 53334 - DNA, 15 bp, Homo sapiens
aaattctcacccttg

SEQ ID NO: 53335 - DNA, 15 bp, Homo sapiens
caaattctcaccctt

SEQ ID NO: 53336 - DNA, 15 bp, Homo sapiens
tcaaattctcaccct

SEQ ID NO: 53337 - DNA, 15 bp, Homo sapiens
ttcaaattctcaccc

SEQ ID NO: 53338 - DNA, 15 bp, Homo sapiens
tttcaaattctcacc

SEQ ID NO: 53339 - DNA, 15 bp, Homo sapiens
ctttcaaattctcac

SEQ ID NO: 53340 - DNA, 15 bp, Homo sapiens
gctttcaaattctca

SEQ ID NO: 53341 - DNA, 15 bp, Homo sapiens
agctttcaaattctc

SEQ ID NO: 53342 - DNA, 15 bp, Homo sapiens
aagctttcaaattct

SEQ ID NO: 53343 - DNA, 15 bp, Homo sapiens
aaagctttcaaattc

SEQ ID NO: 53344 - DNA, 15 bp, Homo sapiens
aaaagctttcaaatt

SEQ ID NO: 53345 - DNA, 15 bp, Homo sapiens
gaaaagctttcaaat

SEQ ID NO: 53346 - DNA, 15 bp, Homo sapiens
ggaaaagctttcaaa

SEQ ID NO: 53347 - DNA, 15 bp, Homo sapiens
gggaaaagctttcaa

SEQ ID NO: 53348 - DNA, 15 bp, Homo sapiens
ggggaaaagctttca

SEQ ID NO: 53349 - DNA, 15 bp, Homo sapiens
gggggaaaagctttc

SEQ ID NO: 53350 - DNA, 15 bp, Homo sapiens
agggggaaaagcttt

SEQ ID NO: 53351 - DNA, 15 bp, Homo sapiens
tagggggaaaagctt

SEQ ID NO: 53352 - DNA, 15 bp, Homo sapiens
ttagggggaaaagct

SEQ ID NO: 53353 - DNA, 15 bp, Homo sapiens
cttagggggaaaagc

SEQ ID NO: 53354 - DNA, 15 bp, Homo sapiens
tcttagggggaaaag

SEQ ID NO: 53355 - DNA, 15 bp, Homo sapiens
atcttagggggaaaa

SEQ ID NO: 53356 - DNA, 15 bp, Homo sapiens
gatcttagggggaaa

SEQ ID NO: 53357 - DNA, 15 bp, Homo sapiens
tgatcttagggggaa

SEQ ID NO: 53358 - DNA, 15 bp, Homo sapiens
ctgatcttaggggga

SEQ ID NO: 53359 - DNA, 15 bp, Homo sapiens
cctgatcttaggggg

SEQ ID NO: 53360 - DNA, 15 bp, Homo sapiens
tcctgatcttagggg

SEQ ID NO: 53361 - DNA, 15 bp, Homo sapiens
ttcctgatcttaggg

SEQ ID NO: 53362 - DNA, 15 bp, Homo sapiens
gttcctgatcttagg

SEQ ID NO: 53363 - DNA, 15 bp, Homo sapiens
tgttcctgatcttag

SEQ ID NO: 53364 - DNA, 15 bp, Homo sapiens
ttgttcctgatctta

SEQ ID NO: 53365 - DNA, 15 bp, Homo sapiens
cttgttcctgatctt

SEQ ID NO: 53366 - DNA, 15 bp, Homo sapiens
tcttgttcctgatct

SEQ ID NO: 53367 - DNA, 15 bp, Homo sapiens
gtcttgttcctgatc

SEQ ID NO: 53368 - DNA, 15 bp, Homo sapiens
tgtcttgttcctgat

SEQ ID NO: 53369 - DNA, 15 bp, Homo sapiens
ttgtcttgttcctga

SEQ ID NO: 53370 - DNA, 15 bp, Homo sapiens
tttgtcttgttcctg

SEQ ID NO: 53371 - DNA, 15 bp, Homo sapiens
ttttgtcttgttcct

SEQ ID NO: 53372 - DNA, 15 bp, Homo sapiens
tttttgtcttgttcc

SEQ ID NO: 53373 - DNA, 15 bp, Homo sapiens
atttttgtcttgttc

SEQ ID NO: 53374 - DNA, 15 bp, Homo sapiens
catttttgtcttgtt

SEQ ID NO: 53375 - DNA, 15 bp, Homo sapiens
gcatttttgtcttgt

SEQ ID NO: 53376 - DNA, 15 bp, Homo sapiens
ggcatttttgtcttg

SEQ ID NO: 53377 - DNA, 15 bp, Homo sapiens
gggcatttttgtctt

SEQ ID NO: 53378 - DNA, 15 bp, Homo sapiens
tgggcatttttgtct

SEQ ID NO: 53379 - DNA, 15 bp, Homo sapiens
atgggcatttttgtc

SEQ ID NO: 53380 - DNA, 15 bp, Homo sapiens
aatgggcatttttgt

SEQ ID NO: 53381 - DNA, 15 bp, Homo sapiens
gaatgggcatttttg

SEQ ID NO: 53382 - DNA, 15 bp, Homo sapiens
agaatgggcattttt

SEQ ID NO: 53383 - DNA, 15 bp, Homo sapiens
aagaatgggcatttt

SEQ ID NO: 53384 - DNA, 15 bp, Homo sapiens
caagaatgggcattt

SEQ ID NO: 53385 - DNA, 15 bp, Homo sapiens
gcaagaatgggcatt

SEQ ID NO: 53386 - DNA, 15 bp, Homo sapiens
ggcaagaatgggcat

SEQ ID NO: 53387 - DNA, 15 bp, Homo sapiens
tggcaagaatgggca

SEQ ID NO: 53388 - DNA, 15 bp, Homo sapiens
gtggcaagaatgggc

SEQ ID NO: 53389 - DNA, 15 bp, Homo sapiens
agtggcaagaatggg

SEQ ID NO: 53390 - DNA, 15 bp, Homo sapiens
aagtggcaagaatgg

SEQ ID NO: 53391 - DNA, 15 bp, Homo sapiens
gaagtggcaagaatg

SEQ ID NO: 53392 - DNA, 15 bp, Homo sapiens
agaagtggcaagaat

SEQ ID NO: 53393 - DNA, 15 bp, Homo sapiens
aagaagtggcaagaa

SEQ ID NO: 53394 - DNA, 15 bp, Homo sapiens
taagaagtggcaaga

SEQ ID NO: 53395 - DNA, 15 bp, Homo sapiens
ctaagaagtggcaag

SEQ ID NO: 53396 - DNA, 15 bp, Homo sapiens
gctaagaagtggcaa

SEQ ID NO: 53397 - DNA, 15 bp, Homo sapiens
tgctaagaagtggca

SEQ ID NO: 53398 - DNA, 15 bp, Homo sapiens
ttgctaagaagtggc

SEQ ID NO: 53399 - DNA, 15 bp, Homo sapiens
gttgctaagaagtgg

SEQ ID NO: 53400 - DNA, 15 bp, Homo sapiens
ggttgctaagaagtg

SEQ ID NO: 53401 - DNA, 15 bp, Homo sapiens
tggttgctaagaagt

SEQ ID NO: 53402 - DNA, 15 bp, Homo sapiens
gtggttgctaagaag

SEQ ID NO: 53403 - DNA, 15 bp, Homo sapiens
tgtggttgctaagaa

SEQ ID NO: 53404 - DNA, 15 bp, Homo sapiens
ttgtggttgctaaga

SEQ ID NO: 53405 - DNA, 15 bp, Homo sapiens
tttgtggttgctaag

SEQ ID NO: 53406 - DNA, 15 bp, Homo sapiens
ttttgtggttgctaa

SEQ ID NO: 53407 - DNA, 15 bp, Homo sapiens
cttttgtggttgcta

SEQ ID NO: 53408 - DNA, 15 bp, Homo sapiens
tcttttgtggttgct

SEQ ID NO: 53409 - DNA, 15 bp, Homo sapiens
gtcttttgtggttgc

SEQ ID NO: 53410 - DNA, 15 bp, Homo sapiens
ggtcttttgtggttg

SEQ ID NO: 53411 - DNA, 15 bp, Homo sapiens
aggtcttttgtggtt

SEQ ID NO: 53412 - DNA, 15 bp, Homo sapiens
aaggtcttttgtggt

SEQ ID NO: 53413 - DNA, 15 bp, Homo sapiens
caaggtcttttgtgg

SEQ ID NO: 53414 - DNA, 15 bp, Homo sapiens
tcaaggtcttttgtg

SEQ ID NO: 53415 - DNA, 15 bp, Homo sapiens
ttcaaggtcttttgt

SEQ ID NO: 53416 - DNA, 15 bp, Homo sapiens
attcaaggtcttttg

SEQ ID NO: 53417 - DNA, 15 bp, Homo sapiens
tattcaaggtctttt

SEQ ID NO: 53418 - DNA, 15 bp, Homo sapiens
ctattcaaggtcttt

SEQ ID NO: 53419 - DNA, 15 bp, Homo sapiens
gctattcaaggtctt

SEQ ID NO: 53420 - DNA, 15 bp, Homo sapiens
tgctattcaaggtct

SEQ ID NO: 53421 - DNA, 15 bp, Homo sapiens
ttgctattcaaggtc

SEQ ID NO: 53422 - DNA, 15 bp, Homo sapiens
tttgctattcaaggt

SEQ ID NO: 53423 - DNA, 15 bp, Homo sapiens
ttttgctattcaagg

SEQ ID NO: 53424 - DNA, 15 bp, Homo sapiens
tttttgctattcaag

SEQ ID NO: 53425 - DNA, 15 bp, Homo sapiens
atttttgctattcaa

SEQ ID NO: 53426 - DNA, 15 bp, Homo sapiens
gatttttgctattca

SEQ ID NO: 53427 - DNA, 15 bp, Homo sapiens
ggatttttgctattc

SEQ ID NO: 53428 - DNA, 15 bp, Homo sapiens
aggatttttgctatt

SEQ ID NO: 53429 - DNA, 15 bp, Homo sapiens
caggatttttgctat

SEQ ID NO: 53430 - DNA, 15 bp, Homo sapiens
tcaggatttttgcta

SEQ ID NO: 53431 - DNA, 15 bp, Homo sapiens
ttcaggatttttgct

SEQ ID NO: 53432 - DNA, 15 bp, Homo sapiens
gttcaggatttttgc

SEQ ID NO: 53433 - DNA, 15 bp, Homo sapiens
tgttcaggatttttg

SEQ ID NO: 53434 - DNA, 15 bp, Homo sapiens
ttgttcaggattttt

SEQ ID NO: 53435 - DNA, 15 bp, Homo sapiens
cttgttcaggatttt

SEQ ID NO: 53436 - DNA, 15 bp, Homo sapiens
tcttgttcaggattt

SEQ ID NO: 53437 - DNA, 15 bp, Homo sapiens
ttcttgttcaggatt

SEQ ID NO: 53438 - DNA, 15 bp, Homo sapiens
cttcttgttcaggat

SEQ ID NO: 53439 - DNA, 15 bp, Homo sapiens
tcttcttgttcagga

SEQ ID NO: 53440 - DNA, 15 bp, Homo sapiens
ttcttcttgttcagg

SEQ ID NO: 53441 - DNA, 15 bp, Homo sapiens
gttcttcttgttcag

SEQ ID NO: 53442 - DNA, 15 bp, Homo sapiens
tgttcttcttgttca

SEQ ID NO: 53443 - DNA, 15 bp, Homo sapiens
ttgttcttcttgttc

SEQ ID NO: 53444 - DNA, 15 bp, Homo sapiens
tttgttcttcttgtt

SEQ ID NO: 53445 - DNA, 15 bp, Homo sapiens
ctttgttcttcttgt

SEQ ID NO: 53446 - DNA, 15 bp, Homo sapiens
gctttgttcttcttg

SEQ ID NO: 53447 - DNA, 15 bp, Homo sapiens
agctttgttcttctt

SEQ ID NO: 53448 - DNA, 15 bp, Homo sapiens
cagctttgttcttct

SEQ ID NO: 53449 - DNA, 15 bp, Homo sapiens
ccagctttgttcttc

SEQ ID NO: 53450 - DNA, 15 bp, Homo sapiens
tccagctttgttctt

SEQ ID NO: 53451 - DNA, 15 bp, Homo sapiens
ctccagctttgttct

SEQ ID NO: 53452 - DNA, 15 bp, Homo sapiens
cctccagctttgttc

SEQ ID NO: 53453 - DNA, 15 bp, Homo sapiens
gcctccagctttgtt

SEQ ID NO: 53454 - DNA, 15 bp, Homo sapiens
tgcctccagctttgt

SEQ ID NO: 53455 - DNA, 15 bp, Homo sapiens
atgcctccagctttg

SEQ ID NO: 53456 - DNA, 15 bp, Homo sapiens
gatgcctccagcttt

SEQ ID NO: 53457 - DNA, 15 bp, Homo sapiens
tgatgcctccagctt

SEQ ID NO: 53458 - DNA, 15 bp, Homo sapiens
gtgatgcctccagct

SEQ ID NO: 53459 - DNA, 15 bp, Homo sapiens
cgtgatgcctccagc

SEQ ID NO: 53460 - DNA, 15 bp, Homo sapiens
acgtgatgcctccag

SEQ ID NO: 53461 - DNA, 15 bp, Homo sapiens
aacgtgatgcctcca

SEQ ID NO: 53462 - DNA, 15 bp, Homo sapiens
taacgtgatgcctcc

SEQ ID NO: 53463 - DNA, 15 bp, Homo sapiens
gtaacgtgatgcctc

SEQ ID NO: 53464 - DNA, 15 bp, Homo sapiens
ggtaacgtgatgcct

SEQ ID NO: 53465 - DNA, 15 bp, Homo sapiens
aggtaacgtgatgcc

SEQ ID NO: 53466 - DNA, 15 bp, Homo sapiens
caggtaacgtgatgc

SEQ ID NO: 53467 - DNA, 15 bp, Homo sapiens
tcaggtaacgtgatg

SEQ ID NO: 53468 - DNA, 15 bp, Homo sapiens
atcaggtaacgtgat

SEQ ID NO: 53469 - DNA, 15 bp, Homo sapiens
gatcaggtaacgtga

SEQ ID NO: 53470 - DNA, 15 bp, Homo sapiens
agatcaggtaacgtg

SEQ ID NO: 53471 - DNA, 15 bp, Homo sapiens
gagatcaggtaacgt

SEQ ID NO: 53472 - DNA, 15 bp, Homo sapiens
tgagatcaggtaacg

SEQ ID NO: 53473 - DNA, 15 bp, Homo sapiens
ttgagatcaggtaac

SEQ ID NO: 53474 - DNA, 15 bp, Homo sapiens
tttgagatcaggtaa

SEQ ID NO: 53475 - DNA, 15 bp, Homo sapiens
ttttgagatcaggta

SEQ ID NO: 53476 - DNA, 15 bp, Homo sapiens
attttgagatcaggt

SEQ ID NO: 53477 - DNA, 15 bp, Homo sapiens
gattttgagatcagg

SEQ ID NO: 53478 - DNA, 15 bp, Homo sapiens
agattttgagatcag

SEQ ID NO: 53479 - DNA, 15 bp, Homo sapiens
tagattttgagatca

SEQ ID NO: 53480 - DNA, 15 bp, Homo sapiens
gtagattttgagatc

SEQ ID NO: 53481 - DNA, 15 bp, Homo sapiens
agtagattttgagat

SEQ ID NO: 53482 - DNA, 15 bp, Homo sapiens
tagtagattttgaga

SEQ ID NO: 53483 - DNA, 15 bp, Homo sapiens
gtagtagattttgag

SEQ ID NO: 53484 - DNA, 15 bp, Homo sapiens
tgtagtagattttga

SEQ ID NO: 53485 - DNA, 15 bp, Homo sapiens
ttgtagtagattttg

SEQ ID NO: 53486 - DNA, 15 bp, Homo sapiens
tttgtagtagatttt

SEQ ID NO: 53487 - DNA, 15 bp, Homo sapiens
ctttgtagtagattt

SEQ ID NO: 53488 - DNA, 15 bp, Homo sapiens
actttgtagtagatt

SEQ ID NO: 53489 - DNA, 15 bp, Homo sapiens
tactttgtagtagat

SEQ ID NO: 53490 - DNA, 15 bp, Homo sapiens
ttactttgtagtaga

SEQ ID NO: 53491 - DNA, 15 bp, Homo sapiens
attactttgtagtag

SEQ ID NO: 53492 - DNA, 15 bp, Homo sapiens
tattactttgtagta

SEQ ID NO: 53493 - DNA, 15 bp, Homo sapiens
ctattactttgtagt

SEQ ID NO: 53494 - DNA, 15 bp, Homo sapiens
tctattactttgtag

SEQ ID NO: 53495 - DNA, 15 bp, Homo sapiens
atctattactttgta

SEQ ID NO: 53496 - DNA, 15 bp, Homo sapiens
gatctattactttgt

SEQ ID NO: 53497 - DNA, 15 bp, Homo sapiens
tgatctattactttg

SEQ ID NO: 53498 - DNA, 15 bp, Homo sapiens
atgatctattacttt

SEQ ID NO: 53499 - DNA, 15 bp, Homo sapiens
aatgatctattactt

SEQ ID NO: 53500 - DNA, 15 bp, Homo sapiens
taatgatctattact

SEQ ID NO: 53501 - DNA, 15 bp, Homo sapiens
ataatgatctattac

SEQ ID NO: 53502 - DNA, 15 bp, Homo sapiens
aataatgatctatta

SEQ ID NO: 53503 - DNA, 15 bp, Homo sapiens
taataatgatctatt

SEQ ID NO: 53504 - DNA, 15 bp, Homo sapiens
ctaataatgatctat

SEQ ID NO: 53505 - DNA, 15 bp, Homo sapiens
tctaataatgatcta

SEQ ID NO: 53506 - DNA, 15 bp, Homo sapiens
atctaataatgatct

SEQ ID NO: 53507 - DNA, 15 bp, Homo sapiens
aatctaataatgatc

SEQ ID NO: 53508 - DNA, 15 bp, Homo sapiens
taatctaataatgat

SEQ ID NO: 53509 - DNA, 15 bp, Homo sapiens
ataatctaataatga

SEQ ID NO: 53510 - DNA, 15 bp, Homo sapiens
aataatctaataatg

SEQ ID NO: 53511 - DNA, 15 bp, Homo sapiens
aaataatctaataat

SEQ ID NO: 53512 - DNA, 15 bp, Homo sapiens
caaataatctaataa

SEQ ID NO: 53513 - DNA, 15 bp, Homo sapiens
tcaaataatctaata

SEQ ID NO: 53514 - DNA, 15 bp, Homo sapiens
atcaaataatctaat

SEQ ID NO: 53515 - DNA, 15 bp, Homo sapiens
aatcaaataatctaa

SEQ ID NO: 53516 - DNA, 15 bp, Homo sapiens
taatcaaataatcta

SEQ ID NO: 53517 - DNA, 15 bp, Homo sapiens
gtaatcaaataatct

SEQ ID NO: 53518 - DNA, 15 bp, Homo sapiens
agtaatcaaataatc

SEQ ID NO: 53519 - DNA, 15 bp, Homo sapiens
tagtaatcaaataat

SEQ ID NO: 53520 - DNA, 15 bp, Homo sapiens
atagtaatcaaataa

SEQ ID NO: 53521 - DNA, 15 bp, Homo sapiens
tatagtaatcaaata

SEQ ID NO: 53522 - DNA, 15 bp, Homo sapiens
ctatagtaatcaaat

SEQ ID NO: 53523 - DNA, 15 bp, Homo sapiens
actatagtaatcaaa

SEQ ID NO: 53524 - DNA, 15 bp, Homo sapiens
tactatagtaatcaa

SEQ ID NO: 53525 - DNA, 15 bp, Homo sapiens
ttactatagtaatca

SEQ ID NO: 53526 - DNA, 15 bp, Homo sapiens
attactatagtaatc

SEQ ID NO: 53527 - DNA, 15 bp, Homo sapiens
tattactatagtaat

SEQ ID NO: 53528 - DNA, 15 bp, Homo sapiens
ttattactatagtaa

SEQ ID NO: 53529 - DNA, 15 bp, Homo sapiens
tttattactatagta

SEQ ID NO: 53530 - DNA, 15 bp, Homo sapiens
ttttattactatagt

SEQ ID NO: 53531 - DNA, 15 bp, Homo sapiens
tttttattactatag

SEQ ID NO: 53532 - DNA, 15 bp, Homo sapiens
gtttttattactata

SEQ ID NO: 53533 - DNA, 15 bp, Homo sapiens
tgtttttattactat

SEQ ID NO: 53534 - DNA, 15 bp, Homo sapiens
ctgtttttattacta

SEQ ID NO: 53535 - DNA, 15 bp, Homo sapiens
gctgtttttattact

SEQ ID NO: 53536 - DNA, 15 bp, Homo sapiens
tgctgtttttattac

SEQ ID NO: 53537 - DNA, 15 bp, Homo sapiens
atgctgtttttatta

SEQ ID NO: 53538 - DNA, 15 bp, Homo sapiens
catgctgtttttatt

SEQ ID NO: 53539 - DNA, 15 bp, Homo sapiens
ccatgctgtttttat

SEQ ID NO: 53540 - DNA, 15 bp, Homo sapiens
accatgctgttttta

SEQ ID NO: 53541 - DNA, 15 bp, Homo sapiens
taccatgctgttttt

SEQ ID NO: 53542 - DNA, 15 bp, Homo sapiens
gtaccatgctgtttt

SEQ ID NO: 53543 - DNA, 15 bp, Homo sapiens
agtaccatgctgttt

SEQ ID NO: 53544 - DNA, 15 bp, Homo sapiens
cagtaccatgctgtt

SEQ ID NO: 53545 - DNA, 15 bp, Homo sapiens
ccagtaccatgctgt

SEQ ID NO: 53546 - DNA, 15 bp, Homo sapiens
gccagtaccatgctg

SEQ ID NO: 53547 - DNA, 15 bp, Homo sapiens
tgccagtaccatgct

SEQ ID NO: 53548 - DNA, 15 bp, Homo sapiens
atgccagtaccatgc

SEQ ID NO: 53549 - DNA, 15 bp, Homo sapiens
tatgccagtaccatg

SEQ ID NO: 53550 - DNA, 15 bp, Homo sapiens
ctatgccagtaccat

SEQ ID NO: 53551 - DNA, 15 bp, Homo sapiens
tctatgccagtacca

SEQ ID NO: 53552 - DNA, 15 bp, Homo sapiens
ttctatgccagtacc

SEQ ID NO: 53553 - DNA, 15 bp, Homo sapiens
tttctatgccagtac

SEQ ID NO: 53554 - DNA, 15 bp, Homo sapiens
gtttctatgccagta

SEQ ID NO: 53555 - DNA, 15 bp, Homo sapiens
tgtttctatgccagt

SEQ ID NO: 53556 - DNA, 15 bp, Homo sapiens
ctgtttctatgccag

SEQ ID NO: 53557 - DNA, 15 bp, Homo sapiens
tctgtttctatgcca

SEQ ID NO: 53558 - DNA, 15 bp, Homo sapiens
gtctgtttctatgcc

SEQ ID NO: 53559 - DNA, 15 bp, Homo sapiens
tgtctgtttctatgc

SEQ ID NO: 53560 - DNA, 15 bp, Homo sapiens
gtgtctgtttctatg

SEQ ID NO: 53561 - DNA, 15 bp, Homo sapiens
tgtgtctgtttctat

SEQ ID NO: 53562 - DNA, 15 bp, Homo sapiens
atgtgtctgtttcta

SEQ ID NO: 53563 - DNA, 15 bp, Homo sapiens
tatgtgtctgtttct

SEQ ID NO: 53564 - DNA, 15 bp, Homo sapiens
ctatgtgtctgtttc

SEQ ID NO: 53565 - DNA, 15 bp, Homo sapiens
tctatgtgtctgttt

SEQ ID NO: 53566 - DNA, 15 bp, Homo sapiens
gtctatgtgtctgtt

SEQ ID NO: 53567 - DNA, 15 bp, Homo sapiens
ggtctatgtgtctgt

SEQ ID NO: 53568 - DNA, 15 bp, Homo sapiens
tggtctatgtgtctg

SEQ ID NO: 53569 - DNA, 15 bp, Homo sapiens
ctggtctatgtgtct

SEQ ID NO: 53570 - DNA, 15 bp, Homo sapiens
actggtctatgtgtc

SEQ ID NO: 53571 - DNA, 15 bp, Homo sapiens
cactggtctatgtgt

SEQ ID NO: 53572 - DNA, 15 bp, Homo sapiens
tcactggtctatgtg

SEQ ID NO: 53573 - DNA, 15 bp, Homo sapiens
ttcactggtctatgt

SEQ ID NO: 53574 - DNA, 15 bp, Homo sapiens
tttcactggtctatg

SEQ ID NO: 53575 - DNA, 15 bp, Homo sapiens
ttttcactggtctat

SEQ ID NO: 53576 - DNA, 15 bp, Homo sapiens
tttttcactggtcta

SEQ ID NO: 53577 - DNA, 15 bp, Homo sapiens
ctttttcactggtct

SEQ ID NO: 53578 - DNA, 15 bp, Homo sapiens
tctttttcactggtc

SEQ ID NO: 53579 - DNA, 15 bp, Homo sapiens
ttctttttcactggt

SEQ ID NO: 53580 - DNA, 15 bp, Homo sapiens
attctttttcactgg

SEQ ID NO: 53581 - DNA, 15 bp, Homo sapiens
cattctttttcactg

SEQ ID NO: 53582 - DNA, 15 bp, Homo sapiens
ccattctttttcact

SEQ ID NO: 53583 - DNA, 15 bp, Homo sapiens
tccattctttttcac

SEQ ID NO: 53584 - DNA, 15 bp, Homo sapiens
ctccattctttttca

SEQ ID NO: 53585 - DNA, 15 bp, Homo sapiens
tctccattctttttc

SEQ ID NO: 53586 - DNA, 15 bp, Homo sapiens
ctctccattcttttt

SEQ ID NO: 53587 - DNA, 15 bp, Homo sapiens
gctctccattctttt

SEQ ID NO: 53588 - DNA, 15 bp, Homo sapiens
ggctctccattcttt

SEQ ID NO: 53589 - DNA, 15 bp, Homo sapiens
gggctctccattctt

SEQ ID NO: 53590 - DNA, 15 bp, Homo sapiens
tgggctctccattct

SEQ ID NO: 53591 - DNA, 15 bp, Homo sapiens
ctgggctctccattc

SEQ ID NO: 53592 - DNA, 15 bp, Homo sapiens
tctgggctctccatt

SEQ ID NO: 53593 - DNA, 15 bp, Homo sapiens
ttctgggctctccat

SEQ ID NO: 53594 - DNA, 15 bp, Homo sapiens
tttctgggctctcca

SEQ ID NO: 53595 - DNA, 15 bp, Homo sapiens
ctttctgggctctcc

SEQ ID NO: 53596 - DNA, 15 bp, Homo sapiens
tctttctgggctctc

SEQ ID NO: 53597 - DNA, 15 bp, Homo sapiens
ttctttctgggctct

SEQ ID NO: 53598 - DNA, 15 bp, Homo sapiens
cttctttctgggctc

SEQ ID NO: 53599 - DNA, 15 bp, Homo sapiens
acttctttctgggct

SEQ ID NO: 53600 - DNA, 15 bp, Homo sapiens
gacttctttctgggc

SEQ ID NO: 53601 - DNA, 15 bp, Homo sapiens
ggacttctttctggg

SEQ ID NO: 53602 - DNA, 15 bp, Homo sapiens
tggacttctttctgg

SEQ ID NO: 53603 - DNA, 15 bp, Homo sapiens
atggacttctttctg

SEQ ID NO: 53604 - DNA, 15 bp, Homo sapiens
catggacttctttct

SEQ ID NO: 53605 - DNA, 15 bp, Homo sapiens
gcatggacttctttc

SEQ ID NO: 53606 - DNA, 15 bp, Homo sapiens
tgcatggacttcttt

SEQ ID NO: 53607 - DNA, 15 bp, Homo sapiens
atgcatggacttctt

SEQ ID NO: 53608 - DNA, 15 bp, Homo sapiens
aatgcatggacttct

SEQ ID NO: 53609 - DNA, 15 bp, Homo sapiens
aaatgcatggacttc

SEQ ID NO: 53610 - DNA, 15 bp, Homo sapiens
taaatgcatggactt

SEQ ID NO: 53611 - DNA, 15 bp, Homo sapiens
ataaatgcatggact

SEQ ID NO: 53612 - DNA, 15 bp, Homo sapiens
tataaatgcatggac

SEQ ID NO: 53613 - DNA, 15 bp, Homo sapiens
ctataaatgcatgga

SEQ ID NO: 53614 - DNA, 15 bp, Homo sapiens
actataaatgcatgg

SEQ ID NO: 53615 - DNA, 15 bp, Homo sapiens
gactataaatgcatg

SEQ ID NO: 53616 - DNA, 15 bp, Homo sapiens
ggactataaatgcat

SEQ ID NO: 53617 - DNA, 15 bp, Homo sapiens
tggactataaatgca

SEQ ID NO: 53618 - DNA, 15 bp, Homo sapiens
atggactataaatgc

SEQ ID NO: 53619 - DNA, 15 bp, Homo sapiens
aatggactataaatg

SEQ ID NO: 53620 - DNA, 15 bp, Homo sapiens
caatggactataaat

SEQ ID NO: 53621 - DNA, 15 bp, Homo sapiens
tcaatggactataaa

SEQ ID NO: 53622 - DNA, 15 bp, Homo sapiens
atcaatggactataa

SEQ ID NO: 53623 - DNA, 15 bp, Homo sapiens
aatcaatggactata

SEQ ID NO: 53624 - DNA, 15 bp, Homo sapiens
aaatcaatggactat

SEQ ID NO: 53625 - DNA, 15 bp, Homo sapiens
aaaatcaatggacta

SEQ ID NO: 53626 - DNA, 15 bp, Homo sapiens
gaaaatcaatggact

SEQ ID NO: 53627 - DNA, 15 bp, Homo sapiens
tgaaaatcaatggac

SEQ ID NO: 53628 - DNA, 15 bp, Homo sapiens
ttgaaaatcaatgga

SEQ ID NO: 53629 - DNA, 15 bp, Homo sapiens
attgaaaatcaatgg

SEQ ID NO: 53630 - DNA, 15 bp, Homo sapiens
tattgaaaatcaatg

SEQ ID NO: 53631 - DNA, 15 bp, Homo sapiens
ttattgaaaatcaat

SEQ ID NO: 53632 - DNA, 15 bp, Homo sapiens
tttattgaaaatcaa

SEQ ID NO: 53633 - DNA, 15 bp, Homo sapiens
ctttattgaaaatca

SEQ ID NO: 53634 - DNA, 15 bp, Homo sapiens
tctttattgaaaatc

SEQ ID NO: 53635 - DNA, 15 bp, Homo sapiens
ctctttattgaaaat

SEQ ID NO: 53636 - DNA, 15 bp, Homo sapiens
tctctttattgaaaa

SEQ ID NO: 53637 - DNA, 15 bp, Homo sapiens
gtctctttattgaaa

SEQ ID NO: 53638 - DNA, 15 bp, Homo sapiens
ggtctctttattgaa

SEQ ID NO: 53639 - DNA, 15 bp, Homo sapiens
tggtctctttattga

SEQ ID NO: 53640 - DNA, 15 bp, Homo sapiens
ttggtctctttattg

SEQ ID NO: 53641 - DNA, 15 bp, Homo sapiens
gttggtctctttatt

SEQ ID NO: 53642 - DNA, 15 bp, Homo sapiens
tgttggtctctttat

SEQ ID NO: 53643 - DNA, 15 bp, Homo sapiens
ttgttggtctcttta

SEQ ID NO: 53644 - DNA, 15 bp, Homo sapiens
gttgttggtctcttt

SEQ ID NO: 53645 - DNA, 15 bp, Homo sapiens
tgttgttggtctctt

SEQ ID NO: 53646 - DNA, 15 bp, Homo sapiens
gtgttgttggtctct

SEQ ID NO: 53647 - DNA, 15 bp, Homo sapiens
tgtgttgttggtctc

SEQ ID NO: 53648 - DNA, 15 bp, Homo sapiens
gtgtgttgttggtct

SEQ ID NO: 53649 - DNA, 15 bp, Homo sapiens
ggtgtgttgttggtc

SEQ ID NO: 53650 - DNA, 15 bp, Homo sapiens
tggtgtgttgttggt

SEQ ID NO: 53651 - DNA, 15 bp, Homo sapiens
atggtgtgttgttgg

SEQ ID NO: 53652 - DNA, 15 bp, Homo sapiens
catggtgtgttgttg

SEQ ID NO: 53653 - DNA, 15 bp, Homo sapiens
tcatggtgtgttgtt

SEQ ID NO: 53654 - DNA, 15 bp, Homo sapiens
ctcatggtgtgttgt

SEQ ID NO: 53655 - DNA, 15 bp, Homo sapiens
cctcatggtgtgttg

SEQ ID NO: 53656 - DNA, 15 bp, Homo sapiens
tcctcatggtgtgtt

SEQ ID NO: 53657 - DNA, 15 bp, Homo sapiens
ttcctcatggtgtgt

SEQ ID NO: 53658 - DNA, 15 bp, Homo sapiens
tttcctcatggtgtg

SEQ ID NO: 53659 - DNA, 15 bp, Homo sapiens
ctttcctcatggtgt

SEQ ID NO: 53660 - DNA, 15 bp, Homo sapiens
cctttcctcatggtg

SEQ ID NO: 53661 - DNA, 15 bp, Homo sapiens
ccctttcctcatggt

SEQ ID NO: 53662 - DNA, 15 bp, Homo sapiens
gccctttcctcatgg

SEQ ID NO: 53663 - DNA, 15 bp, Homo sapiens
tgccctttcctcatg

SEQ ID NO: 53664 - DNA, 15 bp, Homo sapiens
ctgccctttcctcat

SEQ ID NO: 53665 - DNA, 15 bp, Homo sapiens
actgccctttcctca

SEQ ID NO: 53666 - DNA, 15 bp, Homo sapiens
gactgccctttcctc

SEQ ID NO: 53667 - DNA, 15 bp, Homo sapiens
agactgccctttcct

SEQ ID NO: 53668 - DNA, 15 bp, Homo sapiens
gagactgccctttcc

SEQ ID NO: 53669 - DNA, 15 bp, Homo sapiens
agagactgccctttc

SEQ ID NO: 53670 - DNA, 15 bp, Homo sapiens
aagagactgcccttt

SEQ ID NO: 53671 - DNA, 15 bp, Homo sapiens
gaagagactgccctt

SEQ ID NO: 53672 - DNA, 15 bp, Homo sapiens
tgaagagactgccct

SEQ ID NO: 53673 - DNA, 15 bp, Homo sapiens
ttgaagagactgccc

SEQ ID NO: 53674 - DNA, 15 bp, Homo sapiens
attgaagagactgcc

SEQ ID NO: 53675 - DNA, 15 bp, Homo sapiens
tattgaagagactgc

SEQ ID NO: 53676 - DNA, 15 bp, Homo sapiens
ttattgaagagactg

SEQ ID NO: 53677 - DNA, 15 bp, Homo sapiens
tttattgaagagact

SEQ ID NO: 53678 - DNA, 15 bp, Homo sapiens
gtttattgaagagac

SEQ ID NO: 53679 - DNA, 15 bp, Homo sapiens
cgtttattgaagaga

SEQ ID NO: 53680 - DNA, 15 bp, Homo sapiens
tcgtttattgaagag

SEQ ID NO: 53681 - DNA, 15 bp, Homo sapiens
atcgtttattgaaga

SEQ ID NO: 53682 - DNA, 15 bp, Homo sapiens
catcgtttattgaag

SEQ ID NO: 53683 - DNA, 15 bp, Homo sapiens
acatcgtttattgaa

SEQ ID NO: 53684 - DNA, 15 bp, Homo sapiens
aacatcgtttattga

SEQ ID NO: 53685 - DNA, 15 bp, Homo sapiens
caacatcgtttattg

SEQ ID NO: 53686 - DNA, 15 bp, Homo sapiens
ccaacatcgtttatt

SEQ ID NO: 53687 - DNA, 15 bp, Homo sapiens
cccaacatcgtttat

SEQ ID NO: 53688 - DNA, 15 bp, Homo sapiens
ccccaacatcgttta

SEQ ID NO: 53689 - DNA, 15 bp, Homo sapiens
tccccaacatcgttt

SEQ ID NO: 53690 - DNA, 15 bp, Homo sapiens
ttccccaacatcgtt

SEQ ID NO: 53691 - DNA, 15 bp, Homo sapiens
tttccccaacatcgt

SEQ ID NO: 53692 - DNA, 15 bp, Homo sapiens
gtttccccaacatcg

SEQ ID NO: 53693 - DNA, 15 bp, Homo sapiens
agtttccccaacatc

SEQ ID NO: 53694 - DNA, 15 bp, Homo sapiens
cagtttccccaacat

SEQ ID NO: 53695 - DNA, 15 bp, Homo sapiens
ccagtttccccaaca

SEQ ID NO: 53696 - DNA, 15 bp, Homo sapiens
tccagtttccccaac

SEQ ID NO: 53697 - DNA, 15 bp, Homo sapiens
atccagtttccccaa

SEQ ID NO: 53698 - DNA, 15 bp, Homo sapiens
tatccagtttcccca

SEQ ID NO: 53699 - DNA, 15 bp, Homo sapiens
atatccagtttcccc

SEQ ID NO: 53700 - DNA, 15 bp, Homo sapiens
gatatccagtttccc

SEQ ID NO: 53701 - DNA, 15 bp, Homo sapiens
ggatatccagtttcc

SEQ ID NO: 53702 - DNA, 15 bp, Homo sapiens
tggatatccagtttc

SEQ ID NO: 53703 - DNA, 15 bp, Homo sapiens
gtggatatccagttt

SEQ ID NO: 53704 - DNA, 15 bp, Homo sapiens
tgtggatatccagtt

SEQ ID NO: 53705 - DNA, 15 bp, Homo sapiens
atgtggatatccagt

SEQ ID NO: 53706 - DNA, 15 bp, Homo sapiens
catgtggatatccag

SEQ ID NO: 53707 - DNA, 15 bp, Homo sapiens
gcatgtggatatcca

SEQ ID NO: 53708 - DNA, 15 bp, Homo sapiens
tgcatgtggatatcc

SEQ ID NO: 53709 - DNA, 15 bp, Homo sapiens
ctgcatgtggatatc

SEQ ID NO: 53710 - DNA, 15 bp, Homo sapiens
tctgcatgtggatat

SEQ ID NO: 53711 - DNA, 15 bp, Homo sapiens
ttctgcatgtggata

SEQ ID NO: 53712 - DNA, 15 bp, Homo sapiens
cttctgcatgtggat

SEQ ID NO: 53713 - DNA, 15 bp, Homo sapiens
tcttctgcatgtgga

SEQ ID NO: 53714 - DNA, 15 bp, Homo sapiens
ttcttctgcatgtgg

SEQ ID NO: 53715 - DNA, 15 bp, Homo sapiens
attcttctgcatgtg

SEQ ID NO: 53716 - DNA, 15 bp, Homo sapiens
cattcttctgcatgt

SEQ ID NO: 53717 - DNA, 15 bp, Homo sapiens
tcattcttctgcatg

SEQ ID NO: 53718 - DNA, 15 bp, Homo sapiens
ttcattcttctgcat

SEQ ID NO: 53719 - DNA, 15 bp, Homo sapiens
tttcattcttctgca

SEQ ID NO: 53720 - DNA, 15 bp, Homo sapiens
atttcattcttctgc

SEQ ID NO: 53721 - DNA, 15 bp, Homo sapiens
aatttcattcttctg

SEQ ID NO: 53722 - DNA, 15 bp, Homo sapiens
aaatttcattcttct

SEQ ID NO: 53723 - DNA, 15 bp, Homo sapiens
caaatttcattcttc

SEQ ID NO: 53724 - DNA, 15 bp, Homo sapiens
tcaaatttcattctt

SEQ ID NO: 53725 - DNA, 15 bp, Homo sapiens
atcaaatttcattct

SEQ ID NO: 53726 - DNA, 15 bp, Homo sapiens
gatcaaatttcattc

SEQ ID NO: 53727 - DNA, 15 bp, Homo sapiens
ggatcaaatttcatt

SEQ ID NO: 53728 - DNA, 15 bp, Homo sapiens
aggatcaaatttcat

SEQ ID NO: 53729 - DNA, 15 bp, Homo sapiens
aaggatcaaatttca

SEQ ID NO: 53730 - DNA, 15 bp, Homo sapiens
taaggatcaaatttc

SEQ ID NO: 53731 - DNA, 15 bp, Homo sapiens
gtaaggatcaaattt

SEQ ID NO: 53732 - DNA, 15 bp, Homo sapiens
ggtaaggatcaaatt

SEQ ID NO: 53733 - DNA, 15 bp, Homo sapiens
aggtaaggatcaaat

SEQ ID NO: 53734 - DNA, 15 bp, Homo sapiens
gaggtaaggatcaaa

SEQ ID NO: 53735 - DNA, 15 bp, Homo sapiens
tgaggtaaggatcaa

SEQ ID NO: 53736 - DNA, 15 bp, Homo sapiens
gtgaggtaaggatca

SEQ ID NO: 53737 - DNA, 15 bp, Homo sapiens
tgtgaggtaaggatc

SEQ ID NO: 53738 - DNA, 15 bp, Homo sapiens
gtgtgaggtaaggat

SEQ ID NO: 53739 - DNA, 15 bp, Homo sapiens
agtgtgaggtaagga

SEQ ID NO: 53740 - DNA, 15 bp, Homo sapiens
tagtgtgaggtaagg

SEQ ID NO: 53741 - DNA, 15 bp, Homo sapiens
atagtgtgaggtaag

SEQ ID NO: 53742 - DNA, 15 bp, Homo sapiens
tatagtgtgaggtaa

SEQ ID NO: 53743 - DNA, 15 bp, Homo sapiens
gtatagtgtgaggta

SEQ ID NO: 53744 - DNA, 15 bp, Homo sapiens
tgtatagtgtgaggt

SEQ ID NO: 53745 - DNA, 15 bp, Homo sapiens
gtgtatagtgtgagg

SEQ ID NO: 53746 - DNA, 15 bp, Homo sapiens
tgtgtatagtgtgag

SEQ ID NO: 53747 - DNA, 15 bp, Homo sapiens
ttgtgtatagtgtga

SEQ ID NO: 53748 - DNA, 15 bp, Homo sapiens
tttgtgtatagtgtg

SEQ ID NO: 53749 - DNA, 15 bp, Homo sapiens
atttgtgtatagtgt

SEQ ID NO: 53750 - DNA, 15 bp, Homo sapiens
tatttgtgtatagtg

SEQ ID NO: 53751 - DNA, 15 bp, Homo sapiens
atatttgtgtatagt

SEQ ID NO: 53752 - DNA, 15 bp, Homo sapiens
gatatttgtgtatag

SEQ ID NO: 53753 - DNA, 15 bp, Homo sapiens
tgatatttgtgtata

SEQ ID NO: 53754 - DNA, 15 bp, Homo sapiens
ttgatatttgtgtat

SEQ ID NO: 53755 - DNA, 15 bp, Homo sapiens
gttgatatttgtgta

SEQ ID NO: 53756 - DNA, 15 bp, Homo sapiens
agttgatatttgtgt

SEQ ID NO: 53757 - DNA, 15 bp, Homo sapiens
gagttgatatttgtg

SEQ ID NO: 53758 - DNA, 15 bp, Homo sapiens
tgagttgatatttgt

SEQ ID NO: 53759 - DNA, 15 bp, Homo sapiens
ttgagttgatatttg

SEQ ID NO: 53760 - DNA, 15 bp, Homo sapiens
tttgagttgatattt

SEQ ID NO: 53761 - DNA, 15 bp, Homo sapiens
ttttgagttgatatt

SEQ ID NO: 53762 - DNA, 15 bp, Homo sapiens
attttgagttgatat

SEQ ID NO: 53763 - DNA, 15 bp, Homo sapiens
cattttgagttgata

SEQ ID NO: 53764 - DNA, 15 bp, Homo sapiens
ccattttgagttgat

SEQ ID NO: 53765 - DNA, 15 bp, Homo sapiens
tccattttgagttga

SEQ ID NO: 53766 - DNA, 15 bp, Homo sapiens
atccattttgagttg

SEQ ID NO: 53767 - DNA, 15 bp, Homo sapiens
aatccattttgagtt

SEQ ID NO: 53768 - DNA, 15 bp, Homo sapiens
agaatcgcttgaacc

SEQ ID NO: 53769 - DNA, 15 bp, Homo sapiens
gagaatcgcttgaac

SEQ ID NO: 53770 - DNA, 15 bp, Homo sapiens
ggagaatcgcttgaa

SEQ ID NO: 53771 - DNA, 15 bp, Homo sapiens
aggagaatcgcttga

SEQ ID NO: 53772 - DNA, 15 bp, Homo sapiens
caggagaatcgcttg

SEQ ID NO: 53773 - DNA, 15 bp, Homo sapiens
gcaggagaatcgctt

SEQ ID NO: 53774 - DNA, 15 bp, Homo sapiens
ggcaggagaatcgct

SEQ ID NO: 53775 - DNA, 15 bp, Homo sapiens
aggcaggagaatcgc

SEQ ID NO: 53776 - DNA, 15 bp, Homo sapiens
gaggcaggagaatcg

SEQ ID NO: 53777 - DNA, 15 bp, Homo sapiens
tgaggcaggagaatc

SEQ ID NO: 53778 - DNA, 15 bp, Homo sapiens
ttgaggcaggagaat

SEQ ID NO: 53779 - DNA, 15 bp, Homo sapiens
cttgaggcaggagaa

SEQ ID NO: 53780 - DNA, 15 bp, Homo sapiens
ccttgaggcaggaga

SEQ ID NO: 53781 - DNA, 15 bp, Homo sapiens
cccttgaggcaggag

SEQ ID NO: 53782 - DNA, 15 bp, Homo sapiens
tcccttgaggcagga

SEQ ID NO: 53783 - DNA, 15 bp, Homo sapiens
ctcccttgaggcagg

SEQ ID NO: 53784 - DNA, 15 bp, Homo sapiens
actcccttgaggcag

SEQ ID NO: 53785 - DNA, 15 bp, Homo sapiens
cactcccttgaggca

SEQ ID NO: 53786 - DNA, 15 bp, Homo sapiens
tcactcccttgaggc

SEQ ID NO: 53787 - DNA, 15 bp, Homo sapiens
ttcactcccttgagg

SEQ ID NO: 53788 - DNA, 15 bp, Homo sapiens
attcactcccttgag

SEQ ID NO: 53789 - DNA, 15 bp, Homo sapiens
cattcactcccttga

SEQ ID NO: 53790 - DNA, 15 bp, Homo sapiens
gcattcactcccttg

SEQ ID NO: 53791 - DNA, 15 bp, Homo sapiens
tgcattcactccctt

SEQ ID NO: 53792 - DNA, 15 bp, Homo sapiens
ttgcattcactccct

SEQ ID NO: 53793 - DNA, 15 bp, Homo sapiens
gttgcattcactccc

SEQ ID NO: 53794 - DNA, 15 bp, Homo sapiens
tgttgcattcactcc

SEQ ID NO: 53795 - DNA, 15 bp, Homo sapiens
ctgttgcattcactc

SEQ ID NO: 53796 - DNA, 15 bp, Homo sapiens
cctgttgcattcact

SEQ ID NO: 53797 - DNA, 15 bp, Homo sapiens
ccctgttgcattcac

SEQ ID NO: 53798 - DNA, 15 bp, Homo sapiens
tccctgttgcattca

SEQ ID NO: 53799 - DNA, 15 bp, Homo sapiens
ttccctgttgcattc

SEQ ID NO: 53800 - DNA, 15 bp, Homo sapiens
gttccctgttgcatt

SEQ ID NO: 53801 - DNA, 15 bp, Homo sapiens
agttccctgttgcat

SEQ ID NO: 53802 - DNA, 15 bp, Homo sapiens
tagttccctgttgca

SEQ ID NO: 53803 - DNA, 15 bp, Homo sapiens
ctagttccctgttgc

SEQ ID NO: 53804 - DNA, 15 bp, Homo sapiens
tctagttccctgttg

SEQ ID NO: 53805 - DNA, 15 bp, Homo sapiens
ttctagttccctgtt

SEQ ID NO: 53806 - DNA, 15 bp, Homo sapiens
gttctagttccctgt

SEQ ID NO: 53807 - DNA, 15 bp, Homo sapiens
tgttctagttccctg

SEQ ID NO: 53808 - DNA, 15 bp, Homo sapiens
ttgttctagttccct

SEQ ID NO: 53809 - DNA, 15 bp, Homo sapiens
cttgttctagttccc

SEQ ID NO: 53810 - DNA, 15 bp, Homo sapiens
acttgttctagttcc

SEQ ID NO: 53811 - DNA, 15 bp, Homo sapiens
tacttgttctagttc

SEQ ID NO: 53812 - DNA, 15 bp, Homo sapiens
ttacttgttctagtt

SEQ ID NO: 53813 - DNA, 15 bp, Homo sapiens
cttacttgttctagt

SEQ ID NO: 53814 - DNA, 15 bp, Homo sapiens
tcttacttgttctag

SEQ ID NO: 53815 - DNA, 15 bp, Homo sapiens
gtcttacttgttcta

SEQ ID NO: 53816 - DNA, 15 bp, Homo sapiens
ggtcttacttgttct

SEQ ID NO: 53817 - DNA, 15 bp, Homo sapiens
gggtcttacttgttc

SEQ ID NO: 53818 - DNA, 15 bp, Homo sapiens
ggggtcttacttgtt

SEQ ID NO: 53819 - DNA, 15 bp, Homo sapiens
aggggtcttacttgt

SEQ ID NO: 53820 - DNA, 15 bp, Homo sapiens
caggggtcttacttg

SEQ ID NO: 53821 - DNA, 15 bp, Homo sapiens
acaggggtcttactt

SEQ ID NO: 53822 - DNA, 15 bp, Homo sapiens
aacaggggtcttact

SEQ ID NO: 53823 - DNA, 15 bp, Homo sapiens
gaacaggggtcttac

SEQ ID NO: 53824 - DNA, 15 bp, Homo sapiens
agaacaggggtctta

SEQ ID NO: 53825 - DNA, 15 bp, Homo sapiens
aagaacaggggtctt

SEQ ID NO: 53826 - DNA, 15 bp, Homo sapiens
aaagaacaggggtct

SEQ ID NO: 53827 - DNA, 15 bp, Homo sapiens
taaagaacaggggtc

SEQ ID NO: 53828 - DNA, 15 bp, Homo sapiens
gtaaagaacaggggt

SEQ ID NO: 53829 - DNA, 15 bp, Homo sapiens
agtaaagaacagggg

SEQ ID NO: 53830 - DNA, 15 bp, Homo sapiens
gagtaaagaacaggg

SEQ ID NO: 53831 - DNA, 15 bp, Homo sapiens
tgagtaaagaacagg

SEQ ID NO: 53832 - DNA, 15 bp, Homo sapiens
atgagtaaagaacag

SEQ ID NO: 53833 - DNA, 15 bp, Homo sapiens
catgagtaaagaaca

SEQ ID NO: 53834 - DNA, 15 bp, Homo sapiens
gcatgagtaaagaac

SEQ ID NO: 53835 - DNA, 15 bp, Homo sapiens
agcatgagtaaagaa

SEQ ID NO: 53836 - DNA, 15 bp, Homo sapiens
cagcatgagtaaaga

SEQ ID NO: 53837 - DNA, 15 bp, Homo sapiens
ccagcatgagtaaag

SEQ ID NO: 53838 - DNA, 15 bp, Homo sapiens
cccagcatgagtaaa

SEQ ID NO: 53839 - DNA, 15 bp, Homo sapiens
tcccagcatgagtaa

SEQ ID NO: 53840 - DNA, 15 bp, Homo sapiens
ctcccagcatgagta

SEQ ID NO: 53841 - DNA, 15 bp, Homo sapiens
tctcccagcatgagt

SEQ ID NO: 53842 - DNA, 15 bp, Homo sapiens
ctctcccagcatgag

SEQ ID NO: 53843 - DNA, 15 bp, Homo sapiens
cctctcccagcatga

SEQ ID NO: 53844 - DNA, 15 bp, Homo sapiens
tcctctcccagcatg

SEQ ID NO: 53845 - DNA, 15 bp, Homo sapiens
gtcctctcccagcat

SEQ ID NO: 53846 - DNA, 15 bp, Homo sapiens
tgtcctctcccagca

SEQ ID NO: 53847 - DNA, 15 bp, Homo sapiens
ctgtcctctcccagc

SEQ ID NO: 53848 - DNA, 15 bp, Homo sapiens
cctgtcctctcccag

SEQ ID NO: 53849 - DNA, 15 bp, Homo sapiens
gcctgtcctctccca

SEQ ID NO: 53850 - DNA, 15 bp, Homo sapiens
tgcctgtcctctccc

SEQ ID NO: 53851 - DNA, 15 bp, Homo sapiens
ctgcctgtcctctcc

SEQ ID NO: 53852 - DNA, 15 bp, Homo sapiens
actgcctgtcctctc

SEQ ID NO: 53853 - DNA, 15 bp, Homo sapiens
tactgcctgtcctct

SEQ ID NO: 53854 - DNA, 15 bp, Homo sapiens
ttactgcctgtcctc

SEQ ID NO: 53855 - DNA, 15 bp, Homo sapiens
tttactgcctgtcct

SEQ ID NO: 53856 - DNA, 15 bp, Homo sapiens
ctttactgcctgtcc

SEQ ID NO: 53857 - DNA, 15 bp, Homo sapiens
tctttactgcctgtc

SEQ ID NO: 53858 - DNA, 15 bp, Homo sapiens
ttctttactgcctgt

SEQ ID NO: 53859 - DNA, 15 bp, Homo sapiens
cttctttactgcctg

SEQ ID NO: 53860 - DNA, 15 bp, Homo sapiens
acttctttactgcct

SEQ ID NO: 53861 - DNA, 15 bp, Homo sapiens
tacttctttactgcc

SEQ ID NO: 53862 - DNA, 15 bp, Homo sapiens
atacttctttactgc

SEQ ID NO: 53863 - DNA, 15 bp, Homo sapiens
catacttctttactg

SEQ ID NO: 53864 - DNA, 15 bp, Homo sapiens
gcatacttctttact

SEQ ID NO: 53865 - DNA, 15 bp, Homo sapiens
tgcatacttctttac

SEQ ID NO: 53866 - DNA, 15 bp, Homo sapiens
gtgcatacttcttta

SEQ ID NO: 53867 - DNA, 15 bp, Homo sapiens
tgtgcatacttcttt

SEQ ID NO: 53868 - DNA, 15 bp, Homo sapiens
atgtgcatacttctt

SEQ ID NO: 53869 - DNA, 15 bp, Homo sapiens
aatgtgcatacttct

SEQ ID NO: 53870 - DNA, 15 bp, Homo sapiens
gaatgtgcatacttc

SEQ ID NO: 53871 - DNA, 15 bp, Homo sapiens
tgaatgtgcatactt

SEQ ID NO: 53872 - DNA, 15 bp, Homo sapiens
ttgaatgtgcatact

SEQ ID NO: 53873 - DNA, 15 bp, Homo sapiens
tttgaatgtgcatac

SEQ ID NO: 53874 - DNA, 15 bp, Homo sapiens
ctttgaatgtgcata

SEQ ID NO: 53875 - DNA, 15 bp, Homo sapiens
tctttgaatgtgcat

SEQ ID NO: 53876 - DNA, 15 bp, Homo sapiens
atctttgaatgtgca

SEQ ID NO: 53877 - DNA, 15 bp, Homo sapiens
tatctttgaatgtgc

SEQ ID NO: 53878 - DNA, 15 bp, Homo sapiens
ttatctttgaatgtg

SEQ ID NO: 53879 - DNA, 15 bp, Homo sapiens
cttatctttgaatgt

SEQ ID NO: 53880 - DNA, 15 bp, Homo sapiens
tcttatctttgaatg

SEQ ID NO: 53881 - DNA, 15 bp, Homo sapiens
gtcttatctttgaat

SEQ ID NO: 53882 - DNA, 15 bp, Homo sapiens
tgtcttatctttgaa

SEQ ID NO: 53883 - DNA, 15 bp, Homo sapiens
ttgtcttatctttga

SEQ ID NO: 53884 - DNA, 15 bp, Homo sapiens
attgtcttatctttg

SEQ ID NO: 53885 - DNA, 15 bp, Homo sapiens
tattgtcttatcttt

SEQ ID NO: 53886 - DNA, 15 bp, Homo sapiens
ctattgtcttatctt

SEQ ID NO: 53887 - DNA, 15 bp, Homo sapiens
gctattgtcttatct

SEQ ID NO: 53888 - DNA, 15 bp, Homo sapiens
tgctattgtcttatc

SEQ ID NO: 53889 - DNA, 15 bp, Homo sapiens
ctgctattgtcttat

SEQ ID NO: 53890 - DNA, 15 bp, Homo sapiens
tctgctattgtctta

SEQ ID NO: 53891 - DNA, 15 bp, Homo sapiens
ctctgctattgtctt

SEQ ID NO: 53892 - DNA, 15 bp, Homo sapiens
tctctgctattgtct

SEQ ID NO: 53893 - DNA, 15 bp, Homo sapiens
ctctctgctattgtc

SEQ ID NO: 53894 - DNA, 15 bp, Homo sapiens
actctctgctattgt

SEQ ID NO: 53895 - DNA, 15 bp, Homo sapiens
cactctctgctattg

SEQ ID NO: 53896 - DNA, 15 bp, Homo sapiens
ccactctctgctatt

SEQ ID NO: 53897 - DNA, 15 bp, Homo sapiens
accactctctgctat

SEQ ID NO: 53898 - DNA, 15 bp, Homo sapiens
taccactctctgcta

SEQ ID NO: 53899 - DNA, 15 bp, Homo sapiens
ttaccactctctgct

SEQ ID NO: 53900 - DNA, 15 bp, Homo sapiens
cttaccactctctgc

SEQ ID NO: 53901 - DNA, 15 bp, Homo sapiens
acttaccactctctg

SEQ ID NO: 53902 - DNA, 15 bp, Homo sapiens
tacttaccactctct

SEQ ID NO: 53903 - DNA, 15 bp, Homo sapiens
ttacttaccactctc

SEQ ID NO: 53904 - DNA, 15 bp, Homo sapiens
tttacttaccactct

SEQ ID NO: 53905 - DNA, 15 bp, Homo sapiens
atttacttaccactc

SEQ ID NO: 53906 - DNA, 15 bp, Homo sapiens
tatttacttaccact

SEQ ID NO: 53907 - DNA, 15 bp, Homo sapiens
ttatttacttaccac

SEQ ID NO: 53908 - DNA, 15 bp, Homo sapiens
tttatttacttacca

SEQ ID NO: 53909 - DNA, 15 bp, Homo sapiens
ctttatttacttacc

SEQ ID NO: 53910 - DNA, 15 bp, Homo sapiens
cctttatttacttac

SEQ ID NO: 53911 - DNA, 15 bp, Homo sapiens
tcctttatttactta

SEQ ID NO: 53912 - DNA, 15 bp, Homo sapiens
ttcctttatttactt

SEQ ID NO: 53913 - DNA, 15 bp, Homo sapiens
tttcctttatttact

SEQ ID NO: 53914 - DNA, 15 bp, Homo sapiens
atttcctttatttac

SEQ ID NO: 53915 - DNA, 15 bp, Homo sapiens
tatttcctttattta

SEQ ID NO: 53916 - DNA, 15 bp, Homo sapiens
ttatttcctttattt

SEQ ID NO: 53917 - DNA, 15 bp, Homo sapiens
tttatttcctttatt

SEQ ID NO: 53918 - DNA, 15 bp, Homo sapiens
ttttatttcctttat

SEQ ID NO: 53919 - DNA, 15 bp, Homo sapiens
attttatttccttta

SEQ ID NO: 53920 - DNA, 15 bp, Homo sapiens
tattttatttccttt

SEQ ID NO: 53921 - DNA, 15 bp, Homo sapiens
ctattttatttcctt

SEQ ID NO: 53922 - DNA, 15 bp, Homo sapiens
cctattttatttcct

SEQ ID NO: 53923 - DNA, 15 bp, Homo sapiens
ccctattttatttcc

SEQ ID NO: 53924 - DNA, 15 bp, Homo sapiens
gccctattttatttc

SEQ ID NO: 53925 - DNA, 15 bp, Homo sapiens
tgccctattttattt

SEQ ID NO: 53926 - DNA, 15 bp, Homo sapiens
ttgccctattttatt

SEQ ID NO: 53927 - DNA, 15 bp, Homo sapiens
attgccctattttat

SEQ ID NO: 53928 - DNA, 15 bp, Homo sapiens
cattgccctatttta

SEQ ID NO: 53929 - DNA, 15 bp, Homo sapiens
acattgccctatttt

SEQ ID NO: 53930 - DNA, 15 bp, Homo sapiens
cacattgccctattt

SEQ ID NO: 53931 - DNA, 15 bp, Homo sapiens
tcacattgccctatt

SEQ ID NO: 53932 - DNA, 15 bp, Homo sapiens
gtcacattgccctat

SEQ ID NO: 53933 - DNA, 15 bp, Homo sapiens
tgtcacattgcccta

SEQ ID NO: 53934 - DNA, 15 bp, Homo sapiens
ctgtcacattgccct

SEQ ID NO: 53935 - DNA, 15 bp, Homo sapiens
gctgtcacattgccc

SEQ ID NO: 53936 - DNA, 15 bp, Homo sapiens
cgctgtcacattgcc

SEQ ID NO: 53937 - DNA, 15 bp, Homo sapiens
tcgctgtcacattgc

SEQ ID NO: 53938 - DNA, 15 bp, Homo sapiens
gtcgctgtcacattg

SEQ ID NO: 53939 - DNA, 15 bp, Homo sapiens
agtcgctgtcacatt

SEQ ID NO: 53940 - DNA, 15 bp, Homo sapiens
cagtcgctgtcacat

SEQ ID NO: 53941 - DNA, 15 bp, Homo sapiens
ccagtcgctgtcaca

SEQ ID NO: 53942 - DNA, 15 bp, Homo sapiens
cccagtcgctgtcac

SEQ ID NO: 53943 - DNA, 15 bp, Homo sapiens
ccccagtcgctgtca

SEQ ID NO: 53944 - DNA, 15 bp, Homo sapiens
accccagtcgctgtc

SEQ ID NO: 53945 - DNA, 15 bp, Homo sapiens
caccccagtcgctgt

SEQ ID NO: 53946 - DNA, 15 bp, Homo sapiens
ccaccccagtcgctg

SEQ ID NO: 53947 - DNA, 15 bp, Homo sapiens
cccaccccagtcgct

SEQ ID NO: 53948 - DNA, 15 bp, Homo sapiens
tcccaccccagtcgc

SEQ ID NO: 53949 - DNA, 15 bp, Homo sapiens
ctcccaccccagtcg

SEQ ID NO: 53950 - DNA, 15 bp, Homo sapiens
tctcccaccccagtc

SEQ ID NO: 53951 - DNA, 15 bp, Homo sapiens
ttctcccaccccagt

SEQ ID NO: 53952 - DNA, 15 bp, Homo sapiens
tttctcccaccccag

SEQ ID NO: 53953 - DNA, 15 bp, Homo sapiens
ctttctcccacccca

SEQ ID NO: 53954 - DNA, 15 bp, Homo sapiens
tctttctcccacccc

SEQ ID NO: 53955 - DNA, 15 bp, Homo sapiens
ctctttctcccaccc

SEQ ID NO: 53956 - DNA, 15 bp, Homo sapiens
actctttctcccacc

SEQ ID NO: 53957 - DNA, 15 bp, Homo sapiens
gactctttctcccac

SEQ ID NO: 53958 - DNA, 15 bp, Homo sapiens
agactctttctccca

SEQ ID NO: 53959 - DNA, 15 bp, Homo sapiens
aagactctttctccc

SEQ ID NO: 53960 - DNA, 15 bp, Homo sapiens
aaagactctttctcc

SEQ ID NO: 53961 - DNA, 15 bp, Homo sapiens
taaagactctttctc

SEQ ID NO: 53962 - DNA, 15 bp, Homo sapiens
ttaaagactctttct

SEQ ID NO: 53963 - DNA, 15 bp, Homo sapiens
tttaaagactctttc

SEQ ID NO: 53964 - DNA, 15 bp, Homo sapiens
atttaaagactcttt

SEQ ID NO: 53965 - DNA, 15 bp, Homo sapiens
aatttaaagactctt

SEQ ID NO: 53966 - DNA, 15 bp, Homo sapiens
caatttaaagactct

SEQ ID NO: 53967 - DNA, 15 bp, Homo sapiens
ccaatttaaagactc

SEQ ID NO: 53968 - DNA, 15 bp, Homo sapiens
cccaatttaaagact

SEQ ID NO: 53969 - DNA, 15 bp, Homo sapiens
acccaatttaaagac

SEQ ID NO: 53970 - DNA, 15 bp, Homo sapiens
cacccaatttaaaga

SEQ ID NO: 53971 - DNA, 15 bp, Homo sapiens
ccacccaatttaaag

SEQ ID NO: 53972 - DNA, 15 bp, Homo sapiens
accacccaatttaaa

SEQ ID NO: 53973 - DNA, 15 bp, Homo sapiens
caccacccaatttaa

SEQ ID NO: 53974 - DNA, 15 bp, Homo sapiens
ccaccacccaattta

SEQ ID NO: 53975 - DNA, 15 bp, Homo sapiens
accaccacccaattt

SEQ ID NO: 53976 - DNA, 15 bp, Homo sapiens
caccaccacccaatt

SEQ ID NO: 53977 - DNA, 15 bp, Homo sapiens
ccaccaccacccaat

SEQ ID NO: 53978 - DNA, 15 bp, Homo sapiens
gccaccaccacccaa

SEQ ID NO: 53979 - DNA, 15 bp, Homo sapiens
tgccaccaccaccca

SEQ ID NO: 53980 - DNA, 15 bp, Homo sapiens
ctgccaccaccaccc

SEQ ID NO: 53981 - DNA, 15 bp, Homo sapiens
actgccaccaccacc

SEQ ID NO: 53982 - DNA, 15 bp, Homo sapiens
tactgccaccaccac

SEQ ID NO: 53983 - DNA, 15 bp, Homo sapiens
atactgccaccacca

SEQ ID NO: 53984 - DNA, 15 bp, Homo sapiens
gatactgccaccacc

SEQ ID NO: 53985 - DNA, 15 bp, Homo sapiens
agatactgccaccac

SEQ ID NO: 53986 - DNA, 15 bp, Homo sapiens
gagatactgccacca

SEQ ID NO: 53987 - DNA, 15 bp, Homo sapiens
agagatactgccacc

SEQ ID NO: 53988 - DNA, 15 bp, Homo sapiens
cagagatactgccac

SEQ ID NO: 53989 - DNA, 15 bp, Homo sapiens
tcagagatactgcca

SEQ ID NO: 53990 - DNA, 15 bp, Homo sapiens
ctcagagatactgcc

SEQ ID NO: 53991 - DNA, 15 bp, Homo sapiens
cctcagagatactgc

SEQ ID NO: 53992 - DNA, 15 bp, Homo sapiens
tcctcagagatactg

SEQ ID NO: 53993 - DNA, 15 bp, Homo sapiens
ctcctcagagatact

SEQ ID NO: 53994 - DNA, 15 bp, Homo sapiens
cctcctcagagatac

SEQ ID NO: 53995 - DNA, 15 bp, Homo sapiens
acctcctcagagata

SEQ ID NO: 53996 - DNA, 15 bp, Homo sapiens
tacctcctcagagat

SEQ ID NO: 53997 - DNA, 15 bp, Homo sapiens
ctacctcctcagaga

SEQ ID NO: 53998 - DNA, 15 bp, Homo sapiens
gctacctcctcagag

SEQ ID NO: 53999 - DNA, 15 bp, Homo sapiens
tgctacctcctcaga

SEQ ID NO: 54000 - DNA, 15 bp, Homo sapiens
atgctacctcctcag

SEQ ID NO: 54001 - DNA, 15 bp, Homo sapiens
aatgctacctcctca

SEQ ID NO: 54002 - DNA, 15 bp, Homo sapiens
aaatgctacctcctc

SEQ ID NO: 54003 - DNA, 15 bp, Homo sapiens
caaatgctacctcct

SEQ ID NO: 54004 - DNA, 15 bp, Homo sapiens
tcaaatgctacctcc

SEQ ID NO: 54005 - DNA, 15 bp, Homo sapiens
ctcaaatgctacctc

SEQ ID NO: 54006 - DNA, 15 bp, Homo sapiens
actcaaatgctacct

SEQ ID NO: 54007 - DNA, 15 bp, Homo sapiens
cactcaaatgctacc

SEQ ID NO: 54008 - DNA, 15 bp, Homo sapiens
ccactcaaatgctac

SEQ ID NO: 54009 - DNA, 15 bp, Homo sapiens
tccactcaaatgcta

SEQ ID NO: 54010 - DNA, 15 bp, Homo sapiens
ctccactcaaatgct

SEQ ID NO: 54011 - DNA, 15 bp, Homo sapiens
tctccactcaaatgc

SEQ ID NO: 54012 - DNA, 15 bp, Homo sapiens
ttctccactcaaatg

SEQ ID NO: 54013 - DNA, 15 bp, Homo sapiens
gttctccactcaaat

SEQ ID NO: 54014 - DNA, 15 bp, Homo sapiens
agttctccactcaaa

SEQ ID NO: 54015 - DNA, 15 bp, Homo sapiens
cagttctccactcaa

SEQ ID NO: 54016 - DNA, 15 bp, Homo sapiens
tcagttctccactca

SEQ ID NO: 54017 - DNA, 15 bp, Homo sapiens
ttcagttctccactc

SEQ ID NO: 54018 - DNA, 15 bp, Homo sapiens
cttcagttctccact

SEQ ID NO: 54019 - DNA, 15 bp, Homo sapiens
tcttcagttctccac

SEQ ID NO: 54020 - DNA, 15 bp, Homo sapiens
ttcttcagttctcca

SEQ ID NO: 54021 - DNA, 15 bp, Homo sapiens
tttcttcagttctcc

SEQ ID NO: 54022 - DNA, 15 bp, Homo sapiens
ttttcttcagttctc

SEQ ID NO: 54023 - DNA, 15 bp, Homo sapiens
cttttcttcagttct

SEQ ID NO: 54024 - DNA, 15 bp, Homo sapiens
acttttcttcagttc

SEQ ID NO: 54025 - DNA, 15 bp, Homo sapiens
gacttttcttcagtt

SEQ ID NO: 54026 - DNA, 15 bp, Homo sapiens
tgacttttcttcagt

SEQ ID NO: 54027 - DNA, 15 bp, Homo sapiens
ctgacttttcttcag

SEQ ID NO: 54028 - DNA, 15 bp, Homo sapiens
gctgacttttcttca

SEQ ID NO: 54029 - DNA, 15 bp, Homo sapiens
ggctgacttttcttc

SEQ ID NO: 54030 - DNA, 15 bp, Homo sapiens
tggctgacttttctt

SEQ ID NO: 54031 - DNA, 15 bp, Homo sapiens
atggctgacttttct

SEQ ID NO: 54032 - DNA, 15 bp, Homo sapiens
tatggctgacttttc

SEQ ID NO: 54033 - DNA, 15 bp, Homo sapiens
gtatggctgactttt

SEQ ID NO: 54034 - DNA, 15 bp, Homo sapiens
tgtatggctgacttt

SEQ ID NO: 54035 - DNA, 15 bp, Homo sapiens
ttgtatggctgactt

SEQ ID NO: 54036 - DNA, 15 bp, Homo sapiens
tttgtatggctgact

SEQ ID NO: 54037 - DNA, 15 bp, Homo sapiens
atttgtatggctgac

SEQ ID NO: 54038 - DNA, 15 bp, Homo sapiens
catttgtatggctga

SEQ ID NO: 54039 - DNA, 15 bp, Homo sapiens
tcatttgtatggctg

SEQ ID NO: 54040 - DNA, 15 bp, Homo sapiens
ctcatttgtatggct

SEQ ID NO: 54041 - DNA, 15 bp, Homo sapiens
cctcatttgtatggc

SEQ ID NO: 54042 - DNA, 15 bp, Homo sapiens
tcctcatttgtatgg

SEQ ID NO: 54043 - DNA, 15 bp, Homo sapiens
atcctcatttgtatg

SEQ ID NO: 54044 - DNA, 15 bp, Homo sapiens
aatcctcatttgtat

SEQ ID NO: 54045 - DNA, 15 bp, Homo sapiens
caatcctcatttgta

SEQ ID NO: 54046 - DNA, 15 bp, Homo sapiens
ccaatcctcatttgt

SEQ ID NO: 54047 - DNA, 15 bp, Homo sapiens
tccaatcctcatttg

SEQ ID NO: 54048 - DNA, 15 bp, Homo sapiens
ctccaatcctcattt

SEQ ID NO: 54049 - DNA, 15 bp, Homo sapiens
cctccaatcctcatt

SEQ ID NO: 54050 - DNA, 15 bp, Homo sapiens
tcctccaatcctcat

SEQ ID NO: 54051 - DNA, 15 bp, Homo sapiens
ctcctccaatcctca

SEQ ID NO: 54052 - DNA, 15 bp, Homo sapiens
cctcctccaatcctc

SEQ ID NO: 54053 - DNA, 15 bp, Homo sapiens
acctcctccaatcct

SEQ ID NO: 54054 - DNA, 15 bp, Homo sapiens
cacctcctccaatcc

SEQ ID NO: 54055 - DNA, 15 bp, Homo sapiens
ccacctcctccaatc

SEQ ID NO: 54056 - DNA, 15 bp, Homo sapiens
cccacctcctccaat

SEQ ID NO: 54057 - DNA, 15 bp, Homo sapiens
ccccacctcctccaa

SEQ ID NO: 54058 - DNA, 15 bp, Homo sapiens
gccccacctcctcca

SEQ ID NO: 54059 - DNA, 15 bp, Homo sapiens
cgccccacctcctcc

SEQ ID NO: 54060 - DNA, 15 bp, Homo sapiens
acgccccacctcctc

SEQ ID NO: 54061 - DNA, 15 bp, Homo sapiens
cacgccccacctcct

SEQ ID NO: 54062 - DNA, 15 bp, Homo sapiens
ccacgccccacctcc

SEQ ID NO: 54063 - DNA, 15 bp, Homo sapiens
cccacgccccacctc

SEQ ID NO: 54064 - DNA, 15 bp, Homo sapiens
tcccacgccccacct

SEQ ID NO: 54065 - DNA, 15 bp, Homo sapiens
ttcccacgccccacc

SEQ ID NO: 54066 - DNA, 15 bp, Homo sapiens
cttcccacgccccac

SEQ ID NO: 54067 - DNA, 15 bp, Homo sapiens
acttcccacgcccca

SEQ ID NO: 54068 - DNA, 15 bp, Homo sapiens
tacttcccacgcccc

SEQ ID NO: 54069 - DNA, 15 bp, Homo sapiens
ttacttcccacgccc

SEQ ID NO: 54070 - DNA, 15 bp, Homo sapiens
cttacttcccacgcc

SEQ ID NO: 54071 - DNA, 15 bp, Homo sapiens
tcttacttcccacgc

SEQ ID NO: 54072 - DNA, 15 bp, Homo sapiens
ctcttacttcccacg

SEQ ID NO: 54073 - DNA, 15 bp, Homo sapiens
gctcttacttcccac

SEQ ID NO: 54074 - DNA, 15 bp, Homo sapiens
tgctcttacttccca

SEQ ID NO: 54075 - DNA, 15 bp, Homo sapiens
ctgctcttacttccc

SEQ ID NO: 54076 - DNA, 15 bp, Homo sapiens
cctgctcttacttcc

SEQ ID NO: 54077 - DNA, 15 bp, Homo sapiens
ccctgctcttacttc

SEQ ID NO: 54078 - DNA, 15 bp, Homo sapiens
tccctgctcttactt

SEQ ID NO: 54079 - DNA, 15 bp, Homo sapiens
ctccctgctcttact

SEQ ID NO: 54080 - DNA, 15 bp, Homo sapiens
cctccctgctcttac

SEQ ID NO: 54081 - DNA, 15 bp, Homo sapiens
ccctccctgctctta

SEQ ID NO: 54082 - DNA, 15 bp, Homo sapiens
gccctccctgctctt

SEQ ID NO: 54083 - DNA, 15 bp, Homo sapiens
tgccctccctgctct

SEQ ID NO: 54084 - DNA, 15 bp, Homo sapiens
atgccctccctgctc

SEQ ID NO: 54085 - DNA, 15 bp, Homo sapiens
aatgccctccctgct

SEQ ID NO: 54086 - DNA, 15 bp, Homo sapiens
gaatgccctccctgc

SEQ ID NO: 54087 - DNA, 15 bp, Homo sapiens
tgaatgccctccctg

SEQ ID NO: 54088 - DNA, 15 bp, Homo sapiens
atgaatgccctccct

SEQ ID NO: 54089 - DNA, 15 bp, Homo sapiens
catgaatgccctccc

SEQ ID NO: 54090 - DNA, 15 bp, Homo sapiens
ccatgaatgccctcc

SEQ ID NO: 54091 - DNA, 15 bp, Homo sapiens
tccatgaatgccctc

SEQ ID NO: 54092 - DNA, 15 bp, Homo sapiens
ttccatgaatgccct

SEQ ID NO: 54093 - DNA, 15 bp, Homo sapiens
cttccatgaatgccc

SEQ ID NO: 54094 - DNA, 15 bp, Homo sapiens
tcttccatgaatgcc

SEQ ID NO: 54095 - DNA, 15 bp, Homo sapiens
ctcttccatgaatgc

SEQ ID NO: 54096 - DNA, 15 bp, Homo sapiens
tctcttccatgaatg

SEQ ID NO: 54097 - DNA, 15 bp, Homo sapiens
ctctcttccatgaat

SEQ ID NO: 54098 - DNA, 15 bp, Homo sapiens
cctctcttccatgaa

SEQ ID NO: 54099 - DNA, 15 bp, Homo sapiens
gcctctcttccatga

SEQ ID NO: 54100 - DNA, 15 bp, Homo sapiens
ggcctctcttccatg

SEQ ID NO: 54101 - DNA, 15 bp, Homo sapiens
gggcctctcttccat

SEQ ID NO: 54102 - DNA, 15 bp, Homo sapiens
ggggcctctcttcca

SEQ ID NO: 54103 - DNA, 15 bp, Homo sapiens
gggggcctctcttcc

SEQ ID NO: 54104 - DNA, 15 bp, Homo sapiens
tgggggcctctcttc

SEQ ID NO: 54105 - DNA, 15 bp, Homo sapiens
ttgggggcctctctt

SEQ ID NO: 54106 - DNA, 15 bp, Homo sapiens
cttgggggcctctct

SEQ ID NO: 54107 - DNA, 15 bp, Homo sapiens
acttgggggcctctc

SEQ ID NO: 54108 - DNA, 15 bp, Homo sapiens
aacttgggggcctct

SEQ ID NO: 54109 - DNA, 15 bp, Homo sapiens
caacttgggggcctc

SEQ ID NO: 54110 - DNA, 15 bp, Homo sapiens
ccaacttgggggcct

SEQ ID NO: 54111 - DNA, 15 bp, Homo sapiens
tccaacttgggggcc

SEQ ID NO: 54112 - DNA, 15 bp, Homo sapiens
ttccaacttgggggc

SEQ ID NO: 54113 - DNA, 15 bp, Homo sapiens
tttccaacttggggg

SEQ ID NO: 54114 - DNA, 15 bp, Homo sapiens
ttttccaacttgggg

SEQ ID NO: 54115 - DNA, 15 bp, Homo sapiens
cttttccaacttggg

SEQ ID NO: 54116 - DNA, 15 bp, Homo sapiens
ccttttccaacttgg

SEQ ID NO: 54117 - DNA, 15 bp, Homo sapiens
gccttttccaacttg

SEQ ID NO: 54118 - DNA, 15 bp, Homo sapiens
agccttttccaactt

SEQ ID NO: 54119 - DNA, 15 bp, Homo sapiens
cagccttttccaact

SEQ ID NO: 54120 - DNA, 15 bp, Homo sapiens
gcagccttttccaac

SEQ ID NO: 54121 - DNA, 15 bp, Homo sapiens
agcagccttttccaa

SEQ ID NO: 54122 - DNA, 15 bp, Homo sapiens
cagcagccttttcca

SEQ ID NO: 54123 - DNA, 15 bp, Homo sapiens
tcagcagccttttcc

SEQ ID NO: 54124 - DNA, 15 bp, Homo sapiens
atcagcagccttttc

SEQ ID NO: 54125 - DNA, 15 bp, Homo sapiens
aatcagcagcctttt

SEQ ID NO: 54126 - DNA, 15 bp, Homo sapiens
aaatcagcagccttt

SEQ ID NO: 54127 - DNA, 15 bp, Homo sapiens
taaatcagcagcctt

SEQ ID NO: 54128 - DNA, 15 bp, Homo sapiens
ttaaatcagcagcct

SEQ ID NO: 54129 - DNA, 15 bp, Homo sapiens
tttaaatcagcagcc

SEQ ID NO: 54130 - DNA, 15 bp, Homo sapiens
ctttaaatcagcagc

SEQ ID NO: 54131 - DNA, 15 bp, Homo sapiens
tctttaaatcagcag

SEQ ID NO: 54132 - DNA, 15 bp, Homo sapiens
ttctttaaatcagca

SEQ ID NO: 54133 - DNA, 15 bp, Homo sapiens
cttctttaaatcagc

SEQ ID NO: 54134 - DNA, 15 bp, Homo sapiens
gcttctttaaatcag

SEQ ID NO: 54135 - DNA, 15 bp, Homo sapiens
agcttctttaaatca

SEQ ID NO: 54136 - DNA, 15 bp, Homo sapiens
cagcttctttaaatc

SEQ ID NO: 54137 - DNA, 15 bp, Homo sapiens
tcagcttctttaaat

SEQ ID NO: 54138 - DNA, 15 bp, Homo sapiens
ttcagcttctttaaa

SEQ ID NO: 54139 - DNA, 15 bp, Homo sapiens
tttcagcttctttaa

SEQ ID NO: 54140 - DNA, 15 bp, Homo sapiens
gtttcagcttcttta

SEQ ID NO: 54141 - DNA, 15 bp, Homo sapiens
tgtttcagcttcttt

SEQ ID NO: 54142 - DNA, 15 bp, Homo sapiens
ttgtttcagcttctt

SEQ ID NO: 54143 - DNA, 15 bp, Homo sapiens
cttgtttcagcttct

SEQ ID NO: 54144 - DNA, 15 bp, Homo sapiens
gcttgtttcagcttc

SEQ ID NO: 54145 - DNA, 15 bp, Homo sapiens
ggcttgtttcagctt

SEQ ID NO: 54146 - DNA, 15 bp, Homo sapiens
gggcttgtttcagct

SEQ ID NO: 54147 - DNA, 15 bp, Homo sapiens
tgggcttgtttcagc

SEQ ID NO: 54148 - DNA, 15 bp, Homo sapiens
ctgggcttgtttcag

SEQ ID NO: 54149 - DNA, 15 bp, Homo sapiens
actgggcttgtttca

SEQ ID NO: 54150 - DNA, 15 bp, Homo sapiens
cactgggcttgtttc

SEQ ID NO: 54151 - DNA, 15 bp, Homo sapiens
gcactgggcttgttt

SEQ ID NO: 54152 - DNA, 15 bp, Homo sapiens
tgcactgggcttgtt

SEQ ID NO: 54153 - DNA, 15 bp, Homo sapiens
ttgcactgggcttgt

SEQ ID NO: 54154 - DNA, 15 bp, Homo sapiens
gttgcactgggcttg

SEQ ID NO: 54155 - DNA, 15 bp, Homo sapiens
agttgcactgggctt

SEQ ID NO: 54156 - DNA, 15 bp, Homo sapiens
cagttgcactgggct

SEQ ID NO: 54157 - DNA, 15 bp, Homo sapiens
tcagttgcactgggc

SEQ ID NO: 54158 - DNA, 15 bp, Homo sapiens
ttcagttgcactggg

SEQ ID NO: 54159 - DNA, 15 bp, Homo sapiens
attcagttgcactgg

SEQ ID NO: 54160 - DNA, 15 bp, Homo sapiens
tattcagttgcactg

SEQ ID NO: 54161 - DNA, 15 bp, Homo sapiens
ctattcagttgcact

SEQ ID NO: 54162 - DNA, 15 bp, Homo sapiens
tctattcagttgcac

SEQ ID NO: 54163 - DNA, 15 bp, Homo sapiens
ctctattcagttgca

SEQ ID NO: 54164 - DNA, 15 bp, Homo sapiens
actctattcagttgc

SEQ ID NO: 54165 - DNA, 15 bp, Homo sapiens
cactctattcagttg

SEQ ID NO: 54166 - DNA, 15 bp, Homo sapiens
tcactctattcagtt

SEQ ID NO: 54167 - DNA, 15 bp, Homo sapiens
ttcactctattcagt

SEQ ID NO: 54168 - DNA, 15 bp, Homo sapiens
gttcactctattcag

SEQ ID NO: 54169 - DNA, 15 bp, Homo sapiens
tgttcactctattca

SEQ ID NO: 54170 - DNA, 15 bp, Homo sapiens
ttgttcactctattc

SEQ ID NO: 54171 - DNA, 15 bp, Homo sapiens
cttgttcactctatt

SEQ ID NO: 54172 - DNA, 15 bp, Homo sapiens
ccttgttcactctat

SEQ ID NO: 54173 - DNA, 15 bp, Homo sapiens
cccttgttcactcta

SEQ ID NO: 54174 - DNA, 15 bp, Homo sapiens
ccccttgttcactct

SEQ ID NO: 54175 - DNA, 15 bp, Homo sapiens
gccccttgttcactc

SEQ ID NO: 54176 - DNA, 15 bp, Homo sapiens
tgccccttgttcact

SEQ ID NO: 54177 - DNA, 15 bp, Homo sapiens
ctgccccttgttcac

SEQ ID NO: 54178 - DNA, 15 bp, Homo sapiens
tctgccccttgttca

SEQ ID NO: 54179 - DNA, 15 bp, Homo sapiens
ctctgccccttgttc

SEQ ID NO: 54180 - DNA, 15 bp, Homo sapiens
cctctgccccttgtt

SEQ ID NO: 54181 - DNA, 15 bp, Homo sapiens
gcctctgccccttgt

SEQ ID NO: 54182 - DNA, 15 bp, Homo sapiens
agcctctgccccttg

SEQ ID NO: 54183 - DNA, 15 bp, Homo sapiens
cagcctctgcccctt

SEQ ID NO: 54184 - DNA, 15 bp, Homo sapiens
ccagcctctgcccct

SEQ ID NO: 54185 - DNA, 15 bp, Homo sapiens
tccagcctctgcccc

SEQ ID NO: 54186 - DNA, 15 bp, Homo sapiens
ctccagcctctgccc

SEQ ID NO: 54187 - DNA, 15 bp, Homo sapiens
cctccagcctctgcc

SEQ ID NO: 54188 - DNA, 15 bp, Homo sapiens
gcctccagcctctgc

SEQ ID NO: 54189 - DNA, 15 bp, Homo sapiens
tgcctccagcctctg

SEQ ID NO: 54190 - DNA, 15 bp, Homo sapiens
atgcctccagcctct

SEQ ID NO: 54191 - DNA, 15 bp, Homo sapiens
catgcctccagcctc

SEQ ID NO: 54192 - DNA, 15 bp, Homo sapiens
ccatgcctccagcct

SEQ ID NO: 54193 - DNA, 15 bp, Homo sapiens
cccatgcctccagcc

SEQ ID NO: 54194 - DNA, 15 bp, Homo sapiens
tcccatgcctccagc

SEQ ID NO: 54195 - DNA, 15 bp, Homo sapiens
ttcccatgcctccag

SEQ ID NO: 54196 - DNA, 15 bp, Homo sapiens
cttcccatgcctcca

SEQ ID NO: 54197 - DNA, 15 bp, Homo sapiens
ccttcccatgcctcc

SEQ ID NO: 54198 - DNA, 15 bp, Homo sapiens
cccttcccatgcctc

SEQ ID NO: 54199 - DNA, 15 bp, Homo sapiens
gcccttcccatgcct

SEQ ID NO: 54200 - DNA, 15 bp, Homo sapiens
ggcccttcccatgcc

SEQ ID NO: 54201 - DNA, 15 bp, Homo sapiens
aggcccttcccatgc

SEQ ID NO: 54202 - DNA, 15 bp, Homo sapiens
taggcccttcccatg

SEQ ID NO: 54203 - DNA, 15 bp, Homo sapiens
gtaggcccttcccat

SEQ ID NO: 54204 - DNA, 15 bp, Homo sapiens
ggtaggcccttccca

SEQ ID NO: 54205 - DNA, 15 bp, Homo sapiens
tggtaggcccttccc

SEQ ID NO: 54206 - DNA, 15 bp, Homo sapiens
atggtaggcccttcc

SEQ ID NO: 54207 - DNA, 15 bp, Homo sapiens
catggtaggcccttc

SEQ ID NO: 54208 - DNA, 15 bp, Homo sapiens
gcatggtaggccctt

SEQ ID NO: 54209 - DNA, 15 bp, Homo sapiens
tgcatggtaggccct

SEQ ID NO: 54210 - DNA, 15 bp, Homo sapiens
ctgcatggtaggccc

SEQ ID NO: 54211 - DNA, 15 bp, Homo sapiens
cctgcatggtaggcc

SEQ ID NO: 54212 - DNA, 15 bp, Homo sapiens
tcctgcatggtaggc

SEQ ID NO: 54213 - DNA, 15 bp, Homo sapiens
gtcctgcatggtagg

SEQ ID NO: 54214 - DNA, 15 bp, Homo sapiens
agtcctgcatggtag

SEQ ID NO: 54215 - DNA, 15 bp, Homo sapiens
aagtcctgcatggta

SEQ ID NO: 54216 - DNA, 15 bp, Homo sapiens
gaagtcctgcatggt

SEQ ID NO: 54217 - DNA, 15 bp, Homo sapiens
tgaagtcctgcatgg

SEQ ID NO: 54218 - DNA, 15 bp, Homo sapiens
ttgaagtcctgcatg

SEQ ID NO: 54219 - DNA, 15 bp, Homo sapiens
cttgaagtcctgcat

SEQ ID NO: 54220 - DNA, 15 bp, Homo sapiens
tcttgaagtcctgca

SEQ ID NO: 54221 - DNA, 15 bp, Homo sapiens
gtcttgaagtcctgc

SEQ ID NO: 54222 - DNA, 15 bp, Homo sapiens
ggtcttgaagtcctg

SEQ ID NO: 54223 - DNA, 15 bp, Homo sapiens
tggtcttgaagtcct

SEQ ID NO: 54224 - DNA, 15 bp, Homo sapiens
atggtcttgaagtcc

SEQ ID NO: 54225 - DNA, 15 bp, Homo sapiens
catggtcttgaagtc

SEQ ID NO: 54226 - DNA, 15 bp, Homo sapiens
acatggtcttgaagt

SEQ ID NO: 54227 - DNA, 15 bp, Homo sapiens
gacatggtcttgaag

SEQ ID NO: 54228 - DNA, 15 bp, Homo sapiens
ggacatggtcttgaa

SEQ ID NO: 54229 - DNA, 15 bp, Homo sapiens
tggacatggtcttga

SEQ ID NO: 54230 - DNA, 15 bp, Homo sapiens
atggacatggtcttg

SEQ ID NO: 54231 - DNA, 15 bp, Homo sapiens
tatggacatggtctt

SEQ ID NO: 54232 - DNA, 15 bp, Homo sapiens
ttatggacatggtct

SEQ ID NO: 54233 - DNA, 15 bp, Homo sapiens
tttatggacatggtc

SEQ ID NO: 54234 - DNA, 15 bp, Homo sapiens
ttttatggacatggt

SEQ ID NO: 54235 - DNA, 15 bp, Homo sapiens
attttatggacatgg

SEQ ID NO: 54236 - DNA, 15 bp, Homo sapiens
aattttatggacatg

SEQ ID NO: 54237 - DNA, 15 bp, Homo sapiens
gaattttatggacat

SEQ ID NO: 54238 - DNA, 15 bp, Homo sapiens
cgaattttatggaca

SEQ ID NO: 54239 - DNA, 15 bp, Homo sapiens
gcgaattttatggac

SEQ ID NO: 54240 - DNA, 15 bp, Homo sapiens
agcgaattttatgga

SEQ ID NO: 54241 - DNA, 15 bp, Homo sapiens
aagcgaattttatgg

SEQ ID NO: 54242 - DNA, 15 bp, Homo sapiens
taagcgaattttatg

SEQ ID NO: 54243 - DNA, 15 bp, Homo sapiens
ataagcgaattttat

SEQ ID NO: 54244 - DNA, 15 bp, Homo sapiens
gataagcgaatttta

SEQ ID NO: 54245 - DNA, 15 bp, Homo sapiens
agataagcgaatttt

SEQ ID NO: 54246 - DNA, 15 bp, Homo sapiens
aagataagcgaattt

SEQ ID NO: 54247 - DNA, 15 bp, Homo sapiens
gaagataagcgaatt

SEQ ID NO: 54248 - DNA, 15 bp, Homo sapiens
agaagataagcgaat

SEQ ID NO: 54249 - DNA, 15 bp, Homo sapiens
tagaagataagcgaa

SEQ ID NO: 54250 - DNA, 15 bp, Homo sapiens
ttagaagataagcga

SEQ ID NO: 54251 - DNA, 15 bp, Homo sapiens
tttagaagataagcg

SEQ ID NO: 54252 - DNA, 15 bp, Homo sapiens
atttagaagataagc

SEQ ID NO: 54253 - DNA, 15 bp, Homo sapiens
tatttagaagataag

SEQ ID NO: 54254 - DNA, 15 bp, Homo sapiens
atatttagaagataa

SEQ ID NO: 54255 - DNA, 15 bp, Homo sapiens
catatttagaagata

SEQ ID NO: 54256 - DNA, 15 bp, Homo sapiens
ccatatttagaagat

SEQ ID NO: 54257 - DNA, 15 bp, Homo sapiens
gccatatttagaaga

SEQ ID NO: 54258 - DNA, 15 bp, Homo sapiens
tgccatatttagaag

SEQ ID NO: 54259 - DNA, 15 bp, Homo sapiens
ttgccatatttagaa

SEQ ID NO: 54260 - DNA, 15 bp, Homo sapiens
tttgccatatttaga

SEQ ID NO: 54261 - DNA, 15 bp, Homo sapiens
ttttgccatatttag

SEQ ID NO: 54262 - DNA, 15 bp, Homo sapiens
tttttgccatattta

SEQ ID NO: 54263 - DNA, 15 bp, Homo sapiens
ctttttgccatattt

SEQ ID NO: 54264 - DNA, 15 bp, Homo sapiens
cctttttgccatatt

SEQ ID NO: 54265 - DNA, 15 bp, Homo sapiens
ccctttttgccatat

SEQ ID NO: 54266 - DNA, 15 bp, Homo sapiens
tccctttttgccata

SEQ ID NO: 54267 - DNA, 15 bp, Homo sapiens
atccctttttgccat

SEQ ID NO: 54268 - DNA, 15 bp, Homo sapiens
aatccctttttgcca

SEQ ID NO: 54269 - DNA, 15 bp, Homo sapiens
aaatccctttttgcc

SEQ ID NO: 54270 - DNA, 15 bp, Homo sapiens
aaaatccctttttgc

SEQ ID NO: 54271 - DNA, 15 bp, Homo sapiens
taaaatccctttttg

SEQ ID NO: 54272 - DNA, 15 bp, Homo sapiens
gtaaaatcccttttt

SEQ ID NO: 54273 - DNA, 15 bp, Homo sapiens
agtaaaatccctttt

SEQ ID NO: 54274 - DNA, 15 bp, Homo sapiens
cagtaaaatcccttt

SEQ ID NO: 54275 - DNA, 15 bp, Homo sapiens
ccagtaaaatccctt

SEQ ID NO: 54276 - DNA, 15 bp, Homo sapiens
accagtaaaatccct

SEQ ID NO: 54277 - DNA, 15 bp, Homo sapiens
aaccagtaaaatccc

SEQ ID NO: 54278 - DNA, 15 bp, Homo sapiens
taaccagtaaaatcc

SEQ ID NO: 54279 - DNA, 15 bp, Homo sapiens
ctaaccagtaaaatc

SEQ ID NO: 54280 - DNA, 15 bp, Homo sapiens
actaaccagtaaaat

SEQ ID NO: 54281 - DNA, 15 bp, Homo sapiens
gactaaccagtaaaa

SEQ ID NO: 54282 - DNA, 15 bp, Homo sapiens
agactaaccagtaaa

SEQ ID NO: 54283 - DNA, 15 bp, Homo sapiens
tagactaaccagtaa

SEQ ID NO: 54284 - DNA, 15 bp, Homo sapiens
atagactaaccagta

SEQ ID NO: 54285 - DNA, 15 bp, Homo sapiens
catagactaaccagt

SEQ ID NO: 54286 - DNA, 15 bp, Homo sapiens
ccatagactaaccag

SEQ ID NO: 54287 - DNA, 15 bp, Homo sapiens
tccatagactaacca

SEQ ID NO: 54288 - DNA, 15 bp, Homo sapiens
ttccatagactaacc

SEQ ID NO: 54289 - DNA, 15 bp, Homo sapiens
cttccatagactaac

SEQ ID NO: 54290 - DNA, 15 bp, Homo sapiens
gcttccatagactaa

SEQ ID NO: 54291 - DNA, 15 bp, Homo sapiens
tgcttccatagacta

SEQ ID NO: 54292 - DNA, 15 bp, Homo sapiens
gtgcttccatagact

SEQ ID NO: 54293 - DNA, 15 bp, Homo sapiens
tgtgcttccatagac

SEQ ID NO: 54294 - DNA, 15 bp, Homo sapiens
gtgtgcttccataga

SEQ ID NO: 54295 - DNA, 15 bp, Homo sapiens
agtgtgcttccatag

SEQ ID NO: 54296 - DNA, 15 bp, Homo sapiens
cagtgtgcttccata

SEQ ID NO: 54297 - DNA, 15 bp, Homo sapiens
ccagtgtgcttccat

SEQ ID NO: 54298 - DNA, 15 bp, Homo sapiens
tccagtgtgcttcca

SEQ ID NO: 54299 - DNA, 15 bp, Homo sapiens
ctccagtgtgcttcc

SEQ ID NO: 54300 - DNA, 15 bp, Homo sapiens
cctccagtgtgcttc

SEQ ID NO: 54301 - DNA, 15 bp, Homo sapiens
gcctccagtgtgctt

SEQ ID NO: 54302 - DNA, 15 bp, Homo sapiens
ggcctccagtgtgct

SEQ ID NO: 54303 - DNA, 15 bp, Homo sapiens
tggcctccagtgtgc

SEQ ID NO: 54304 - DNA, 15 bp, Homo sapiens
ttggcctccagtgtg

SEQ ID NO: 54305 - DNA, 15 bp, Homo sapiens
cttggcctccagtgt

SEQ ID NO: 54306 - DNA, 15 bp, Homo sapiens
gcttggcctccagtg

SEQ ID NO: 54307 - DNA, 15 bp, Homo sapiens
agcttggcctccagt

SEQ ID NO: 54308 - DNA, 15 bp, Homo sapiens
tagcttggcctccag

SEQ ID NO: 54309 - DNA, 15 bp, Homo sapiens
ctagcttggcctcca

SEQ ID NO: 54310 - DNA, 15 bp, Homo sapiens
cctagcttggcctcc

SEQ ID NO: 54311 - DNA, 15 bp, Homo sapiens
ccctagcttggcctc

SEQ ID NO: 54312 - DNA, 15 bp, Homo sapiens
tccctagcttggcct

SEQ ID NO: 54313 - DNA, 15 bp, Homo sapiens
ctccctagcttggcc

SEQ ID NO: 54314 - DNA, 15 bp, Homo sapiens
actccctagcttggc

SEQ ID NO: 54315 - DNA, 15 bp, Homo sapiens
gactccctagcttgg

SEQ ID NO: 54316 - DNA, 15 bp, Homo sapiens
tgactccctagcttg

SEQ ID NO: 54317 - DNA, 15 bp, Homo sapiens
ttgactccctagctt

SEQ ID NO: 54318 - DNA, 15 bp, Homo sapiens
tttgactccctagct

SEQ ID NO: 54319 - DNA, 15 bp, Homo sapiens
ttttgactccctagc

SEQ ID NO: 54320 - DNA, 15 bp, Homo sapiens
attttgactccctag

SEQ ID NO: 54321 - DNA, 15 bp, Homo sapiens
gattttgactcccta

SEQ ID NO: 54322 - DNA, 15 bp, Homo sapiens
ggattttgactccct

SEQ ID NO: 54323 - DNA, 15 bp, Homo sapiens
tggattttgactccc

SEQ ID NO: 54324 - DNA, 15 bp, Homo sapiens
ttggattttgactcc

SEQ ID NO: 54325 - DNA, 15 bp, Homo sapiens
cttggattttgactc

SEQ ID NO: 54326 - DNA, 15 bp, Homo sapiens
tcttggattttgact

SEQ ID NO: 54327 - DNA, 15 bp, Homo sapiens
ttcttggattttgac

SEQ ID NO: 54328 - DNA, 15 bp, Homo sapiens
gttcttggattttga

SEQ ID NO: 54329 - DNA, 15 bp, Homo sapiens
tgttcttggattttg

SEQ ID NO: 54330 - DNA, 15 bp, Homo sapiens
ctgttcttggatttt

SEQ ID NO: 54331 - DNA, 15 bp, Homo sapiens
cctgttcttggattt

SEQ ID NO: 54332 - DNA, 15 bp, Homo sapiens
gcctgttcttggatt

SEQ ID NO: 54333 - DNA, 15 bp, Homo sapiens
ggcctgttcttggat

SEQ ID NO: 54334 - DNA, 15 bp, Homo sapiens
tggcctgttcttgga

SEQ ID NO: 54335 - DNA, 15 bp, Homo sapiens
ctggcctgttcttgg

SEQ ID NO: 54336 - DNA, 15 bp, Homo sapiens
cctggcctgttcttg

SEQ ID NO: 54337 - DNA, 15 bp, Homo sapiens
gcctggcctgttctt

SEQ ID NO: 54338 - DNA, 15 bp, Homo sapiens
tgcctggcctgttct

SEQ ID NO: 54339 - DNA, 15 bp, Homo sapiens
atgcctggcctgttc

SEQ ID NO: 54340 - DNA, 15 bp, Homo sapiens
catgcctggcctgtt

SEQ ID NO: 54341 - DNA, 15 bp, Homo sapiens
ccatgcctggcctgt

SEQ ID NO: 54342 - DNA, 15 bp, Homo sapiens
accatgcctggcctg

SEQ ID NO: 54343 - DNA, 15 bp, Homo sapiens
caccatgcctggcct

SEQ ID NO: 54344 - DNA, 15 bp, Homo sapiens
ccaccatgcctggcc

SEQ ID NO: 54345 - DNA, 15 bp, Homo sapiens
agagccaccatgcct

SEQ ID NO: 54346 - DNA, 15 bp, Homo sapiens
aagagccaccatgcc

SEQ ID NO: 54347 - DNA, 15 bp, Homo sapiens
caagagccaccatgc

SEQ ID NO: 54348 - DNA, 15 bp, Homo sapiens
gcaagagccaccatg

SEQ ID NO: 54349 - DNA, 15 bp, Homo sapiens
ggcaagagccaccat

SEQ ID NO: 54350 - DNA, 15 bp, Homo sapiens
aggcaagagccacca

SEQ ID NO: 54351 - DNA, 15 bp, Homo sapiens
caggcaagagccacc

SEQ ID NO: 54352 - DNA, 15 bp, Homo sapiens
acaggcaagagccac

SEQ ID NO: 54353 - DNA, 15 bp, Homo sapiens
tacaggcaagagcca

SEQ ID NO: 54354 - DNA, 15 bp, Homo sapiens
ttacaggcaagagcc

SEQ ID NO: 54355 - DNA, 15 bp, Homo sapiens
attacaggcaagagc

SEQ ID NO: 54356 - DNA, 15 bp, Homo sapiens
gattacaggcaagag

SEQ ID NO: 54357 - DNA, 15 bp, Homo sapiens
ggattacaggcaaga

SEQ ID NO: 54358 - DNA, 15 bp, Homo sapiens
gggattacaggcaag

SEQ ID NO: 54359 - DNA, 15 bp, Homo sapiens
tgggattacaggcaa

SEQ ID NO: 54360 - DNA, 15 bp, Homo sapiens
ttgggattacaggca

SEQ ID NO: 54361 - DNA, 15 bp, Homo sapiens
attgggattacaggc

SEQ ID NO: 54362 - DNA, 15 bp, Homo sapiens
tattgggattacagg

SEQ ID NO: 54363 - DNA, 15 bp, Homo sapiens
gtattgggattacag

SEQ ID NO: 54364 - DNA, 15 bp, Homo sapiens
agtattgggattaca

SEQ ID NO: 54365 - DNA, 15 bp, Homo sapiens
aagtattgggattac

SEQ ID NO: 54366 - DNA, 15 bp, Homo sapiens
aaagtattgggatta

SEQ ID NO: 54367 - DNA, 15 bp, Homo sapiens
caaagtattgggatt

SEQ ID NO: 54368 - DNA, 15 bp, Homo sapiens
ccaaagtattgggat

SEQ ID NO: 54369 - DNA, 15 bp, Homo sapiens
cccaaagtattggga

SEQ ID NO: 54370 - DNA, 15 bp, Homo sapiens
tcccaaagtattggg

SEQ ID NO: 54371 - DNA, 15 bp, Homo sapiens
ctcccaaagtattgg

SEQ ID NO: 54372 - DNA, 15 bp, Homo sapiens
cctcccaaagtattg

SEQ ID NO: 54373 - DNA, 15 bp, Homo sapiens
gcctcccaaagtatt

SEQ ID NO: 54374 - DNA, 15 bp, Homo sapiens
ggcctcccaaagtat

SEQ ID NO: 54375 - DNA, 15 bp, Homo sapiens
tggcctcccaaagta

SEQ ID NO: 54376 - DNA, 15 bp, Homo sapiens
ttggcctcccaaagt

SEQ ID NO: 54377 - DNA, 15 bp, Homo sapiens
cttggcctcccaaag

SEQ ID NO: 54378 - DNA, 15 bp, Homo sapiens
ccttggcctcccaaa

SEQ ID NO: 54379 - DNA, 15 bp, Homo sapiens
accttggcctcccaa

SEQ ID NO: 54380 - DNA, 15 bp, Homo sapiens
caccttggcctccca

SEQ ID NO: 54381 - DNA, 15 bp, Homo sapiens
ccaccttggcctccc

SEQ ID NO: 54382 - DNA, 15 bp, Homo sapiens
cccaccttggcctcc

SEQ ID NO: 54383 - DNA, 15 bp, Homo sapiens
gcccaccttggcctc

SEQ ID NO: 54384 - DNA, 15 bp, Homo sapiens
cgcccaccttggcct

SEQ ID NO: 54385 - DNA, 15 bp, Homo sapiens
gcgcccaccttggcc

SEQ ID NO: 54386 - DNA, 15 bp, Homo sapiens
cgcgcccaccttggc

SEQ ID NO: 54387 - DNA, 15 bp, Homo sapiens
acgcgcccaccttgg

SEQ ID NO: 54388 - DNA, 15 bp, Homo sapiens
gacgcgcccaccttg

SEQ ID NO: 54389 - DNA, 15 bp, Homo sapiens
tgacgcgcccacctt

SEQ ID NO: 54390 - DNA, 15 bp, Homo sapiens
gtgacgcgcccacct

SEQ ID NO: 54391 - DNA, 15 bp, Homo sapiens
ggtgacgcgcccacc

SEQ ID NO: 54392 - DNA, 15 bp, Homo sapiens
aggtgacgcgcccac

SEQ ID NO: 54393 - DNA, 15 bp, Homo sapiens
caggtgacgcgccca

SEQ ID NO: 54394 - DNA, 15 bp, Homo sapiens
tcaggtgacgcgccc

SEQ ID NO: 54395 - DNA, 15 bp, Homo sapiens
ctcaggtgacgcgcc

SEQ ID NO: 54396 - DNA, 15 bp, Homo sapiens
gctcaggtgacgcgc

SEQ ID NO: 54397 - DNA, 15 bp, Homo sapiens
ggctcaggtgacgcg

SEQ ID NO: 54398 - DNA, 15 bp, Homo sapiens
gggctcaggtgacgc

SEQ ID NO: 54399 - DNA, 15 bp, Homo sapiens
tgggctcaggtgacg

SEQ ID NO: 54400 - DNA, 15 bp, Homo sapiens
ctgggctcaggtgac

SEQ ID NO: 54401 - DNA, 15 bp, Homo sapiens
cctgggctcaggtga

SEQ ID NO: 54402 - DNA, 15 bp, Homo sapiens
tcctgggctcaggtg

SEQ ID NO: 54403 - DNA, 15 bp, Homo sapiens
ctcctgggctcaggt

SEQ ID NO: 54404 - DNA, 15 bp, Homo sapiens
actcctgggctcagg

SEQ ID NO: 54405 - DNA, 15 bp, Homo sapiens
aactcctgggctcag

SEQ ID NO: 54406 - DNA, 15 bp, Homo sapiens
gaactcctgggctca

SEQ ID NO: 54407 - DNA, 15 bp, Homo sapiens
tgaactcctgggctc

SEQ ID NO: 54408 - DNA, 15 bp, Homo sapiens
ttgaactcctgggct

SEQ ID NO: 54409 - DNA, 15 bp, Homo sapiens
cttgaactcctgggc

SEQ ID NO: 54410 - DNA, 15 bp, Homo sapiens
tcttgaactcctggg

SEQ ID NO: 54411 - DNA, 15 bp, Homo sapiens
gtcttgaactcctgg

SEQ ID NO: 54412 - DNA, 15 bp, Homo sapiens
ggtcttgaactcctg

SEQ ID NO: 54413 - DNA, 15 bp, Homo sapiens
tggtcttgaactcct

SEQ ID NO: 54414 - DNA, 15 bp, Homo sapiens
ctggtcttgaactcc

SEQ ID NO: 54415 - DNA, 15 bp, Homo sapiens
gctggtcttgaactc

SEQ ID NO: 54416 - DNA, 15 bp, Homo sapiens
ggctggtcttgaact

SEQ ID NO: 54417 - DNA, 15 bp, Homo sapiens
aggctggtcttgaac

SEQ ID NO: 54418 - DNA, 15 bp, Homo sapiens
caggctggtcttgaa

SEQ ID NO: 54419 - DNA, 15 bp, Homo sapiens
ccaggctggtcttga

SEQ ID NO: 54420 - DNA, 15 bp, Homo sapiens
cccaggctggtcttg

SEQ ID NO: 54421 - DNA, 15 bp, Homo sapiens
tcccaggctggtctt

SEQ ID NO: 54422 - DNA, 15 bp, Homo sapiens
ttcccaggctggtct

SEQ ID NO: 54423 - DNA, 15 bp, Homo sapiens
tttcccaggctggtc

SEQ ID NO: 54424 - DNA, 15 bp, Homo sapiens
gtttcccaggctggt

SEQ ID NO: 54425 - DNA, 15 bp, Homo sapiens
tgtttcccaggctgg

SEQ ID NO: 54426 - DNA, 15 bp, Homo sapiens
atgtttcccaggctg

SEQ ID NO: 54427 - DNA, 15 bp, Homo sapiens
catgtttcccaggct

SEQ ID NO: 54428 - DNA, 15 bp, Homo sapiens
ccatgtttcccaggc

SEQ ID NO: 54429 - DNA, 15 bp, Homo sapiens
accatgtttcccagg

SEQ ID NO: 54430 - DNA, 15 bp, Homo sapiens
caccatgtttcccag

SEQ ID NO: 54431 - DNA, 15 bp, Homo sapiens
tcaccatgtttccca

SEQ ID NO: 54432 - DNA, 15 bp, Homo sapiens
ttcaccatgtttccc

SEQ ID NO: 54433 - DNA, 15 bp, Homo sapiens
tttcaccatgtttcc

SEQ ID NO: 54434 - DNA, 15 bp, Homo sapiens
ttttcaccatgtttc

SEQ ID NO: 54435 - DNA, 15 bp, Homo sapiens
gttttcaccatgttt

SEQ ID NO: 54436 - DNA, 15 bp, Homo sapiens
ggttttcaccatgtt

SEQ ID NO: 54437 - DNA, 15 bp, Homo sapiens
aggttttcaccatgt

SEQ ID NO: 54438 - DNA, 15 bp, Homo sapiens
caggttttcaccatg

SEQ ID NO: 54439 - DNA, 15 bp, Homo sapiens
acaggttttcaccat

SEQ ID NO: 54440 - DNA, 15 bp, Homo sapiens
gacaggttttcacca

SEQ ID NO: 54441 - DNA, 15 bp, Homo sapiens
agacaggttttcacc

SEQ ID NO: 54442 - DNA, 15 bp, Homo sapiens
gagacaggttttcac

SEQ ID NO: 54443 - DNA, 15 bp, Homo sapiens
agagacaggttttca

SEQ ID NO: 54444 - DNA, 15 bp, Homo sapiens
tagagacaggttttc

SEQ ID NO: 54445 - DNA, 15 bp, Homo sapiens
gtagagacaggtttt

SEQ ID NO: 54446 - DNA, 15 bp, Homo sapiens
agtagagacaggttt

SEQ ID NO: 54447 - DNA, 15 bp, Homo sapiens
tagtagagacaggtt

SEQ ID NO: 54448 - DNA, 15 bp, Homo sapiens
ttagtagagacaggt

SEQ ID NO: 54449 - DNA, 15 bp, Homo sapiens
cttagtagagacagg

SEQ ID NO: 54450 - DNA, 15 bp, Homo sapiens
tcttagtagagacag

SEQ ID NO: 54451 - DNA, 15 bp, Homo sapiens
ttcttagtagagaca

SEQ ID NO: 54452 - DNA, 15 bp, Homo sapiens
gttcttagtagagac

SEQ ID NO: 54453 - DNA, 15 bp, Homo sapiens
tgttcttagtagaga

SEQ ID NO: 54454 - DNA, 15 bp, Homo sapiens
gtgttcttagtagag

SEQ ID NO: 54455 - DNA, 15 bp, Homo sapiens
tgtgttcttagtaga

SEQ ID NO: 54456 - DNA, 15 bp, Homo sapiens
ttgtgttcttagtag

SEQ ID NO: 54457 - DNA, 15 bp, Homo sapiens
tttgtgttcttagta

SEQ ID NO: 54458 - DNA, 15 bp, Homo sapiens
ttttgtgttcttagt

SEQ ID NO: 54459 - DNA, 15 bp, Homo sapiens
tttttgtgttcttag

SEQ ID NO: 54460 - DNA, 15 bp, Homo sapiens
atttttgtgttctta

SEQ ID NO: 54461 - DNA, 15 bp, Homo sapiens
aatttttgtgttctt

SEQ ID NO: 54462 - DNA, 15 bp, Homo sapiens
taatttttgtgttct

SEQ ID NO: 54463 - DNA, 15 bp, Homo sapiens
ctaatttttgtgttc

SEQ ID NO: 54464 - DNA, 15 bp, Homo sapiens
gctaatttttgtgtt

SEQ ID NO: 54465 - DNA, 15 bp, Homo sapiens
ggctaatttttgtgt

SEQ ID NO: 54466 - DNA, 15 bp, Homo sapiens
tggctaatttttgtg

SEQ ID NO: 54467 - DNA, 15 bp, Homo sapiens
ctggctaatttttgt

SEQ ID NO: 54468 - DNA, 15 bp, Homo sapiens
actggctaatttttg

SEQ ID NO: 54469 - DNA, 15 bp, Homo sapiens
gactggctaattttt

SEQ ID NO: 54470 - DNA, 15 bp, Homo sapiens
tgactggctaatttt

SEQ ID NO: 54471 - DNA, 15 bp, Homo sapiens
ttgactggctaattt

SEQ ID NO: 54472 - DNA, 15 bp, Homo sapiens
cttgactggctaatt

SEQ ID NO: 54473 - DNA, 15 bp, Homo sapiens
tcttgactggctaat

SEQ ID NO: 54474 - DNA, 15 bp, Homo sapiens
atcttgactggctaa

SEQ ID NO: 54475 - DNA, 15 bp, Homo sapiens
catcttgactggcta

SEQ ID NO: 54476 - DNA, 15 bp, Homo sapiens
ccatcttgactggct

SEQ ID NO: 54477 - DNA, 15 bp, Homo sapiens
gccatcttgactggc

SEQ ID NO: 54478 - DNA, 15 bp, Homo sapiens
tgccatcttgactgg

SEQ ID NO: 54479 - DNA, 15 bp, Homo sapiens
atgccatcttgactg

SEQ ID NO: 54480 - DNA, 15 bp, Homo sapiens
catgccatcttgact

SEQ ID NO: 54481 - DNA, 15 bp, Homo sapiens
acatgccatcttgac

SEQ ID NO: 54482 - DNA, 15 bp, Homo sapiens
cacatgccatcttga

SEQ ID NO: 54483 - DNA, 15 bp, Homo sapiens
gcacatgccatcttg

SEQ ID NO: 54484 - DNA, 15 bp, Homo sapiens
ggcacatgccatctt

SEQ ID NO: 54485 - DNA, 15 bp, Homo sapiens
aggcacatgccatct

SEQ ID NO: 54486 - DNA, 15 bp, Homo sapiens
caggcacatgccatc

SEQ ID NO: 54487 - DNA, 15 bp, Homo sapiens
acaggcacatgccat

SEQ ID NO: 54488 - DNA, 15 bp, Homo sapiens
tacaggcacatgcca

SEQ ID NO: 54489 - DNA, 15 bp, Homo sapiens
ctacaggcacatgcc

SEQ ID NO: 54490 - DNA, 15 bp, Homo sapiens
actacaggcacatgc

SEQ ID NO: 54491 - DNA, 15 bp, Homo sapiens
gactacaggcacatg

SEQ ID NO: 54492 - DNA, 15 bp, Homo sapiens
ggactacaggcacat

SEQ ID NO: 54493 - DNA, 15 bp, Homo sapiens
gggactacaggcaca

SEQ ID NO: 54494 - DNA, 15 bp, Homo sapiens
tgggactacaggcac

SEQ ID NO: 54495 - DNA, 15 bp, Homo sapiens
atagctgggactaca

SEQ ID NO: 54496 - DNA, 15 bp, Homo sapiens
aatagctgggactac

SEQ ID NO: 54497 - DNA, 15 bp, Homo sapiens
gaatagctgggacta

SEQ ID NO: 54498 - DNA, 15 bp, Homo sapiens
tgaatagctgggact

SEQ ID NO: 54499 - DNA, 15 bp, Homo sapiens
ttgaatagctgggac

SEQ ID NO: 54500 - DNA, 15 bp, Homo sapiens
cttgaatagctggga

SEQ ID NO: 54501 - DNA, 15 bp, Homo sapiens
tcttgaatagctggg

SEQ ID NO: 54502 - DNA, 15 bp, Homo sapiens
ctcttgaatagctgg

SEQ ID NO: 54503 - DNA, 15 bp, Homo sapiens
cctcttgaatagctg

SEQ ID NO: 54504 - DNA, 15 bp, Homo sapiens
gcctcttgaatagct

SEQ ID NO: 54505 - DNA, 15 bp, Homo sapiens
agcctcttgaatagc

SEQ ID NO: 54506 - DNA, 15 bp, Homo sapiens
cagcctcttgaatag

SEQ ID NO: 54507 - DNA, 15 bp, Homo sapiens
tcagcctcttgaata

SEQ ID NO: 54508 - DNA, 15 bp, Homo sapiens
ctcagcctcttgaat

SEQ ID NO: 54509 - DNA, 15 bp, Homo sapiens
cctcagcctcttgaa

SEQ ID NO: 54510 - DNA, 15 bp, Homo sapiens
acctcagcctcttga

SEQ ID NO: 54511 - DNA, 15 bp, Homo sapiens
cacctcagcctcttg

SEQ ID NO: 54512 - DNA, 15 bp, Homo sapiens
ccacctcagcctctt

SEQ ID NO: 54513 - DNA, 15 bp, Homo sapiens
cccacctcagcctct

SEQ ID NO: 54514 - DNA, 15 bp, Homo sapiens
ctcaggtgatcctcc

SEQ ID NO: 54515 - DNA, 15 bp, Homo sapiens
gctcaggtgatcctc

SEQ ID NO: 54516 - DNA, 15 bp, Homo sapiens
ggctcaggtgatcct

SEQ ID NO: 54517 - DNA, 15 bp, Homo sapiens
gggctcaggtgatcc

SEQ ID NO: 54518 - DNA, 15 bp, Homo sapiens
tgggctcaggtgatc

SEQ ID NO: 54519 - DNA, 15 bp, Homo sapiens
ctgggctcaggtgat

SEQ ID NO: 54520 - DNA, 15 bp, Homo sapiens
ccctgggctcaggtg

SEQ ID NO: 54521 - DNA, 15 bp, Homo sapiens
accctgggctcaggt

SEQ ID NO: 54522 - DNA, 15 bp, Homo sapiens
caccctgggctcagg

SEQ ID NO: 54523 - DNA, 15 bp, Homo sapiens
ccaccctgggctcag

SEQ ID NO: 54524 - DNA, 15 bp, Homo sapiens
gccaccctgggctca

SEQ ID NO: 54525 - DNA, 15 bp, Homo sapiens
ggccaccctgggctc

SEQ ID NO: 54526 - DNA, 15 bp, Homo sapiens
cggccaccctgggct

SEQ ID NO: 54527 - DNA, 15 bp, Homo sapiens
tcggccaccctgggc

SEQ ID NO: 54528 - DNA, 15 bp, Homo sapiens
ctcggccaccctggg

SEQ ID NO: 54529 - DNA, 15 bp, Homo sapiens
cctcggccaccctgg

SEQ ID NO: 54530 - DNA, 15 bp, Homo sapiens
gcctcggccaccctg

SEQ ID NO: 54531 - DNA, 15 bp, Homo sapiens
agcctcggccaccct

SEQ ID NO: 54532 - DNA, 15 bp, Homo sapiens
cagcctcggccaccc

SEQ ID NO: 54533 - DNA, 15 bp, Homo sapiens
gcagcctcggccacc

SEQ ID NO: 54534 - DNA, 15 bp, Homo sapiens
tgcagcctcggccac

SEQ ID NO: 54535 - DNA, 15 bp, Homo sapiens
ctgcagcctcggcca

SEQ ID NO: 54536 - DNA, 15 bp, Homo sapiens
actgcagcctcggcc

SEQ ID NO: 54537 - DNA, 15 bp, Homo sapiens
cactgcagcctcggc

SEQ ID NO: 54538 - DNA, 15 bp, Homo sapiens
tcactgcagcctcgg

SEQ ID NO: 54539 - DNA, 15 bp, Homo sapiens
ctcactgcagcctcg

SEQ ID NO: 54540 - DNA, 15 bp, Homo sapiens
gctcactgcagcctc

SEQ ID NO: 54541 - DNA, 15 bp, Homo sapiens
ggctcactgcagcct

SEQ ID NO: 54542 - DNA, 15 bp, Homo sapiens
tggctcactgcagcc

SEQ ID NO: 54543 - DNA, 15 bp, Homo sapiens
atggctcactgcagc

SEQ ID NO: 54544 - DNA, 15 bp, Homo sapiens
catggctcactgcag

SEQ ID NO: 54545 - DNA, 15 bp, Homo sapiens
tcatggctcactgca

SEQ ID NO: 54546 - DNA, 15 bp, Homo sapiens
atcatggctcactgc

SEQ ID NO: 54547 - DNA, 15 bp, Homo sapiens
aatcatggctcactg

SEQ ID NO: 54548 - DNA, 15 bp, Homo sapiens
caatcatggctcact

SEQ ID NO: 54549 - DNA, 15 bp, Homo sapiens
gcaatcatggctcac

SEQ ID NO: 54550 - DNA, 15 bp, Homo sapiens
cgcaatcatggctca

SEQ ID NO: 54551 - DNA, 15 bp, Homo sapiens
gcgcaatcatggctc

SEQ ID NO: 54552 - DNA, 15 bp, Homo sapiens
ggcgcaatcatggct

SEQ ID NO: 54553 - DNA, 15 bp, Homo sapiens
tggcgcaatcatggc

SEQ ID NO: 54554 - DNA, 15 bp, Homo sapiens
gtggcgcaatcatgg

SEQ ID NO: 54555 - DNA, 15 bp, Homo sapiens
agtggcgcaatcatg

SEQ ID NO: 54556 - DNA, 15 bp, Homo sapiens
cagtggcgcaatcat

SEQ ID NO: 54557 - DNA, 15 bp, Homo sapiens
gcagtggcgcaatca

SEQ ID NO: 54558 - DNA, 15 bp, Homo sapiens
agcagtggcgcaatc

SEQ ID NO: 54559 - DNA, 15 bp, Homo sapiens
gagcagtggcgcaat

SEQ ID NO: 54560 - DNA, 15 bp, Homo sapiens
agagcagtggcgcaa

SEQ ID NO: 54561 - DNA, 15 bp, Homo sapiens
gagagcagtggcgca

SEQ ID NO: 54562 - DNA, 15 bp, Homo sapiens
ggagagcagtggcgc

SEQ ID NO: 54563 - DNA, 15 bp, Homo sapiens
tggagagcagtggcg

SEQ ID NO: 54564 - DNA, 15 bp, Homo sapiens
ctggagagcagtggc

SEQ ID NO: 54565 - DNA, 15 bp, Homo sapiens
gctggagagcagtgg

SEQ ID NO: 54566 - DNA, 15 bp, Homo sapiens
ggctggagagcagtg

SEQ ID NO: 54567 - DNA, 15 bp, Homo sapiens
aggctggagagcagt

SEQ ID NO: 54568 - DNA, 15 bp, Homo sapiens
caggctggagagcag

SEQ ID NO: 54569 - DNA, 15 bp, Homo sapiens
ccaggctggagagca

SEQ ID NO: 54570 - DNA, 15 bp, Homo sapiens
cccaggctggagagc

SEQ ID NO: 54571 - DNA, 15 bp, Homo sapiens
gcccaggctggagag

SEQ ID NO: 54572 - DNA, 15 bp, Homo sapiens
tgcccaggctggaga

SEQ ID NO: 54573 - DNA, 15 bp, Homo sapiens
actctgttgcccagg

SEQ ID NO: 54574 - DNA, 15 bp, Homo sapiens
cactctgttgcccag

SEQ ID NO: 54575 - DNA, 15 bp, Homo sapiens
tcactctgttgccca

SEQ ID NO: 54576 - DNA, 15 bp, Homo sapiens
ctcactctgttgccc

SEQ ID NO: 54577 - DNA, 15 bp, Homo sapiens
tctcactctgttgcc

SEQ ID NO: 54578 - DNA, 15 bp, Homo sapiens
ttctcactctgttgc

SEQ ID NO: 54579 - DNA, 15 bp, Homo sapiens
gttctcactctgttg

SEQ ID NO: 54580 - DNA, 15 bp, Homo sapiens
cgttctcactctgtt

SEQ ID NO: 54581 - DNA, 15 bp, Homo sapiens
acgttctcactctgt

SEQ ID NO: 54582 - DNA, 15 bp, Homo sapiens
cacgttctcactctg

SEQ ID NO: 54583 - DNA, 15 bp, Homo sapiens
acacgttctcactct

SEQ ID NO: 54584 - DNA, 15 bp, Homo sapiens
gacacgttctcactc

SEQ ID NO: 54585 - DNA, 15 bp, Homo sapiens
agacacgttctcact

SEQ ID NO: 54586 - DNA, 15 bp, Homo sapiens
gagacacgttctcac

SEQ ID NO: 54587 - DNA, 15 bp, Homo sapiens
tgagacacgttctca

SEQ ID NO: 54588 - DNA, 15 bp, Homo sapiens
ttgagacacgttctc

SEQ ID NO: 54589 - DNA, 15 bp, Homo sapiens
tttgagacacgttct

SEQ ID NO: 54590 - DNA, 15 bp, Homo sapiens
ttttgagacacgttc

SEQ ID NO: 54591 - DNA, 15 bp, Homo sapiens
tttttgagacacgtt

SEQ ID NO: 54592 - DNA, 15 bp, Homo sapiens
ttttttgagacacgt

SEQ ID NO: 54593 - DNA, 15 bp, Homo sapiens
gttttttgagacacg

SEQ ID NO: 54594 - DNA, 15 bp, Homo sapiens
tgttttttgagacac

SEQ ID NO: 54595 - DNA, 15 bp, Homo sapiens
gtttgttttttgaga

SEQ ID NO: 54596 - DNA, 15 bp, Homo sapiens
tgtttgttttttgag

SEQ ID NO: 54597 - DNA, 15 bp, Homo sapiens
ttgtttgttttttga

SEQ ID NO: 54598 - DNA, 15 bp, Homo sapiens
tttgtttgttttttg

SEQ ID NO: 54599 - DNA, 15 bp, Homo sapiens
gtttgtttgtttttt

SEQ ID NO: 54600 - DNA, 15 bp, Homo sapiens
tgtttgtttgttttt

SEQ ID NO: 54601 - DNA, 15 bp, Homo sapiens
ctgtttgtttgtttt

SEQ ID NO: 54602 - DNA, 15 bp, Homo sapiens
tctgtttgtttgttt

SEQ ID NO: 54603 - DNA, 15 bp, Homo sapiens
ttctgtttgtttgtt

SEQ ID NO: 54604 - DNA, 15 bp, Homo sapiens
tttctgtttgtttgt

SEQ ID NO: 54605 - DNA, 15 bp, Homo sapiens
ttttctgtttgtttg

SEQ ID NO: 54606 - DNA, 15 bp, Homo sapiens
gttttctgtttgttt

SEQ ID NO: 54607 - DNA, 15 bp, Homo sapiens
ggttttctgtttgtt

SEQ ID NO: 54608 - DNA, 15 bp, Homo sapiens
tggttttctgtttgt

SEQ ID NO: 54609 - DNA, 15 bp, Homo sapiens
ttggttttctgtttg

SEQ ID NO: 54610 - DNA, 15 bp, Homo sapiens
cttggttttctgttt

SEQ ID NO: 54611 - DNA, 15 bp, Homo sapiens
tcttggttttctgtt

SEQ ID NO: 54612 - DNA, 15 bp, Homo sapiens
ttcttggttttctgt

SEQ ID NO: 54613 - DNA, 15 bp, Homo sapiens
gttcttggttttctg

SEQ ID NO: 54614 - DNA, 15 bp, Homo sapiens
tgttcttggttttct

SEQ ID NO: 54615 - DNA, 15 bp, Homo sapiens
ctgttcttggttttc

SEQ ID NO: 54616 - DNA, 15 bp, Homo sapiens
tctgttcttggtttt

SEQ ID NO: 54617 - DNA, 15 bp, Homo sapiens
ttctgttcttggttt

SEQ ID NO: 54618 - DNA, 15 bp, Homo sapiens
cttctgttcttggtt

SEQ ID NO: 54619 - DNA, 15 bp, Homo sapiens
ccttctgttcttggt

SEQ ID NO: 54620 - DNA, 15 bp, Homo sapiens
cccttctgttcttgg

SEQ ID NO: 54621 - DNA, 15 bp, Homo sapiens
ccccttctgttcttg

SEQ ID NO: 54622 - DNA, 15 bp, Homo sapiens
tccccttctgttctt

SEQ ID NO: 54623 - DNA, 15 bp, Homo sapiens
ttccccttctgttct

SEQ ID NO: 54624 - DNA, 15 bp, Homo sapiens
cttccccttctgttc

SEQ ID NO: 54625 - DNA, 15 bp, Homo sapiens
acttccccttctgtt

SEQ ID NO: 54626 - DNA, 15 bp, Homo sapiens
aacttccccttctgt

SEQ ID NO: 54627 - DNA, 15 bp, Homo sapiens
caacttccccttctg

SEQ ID NO: 54628 - DNA, 15 bp, Homo sapiens
ccaacttccccttct

SEQ ID NO: 54629 - DNA, 15 bp, Homo sapiens
gccaacttccccttc

SEQ ID NO: 54630 - DNA, 15 bp, Homo sapiens
tgccaacttcccctt

SEQ ID NO: 54631 - DNA, 15 bp, Homo sapiens
ttgccaacttcccct

SEQ ID NO: 54632 - DNA, 15 bp, Homo sapiens
attgccaacttcccc

SEQ ID NO: 54633 - DNA, 15 bp, Homo sapiens
gattgccaacttccc

SEQ ID NO: 54634 - DNA, 15 bp, Homo sapiens
agattgccaacttcc

SEQ ID NO: 54635 - DNA, 15 bp, Homo sapiens
cagattgccaacttc

SEQ ID NO: 54636 - DNA, 15 bp, Homo sapiens
acagattgccaactt

SEQ ID NO: 54637 - DNA, 15 bp, Homo sapiens
aacagattgccaact

SEQ ID NO: 54638 - DNA, 15 bp, Homo sapiens
caacagattgccaac

SEQ ID NO: 54639 - DNA, 15 bp, Homo sapiens
acaacagattgccaa

SEQ ID NO: 54640 - DNA, 15 bp, Homo sapiens
aacaacagattgcca

SEQ ID NO: 54641 - DNA, 15 bp, Homo sapiens
gaacaacagattgcc

SEQ ID NO: 54642 - DNA, 15 bp, Homo sapiens
agaacaacagattgc

SEQ ID NO: 54643 - DNA, 15 bp, Homo sapiens
aagaacaacagattg

SEQ ID NO: 54644 - DNA, 15 bp, Homo sapiens
aaagaacaacagatt

SEQ ID NO: 54645 - DNA, 15 bp, Homo sapiens
gaaagaacaacagat

SEQ ID NO: 54646 - DNA, 15 bp, Homo sapiens
agaaagaacaacaga

SEQ ID NO: 54647 - DNA, 15 bp, Homo sapiens
gagaaagaacaacag

SEQ ID NO: 54648 - DNA, 15 bp, Homo sapiens
agagaaagaacaaca

SEQ ID NO: 54649 - DNA, 15 bp, Homo sapiens
aagagaaagaacaac

SEQ ID NO: 54650 - DNA, 15 bp, Homo sapiens
aaagagaaagaacaa

SEQ ID NO: 54651 - DNA, 15 bp, Homo sapiens
taaagagaaagaaca

SEQ ID NO: 54652 - DNA, 15 bp, Homo sapiens
ttaaagagaaagaac

SEQ ID NO: 54653 - DNA, 15 bp, Homo sapiens
tttaaagagaaagaa

SEQ ID NO: 54654 - DNA, 15 bp, Homo sapiens
ttttaaagagaaaga

SEQ ID NO: 54655 - DNA, 15 bp, Homo sapiens
tttttaaagagaaag

SEQ ID NO: 54656 - DNA, 15 bp, Homo sapiens
ttttttaaagagaaa

SEQ ID NO: 54657 - DNA, 15 bp, Homo sapiens
tttttttaaagagaa

SEQ ID NO: 54658 - DNA, 15 bp, Homo sapiens
attttttttttttaa

SEQ ID NO: 54659 - DNA, 15 bp, Homo sapiens
catttttttttttta

SEQ ID NO: 54660 - DNA, 15 bp, Homo sapiens
gcatttttttttttt

SEQ ID NO: 54661 - DNA, 15 bp, Homo sapiens
ggcattttttttttt

SEQ ID NO: 54662 - DNA, 15 bp, Homo sapiens
gggcatttttttttt

SEQ ID NO: 54663 - DNA, 15 bp, Homo sapiens
agggcattttttttt

SEQ ID NO: 54664 - DNA, 15 bp, Homo sapiens
cagggcatttttttt

SEQ ID NO: 54665 - DNA, 15 bp, Homo sapiens
tcagggcattttttt

SEQ ID NO: 54666 - DNA, 15 bp, Homo sapiens
ctcagggcatttttt

SEQ ID NO: 54667 - DNA, 15 bp, Homo sapiens
gctcagggcattttt

SEQ ID NO: 54668 - DNA, 15 bp, Homo sapiens
agctcagggcatttt

SEQ ID NO: 54669 - DNA, 15 bp, Homo sapiens
cagctcagggcattt

SEQ ID NO: 54670 - DNA, 15 bp, Homo sapiens
tcagctcagggcatt

SEQ ID NO: 54671 - DNA, 15 bp, Homo sapiens
ctcagctcagggcat

SEQ ID NO: 54672 - DNA, 15 bp, Homo sapiens
actcagctcagggca

SEQ ID NO: 54673 - DNA, 15 bp, Homo sapiens
gactcagctcagggc

SEQ ID NO: 54674 - DNA, 15 bp, Homo sapiens
ggactcagctcaggg

SEQ ID NO: 54675 - DNA, 15 bp, Homo sapiens
tggactcagctcagg

SEQ ID NO: 54676 - DNA, 15 bp, Homo sapiens
ttggactcagctcag

SEQ ID NO: 54677 - DNA, 15 bp, Homo sapiens
tttggactcagctca

SEQ ID NO: 54678 - DNA, 15 bp, Homo sapiens
ctttggactcagctc

SEQ ID NO: 54679 - DNA, 15 bp, Homo sapiens
gctttggactcagct

SEQ ID NO: 54680 - DNA, 15 bp, Homo sapiens
tgctttggactcagc

SEQ ID NO: 54681 - DNA, 15 bp, Homo sapiens
ttgctttggactcag

SEQ ID NO: 54682 - DNA, 15 bp, Homo sapiens
cttgctttggactca

SEQ ID NO: 54683 - DNA, 15 bp, Homo sapiens
gcttgctttggactc

SEQ ID NO: 54684 - DNA, 15 bp, Homo sapiens
ggcttgctttggact

SEQ ID NO: 54685 - DNA, 15 bp, Homo sapiens
gggcttgctttggac

SEQ ID NO: 54686 - DNA, 15 bp, Homo sapiens
agggcttgctttgga

SEQ ID NO: 54687 - DNA, 15 bp, Homo sapiens
cagggcttgctttgg

SEQ ID NO: 54688 - DNA, 15 bp, Homo sapiens
ccagggcttgctttg

SEQ ID NO: 54689 - DNA, 15 bp, Homo sapiens
tccagggcttgcttt

SEQ ID NO: 54690 - DNA, 15 bp, Homo sapiens
ttccagggcttgctt

SEQ ID NO: 54691 - DNA, 15 bp, Homo sapiens
tttccagggcttgct

SEQ ID NO: 54692 - DNA, 15 bp, Homo sapiens
atttccagggcttgc

SEQ ID NO: 54693 - DNA, 15 bp, Homo sapiens
gatttccagggcttg

SEQ ID NO: 54694 - DNA, 15 bp, Homo sapiens
ggatttccagggctt

SEQ ID NO: 54695 - DNA, 15 bp, Homo sapiens
tggatttccagggct

SEQ ID NO: 54696 - DNA, 15 bp, Homo sapiens
ctggatttccagggc

SEQ ID NO: 54697 - DNA, 15 bp, Homo sapiens
tctggatttccaggg

SEQ ID NO: 54698 - DNA, 15 bp, Homo sapiens
ctctggatttccagg

SEQ ID NO: 54699 - DNA, 15 bp, Homo sapiens
cctctggatttccag

SEQ ID NO: 54700 - DNA, 15 bp, Homo sapiens
acctctggatttcca

SEQ ID NO: 54701 - DNA, 15 bp, Homo sapiens
cacctctggatttcc

SEQ ID NO: 54702 - DNA, 15 bp, Homo sapiens
tcacctctggatttc

SEQ ID NO: 54703 - DNA, 15 bp, Homo sapiens
atcacctctggattt

SEQ ID NO: 54704 - DNA, 15 bp, Homo sapiens
aatcacctctggatt

SEQ ID NO: 54705 - DNA, 15 bp, Homo sapiens
aaatcacctctggat

SEQ ID NO: 54706 - DNA, 15 bp, Homo sapiens
caaatcacctctgga

SEQ ID NO: 54707 - DNA, 15 bp, Homo sapiens
gcaaatcacctctgg

SEQ ID NO: 54708 - DNA, 15 bp, Homo sapiens
cgcaaatcacctctg

SEQ ID NO: 54709 - DNA, 15 bp, Homo sapiens
ccgcaaatcacctct

SEQ ID NO: 54710 - DNA, 15 bp, Homo sapiens
cccgcaaatcacctc

SEQ ID NO: 54711 - DNA, 15 bp, Homo sapiens
gcccgcaaatcacct

SEQ ID NO: 54712 - DNA, 15 bp, Homo sapiens
agcccgcaaatcacc

SEQ ID NO: 54713 - DNA, 15 bp, Homo sapiens
gagcccgcaaatcac

SEQ ID NO: 54714 - DNA, 15 bp, Homo sapiens
ggagcccgcaaatca

SEQ ID NO: 54715 - DNA, 15 bp, Homo sapiens
gggagcccgcaaatc

SEQ ID NO: 54716 - DNA, 15 bp, Homo sapiens
agggagcccgcaaat

SEQ ID NO: 54717 - DNA, 15 bp, Homo sapiens
cagggagcccgcaaa

SEQ ID NO: 54718 - DNA, 15 bp, Homo sapiens
tcagggagcccgcaa

SEQ ID NO: 54719 - DNA, 15 bp, Homo sapiens
ttcagggagcccgca

SEQ ID NO: 54720 - DNA, 15 bp, Homo sapiens
gttcagggagcccgc

SEQ ID NO: 54721 - DNA, 15 bp, Homo sapiens
ggttcagggagcccg

SEQ ID NO: 54722 - DNA, 15 bp, Homo sapiens
aggttcagggagccc

SEQ ID NO: 54723 - DNA, 15 bp, Homo sapiens
caggttcagggagcc

SEQ ID NO: 54724 - DNA, 15 bp, Homo sapiens
acaggttcagggagc

SEQ ID NO: 54725 - DNA, 15 bp, Homo sapiens
aacaggttcagggag

SEQ ID NO: 54726 - DNA, 15 bp, Homo sapiens
aaacaggttcaggga

SEQ ID NO: 54727 - DNA, 15 bp, Homo sapiens
caaacaggttcaggg

SEQ ID NO: 54728 - DNA, 15 bp, Homo sapiens
ccaaacaggttcagg

SEQ ID NO: 54729 - DNA, 15 bp, Homo sapiens
accaaacaggttcag

SEQ ID NO: 54730 - DNA, 15 bp, Homo sapiens
aaccaaacaggttca

SEQ ID NO: 54731 - DNA, 15 bp, Homo sapiens
gaaccaaacaggttc

SEQ ID NO: 54732 - DNA, 15 bp, Homo sapiens
tgaaccaaacaggtt

SEQ ID NO: 54733 - DNA, 15 bp, Homo sapiens
gtgaaccaaacaggt

SEQ ID NO: 54734 - DNA, 15 bp, Homo sapiens
agtgaaccaaacagg

SEQ ID NO: 54735 - DNA, 15 bp, Homo sapiens
cagtgaaccaaacag

SEQ ID NO: 54736 - DNA, 15 bp, Homo sapiens
acagtgaaccaaaca

SEQ ID NO: 54737 - DNA, 15 bp, Homo sapiens
gacagtgaaccaaac

SEQ ID NO: 54738 - DNA, 15 bp, Homo sapiens
ggacagtgaaccaaa

SEQ ID NO: 54739 - DNA, 15 bp, Homo sapiens
cggacagtgaaccaa

SEQ ID NO: 54740 - DNA, 15 bp, Homo sapiens
gcggacagtgaacca

SEQ ID NO: 54741 - DNA, 15 bp, Homo sapiens
agcggacagtgaacc

SEQ ID NO: 54742 - DNA, 15 bp, Homo sapiens
cagcggacagtgaac

SEQ ID NO: 54743 - DNA, 15 bp, Homo sapiens
acagcggacagtgaa

SEQ ID NO: 54744 - DNA, 15 bp, Homo sapiens
aacagcggacagtga

SEQ ID NO: 54745 - DNA, 15 bp, Homo sapiens
aaacagcggacagtg

SEQ ID NO: 54746 - DNA, 15 bp, Homo sapiens
caaacagcggacagt

SEQ ID NO: 54747 - DNA, 15 bp, Homo sapiens
tcaaacagcggacag

SEQ ID NO: 54748 - DNA, 15 bp, Homo sapiens
atcaaacagcggaca

SEQ ID NO: 54749 - DNA, 15 bp, Homo sapiens
tatcaaacagcggac

SEQ ID NO: 54750 - DNA, 15 bp, Homo sapiens
gtatcaaacagcgga

SEQ ID NO: 54751 - DNA, 15 bp, Homo sapiens
agtatcaaacagcgg

SEQ ID NO: 54752 - DNA, 15 bp, Homo sapiens
gagtatcaaacagcg

SEQ ID NO: 54753 - DNA, 15 bp, Homo sapiens
agagtatcaaacagc

SEQ ID NO: 54754 - DNA, 15 bp, Homo sapiens
aagagtatcaaacag

SEQ ID NO: 54755 - DNA, 15 bp, Homo sapiens
aaagagtatcaaaca

SEQ ID NO: 54756 - DNA, 15 bp, Homo sapiens
gaaagagtatcaaac

SEQ ID NO: 54757 - DNA, 15 bp, Homo sapiens
cgaaagagtatcaaa

SEQ ID NO: 54758 - DNA, 15 bp, Homo sapiens
gcgaaagagtatcaa

SEQ ID NO: 54759 - DNA, 15 bp, Homo sapiens
ggcgaaagagtatca

SEQ ID NO: 54760 - DNA, 15 bp, Homo sapiens
tggcgaaagagtatc

SEQ ID NO: 54761 - DNA, 15 bp, Homo sapiens
ttggcgaaagagtat

SEQ ID NO: 54762 - DNA, 15 bp, Homo sapiens
tttggcgaaagagta

SEQ ID NO: 54763 - DNA, 15 bp, Homo sapiens
gtttggcgaaagagt

SEQ ID NO: 54764 - DNA, 15 bp, Homo sapiens
tgtttggcgaaagag

SEQ ID NO: 54765 - DNA, 15 bp, Homo sapiens
ctgtttggcgaaaga

SEQ ID NO: 54766 - DNA, 15 bp, Homo sapiens
actgtttggcgaaag

SEQ ID NO: 54767 - DNA, 15 bp, Homo sapiens
cactgtttggcgaaa

SEQ ID NO: 54768 - DNA, 15 bp, Homo sapiens
tcactgtttggcgaa

SEQ ID NO: 54769 - DNA, 15 bp, Homo sapiens
ttcactgtttggcga

SEQ ID NO: 54770 - DNA, 15 bp, Homo sapiens
cttcactgtttggcg

SEQ ID NO: 54771 - DNA, 15 bp, Homo sapiens
acttcactgtttggc

SEQ ID NO: 54772 - DNA, 15 bp, Homo sapiens
aacttcactgtttgg

SEQ ID NO: 54773 - DNA, 15 bp, Homo sapiens
caacttcactgtttg

SEQ ID NO: 54774 - DNA, 15 bp, Homo sapiens
acaacttcactgttt

SEQ ID NO: 54775 - DNA, 15 bp, Homo sapiens
tacaacttcactgtt

SEQ ID NO: 54776 - DNA, 15 bp, Homo sapiens
ttacaacttcactgt

SEQ ID NO: 54777 - DNA, 15 bp, Homo sapiens
gttacaacttcactg

SEQ ID NO: 54778 - DNA, 15 bp, Homo sapiens
ggttacaacttcact

SEQ ID NO: 54779 - DNA, 15 bp, Homo sapiens
aggttacaacttcac

SEQ ID NO: 54780 - DNA, 15 bp, Homo sapiens
taggttacaacttca

SEQ ID NO: 54781 - DNA, 15 bp, Homo sapiens
ataggttacaacttc

SEQ ID NO: 54782 - DNA, 15 bp, Homo sapiens
aataggttacaactt

SEQ ID NO: 54783 - DNA, 15 bp, Homo sapiens
taataggttacaact

SEQ ID NO: 54784 - DNA, 15 bp, Homo sapiens
ttaataggttacaac

SEQ ID NO: 54785 - DNA, 15 bp, Homo sapiens
cttaataggttacaa

SEQ ID NO: 54786 - DNA, 15 bp, Homo sapiens
ccttaataggttaca

SEQ ID NO: 54787 - DNA, 15 bp, Homo sapiens
tccttaataggttac

SEQ ID NO: 54788 - DNA, 15 bp, Homo sapiens
ttccttaataggtta

SEQ ID NO: 54789 - DNA, 15 bp, Homo sapiens
cttccttaataggtt

SEQ ID NO: 54790 - DNA, 15 bp, Homo sapiens
acttccttaataggt

SEQ ID NO: 54791 - DNA, 15 bp, Homo sapiens
cacttccttaatagg

SEQ ID NO: 54792 - DNA, 15 bp, Homo sapiens
tcacttccttaatag

SEQ ID NO: 54793 - DNA, 15 bp, Homo sapiens
gtcacttccttaata

SEQ ID NO: 54794 - DNA, 15 bp, Homo sapiens
agtcacttccttaat

SEQ ID NO: 54795 - DNA, 15 bp, Homo sapiens
gagtcacttccttaa

SEQ ID NO: 54796 - DNA, 15 bp, Homo sapiens
tgagtcacttcctta

SEQ ID NO: 54797 - DNA, 15 bp, Homo sapiens
atgagtcacttcctt

SEQ ID NO: 54798 - DNA, 15 bp, Homo sapiens
aatgagtcacttcct

SEQ ID NO: 54799 - DNA, 15 bp, Homo sapiens
caatgagtcacttcc

SEQ ID NO: 54800 - DNA, 15 bp, Homo sapiens
gcaatgagtcacttc

SEQ ID NO: 54801 - DNA, 15 bp, Homo sapiens
agcaatgagtcactt

SEQ ID NO: 54802 - DNA, 15 bp, Homo sapiens
aagcaatgagtcact

SEQ ID NO: 54803 - DNA, 15 bp, Homo sapiens
aaagcaatgagtcac

SEQ ID NO: 54804 - DNA, 15 bp, Homo sapiens
taaagcaatgagtca

SEQ ID NO: 54805 - DNA, 15 bp, Homo sapiens
ataaagcaatgagtc

SEQ ID NO: 54806 - DNA, 15 bp, Homo sapiens
gataaagcaatgagt

SEQ ID NO: 54807 - DNA, 15 bp, Homo sapiens
agataaagcaatgag

SEQ ID NO: 54808 - DNA, 15 bp, Homo sapiens
cagataaagcaatga

SEQ ID NO: 54809 - DNA, 15 bp, Homo sapiens
acagataaagcaatg

SEQ ID NO: 54810 - DNA, 15 bp, Homo sapiens
aacagataaagcaat

SEQ ID NO: 54811 - DNA, 15 bp, Homo sapiens
aaacagataaagcaa

SEQ ID NO: 54812 - DNA, 15 bp, Homo sapiens
aaaacagataaagca

SEQ ID NO: 54813 - DNA, 15 bp, Homo sapiens
taaaacagataaagc

SEQ ID NO: 54814 - DNA, 15 bp, Homo sapiens
ataaaacagataaag

SEQ ID NO: 54815 - DNA, 15 bp, Homo sapiens
tataaaacagataaa

SEQ ID NO: 54816 - DNA, 15 bp, Homo sapiens
ttataaaacagataa

SEQ ID NO: 54817 - DNA, 15 bp, Homo sapiens
attataaaacagata

SEQ ID NO: 54818 - DNA, 15 bp, Homo sapiens
aattataaaacagat

SEQ ID NO: 54819 - DNA, 15 bp, Homo sapiens
aaattataaaacaga

SEQ ID NO: 54820 - DNA, 15 bp, Homo sapiens
caaattataaaacag

SEQ ID NO: 54821 - DNA, 15 bp, Homo sapiens
ccaaattataaaaca

SEQ ID NO: 54822 - DNA, 15 bp, Homo sapiens
cccaaattataaaac

SEQ ID NO: 54823 - DNA, 15 bp, Homo sapiens
ccccaaattataaaa

SEQ ID NO: 54824 - DNA, 15 bp, Homo sapiens
accccaaattataaa

SEQ ID NO: 54825 - DNA, 15 bp, Homo sapiens
aaccccaaattataa

SEQ ID NO: 54826 - DNA, 15 bp, Homo sapiens
aaaccccaaattata

SEQ ID NO: 54827 - DNA, 15 bp, Homo sapiens
gaaaccccaaattat

SEQ ID NO: 54828 - DNA, 15 bp, Homo sapiens
tgaaaccccaaatta

SEQ ID NO: 54829 - DNA, 15 bp, Homo sapiens
atgaaaccccaaatt

SEQ ID NO: 54830 - DNA, 15 bp, Homo sapiens
tatgaaaccccaaat

SEQ ID NO: 54831 - DNA, 15 bp, Homo sapiens
atatgaaaccccaaa

SEQ ID NO: 54832 - DNA, 15 bp, Homo sapiens
tatatgaaaccccaa

SEQ ID NO: 54833 - DNA, 15 bp, Homo sapiens
atatatgaaacccca

SEQ ID NO: 54834 - DNA, 15 bp, Homo sapiens
aatatatgaaacccc

SEQ ID NO: 54835 - DNA, 15 bp, Homo sapiens
caatatatgaaaccc

SEQ ID NO: 54836 - DNA, 15 bp, Homo sapiens
ccaatatatgaaacc

SEQ ID NO: 54837 - DNA, 15 bp, Homo sapiens
tccaatatatgaaac

SEQ ID NO: 54838 - DNA, 15 bp, Homo sapiens
ctccaatatatgaaa

SEQ ID NO: 54839 - DNA, 15 bp, Homo sapiens
actccaatatatgaa

SEQ ID NO: 54840 - DNA, 15 bp, Homo sapiens
tactccaatatatga

SEQ ID NO: 54841 - DNA, 15 bp, Homo sapiens
gtactccaatatatg

SEQ ID NO: 54842 - DNA, 15 bp, Homo sapiens
tgtactccaatatat

SEQ ID NO: 54843 - DNA, 15 bp, Homo sapiens
ctgtactccaatata

SEQ ID NO: 54844 - DNA, 15 bp, Homo sapiens
tctgtactccaatat

SEQ ID NO: 54845 - DNA, 15 bp, Homo sapiens
ctctgtactccaata

SEQ ID NO: 54846 - DNA, 15 bp, Homo sapiens
tctctgtactccaat

SEQ ID NO: 54847 - DNA, 15 bp, Homo sapiens
ctctctgtactccaa

SEQ ID NO: 54848 - DNA, 15 bp, Homo sapiens
tctctctgtactcca

SEQ ID NO: 54849 - DNA, 15 bp, Homo sapiens
atctctctgtactcc

SEQ ID NO: 54850 - DNA, 15 bp, Homo sapiens
aatctctctgtactc

SEQ ID NO: 54851 - DNA, 15 bp, Homo sapiens
caatctctctgtact

SEQ ID NO: 54852 - DNA, 15 bp, Homo sapiens
acaatctctctgtac

SEQ ID NO: 54853 - DNA, 15 bp, Homo sapiens
aacaatctctctgta

SEQ ID NO: 54854 - DNA, 15 bp, Homo sapiens
taacaatctctctgt

SEQ ID NO: 54855 - DNA, 15 bp, Homo sapiens
ttaacaatctctctg

SEQ ID NO: 54856 - DNA, 15 bp, Homo sapiens
tttaacaatctctct

SEQ ID NO: 54857 - DNA, 15 bp, Homo sapiens
ttttaacaatctctc

SEQ ID NO: 54858 - DNA, 15 bp, Homo sapiens
tttttaacaatctct

SEQ ID NO: 54859 - DNA, 15 bp, Homo sapiens
gtttttaacaatctc

SEQ ID NO: 54860 - DNA, 15 bp, Homo sapiens
ggtttttaacaatct

SEQ ID NO: 54861 - DNA, 15 bp, Homo sapiens
tggtttttaacaatc

SEQ ID NO: 54862 - DNA, 15 bp, Homo sapiens
gtggtttttaacaat

SEQ ID NO: 54863 - DNA, 15 bp, Homo sapiens
tgtggtttttaacaa

SEQ ID NO: 54864 - DNA, 15 bp, Homo sapiens
atgtggtttttaaca

SEQ ID NO: 54865 - DNA, 15 bp, Homo sapiens
tatgtggtttttaac

SEQ ID NO: 54866 - DNA, 15 bp, Homo sapiens
ttatgtggtttttaa

SEQ ID NO: 54867 - DNA, 15 bp, Homo sapiens
tttatgtggttttta

SEQ ID NO: 54868 - DNA, 15 bp, Homo sapiens
ttttatgtggttttt

SEQ ID NO: 54869 - DNA, 15 bp, Homo sapiens
tttttatgtggtttt

SEQ ID NO: 54870 - DNA, 15 bp, Homo sapiens
atttttatgtggttt

SEQ ID NO: 54871 - DNA, 15 bp, Homo sapiens
catttttatgtggtt

SEQ ID NO: 54872 - DNA, 15 bp, Homo sapiens
acatttttatgtggt

SEQ ID NO: 54873 - DNA, 15 bp, Homo sapiens
aacatttttatgtgg

SEQ ID NO: 54874 - DNA, 15 bp, Homo sapiens
gaacatttttatgtg

SEQ ID NO: 54875 - DNA, 15 bp, Homo sapiens
tgaacatttttatgt

SEQ ID NO: 54876 - DNA, 15 bp, Homo sapiens
atgaacatttttatg

SEQ ID NO: 54877 - DNA, 15 bp, Homo sapiens
aatgaacatttttat

SEQ ID NO: 54878 - DNA, 15 bp, Homo sapiens
caatgaacattttta

SEQ ID NO: 54879 - DNA, 15 bp, Homo sapiens
tcaatgaacattttt

SEQ ID NO: 54880 - DNA, 15 bp, Homo sapiens
atcaatgaacatttt

SEQ ID NO: 54881 - DNA, 15 bp, Homo sapiens
catcaatgaacattt

SEQ ID NO: 54882 - DNA, 15 bp, Homo sapiens
ccatcaatgaacatt

SEQ ID NO: 54883 - DNA, 15 bp, Homo sapiens
gccatcaatgaacat

SEQ ID NO: 54884 - DNA, 15 bp, Homo sapiens
ggccatcaatgaaca

SEQ ID NO: 54885 - DNA, 15 bp, Homo sapiens
tggccatcaatgaac

SEQ ID NO: 54886 - DNA, 15 bp, Homo sapiens
ctggccatcaatgaa

SEQ ID NO: 54887 - DNA, 15 bp, Homo sapiens
cctggccatcaatga

SEQ ID NO: 54888 - DNA, 15 bp, Homo sapiens
gcctggccatcaatg

SEQ ID NO: 54889 - DNA, 15 bp, Homo sapiens
tgcctggccatcaat

SEQ ID NO: 54890 - DNA, 15 bp, Homo sapiens
atgcctggccatcaa

SEQ ID NO: 54891 - DNA, 15 bp, Homo sapiens
catgcctggccatca

SEQ ID NO: 54892 - DNA, 15 bp, Homo sapiens
ccatgcctggccatc

SEQ ID NO: 54893 - DNA, 15 bp, Homo sapiens
accatgcctggccat

SEQ ID NO: 54894 - DNA, 15 bp, Homo sapiens
caccatgcctggcca

SEQ ID NO: 54895 - DNA, 15 bp, Homo sapiens
gtgagccaccatgcc

SEQ ID NO: 54896 - DNA, 15 bp, Homo sapiens
tgtgagccaccatgc

SEQ ID NO: 54897 - DNA, 15 bp, Homo sapiens
gtgtgagccaccatg

SEQ ID NO: 54898 - DNA, 15 bp, Homo sapiens
ggtgtgagccaccat

SEQ ID NO: 54899 - DNA, 15 bp, Homo sapiens
aggtgtgagccacca

SEQ ID NO: 54900 - DNA, 15 bp, Homo sapiens
caggtgtgagccacc

SEQ ID NO: 54901 - DNA, 15 bp, Homo sapiens
cccaaagtgctggga

SEQ ID NO: 54902 - DNA, 15 bp, Homo sapiens
tcccaaagtgctggg

SEQ ID NO: 54903 - DNA, 15 bp, Homo sapiens
ctcccaaagtgctgg

SEQ ID NO: 54904 - DNA, 15 bp, Homo sapiens
tggcctcccaaagtg

SEQ ID NO: 54905 - DNA, 15 bp, Homo sapiens
acttggcctcccaaa

SEQ ID NO: 54906 - DNA, 15 bp, Homo sapiens
gacttggcctcccaa

SEQ ID NO: 54907 - DNA, 15 bp, Homo sapiens
cgacttggcctccca

SEQ ID NO: 54908 - DNA, 15 bp, Homo sapiens
ccgacttggcctccc

SEQ ID NO: 54909 - DNA, 15 bp, Homo sapiens
cccgacttggcctcc

SEQ ID NO: 54910 - DNA, 15 bp, Homo sapiens
tcccgacttggcctc

SEQ ID NO: 54911 - DNA, 15 bp, Homo sapiens
ctcccgacttggcct

SEQ ID NO: 54912 - DNA, 15 bp, Homo sapiens
cctcccgacttggcc

SEQ ID NO: 54913 - DNA, 15 bp, Homo sapiens
tcctcccgacttggc

SEQ ID NO: 54914 - DNA, 15 bp, Homo sapiens
atcctcccgacttgg

SEQ ID NO: 54915 - DNA, 15 bp, Homo sapiens
tatcctcccgacttg

SEQ ID NO: 54916 - DNA, 15 bp, Homo sapiens
ctatcctcccgactt

SEQ ID NO: 54917 - DNA, 15 bp, Homo sapiens
gctatcctcccgact

SEQ ID NO: 54918 - DNA, 15 bp, Homo sapiens
agctatcctcccgac

SEQ ID NO: 54919 - DNA, 15 bp, Homo sapiens
aagctatcctcccga

SEQ ID NO: 54920 - DNA, 15 bp, Homo sapiens
caagctatcctcccg

SEQ ID NO: 54921 - DNA, 15 bp, Homo sapiens
tcaagctatcctccc

SEQ ID NO: 54922 - DNA, 15 bp, Homo sapiens
ctcaagctatcctcc

SEQ ID NO: 54923 - DNA, 15 bp, Homo sapiens
gctcaagctatcctc

SEQ ID NO: 54924 - DNA, 15 bp, Homo sapiens
ggctcaagctatcct

SEQ ID NO: 54925 - DNA, 15 bp, Homo sapiens
gggctcaagctatcc

SEQ ID NO: 54926 - DNA, 15 bp, Homo sapiens
tgggctcaagctatc

SEQ ID NO: 54927 - DNA, 15 bp, Homo sapiens
ctgggctcaagctat

SEQ ID NO: 54928 - DNA, 15 bp, Homo sapiens
cctgggctcaagcta

SEQ ID NO: 54929 - DNA, 15 bp, Homo sapiens
tcctgggctcaagct

SEQ ID NO: 54930 - DNA, 15 bp, Homo sapiens
tctcaaactcctggg

SEQ ID NO: 54931 - DNA, 15 bp, Homo sapiens
tgtctcaaactcctg

SEQ ID NO: 54932 - DNA, 15 bp, Homo sapiens
ttgtctcaaactcct

SEQ ID NO: 54933 - DNA, 15 bp, Homo sapiens
cttgtctcaaactcc

SEQ ID NO: 54934 - DNA, 15 bp, Homo sapiens
gcttgtctcaaactc

SEQ ID NO: 54935 - DNA, 15 bp, Homo sapiens
ggcttgtctcaaact

SEQ ID NO: 54936 - DNA, 15 bp, Homo sapiens
aggcttgtctcaaac

SEQ ID NO: 54937 - DNA, 15 bp, Homo sapiens
caggcttgtctcaaa

SEQ ID NO: 54938 - DNA, 15 bp, Homo sapiens
ccaggcttgtctcaa

SEQ ID NO: 54939 - DNA, 15 bp, Homo sapiens
cccaggcttgtctca

SEQ ID NO: 54940 - DNA, 15 bp, Homo sapiens
ggttgcccaggcttg

SEQ ID NO: 54941 - DNA, 15 bp, Homo sapiens
gggttgcccaggctt

SEQ ID NO: 54942 - DNA, 15 bp, Homo sapiens
agggttgcccaggct

SEQ ID NO: 54943 - DNA, 15 bp, Homo sapiens
cagggttgcccaggc

SEQ ID NO: 54944 - DNA, 15 bp, Homo sapiens
acagggttgcccagg

SEQ ID NO: 54945 - DNA, 15 bp, Homo sapiens
gacagggttgcccag

SEQ ID NO: 54946 - DNA, 15 bp, Homo sapiens
agacagggttgccca

SEQ ID NO: 54947 - DNA, 15 bp, Homo sapiens
gagacagggttgccc

SEQ ID NO: 54948 - DNA, 15 bp, Homo sapiens
agagacagggttgcc

SEQ ID NO: 54949 - DNA, 15 bp, Homo sapiens
tagagacagggttgc

SEQ ID NO: 54950 - DNA, 15 bp, Homo sapiens
gtagagacagggttg

SEQ ID NO: 54951 - DNA, 15 bp, Homo sapiens
tgtagagacagggtt

SEQ ID NO: 54952 - DNA, 15 bp, Homo sapiens
ttttttgtagagaca

SEQ ID NO: 54953 - DNA, 15 bp, Homo sapiens
aattttttgtagaga

SEQ ID NO: 54954 - DNA, 15 bp, Homo sapiens
aaattttttgtagag

SEQ ID NO: 54955 - DNA, 15 bp, Homo sapiens
taaattttttgtaga

SEQ ID NO: 54956 - DNA, 15 bp, Homo sapiens
ttaaattttttgtag

SEQ ID NO: 54957 - DNA, 15 bp, Homo sapiens
tttaaattttttgta

SEQ ID NO: 54958 - DNA, 15 bp, Homo sapiens
ttttaaattttttgt

SEQ ID NO: 54959 - DNA, 15 bp, Homo sapiens
tttttaaattttttg

SEQ ID NO: 54960 - DNA, 15 bp, Homo sapiens
ctttttaaatttttt

SEQ ID NO: 54961 - DNA, 15 bp, Homo sapiens
actttttaaattttt

SEQ ID NO: 54962 - DNA, 15 bp, Homo sapiens
tactttttaaatttt

SEQ ID NO: 54963 - DNA, 15 bp, Homo sapiens
ctactttttaaattt

SEQ ID NO: 54964 - DNA, 15 bp, Homo sapiens
gctactttttaaatt

SEQ ID NO: 54965 - DNA, 15 bp, Homo sapiens
ggctactttttaaat

SEQ ID NO: 54966 - DNA, 15 bp, Homo sapiens
cggctactttttaaa

SEQ ID NO: 54967 - DNA, 15 bp, Homo sapiens
ccggctactttttaa

SEQ ID NO: 54968 - DNA, 15 bp, Homo sapiens
cccggctacttttta

SEQ ID NO: 54969 - DNA, 15 bp, Homo sapiens
acccggctacttttt

SEQ ID NO: 54970 - DNA, 15 bp, Homo sapiens
cacccggctactttt

SEQ ID NO: 54971 - DNA, 15 bp, Homo sapiens
acacccggctacttt

SEQ ID NO: 54972 - DNA, 15 bp, Homo sapiens
cacacccggctactt

SEQ ID NO: 54973 - DNA, 15 bp, Homo sapiens
ccacacccggctact

SEQ ID NO: 54974 - DNA, 15 bp, Homo sapiens
accacacccggctac

SEQ ID NO: 54975 - DNA, 15 bp, Homo sapiens
caccacacccggcta

SEQ ID NO: 54976 - DNA, 15 bp, Homo sapiens
ccaccacacccggct

SEQ ID NO: 54977 - DNA, 15 bp, Homo sapiens
gccaccacacccggc

SEQ ID NO: 54978 - DNA, 15 bp, Homo sapiens
tgccaccacacccgg

SEQ ID NO: 54979 - DNA, 15 bp, Homo sapiens
gtgccaccacacccg

SEQ ID NO: 54980 - DNA, 15 bp, Homo sapiens
tgtgccaccacaccc

SEQ ID NO: 54981 - DNA, 15 bp, Homo sapiens
atgtgccaccacacc

SEQ ID NO: 54982 - DNA, 15 bp, Homo sapiens
catgtgccaccacac

SEQ ID NO: 54983 - DNA, 15 bp, Homo sapiens
gcatgtgccaccaca

SEQ ID NO: 54984 - DNA, 15 bp, Homo sapiens
ggcatgtgccaccac

SEQ ID NO: 54985 - DNA, 15 bp, Homo sapiens
aggcatgtgccacca

SEQ ID NO: 54986 - DNA, 15 bp, Homo sapiens
taggcatgtgccacc

SEQ ID NO: 54987 - DNA, 15 bp, Homo sapiens
ataggcatgtgccac

SEQ ID NO: 54988 - DNA, 15 bp, Homo sapiens
tataggcatgtgcca

SEQ ID NO: 54989 - DNA, 15 bp, Homo sapiens
ctataggcatgtgcc

SEQ ID NO: 54990 - DNA, 15 bp, Homo sapiens
actataggcatgtgc

SEQ ID NO: 54991 - DNA, 15 bp, Homo sapiens
gactataggcatgtg

SEQ ID NO: 54992 - DNA, 15 bp, Homo sapiens
ggactataggcatgt

SEQ ID NO: 54993 - DNA, 15 bp, Homo sapiens
gggactataggcatg

SEQ ID NO: 54994 - DNA, 15 bp, Homo sapiens
tgggactataggcat

SEQ ID NO: 54995 - DNA, 15 bp, Homo sapiens
ctgggactataggca

SEQ ID NO: 54996 - DNA, 15 bp, Homo sapiens
gctgggactataggc

SEQ ID NO: 54997 - DNA, 15 bp, Homo sapiens
agctgggactatagg

SEQ ID NO: 54998 - DNA, 15 bp, Homo sapiens
tagctgggactatag

SEQ ID NO: 54999 - DNA, 15 bp, Homo sapiens
ctagctgggactata

SEQ ID NO: 55000 - DNA, 15 bp, Homo sapiens
actagctgggactat

SEQ ID NO: 55001 - DNA, 15 bp, Homo sapiens
gactagctgggacta

SEQ ID NO: 55002 - DNA, 15 bp, Homo sapiens
tgactagctgggact

SEQ ID NO: 55003 - DNA, 15 bp, Homo sapiens
ctgactagctgggac

SEQ ID NO: 55004 - DNA, 15 bp, Homo sapiens
cctgactagctggga

SEQ ID NO: 55005 - DNA, 15 bp, Homo sapiens
tcctgactagctggg

SEQ ID NO: 55006 - DNA, 15 bp, Homo sapiens
ctcctgactagctgg

SEQ ID NO: 55007 - DNA, 15 bp, Homo sapiens
cctcctgactagctg

SEQ ID NO: 55008 - DNA, 15 bp, Homo sapiens
gcctcctgactagct

SEQ ID NO: 55009 - DNA, 15 bp, Homo sapiens
agcctcctgactagc

SEQ ID NO: 55010 - DNA, 15 bp, Homo sapiens
cagcctcctgactag

SEQ ID NO: 55011 - DNA, 15 bp, Homo sapiens
tcagcctcctgacta

SEQ ID NO: 55012 - DNA, 15 bp, Homo sapiens
atcagcctcctgact

SEQ ID NO: 55013 - DNA, 15 bp, Homo sapiens
tatcagcctcctgac

SEQ ID NO: 55014 - DNA, 15 bp, Homo sapiens
atatcagcctcctga

SEQ ID NO: 55015 - DNA, 15 bp, Homo sapiens
catatcagcctcctg

SEQ ID NO: 55016 - DNA, 15 bp, Homo sapiens
ccatatcagcctcct

SEQ ID NO: 55017 - DNA, 15 bp, Homo sapiens
cccatatcagcctcc

SEQ ID NO: 55018 - DNA, 15 bp, Homo sapiens
tcccatatcagcctc

SEQ ID NO: 55019 - DNA, 15 bp, Homo sapiens
ctcccatatcagcct

SEQ ID NO: 55020 - DNA, 15 bp, Homo sapiens
cctcccatatcagcc

SEQ ID NO: 55021 - DNA, 15 bp, Homo sapiens
tcctcccatatcagc

SEQ ID NO: 55022 - DNA, 15 bp, Homo sapiens
atcctcccatatcag

SEQ ID NO: 55023 - DNA, 15 bp, Homo sapiens
catcctcccatatca

SEQ ID NO: 55024 - DNA, 15 bp, Homo sapiens
ccatcctcccatatc

SEQ ID NO: 55025 - DNA, 15 bp, Homo sapiens
gccatcctcccatat

SEQ ID NO: 55026 - DNA, 15 bp, Homo sapiens
ggccatcctcccata

SEQ ID NO: 55027 - DNA, 15 bp, Homo sapiens
aggccatcctcccat

SEQ ID NO: 55028 - DNA, 15 bp, Homo sapiens
taggccatcctccca

SEQ ID NO: 55029 - DNA, 15 bp, Homo sapiens
ttaggccatcctccc

SEQ ID NO: 55030 - DNA, 15 bp, Homo sapiens
cttaggccatcctcc

SEQ ID NO: 55031 - DNA, 15 bp, Homo sapiens
gcttaggccatcctc

SEQ ID NO: 55032 - DNA, 15 bp, Homo sapiens
ggcttaggccatcct

SEQ ID NO: 55033 - DNA, 15 bp, Homo sapiens
gggcttaggccatcc

SEQ ID NO: 55034 - DNA, 15 bp, Homo sapiens
tgggcttaggccatc

SEQ ID NO: 55035 - DNA, 15 bp, Homo sapiens
ctgggcttaggccat

SEQ ID NO: 55036 - DNA, 15 bp, Homo sapiens
cctgggcttaggcca

SEQ ID NO: 55037 - DNA, 15 bp, Homo sapiens
tcctgggcttaggcc

SEQ ID NO: 55038 - DNA, 15 bp, Homo sapiens
ctcctgggcttaggc

SEQ ID NO: 55039 - DNA, 15 bp, Homo sapiens
actcctgggcttagg

SEQ ID NO: 55040 - DNA, 15 bp, Homo sapiens
aactcctgggcttag

SEQ ID NO: 55041 - DNA, 15 bp, Homo sapiens
aaactcctgggctta

SEQ ID NO: 55042 - DNA, 15 bp, Homo sapiens
caaactcctgggctt

SEQ ID NO: 55043 - DNA, 15 bp, Homo sapiens
ttcaaactcctgggc

SEQ ID NO: 55044 - DNA, 15 bp, Homo sapiens
cttcaaactcctggg

SEQ ID NO: 55045 - DNA, 15 bp, Homo sapiens
tcttcaaactcctgg

SEQ ID NO: 55046 - DNA, 15 bp, Homo sapiens
atcttcaaactcctg

SEQ ID NO: 55047 - DNA, 15 bp, Homo sapiens
catcttcaaactcct

SEQ ID NO: 55048 - DNA, 15 bp, Homo sapiens
gcatcttcaaactcc

SEQ ID NO: 55049 - DNA, 15 bp, Homo sapiens
tgcatcttcaaactc

SEQ ID NO: 55050 - DNA, 15 bp, Homo sapiens
ctgcatcttcaaact

SEQ ID NO: 55051 - DNA, 15 bp, Homo sapiens
actgcatcttcaaac

SEQ ID NO: 55052 - DNA, 15 bp, Homo sapiens
cactgcatcttcaaa

SEQ ID NO: 55053 - DNA, 15 bp, Homo sapiens
tcactgcatcttcaa

SEQ ID NO: 55054 - DNA, 15 bp, Homo sapiens
ctcactgcatcttca

SEQ ID NO: 55055 - DNA, 15 bp, Homo sapiens
gctcactgcatcttc

SEQ ID NO: 55056 - DNA, 15 bp, Homo sapiens
agctcactgcatctt

SEQ ID NO: 55057 - DNA, 15 bp, Homo sapiens
tagctcactgcatct

SEQ ID NO: 55058 - DNA, 15 bp, Homo sapiens
atagctcactgcatc

SEQ ID NO: 55059 - DNA, 15 bp, Homo sapiens
catagctcactgcat

SEQ ID NO: 55060 - DNA, 15 bp, Homo sapiens
tcatagctcactgca

SEQ ID NO: 55061 - DNA, 15 bp, Homo sapiens
atcatagctcactgc

SEQ ID NO: 55062 - DNA, 15 bp, Homo sapiens
gatcatagctcactg

SEQ ID NO: 55063 - DNA, 15 bp, Homo sapiens
tgatcatagctcact

SEQ ID NO: 55064 - DNA, 15 bp, Homo sapiens
gtgatcatagctcac

SEQ ID NO: 55065 - DNA, 15 bp, Homo sapiens
tgtgatcatagctca

SEQ ID NO: 55066 - DNA, 15 bp, Homo sapiens
gtgtgatcatagctc

SEQ ID NO: 55067 - DNA, 15 bp, Homo sapiens
agtgtgatcatagct

SEQ ID NO: 55068 - DNA, 15 bp, Homo sapiens
tagtgtgatcatagc

SEQ ID NO: 55069 - DNA, 15 bp, Homo sapiens
gtagtgtgatcatag

SEQ ID NO: 55070 - DNA, 15 bp, Homo sapiens
agtagtgtgatcata

SEQ ID NO: 55071 - DNA, 15 bp, Homo sapiens
cagtagtgtgatcat

SEQ ID NO: 55072 - DNA, 15 bp, Homo sapiens
gcagtagtgtgatca

SEQ ID NO: 55073 - DNA, 15 bp, Homo sapiens
tgcagtagtgtgatc

SEQ ID NO: 55074 - DNA, 15 bp, Homo sapiens
gtgcagtagtgtgat

SEQ ID NO: 55075 - DNA, 15 bp, Homo sapiens
agtgcagtagtgtga

SEQ ID NO: 55076 - DNA, 15 bp, Homo sapiens
gagtgcagtagtgtg

SEQ ID NO: 55077 - DNA, 15 bp, Homo sapiens
agagtgcagtagtgt

SEQ ID NO: 55078 - DNA, 15 bp, Homo sapiens
cagagtgcagtagtg

SEQ ID NO: 55079 - DNA, 15 bp, Homo sapiens
ccagagtgcagtagt

SEQ ID NO: 55080 - DNA, 15 bp, Homo sapiens
gccagagtgcagtag

SEQ ID NO: 55081 - DNA, 15 bp, Homo sapiens
ggccagagtgcagta

SEQ ID NO: 55082 - DNA, 15 bp, Homo sapiens
aggccagagtgcagt

SEQ ID NO: 55083 - DNA, 15 bp, Homo sapiens
caggccagagtgcag

SEQ ID NO: 55084 - DNA, 15 bp, Homo sapiens
ccaggccagagtgca

SEQ ID NO: 55085 - DNA, 15 bp, Homo sapiens
cccaggccagagtgc

SEQ ID NO: 55086 - DNA, 15 bp, Homo sapiens
acccaggccagagtg

SEQ ID NO: 55087 - DNA, 15 bp, Homo sapiens
cacccaggccagagt

SEQ ID NO: 55088 - DNA, 15 bp, Homo sapiens
tcacccaggccagag

SEQ ID NO: 55089 - DNA, 15 bp, Homo sapiens
gtcacccaggccaga

SEQ ID NO: 55090 - DNA, 15 bp, Homo sapiens
tgtcacccaggccag

SEQ ID NO: 55091 - DNA, 15 bp, Homo sapiens
ctgtcacccaggcca

SEQ ID NO: 55092 - DNA, 15 bp, Homo sapiens
tctgtcacccaggcc

SEQ ID NO: 55093 - DNA, 15 bp, Homo sapiens
ttcactctgtcaccc

SEQ ID NO: 55094 - DNA, 15 bp, Homo sapiens
tttcactctgtcacc

SEQ ID NO: 55095 - DNA, 15 bp, Homo sapiens
gtttcactctgtcac

SEQ ID NO: 55096 - DNA, 15 bp, Homo sapiens
ggtttcactctgtca

SEQ ID NO: 55097 - DNA, 15 bp, Homo sapiens
gggtttcactctgtc

SEQ ID NO: 55098 - DNA, 15 bp, Homo sapiens
agggtttcactctgt

SEQ ID NO: 55099 - DNA, 15 bp, Homo sapiens
cagggtttcactctg

SEQ ID NO: 55100 - DNA, 15 bp, Homo sapiens
acagggtttcactct

SEQ ID NO: 55101 - DNA, 15 bp, Homo sapiens
gacagggtttcactc

SEQ ID NO: 55102 - DNA, 15 bp, Homo sapiens
agacagggtttcact

SEQ ID NO: 55103 - DNA, 15 bp, Homo sapiens
gagacagggtttcac

SEQ ID NO: 55104 - DNA, 15 bp, Homo sapiens
agagacagggtttca

SEQ ID NO: 55105 - DNA, 15 bp, Homo sapiens
cagagacagggtttc

SEQ ID NO: 55106 - DNA, 15 bp, Homo sapiens
tcagagacagggttt

SEQ ID NO: 55107 - DNA, 15 bp, Homo sapiens
ttcagagacagggtt

SEQ ID NO: 55108 - DNA, 15 bp, Homo sapiens
tttcagagacagggt

SEQ ID NO: 55109 - DNA, 15 bp, Homo sapiens
ttttcagagacaggg

SEQ ID NO: 55110 - DNA, 15 bp, Homo sapiens
tttttcagagacagg

SEQ ID NO: 55111 - DNA, 15 bp, Homo sapiens
ttttttcagagacag

SEQ ID NO: 55112 - DNA, 15 bp, Homo sapiens
tttttttcagagaca

SEQ ID NO: 55113 - DNA, 15 bp, Homo sapiens
ttttttttcagagac

SEQ ID NO: 55114 - DNA, 15 bp, Homo sapiens
tttttttttcagaga

SEQ ID NO: 55115 - DNA, 15 bp, Homo sapiens
ttttttttttcagag

SEQ ID NO: 55116 - DNA, 15 bp, Homo sapiens
tttttttttttcaga

SEQ ID NO: 55117 - DNA, 15 bp, Homo sapiens
ttttttttttttcag

SEQ ID NO: 55118 - DNA, 15 bp, Homo sapiens
tttttttttttttca

SEQ ID NO: 55119 - DNA, 15 bp, Homo sapiens
ttttttttttttttc

SEQ ID NO: 55120 - DNA, 15 bp, Homo sapiens
gactttttttttttt

SEQ ID NO: 55121 - DNA, 15 bp, Homo sapiens
tgacttttttttttt

SEQ ID NO: 55122 - DNA, 15 bp, Homo sapiens
ttgactttttttttt

SEQ ID NO: 55123 - DNA, 15 bp, Homo sapiens
attgacttttttttt

SEQ ID NO: 55124 - DNA, 15 bp, Homo sapiens
aattgactttttttt

SEQ ID NO: 55125 - DNA, 15 bp, Homo sapiens
aaattgacttttttt

SEQ ID NO: 55126 - DNA, 15 bp, Homo sapiens
taaattgactttttt

SEQ ID NO: 55127 - DNA, 15 bp, Homo sapiens
ataaattgacttttt

SEQ ID NO: 55128 - DNA, 15 bp, Homo sapiens
aataaattgactttt

SEQ ID NO: 55129 - DNA, 15 bp, Homo sapiens
gaataaattgacttt

SEQ ID NO: 55130 - DNA, 15 bp, Homo sapiens
tgaataaattgactt

SEQ ID NO: 55131 - DNA, 15 bp, Homo sapiens
ttgaataaattgact

SEQ ID NO: 55132 - DNA, 15 bp, Homo sapiens
tttgaataaattgac

SEQ ID NO: 55133 - DNA, 15 bp, Homo sapiens
atttgaataaattga

SEQ ID NO: 55134 - DNA, 15 bp, Homo sapiens
aatttgaataaattg

SEQ ID NO: 55135 - DNA, 15 bp, Homo sapiens
gaatttgaataaatt

SEQ ID NO: 55136 - DNA, 15 bp, Homo sapiens
agaatttgaataaat

SEQ ID NO: 55137 - DNA, 15 bp, Homo sapiens
tagaatttgaataaa

SEQ ID NO: 55138 - DNA, 15 bp, Homo sapiens
gtagaatttgaataa

SEQ ID NO: 55139 - DNA, 15 bp, Homo sapiens
ggtagaatttgaata

SEQ ID NO: 55140 - DNA, 15 bp, Homo sapiens
aggtagaatttgaat

SEQ ID NO: 55141 - DNA, 15 bp, Homo sapiens
gaggtagaatttgaa

SEQ ID NO: 55142 - DNA, 15 bp, Homo sapiens
agaggtagaatttga

SEQ ID NO: 55143 - DNA, 15 bp, Homo sapiens
aagaggtagaatttg

SEQ ID NO: 55144 - DNA, 15 bp, Homo sapiens
aaagaggtagaattt

SEQ ID NO: 55145 - DNA, 15 bp, Homo sapiens
gaaagaggtagaatt

SEQ ID NO: 55146 - DNA, 15 bp, Homo sapiens
agaaagaggtagaat

SEQ ID NO: 55147 - DNA, 15 bp, Homo sapiens
aagaaagaggtagaa

SEQ ID NO: 55148 - DNA, 15 bp, Homo sapiens
taagaaagaggtaga

SEQ ID NO: 55149 - DNA, 15 bp, Homo sapiens
ttaagaaagaggtag

SEQ ID NO: 55150 - DNA, 15 bp, Homo sapiens
cttaagaaagaggta

SEQ ID NO: 55151 - DNA, 15 bp, Homo sapiens
tcttaagaaagaggt

SEQ ID NO: 55152 - DNA, 15 bp, Homo sapiens
atcttaagaaagagg

SEQ ID NO: 55153 - DNA, 15 bp, Homo sapiens
aatcttaagaaagag

SEQ ID NO: 55154 - DNA, 15 bp, Homo sapiens
caatcttaagaaaga

SEQ ID NO: 55155 - DNA, 15 bp, Homo sapiens
acaatcttaagaaag

SEQ ID NO: 55156 - DNA, 15 bp, Homo sapiens
aacaatcttaagaaa

SEQ ID NO: 55157 - DNA, 15 bp, Homo sapiens
taacaatcttaagaa

SEQ ID NO: 55158 - DNA, 15 bp, Homo sapiens
ataacaatcttaaga

SEQ ID NO: 55159 - DNA, 15 bp, Homo sapiens
tataacaatcttaag

SEQ ID NO: 55160 - DNA, 15 bp, Homo sapiens
atataacaatcttaa

SEQ ID NO: 55161 - DNA, 15 bp, Homo sapiens
catataacaatctta

SEQ ID NO: 55162 - DNA, 15 bp, Homo sapiens
gcatataacaatctt

SEQ ID NO: 55163 - DNA, 15 bp, Homo sapiens
agcatataacaatct

SEQ ID NO: 55164 - DNA, 15 bp, Homo sapiens
gagcatataacaatc

SEQ ID NO: 55165 - DNA, 15 bp, Homo sapiens
tgagcatataacaat

SEQ ID NO: 55166 - DNA, 15 bp, Homo sapiens
ttgagcatataacaa

SEQ ID NO: 55167 - DNA, 15 bp, Homo sapiens
tttgagcatataaca

SEQ ID NO: 55168 - DNA, 15 bp, Homo sapiens
atttgagcatataac

SEQ ID NO: 55169 - DNA, 15 bp, Homo sapiens
tatttgagcatataa

SEQ ID NO: 55170 - DNA, 15 bp, Homo sapiens
ttatttgagcatata

SEQ ID NO: 55171 - DNA, 15 bp, Homo sapiens
cttatttgagcatat

SEQ ID NO: 55172 - DNA, 15 bp, Homo sapiens
tcttatttgagcata

SEQ ID NO: 55173 - DNA, 15 bp, Homo sapiens
atcttatttgagcat

SEQ ID NO: 55174 - DNA, 15 bp, Homo sapiens
catcttatttgagca

SEQ ID NO: 55175 - DNA, 15 bp, Homo sapiens
tcatcttatttgagc

SEQ ID NO: 55176 - DNA, 15 bp, Homo sapiens
atcatcttatttgag

SEQ ID NO: 55177 - DNA, 15 bp, Homo sapiens
catcatcttatttga

SEQ ID NO: 55178 - DNA, 15 bp, Homo sapiens
tcatcatcttatttg

SEQ ID NO: 55179 - DNA, 15 bp, Homo sapiens
gtcatcatcttattt

SEQ ID NO: 55180 - DNA, 15 bp, Homo sapiens
agtcatcatcttatt

SEQ ID NO: 55181 - DNA, 15 bp, Homo sapiens
gagtcatcatcttat

SEQ ID NO: 55182 - DNA, 15 bp, Homo sapiens
agagtcatcatctta

SEQ ID NO: 55183 - DNA, 15 bp, Homo sapiens
tagagtcatcatctt

SEQ ID NO: 55184 - DNA, 15 bp, Homo sapiens
ttagagtcatcatct

SEQ ID NO: 55185 - DNA, 15 bp, Homo sapiens
tttagagtcatcatc

SEQ ID NO: 55186 - DNA, 15 bp, Homo sapiens
ttttagagtcatcat

SEQ ID NO: 55187 - DNA, 15 bp, Homo sapiens
cttttagagtcatca

SEQ ID NO: 55188 - DNA, 15 bp, Homo sapiens
acttttagagtcatc

SEQ ID NO: 55189 - DNA, 15 bp, Homo sapiens
cacttttagagtcat

SEQ ID NO: 55190 - DNA, 15 bp, Homo sapiens
gcacttttagagtca

SEQ ID NO: 55191 - DNA, 15 bp, Homo sapiens
ggcacttttagagtc

SEQ ID NO: 55192 - DNA, 15 bp, Homo sapiens
gggcacttttagagt

SEQ ID NO: 55193 - DNA, 15 bp, Homo sapiens
agggcacttttagag

SEQ ID NO: 55194 - DNA, 15 bp, Homo sapiens
cagggcacttttaga

SEQ ID NO: 55195 - DNA, 15 bp, Homo sapiens
tcagggcacttttag

SEQ ID NO: 55196 - DNA, 15 bp, Homo sapiens
ttcagggcactttta

SEQ ID NO: 55197 - DNA, 15 bp, Homo sapiens
tttcagggcactttt

SEQ ID NO: 55198 - DNA, 15 bp, Homo sapiens
gtttcagggcacttt

SEQ ID NO: 55199 - DNA, 15 bp, Homo sapiens
agtttcagggcactt

SEQ ID NO: 55200 - DNA, 15 bp, Homo sapiens
tagtttcagggcact

SEQ ID NO: 55201 - DNA, 15 bp, Homo sapiens
ttagtttcagggcac

SEQ ID NO: 55202 - DNA, 15 bp, Homo sapiens
tttagtttcagggca

SEQ ID NO: 55203 - DNA, 15 bp, Homo sapiens
ttttagtttcagggc

SEQ ID NO: 55204 - DNA, 15 bp, Homo sapiens
tttttagtttcaggg

SEQ ID NO: 55205 - DNA, 15 bp, Homo sapiens
ttttttagtttcagg

SEQ ID NO: 55206 - DNA, 15 bp, Homo sapiens
attttttagtttcag

SEQ ID NO: 55207 - DNA, 15 bp, Homo sapiens
aattttttagtttca

SEQ ID NO: 55208 - DNA, 15 bp, Homo sapiens
taattttttagtttc

SEQ ID NO: 55209 - DNA, 15 bp, Homo sapiens
ttaattttttagttt

SEQ ID NO: 55210 - DNA, 15 bp, Homo sapiens
cttaattttttagtt

SEQ ID NO: 55211 - DNA, 15 bp, Homo sapiens
ccttaattttttagt

SEQ ID NO: 55212 - DNA, 15 bp, Homo sapiens
gccttaattttttag

SEQ ID NO: 55213 - DNA, 15 bp, Homo sapiens
tgccttaatttttta

SEQ ID NO: 55214 - DNA, 15 bp, Homo sapiens
atgccttaatttttt

SEQ ID NO: 55215 - DNA, 15 bp, Homo sapiens
aatgccttaattttt

SEQ ID NO: 55216 - DNA, 15 bp, Homo sapiens
aaatgccttaatttt

SEQ ID NO: 55217 - DNA, 15 bp, Homo sapiens
taaatgccttaattt

SEQ ID NO: 55218 - DNA, 15 bp, Homo sapiens
ttaaatgccttaatt

SEQ ID NO: 55219 - DNA, 15 bp, Homo sapiens
tttaaatgccttaat

SEQ ID NO: 55220 - DNA, 15 bp, Homo sapiens
ttttaaatgccttaa

SEQ ID NO: 55221 - DNA, 15 bp, Homo sapiens
tttttaaatgcctta

SEQ ID NO: 55222 - DNA, 15 bp, Homo sapiens
atttttaaatgcctt

SEQ ID NO: 55223 - DNA, 15 bp, Homo sapiens
aatttttaaatgcct

SEQ ID NO: 55224 - DNA, 15 bp, Homo sapiens
taatttttaaatgcc

SEQ ID NO: 55225 - DNA, 15 bp, Homo sapiens
ataatttttaaatgc

SEQ ID NO: 55226 - DNA, 15 bp, Homo sapiens
aataatttttaaatg

SEQ ID NO: 55227 - DNA, 15 bp, Homo sapiens
aaataatttttaaat

SEQ ID NO: 55228 - DNA, 15 bp, Homo sapiens
gaaataatttttaaa

SEQ ID NO: 55229 - DNA, 15 bp, Homo sapiens
agaaataatttttaa

SEQ ID NO: 55230 - DNA, 15 bp, Homo sapiens
aagaaataattttta

SEQ ID NO: 55231 - DNA, 15 bp, Homo sapiens
taagaaataattttt

SEQ ID NO: 55232 - DNA, 15 bp, Homo sapiens
gtaagaaataatttt

SEQ ID NO: 55233 - DNA, 15 bp, Homo sapiens
ggtaagaaataattt

SEQ ID NO: 55234 - DNA, 15 bp, Homo sapiens
aggtaagaaataatt

SEQ ID NO: 55235 - DNA, 15 bp, Homo sapiens
aaggtaagaaataat

SEQ ID NO: 55236 - DNA, 15 bp, Homo sapiens
aaaggtaagaaataa

SEQ ID NO: 55237 - DNA, 15 bp, Homo sapiens
taaaggtaagaaata

SEQ ID NO: 55238 - DNA, 15 bp, Homo sapiens
ataaaggtaagaaat

SEQ ID NO: 55239 - DNA, 15 bp, Homo sapiens
aataaaggtaagaaa

SEQ ID NO: 55240 - DNA, 15 bp, Homo sapiens
taataaaggtaagaa

SEQ ID NO: 55241 - DNA, 15 bp, Homo sapiens
ctaataaaggtaaga

SEQ ID NO: 55242 - DNA, 15 bp, Homo sapiens
gctaataaaggtaag

SEQ ID NO: 55243 - DNA, 15 bp, Homo sapiens
tgctaataaaggtaa

SEQ ID NO: 55244 - DNA, 15 bp, Homo sapiens
ttgctaataaaggta

SEQ ID NO: 55245 - DNA, 15 bp, Homo sapiens
gttgctaataaaggt

SEQ ID NO: 55246 - DNA, 15 bp, Homo sapiens
ggttgctaataaagg

SEQ ID NO: 55247 - DNA, 15 bp, Homo sapiens
gggttgctaataaag

SEQ ID NO: 55248 - DNA, 15 bp, Homo sapiens
tgggttgctaataaa

SEQ ID NO: 55249 - DNA, 15 bp, Homo sapiens
ctgggttgctaataa

SEQ ID NO: 55250 - DNA, 15 bp, Homo sapiens
actgggttgctaata

SEQ ID NO: 55251 - DNA, 15 bp, Homo sapiens
tactgggttgctaat

SEQ ID NO: 55252 - DNA, 15 bp, Homo sapiens
ttactgggttgctaa

SEQ ID NO: 55253 - DNA, 15 bp, Homo sapiens
cttactgggttgcta

SEQ ID NO: 55254 - DNA, 15 bp, Homo sapiens
ccttactgggttgct

SEQ ID NO: 55255 - DNA, 15 bp, Homo sapiens
tccttactgggttgc

SEQ ID NO: 55256 - DNA, 15 bp, Homo sapiens
ctccttactgggttg

SEQ ID NO: 55257 - DNA, 15 bp, Homo sapiens
cctccttactgggtt

SEQ ID NO: 55258 - DNA, 15 bp, Homo sapiens
acctccttactgggt

SEQ ID NO: 55259 - DNA, 15 bp, Homo sapiens
tacctccttactggg

SEQ ID NO: 55260 - DNA, 15 bp, Homo sapiens
ctacctccttactgg

SEQ ID NO: 55261 - DNA, 15 bp, Homo sapiens
tctacctccttactg

SEQ ID NO: 55262 - DNA, 15 bp, Homo sapiens
atctacctccttact

SEQ ID NO: 55263 - DNA, 15 bp, Homo sapiens
aatctacctccttac

SEQ ID NO: 55264 - DNA, 15 bp, Homo sapiens
taatctacctcctta

SEQ ID NO: 55265 - DNA, 15 bp, Homo sapiens
gtaatctacctcctt

SEQ ID NO: 55266 - DNA, 15 bp, Homo sapiens
tgtaatctacctcct

SEQ ID NO: 55267 - DNA, 15 bp, Homo sapiens
atgtaatctacctcc

SEQ ID NO: 55268 - DNA, 15 bp, Homo sapiens
aatgtaatctacctc

SEQ ID NO: 55269 - DNA, 15 bp, Homo sapiens
taatgtaatctacct

SEQ ID NO: 55270 - DNA, 15 bp, Homo sapiens
ataatgtaatctacc

SEQ ID NO: 55271 - DNA, 15 bp, Homo sapiens
tataatgtaatctac

SEQ ID NO: 55272 - DNA, 15 bp, Homo sapiens
gtataatgtaatcta

SEQ ID NO: 55273 - DNA, 15 bp, Homo sapiens
agtataatgtaatct

SEQ ID NO: 55274 - DNA, 15 bp, Homo sapiens
gagtataatgtaatc

SEQ ID NO: 55275 - DNA, 15 bp, Homo sapiens
ggagtataatgtaat

SEQ ID NO: 55276 - DNA, 15 bp, Homo sapiens
aggagtataatgtaa

SEQ ID NO: 55277 - DNA, 15 bp, Homo sapiens
gaggagtataatgta

SEQ ID NO: 55278 - DNA, 15 bp, Homo sapiens
tgaggagtataatgt

SEQ ID NO: 55279 - DNA, 15 bp, Homo sapiens
ttgaggagtataatg

SEQ ID NO: 55280 - DNA, 15 bp, Homo sapiens
attgaggagtataat

SEQ ID NO: 55281 - DNA, 15 bp, Homo sapiens
tattgaggagtataa

SEQ ID NO: 55282 - DNA, 15 bp, Homo sapiens
ctattgaggagtata

SEQ ID NO: 55283 - DNA, 15 bp, Homo sapiens
tctattgaggagtat

SEQ ID NO: 55284 - DNA, 15 bp, Homo sapiens
ctctattgaggagta

SEQ ID NO: 55285 - DNA, 15 bp, Homo sapiens
gctctattgaggagt

SEQ ID NO: 55286 - DNA, 15 bp, Homo sapiens
agctctattgaggag

SEQ ID NO: 55287 - DNA, 15 bp, Homo sapiens
tagctctattgagga

SEQ ID NO: 55288 - DNA, 15 bp, Homo sapiens
ttagctctattgagg

SEQ ID NO: 55289 - DNA, 15 bp, Homo sapiens
tttagctctattgag

SEQ ID NO: 55290 - DNA, 15 bp, Homo sapiens
ctttagctctattga

SEQ ID NO: 55291 - DNA, 15 bp, Homo sapiens
actttagctctattg

SEQ ID NO: 55292 - DNA, 15 bp, Homo sapiens
cactttagctctatt

SEQ ID NO: 55293 - DNA, 15 bp, Homo sapiens
tcactttagctctat

SEQ ID NO: 55294 - DNA, 15 bp, Homo sapiens
atcactttagctcta

SEQ ID NO: 55295 - DNA, 15 bp, Homo sapiens
aatcactttagctct

SEQ ID NO: 55296 - DNA, 15 bp, Homo sapiens
caatcactttagctc

SEQ ID NO: 55297 - DNA, 15 bp, Homo sapiens
tcaatcactttagct

SEQ ID NO: 55298 - DNA, 15 bp, Homo sapiens
atcaatcactttagc

SEQ ID NO: 55299 - DNA, 15 bp, Homo sapiens
tatcaatcactttag

SEQ ID NO: 55300 - DNA, 15 bp, Homo sapiens
atatcaatcacttta

SEQ ID NO: 55301 - DNA, 15 bp, Homo sapiens
catatcaatcacttt

SEQ ID NO: 55302 - DNA, 15 bp, Homo sapiens
ccatatcaatcactt

SEQ ID NO: 55303 - DNA, 15 bp, Homo sapiens
accatatcaatcact

SEQ ID NO: 55304 - DNA, 15 bp, Homo sapiens
aaccatatcaatcac

SEQ ID NO: 55305 - DNA, 15 bp, Homo sapiens
aaaccatatcaatca

SEQ ID NO: 55306 - DNA, 15 bp, Homo sapiens
caaaccatatcaatc

SEQ ID NO: 55307 - DNA, 15 bp, Homo sapiens
ccaaaccatatcaat

SEQ ID NO: 55308 - DNA, 15 bp, Homo sapiens
gccaaaccatatcaa

SEQ ID NO: 55309 - DNA, 15 bp, Homo sapiens
agccaaaccatatca

SEQ ID NO: 55310 - DNA, 15 bp, Homo sapiens
aagccaaaccatatc

SEQ ID NO: 55311 - DNA, 15 bp, Homo sapiens
aaagccaaaccatat

SEQ ID NO: 55312 - DNA, 15 bp, Homo sapiens
taaagccaaaccata

SEQ ID NO: 55313 - DNA, 15 bp, Homo sapiens
ataaagccaaaccat

SEQ ID NO: 55314 - DNA, 15 bp, Homo sapiens
cataaagccaaacca

SEQ ID NO: 55315 - DNA, 15 bp, Homo sapiens
acataaagccaaacc

SEQ ID NO: 55316 - DNA, 15 bp, Homo sapiens
gacataaagccaaac

SEQ ID NO: 55317 - DNA, 15 bp, Homo sapiens
ggacataaagccaaa

SEQ ID NO: 55318 - DNA, 15 bp, Homo sapiens
gggacataaagccaa

SEQ ID NO: 55319 - DNA, 15 bp, Homo sapiens
ggggacataaagcca

SEQ ID NO: 55320 - DNA, 15 bp, Homo sapiens
tggggacataaagcc

SEQ ID NO: 55321 - DNA, 15 bp, Homo sapiens
gtggggacataaagc

SEQ ID NO: 55322 - DNA, 15 bp, Homo sapiens
ggtggggacataaag

SEQ ID NO: 55323 - DNA, 15 bp, Homo sapiens
gggtggggacataaa

SEQ ID NO: 55324 - DNA, 15 bp, Homo sapiens
tgggtggggacataa

SEQ ID NO: 55325 - DNA, 15 bp, Homo sapiens
ttgggtggggacata

SEQ ID NO: 55326 - DNA, 15 bp, Homo sapiens
tttgggtggggacat

SEQ ID NO: 55327 - DNA, 15 bp, Homo sapiens
atttgggtggggaca

SEQ ID NO: 55328 - DNA, 15 bp, Homo sapiens
gatttgggtggggac

SEQ ID NO: 55329 - DNA, 15 bp, Homo sapiens
agatttgggtgggga

SEQ ID NO: 55330 - DNA, 15 bp, Homo sapiens
aagatttgggtgggg

SEQ ID NO: 55331 - DNA, 15 bp, Homo sapiens
taagatttgggtggg

SEQ ID NO: 55332 - DNA, 15 bp, Homo sapiens
ataagatttgggtgg

SEQ ID NO: 55333 - DNA, 15 bp, Homo sapiens
gataagatttgggtg

SEQ ID NO: 55334 - DNA, 15 bp, Homo sapiens
agataagatttgggt

SEQ ID NO: 55335 - DNA, 15 bp, Homo sapiens
aagataagatttggg

SEQ ID NO: 55336 - DNA, 15 bp, Homo sapiens
caagataagatttgg

SEQ ID NO: 55337 - DNA, 15 bp, Homo sapiens
tcaagataagatttg

SEQ ID NO: 55338 - DNA, 15 bp, Homo sapiens
ttcaagataagattt

SEQ ID NO: 55339 - DNA, 15 bp, Homo sapiens
gttcaagataagatt

SEQ ID NO: 55340 - DNA, 15 bp, Homo sapiens
agttcaagataagat

SEQ ID NO: 55341 - DNA, 15 bp, Homo sapiens
cagttcaagataaga

SEQ ID NO: 55342 - DNA, 15 bp, Homo sapiens
acagttcaagataag

SEQ ID NO: 55343 - DNA, 15 bp, Homo sapiens
tacagttcaagataa

SEQ ID NO: 55344 - DNA, 15 bp, Homo sapiens
ttacagttcaagata

SEQ ID NO: 55345 - DNA, 15 bp, Homo sapiens
attacagttcaagat

SEQ ID NO: 55346 - DNA, 15 bp, Homo sapiens
gattacagttcaaga

SEQ ID NO: 55347 - DNA, 15 bp, Homo sapiens
ggattacagttcaag

SEQ ID NO: 55348 - DNA, 15 bp, Homo sapiens
gggattacagttcaa

SEQ ID NO: 55349 - DNA, 15 bp, Homo sapiens
ggggattacagttca

SEQ ID NO: 55350 - DNA, 15 bp, Homo sapiens
tggggattacagttc

SEQ ID NO: 55351 - DNA, 15 bp, Homo sapiens
atggggattacagtt

SEQ ID NO: 55352 - DNA, 15 bp, Homo sapiens
catggggattacagt

SEQ ID NO: 55353 - DNA, 15 bp, Homo sapiens
acatggggattacag

SEQ ID NO: 55354 - DNA, 15 bp, Homo sapiens
cacatggggattaca

SEQ ID NO: 55355 - DNA, 15 bp, Homo sapiens
acacatggggattac

SEQ ID NO: 55356 - DNA, 15 bp, Homo sapiens
gacacatggggatta

SEQ ID NO: 55357 - DNA, 15 bp, Homo sapiens
cgacacatggggatt

SEQ ID NO: 55358 - DNA, 15 bp, Homo sapiens
tcgacacatggggat

SEQ ID NO: 55359 - DNA, 15 bp, Homo sapiens
ctcgacacatgggga

SEQ ID NO: 55360 - DNA, 15 bp, Homo sapiens
cctcgacacatgggg

SEQ ID NO: 55361 - DNA, 15 bp, Homo sapiens
ccctcgacacatggg

SEQ ID NO: 55362 - DNA, 15 bp, Homo sapiens
tccctcgacacatgg

SEQ ID NO: 55363 - DNA, 15 bp, Homo sapiens
gtccctcgacacatg

SEQ ID NO: 55364 - DNA, 15 bp, Homo sapiens
tgtccctcgacacat

SEQ ID NO: 55365 - DNA, 15 bp, Homo sapiens
ctgtccctcgacaca

SEQ ID NO: 55366 - DNA, 15 bp, Homo sapiens
tctgtccctcgacac

SEQ ID NO: 55367 - DNA, 15 bp, Homo sapiens
gtctgtccctcgaca

SEQ ID NO: 55368 - DNA, 15 bp, Homo sapiens
ggtctgtccctcgac

SEQ ID NO: 55369 - DNA, 15 bp, Homo sapiens
aggtctgtccctcga

SEQ ID NO: 55370 - DNA, 15 bp, Homo sapiens
caggtctgtccctcg

SEQ ID NO: 55371 - DNA, 15 bp, Homo sapiens
ccaggtctgtccctc

SEQ ID NO: 55372 - DNA, 15 bp, Homo sapiens
accaggtctgtccct

SEQ ID NO: 55373 - DNA, 15 bp, Homo sapiens
caccaggtctgtccc

SEQ ID NO: 55374 - DNA, 15 bp, Homo sapiens
ccaccaggtctgtcc

SEQ ID NO: 55375 - DNA, 15 bp, Homo sapiens
cccaccaggtctgtc

SEQ ID NO: 55376 - DNA, 15 bp, Homo sapiens
tcccaccaggtctgt

SEQ ID NO: 55377 - DNA, 15 bp, Homo sapiens
ttcccaccaggtctg

SEQ ID NO: 55378 - DNA, 15 bp, Homo sapiens
cttcccaccaggtct

SEQ ID NO: 55379 - DNA, 15 bp, Homo sapiens
acttcccaccaggtc

SEQ ID NO: 55380 - DNA, 15 bp, Homo sapiens
gacttcccaccaggt

SEQ ID NO: 55381 - DNA, 15 bp, Homo sapiens
tgacttcccaccagg

SEQ ID NO: 55382 - DNA, 15 bp, Homo sapiens
atgacttcccaccag

SEQ ID NO: 55383 - DNA, 15 bp, Homo sapiens
aatgacttcccacca

SEQ ID NO: 55384 - DNA, 15 bp, Homo sapiens
caatgacttcccacc

SEQ ID NO: 55385 - DNA, 15 bp, Homo sapiens
ccaatgacttcccac

SEQ ID NO: 55386 - DNA, 15 bp, Homo sapiens
tccaatgacttccca

SEQ ID NO: 55387 - DNA, 15 bp, Homo sapiens
atccaatgacttccc

SEQ ID NO: 55388 - DNA, 15 bp, Homo sapiens
gatccaatgacttcc

SEQ ID NO: 55389 - DNA, 15 bp, Homo sapiens
tgatccaatgacttc

SEQ ID NO: 55390 - DNA, 15 bp, Homo sapiens
gtgatccaatgactt

SEQ ID NO: 55391 - DNA, 15 bp, Homo sapiens
tgtgatccaatgact

SEQ ID NO: 55392 - DNA, 15 bp, Homo sapiens
ctgtgatccaatgac

SEQ ID NO: 55393 - DNA, 15 bp, Homo sapiens
cctgtgatccaatga

SEQ ID NO: 55394 - DNA, 15 bp, Homo sapiens
tcctgtgatccaatg

SEQ ID NO: 55395 - DNA, 15 bp, Homo sapiens
ctcctgtgatccaat

SEQ ID NO: 55396 - DNA, 15 bp, Homo sapiens
gctcctgtgatccaa

SEQ ID NO: 55397 - DNA, 15 bp, Homo sapiens
tgctcctgtgatcca

SEQ ID NO: 55398 - DNA, 15 bp, Homo sapiens
atgctcctgtgatcc

SEQ ID NO: 55399 - DNA, 15 bp, Homo sapiens
aatgctcctgtgatc

SEQ ID NO: 55400 - DNA, 15 bp, Homo sapiens
aaatgctcctgtgat

SEQ ID NO: 55401 - DNA, 15 bp, Homo sapiens
aaaatgctcctgtga

SEQ ID NO: 55402 - DNA, 15 bp, Homo sapiens
gaaaatgctcctgtg

SEQ ID NO: 55403 - DNA, 15 bp, Homo sapiens
ggaaaatgctcctgt

SEQ ID NO: 55404 - DNA, 15 bp, Homo sapiens
gggaaaatgctcctg

SEQ ID NO: 55405 - DNA, 15 bp, Homo sapiens
ggggaaaatgctcct

SEQ ID NO: 55406 - DNA, 15 bp, Homo sapiens
gggggaaaatgctcc

SEQ ID NO: 55407 - DNA, 15 bp, Homo sapiens
tgggggaaaatgctc

SEQ ID NO: 55408 - DNA, 15 bp, Homo sapiens
atgggggaaaatgct

SEQ ID NO: 55409 - DNA, 15 bp, Homo sapiens
catgggggaaaatgc

SEQ ID NO: 55410 - DNA, 15 bp, Homo sapiens
gcatgggggaaaatg

SEQ ID NO: 55411 - DNA, 15 bp, Homo sapiens
agcatgggggaaaat

SEQ ID NO: 55412 - DNA, 15 bp, Homo sapiens
cagcatgggggaaaa

SEQ ID NO: 55413 - DNA, 15 bp, Homo sapiens
acagcatgggggaaa

SEQ ID NO: 55414 - DNA, 15 bp, Homo sapiens
aacagcatgggggaa

SEQ ID NO: 55415 - DNA, 15 bp, Homo sapiens
gaacagcatggggga

SEQ ID NO: 55416 - DNA, 15 bp, Homo sapiens
agaacagcatggggg

SEQ ID NO: 55417 - DNA, 15 bp, Homo sapiens
aagaacagcatgggg

SEQ ID NO: 55418 - DNA, 15 bp, Homo sapiens
caagaacagcatggg

SEQ ID NO: 55419 - DNA, 15 bp, Homo sapiens
acaagaacagcatgg

SEQ ID NO: 55420 - DNA, 15 bp, Homo sapiens
cacaagaacagcatg

SEQ ID NO: 55421 - DNA, 15 bp, Homo sapiens
tcacaagaacagcat

SEQ ID NO: 55422 - DNA, 15 bp, Homo sapiens
atcacaagaacagca

SEQ ID NO: 55423 - DNA, 15 bp, Homo sapiens
tatcacaagaacagc

SEQ ID NO: 55424 - DNA, 15 bp, Homo sapiens
ctatcacaagaacag

SEQ ID NO: 55425 - DNA, 15 bp, Homo sapiens
actatcacaagaaca

SEQ ID NO: 55426 - DNA, 15 bp, Homo sapiens
cactatcacaagaac

SEQ ID NO: 55427 - DNA, 15 bp, Homo sapiens
tcactatcacaagaa

SEQ ID NO: 55428 - DNA, 15 bp, Homo sapiens
ctcactatcacaaga

SEQ ID NO: 55429 - DNA, 15 bp, Homo sapiens
cctcactatcacaag

SEQ ID NO: 55430 - DNA, 15 bp, Homo sapiens
ccctcactatcacaa

SEQ ID NO: 55431 - DNA, 15 bp, Homo sapiens
tccctcactatcaca

SEQ ID NO: 55432 - DNA, 15 bp, Homo sapiens
ctccctcactatcac

SEQ ID NO: 55433 - DNA, 15 bp, Homo sapiens
actccctcactatca

SEQ ID NO: 55434 - DNA, 15 bp, Homo sapiens
aactccctcactatc

SEQ ID NO: 55435 - DNA, 15 bp, Homo sapiens
gaactccctcactat

SEQ ID NO: 55436 - DNA, 15 bp, Homo sapiens
agaactccctcacta

SEQ ID NO: 55437 - DNA, 15 bp, Homo sapiens
gagaactccctcact

SEQ ID NO: 55438 - DNA, 15 bp, Homo sapiens
tgagaactccctcac

SEQ ID NO: 55439 - DNA, 15 bp, Homo sapiens
atgagaactccctca

SEQ ID NO: 55440 - DNA, 15 bp, Homo sapiens
catgagaactccctc

SEQ ID NO: 55441 - DNA, 15 bp, Homo sapiens
tcatgagaactccct

SEQ ID NO: 55442 - DNA, 15 bp, Homo sapiens
ctcatgagaactccc

SEQ ID NO: 55443 - DNA, 15 bp, Homo sapiens
tctcatgagaactcc

SEQ ID NO: 55444 - DNA, 15 bp, Homo sapiens
atctcatgagaactc

SEQ ID NO: 55445 - DNA, 15 bp, Homo sapiens
gatctcatgagaact

SEQ ID NO: 55446 - DNA, 15 bp, Homo sapiens
agatctcatgagaac

SEQ ID NO: 55447 - DNA, 15 bp, Homo sapiens
cagatctcatgagaa

SEQ ID NO: 55448 - DNA, 15 bp, Homo sapiens
tcagatctcatgaga

SEQ ID NO: 55449 - DNA, 15 bp, Homo sapiens
gtcagatctcatgag

SEQ ID NO: 55450 - DNA, 15 bp, Homo sapiens
cgtcagatctcatga

SEQ ID NO: 55451 - DNA, 15 bp, Homo sapiens
ccgtcagatctcatg

SEQ ID NO: 55452 - DNA, 15 bp, Homo sapiens
accgtcagatctcat

SEQ ID NO: 55453 - DNA, 15 bp, Homo sapiens
aaccgtcagatctca

SEQ ID NO: 55454 - DNA, 15 bp, Homo sapiens
aaaccgtcagatctc

SEQ ID NO: 55455 - DNA, 15 bp, Homo sapiens
aaaaccgtcagatct

SEQ ID NO: 55456 - DNA, 15 bp, Homo sapiens
taaaaccgtcagatc

SEQ ID NO: 55457 - DNA, 15 bp, Homo sapiens
ttaaaaccgtcagat

SEQ ID NO: 55458 - DNA, 15 bp, Homo sapiens
tttaaaaccgtcaga

SEQ ID NO: 55459 - DNA, 15 bp, Homo sapiens
ctttaaaaccgtcag

SEQ ID NO: 55460 - DNA, 15 bp, Homo sapiens
actttaaaaccgtca

SEQ ID NO: 55461 - DNA, 15 bp, Homo sapiens
cactttaaaaccgtc

SEQ ID NO: 55462 - DNA, 15 bp, Homo sapiens
ccactttaaaaccgt

SEQ ID NO: 55463 - DNA, 15 bp, Homo sapiens
gccactttaaaaccg

SEQ ID NO: 55464 - DNA, 15 bp, Homo sapiens
tgccactttaaaacc

SEQ ID NO: 55465 - DNA, 15 bp, Homo sapiens
ctgccactttaaaac

SEQ ID NO: 55466 - DNA, 15 bp, Homo sapiens
actgccactttaaaa

SEQ ID NO: 55467 - DNA, 15 bp, Homo sapiens
aactgccactttaaa

SEQ ID NO: 55468 - DNA, 15 bp, Homo sapiens
aaactgccactttaa

SEQ ID NO: 55469 - DNA, 15 bp, Homo sapiens
gaaactgccacttta

SEQ ID NO: 55470 - DNA, 15 bp, Homo sapiens
ggaaactgccacttt

SEQ ID NO: 55471 - DNA, 15 bp, Homo sapiens
gggaaactgccactt

SEQ ID NO: 55472 - DNA, 15 bp, Homo sapiens
ggggaaactgccact

SEQ ID NO: 55473 - DNA, 15 bp, Homo sapiens
aggggaaactgccac

SEQ ID NO: 55474 - DNA, 15 bp, Homo sapiens
taggggaaactgcca

SEQ ID NO: 55475 - DNA, 15 bp, Homo sapiens
ataggggaaactgcc

SEQ ID NO: 55476 - DNA, 15 bp, Homo sapiens
cataggggaaactgc

SEQ ID NO: 55477 - DNA, 15 bp, Homo sapiens
gcataggggaaactg

SEQ ID NO: 55478 - DNA, 15 bp, Homo sapiens
cgcataggggaaact

SEQ ID NO: 55479 - DNA, 15 bp, Homo sapiens
gcgcataggggaaac

SEQ ID NO: 55480 - DNA, 15 bp, Homo sapiens
agcgcataggggaaa

SEQ ID NO: 55481 - DNA, 15 bp, Homo sapiens
gagcgcataggggaa

SEQ ID NO: 55482 - DNA, 15 bp, Homo sapiens
agagcgcatagggga

SEQ ID NO: 55483 - DNA, 15 bp, Homo sapiens
gagagcgcatagggg

SEQ ID NO: 55484 - DNA, 15 bp, Homo sapiens
agagagcgcataggg

SEQ ID NO: 55485 - DNA, 15 bp, Homo sapiens
gagagagcgcatagg

SEQ ID NO: 55486 - DNA, 15 bp, Homo sapiens
ggagagagcgcatag

SEQ ID NO: 55487 - DNA, 15 bp, Homo sapiens
aggagagagcgcata

SEQ ID NO: 55488 - DNA, 15 bp, Homo sapiens
caggagagagcgcat

SEQ ID NO: 55489 - DNA, 15 bp, Homo sapiens
gcaggagagagcgca

SEQ ID NO: 55490 - DNA, 15 bp, Homo sapiens
ggcaggagagagcgc

SEQ ID NO: 55491 - DNA, 15 bp, Homo sapiens
tggcaggagagagcg

SEQ ID NO: 55492 - DNA, 15 bp, Homo sapiens
gtggcaggagagagc

SEQ ID NO: 55493 - DNA, 15 bp, Homo sapiens
ggtggcaggagagag

SEQ ID NO: 55494 - DNA, 15 bp, Homo sapiens
tggtggcaggagaga

SEQ ID NO: 55495 - DNA, 15 bp, Homo sapiens
atggtggcaggagag

SEQ ID NO: 55496 - DNA, 15 bp, Homo sapiens
catggtggcaggaga

SEQ ID NO: 55497 - DNA, 15 bp, Homo sapiens
acatggtggcaggag

SEQ ID NO: 55498 - DNA, 15 bp, Homo sapiens
tacatggtggcagga

SEQ ID NO: 55499 - DNA, 15 bp, Homo sapiens
ttacatggtggcagg

SEQ ID NO: 55500 - DNA, 15 bp, Homo sapiens
cttacatggtggcag

SEQ ID NO: 55501 - DNA, 15 bp, Homo sapiens
tcttacatggtggca

SEQ ID NO: 55502 - DNA, 15 bp, Homo sapiens
gtcttacatggtggc

SEQ ID NO: 55503 - DNA, 15 bp, Homo sapiens
tgtcttacatggtgg

SEQ ID NO: 55504 - DNA, 15 bp, Homo sapiens
atgtcttacatggtg

SEQ ID NO: 55505 - DNA, 15 bp, Homo sapiens
catgtcttacatggt

SEQ ID NO: 55506 - DNA, 15 bp, Homo sapiens
gcatgtcttacatgg

SEQ ID NO: 55507 - DNA, 15 bp, Homo sapiens
agcatgtcttacatg

SEQ ID NO: 55508 - DNA, 15 bp, Homo sapiens
aagcatgtcttacat

SEQ ID NO: 55509 - DNA, 15 bp, Homo sapiens
aaagcatgtcttaca

SEQ ID NO: 55510 - DNA, 15 bp, Homo sapiens
caaagcatgtcttac

SEQ ID NO: 55511 - DNA, 15 bp, Homo sapiens
gcaaagcatgtctta

SEQ ID NO: 55512 - DNA, 15 bp, Homo sapiens
agcaaagcatgtctt

SEQ ID NO: 55513 - DNA, 15 bp, Homo sapiens
aagcaaagcatgtct

SEQ ID NO: 55514 - DNA, 15 bp, Homo sapiens
gaagcaaagcatgtc

SEQ ID NO: 55515 - DNA, 15 bp, Homo sapiens
ggaagcaaagcatgt

SEQ ID NO: 55516 - DNA, 15 bp, Homo sapiens
gggaagcaaagcatg

SEQ ID NO: 55517 - DNA, 15 bp, Homo sapiens
ggggaagcaaagcat

SEQ ID NO: 55518 - DNA, 15 bp, Homo sapiens
aggggaagcaaagca

SEQ ID NO: 55519 - DNA, 15 bp, Homo sapiens
aaggggaagcaaagc

SEQ ID NO: 55520 - DNA, 15 bp, Homo sapiens
aaaggggaagcaaag

SEQ ID NO: 55521 - DNA, 15 bp, Homo sapiens
caaaggggaagcaaa

SEQ ID NO: 55522 - DNA, 15 bp, Homo sapiens
gcaaaggggaagcaa

SEQ ID NO: 55523 - DNA, 15 bp, Homo sapiens
ggcaaaggggaagca

SEQ ID NO: 55524 - DNA, 15 bp, Homo sapiens
aggcaaaggggaagc

SEQ ID NO: 55525 - DNA, 15 bp, Homo sapiens
aaggcaaaggggaag

SEQ ID NO: 55526 - DNA, 15 bp, Homo sapiens
gaaggcaaaggggaa

SEQ ID NO: 55527 - DNA, 15 bp, Homo sapiens
tgaaggcaaagggga

SEQ ID NO: 55528 - DNA, 15 bp, Homo sapiens
ttgaaggcaaagggg

SEQ ID NO: 55529 - DNA, 15 bp, Homo sapiens
gttgaaggcaaaggg

SEQ ID NO: 55530 - DNA, 15 bp, Homo sapiens
ggttgaaggcaaagg

SEQ ID NO: 55531 - DNA, 15 bp, Homo sapiens
tggttgaaggcaaag

SEQ ID NO: 55532 - DNA, 15 bp, Homo sapiens
atggttgaaggcaaa

SEQ ID NO: 55533 - DNA, 15 bp, Homo sapiens
catggttgaaggcaa

SEQ ID NO: 55534 - DNA, 15 bp, Homo sapiens
ccatggttgaaggca

SEQ ID NO: 55535 - DNA, 15 bp, Homo sapiens
accatggttgaaggc

SEQ ID NO: 55536 - DNA, 15 bp, Homo sapiens
aaccatggttgaagg

SEQ ID NO: 55537 - DNA, 15 bp, Homo sapiens
caaccatggttgaag

SEQ ID NO: 55538 - DNA, 15 bp, Homo sapiens
acaaccatggttgaa

SEQ ID NO: 55539 - DNA, 15 bp, Homo sapiens
tacaaccatggttga

SEQ ID NO: 55540 - DNA, 15 bp, Homo sapiens
ttacaaccatggttg

SEQ ID NO: 55541 - DNA, 15 bp, Homo sapiens
cttacaaccatggtt

SEQ ID NO: 55542 - DNA, 15 bp, Homo sapiens
acttacaaccatggt

SEQ ID NO: 55543 - DNA, 15 bp, Homo sapiens
aacttacaaccatgg

SEQ ID NO: 55544 - DNA, 15 bp, Homo sapiens
aaacttacaaccatg

SEQ ID NO: 55545 - DNA, 15 bp, Homo sapiens
gaaacttacaaccat

SEQ ID NO: 55546 - DNA, 15 bp, Homo sapiens
ggaaacttacaacca

SEQ ID NO: 55547 - DNA, 15 bp, Homo sapiens
aggaaacttacaacc

SEQ ID NO: 55548 - DNA, 15 bp, Homo sapiens
caggaaacttacaac

SEQ ID NO: 55549 - DNA, 15 bp, Homo sapiens
tcaggaaacttacaa

SEQ ID NO: 55550 - DNA, 15 bp, Homo sapiens
ctcaggaaacttaca

SEQ ID NO: 55551 - DNA, 15 bp, Homo sapiens
cctcaggaaacttac

SEQ ID NO: 55552 - DNA, 15 bp, Homo sapiens
gcctcaggaaactta

SEQ ID NO: 55553 - DNA, 15 bp, Homo sapiens
ggcctcaggaaactt

SEQ ID NO: 55554 - DNA, 15 bp, Homo sapiens
aggcctcaggaaact

SEQ ID NO: 55555 - DNA, 15 bp, Homo sapiens
gaggcctcaggaaac

SEQ ID NO: 55556 - DNA, 15 bp, Homo sapiens
ggaggcctcaggaaa

SEQ ID NO: 55557 - DNA, 15 bp, Homo sapiens
gggaggcctcaggaa

SEQ ID NO: 55558 - DNA, 15 bp, Homo sapiens
ggggaggcctcagga

SEQ ID NO: 55559 - DNA, 15 bp, Homo sapiens
tggggaggcctcagg

SEQ ID NO: 55560 - DNA, 15 bp, Homo sapiens
ctggggaggcctcag

SEQ ID NO: 55561 - DNA, 15 bp, Homo sapiens
gctggggaggcctca

SEQ ID NO: 55562 - DNA, 15 bp, Homo sapiens
ggctggggaggcctc

SEQ ID NO: 55563 - DNA, 15 bp, Homo sapiens
tggctggggaggcct

SEQ ID NO: 55564 - DNA, 15 bp, Homo sapiens
atggctggggaggcc

SEQ ID NO: 55565 - DNA, 15 bp, Homo sapiens
aatggctggggaggc

SEQ ID NO: 55566 - DNA, 15 bp, Homo sapiens
aaatggctggggagg

SEQ ID NO: 55567 - DNA, 15 bp, Homo sapiens
caaatggctggggag

SEQ ID NO: 55568 - DNA, 15 bp, Homo sapiens
ccaaatggctgggga

SEQ ID NO: 55569 - DNA, 15 bp, Homo sapiens
tccaaatggctgggg

SEQ ID NO: 55570 - DNA, 15 bp, Homo sapiens
ttccaaatggctggg

SEQ ID NO: 55571 - DNA, 15 bp, Homo sapiens
gttccaaatggctgg

SEQ ID NO: 55572 - DNA, 15 bp, Homo sapiens
agttccaaatggctg

SEQ ID NO: 55573 - DNA, 15 bp, Homo sapiens
tagttccaaatggct

SEQ ID NO: 55574 - DNA, 15 bp, Homo sapiens
atagttccaaatggc

SEQ ID NO: 55575 - DNA, 15 bp, Homo sapiens
catagttccaaatgg

SEQ ID NO: 55576 - DNA, 15 bp, Homo sapiens
tcatagttccaaatg

SEQ ID NO: 55577 - DNA, 15 bp, Homo sapiens
ttcatagttccaaat

SEQ ID NO: 55578 - DNA, 15 bp, Homo sapiens
attcatagttccaaa

SEQ ID NO: 55579 - DNA, 15 bp, Homo sapiens
gattcatagttccaa

SEQ ID NO: 55580 - DNA, 15 bp, Homo sapiens
tgattcatagttcca

SEQ ID NO: 55581 - DNA, 15 bp, Homo sapiens
ttgattcatagttcc

SEQ ID NO: 55582 - DNA, 15 bp, Homo sapiens
attgattcatagttc

SEQ ID NO: 55583 - DNA, 15 bp, Homo sapiens
aattgattcatagtt

SEQ ID NO: 55584 - DNA, 15 bp, Homo sapiens
taattgattcatagt

SEQ ID NO: 55585 - DNA, 15 bp, Homo sapiens
ttaattgattcatag

SEQ ID NO: 55586 - DNA, 15 bp, Homo sapiens
tttaattgattcata

SEQ ID NO: 55587 - DNA, 15 bp, Homo sapiens
ttttaattgattcat

SEQ ID NO: 55588 - DNA, 15 bp, Homo sapiens
gttttaattgattca

SEQ ID NO: 55589 - DNA, 15 bp, Homo sapiens
agttttaattgattc

SEQ ID NO: 55590 - DNA, 15 bp, Homo sapiens
gagttttaattgatt

SEQ ID NO: 55591 - DNA, 15 bp, Homo sapiens
agagttttaattgat

SEQ ID NO: 55592 - DNA, 15 bp, Homo sapiens
aagagttttaattga

SEQ ID NO: 55593 - DNA, 15 bp, Homo sapiens
aaagagttttaattg

SEQ ID NO: 55594 - DNA, 15 bp, Homo sapiens
aaaagagttttaatt

SEQ ID NO: 55595 - DNA, 15 bp, Homo sapiens
gaaaagagttttaat

SEQ ID NO: 55596 - DNA, 15 bp, Homo sapiens
agaaaagagttttaa

SEQ ID NO: 55597 - DNA, 15 bp, Homo sapiens
aagaaaagagtttta

SEQ ID NO: 55598 - DNA, 15 bp, Homo sapiens
aaagaaaagagtttt

SEQ ID NO: 55599 - DNA, 15 bp, Homo sapiens
gaaagaaaagagttt

SEQ ID NO: 55600 - DNA, 15 bp, Homo sapiens
agaaagaaaagagtt

SEQ ID NO: 55601 - DNA, 15 bp, Homo sapiens
tagaaagaaaagagt

SEQ ID NO: 55602 - DNA, 15 bp, Homo sapiens
ttagaaagaaaagag

SEQ ID NO: 55603 - DNA, 15 bp, Homo sapiens
tttagaaagaaaaga

SEQ ID NO: 55604 - DNA, 15 bp, Homo sapiens
atttagaaagaaaag

SEQ ID NO: 55605 - DNA, 15 bp, Homo sapiens
aatttagaaagaaaa

SEQ ID NO: 55606 - DNA, 15 bp, Homo sapiens
taatttagaaagaaa

SEQ ID NO: 55607 - DNA, 15 bp, Homo sapiens
gtaatttagaaagaa

SEQ ID NO: 55608 - DNA, 15 bp, Homo sapiens
ggtaatttagaaaga

SEQ ID NO: 55609 - DNA, 15 bp, Homo sapiens
gggtaatttagaaag

SEQ ID NO: 55610 - DNA, 15 bp, Homo sapiens
tgggtaatttagaaa

SEQ ID NO: 55611 - DNA, 15 bp, Homo sapiens
ctgggtaatttagaa

SEQ ID NO: 55612 - DNA, 15 bp, Homo sapiens
actgggtaatttaga

SEQ ID NO: 55613 - DNA, 15 bp, Homo sapiens
gactgggtaatttag

SEQ ID NO: 55614 - DNA, 15 bp, Homo sapiens
agactgggtaattta

SEQ ID NO: 55615 - DNA, 15 bp, Homo sapiens
gagactgggtaattt

SEQ ID NO: 55616 - DNA, 15 bp, Homo sapiens
tgagactgggtaatt

SEQ ID NO: 55617 - DNA, 15 bp, Homo sapiens
ctgagactgggtaat

SEQ ID NO: 55618 - DNA, 15 bp, Homo sapiens
gaatacctgagactg

SEQ ID NO: 55619 - DNA, 15 bp, Homo sapiens
agaatacctgagact

SEQ ID NO: 55620 - DNA, 15 bp, Homo sapiens
aagaatacctgagac

SEQ ID NO: 55621 - DNA, 15 bp, Homo sapiens
aaagaatacctgaga

SEQ ID NO: 55622 - DNA, 15 bp, Homo sapiens
taaagaatacctgag

SEQ ID NO: 55623 - DNA, 15 bp, Homo sapiens
ataaagaatacctga

SEQ ID NO: 55624 - DNA, 15 bp, Homo sapiens
tataaagaatacctg

SEQ ID NO: 55625 - DNA, 15 bp, Homo sapiens
ctataaagaatacct

SEQ ID NO: 55626 - DNA, 15 bp, Homo sapiens
gctataaagaatacc

SEQ ID NO: 55627 - DNA, 15 bp, Homo sapiens
cgctataaagaatac

SEQ ID NO: 55628 - DNA, 15 bp, Homo sapiens
ccgctataaagaata

SEQ ID NO: 55629 - DNA, 15 bp, Homo sapiens
accgctataaagaat

SEQ ID NO: 55630 - DNA, 15 bp, Homo sapiens
caccgctataaagaa

SEQ ID NO: 55631 - DNA, 15 bp, Homo sapiens
acaccgctataaaga

SEQ ID NO: 55632 - DNA, 15 bp, Homo sapiens
cacaccgctataaag

SEQ ID NO: 55633 - DNA, 15 bp, Homo sapiens
tcacaccgctataaa

SEQ ID NO: 55634 - DNA, 15 bp, Homo sapiens
ttcacaccgctataa

SEQ ID NO: 55635 - DNA, 15 bp, Homo sapiens
tttcacaccgctata

SEQ ID NO: 55636 - DNA, 15 bp, Homo sapiens
ttttcacaccgctat

SEQ ID NO: 55637 - DNA, 15 bp, Homo sapiens
attttcacaccgcta

SEQ ID NO: 55638 - DNA, 15 bp, Homo sapiens
cattttcacaccgct

SEQ ID NO: 55639 - DNA, 15 bp, Homo sapiens
ccattttcacaccgc

SEQ ID NO: 55640 - DNA, 15 bp, Homo sapiens
tccattttcacaccg

SEQ ID NO: 55641 - DNA, 15 bp, Homo sapiens
gtccattttcacacc

SEQ ID NO: 55642 - DNA, 15 bp, Homo sapiens
agtccattttcacac

SEQ ID NO: 55643 - DNA, 15 bp, Homo sapiens
tagtccattttcaca

SEQ ID NO: 55644 - DNA, 15 bp, Homo sapiens
ttagtccattttcac

SEQ ID NO: 55645 - DNA, 15 bp, Homo sapiens
attagtccattttca

SEQ ID NO: 55646 - DNA, 15 bp, Homo sapiens
tattagtccattttc

SEQ ID NO: 55647 - DNA, 15 bp, Homo sapiens
gtattagtccatttt

SEQ ID NO: 55648 - DNA, 15 bp, Homo sapiens
tgtattagtccattt

SEQ ID NO: 55649 - DNA, 15 bp, Homo sapiens
ctgtattagtccatt

SEQ ID NO: 55650 - DNA, 15 bp, Homo sapiens
actgtattagtccat

SEQ ID NO: 55651 - DNA, 15 bp, Homo sapiens
cactgtattagtcca

SEQ ID NO: 55652 - DNA, 15 bp, Homo sapiens
tcactgtattagtcc

SEQ ID NO: 55653 - DNA, 15 bp, Homo sapiens
atcactgtattagtc

SEQ ID NO: 55654 - DNA, 15 bp, Homo sapiens
catcactgtattagt

SEQ ID NO: 55655 - DNA, 15 bp, Homo sapiens
tcatcactgtattag

SEQ ID NO: 55656 - DNA, 15 bp, Homo sapiens
ttcatcactgtatta

SEQ ID NO: 55657 - DNA, 15 bp, Homo sapiens
attcatcactgtatt

SEQ ID NO: 55658 - DNA, 15 bp, Homo sapiens
aattcatcactgtat

SEQ ID NO: 55659 - DNA, 15 bp, Homo sapiens
aaattcatcactgta

SEQ ID NO: 55660 - DNA, 15 bp, Homo sapiens
gaaattcatcactgt

SEQ ID NO: 55661 - DNA, 15 bp, Homo sapiens
ggaaattcatcactg

SEQ ID NO: 55662 - DNA, 15 bp, Homo sapiens
tggaaattcatcact

SEQ ID NO: 55663 - DNA, 15 bp, Homo sapiens
atggaaattcatcac

SEQ ID NO: 55664 - DNA, 15 bp, Homo sapiens
gatggaaattcatca

SEQ ID NO: 55665 - DNA, 15 bp, Homo sapiens
tgatggaaattcatc

SEQ ID NO: 55666 - DNA, 15 bp, Homo sapiens
gtgatggaaattcat

SEQ ID NO: 55667 - DNA, 15 bp, Homo sapiens
agtgatggaaattca

SEQ ID NO: 55668 - DNA, 15 bp, Homo sapiens
tagtgatggaaattc

SEQ ID NO: 55669 - DNA, 15 bp, Homo sapiens
ctagtgatggaaatt

SEQ ID NO: 55670 - DNA, 15 bp, Homo sapiens
actagtgatggaaat

SEQ ID NO: 55671 - DNA, 15 bp, Homo sapiens
aactagtgatggaaa

SEQ ID NO: 55672 - DNA, 15 bp, Homo sapiens
taactagtgatggaa

SEQ ID NO: 55673 - DNA, 15 bp, Homo sapiens
ataactagtgatgga

SEQ ID NO: 55674 - DNA, 15 bp, Homo sapiens
cataactagtgatgg

SEQ ID NO: 55675 - DNA, 15 bp, Homo sapiens
ccataactagtgatg

SEQ ID NO: 55676 - DNA, 15 bp, Homo sapiens
tccataactagtgat

SEQ ID NO: 55677 - DNA, 15 bp, Homo sapiens
gtccataactagtga

SEQ ID NO: 55678 - DNA, 15 bp, Homo sapiens
tgtccataactagtg

SEQ ID NO: 55679 - DNA, 15 bp, Homo sapiens
ttgtccataactagt

SEQ ID NO: 55680 - DNA, 15 bp, Homo sapiens
cttgtccataactag

SEQ ID NO: 55681 - DNA, 15 bp, Homo sapiens
ccttgtccataacta

SEQ ID NO: 55682 - DNA, 15 bp, Homo sapiens
cccttgtccataact

SEQ ID NO: 55683 - DNA, 15 bp, Homo sapiens
tcccttgtccataac

SEQ ID NO: 55684 - DNA, 15 bp, Homo sapiens
ttcccttgtccataa

SEQ ID NO: 55685 - DNA, 15 bp, Homo sapiens
cttcccttgtccata

SEQ ID NO: 55686 - DNA, 15 bp, Homo sapiens
tcttcccttgtccat

SEQ ID NO: 55687 - DNA, 15 bp, Homo sapiens
ttcttcccttgtcca

SEQ ID NO: 55688 - DNA, 15 bp, Homo sapiens
cttcttcccttgtcc

SEQ ID NO: 55689 - DNA, 15 bp, Homo sapiens
tcttcttcccttgtc

SEQ ID NO: 55690 - DNA, 15 bp, Homo sapiens
atcttcttcccttgt

SEQ ID NO: 55691 - DNA, 15 bp, Homo sapiens
catcttcttcccttg

SEQ ID NO: 55692 - DNA, 15 bp, Homo sapiens
tcatcttcttccctt

SEQ ID NO: 55693 - DNA, 15 bp, Homo sapiens
atcatcttcttccct

SEQ ID NO: 55694 - DNA, 15 bp, Homo sapiens
catcatcttcttccc

SEQ ID NO: 55695 - DNA, 15 bp, Homo sapiens
gcatcatcttcttcc

SEQ ID NO: 55696 - DNA, 15 bp, Homo sapiens
agcatcatcttcttc

SEQ ID NO: 55697 - DNA, 15 bp, Homo sapiens
cagcatcatcttctt

SEQ ID NO: 55698 - DNA, 15 bp, Homo sapiens
ccagcatcatcttct

SEQ ID NO: 55699 - DNA, 15 bp, Homo sapiens
tccagcatcatcttc

SEQ ID NO: 55700 - DNA, 15 bp, Homo sapiens
ctccagcatcatctt

SEQ ID NO: 55701 - DNA, 15 bp, Homo sapiens
actccagcatcatct

SEQ ID NO: 55702 - DNA, 15 bp, Homo sapiens
cactccagcatcatc

SEQ ID NO: 55703 - DNA, 15 bp, Homo sapiens
acactccagcatcat

SEQ ID NO: 55704 - DNA, 15 bp, Homo sapiens
aacactccagcatca

SEQ ID NO: 55705 - DNA, 15 bp, Homo sapiens
gaacactccagcatc

SEQ ID NO: 55706 - DNA, 15 bp, Homo sapiens
agaacactccagcat

SEQ ID NO: 55707 - DNA, 15 bp, Homo sapiens
cagaacactccagca

SEQ ID NO: 55708 - DNA, 15 bp, Homo sapiens
ccagaacactccagc

SEQ ID NO: 55709 - DNA, 15 bp, Homo sapiens
accagaacactccag

SEQ ID NO: 55710 - DNA, 15 bp, Homo sapiens
taccagaacactcca

SEQ ID NO: 55711 - DNA, 15 bp, Homo sapiens
ctaccagaacactcc

SEQ ID NO: 55712 - DNA, 15 bp, Homo sapiens
gctaccagaacactc

SEQ ID NO: 55713 - DNA, 15 bp, Homo sapiens
tgctaccagaacact

SEQ ID NO: 55714 - DNA, 15 bp, Homo sapiens
ctgctaccagaacac

SEQ ID NO: 55715 - DNA, 15 bp, Homo sapiens
cctgctaccagaaca

SEQ ID NO: 55716 - DNA, 15 bp, Homo sapiens
tcctgctaccagaac

SEQ ID NO: 55717 - DNA, 15 bp, Homo sapiens
ttcctgctaccagaa

SEQ ID NO: 55718 - DNA, 15 bp, Homo sapiens
cttcctgctaccaga

SEQ ID NO: 55719 - DNA, 15 bp, Homo sapiens
tcttcctgctaccag

SEQ ID NO: 55720 - DNA, 15 bp, Homo sapiens
ctcttcctgctacca

SEQ ID NO: 55721 - DNA, 15 bp, Homo sapiens
cctcttcctgctacc

SEQ ID NO: 55722 - DNA, 15 bp, Homo sapiens
gcctcttcctgctac

SEQ ID NO: 55723 - DNA, 15 bp, Homo sapiens
ggcctcttcctgcta

SEQ ID NO: 55724 - DNA, 15 bp, Homo sapiens
gggcctcttcctgct

SEQ ID NO: 55725 - DNA, 15 bp, Homo sapiens
agggcctcttcctgc

SEQ ID NO: 55726 - DNA, 15 bp, Homo sapiens
gagggcctcttcctg

SEQ ID NO: 55727 - DNA, 15 bp, Homo sapiens
tgagggcctcttcct

SEQ ID NO: 55728 - DNA, 15 bp, Homo sapiens
gtgagggcctcttcc

SEQ ID NO: 55729 - DNA, 15 bp, Homo sapiens
agtgagggcctcttc

SEQ ID NO: 55730 - DNA, 15 bp, Homo sapiens
aagtgagggcctctt

SEQ ID NO: 55731 - DNA, 15 bp, Homo sapiens
aaagtgagggcctct

SEQ ID NO: 55732 - DNA, 15 bp, Homo sapiens
aaaagtgagggcctc

SEQ ID NO: 55733 - DNA, 15 bp, Homo sapiens
gaaaagtgagggcct

SEQ ID NO: 55734 - DNA, 15 bp, Homo sapiens
agaaaagtgagggcc

SEQ ID NO: 55735 - DNA, 15 bp, Homo sapiens
gagaaaagtgagggc

SEQ ID NO: 55736 - DNA, 15 bp, Homo sapiens
agagaaaagtgaggg

SEQ ID NO: 55737 - DNA, 15 bp, Homo sapiens
cagagaaaagtgagg

SEQ ID NO: 55738 - DNA, 15 bp, Homo sapiens
tcagagaaaagtgag

SEQ ID NO: 55739 - DNA, 15 bp, Homo sapiens
atcagagaaaagtga

SEQ ID NO: 55740 - DNA, 15 bp, Homo sapiens
aatcagagaaaagtg

SEQ ID NO: 55741 - DNA, 15 bp, Homo sapiens
taatcagagaaaagt

SEQ ID NO: 55742 - DNA, 15 bp, Homo sapiens
ttaatcagagaaaag

SEQ ID NO: 55743 - DNA, 15 bp, Homo sapiens
gttaatcagagaaaa

SEQ ID NO: 55744 - DNA, 15 bp, Homo sapiens
ggttaatcagagaaa

SEQ ID NO: 55745 - DNA, 15 bp, Homo sapiens
tggttaatcagagaa

SEQ ID NO: 55746 - DNA, 15 bp, Homo sapiens
ctggttaatcagaga

SEQ ID NO: 55747 - DNA, 15 bp, Homo sapiens
tctggttaatcagag

SEQ ID NO: 55748 - DNA, 15 bp, Homo sapiens
ctctggttaatcaga

SEQ ID NO: 55749 - DNA, 15 bp, Homo sapiens
actctggttaatcag

SEQ ID NO: 55750 - DNA, 15 bp, Homo sapiens
cactctggttaatca

SEQ ID NO: 55751 - DNA, 15 bp, Homo sapiens
ccactctggttaatc

SEQ ID NO: 55752 - DNA, 15 bp, Homo sapiens
accactctggttaat

SEQ ID NO: 55753 - DNA, 15 bp, Homo sapiens
aaccactctggttaa

SEQ ID NO: 55754 - DNA, 15 bp, Homo sapiens
taaccactctggtta

SEQ ID NO: 55755 - DNA, 15 bp, Homo sapiens
ttaaccactctggtt

SEQ ID NO: 55756 - DNA, 15 bp, Homo sapiens
tttaaccactctggt

SEQ ID NO: 55757 - DNA, 15 bp, Homo sapiens
atttaaccactctgg

SEQ ID NO: 55758 - DNA, 15 bp, Homo sapiens
aatttaaccactctg

SEQ ID NO: 55759 - DNA, 15 bp, Homo sapiens
gaatttaaccactct

SEQ ID NO: 55760 - DNA, 15 bp, Homo sapiens
agaatttaaccactc

SEQ ID NO: 55761 - DNA, 15 bp, Homo sapiens
tagaatttaaccact

SEQ ID NO: 55762 - DNA, 15 bp, Homo sapiens
ctagaatttaaccac

SEQ ID NO: 55763 - DNA, 15 bp, Homo sapiens
tctagaatttaacca

SEQ ID NO: 55764 - DNA, 15 bp, Homo sapiens
atctagaatttaacc

SEQ ID NO: 55765 - DNA, 15 bp, Homo sapiens
aatctagaatttaac

SEQ ID NO: 55766 - DNA, 15 bp, Homo sapiens
caatctagaatttaa

SEQ ID NO: 55767 - DNA, 15 bp, Homo sapiens
ccaatctagaattta

SEQ ID NO: 55768 - DNA, 15 bp, Homo sapiens
cccaatctagaattt

SEQ ID NO: 55769 - DNA, 15 bp, Homo sapiens
gcccaatctagaatt

SEQ ID NO: 55770 - DNA, 15 bp, Homo sapiens
agcccaatctagaat

SEQ ID NO: 55771 - DNA, 15 bp, Homo sapiens
aagcccaatctagaa

SEQ ID NO: 55772 - DNA, 15 bp, Homo sapiens
caagcccaatctaga

SEQ ID NO: 55773 - DNA, 15 bp, Homo sapiens
acaagcccaatctag

SEQ ID NO: 55774 - DNA, 15 bp, Homo sapiens
aacaagcccaatcta

SEQ ID NO: 55775 - DNA, 15 bp, Homo sapiens
caacaagcccaatct

SEQ ID NO: 55776 - DNA, 15 bp, Homo sapiens
gcaacaagcccaatc

SEQ ID NO: 55777 - DNA, 15 bp, Homo sapiens
agcaacaagcccaat

SEQ ID NO: 55778 - DNA, 15 bp, Homo sapiens
tagcaacaagcccaa

SEQ ID NO: 55779 - DNA, 15 bp, Homo sapiens
ctagcaacaagccca

SEQ ID NO: 55780 - DNA, 15 bp, Homo sapiens
gctagcaacaagccc

SEQ ID NO: 55781 - DNA, 15 bp, Homo sapiens
tgctagcaacaagcc

SEQ ID NO: 55782 - DNA, 15 bp, Homo sapiens
ctgctagcaacaagc

SEQ ID NO: 55783 - DNA, 15 bp, Homo sapiens
tctgctagcaacaag

SEQ ID NO: 55784 - DNA, 15 bp, Homo sapiens
ttctgctagcaacaa

SEQ ID NO: 55785 - DNA, 15 bp, Homo sapiens
cttctgctagcaaca

SEQ ID NO: 55786 - DNA, 15 bp, Homo sapiens
tcttctgctagcaac

SEQ ID NO: 55787 - DNA, 15 bp, Homo sapiens
ctcttctgctagcaa

SEQ ID NO: 55788 - DNA, 15 bp, Homo sapiens
cctcttctgctagca

SEQ ID NO: 55789 - DNA, 15 bp, Homo sapiens
acctcttctgctagc

SEQ ID NO: 55790 - DNA, 15 bp, Homo sapiens
cacctcttctgctag

SEQ ID NO: 55791 - DNA, 15 bp, Homo sapiens
tcacctcttctgcta

SEQ ID NO: 55792 - DNA, 15 bp, Homo sapiens
ttcacctcttctgct

SEQ ID NO: 55793 - DNA, 15 bp, Homo sapiens
tttcacctcttctgc

SEQ ID NO: 55794 - DNA, 15 bp, Homo sapiens
atttcacctcttctg

SEQ ID NO: 55795 - DNA, 15 bp, Homo sapiens
aatttcacctcttct

SEQ ID NO: 55796 - DNA, 15 bp, Homo sapiens
gaatttcacctcttc

SEQ ID NO: 55797 - DNA, 15 bp, Homo sapiens
tgaatttcacctctt

SEQ ID NO: 55798 - DNA, 15 bp, Homo sapiens
ctgaatttcacctct

SEQ ID NO: 55799 - DNA, 15 bp, Homo sapiens
cctgaatttcacctc

SEQ ID NO: 55800 - DNA, 15 bp, Homo sapiens
tcctgaatttcacct

SEQ ID NO: 55801 - DNA, 15 bp, Homo sapiens
gtcctgaatttcacc

SEQ ID NO: 55802 - DNA, 15 bp, Homo sapiens
tgtcctgaatttcac

SEQ ID NO: 55803 - DNA, 15 bp, Homo sapiens
ttgtcctgaatttca

SEQ ID NO: 55804 - DNA, 15 bp, Homo sapiens
gttgtcctgaatttc

SEQ ID NO: 55805 - DNA, 15 bp, Homo sapiens
tgttgtcctgaattt

SEQ ID NO: 55806 - DNA, 15 bp, Homo sapiens
ttgttgtcctgaatt

SEQ ID NO: 55807 - DNA, 15 bp, Homo sapiens
attgttgtcctgaat

SEQ ID NO: 55808 - DNA, 15 bp, Homo sapiens
aattgttgtcctgaa

SEQ ID NO: 55809 - DNA, 15 bp, Homo sapiens
caattgttgtcctga

SEQ ID NO: 55810 - DNA, 15 bp, Homo sapiens
tcaattgttgtcctg

SEQ ID NO: 55811 - DNA, 15 bp, Homo sapiens
ttcaattgttgtcct

SEQ ID NO: 55812 - DNA, 15 bp, Homo sapiens
tttcaattgttgtcc

SEQ ID NO: 55813 - DNA, 15 bp, Homo sapiens
ctttcaattgttgtc

SEQ ID NO: 55814 - DNA, 15 bp, Homo sapiens
actttcaattgttgt

SEQ ID NO: 55815 - DNA, 15 bp, Homo sapiens
aactttcaattgttg

SEQ ID NO: 55816 - DNA, 15 bp, Homo sapiens
caactttcaattgtt

SEQ ID NO: 55817 - DNA, 15 bp, Homo sapiens
ccaactttcaattgt

SEQ ID NO: 55818 - DNA, 15 bp, Homo sapiens
accaactttcaattg

SEQ ID NO: 55819 - DNA, 15 bp, Homo sapiens
taccaactttcaatt

SEQ ID NO: 55820 - DNA, 15 bp, Homo sapiens
ctaccaactttcaat

SEQ ID NO: 55821 - DNA, 15 bp, Homo sapiens
gctaccaactttcaa

SEQ ID NO: 55822 - DNA, 15 bp, Homo sapiens
tgctaccaactttca

SEQ ID NO: 55823 - DNA, 15 bp, Homo sapiens
atgctaccaactttc

SEQ ID NO: 55824 - DNA, 15 bp, Homo sapiens
aatgctaccaacttt

SEQ ID NO: 55825 - DNA, 15 bp, Homo sapiens
aaatgctaccaactt

SEQ ID NO: 55826 - DNA, 15 bp, Homo sapiens
caaatgctaccaact

SEQ ID NO: 55827 - DNA, 15 bp, Homo sapiens
tcaaatgctaccaac

SEQ ID NO: 55828 - DNA, 15 bp, Homo sapiens
ttcaaatgctaccaa

SEQ ID NO: 55829 - DNA, 15 bp, Homo sapiens
gttcaaatgctacca

SEQ ID NO: 55830 - DNA, 15 bp, Homo sapiens
tgttcaaatgctacc

SEQ ID NO: 55831 - DNA, 15 bp, Homo sapiens
gtgttcaaatgctac

SEQ ID NO: 55832 - DNA, 15 bp, Homo sapiens
tgtgttcaaatgcta

SEQ ID NO: 55833 - DNA, 15 bp, Homo sapiens
atgtgttcaaatgct

SEQ ID NO: 55834 - DNA, 15 bp, Homo sapiens
gatgtgttcaaatgc

SEQ ID NO: 55835 - DNA, 15 bp, Homo sapiens
tgatgtgttcaaatg

SEQ ID NO: 55836 - DNA, 15 bp, Homo sapiens
atgatgtgttcaaat

SEQ ID NO: 55837 - DNA, 15 bp, Homo sapiens
aatgatgtgttcaaa

SEQ ID NO: 55838 - DNA, 15 bp, Homo sapiens
aaatgatgtgttcaa

SEQ ID NO: 55839 - DNA, 15 bp, Homo sapiens
taaatgatgtgttca

SEQ ID NO: 55840 - DNA, 15 bp, Homo sapiens
ctaaatgatgtgttc

SEQ ID NO: 55841 - DNA, 15 bp, Homo sapiens
cctaaatgatgtgtt

SEQ ID NO: 55842 - DNA, 15 bp, Homo sapiens
tcctaaatgatgtgt

SEQ ID NO: 55843 - DNA, 15 bp, Homo sapiens
ttcctaaatgatgtg

SEQ ID NO: 55844 - DNA, 15 bp, Homo sapiens
gttcctaaatgatgt

SEQ ID NO: 55845 - DNA, 15 bp, Homo sapiens
tgttcctaaatgatg

SEQ ID NO: 55846 - DNA, 15 bp, Homo sapiens
gtgttcctaaatgat

SEQ ID NO: 55847 - DNA, 15 bp, Homo sapiens
agtgttcctaaatga

SEQ ID NO: 55848 - DNA, 15 bp, Homo sapiens
gagtgttcctaaatg

SEQ ID NO: 55849 - DNA, 15 bp, Homo sapiens
tgagtgttcctaaat

SEQ ID NO: 55850 - DNA, 15 bp, Homo sapiens
ctgagtgttcctaaa

SEQ ID NO: 55851 - DNA, 15 bp, Homo sapiens
actgagtgttcctaa

SEQ ID NO: 55852 - DNA, 15 bp, Homo sapiens
aactgagtgttccta

SEQ ID NO: 55853 - DNA, 15 bp, Homo sapiens
aaactgagtgttcct

SEQ ID NO: 55854 - DNA, 15 bp, Homo sapiens
aaaactgagtgttcc

SEQ ID NO: 55855 - DNA, 15 bp, Homo sapiens
taaaactgagtgttc

SEQ ID NO: 55856 - DNA, 15 bp, Homo sapiens
ttaaaactgagtgtt

SEQ ID NO: 55857 - DNA, 15 bp, Homo sapiens
attaaaactgagtgt

SEQ ID NO: 55858 - DNA, 15 bp, Homo sapiens
gattaaaactgagtg

SEQ ID NO: 55859 - DNA, 15 bp, Homo sapiens
tgattaaaactgagt

SEQ ID NO: 55860 - DNA, 15 bp, Homo sapiens
atgattaaaactgag

SEQ ID NO: 55861 - DNA, 15 bp, Homo sapiens
gatgattaaaactga

SEQ ID NO: 55862 - DNA, 15 bp, Homo sapiens
tgatgattaaaactg

SEQ ID NO: 55863 - DNA, 15 bp, Homo sapiens
atgatgattaaaact

SEQ ID NO: 55864 - DNA, 15 bp, Homo sapiens
gatgatgattaaaac

SEQ ID NO: 55865 - DNA, 15 bp, Homo sapiens
agatgatgattaaaa

SEQ ID NO: 55866 - DNA, 15 bp, Homo sapiens
tagatgatgattaaa

SEQ ID NO: 55867 - DNA, 15 bp, Homo sapiens
gtagatgatgattaa

SEQ ID NO: 55868 - DNA, 15 bp, Homo sapiens
ggtagatgatgatta

SEQ ID NO: 55869 - DNA, 15 bp, Homo sapiens
tggtagatgatgatt

SEQ ID NO: 55870 - DNA, 15 bp, Homo sapiens
atggtagatgatgat

SEQ ID NO: 55871 - DNA, 15 bp, Homo sapiens
catggtagatgatga

SEQ ID NO: 55872 - DNA, 15 bp, Homo sapiens
ccatggtagatgatg

SEQ ID NO: 55873 - DNA, 15 bp, Homo sapiens
tccatggtagatgat

SEQ ID NO: 55874 - DNA, 15 bp, Homo sapiens
atccatggtagatga

SEQ ID NO: 55875 - DNA, 15 bp, Homo sapiens
tatccatggtagatg

SEQ ID NO: 55876 - DNA, 15 bp, Homo sapiens
gtatccatggtagat

SEQ ID NO: 55877 - DNA, 15 bp, Homo sapiens
agtatccatggtaga

SEQ ID NO: 55878 - DNA, 15 bp, Homo sapiens
gagtatccatggtag

SEQ ID NO: 55879 - DNA, 15 bp, Homo sapiens
tgagtatccatggta

SEQ ID NO: 55880 - DNA, 15 bp, Homo sapiens
ttgagtatccatggt

SEQ ID NO: 55881 - DNA, 15 bp, Homo sapiens
tttgagtatccatgg

SEQ ID NO: 55882 - DNA, 15 bp, Homo sapiens
ttttgagtatccatg

SEQ ID NO: 55883 - DNA, 15 bp, Homo sapiens
cttttgagtatccat

SEQ ID NO: 55884 - DNA, 15 bp, Homo sapiens
tcttttgagtatcca

SEQ ID NO: 55885 - DNA, 15 bp, Homo sapiens
ttcttttgagtatcc

SEQ ID NO: 55886 - DNA, 15 bp, Homo sapiens
attcttttgagtatc

SEQ ID NO: 55887 - DNA, 15 bp, Homo sapiens
tattcttttgagtat

SEQ ID NO: 55888 - DNA, 15 bp, Homo sapiens
gtattcttttgagta

SEQ ID NO: 55889 - DNA, 15 bp, Homo sapiens
ggtattcttttgagt

SEQ ID NO: 55890 - DNA, 15 bp, Homo sapiens
gggtattcttttgag

SEQ ID NO: 55891 - DNA, 15 bp, Homo sapiens
agggtattcttttga

SEQ ID NO: 55892 - DNA, 15 bp, Homo sapiens
gagggtattcttttg

SEQ ID NO: 55893 - DNA, 15 bp, Homo sapiens
cgagggtattctttt

SEQ ID NO: 55894 - DNA, 15 bp, Homo sapiens
ccgagggtattcttt

SEQ ID NO: 55895 - DNA, 15 bp, Homo sapiens
tccgagggtattctt

SEQ ID NO: 55896 - DNA, 15 bp, Homo sapiens
gtccgagggtattct

SEQ ID NO: 55897 - DNA, 15 bp, Homo sapiens
ggtccgagggtattc

SEQ ID NO: 55898 - DNA, 15 bp, Homo sapiens
gggtccgagggtatt

SEQ ID NO: 55899 - DNA, 15 bp, Homo sapiens
ggggtccgagggtat

SEQ ID NO: 55900 - DNA, 15 bp, Homo sapiens
gggggtccgagggta

SEQ ID NO: 55901 - DNA, 15 bp, Homo sapiens
cgggggtccgagggt

SEQ ID NO: 55902 - DNA, 15 bp, Homo sapiens
tcgggggtccgaggg

SEQ ID NO: 55903 - DNA, 15 bp, Homo sapiens
atcgggggtccgagg

SEQ ID NO: 55904 - DNA, 15 bp, Homo sapiens
aatcgggggtccgag

SEQ ID NO: 55905 - DNA, 15 bp, Homo sapiens
caatcgggggtccga

SEQ ID NO: 55906 - DNA, 15 bp, Homo sapiens
ccaatcgggggtccg

SEQ ID NO: 55907 - DNA, 15 bp, Homo sapiens
accaatcgggggtcc

SEQ ID NO: 55908 - DNA, 15 bp, Homo sapiens
aaccaatcgggggtc

SEQ ID NO: 55909 - DNA, 15 bp, Homo sapiens
caaccaatcgggggt

SEQ ID NO: 55910 - DNA, 15 bp, Homo sapiens
tcaaccaatcggggg

SEQ ID NO: 55911 - DNA, 15 bp, Homo sapiens
gtcaaccaatcgggg

SEQ ID NO: 55912 - DNA, 15 bp, Homo sapiens
agtcaaccaatcggg

SEQ ID NO: 55913 - DNA, 15 bp, Homo sapiens
tagtcaaccaatcgg

SEQ ID NO: 55914 - DNA, 15 bp, Homo sapiens
ctagtcaaccaatcg

SEQ ID NO: 55915 - DNA, 15 bp, Homo sapiens
actagtcaaccaatc

SEQ ID NO: 55916 - DNA, 15 bp, Homo sapiens
aactagtcaaccaat

SEQ ID NO: 55917 - DNA, 15 bp, Homo sapiens
caactagtcaaccaa

SEQ ID NO: 55918 - DNA, 15 bp, Homo sapiens
gcaactagtcaacca

SEQ ID NO: 55919 - DNA, 15 bp, Homo sapiens
ggcaactagtcaacc

SEQ ID NO: 55920 - DNA, 15 bp, Homo sapiens
aggcaactagtcaac

SEQ ID NO: 55921 - DNA, 15 bp, Homo sapiens
caggcaactagtcaa

SEQ ID NO: 55922 - DNA, 15 bp, Homo sapiens
ccaggcaactagtca

SEQ ID NO: 55923 - DNA, 15 bp, Homo sapiens
accaggcaactagtc

SEQ ID NO: 55924 - DNA, 15 bp, Homo sapiens
gaccaggcaactagt

SEQ ID NO: 55925 - DNA, 15 bp, Homo sapiens
agaccaggcaactag

SEQ ID NO: 55926 - DNA, 15 bp, Homo sapiens
aagaccaggcaacta

SEQ ID NO: 55927 - DNA, 15 bp, Homo sapiens
taagaccaggcaact

SEQ ID NO: 55928 - DNA, 15 bp, Homo sapiens
ctaagaccaggcaac

SEQ ID NO: 55929 - DNA, 15 bp, Homo sapiens
tctaagaccaggcaa

SEQ ID NO: 55930 - DNA, 15 bp, Homo sapiens
ttctaagaccaggca

SEQ ID NO: 55931 - DNA, 15 bp, Homo sapiens
tttctaagaccaggc

SEQ ID NO: 55932 - DNA, 15 bp, Homo sapiens
gtttctaagaccagg

SEQ ID NO: 55933 - DNA, 15 bp, Homo sapiens
agtttctaagaccag

SEQ ID NO: 55934 - DNA, 15 bp, Homo sapiens
aagtttctaagacca

SEQ ID NO: 55935 - DNA, 15 bp, Homo sapiens
taagtttctaagacc

SEQ ID NO: 55936 - DNA, 15 bp, Homo sapiens
ttaagtttctaagac

SEQ ID NO: 55937 - DNA, 15 bp, Homo sapiens
attaagtttctaaga

SEQ ID NO: 55938 - DNA, 15 bp, Homo sapiens
gattaagtttctaag

SEQ ID NO: 55939 - DNA, 15 bp, Homo sapiens
agattaagtttctaa

SEQ ID NO: 55940 - DNA, 15 bp, Homo sapiens
aagattaagtttcta

SEQ ID NO: 55941 - DNA, 15 bp, Homo sapiens
aaagattaagtttct

SEQ ID NO: 55942 - DNA, 15 bp, Homo sapiens
gaaagattaagtttc

SEQ ID NO: 55943 - DNA, 15 bp, Homo sapiens
agaaagattaagttt

SEQ ID NO: 55944 - DNA, 15 bp, Homo sapiens
cagaaagattaagtt

SEQ ID NO: 55945 - DNA, 15 bp, Homo sapiens
gcagaaagattaagt

SEQ ID NO: 55946 - DNA, 15 bp, Homo sapiens
tgcagaaagattaag

SEQ ID NO: 55947 - DNA, 15 bp, Homo sapiens
ttgcagaaagattaa

SEQ ID NO: 55948 - DNA, 15 bp, Homo sapiens
attgcagaaagatta

SEQ ID NO: 55949 - DNA, 15 bp, Homo sapiens
aattgcagaaagatt

SEQ ID NO: 55950 - DNA, 15 bp, Homo sapiens
gaattgcagaaagat

SEQ ID NO: 55951 - DNA, 15 bp, Homo sapiens
ggaattgcagaaaga

SEQ ID NO: 55952 - DNA, 15 bp, Homo sapiens
aggaattgcagaaag

SEQ ID NO: 55953 - DNA, 15 bp, Homo sapiens
gaggaattgcagaaa

SEQ ID NO: 55954 - DNA, 15 bp, Homo sapiens
ggaggaattgcagaa

SEQ ID NO: 55955 - DNA, 15 bp, Homo sapiens
tggaggaattgcaga

SEQ ID NO: 55956 - DNA, 15 bp, Homo sapiens
gtggaggaattgcag

SEQ ID NO: 55957 - DNA, 15 bp, Homo sapiens
agtggaggaattgca

SEQ ID NO: 55958 - DNA, 15 bp, Homo sapiens
aagtggaggaattgc

SEQ ID NO: 55959 - DNA, 15 bp, Homo sapiens
gaagtggaggaattg

SEQ ID NO: 55960 - DNA, 15 bp, Homo sapiens
agaagtggaggaatt

SEQ ID NO: 55961 - DNA, 15 bp, Homo sapiens
aagaagtggaggaat

SEQ ID NO: 55962 - DNA, 15 bp, Homo sapiens
gaagaagtggaggaa

SEQ ID NO: 55963 - DNA, 15 bp, Homo sapiens
tgaagaagtggagga

SEQ ID NO: 55964 - DNA, 15 bp, Homo sapiens
ttgaagaagtggagg

SEQ ID NO: 55965 - DNA, 15 bp, Homo sapiens
gttgaagaagtggag

SEQ ID NO: 55966 - DNA, 15 bp, Homo sapiens
agttgaagaagtgga

SEQ ID NO: 55967 - DNA, 15 bp, Homo sapiens
cagttgaagaagtgg

SEQ ID NO: 55968 - DNA, 15 bp, Homo sapiens
tcagttgaagaagtg

SEQ ID NO: 55969 - DNA, 15 bp, Homo sapiens
ttcagttgaagaagt

SEQ ID NO: 55970 - DNA, 15 bp, Homo sapiens
tttcagttgaagaag

SEQ ID NO: 55971 - DNA, 15 bp, Homo sapiens
ttttcagttgaagaa

SEQ ID NO: 55972 - DNA, 15 bp, Homo sapiens
attttcagttgaaga

SEQ ID NO: 55973 - DNA, 15 bp, Homo sapiens
cattttcagttgaag

SEQ ID NO: 55974 - DNA, 15 bp, Homo sapiens
ccattttcagttgaa

SEQ ID NO: 55975 - DNA, 15 bp, Homo sapiens
cccattttcagttga

SEQ ID NO: 55976 - DNA, 15 bp, Homo sapiens
gcccattttcagttg

SEQ ID NO: 55977 - DNA, 15 bp, Homo sapiens
tgcccattttcagtt

SEQ ID NO: 55978 - DNA, 15 bp, Homo sapiens
atgcccattttcagt

SEQ ID NO: 55979 - DNA, 15 bp, Homo sapiens
tatgcccattttcag

SEQ ID NO: 55980 - DNA, 15 bp, Homo sapiens
atatgcccattttca

SEQ ID NO: 55981 - DNA, 15 bp, Homo sapiens
gatatgcccattttc

SEQ ID NO: 55982 - DNA, 15 bp, Homo sapiens
tgatatgcccatttt

SEQ ID NO: 55983 - DNA, 15 bp, Homo sapiens
gtgatatgcccattt

SEQ ID NO: 55984 - DNA, 15 bp, Homo sapiens
ggtgatatgcccatt

SEQ ID NO: 55985 - DNA, 15 bp, Homo sapiens
tggtgatatgcccat

SEQ ID NO: 55986 - DNA, 15 bp, Homo sapiens
ctggtgatatgccca

SEQ ID NO: 55987 - DNA, 15 bp, Homo sapiens
actggtgatatgccc

SEQ ID NO: 55988 - DNA, 15 bp, Homo sapiens
gactggtgatatgcc

SEQ ID NO: 55989 - DNA, 15 bp, Homo sapiens
agactggtgatatgc

SEQ ID NO: 55990 - DNA, 15 bp, Homo sapiens
tagactggtgatatg

SEQ ID NO: 55991 - DNA, 15 bp, Homo sapiens
ctagactggtgatat

SEQ ID NO: 55992 - DNA, 15 bp, Homo sapiens
actagactggtgata

SEQ ID NO: 55993 - DNA, 15 bp, Homo sapiens
aactagactggtgat

SEQ ID NO: 55994 - DNA, 15 bp, Homo sapiens
aaactagactggtga

SEQ ID NO: 55995 - DNA, 15 bp, Homo sapiens
caaactagactggtg

SEQ ID NO: 55996 - DNA, 15 bp, Homo sapiens
ccaaactagactggt

SEQ ID NO: 55997 - DNA, 15 bp, Homo sapiens
accaaactagactgg

SEQ ID NO: 55998 - DNA, 15 bp, Homo sapiens
caccaaactagactg

SEQ ID NO: 55999 - DNA, 15 bp, Homo sapiens
tcaccaaactagact

SEQ ID NO: 56000 - DNA, 15 bp, Homo sapiens
gtcaccaaactagac

SEQ ID NO: 56001 - DNA, 15 bp, Homo sapiens
cgtcaccaaactaga

SEQ ID NO: 56002 - DNA, 15 bp, Homo sapiens
ccgtcaccaaactag

SEQ ID NO: 56003 - DNA, 15 bp, Homo sapiens
accgtcaccaaacta

SEQ ID NO: 56004 - DNA, 15 bp, Homo sapiens
caccgtcaccaaact

SEQ ID NO: 56005 - DNA, 15 bp, Homo sapiens
tcaccgtcaccaaac

SEQ ID NO: 56006 - DNA, 15 bp, Homo sapiens
gtcaccgtcaccaaa

SEQ ID NO: 56007 - DNA, 15 bp, Homo sapiens
tgtcaccgtcaccaa

SEQ ID NO: 56008 - DNA, 15 bp, Homo sapiens
ttgtcaccgtcacca

SEQ ID NO: 56009 - DNA, 15 bp, Homo sapiens
attgtcaccgtcacc

SEQ ID NO: 56010 - DNA, 15 bp, Homo sapiens
aattgtcaccgtcac

SEQ ID NO: 56011 - DNA, 15 bp, Homo sapiens
taattgtcaccgtca

SEQ ID NO: 56012 - DNA, 15 bp, Homo sapiens
ataattgtcaccgtc

SEQ ID NO: 56013 - DNA, 15 bp, Homo sapiens
cataattgtcaccgt

SEQ ID NO: 56014 - DNA, 15 bp, Homo sapiens
acataattgtcaccg

SEQ ID NO: 56015 - DNA, 15 bp, Homo sapiens
tacataattgtcacc

SEQ ID NO: 56016 - DNA, 15 bp, Homo sapiens
ttacataattgtcac

SEQ ID NO: 56017 - DNA, 15 bp, Homo sapiens
tttacataattgtca

SEQ ID NO: 56018 - DNA, 15 bp, Homo sapiens
atttacataattgtc

SEQ ID NO: 56019 - DNA, 15 bp, Homo sapiens
tatttacataattgt

SEQ ID NO: 56020 - DNA, 15 bp, Homo sapiens
ttatttacataattg

SEQ ID NO: 56021 - DNA, 15 bp, Homo sapiens
tttatttacataatt

SEQ ID NO: 56022 - DNA, 15 bp, Homo sapiens
ttttatttacataat

SEQ ID NO: 56023 - DNA, 15 bp, Homo sapiens
cttttatttacataa

SEQ ID NO: 56024 - DNA, 15 bp, Homo sapiens
acttttatttacata

SEQ ID NO: 56025 - DNA, 15 bp, Homo sapiens
tacttttatttacat

SEQ ID NO: 56026 - DNA, 15 bp, Homo sapiens
atacttttatttaca

SEQ ID NO: 56027 - DNA, 15 bp, Homo sapiens
tatacttttatttac

SEQ ID NO: 56028 - DNA, 15 bp, Homo sapiens
ttatacttttattta

SEQ ID NO: 56029 - DNA, 15 bp, Homo sapiens
tttatacttttattt

SEQ ID NO: 56030 - DNA, 15 bp, Homo sapiens
ttttatacttttatt

SEQ ID NO: 56031 - DNA, 15 bp, Homo sapiens
tttttatacttttat

SEQ ID NO: 56032 - DNA, 15 bp, Homo sapiens
gtttttatactttta

SEQ ID NO: 56033 - DNA, 15 bp, Homo sapiens
tgtttttatactttt

SEQ ID NO: 56034 - DNA, 15 bp, Homo sapiens
gtgtttttatacttt

SEQ ID NO: 56035 - DNA, 15 bp, Homo sapiens
ggtgtttttatactt

SEQ ID NO: 56036 - DNA, 15 bp, Homo sapiens
aggtgtttttatact

SEQ ID NO: 56037 - DNA, 15 bp, Homo sapiens
taggtgtttttatac

SEQ ID NO: 56038 - DNA, 15 bp, Homo sapiens
ctaggtgtttttata

SEQ ID NO: 56039 - DNA, 15 bp, Homo sapiens
actaggtgtttttat

SEQ ID NO: 56040 - DNA, 15 bp, Homo sapiens
tactaggtgttttta

SEQ ID NO: 56041 - DNA, 15 bp, Homo sapiens
gtactaggtgttttt

SEQ ID NO: 56042 - DNA, 15 bp, Homo sapiens
tgtactaggtgtttt

SEQ ID NO: 56043 - DNA, 15 bp, Homo sapiens
atgtactaggtgttt

SEQ ID NO: 56044 - DNA, 15 bp, Homo sapiens
aatgtactaggtgtt

SEQ ID NO: 56045 - DNA, 15 bp, Homo sapiens
caatgtactaggtgt

SEQ ID NO: 56046 - DNA, 15 bp, Homo sapiens
acaatgtactaggtg

SEQ ID NO: 56047 - DNA, 15 bp, Homo sapiens
gacaatgtactaggt

SEQ ID NO: 56048 - DNA, 15 bp, Homo sapiens
agacaatgtactagg

SEQ ID NO: 56049 - DNA, 15 bp, Homo sapiens
gagacaatgtactag

SEQ ID NO: 56050 - DNA, 15 bp, Homo sapiens
ggagacaatgtacta

SEQ ID NO: 56051 - DNA, 15 bp, Homo sapiens
aggagacaatgtact

SEQ ID NO: 56052 - DNA, 15 bp, Homo sapiens
taggagacaatgtac

SEQ ID NO: 56053 - DNA, 15 bp, Homo sapiens
ataggagacaatgta

SEQ ID NO: 56054 - DNA, 15 bp, Homo sapiens
tataggagacaatgt

SEQ ID NO: 56055 - DNA, 15 bp, Homo sapiens
atataggagacaatg

SEQ ID NO: 56056 - DNA, 15 bp, Homo sapiens
aatataggagacaat

SEQ ID NO: 56057 - DNA, 15 bp, Homo sapiens
taatataggagacaa

SEQ ID NO: 56058 - DNA, 15 bp, Homo sapiens
ataatataggagaca

SEQ ID NO: 56059 - DNA, 15 bp, Homo sapiens
gataatataggagac

SEQ ID NO: 56060 - DNA, 15 bp, Homo sapiens
agataatataggaga

SEQ ID NO: 56061 - DNA, 15 bp, Homo sapiens
aagataatataggag

SEQ ID NO: 56062 - DNA, 15 bp, Homo sapiens
taagataatatagga

SEQ ID NO: 56063 - DNA, 15 bp, Homo sapiens
ctaagataatatagg

SEQ ID NO: 56064 - DNA, 15 bp, Homo sapiens
actaagataatatag

SEQ ID NO: 56065 - DNA, 15 bp, Homo sapiens
tactaagataatata

SEQ ID NO: 56066 - DNA, 15 bp, Homo sapiens
ttactaagataatat

SEQ ID NO: 56067 - DNA, 15 bp, Homo sapiens
attactaagataata

SEQ ID NO: 56068 - DNA, 15 bp, Homo sapiens
tattactaagataat

SEQ ID NO: 56069 - DNA, 15 bp, Homo sapiens
atattactaagataa

SEQ ID NO: 56070 - DNA, 15 bp, Homo sapiens
tatattactaagata

SEQ ID NO: 56071 - DNA, 15 bp, Homo sapiens
atatattactaagat

SEQ ID NO: 56072 - DNA, 15 bp, Homo sapiens
tatatattactaaga

SEQ ID NO: 56073 - DNA, 15 bp, Homo sapiens
ttatatattactaag

SEQ ID NO: 56074 - DNA, 15 bp, Homo sapiens
attatatattactaa

SEQ ID NO: 56075 - DNA, 15 bp, Homo sapiens
tattatatattacta

SEQ ID NO: 56076 - DNA, 15 bp, Homo sapiens
atattatatattact

SEQ ID NO: 56077 - DNA, 15 bp, Homo sapiens
tatattatatattac

SEQ ID NO: 56078 - DNA, 15 bp, Homo sapiens
atatattatatatta

SEQ ID NO: 56079 - DNA, 15 bp, Homo sapiens
tatatattatatatt

SEQ ID NO: 56080 - DNA, 15 bp, Homo sapiens
ttatatattatatat

SEQ ID NO: 56081 - DNA, 15 bp, Homo sapiens
attatatattatata

SEQ ID NO: 56082 - DNA, 15 bp, Homo sapiens
tattatatattatat

SEQ ID NO: 56083 - DNA, 15 bp, Homo sapiens
ttattatatattata

SEQ ID NO: 56084 - DNA, 15 bp, Homo sapiens
attattatatattat

SEQ ID NO: 56085 - DNA, 15 bp, Homo sapiens
tattattatatatta

SEQ ID NO: 56086 - DNA, 15 bp, Homo sapiens
atattattatatatt

SEQ ID NO: 56087 - DNA, 15 bp, Homo sapiens
aatattattatatat

SEQ ID NO: 56088 - DNA, 15 bp, Homo sapiens
caatattattatata

SEQ ID NO: 56089 - DNA, 15 bp, Homo sapiens
acaatattattatat

SEQ ID NO: 56090 - DNA, 15 bp, Homo sapiens
aacaatattattata

SEQ ID NO: 56091 - DNA, 15 bp, Homo sapiens
taacaatattattat

SEQ ID NO: 56092 - DNA, 15 bp, Homo sapiens
ttaacaatattatta

SEQ ID NO: 56093 - DNA, 15 bp, Homo sapiens
gttaacaatattatt

SEQ ID NO: 56094 - DNA, 15 bp, Homo sapiens
tgttaacaatattat

SEQ ID NO: 56095 - DNA, 15 bp, Homo sapiens
atgttaacaatatta

SEQ ID NO: 56096 - DNA, 15 bp, Homo sapiens
tatgttaacaatatt

SEQ ID NO: 56097 - DNA, 15 bp, Homo sapiens
atatgttaacaatat

SEQ ID NO: 56098 - DNA, 15 bp, Homo sapiens
catatgttaacaata

SEQ ID NO: 56099 - DNA, 15 bp, Homo sapiens
acatatgttaacaat

SEQ ID NO: 56100 - DNA, 15 bp, Homo sapiens
aacatatgttaacaa

SEQ ID NO: 56101 - DNA, 15 bp, Homo sapiens
taacatatgttaaca

SEQ ID NO: 56102 - DNA, 15 bp, Homo sapiens
ataacatatgttaac

SEQ ID NO: 56103 - DNA, 15 bp, Homo sapiens
tataacatatgttaa

SEQ ID NO: 56104 - DNA, 15 bp, Homo sapiens
gtataacatatgtta

SEQ ID NO: 56105 - DNA, 15 bp, Homo sapiens
tgtataacatatgtt

SEQ ID NO: 56106 - DNA, 15 bp, Homo sapiens
atgtataacatatgt

SEQ ID NO: 56107 - DNA, 15 bp, Homo sapiens
aatgtataacatatg

SEQ ID NO: 56108 - DNA, 15 bp, Homo sapiens
aaatgtataacatat

SEQ ID NO: 56109 - DNA, 15 bp, Homo sapiens
taaatgtataacata

SEQ ID NO: 56110 - DNA, 15 bp, Homo sapiens
ataaatgtataacat

SEQ ID NO: 56111 - DNA, 15 bp, Homo sapiens
tataaatgtataaca

SEQ ID NO: 56112 - DNA, 15 bp, Homo sapiens
ttataaatgtataac

SEQ ID NO: 56113 - DNA, 15 bp, Homo sapiens
attataaatgtataa

SEQ ID NO: 56114 - DNA, 15 bp, Homo sapiens
tattataaatgtata

SEQ ID NO: 56115 - DNA, 15 bp, Homo sapiens
atattataaatgtat

SEQ ID NO: 56116 - DNA, 15 bp, Homo sapiens
aatattataaatgta

SEQ ID NO: 56117 - DNA, 15 bp, Homo sapiens
taatattataaatgt

SEQ ID NO: 56118 - DNA, 15 bp, Homo sapiens
ttaatattataaatg

SEQ ID NO: 56119 - DNA, 15 bp, Homo sapiens
attaatattataaat

SEQ ID NO: 56120 - DNA, 15 bp, Homo sapiens
tattaatattataaa

SEQ ID NO: 56121 - DNA, 15 bp, Homo sapiens
gtattaatattataa

SEQ ID NO: 56122 - DNA, 15 bp, Homo sapiens
tgtattaatattata

SEQ ID NO: 56123 - DNA, 15 bp, Homo sapiens
ttgtattaatattat

SEQ ID NO: 56124 - DNA, 15 bp, Homo sapiens
gttgtattaatatta

SEQ ID NO: 56125 - DNA, 15 bp, Homo sapiens
tgttgtattaatatt

SEQ ID NO: 56126 - DNA, 15 bp, Homo sapiens
atgttgtattaatat

SEQ ID NO: 56127 - DNA, 15 bp, Homo sapiens
tatgttgtattaata

SEQ ID NO: 56128 - DNA, 15 bp, Homo sapiens
atatgttgtattaat

SEQ ID NO: 56129 - DNA, 15 bp, Homo sapiens
catatgttgtattaa

SEQ ID NO: 56130 - DNA, 15 bp, Homo sapiens
acatatgttgtatta

SEQ ID NO: 56131 - DNA, 15 bp, Homo sapiens
tacatatgttgtatt

SEQ ID NO: 56132 - DNA, 15 bp, Homo sapiens
atacatatgttgtat

SEQ ID NO: 56133 - DNA, 15 bp, Homo sapiens
aatacatatgttgta

SEQ ID NO: 56134 - DNA, 15 bp, Homo sapiens
taatacatatgttgt

SEQ ID NO: 56135 - DNA, 15 bp, Homo sapiens
ataatacatatgttg

SEQ ID NO: 56136 - DNA, 15 bp, Homo sapiens
tataatacatatgtt

SEQ ID NO: 56137 - DNA, 15 bp, Homo sapiens
atataatacatatgt

SEQ ID NO: 56138 - DNA, 15 bp, Homo sapiens
tatataatacatatg

SEQ ID NO: 56139 - DNA, 15 bp, Homo sapiens
atatataatacatat

SEQ ID NO: 56140 - DNA, 15 bp, Homo sapiens
catatataatacata

SEQ ID NO: 56141 - DNA, 15 bp, Homo sapiens
acatatataatacat

SEQ ID NO: 56142 - DNA, 15 bp, Homo sapiens
tacatatataataca

SEQ ID NO: 56143 - DNA, 15 bp, Homo sapiens
atacatatataatac

SEQ ID NO: 56144 - DNA, 15 bp, Homo sapiens
aatacatatataata

SEQ ID NO: 56145 - DNA, 15 bp, Homo sapiens
taatacatatataat

SEQ ID NO: 56146 - DNA, 15 bp, Homo sapiens
ataatacatatataa

SEQ ID NO: 56147 - DNA, 15 bp, Homo sapiens
aataatacatatata

SEQ ID NO: 56148 - DNA, 15 bp, Homo sapiens
taataatacatatat

SEQ ID NO: 56149 - DNA, 15 bp, Homo sapiens
ataataatacatata

SEQ ID NO: 56150 - DNA, 15 bp, Homo sapiens
tataataatacatat

SEQ ID NO: 56151 - DNA, 15 bp, Homo sapiens
atataataatacata

SEQ ID NO: 56152 - DNA, 15 bp, Homo sapiens
tatataataatacat

SEQ ID NO: 56153 - DNA, 15 bp, Homo sapiens
ttatataataataca

SEQ ID NO: 56154 - DNA, 15 bp, Homo sapiens
attatataataatac

SEQ ID NO: 56155 - DNA, 15 bp, Homo sapiens
cattatataataata

SEQ ID NO: 56156 - DNA, 15 bp, Homo sapiens
ccattatataataat

SEQ ID NO: 56157 - DNA, 15 bp, Homo sapiens
gccattatataataa

SEQ ID NO: 56158 - DNA, 15 bp, Homo sapiens
tgccattatataata

SEQ ID NO: 56159 - DNA, 15 bp, Homo sapiens
gtgccattatataat

SEQ ID NO: 56160 - DNA, 15 bp, Homo sapiens
tgtgccattatataa

SEQ ID NO: 56161 - DNA, 15 bp, Homo sapiens
atgtgccattatata

SEQ ID NO: 56162 - DNA, 15 bp, Homo sapiens
tatgtgccattatat

SEQ ID NO: 56163 - DNA, 15 bp, Homo sapiens
atatgtgccattata

SEQ ID NO: 56164 - DNA, 15 bp, Homo sapiens
aatatgtgccattat

SEQ ID NO: 56165 - DNA, 15 bp, Homo sapiens
taatatgtgccatta

SEQ ID NO: 56166 - DNA, 15 bp, Homo sapiens
ataatatgtgccatt

SEQ ID NO: 56167 - DNA, 15 bp, Homo sapiens
tataatatgtgccat

SEQ ID NO: 56168 - DNA, 15 bp, Homo sapiens
atataatatgtgcca

SEQ ID NO: 56169 - DNA, 15 bp, Homo sapiens
tatataatatgtgcc

SEQ ID NO: 56170 - DNA, 15 bp, Homo sapiens
ttatataatatgtgc

SEQ ID NO: 56171 - DNA, 15 bp, Homo sapiens
attatataatatgtg

SEQ ID NO: 56172 - DNA, 15 bp, Homo sapiens
tattatataatatgt

SEQ ID NO: 56173 - DNA, 15 bp, Homo sapiens
atattatataatatg

SEQ ID NO: 56174 - DNA, 15 bp, Homo sapiens
gatattatataatat

SEQ ID NO: 56175 - DNA, 15 bp, Homo sapiens
agatattatataata

SEQ ID NO: 56176 - DNA, 15 bp, Homo sapiens
gagatattatataat

SEQ ID NO: 56177 - DNA, 15 bp, Homo sapiens
tgagatattatataa

SEQ ID NO: 56178 - DNA, 15 bp, Homo sapiens
ctgagatattatata

SEQ ID NO: 56179 - DNA, 15 bp, Homo sapiens
actgagatattatat

SEQ ID NO: 56180 - DNA, 15 bp, Homo sapiens
tactgagatattata

SEQ ID NO: 56181 - DNA, 15 bp, Homo sapiens
ttactgagatattat

SEQ ID NO: 56182 - DNA, 15 bp, Homo sapiens
gttactgagatatta

SEQ ID NO: 56183 - DNA, 15 bp, Homo sapiens
tgttactgagatatt

SEQ ID NO: 56184 - DNA, 15 bp, Homo sapiens
ttgttactgagatat

SEQ ID NO: 56185 - DNA, 15 bp, Homo sapiens
gttgttactgagata

SEQ ID NO: 56186 - DNA, 15 bp, Homo sapiens
tgttgttactgagat

SEQ ID NO: 56187 - DNA, 15 bp, Homo sapiens
atgttgttactgaga

SEQ ID NO: 56188 - DNA, 15 bp, Homo sapiens
catgttgttactgag

SEQ ID NO: 56189 - DNA, 15 bp, Homo sapiens
tcatgttgttactga

SEQ ID NO: 56190 - DNA, 15 bp, Homo sapiens
atcatgttgttactg

SEQ ID NO: 56191 - DNA, 15 bp, Homo sapiens
tatcatgttgttact

SEQ ID NO: 56192 - DNA, 15 bp, Homo sapiens
ttatcatgttgttac

SEQ ID NO: 56193 - DNA, 15 bp, Homo sapiens
tttatcatgttgtta

SEQ ID NO: 56194 - DNA, 15 bp, Homo sapiens
atttatcatgttgtt

SEQ ID NO: 56195 - DNA, 15 bp, Homo sapiens
tatttatcatgttgt

SEQ ID NO: 56196 - DNA, 15 bp, Homo sapiens
ttatttatcatgttg

SEQ ID NO: 56197 - DNA, 15 bp, Homo sapiens
attatttatcatgtt

SEQ ID NO: 56198 - DNA, 15 bp, Homo sapiens
tattatttatcatgt

SEQ ID NO: 56199 - DNA, 15 bp, Homo sapiens
ttattatttatcatg

SEQ ID NO: 56200 - DNA, 15 bp, Homo sapiens
gttattatttatcat

SEQ ID NO: 56201 - DNA, 15 bp, Homo sapiens
tgttattatttatca

SEQ ID NO: 56202 - DNA, 15 bp, Homo sapiens
ttgttattatttatc

SEQ ID NO: 56203 - DNA, 15 bp, Homo sapiens
attgttattatttat

SEQ ID NO: 56204 - DNA, 15 bp, Homo sapiens
aattgttattattta

SEQ ID NO: 56205 - DNA, 15 bp, Homo sapiens
taattgttattattt

SEQ ID NO: 56206 - DNA, 15 bp, Homo sapiens
ttaattgttattatt

SEQ ID NO: 56207 - DNA, 15 bp, Homo sapiens
tttaattgttattat

SEQ ID NO: 56208 - DNA, 15 bp, Homo sapiens
atttaattgttatta

SEQ ID NO: 56209 - DNA, 15 bp, Homo sapiens
tatttaattgttatt

SEQ ID NO: 56210 - DNA, 15 bp, Homo sapiens
ttatttaattgttat

SEQ ID NO: 56211 - DNA, 15 bp, Homo sapiens
tttatttaattgtta

SEQ ID NO: 56212 - DNA, 15 bp, Homo sapiens
atttatttaattgtt

SEQ ID NO: 56213 - DNA, 15 bp, Homo sapiens
aatttatttaattgt

SEQ ID NO: 56214 - DNA, 15 bp, Homo sapiens
taatttatttaattg

SEQ ID NO: 56215 - DNA, 15 bp, Homo sapiens
ttaatttatttaatt

SEQ ID NO: 56216 - DNA, 15 bp, Homo sapiens
attaatttatttaat

SEQ ID NO: 56217 - DNA, 15 bp, Homo sapiens
aattaatttatttaa

SEQ ID NO: 56218 - DNA, 15 bp, Homo sapiens
taattaatttattta

SEQ ID NO: 56219 - DNA, 15 bp, Homo sapiens
ttaattaatttattt

SEQ ID NO: 56220 - DNA, 15 bp, Homo sapiens
tttaattaatttatt

SEQ ID NO: 56221 - DNA, 15 bp, Homo sapiens
atttaattaatttat

SEQ ID NO: 56222 - DNA, 15 bp, Homo sapiens
tatttaattaattta

SEQ ID NO: 56223 - DNA, 15 bp, Homo sapiens
atatttaattaattt

SEQ ID NO: 56224 - DNA, 15 bp, Homo sapiens
catatttaattaatt

SEQ ID NO: 56225 - DNA, 15 bp, Homo sapiens
acatatttaattaat

SEQ ID NO: 56226 - DNA, 15 bp, Homo sapiens
tacatatttaattaa

SEQ ID NO: 56227 - DNA, 15 bp, Homo sapiens
atacatatttaatta

SEQ ID NO: 56228 - DNA, 15 bp, Homo sapiens
aatacatatttaatt

SEQ ID NO: 56229 - DNA, 15 bp, Homo sapiens
taatacatatttaat

SEQ ID NO: 56230 - DNA, 15 bp, Homo sapiens
ataatacatatttaa

SEQ ID NO: 56231 - DNA, 15 bp, Homo sapiens
cataatacatattta

SEQ ID NO: 56232 - DNA, 15 bp, Homo sapiens
acataatacatattt

SEQ ID NO: 56233 - DNA, 15 bp, Homo sapiens
aacataatacatatt

SEQ ID NO: 56234 - DNA, 15 bp, Homo sapiens
taacataatacatat

SEQ ID NO: 56235 - DNA, 15 bp, Homo sapiens
ttaacataatacata

SEQ ID NO: 56236 - DNA, 15 bp, Homo sapiens
attaacataatacat

SEQ ID NO: 56237 - DNA, 15 bp, Homo sapiens
tattaacataataca

SEQ ID NO: 56238 - DNA, 15 bp, Homo sapiens
atattaacataatac

SEQ ID NO: 56239 - DNA, 15 bp, Homo sapiens
tatattaacataata

SEQ ID NO: 56240 - DNA, 15 bp, Homo sapiens
atatattaacataat

SEQ ID NO: 56241 - DNA, 15 bp, Homo sapiens
tatatattaacataa

SEQ ID NO: 56242 - DNA, 15 bp, Homo sapiens
ttatatattaacata

SEQ ID NO: 56243 - DNA, 15 bp, Homo sapiens
attatatattaacat

SEQ ID NO: 56244 - DNA, 15 bp, Homo sapiens
tattatatattaaca

SEQ ID NO: 56245 - DNA, 15 bp, Homo sapiens
atattatatattaac

SEQ ID NO: 56246 - DNA, 15 bp, Homo sapiens
gatattatatattaa

SEQ ID NO: 56247 - DNA, 15 bp, Homo sapiens
agatattatatatta

SEQ ID NO: 56248 - DNA, 15 bp, Homo sapiens
gagatattatatatt

SEQ ID NO: 56249 - DNA, 15 bp, Homo sapiens
tgagatattatatat

SEQ ID NO: 56250 - DNA, 15 bp, Homo sapiens
attactgagatatta

SEQ ID NO: 56251 - DNA, 15 bp, Homo sapiens
tattactgagatatt

SEQ ID NO: 56252 - DNA, 15 bp, Homo sapiens
ctattactgagatat

SEQ ID NO: 56253 - DNA, 15 bp, Homo sapiens
gctattactgagata

SEQ ID NO: 56254 - DNA, 15 bp, Homo sapiens
agctattactgagat

SEQ ID NO: 56255 - DNA, 15 bp, Homo sapiens
gagctattactgaga

SEQ ID NO: 56256 - DNA, 15 bp, Homo sapiens
tgagctattactgag

SEQ ID NO: 56257 - DNA, 15 bp, Homo sapiens
ttgagctattactga

SEQ ID NO: 56258 - DNA, 15 bp, Homo sapiens
cttgagctattactg

SEQ ID NO: 56259 - DNA, 15 bp, Homo sapiens
tcttgagctattact

SEQ ID NO: 56260 - DNA, 15 bp, Homo sapiens
ttcttgagctattac

SEQ ID NO: 56261 - DNA, 15 bp, Homo sapiens
cttcttgagctatta

SEQ ID NO: 56262 - DNA, 15 bp, Homo sapiens
acttcttgagctatt

SEQ ID NO: 56263 - DNA, 15 bp, Homo sapiens
tacttcttgagctat

SEQ ID NO: 56264 - DNA, 15 bp, Homo sapiens
ctacttcttgagcta

SEQ ID NO: 56265 - DNA, 15 bp, Homo sapiens
actacttcttgagct

SEQ ID NO: 56266 - DNA, 15 bp, Homo sapiens
cactacttcttgagc

SEQ ID NO: 56267 - DNA, 15 bp, Homo sapiens
tcactacttcttgag

SEQ ID NO: 56268 - DNA, 15 bp, Homo sapiens
atcactacttcttga

SEQ ID NO: 56269 - DNA, 15 bp, Homo sapiens
aatcactacttcttg

SEQ ID NO: 56270 - DNA, 15 bp, Homo sapiens
taatcactacttctt

SEQ ID NO: 56271 - DNA, 15 bp, Homo sapiens
ataatcactacttct

SEQ ID NO: 56272 - DNA, 15 bp, Homo sapiens
aataatcactacttc

SEQ ID NO: 56273 - DNA, 15 bp, Homo sapiens
gaataatcactactt

SEQ ID NO: 56274 - DNA, 15 bp, Homo sapiens
agaataatcactact

SEQ ID NO: 56275 - DNA, 15 bp, Homo sapiens
gagaataatcactac

SEQ ID NO: 56276 - DNA, 15 bp, Homo sapiens
tgagaataatcacta

SEQ ID NO: 56277 - DNA, 15 bp, Homo sapiens
gtgagaataatcact

SEQ ID NO: 56278 - DNA, 15 bp, Homo sapiens
agtgagaataatcac

SEQ ID NO: 56279 - DNA, 15 bp, Homo sapiens
tagtgagaataatca

SEQ ID NO: 56280 - DNA, 15 bp, Homo sapiens
atagtgagaataatc

SEQ ID NO: 56281 - DNA, 15 bp, Homo sapiens
aatagtgagaataat

SEQ ID NO: 56282 - DNA, 15 bp, Homo sapiens
taatagtgagaataa

SEQ ID NO: 56283 - DNA, 15 bp, Homo sapiens
ataatagtgagaata

SEQ ID NO: 56284 - DNA, 15 bp, Homo sapiens
aataatagtgagaat

SEQ ID NO: 56285 - DNA, 15 bp, Homo sapiens
taataatagtgagaa

SEQ ID NO: 56286 - DNA, 15 bp, Homo sapiens
ttaataatagtgaga

SEQ ID NO: 56287 - DNA, 15 bp, Homo sapiens
attaataatagtgag

SEQ ID NO: 56288 - DNA, 15 bp, Homo sapiens
tattaataatagtga

SEQ ID NO: 56289 - DNA, 15 bp, Homo sapiens
ttattaataatagtg

SEQ ID NO: 56290 - DNA, 15 bp, Homo sapiens
tttattaataatagt

SEQ ID NO: 56291 - DNA, 15 bp, Homo sapiens
gtttattaataatag

SEQ ID NO: 56292 - DNA, 15 bp, Homo sapiens
cgtttattaataata

SEQ ID NO: 56293 - DNA, 15 bp, Homo sapiens
acgtttattaataat

SEQ ID NO: 56294 - DNA, 15 bp, Homo sapiens
aacgtttattaataa

SEQ ID NO: 56295 - DNA, 15 bp, Homo sapiens
aaacgtttattaata

SEQ ID NO: 56296 - DNA, 15 bp, Homo sapiens
taaacgtttattaat

SEQ ID NO: 56297 - DNA, 15 bp, Homo sapiens
ttaaacgtttattaa

SEQ ID NO: 56298 - DNA, 15 bp, Homo sapiens
attaaacgtttatta

SEQ ID NO: 56299 - DNA, 15 bp, Homo sapiens
cattaaacgtttatt

SEQ ID NO: 56300 - DNA, 15 bp, Homo sapiens
tcattaaacgtttat

SEQ ID NO: 56301 - DNA, 15 bp, Homo sapiens
ctcattaaacgttta

SEQ ID NO: 56302 - DNA, 15 bp, Homo sapiens
actcattaaacgttt

SEQ ID NO: 56303 - DNA, 15 bp, Homo sapiens
tactcattaaacgtt

SEQ ID NO: 56304 - DNA, 15 bp, Homo sapiens
gtactcattaaacgt

SEQ ID NO: 56305 - DNA, 15 bp, Homo sapiens
tgtactcattaaacg

SEQ ID NO: 56306 - DNA, 15 bp, Homo sapiens
gtgtactcattaaac

SEQ ID NO: 56307 - DNA, 15 bp, Homo sapiens
tgtgtactcattaaa

SEQ ID NO: 56308 - DNA, 15 bp, Homo sapiens
atgtgtactcattaa

SEQ ID NO: 56309 - DNA, 15 bp, Homo sapiens
gatgtgtactcatta

SEQ ID NO: 56310 - DNA, 15 bp, Homo sapiens
agatgtgtactcatt

SEQ ID NO: 56311 - DNA, 15 bp, Homo sapiens
aagatgtgtactcat

SEQ ID NO: 56312 - DNA, 15 bp, Homo sapiens
aaagatgtgtactca

SEQ ID NO: 56313 - DNA, 15 bp, Homo sapiens
caaagatgtgtactc

SEQ ID NO: 56314 - DNA, 15 bp, Homo sapiens
ccaaagatgtgtact

SEQ ID NO: 56315 - DNA, 15 bp, Homo sapiens
gccaaagatgtgtac

SEQ ID NO: 56316 - DNA, 15 bp, Homo sapiens
cgccaaagatgtgta

SEQ ID NO: 56317 - DNA, 15 bp, Homo sapiens
acgccaaagatgtgt

SEQ ID NO: 56318 - DNA, 15 bp, Homo sapiens
tacgccaaagatgtg

SEQ ID NO: 56319 - DNA, 15 bp, Homo sapiens
atacgccaaagatgt

SEQ ID NO: 56320 - DNA, 15 bp, Homo sapiens
gatacgccaaagatg

SEQ ID NO: 56321 - DNA, 15 bp, Homo sapiens
agatacgccaaagat

SEQ ID NO: 56322 - DNA, 15 bp, Homo sapiens
gagatacgccaaaga

SEQ ID NO: 56323 - DNA, 15 bp, Homo sapiens
agagatacgccaaag

SEQ ID NO: 56324 - DNA, 15 bp, Homo sapiens
cagagatacgccaaa

SEQ ID NO: 56325 - DNA, 15 bp, Homo sapiens
gcagagatacgccaa

SEQ ID NO: 56326 - DNA, 15 bp, Homo sapiens
tgcagagatacgcca

SEQ ID NO: 56327 - DNA, 15 bp, Homo sapiens
ttgcagagatacgcc

SEQ ID NO: 56328 - DNA, 15 bp, Homo sapiens
attgcagagatacgc

SEQ ID NO: 56329 - DNA, 15 bp, Homo sapiens
cattgcagagatacg

SEQ ID NO: 56330 - DNA, 15 bp, Homo sapiens
acattgcagagatac

SEQ ID NO: 56331 - DNA, 15 bp, Homo sapiens
aacattgcagagata

SEQ ID NO: 56332 - DNA, 15 bp, Homo sapiens
aaacattgcagagat

SEQ ID NO: 56333 - DNA, 15 bp, Homo sapiens
aaaacattgcagaga

SEQ ID NO: 56334 - DNA, 15 bp, Homo sapiens
taaaacattgcagag

SEQ ID NO: 56335 - DNA, 15 bp, Homo sapiens
ataaaacattgcaga

SEQ ID NO: 56336 - DNA, 15 bp, Homo sapiens
gataaaacattgcag

SEQ ID NO: 56337 - DNA, 15 bp, Homo sapiens
agataaaacattgca

SEQ ID NO: 56338 - DNA, 15 bp, Homo sapiens
cagataaaacattgc

SEQ ID NO: 56339 - DNA, 15 bp, Homo sapiens
ccagataaaacattg

SEQ ID NO: 56340 - DNA, 15 bp, Homo sapiens
accagataaaacatt

SEQ ID NO: 56341 - DNA, 15 bp, Homo sapiens
aaccagataaaacat

SEQ ID NO: 56342 - DNA, 15 bp, Homo sapiens
caaccagataaaaca

SEQ ID NO: 56343 - DNA, 15 bp, Homo sapiens
acaaccagataaaac

SEQ ID NO: 56344 - DNA, 15 bp, Homo sapiens
aacaaccagataaaa

SEQ ID NO: 56345 - DNA, 15 bp, Homo sapiens
caacaaccagataaa

SEQ ID NO: 56346 - DNA, 15 bp, Homo sapiens
acaacaaccagataa

SEQ ID NO: 56347 - DNA, 15 bp, Homo sapiens
aacaacaaccagata

SEQ ID NO: 56348 - DNA, 15 bp, Homo sapiens
gaacaacaaccagat

SEQ ID NO: 56349 - DNA, 15 bp, Homo sapiens
agaacaacaaccaga

SEQ ID NO: 56350 - DNA, 15 bp, Homo sapiens
tagaacaacaaccag

SEQ ID NO: 56351 - DNA, 15 bp, Homo sapiens
ttagaacaacaacca

SEQ ID NO: 56352 - DNA, 15 bp, Homo sapiens
cttagaacaacaacc

SEQ ID NO: 56353 - DNA, 15 bp, Homo sapiens
acttagaacaacaac

SEQ ID NO: 56354 - DNA, 15 bp, Homo sapiens
tacttagaacaacaa

SEQ ID NO: 56355 - DNA, 15 bp, Homo sapiens
ttacttagaacaaca

SEQ ID NO: 56356 - DNA, 15 bp, Homo sapiens
tttacttagaacaac

SEQ ID NO: 56357 - DNA, 15 bp, Homo sapiens
atttacttagaacaa

SEQ ID NO: 56358 - DNA, 15 bp, Homo sapiens
aatttacttagaaca

SEQ ID NO: 56359 - DNA, 15 bp, Homo sapiens
gaatttacttagaac

SEQ ID NO: 56360 - DNA, 15 bp, Homo sapiens
tgaatttacttagaa

SEQ ID NO: 56361 - DNA, 15 bp, Homo sapiens
ttgaatttacttaga

SEQ ID NO: 56362 - DNA, 15 bp, Homo sapiens
tttgaatttacttag

SEQ ID NO: 56363 - DNA, 15 bp, Homo sapiens
atttgaatttactta

SEQ ID NO: 56364 - DNA, 15 bp, Homo sapiens
aatttgaatttactt

SEQ ID NO: 56365 - DNA, 15 bp, Homo sapiens
taatttgaatttact

SEQ ID NO: 56366 - DNA, 15 bp, Homo sapiens
ttaatttgaatttac

SEQ ID NO: 56367 - DNA, 15 bp, Homo sapiens
cttaatttgaattta

SEQ ID NO: 56368 - DNA, 15 bp, Homo sapiens
tcttaatttgaattt

SEQ ID NO: 56369 - DNA, 15 bp, Homo sapiens
atcttaatttgaatt

SEQ ID NO: 56370 - DNA, 15 bp, Homo sapiens
tatcttaatttgaat

SEQ ID NO: 56371 - DNA, 15 bp, Homo sapiens
gtatcttaatttgaa

SEQ ID NO: 56372 - DNA, 15 bp, Homo sapiens
tgtatcttaatttga

SEQ ID NO: 56373 - DNA, 15 bp, Homo sapiens
atgtatcttaatttg

SEQ ID NO: 56374 - DNA, 15 bp, Homo sapiens
catgtatcttaattt

SEQ ID NO: 56375 - DNA, 15 bp, Homo sapiens
gcatgtatcttaatt

SEQ ID NO: 56376 - DNA, 15 bp, Homo sapiens
tgcatgtatcttaat

SEQ ID NO: 56377 - DNA, 15 bp, Homo sapiens
ttgcatgtatcttaa

SEQ ID NO: 56378 - DNA, 15 bp, Homo sapiens
tttgcatgtatctta

SEQ ID NO: 56379 - DNA, 15 bp, Homo sapiens
gtttgcatgtatctt

SEQ ID NO: 56380 - DNA, 15 bp, Homo sapiens
agtttgcatgtatct

SEQ ID NO: 56381 - DNA, 15 bp, Homo sapiens
tagtttgcatgtatc

SEQ ID NO: 56382 - DNA, 15 bp, Homo sapiens
ttagtttgcatgtat

SEQ ID NO: 56383 - DNA, 15 bp, Homo sapiens
cttagtttgcatgta

SEQ ID NO: 56384 - DNA, 15 bp, Homo sapiens
tcttagtttgcatgt

SEQ ID NO: 56385 - DNA, 15 bp, Homo sapiens
ctcttagtttgcatg

SEQ ID NO: 56386 - DNA, 15 bp, Homo sapiens
cctcttagtttgcat

SEQ ID NO: 56387 - DNA, 15 bp, Homo sapiens
gcctcttagtttgca

SEQ ID NO: 56388 - DNA, 15 bp, Homo sapiens
tgcctcttagtttgc

SEQ ID NO: 56389 - DNA, 15 bp, Homo sapiens
gtgcctcttagtttg

SEQ ID NO: 56390 - DNA, 15 bp, Homo sapiens
tgtgcctcttagttt

SEQ ID NO: 56391 - DNA, 15 bp, Homo sapiens
ttgtgcctcttagtt

SEQ ID NO: 56392 - DNA, 15 bp, Homo sapiens
attgtgcctcttagt

SEQ ID NO: 56393 - DNA, 15 bp, Homo sapiens
tattgtgcctcttag

SEQ ID NO: 56394 - DNA, 15 bp, Homo sapiens
ttattgtgcctctta

SEQ ID NO: 56395 - DNA, 15 bp, Homo sapiens
tttattgtgcctctt

SEQ ID NO: 56396 - DNA, 15 bp, Homo sapiens
atttattgtgcctct

SEQ ID NO: 56397 - DNA, 15 bp, Homo sapiens
catttattgtgcctc

SEQ ID NO: 56398 - DNA, 15 bp, Homo sapiens
acatttattgtgcct

SEQ ID NO: 56399 - DNA, 15 bp, Homo sapiens
tacatttattgtgcc

SEQ ID NO: 56400 - DNA, 15 bp, Homo sapiens
atacatttattgtgc

SEQ ID NO: 56401 - DNA, 15 bp, Homo sapiens
tatacatttattgtg

SEQ ID NO: 56402 - DNA, 15 bp, Homo sapiens
gtatacatttattgt

SEQ ID NO: 56403 - DNA, 15 bp, Homo sapiens
tgtatacatttattg

SEQ ID NO: 56404 - DNA, 15 bp, Homo sapiens
atgtatacatttatt

SEQ ID NO: 56405 - DNA, 15 bp, Homo sapiens
gatgtatacatttat

SEQ ID NO: 56406 - DNA, 15 bp, Homo sapiens
agatgtatacattta

SEQ ID NO: 56407 - DNA, 15 bp, Homo sapiens
aagatgtatacattt

SEQ ID NO: 56408 - DNA, 15 bp, Homo sapiens
gaagatgtatacatt

SEQ ID NO: 56409 - DNA, 15 bp, Homo sapiens
tgaagatgtatacat

SEQ ID NO: 56410 - DNA, 15 bp, Homo sapiens
atgaagatgtataca

SEQ ID NO: 56411 - DNA, 15 bp, Homo sapiens
aatgaagatgtatac

SEQ ID NO: 56412 - DNA, 15 bp, Homo sapiens
aaatgaagatgtata

SEQ ID NO: 56413 - DNA, 15 bp, Homo sapiens
caaatgaagatgtat

SEQ ID NO: 56414 - DNA, 15 bp, Homo sapiens
tcaaatgaagatgta

SEQ ID NO: 56415 - DNA, 15 bp, Homo sapiens
ttcaaatgaagatgt

SEQ ID NO: 56416 - DNA, 15 bp, Homo sapiens
attcaaatgaagatg

SEQ ID NO: 56417 - DNA, 15 bp, Homo sapiens
aattcaaatgaagat

SEQ ID NO: 56418 - DNA, 15 bp, Homo sapiens
aaattcaaatgaaga

SEQ ID NO: 56419 - DNA, 15 bp, Homo sapiens
taaattcaaatgaag

SEQ ID NO: 56420 - DNA, 15 bp, Homo sapiens
gtaaattcaaatgaa

SEQ ID NO: 56421 - DNA, 15 bp, Homo sapiens
agtaaattcaaatga

SEQ ID NO: 56422 - DNA, 15 bp, Homo sapiens
gagtaaattcaaatg

SEQ ID NO: 56423 - DNA, 15 bp, Homo sapiens
tgagtaaattcaaat

SEQ ID NO: 56424 - DNA, 15 bp, Homo sapiens
atgagtaaattcaaa

SEQ ID NO: 56425 - DNA, 15 bp, Homo sapiens
tatgagtaaattcaa

SEQ ID NO: 56426 - DNA, 15 bp, Homo sapiens
ttatgagtaaattca

SEQ ID NO: 56427 - DNA, 15 bp, Homo sapiens
tttatgagtaaattc

SEQ ID NO: 56428 - DNA, 15 bp, Homo sapiens
ttttatgagtaaatt

SEQ ID NO: 56429 - DNA, 15 bp, Homo sapiens
gttttatgagtaaat

SEQ ID NO: 56430 - DNA, 15 bp, Homo sapiens
tgttttatgagtaaa

SEQ ID NO: 56431 - DNA, 15 bp, Homo sapiens
ctgttttatgagtaa

SEQ ID NO: 56432 - DNA, 15 bp, Homo sapiens
tctgttttatgagta

SEQ ID NO: 56433 - DNA, 15 bp, Homo sapiens
ctctgttttatgagt

SEQ ID NO: 56434 - DNA, 15 bp, Homo sapiens
gctctgttttatgag

SEQ ID NO: 56435 - DNA, 15 bp, Homo sapiens
tgctctgttttatga

SEQ ID NO: 56436 - DNA, 15 bp, Homo sapiens
ttgctctgttttatg

SEQ ID NO: 56437 - DNA, 15 bp, Homo sapiens
gttgctctgttttat

SEQ ID NO: 56438 - DNA, 15 bp, Homo sapiens
tgttgctctgtttta

SEQ ID NO: 56439 - DNA, 15 bp, Homo sapiens
ttgttgctctgtttt

SEQ ID NO: 56440 - DNA, 15 bp, Homo sapiens
gttgttgctctgttt

SEQ ID NO: 56441 - DNA, 15 bp, Homo sapiens
ggttgttgctctgtt

SEQ ID NO: 56442 - DNA, 15 bp, Homo sapiens
tggttgttgctctgt

SEQ ID NO: 56443 - DNA, 15 bp, Homo sapiens
ctggttgttgctctg

SEQ ID NO: 56444 - DNA, 15 bp, Homo sapiens
tctggttgttgctct

SEQ ID NO: 56445 - DNA, 15 bp, Homo sapiens
atctggttgttgctc

SEQ ID NO: 56446 - DNA, 15 bp, Homo sapiens
tatctggttgttgct

SEQ ID NO: 56447 - DNA, 15 bp, Homo sapiens
ttatctggttgttgc

SEQ ID NO: 56448 - DNA, 15 bp, Homo sapiens
tttatctggttgttg

SEQ ID NO: 56449 - DNA, 15 bp, Homo sapiens
ttttatctggttgtt

SEQ ID NO: 56450 - DNA, 15 bp, Homo sapiens
gttttatctggttgt

SEQ ID NO: 56451 - DNA, 15 bp, Homo sapiens
tgttttatctggttg

SEQ ID NO: 56452 - DNA, 15 bp, Homo sapiens
atgttttatctggtt

SEQ ID NO: 56453 - DNA, 15 bp, Homo sapiens
aatgttttatctggt

SEQ ID NO: 56454 - DNA, 15 bp, Homo sapiens
caatgttttatctgg

SEQ ID NO: 56455 - DNA, 15 bp, Homo sapiens
gcaatgttttatctg

SEQ ID NO: 56456 - DNA, 15 bp, Homo sapiens
tgcaatgttttatct

SEQ ID NO: 56457 - DNA, 15 bp, Homo sapiens
ctgcaatgttttatc

SEQ ID NO: 56458 - DNA, 15 bp, Homo sapiens
tctgcaatgttttat

SEQ ID NO: 56459 - DNA, 15 bp, Homo sapiens
ctctgcaatgtttta

SEQ ID NO: 56460 - DNA, 15 bp, Homo sapiens
tctctgcaatgtttt

SEQ ID NO: 56461 - DNA, 15 bp, Homo sapiens
atctctgcaatgttt

SEQ ID NO: 56462 - DNA, 15 bp, Homo sapiens
tatctctgcaatgtt

SEQ ID NO: 56463 - DNA, 15 bp, Homo sapiens
gtatctctgcaatgt

SEQ ID NO: 56464 - DNA, 15 bp, Homo sapiens
cgtatctctgcaatg

SEQ ID NO: 56465 - DNA, 15 bp, Homo sapiens
gcgtatctctgcaat

SEQ ID NO: 56466 - DNA, 15 bp, Homo sapiens
ggcgtatctctgcaa

SEQ ID NO: 56467 - DNA, 15 bp, Homo sapiens
tggcgtatctctgca

SEQ ID NO: 56468 - DNA, 15 bp, Homo sapiens
ttggcgtatctctgc

SEQ ID NO: 56469 - DNA, 15 bp, Homo sapiens
tttggcgtatctctg

SEQ ID NO: 56470 - DNA, 15 bp, Homo sapiens
ctttggcgtatctct

SEQ ID NO: 56471 - DNA, 15 bp, Homo sapiens
tctttggcgtatctc

SEQ ID NO: 56472 - DNA, 15 bp, Homo sapiens
atctttggcgtatct

SEQ ID NO: 56473 - DNA, 15 bp, Homo sapiens
catctttggcgtatc

SEQ ID NO: 56474 - DNA, 15 bp, Homo sapiens
acatctttggcgtat

SEQ ID NO: 56475 - DNA, 15 bp, Homo sapiens
aacatctttggcgta

SEQ ID NO: 56476 - DNA, 15 bp, Homo sapiens
aaacatctttggcgt

SEQ ID NO: 56477 - DNA, 15 bp, Homo sapiens
taaacatctttggcg

SEQ ID NO: 56478 - DNA, 15 bp, Homo sapiens
ataaacatctttggc

SEQ ID NO: 56479 - DNA, 15 bp, Homo sapiens
aataaacatctttgg

SEQ ID NO: 56480 - DNA, 15 bp, Homo sapiens
aaataaacatctttg

SEQ ID NO: 56481 - DNA, 15 bp, Homo sapiens
caaataaacatcttt

SEQ ID NO: 56482 - DNA, 15 bp, Homo sapiens
tcaaataaacatctt

SEQ ID NO: 56483 - DNA, 15 bp, Homo sapiens
ttcaaataaacatct

SEQ ID NO: 56484 - DNA, 15 bp, Homo sapiens
attcaaataaacatc

SEQ ID NO: 56485 - DNA, 15 bp, Homo sapiens
aattcaaataaacat

SEQ ID NO: 56486 - DNA, 15 bp, Homo sapiens
aaattcaaataaaca

SEQ ID NO: 56487 - DNA, 15 bp, Homo sapiens
taaattcaaataaac

SEQ ID NO: 56488 - DNA, 15 bp, Homo sapiens
gtaaattcaaataaa

SEQ ID NO: 56489 - DNA, 15 bp, Homo sapiens
tgtaaattcaaataa

SEQ ID NO: 56490 - DNA, 15 bp, Homo sapiens
ttgtaaattcaaata

SEQ ID NO: 56491 - DNA, 15 bp, Homo sapiens
attgtaaattcaaat

SEQ ID NO: 56492 - DNA, 15 bp, Homo sapiens
aattgtaaattcaaa

SEQ ID NO: 56493 - DNA, 15 bp, Homo sapiens
aaattgtaaattcaa

SEQ ID NO: 56494 - DNA, 15 bp, Homo sapiens
caaattgtaaattca

SEQ ID NO: 56495 - DNA, 15 bp, Homo sapiens
tcaaattgtaaattc

SEQ ID NO: 56496 - DNA, 15 bp, Homo sapiens
ttcaaattgtaaatt

SEQ ID NO: 56497 - DNA, 15 bp, Homo sapiens
attcaaattgtaaat

SEQ ID NO: 56498 - DNA, 15 bp, Homo sapiens
aattcaaattgtaaa

SEQ ID NO: 56499 - DNA, 15 bp, Homo sapiens
caattcaaattgtaa

SEQ ID NO: 56500 - DNA, 15 bp, Homo sapiens
tcaattcaaattgta

SEQ ID NO: 56501 - DNA, 15 bp, Homo sapiens
ctcaattcaaattgt

SEQ ID NO: 56502 - DNA, 15 bp, Homo sapiens
actcaattcaaattg

SEQ ID NO: 56503 - DNA, 15 bp, Homo sapiens
aactcaattcaaatt

SEQ ID NO: 56504 - DNA, 15 bp, Homo sapiens
caactcaattcaaat

SEQ ID NO: 56505 - DNA, 15 bp, Homo sapiens
acaactcaattcaaa

SEQ ID NO: 56506 - DNA, 15 bp, Homo sapiens
cacaactcaattcaa

SEQ ID NO: 56507 - DNA, 15 bp, Homo sapiens
gcacaactcaattca

SEQ ID NO: 56508 - DNA, 15 bp, Homo sapiens
tgcacaactcaattc

SEQ ID NO: 56509 - DNA, 15 bp, Homo sapiens
atgcacaactcaatt

SEQ ID NO: 56510 - DNA, 15 bp, Homo sapiens
gatgcacaactcaat

SEQ ID NO: 56511 - DNA, 15 bp, Homo sapiens
agatgcacaactcaa

SEQ ID NO: 56512 - DNA, 15 bp, Homo sapiens
aagatgcacaactca

SEQ ID NO: 56513 - DNA, 15 bp, Homo sapiens
taagatgcacaactc

SEQ ID NO: 56514 - DNA, 15 bp, Homo sapiens
ctaagatgcacaact

SEQ ID NO: 56515 - DNA, 15 bp, Homo sapiens
actaagatgcacaac

SEQ ID NO: 56516 - DNA, 15 bp, Homo sapiens
aactaagatgcacaa

SEQ ID NO: 56517 - DNA, 15 bp, Homo sapiens
aaactaagatgcaca

SEQ ID NO: 56518 - DNA, 15 bp, Homo sapiens
caaactaagatgcac

SEQ ID NO: 56519 - DNA, 15 bp, Homo sapiens
tcaaactaagatgca

SEQ ID NO: 56520 - DNA, 15 bp, Homo sapiens
ctcaaactaagatgc

SEQ ID NO: 56521 - DNA, 15 bp, Homo sapiens
actcaaactaagatg

SEQ ID NO: 56522 - DNA, 15 bp, Homo sapiens
aactcaaactaagat

SEQ ID NO: 56523 - DNA, 15 bp, Homo sapiens
aaactcaaactaaga

SEQ ID NO: 56524 - DNA, 15 bp, Homo sapiens
taaactcaaactaag

SEQ ID NO: 56525 - DNA, 15 bp, Homo sapiens
gtaaactcaaactaa

SEQ ID NO: 56526 - DNA, 15 bp, Homo sapiens
tgtaaactcaaacta

SEQ ID NO: 56527 - DNA, 15 bp, Homo sapiens
gtgtaaactcaaact

SEQ ID NO: 56528 - DNA, 15 bp, Homo sapiens
agtgtaaactcaaac

SEQ ID NO: 56529 - DNA, 15 bp, Homo sapiens
cagtgtaaactcaaa

SEQ ID NO: 56530 - DNA, 15 bp, Homo sapiens
acagtgtaaactcaa

SEQ ID NO: 56531 - DNA, 15 bp, Homo sapiens
cacagtgtaaactca

SEQ ID NO: 56532 - DNA, 15 bp, Homo sapiens
acacagtgtaaactc

SEQ ID NO: 56533 - DNA, 15 bp, Homo sapiens
gacacagtgtaaact

SEQ ID NO: 56534 - DNA, 15 bp, Homo sapiens
ggacacagtgtaaac

SEQ ID NO: 56535 - DNA, 15 bp, Homo sapiens
gggacacagtgtaaa

SEQ ID NO: 56536 - DNA, 15 bp, Homo sapiens
agggacacagtgtaa

SEQ ID NO: 56537 - DNA, 15 bp, Homo sapiens
aagggacacagtgta

SEQ ID NO: 56538 - DNA, 15 bp, Homo sapiens
aaagggacacagtgt

SEQ ID NO: 56539 - DNA, 15 bp, Homo sapiens
aaaagggacacagtg

SEQ ID NO: 56540 - DNA, 15 bp, Homo sapiens
caaaagggacacagt

SEQ ID NO: 56541 - DNA, 15 bp, Homo sapiens
acaaaagggacacag

SEQ ID NO: 56542 - DNA, 15 bp, Homo sapiens
tacaaaagggacaca

SEQ ID NO: 56543 - DNA, 15 bp, Homo sapiens
atacaaaagggacac

SEQ ID NO: 56544 - DNA, 15 bp, Homo sapiens
aatacaaaagggaca

SEQ ID NO: 56545 - DNA, 15 bp, Homo sapiens
aaatacaaaagggac

SEQ ID NO: 56546 - DNA, 15 bp, Homo sapiens
gaaatacaaaaggga

SEQ ID NO: 56547 - DNA, 15 bp, Homo sapiens
tgaaatacaaaaggg

SEQ ID NO: 56548 - DNA, 15 bp, Homo sapiens
gtgaaatacaaaagg

SEQ ID NO: 56549 - DNA, 15 bp, Homo sapiens
agtgaaatacaaaag

SEQ ID NO: 56550 - DNA, 15 bp, Homo sapiens
gagtgaaatacaaaa

SEQ ID NO: 56551 - DNA, 15 bp, Homo sapiens
ggagtgaaatacaaa

SEQ ID NO: 56552 - DNA, 15 bp, Homo sapiens
tggagtgaaatacaa

SEQ ID NO: 56553 - DNA, 15 bp, Homo sapiens
ctggagtgaaataca

SEQ ID NO: 56554 - DNA, 15 bp, Homo sapiens
tctggagtgaaatac

SEQ ID NO: 56555 - DNA, 15 bp, Homo sapiens
ttctggagtgaaata

SEQ ID NO: 56556 - DNA, 15 bp, Homo sapiens
tttctggagtgaaat

SEQ ID NO: 56557 - DNA, 15 bp, Homo sapiens
gtttctggagtgaaa

SEQ ID NO: 56558 - DNA, 15 bp, Homo sapiens
ggtttctggagtgaa

SEQ ID NO: 56559 - DNA, 15 bp, Homo sapiens
gggtttctggagtga

SEQ ID NO: 56560 - DNA, 15 bp, Homo sapiens
tgggtttctggagtg

SEQ ID NO: 56561 - DNA, 15 bp, Homo sapiens
atgggtttctggagt

SEQ ID NO: 56562 - DNA, 15 bp, Homo sapiens
gatgggtttctggag

SEQ ID NO: 56563 - DNA, 15 bp, Homo sapiens
tgatgggtttctgga

SEQ ID NO: 56564 - DNA, 15 bp, Homo sapiens
atgatgggtttctgg

SEQ ID NO: 56565 - DNA, 15 bp, Homo sapiens
aatgatgggtttctg

SEQ ID NO: 56566 - DNA, 15 bp, Homo sapiens
caatgatgggtttct

SEQ ID NO: 56567 - DNA, 15 bp, Homo sapiens
tcaatgatgggtttc

SEQ ID NO: 56568 - DNA, 15 bp, Homo sapiens
gtcaatgatgggttt

SEQ ID NO: 56569 - DNA, 15 bp, Homo sapiens
agtcaatgatgggtt

SEQ ID NO: 56570 - DNA, 15 bp, Homo sapiens
cagtcaatgatgggt

SEQ ID NO: 56571 - DNA, 15 bp, Homo sapiens
gcagtcaatgatggg

SEQ ID NO: 56572 - DNA, 15 bp, Homo sapiens
tgcagtcaatgatgg

SEQ ID NO: 56573 - DNA, 15 bp, Homo sapiens
atgcagtcaatgatg

SEQ ID NO: 56574 - DNA, 15 bp, Homo sapiens
catgcagtcaatgat

SEQ ID NO: 56575 - DNA, 15 bp, Homo sapiens
acatgcagtcaatga

SEQ ID NO: 56576 - DNA, 15 bp, Homo sapiens
gacatgcagtcaatg

SEQ ID NO: 56577 - DNA, 15 bp, Homo sapiens
tgacatgcagtcaat

SEQ ID NO: 56578 - DNA, 15 bp, Homo sapiens
ctgacatgcagtcaa

SEQ ID NO: 56579 - DNA, 15 bp, Homo sapiens
tctgacatgcagtca

SEQ ID NO: 56580 - DNA, 15 bp, Homo sapiens
ttctgacatgcagtc

SEQ ID NO: 56581 - DNA, 15 bp, Homo sapiens
cttctgacatgcagt

SEQ ID NO: 56582 - DNA, 15 bp, Homo sapiens
tcttctgacatgcag

SEQ ID NO: 56583 - DNA, 15 bp, Homo sapiens
atcttctgacatgca

SEQ ID NO: 56584 - DNA, 15 bp, Homo sapiens
catcttctgacatgc

SEQ ID NO: 56585 - DNA, 15 bp, Homo sapiens
ccatcttctgacatg

SEQ ID NO: 56586 - DNA, 15 bp, Homo sapiens
accatcttctgacat

SEQ ID NO: 56587 - DNA, 15 bp, Homo sapiens
aaccatcttctgaca

SEQ ID NO: 56588 - DNA, 15 bp, Homo sapiens
taaccatcttctgac

SEQ ID NO: 56589 - DNA, 15 bp, Homo sapiens
gtaaccatcttctga

SEQ ID NO: 56590 - DNA, 15 bp, Homo sapiens
tgtaaccatcttctg

SEQ ID NO: 56591 - DNA, 15 bp, Homo sapiens
ttgtaaccatcttct

SEQ ID NO: 56592 - DNA, 15 bp, Homo sapiens
cttgtaaccatcttc

SEQ ID NO: 56593 - DNA, 15 bp, Homo sapiens
acttgtaaccatctt

SEQ ID NO: 56594 - DNA, 15 bp, Homo sapiens
aacttgtaaccatct

SEQ ID NO: 56595 - DNA, 15 bp, Homo sapiens
caacttgtaaccatc

SEQ ID NO: 56596 - DNA, 15 bp, Homo sapiens
ccaacttgtaaccat

SEQ ID NO: 56597 - DNA, 15 bp, Homo sapiens
tccaacttgtaacca

SEQ ID NO: 56598 - DNA, 15 bp, Homo sapiens
atccaacttgtaacc

SEQ ID NO: 56599 - DNA, 15 bp, Homo sapiens
gatccaacttgtaac

SEQ ID NO: 56600 - DNA, 15 bp, Homo sapiens
cgatccaacttgtaa

SEQ ID NO: 56601 - DNA, 15 bp, Homo sapiens
tcgatccaacttgta

SEQ ID NO: 56602 - DNA, 15 bp, Homo sapiens
ttcgatccaacttgt

SEQ ID NO: 56603 - DNA, 15 bp, Homo sapiens
attcgatccaacttg

SEQ ID NO: 56604 - DNA, 15 bp, Homo sapiens
gattcgatccaactt

SEQ ID NO: 56605 - DNA, 15 bp, Homo sapiens
tgattcgatccaact

SEQ ID NO: 56606 - DNA, 15 bp, Homo sapiens
ttgattcgatccaac

SEQ ID NO: 56607 - DNA, 15 bp, Homo sapiens
cttgattcgatccaa

SEQ ID NO: 56608 - DNA, 15 bp, Homo sapiens
ccttgattcgatcca

SEQ ID NO: 56609 - DNA, 15 bp, Homo sapiens
cccttgattcgatcc

SEQ ID NO: 56610 - DNA, 15 bp, Homo sapiens
acccttgattcgatc

SEQ ID NO: 56611 - DNA, 15 bp, Homo sapiens
cacccttgattcgat

SEQ ID NO: 56612 - DNA, 15 bp, Homo sapiens
tcacccttgattcga

SEQ ID NO: 56613 - DNA, 15 bp, Homo sapiens
ttcacccttgattcg

SEQ ID NO: 56614 - DNA, 15 bp, Homo sapiens
tttcacccttgattc

SEQ ID NO: 56615 - DNA, 15 bp, Homo sapiens
atttcacccttgatt

SEQ ID NO: 56616 - DNA, 15 bp, Homo sapiens
aatttcacccttgat

SEQ ID NO: 56617 - DNA, 15 bp, Homo sapiens
caatttcacccttga

SEQ ID NO: 56618 - DNA, 15 bp, Homo sapiens
tcaatttcacccttg

SEQ ID NO: 56619 - DNA, 15 bp, Homo sapiens
ttcaatttcaccctt

SEQ ID NO: 56620 - DNA, 15 bp, Homo sapiens
attcaatttcaccct

SEQ ID NO: 56621 - DNA, 15 bp, Homo sapiens
aattcaatttcaccc

SEQ ID NO: 56622 - DNA, 15 bp, Homo sapiens
gaattcaatttcacc

SEQ ID NO: 56623 - DNA, 15 bp, Homo sapiens
ggaattcaatttcac

SEQ ID NO: 56624 - DNA, 15 bp, Homo sapiens
tggaattcaatttca

SEQ ID NO: 56625 - DNA, 15 bp, Homo sapiens
atggaattcaatttc

SEQ ID NO: 56626 - DNA, 15 bp, Homo sapiens
tatggaattcaattt

SEQ ID NO: 56627 - DNA, 15 bp, Homo sapiens
ttatggaattcaatt

SEQ ID NO: 56628 - DNA, 15 bp, Homo sapiens
attatggaattcaat

SEQ ID NO: 56629 - DNA, 15 bp, Homo sapiens
cattatggaattcaa

SEQ ID NO: 56630 - DNA, 15 bp, Homo sapiens
acattatggaattca

SEQ ID NO: 56631 - DNA, 15 bp, Homo sapiens
cacattatggaattc

SEQ ID NO: 56632 - DNA, 15 bp, Homo sapiens
tcacattatggaatt

SEQ ID NO: 56633 - DNA, 15 bp, Homo sapiens
gtcacattatggaat

SEQ ID NO: 56634 - DNA, 15 bp, Homo sapiens
ggtcacattatggaa

SEQ ID NO: 56635 - DNA, 15 bp, Homo sapiens
aggtcacattatgga

SEQ ID NO: 56636 - DNA, 15 bp, Homo sapiens
aaggtcacattatgg

SEQ ID NO: 56637 - DNA, 15 bp, Homo sapiens
gaaggtcacattatg

SEQ ID NO: 56638 - DNA, 15 bp, Homo sapiens
ggaaggtcacattat

SEQ ID NO: 56639 - DNA, 15 bp, Homo sapiens
tggaaggtcacatta

SEQ ID NO: 56640 - DNA, 15 bp, Homo sapiens
atggaaggtcacatt

SEQ ID NO: 56641 - DNA, 15 bp, Homo sapiens
aatggaaggtcacat

SEQ ID NO: 56642 - DNA, 15 bp, Homo sapiens
taatggaaggtcaca

SEQ ID NO: 56643 - DNA, 15 bp, Homo sapiens
ataatggaaggtcac

SEQ ID NO: 56644 - DNA, 15 bp, Homo sapiens
gataatggaaggtca

SEQ ID NO: 56645 - DNA, 15 bp, Homo sapiens
ggataatggaaggtc

SEQ ID NO: 56646 - DNA, 15 bp, Homo sapiens
aggataatggaaggt

SEQ ID NO: 56647 - DNA, 15 bp, Homo sapiens
aaggataatggaagg

SEQ ID NO: 56648 - DNA, 15 bp, Homo sapiens
gaaggataatggaag

SEQ ID NO: 56649 - DNA, 15 bp, Homo sapiens
ggaaggataatggaa

SEQ ID NO: 56650 - DNA, 15 bp, Homo sapiens
tggaaggataatgga

SEQ ID NO: 56651 - DNA, 15 bp, Homo sapiens
ctggaaggataatgg

SEQ ID NO: 56652 - DNA, 15 bp, Homo sapiens
tctggaaggataatg

SEQ ID NO: 56653 - DNA, 15 bp, Homo sapiens
gtctggaaggataat

SEQ ID NO: 56654 - DNA, 15 bp, Homo sapiens
ggtctggaaggataa

SEQ ID NO: 56655 - DNA, 15 bp, Homo sapiens
tggtctggaaggata

SEQ ID NO: 56656 - DNA, 15 bp, Homo sapiens
ctggtctggaaggat

SEQ ID NO: 56657 - DNA, 15 bp, Homo sapiens
tctggtctggaagga

SEQ ID NO: 56658 - DNA, 15 bp, Homo sapiens
ctctggtctggaagg

SEQ ID NO: 56659 - DNA, 15 bp, Homo sapiens
cctctggtctggaag

SEQ ID NO: 56660 - DNA, 15 bp, Homo sapiens
acctctggtctggaa

SEQ ID NO: 56661 - DNA, 15 bp, Homo sapiens
cacctctggtctgga

SEQ ID NO: 56662 - DNA, 15 bp, Homo sapiens
tcacctctggtctgg

SEQ ID NO: 56663 - DNA, 15 bp, Homo sapiens
ttcacctctggtctg

SEQ ID NO: 56664 - DNA, 15 bp, Homo sapiens
cttcacctctggtct

SEQ ID NO: 56665 - DNA, 15 bp, Homo sapiens
ccttcacctctggtc

SEQ ID NO: 56666 - DNA, 15 bp, Homo sapiens
accttcacctctggt

SEQ ID NO: 56667 - DNA, 15 bp, Homo sapiens
caccttcacctctgg

SEQ ID NO: 56668 - DNA, 15 bp, Homo sapiens
tcaccttcacctctg

SEQ ID NO: 56669 - DNA, 15 bp, Homo sapiens
ctcaccttcacctct

SEQ ID NO: 56670 - DNA, 15 bp, Homo sapiens
actcaccttcacctc

SEQ ID NO: 56671 - DNA, 15 bp, Homo sapiens
cactcaccttcacct

SEQ ID NO: 56672 - DNA, 15 bp, Homo sapiens
gcactcaccttcacc

SEQ ID NO: 56673 - DNA, 15 bp, Homo sapiens
agcactcaccttcac

SEQ ID NO: 56674 - DNA, 15 bp, Homo sapiens
cagcactcaccttca

SEQ ID NO: 56675 - DNA, 15 bp, Homo sapiens
ccagcactcaccttc

SEQ ID NO: 56676 - DNA, 15 bp, Homo sapiens
accagcactcacctt

SEQ ID NO: 56677 - DNA, 15 bp, Homo sapiens
gaccagcactcacct

SEQ ID NO: 56678 - DNA, 15 bp, Homo sapiens
agaccagcactcacc

SEQ ID NO: 56679 - DNA, 15 bp, Homo sapiens
cagaccagcactcac

SEQ ID NO: 56680 - DNA, 15 bp, Homo sapiens
acagaccagcactca

SEQ ID NO: 56681 - DNA, 15 bp, Homo sapiens
aacagaccagcactc

SEQ ID NO: 56682 - DNA, 15 bp, Homo sapiens
gaacagaccagcact

SEQ ID NO: 56683 - DNA, 15 bp, Homo sapiens
ggaacagaccagcac

SEQ ID NO: 56684 - DNA, 15 bp, Homo sapiens
gggaacagaccagca

SEQ ID NO: 56685 - DNA, 15 bp, Homo sapiens
ggggaacagaccagc

SEQ ID NO: 56686 - DNA, 15 bp, Homo sapiens
tggggaacagaccag

SEQ ID NO: 56687 - DNA, 15 bp, Homo sapiens
ctggggaacagacca

SEQ ID NO: 56688 - DNA, 15 bp, Homo sapiens
tctggggaacagacc

SEQ ID NO: 56689 - DNA, 15 bp, Homo sapiens
ttctggggaacagac

SEQ ID NO: 56690 - DNA, 15 bp, Homo sapiens
attctggggaacaga

SEQ ID NO: 56691 - DNA, 15 bp, Homo sapiens
tattctggggaacag

SEQ ID NO: 56692 - DNA, 15 bp, Homo sapiens
ctattctggggaaca

SEQ ID NO: 56693 - DNA, 15 bp, Homo sapiens
actattctggggaac

SEQ ID NO: 56694 - DNA, 15 bp, Homo sapiens
tactattctggggaa

SEQ ID NO: 56695 - DNA, 15 bp, Homo sapiens
ttactattctgggga

SEQ ID NO: 56696 - DNA, 15 bp, Homo sapiens
tttactattctgggg

SEQ ID NO: 56697 - DNA, 15 bp, Homo sapiens
atttactattctggg

SEQ ID NO: 56698 - DNA, 15 bp, Homo sapiens
catttactattctgg

SEQ ID NO: 56699 - DNA, 15 bp, Homo sapiens
acatttactattctg

SEQ ID NO: 56700 - DNA, 15 bp, Homo sapiens
aacatttactattct

SEQ ID NO: 56701 - DNA, 15 bp, Homo sapiens
aaacatttactattc

SEQ ID NO: 56702 - DNA, 15 bp, Homo sapiens
aaaacatttactatt

SEQ ID NO: 56703 - DNA, 15 bp, Homo sapiens
gaaaacatttactat

SEQ ID NO: 56704 - DNA, 15 bp, Homo sapiens
agaaaacatttacta

SEQ ID NO: 56705 - DNA, 15 bp, Homo sapiens
aagaaaacatttact

SEQ ID NO: 56706 - DNA, 15 bp, Homo sapiens
gaagaaaacatttac

SEQ ID NO: 56707 - DNA, 15 bp, Homo sapiens
agaagaaaacattta

SEQ ID NO: 56708 - DNA, 15 bp, Homo sapiens
aagaagaaaacattt

SEQ ID NO: 56709 - DNA, 15 bp, Homo sapiens
gaagaagaaaacatt

SEQ ID NO: 56710 - DNA, 15 bp, Homo sapiens
cgaagaagaaaacat

SEQ ID NO: 56711 - DNA, 15 bp, Homo sapiens
tcgaagaagaaaaca

SEQ ID NO: 56712 - DNA, 15 bp, Homo sapiens
atcgaagaagaaaac

SEQ ID NO: 56713 - DNA, 15 bp, Homo sapiens
catcgaagaagaaaa

SEQ ID NO: 56714 - DNA, 15 bp, Homo sapiens
tcatcgaagaagaaa

SEQ ID NO: 56715 - DNA, 15 bp, Homo sapiens
atcatcgaagaagaa

SEQ ID NO: 56716 - DNA, 15 bp, Homo sapiens
aatcatcgaagaaga

SEQ ID NO: 56717 - DNA, 15 bp, Homo sapiens
aaatcatcgaagaag

SEQ ID NO: 56718 - DNA, 15 bp, Homo sapiens
taaatcatcgaagaa

SEQ ID NO: 56719 - DNA, 15 bp, Homo sapiens
ataaatcatcgaaga

SEQ ID NO: 56720 - DNA, 15 bp, Homo sapiens
aataaatcatcgaag

SEQ ID NO: 56721 - DNA, 15 bp, Homo sapiens
aaataaatcatcgaa

SEQ ID NO: 56722 - DNA, 15 bp, Homo sapiens
caaataaatcatcga

SEQ ID NO: 56723 - DNA, 15 bp, Homo sapiens
gcaaataaatcatcg

SEQ ID NO: 56724 - DNA, 15 bp, Homo sapiens
tgcaaataaatcatc

SEQ ID NO: 56725 - DNA, 15 bp, Homo sapiens
atgcaaataaatcat

SEQ ID NO: 56726 - DNA, 15 bp, Homo sapiens
tatgcaaataaatca

SEQ ID NO: 56727 - DNA, 15 bp, Homo sapiens
ttatgcaaataaatc

SEQ ID NO: 56728 - DNA, 15 bp, Homo sapiens
gttatgcaaataaat

SEQ ID NO: 56729 - DNA, 15 bp, Homo sapiens
ggttatgcaaataaa

SEQ ID NO: 56730 - DNA, 15 bp, Homo sapiens
tggttatgcaaataa

SEQ ID NO: 56731 - DNA, 15 bp, Homo sapiens
gtggttatgcaaata

SEQ ID NO: 56732 - DNA, 15 bp, Homo sapiens
tgtggttatgcaaat

SEQ ID NO: 56733 - DNA, 15 bp, Homo sapiens
ttgtggttatgcaaa

SEQ ID NO: 56734 - DNA, 15 bp, Homo sapiens
tttgtggttatgcaa

SEQ ID NO: 56735 - DNA, 15 bp, Homo sapiens
atttgtggttatgca

SEQ ID NO: 56736 - DNA, 15 bp, Homo sapiens
aatttgtggttatgc

SEQ ID NO: 56737 - DNA, 15 bp, Homo sapiens
caatttgtggttatg

SEQ ID NO: 56738 - DNA, 15 bp, Homo sapiens
gcaatttgtggttat

SEQ ID NO: 56739 - DNA, 15 bp, Homo sapiens
agcaatttgtggtta

SEQ ID NO: 56740 - DNA, 15 bp, Homo sapiens
gagcaatttgtggtt

SEQ ID NO: 56741 - DNA, 15 bp, Homo sapiens
tgagcaatttgtggt

SEQ ID NO: 56742 - DNA, 15 bp, Homo sapiens
atgagcaatttgtgg

SEQ ID NO: 56743 - DNA, 15 bp, Homo sapiens
aatgagcaatttgtg

SEQ ID NO: 56744 - DNA, 15 bp, Homo sapiens
aaatgagcaatttgt

SEQ ID NO: 56745 - DNA, 15 bp, Homo sapiens
aaaatgagcaatttg

SEQ ID NO: 56746 - DNA, 15 bp, Homo sapiens
gaaaatgagcaattt

SEQ ID NO: 56747 - DNA, 15 bp, Homo sapiens
agaaaatgagcaatt

SEQ ID NO: 56748 - DNA, 15 bp, Homo sapiens
cagaaaatgagcaat

SEQ ID NO: 56749 - DNA, 15 bp, Homo sapiens
tcagaaaatgagcaa

SEQ ID NO: 56750 - DNA, 15 bp, Homo sapiens
ttcagaaaatgagca

SEQ ID NO: 56751 - DNA, 15 bp, Homo sapiens
cttcagaaaatgagc

SEQ ID NO: 56752 - DNA, 15 bp, Homo sapiens
gcttcagaaaatgag

SEQ ID NO: 56753 - DNA, 15 bp, Homo sapiens
ggcttcagaaaatga

SEQ ID NO: 56754 - DNA, 15 bp, Homo sapiens
aggcttcagaaaatg

SEQ ID NO: 56755 - DNA, 15 bp, Homo sapiens
caggcttcagaaaat

SEQ ID NO: 56756 - DNA, 15 bp, Homo sapiens
tcaggcttcagaaaa

SEQ ID NO: 56757 - DNA, 15 bp, Homo sapiens
gtcaggcttcagaaa

SEQ ID NO: 56758 - DNA, 15 bp, Homo sapiens
agtcaggcttcagaa

SEQ ID NO: 56759 - DNA, 15 bp, Homo sapiens
gagtcaggcttcaga

SEQ ID NO: 56760 - DNA, 15 bp, Homo sapiens
agagtcaggcttcag

SEQ ID NO: 56761 - DNA, 15 bp, Homo sapiens
cagagtcaggcttca

SEQ ID NO: 56762 - DNA, 15 bp, Homo sapiens
acagagtcaggcttc

SEQ ID NO: 56763 - DNA, 15 bp, Homo sapiens
aacagagtcaggctt

SEQ ID NO: 56764 - DNA, 15 bp, Homo sapiens
aaacagagtcaggct

SEQ ID NO: 56765 - DNA, 15 bp, Homo sapiens
gaaacagagtcaggc

SEQ ID NO: 56766 - DNA, 15 bp, Homo sapiens
ggaaacagagtcagg

SEQ ID NO: 56767 - DNA, 15 bp, Homo sapiens
tggaaacagagtcag

SEQ ID NO: 56768 - DNA, 15 bp, Homo sapiens
ctggaaacagagtca

SEQ ID NO: 56769 - DNA, 15 bp, Homo sapiens
actggaaacagagtc

SEQ ID NO: 56770 - DNA, 15 bp, Homo sapiens
tactggaaacagagt

SEQ ID NO: 56771 - DNA, 15 bp, Homo sapiens
ttactggaaacagag

SEQ ID NO: 56772 - DNA, 15 bp, Homo sapiens
attactggaaacaga

SEQ ID NO: 56773 - DNA, 15 bp, Homo sapiens
tattactggaaacag

SEQ ID NO: 56774 - DNA, 15 bp, Homo sapiens
ctattactggaaaca

SEQ ID NO: 56775 - DNA, 15 bp, Homo sapiens
cctattactggaaac

SEQ ID NO: 56776 - DNA, 15 bp, Homo sapiens
ccctattactggaaa

SEQ ID NO: 56777 - DNA, 15 bp, Homo sapiens
tccctattactggaa

SEQ ID NO: 56778 - DNA, 15 bp, Homo sapiens
ttccctattactgga

SEQ ID NO: 56779 - DNA, 15 bp, Homo sapiens
attccctattactgg

SEQ ID NO: 56780 - DNA, 15 bp, Homo sapiens
cattccctattactg

SEQ ID NO: 56781 - DNA, 15 bp, Homo sapiens
ccattccctattact

SEQ ID NO: 56782 - DNA, 15 bp, Homo sapiens
tccattccctattac

SEQ ID NO: 56783 - DNA, 15 bp, Homo sapiens
ctccattccctatta

SEQ ID NO: 56784 - DNA, 15 bp, Homo sapiens
cctccattccctatt

SEQ ID NO: 56785 - DNA, 15 bp, Homo sapiens
acctccattccctat

SEQ ID NO: 56786 - DNA, 15 bp, Homo sapiens
cacctccattcccta

SEQ ID NO: 56787 - DNA, 15 bp, Homo sapiens
acacctccattccct

SEQ ID NO: 56788 - DNA, 15 bp, Homo sapiens
gacacctccattccc

SEQ ID NO: 56789 - DNA, 15 bp, Homo sapiens
agacacctccattcc

SEQ ID NO: 56790 - DNA, 15 bp, Homo sapiens
aagacacctccattc

SEQ ID NO: 56791 - DNA, 15 bp, Homo sapiens
aaagacacctccatt

SEQ ID NO: 56792 - DNA, 15 bp, Homo sapiens
gaaagacacctccat

SEQ ID NO: 56793 - DNA, 15 bp, Homo sapiens
agaaagacacctcca

SEQ ID NO: 56794 - DNA, 15 bp, Homo sapiens
gagaaagacacctcc

SEQ ID NO: 56795 - DNA, 15 bp, Homo sapiens
agagaaagacacctc

SEQ ID NO: 56796 - DNA, 15 bp, Homo sapiens
cagagaaagacacct

SEQ ID NO: 56797 - DNA, 15 bp, Homo sapiens
tcagagaaagacacc

SEQ ID NO: 56798 - DNA, 15 bp, Homo sapiens
ttcagagaaagacac

SEQ ID NO: 56799 - DNA, 15 bp, Homo sapiens
tttcagagaaagaca

SEQ ID NO: 56800 - DNA, 15 bp, Homo sapiens
ctttcagagaaagac

SEQ ID NO: 56801 - DNA, 15 bp, Homo sapiens
actttcagagaaaga

SEQ ID NO: 56802 - DNA, 15 bp, Homo sapiens
tactttcagagaaag

SEQ ID NO: 56803 - DNA, 15 bp, Homo sapiens
atactttcagagaaa

SEQ ID NO: 56804 - DNA, 15 bp, Homo sapiens
gatactttcagagaa

SEQ ID NO: 56805 - DNA, 15 bp, Homo sapiens
ggatactttcagaga

SEQ ID NO: 56806 - DNA, 15 bp, Homo sapiens
aggatactttcagag

SEQ ID NO: 56807 - DNA, 15 bp, Homo sapiens
gaggatactttcaga

SEQ ID NO: 56808 - DNA, 15 bp, Homo sapiens
cgaggatactttcag

SEQ ID NO: 56809 - DNA, 15 bp, Homo sapiens
ccgaggatactttca

SEQ ID NO: 56810 - DNA, 15 bp, Homo sapiens
cccgaggatactttc

SEQ ID NO: 56811 - DNA, 15 bp, Homo sapiens
acccgaggatacttt

SEQ ID NO: 56812 - DNA, 15 bp, Homo sapiens
cacccgaggatactt

SEQ ID NO: 56813 - DNA, 15 bp, Homo sapiens
acacccgaggatact

SEQ ID NO: 56814 - DNA, 15 bp, Homo sapiens
aacacccgaggatac

SEQ ID NO: 56815 - DNA, 15 bp, Homo sapiens
caacacccgaggata

SEQ ID NO: 56816 - DNA, 15 bp, Homo sapiens
ccaacacccgaggat

SEQ ID NO: 56817 - DNA, 15 bp, Homo sapiens
gccaacacccgagga

SEQ ID NO: 56818 - DNA, 15 bp, Homo sapiens
agccaacacccgagg

SEQ ID NO: 56819 - DNA, 15 bp, Homo sapiens
aagccaacacccgag

SEQ ID NO: 56820 - DNA, 15 bp, Homo sapiens
taagccaacacccga

SEQ ID NO: 56821 - DNA, 15 bp, Homo sapiens
ataagccaacacccg

SEQ ID NO: 56822 - DNA, 15 bp, Homo sapiens
gataagccaacaccc

SEQ ID NO: 56823 - DNA, 15 bp, Homo sapiens
agataagccaacacc

SEQ ID NO: 56824 - DNA, 15 bp, Homo sapiens
gagataagccaacac

SEQ ID NO: 56825 - DNA, 15 bp, Homo sapiens
tgagataagccaaca

SEQ ID NO: 56826 - DNA, 15 bp, Homo sapiens
ctgagataagccaac

SEQ ID NO: 56827 - DNA, 15 bp, Homo sapiens
cctgagataagccaa

SEQ ID NO: 56828 - DNA, 15 bp, Homo sapiens
gcctgagataagcca

SEQ ID NO: 56829 - DNA, 15 bp, Homo sapiens
tgcctgagataagcc

SEQ ID NO: 56830 - DNA, 15 bp, Homo sapiens
ttgcctgagataagc

SEQ ID NO: 56831 - DNA, 15 bp, Homo sapiens
gttgcctgagataag

SEQ ID NO: 56832 - DNA, 15 bp, Homo sapiens
tgttgcctgagataa

SEQ ID NO: 56833 - DNA, 15 bp, Homo sapiens
ctgttgcctgagata

SEQ ID NO: 56834 - DNA, 15 bp, Homo sapiens
tctgttgcctgagat

SEQ ID NO: 56835 - DNA, 15 bp, Homo sapiens
gtctgttgcctgaga

SEQ ID NO: 56836 - DNA, 15 bp, Homo sapiens
ggtctgttgcctgag

SEQ ID NO: 56837 - DNA, 15 bp, Homo sapiens
tggtctgttgcctga

SEQ ID NO: 56838 - DNA, 15 bp, Homo sapiens
gtggtctgttgcctg

SEQ ID NO: 56839 - DNA, 15 bp, Homo sapiens
tgtggtctgttgcct

SEQ ID NO: 56840 - DNA, 15 bp, Homo sapiens
atgtggtctgttgcc

SEQ ID NO: 56841 - DNA, 15 bp, Homo sapiens
aatgtggtctgttgc

SEQ ID NO: 56842 - DNA, 15 bp, Homo sapiens
gaatgtggtctgttg

SEQ ID NO: 56843 - DNA, 15 bp, Homo sapiens
ggaatgtggtctgtt

SEQ ID NO: 56844 - DNA, 15 bp, Homo sapiens
aggaatgtggtctgt

SEQ ID NO: 56845 - DNA, 15 bp, Homo sapiens
aaggaatgtggtctg

SEQ ID NO: 56846 - DNA, 15 bp, Homo sapiens
aaaggaatgtggtct

SEQ ID NO: 56847 - DNA, 15 bp, Homo sapiens
caaaggaatgtggtc

SEQ ID NO: 56848 - DNA, 15 bp, Homo sapiens
acaaaggaatgtggt

SEQ ID NO: 56849 - DNA, 15 bp, Homo sapiens
cacaaaggaatgtgg

SEQ ID NO: 56850 - DNA, 15 bp, Homo sapiens
tcacaaaggaatgtg

SEQ ID NO: 56851 - DNA, 15 bp, Homo sapiens
atcacaaaggaatgt

SEQ ID NO: 56852 - DNA, 15 bp, Homo sapiens
tatcacaaaggaatg

SEQ ID NO: 56853 - DNA, 15 bp, Homo sapiens
ttatcacaaaggaat

SEQ ID NO: 56854 - DNA, 15 bp, Homo sapiens
gttatcacaaaggaa

SEQ ID NO: 56855 - DNA, 15 bp, Homo sapiens
ggttatcacaaagga

SEQ ID NO: 56856 - DNA, 15 bp, Homo sapiens
tggttatcacaaagg

SEQ ID NO: 56857 - DNA, 15 bp, Homo sapiens
atggttatcacaaag

SEQ ID NO: 56858 - DNA, 15 bp, Homo sapiens
tatggttatcacaaa

SEQ ID NO: 56859 - DNA, 15 bp, Homo sapiens
ttatggttatcacaa

SEQ ID NO: 56860 - DNA, 15 bp, Homo sapiens
attatggttatcaca

SEQ ID NO: 56861 - DNA, 15 bp, Homo sapiens
cattatggttatcac

SEQ ID NO: 56862 - DNA, 15 bp, Homo sapiens
acattatggttatca

SEQ ID NO: 56863 - DNA, 15 bp, Homo sapiens
cacattatggttatc

SEQ ID NO: 56864 - DNA, 15 bp, Homo sapiens
gcacattatggttat

SEQ ID NO: 56865 - DNA, 15 bp, Homo sapiens
tgcacattatggtta

SEQ ID NO: 56866 - DNA, 15 bp, Homo sapiens
ttgcacattatggtt

SEQ ID NO: 56867 - DNA, 15 bp, Homo sapiens
tttgcacattatggt

SEQ ID NO: 56868 - DNA, 15 bp, Homo sapiens
atttgcacattatgg

SEQ ID NO: 56869 - DNA, 15 bp, Homo sapiens
gatttgcacattatg

SEQ ID NO: 56870 - DNA, 15 bp, Homo sapiens
ggatttgcacattat

SEQ ID NO: 56871 - DNA, 15 bp, Homo sapiens
gggatttgcacatta

SEQ ID NO: 56872 - DNA, 15 bp, Homo sapiens
ggggatttgcacatt

SEQ ID NO: 56873 - DNA, 15 bp, Homo sapiens
aggggatttgcacat

SEQ ID NO: 56874 - DNA, 15 bp, Homo sapiens
caggggatttgcaca

SEQ ID NO: 56875 - DNA, 15 bp, Homo sapiens
ccaggggatttgcac

SEQ ID NO: 56876 - DNA, 15 bp, Homo sapiens
accaggggatttgca

SEQ ID NO: 56877 - DNA, 15 bp, Homo sapiens
aaccaggggatttgc

SEQ ID NO: 56878 - DNA, 15 bp, Homo sapiens
caaccaggggatttg

SEQ ID NO: 56879 - DNA, 15 bp, Homo sapiens
ccaaccaggggattt

SEQ ID NO: 56880 - DNA, 15 bp, Homo sapiens
cccaaccaggggatt

SEQ ID NO: 56881 - DNA, 15 bp, Homo sapiens
tcccaaccaggggat

SEQ ID NO: 56882 - DNA, 15 bp, Homo sapiens
gtcccaaccagggga

SEQ ID NO: 56883 - DNA, 15 bp, Homo sapiens
tgtcccaaccagggg

SEQ ID NO: 56884 - DNA, 15 bp, Homo sapiens
gtgtcccaaccaggg

SEQ ID NO: 56885 - DNA, 15 bp, Homo sapiens
tgtgtcccaaccagg

SEQ ID NO: 56886 - DNA, 15 bp, Homo sapiens
ctgtgtcccaaccag

SEQ ID NO: 56887 - DNA, 15 bp, Homo sapiens
actgtgtcccaacca

SEQ ID NO: 56888 - DNA, 15 bp, Homo sapiens
gactgtgtcccaacc

SEQ ID NO: 56889 - DNA, 15 bp, Homo sapiens
agactgtgtcccaac

SEQ ID NO: 56890 - DNA, 15 bp, Homo sapiens
cagactgtgtcccaa

SEQ ID NO: 56891 - DNA, 15 bp, Homo sapiens
ccagactgtgtccca

SEQ ID NO: 56892 - DNA, 15 bp, Homo sapiens
gccagactgtgtccc

SEQ ID NO: 56893 - DNA, 15 bp, Homo sapiens
tgccagactgtgtcc

SEQ ID NO: 56894 - DNA, 15 bp, Homo sapiens
ctgccagactgtgtc

SEQ ID NO: 56895 - DNA, 15 bp, Homo sapiens
actgccagactgtgt

SEQ ID NO: 56896 - DNA, 15 bp, Homo sapiens
tactgccagactgtg

SEQ ID NO: 56897 - DNA, 15 bp, Homo sapiens
gtactgccagactgt

SEQ ID NO: 56898 - DNA, 15 bp, Homo sapiens
tgtactgccagactg

SEQ ID NO: 56899 - DNA, 15 bp, Homo sapiens
atgtactgccagact

SEQ ID NO: 56900 - DNA, 15 bp, Homo sapiens
aatgtactgccagac

SEQ ID NO: 56901 - DNA, 15 bp, Homo sapiens
gaatgtactgccaga

SEQ ID NO: 56902 - DNA, 15 bp, Homo sapiens
tgaatgtactgccag

SEQ ID NO: 56903 - DNA, 15 bp, Homo sapiens
ctgaatgtactgcca

SEQ ID NO: 56904 - DNA, 15 bp, Homo sapiens
cctgaatgtactgcc

SEQ ID NO: 56905 - DNA, 15 bp, Homo sapiens
gcctgaatgtactgc

SEQ ID NO: 56906 - DNA, 15 bp, Homo sapiens
agcctgaatgtactg

SEQ ID NO: 56907 - DNA, 15 bp, Homo sapiens
tagcctgaatgtact

SEQ ID NO: 56908 - DNA, 15 bp, Homo sapiens
ttagcctgaatgtac

SEQ ID NO: 56909 - DNA, 15 bp, Homo sapiens
tttagcctgaatgta

SEQ ID NO: 56910 - DNA, 15 bp, Homo sapiens
atttagcctgaatgt

SEQ ID NO: 56911 - DNA, 15 bp, Homo sapiens
catttagcctgaatg

SEQ ID NO: 56912 - DNA, 15 bp, Homo sapiens
tcatttagcctgaat

SEQ ID NO: 56913 - DNA, 15 bp, Homo sapiens
ttcatttagcctgaa

SEQ ID NO: 56914 - DNA, 15 bp, Homo sapiens
gttcatttagcctga

SEQ ID NO: 56915 - DNA, 15 bp, Homo sapiens
agttcatttagcctg

SEQ ID NO: 56916 - DNA, 15 bp, Homo sapiens
cagttcatttagcct

SEQ ID NO: 56917 - DNA, 15 bp, Homo sapiens
acagttcatttagcc

SEQ ID NO: 56918 - DNA, 15 bp, Homo sapiens
tacagttcatttagc

SEQ ID NO: 56919 - DNA, 15 bp, Homo sapiens
atacagttcatttag

SEQ ID NO: 56920 - DNA, 15 bp, Homo sapiens
catacagttcattta

SEQ ID NO: 56921 - DNA, 15 bp, Homo sapiens
tcatacagttcattt

SEQ ID NO: 56922 - DNA, 15 bp, Homo sapiens
gtcatacagttcatt

SEQ ID NO: 56923 - DNA, 15 bp, Homo sapiens
cgtcatacagttcat

SEQ ID NO: 56924 - DNA, 15 bp, Homo sapiens
gcgtcatacagttca

SEQ ID NO: 56925 - DNA, 15 bp, Homo sapiens
agcgtcatacagttc

SEQ ID NO: 56926 - DNA, 15 bp, Homo sapiens
gagcgtcatacagtt

SEQ ID NO: 56927 - DNA, 15 bp, Homo sapiens
agagcgtcatacagt

SEQ ID NO: 56928 - DNA, 15 bp, Homo sapiens
cagagcgtcatacag

SEQ ID NO: 56929 - DNA, 15 bp, Homo sapiens
acagagcgtcataca

SEQ ID NO: 56930 - DNA, 15 bp, Homo sapiens
aacagagcgtcatac

SEQ ID NO: 56931 - DNA, 15 bp, Homo sapiens
caacagagcgtcata

SEQ ID NO: 56932 - DNA, 15 bp, Homo sapiens
tcaacagagcgtcat

SEQ ID NO: 56933 - DNA, 15 bp, Homo sapiens
ttcaacagagcgtca

SEQ ID NO: 56934 - DNA, 15 bp, Homo sapiens
tttcaacagagcgtc

SEQ ID NO: 56935 - DNA, 15 bp, Homo sapiens
atttcaacagagcgt

SEQ ID NO: 56936 - DNA, 15 bp, Homo sapiens
catttcaacagagcg

SEQ ID NO: 56937 - DNA, 15 bp, Homo sapiens
tcatttcaacagagc

SEQ ID NO: 56938 - DNA, 15 bp, Homo sapiens
ctcatttcaacagag

SEQ ID NO: 56939 - DNA, 15 bp, Homo sapiens
actcatttcaacaga

SEQ ID NO: 56940 - DNA, 15 bp, Homo sapiens
cactcatttcaacag

SEQ ID NO: 56941 - DNA, 15 bp, Homo sapiens
ccactcatttcaaca

SEQ ID NO: 56942 - DNA, 15 bp, Homo sapiens
gccactcatttcaac

SEQ ID NO: 56943 - DNA, 15 bp, Homo sapiens
tgccactcatttcaa

SEQ ID NO: 56944 - DNA, 15 bp, Homo sapiens
ctgccactcatttca

SEQ ID NO: 56945 - DNA, 15 bp, Homo sapiens
cctgccactcatttc

SEQ ID NO: 56946 - DNA, 15 bp, Homo sapiens
acctgccactcattt

SEQ ID NO: 56947 - DNA, 15 bp, Homo sapiens
gacctgccactcatt

SEQ ID NO: 56948 - DNA, 15 bp, Homo sapiens
ggacctgccactcat

SEQ ID NO: 56949 - DNA, 15 bp, Homo sapiens
aggacctgccactca

SEQ ID NO: 56950 - DNA, 15 bp, Homo sapiens
caggacctgccactc

SEQ ID NO: 56951 - DNA, 15 bp, Homo sapiens
acaggacctgccact

SEQ ID NO: 56952 - DNA, 15 bp, Homo sapiens
gacaggacctgccac

SEQ ID NO: 56953 - DNA, 15 bp, Homo sapiens
agacaggacctgcca

SEQ ID NO: 56954 - DNA, 15 bp, Homo sapiens
aagacaggacctgcc

SEQ ID NO: 56955 - DNA, 15 bp, Homo sapiens
aaagacaggacctgc

SEQ ID NO: 56956 - DNA, 15 bp, Homo sapiens
gaaagacaggacctg

SEQ ID NO: 56957 - DNA, 15 bp, Homo sapiens
ggaaagacaggacct

SEQ ID NO: 56958 - DNA, 15 bp, Homo sapiens
tggaaagacaggacc

SEQ ID NO: 56959 - DNA, 15 bp, Homo sapiens
atggaaagacaggac

SEQ ID NO: 56960 - DNA, 15 bp, Homo sapiens
catggaaagacagga

SEQ ID NO: 56961 - DNA, 15 bp, Homo sapiens
gcatggaaagacagg

SEQ ID NO: 56962 - DNA, 15 bp, Homo sapiens
tgcatggaaagacag

SEQ ID NO: 56963 - DNA, 15 bp, Homo sapiens
ttgcatggaaagaca

SEQ ID NO: 56964 - DNA, 15 bp, Homo sapiens
cttgcatggaaagac

SEQ ID NO: 56965 - DNA, 15 bp, Homo sapiens
acttgcatggaaaga

SEQ ID NO: 56966 - DNA, 15 bp, Homo sapiens
cacttgcatggaaag

SEQ ID NO: 56967 - DNA, 15 bp, Homo sapiens
gcacttgcatggaaa

SEQ ID NO: 56968 - DNA, 15 bp, Homo sapiens
agcacttgcatggaa

SEQ ID NO: 56969 - DNA, 15 bp, Homo sapiens
tagcacttgcatgga

SEQ ID NO: 56970 - DNA, 15 bp, Homo sapiens
ctagcacttgcatgg

SEQ ID NO: 56971 - DNA, 15 bp, Homo sapiens
tctagcacttgcatg

SEQ ID NO: 56972 - DNA, 15 bp, Homo sapiens
atctagcacttgcat

SEQ ID NO: 56973 - DNA, 15 bp, Homo sapiens
tatctagcacttgca

SEQ ID NO: 56974 - DNA, 15 bp, Homo sapiens
ttatctagcacttgc

SEQ ID NO: 56975 - DNA, 15 bp, Homo sapiens
tttatctagcacttg

SEQ ID NO: 56976 - DNA, 15 bp, Homo sapiens
atttatctagcactt

SEQ ID NO: 56977 - DNA, 15 bp, Homo sapiens
catttatctagcact

SEQ ID NO: 56978 - DNA, 15 bp, Homo sapiens
tcatttatctagcac

SEQ ID NO: 56979 - DNA, 15 bp, Homo sapiens
gtcatttatctagca

SEQ ID NO: 56980 - DNA, 15 bp, Homo sapiens
tgtcatttatctagc

SEQ ID NO: 56981 - DNA, 15 bp, Homo sapiens
ttgtcatttatctag

SEQ ID NO: 56982 - DNA, 15 bp, Homo sapiens
cttgtcatttatcta

SEQ ID NO: 56983 - DNA, 15 bp, Homo sapiens
ccttgtcatttatct

SEQ ID NO: 56984 - DNA, 15 bp, Homo sapiens
gccttgtcatttatc

SEQ ID NO: 56985 - DNA, 15 bp, Homo sapiens
tgccttgtcatttat

SEQ ID NO: 56986 - DNA, 15 bp, Homo sapiens
ttgccttgtcattta

SEQ ID NO: 56987 - DNA, 15 bp, Homo sapiens
attgccttgtcattt

SEQ ID NO: 56988 - DNA, 15 bp, Homo sapiens
aattgccttgtcatt

SEQ ID NO: 56989 - DNA, 15 bp, Homo sapiens
taattgccttgtcat

SEQ ID NO: 56990 - DNA, 15 bp, Homo sapiens
gtaattgccttgtca

SEQ ID NO: 56991 - DNA, 15 bp, Homo sapiens
tgtaattgccttgtc

SEQ ID NO: 56992 - DNA, 15 bp, Homo sapiens
ttgtaattgccttgt

SEQ ID NO: 56993 - DNA, 15 bp, Homo sapiens
gttgtaattgccttg

SEQ ID NO: 56994 - DNA, 15 bp, Homo sapiens
tgttgtaattgcctt

SEQ ID NO: 56995 - DNA, 15 bp, Homo sapiens
ttgttgtaattgcct

SEQ ID NO: 56996 - DNA, 15 bp, Homo sapiens
attgttgtaattgcc

SEQ ID NO: 56997 - DNA, 15 bp, Homo sapiens
gattgttgtaattgc

SEQ ID NO: 56998 - DNA, 15 bp, Homo sapiens
tgattgttgtaattg

SEQ ID NO: 56999 - DNA, 15 bp, Homo sapiens
ctgattgttgtaatt

SEQ ID NO: 57000 - DNA, 15 bp, Homo sapiens
cctgattgttgtaat

SEQ ID NO: 57001 - DNA, 15 bp, Homo sapiens
tcctgattgttgtaa

SEQ ID NO: 57002 - DNA, 15 bp, Homo sapiens
ttcctgattgttgta

SEQ ID NO: 57003 - DNA, 15 bp, Homo sapiens
cttcctgattgttgt

SEQ ID NO: 57004 - DNA, 15 bp, Homo sapiens
gcttcctgattgttg

SEQ ID NO: 57005 - DNA, 15 bp, Homo sapiens
tgcttcctgattgtt

SEQ ID NO: 57006 - DNA, 15 bp, Homo sapiens
gtgcttcctgattgt

SEQ ID NO: 57007 - DNA, 15 bp, Homo sapiens
tgtgcttcctgattg

SEQ ID NO: 57008 - DNA, 15 bp, Homo sapiens
ctgtgcttcctgatt

SEQ ID NO: 57009 - DNA, 15 bp, Homo sapiens
cctgtgcttcctgat

SEQ ID NO: 57010 - DNA, 15 bp, Homo sapiens
acctgtgcttcctga

SEQ ID NO: 57011 - DNA, 15 bp, Homo sapiens
aacctgtgcttcctg

SEQ ID NO: 57012 - DNA, 15 bp, Homo sapiens
gaacctgtgcttcct

SEQ ID NO: 57013 - DNA, 15 bp, Homo sapiens
agaacctgtgcttcc

SEQ ID NO: 57014 - DNA, 15 bp, Homo sapiens
aagaacctgtgcttc

SEQ ID NO: 57015 - DNA, 15 bp, Homo sapiens
gaagaacctgtgctt

SEQ ID NO: 57016 - DNA, 15 bp, Homo sapiens
ggaagaacctgtgct

SEQ ID NO: 57017 - DNA, 15 bp, Homo sapiens
gggaagaacctgtgc

SEQ ID NO: 57018 - DNA, 15 bp, Homo sapiens
tgggaagaacctgtg

SEQ ID NO: 57019 - DNA, 15 bp, Homo sapiens
ttgggaagaacctgt

SEQ ID NO: 57020 - DNA, 15 bp, Homo sapiens
gttgggaagaacctg

SEQ ID NO: 57021 - DNA, 15 bp, Homo sapiens
ggttgggaagaacct

SEQ ID NO: 57022 - DNA, 15 bp, Homo sapiens
aggttgggaagaacc

SEQ ID NO: 57023 - DNA, 15 bp, Homo sapiens
aaggttgggaagaac

SEQ ID NO: 57024 - DNA, 15 bp, Homo sapiens
gaaggttgggaagaa

SEQ ID NO: 57025 - DNA, 15 bp, Homo sapiens
cgaaggttgggaaga

SEQ ID NO: 57026 - DNA, 15 bp, Homo sapiens
gcgaaggttgggaag

SEQ ID NO: 57027 - DNA, 15 bp, Homo sapiens
tgcgaaggttgggaa

SEQ ID NO: 57028 - DNA, 15 bp, Homo sapiens
ctgcgaaggttggga

SEQ ID NO: 57029 - DNA, 15 bp, Homo sapiens
tctgcgaaggttggg

SEQ ID NO: 57030 - DNA, 15 bp, Homo sapiens
ctctgcgaaggttgg

SEQ ID NO: 57031 - DNA, 15 bp, Homo sapiens
tctctgcgaaggttg

SEQ ID NO: 57032 - DNA, 15 bp, Homo sapiens
gtctctgcgaaggtt

SEQ ID NO: 57033 - DNA, 15 bp, Homo sapiens
agtctctgcgaaggt

SEQ ID NO: 57034 - DNA, 15 bp, Homo sapiens
cagtctctgcgaagg

SEQ ID NO: 57035 - DNA, 15 bp, Homo sapiens
gcagtctctgcgaag

SEQ ID NO: 57036 - DNA, 15 bp, Homo sapiens
tgcagtctctgcgaa

SEQ ID NO: 57037 - DNA, 15 bp, Homo sapiens
ctgcagtctctgcga

SEQ ID NO: 57038 - DNA, 15 bp, Homo sapiens
tctgcagtctctgcg

SEQ ID NO: 57039 - DNA, 15 bp, Homo sapiens
ttctgcagtctctgc

SEQ ID NO: 57040 - DNA, 15 bp, Homo sapiens
tttctgcagtctctg

SEQ ID NO: 57041 - DNA, 15 bp, Homo sapiens
ctttctgcagtctct

SEQ ID NO: 57042 - DNA, 15 bp, Homo sapiens
actttctgcagtctc

SEQ ID NO: 57043 - DNA, 15 bp, Homo sapiens
cactttctgcagtct

SEQ ID NO: 57044 - DNA, 15 bp, Homo sapiens
ccactttctgcagtc

SEQ ID NO: 57045 - DNA, 15 bp, Homo sapiens
tccactttctgcagt

SEQ ID NO: 57046 - DNA, 15 bp, Homo sapiens
ttccactttctgcag

SEQ ID NO: 57047 - DNA, 15 bp, Homo sapiens
cttccactttctgca

SEQ ID NO: 57048 - DNA, 15 bp, Homo sapiens
tcttccactttctgc

SEQ ID NO: 57049 - DNA, 15 bp, Homo sapiens
gtcttccactttctg

SEQ ID NO: 57050 - DNA, 15 bp, Homo sapiens
tgtcttccactttct

SEQ ID NO: 57051 - DNA, 15 bp, Homo sapiens
gtgtcttccactttc

SEQ ID NO: 57052 - DNA, 15 bp, Homo sapiens
agtgtcttccacttt

SEQ ID NO: 57053 - DNA, 15 bp, Homo sapiens
cagtgtcttccactt

SEQ ID NO: 57054 - DNA, 15 bp, Homo sapiens
tcagtgtcttccact

SEQ ID NO: 57055 - DNA, 15 bp, Homo sapiens
ctcagtgtcttccac

SEQ ID NO: 57056 - DNA, 15 bp, Homo sapiens
actcagtgtcttcca

SEQ ID NO: 57057 - DNA, 15 bp, Homo sapiens
tactcagtgtcttcc

SEQ ID NO: 57058 - DNA, 15 bp, Homo sapiens
atactcagtgtcttc

SEQ ID NO: 57059 - DNA, 15 bp, Homo sapiens
tatactcagtgtctt

SEQ ID NO: 57060 - DNA, 15 bp, Homo sapiens
ctatactcagtgtct

SEQ ID NO: 57061 - DNA, 15 bp, Homo sapiens
cctatactcagtgtc

SEQ ID NO: 57062 - DNA, 15 bp, Homo sapiens
ccctatactcagtgt

SEQ ID NO: 57063 - DNA, 15 bp, Homo sapiens
accctatactcagtg

SEQ ID NO: 57064 - DNA, 15 bp, Homo sapiens
taccctatactcagt

SEQ ID NO: 57065 - DNA, 15 bp, Homo sapiens
ataccctatactcag

SEQ ID NO: 57066 - DNA, 15 bp, Homo sapiens
cataccctatactca

SEQ ID NO: 57067 - DNA, 15 bp, Homo sapiens
tcataccctatactc

SEQ ID NO: 57068 - DNA, 15 bp, Homo sapiens
ttcataccctatact

SEQ ID NO: 57069 - DNA, 15 bp, Homo sapiens
cttcataccctatac

SEQ ID NO: 57070 - DNA, 15 bp, Homo sapiens
acttcataccctata

SEQ ID NO: 57071 - DNA, 15 bp, Homo sapiens
cacttcataccctat

SEQ ID NO: 57072 - DNA, 15 bp, Homo sapiens
ccacttcatacccta

SEQ ID NO: 57073 - DNA, 15 bp, Homo sapiens
gccacttcataccct

SEQ ID NO: 57074 - DNA, 15 bp, Homo sapiens
tgccacttcataccc

SEQ ID NO: 57075 - DNA, 15 bp, Homo sapiens
ttgccacttcatacc

SEQ ID NO: 57076 - DNA, 15 bp, Homo sapiens
tttgccacttcatac

SEQ ID NO: 57077 - DNA, 15 bp, Homo sapiens
ctttgccacttcata

SEQ ID NO: 57078 - DNA, 15 bp, Homo sapiens
cctttgccacttcat

SEQ ID NO: 57079 - DNA, 15 bp, Homo sapiens
tcctttgccacttca

SEQ ID NO: 57080 - DNA, 15 bp, Homo sapiens
ttcctttgccacttc

SEQ ID NO: 57081 - DNA, 15 bp, Homo sapiens
tttcctttgccactt

SEQ ID NO: 57082 - DNA, 15 bp, Homo sapiens
ctttcctttgccact

SEQ ID NO: 57083 - DNA, 15 bp, Homo sapiens
gctttcctttgccac

SEQ ID NO: 57084 - DNA, 15 bp, Homo sapiens
agctttcctttgcca

SEQ ID NO: 57085 - DNA, 15 bp, Homo sapiens
cagctttcctttgcc

SEQ ID NO: 57086 - DNA, 15 bp, Homo sapiens
gcagctttcctttgc

SEQ ID NO: 57087 - DNA, 15 bp, Homo sapiens
ggcagctttcctttg

SEQ ID NO: 57088 - DNA, 15 bp, Homo sapiens
tggcagctttccttt

SEQ ID NO: 57089 - DNA, 15 bp, Homo sapiens
atggcagctttcctt

SEQ ID NO: 57090 - DNA, 15 bp, Homo sapiens
aatggcagctttcct

SEQ ID NO: 57091 - DNA, 15 bp, Homo sapiens
taatggcagctttcc

SEQ ID NO: 57092 - DNA, 15 bp, Homo sapiens
ataatggcagctttc

SEQ ID NO: 57093 - DNA, 15 bp, Homo sapiens
cataatggcagcttt

SEQ ID NO: 57094 - DNA, 15 bp, Homo sapiens
acataatggcagctt

SEQ ID NO: 57095 - DNA, 15 bp, Homo sapiens
tacataatggcagct

SEQ ID NO: 57096 - DNA, 15 bp, Homo sapiens
ctacataatggcagc

SEQ ID NO: 57097 - DNA, 15 bp, Homo sapiens
cctacataatggcag

SEQ ID NO: 57098 - DNA, 15 bp, Homo sapiens
acctacataatggca

SEQ ID NO: 57099 - DNA, 15 bp, Homo sapiens
aacctacataatggc

SEQ ID NO: 57100 - DNA, 15 bp, Homo sapiens
aaacctacataatgg

SEQ ID NO: 57101 - DNA, 15 bp, Homo sapiens
aaaacctacataatg

SEQ ID NO: 57102 - DNA, 15 bp, Homo sapiens
aaaaacctacataat

SEQ ID NO: 57103 - DNA, 15 bp, Homo sapiens
taaaaacctacataa

SEQ ID NO: 57104 - DNA, 15 bp, Homo sapiens
gtaaaaacctacata

SEQ ID NO: 57105 - DNA, 15 bp, Homo sapiens
agtaaaaacctacat

SEQ ID NO: 57106 - DNA, 15 bp, Homo sapiens
aagtaaaaacctaca

SEQ ID NO: 57107 - DNA, 15 bp, Homo sapiens
gaagtaaaaacctac

SEQ ID NO: 57108 - DNA, 15 bp, Homo sapiens
ggaagtaaaaaccta

SEQ ID NO: 57109 - DNA, 15 bp, Homo sapiens
gggaagtaaaaacct

SEQ ID NO: 57110 - DNA, 15 bp, Homo sapiens
tgggaagtaaaaacc

SEQ ID NO: 57111 - DNA, 15 bp, Homo sapiens
atgggaagtaaaaac

SEQ ID NO: 57112 - DNA, 15 bp, Homo sapiens
gatgggaagtaaaaa

SEQ ID NO: 57113 - DNA, 15 bp, Homo sapiens
agatgggaagtaaaa

SEQ ID NO: 57114 - DNA, 15 bp, Homo sapiens
cagatgggaagtaaa

SEQ ID NO: 57115 - DNA, 15 bp, Homo sapiens
acagatgggaagtaa

SEQ ID NO: 57116 - DNA, 15 bp, Homo sapiens
tacagatgggaagta

SEQ ID NO: 57117 - DNA, 15 bp, Homo sapiens
ttacagatgggaagt

SEQ ID NO: 57118 - DNA, 15 bp, Homo sapiens
tttacagatgggaag

SEQ ID NO: 57119 - DNA, 15 bp, Homo sapiens
atttacagatgggaa

SEQ ID NO: 57120 - DNA, 15 bp, Homo sapiens
aatttacagatggga

SEQ ID NO: 57121 - DNA, 15 bp, Homo sapiens
gaatttacagatggg

SEQ ID NO: 57122 - DNA, 15 bp, Homo sapiens
tgaatttacagatgg

SEQ ID NO: 57123 - DNA, 15 bp, Homo sapiens
gtgaatttacagatg

SEQ ID NO: 57124 - DNA, 15 bp, Homo sapiens
agtgaatttacagat

SEQ ID NO: 57125 - DNA, 15 bp, Homo sapiens
tagtgaatttacaga

SEQ ID NO: 57126 - DNA, 15 bp, Homo sapiens
ctagtgaatttacag

SEQ ID NO: 57127 - DNA, 15 bp, Homo sapiens
cctagtgaatttaca

SEQ ID NO: 57128 - DNA, 15 bp, Homo sapiens
acctagtgaatttac

SEQ ID NO: 57129 - DNA, 15 bp, Homo sapiens
gacctagtgaattta

SEQ ID NO: 57130 - DNA, 15 bp, Homo sapiens
tgacctagtgaattt

SEQ ID NO: 57131 - DNA, 15 bp, Homo sapiens
gtgacctagtgaatt

SEQ ID NO: 57132 - DNA, 15 bp, Homo sapiens
agtgacctagtgaat

SEQ ID NO: 57133 - DNA, 15 bp, Homo sapiens
cagtgacctagtgaa

SEQ ID NO: 57134 - DNA, 15 bp, Homo sapiens
gcagtgacctagtga

SEQ ID NO: 57135 - DNA, 15 bp, Homo sapiens
tgcagtgacctagtg

SEQ ID NO: 57136 - DNA, 15 bp, Homo sapiens
atgcagtgacctagt

SEQ ID NO: 57137 - DNA, 15 bp, Homo sapiens
gatgcagtgacctag

SEQ ID NO: 57138 - DNA, 15 bp, Homo sapiens
tgatgcagtgaccta

SEQ ID NO: 57139 - DNA, 15 bp, Homo sapiens
ctgatgcagtgacct

SEQ ID NO: 57140 - DNA, 15 bp, Homo sapiens
gctgatgcagtgacc

SEQ ID NO: 57141 - DNA, 15 bp, Homo sapiens
ggctgatgcagtgac

SEQ ID NO: 57142 - DNA, 15 bp, Homo sapiens
gggctgatgcagtga

SEQ ID NO: 57143 - DNA, 15 bp, Homo sapiens
agggctgatgcagtg

SEQ ID NO: 57144 - DNA, 15 bp, Homo sapiens
aagggctgatgcagt

SEQ ID NO: 57145 - DNA, 15 bp, Homo sapiens
taagggctgatgcag

SEQ ID NO: 57146 - DNA, 15 bp, Homo sapiens
ataagggctgatgca

SEQ ID NO: 57147 - DNA, 15 bp, Homo sapiens
tataagggctgatgc

SEQ ID NO: 57148 - DNA, 15 bp, Homo sapiens
ctataagggctgatg

SEQ ID NO: 57149 - DNA, 15 bp, Homo sapiens
cctataagggctgat

SEQ ID NO: 57150 - DNA, 15 bp, Homo sapiens
tcctataagggctga

SEQ ID NO: 57151 - DNA, 15 bp, Homo sapiens
ttcctataagggctg

SEQ ID NO: 57152 - DNA, 15 bp, Homo sapiens
cttcctataagggct

SEQ ID NO: 57153 - DNA, 15 bp, Homo sapiens
ccttcctataagggc

SEQ ID NO: 57154 - DNA, 15 bp, Homo sapiens
accttcctataaggg

SEQ ID NO: 57155 - DNA, 15 bp, Homo sapiens
taccttcctataagg

SEQ ID NO: 57156 - DNA, 15 bp, Homo sapiens
ataccttcctataag

SEQ ID NO: 57157 - DNA, 15 bp, Homo sapiens
gataccttcctataa

SEQ ID NO: 57158 - DNA, 15 bp, Homo sapiens
ggataccttcctata

SEQ ID NO: 57159 - DNA, 15 bp, Homo sapiens
aggataccttcctat

SEQ ID NO: 57160 - DNA, 15 bp, Homo sapiens
aaggataccttccta

SEQ ID NO: 57161 - DNA, 15 bp, Homo sapiens
caaggataccttcct

SEQ ID NO: 57162 - DNA, 15 bp, Homo sapiens
acaaggataccttcc

SEQ ID NO: 57163 - DNA, 15 bp, Homo sapiens
cacaaggataccttc

SEQ ID NO: 57164 - DNA, 15 bp, Homo sapiens
tcacaaggatacctt

SEQ ID NO: 57165 - DNA, 15 bp, Homo sapiens
atcacaaggatacct

SEQ ID NO: 57166 - DNA, 15 bp, Homo sapiens
tatcacaaggatacc

SEQ ID NO: 57167 - DNA, 15 bp, Homo sapiens
atatcacaaggatac

SEQ ID NO: 57168 - DNA, 15 bp, Homo sapiens
aatatcacaaggata

SEQ ID NO: 57169 - DNA, 15 bp, Homo sapiens
taatatcacaaggat

SEQ ID NO: 57170 - DNA, 15 bp, Homo sapiens
ataatatcacaagga

SEQ ID NO: 57171 - DNA, 15 bp, Homo sapiens
cataatatcacaagg

SEQ ID NO: 57172 - DNA, 15 bp, Homo sapiens
gcataatatcacaag

SEQ ID NO: 57173 - DNA, 15 bp, Homo sapiens
agcataatatcacaa

SEQ ID NO: 57174 - DNA, 15 bp, Homo sapiens
gagcataatatcaca

SEQ ID NO: 57175 - DNA, 15 bp, Homo sapiens
tgagcataatatcac

SEQ ID NO: 57176 - DNA, 15 bp, Homo sapiens
gtgagcataatatca

SEQ ID NO: 57177 - DNA, 15 bp, Homo sapiens
cgtgagcataatatc

SEQ ID NO: 57178 - DNA, 15 bp, Homo sapiens
acgtgagcataatat

SEQ ID NO: 57179 - DNA, 15 bp, Homo sapiens
cacgtgagcataata

SEQ ID NO: 57180 - DNA, 15 bp, Homo sapiens
acacgtgagcataat

SEQ ID NO: 57181 - DNA, 15 bp, Homo sapiens
gacacgtgagcataa

SEQ ID NO: 57182 - DNA, 15 bp, Homo sapiens
agacacgtgagcata

SEQ ID NO: 57183 - DNA, 15 bp, Homo sapiens
aagacacgtgagcat

SEQ ID NO: 57184 - DNA, 15 bp, Homo sapiens
caagacacgtgagca

SEQ ID NO: 57185 - DNA, 15 bp, Homo sapiens
acaagacacgtgagc

SEQ ID NO: 57186 - DNA, 15 bp, Homo sapiens
aacaagacacgtgag

SEQ ID NO: 57187 - DNA, 15 bp, Homo sapiens
gaacaagacacgtga

SEQ ID NO: 57188 - DNA, 15 bp, Homo sapiens
tgaacaagacacgtg

SEQ ID NO: 57189 - DNA, 15 bp, Homo sapiens
ctgaacaagacacgt

SEQ ID NO: 57190 - DNA, 15 bp, Homo sapiens
cctgaacaagacacg

SEQ ID NO: 57191 - DNA, 15 bp, Homo sapiens
ccctgaacaagacac

SEQ ID NO: 57192 - DNA, 15 bp, Homo sapiens
gccctgaacaagaca

SEQ ID NO: 57193 - DNA, 15 bp, Homo sapiens
tgccctgaacaagac

SEQ ID NO: 57194 - DNA, 15 bp, Homo sapiens
gtgccctgaacaaga

SEQ ID NO: 57195 - DNA, 15 bp, Homo sapiens
tgtgccctgaacaag

SEQ ID NO: 57196 - DNA, 15 bp, Homo sapiens
atgtgccctgaacaa

SEQ ID NO: 57197 - DNA, 15 bp, Homo sapiens
catgtgccctgaaca

SEQ ID NO: 57198 - DNA, 15 bp, Homo sapiens
ccatgtgccctgaac

SEQ ID NO: 57199 - DNA, 15 bp, Homo sapiens
accatgtgccctgaa

SEQ ID NO: 57200 - DNA, 15 bp, Homo sapiens
caccatgtgccctga

SEQ ID NO: 57201 - DNA, 15 bp, Homo sapiens
tcaccatgtgccctg

SEQ ID NO: 57202 - DNA, 15 bp, Homo sapiens
ttcaccatgtgccct

SEQ ID NO: 57203 - DNA, 15 bp, Homo sapiens
tttcaccatgtgccc

SEQ ID NO: 57204 - DNA, 15 bp, Homo sapiens
ttttcaccatgtgcc

SEQ ID NO: 57205 - DNA, 15 bp, Homo sapiens
tttttcaccatgtgc

SEQ ID NO: 57206 - DNA, 15 bp, Homo sapiens
ttttttcaccatgtg

SEQ ID NO: 57207 - DNA, 15 bp, Homo sapiens
tttttttcaccatgt

SEQ ID NO: 57208 - DNA, 15 bp, Homo sapiens
atttttttcaccatg

SEQ ID NO: 57209 - DNA, 15 bp, Homo sapiens
aatttttttcaccat

SEQ ID NO: 57210 - DNA, 15 bp, Homo sapiens
taatttttttcacca

SEQ ID NO: 57211 - DNA, 15 bp, Homo sapiens
ataatttttttcacc

SEQ ID NO: 57212 - DNA, 15 bp, Homo sapiens
aataatttttttcac

SEQ ID NO: 57213 - DNA, 15 bp, Homo sapiens
aaataatttttttca

SEQ ID NO: 57214 - DNA, 15 bp, Homo sapiens
gaaataatttttttc

SEQ ID NO: 57215 - DNA, 15 bp, Homo sapiens
ggaaataattttttt

SEQ ID NO: 57216 - DNA, 15 bp, Homo sapiens
aggaaataatttttt

SEQ ID NO: 57217 - DNA, 15 bp, Homo sapiens
caggaaataattttt

SEQ ID NO: 57218 - DNA, 15 bp, Homo sapiens
gcaggaaataatttt

SEQ ID NO: 57219 - DNA, 15 bp, Homo sapiens
ggcaggaaataattt

SEQ ID NO: 57220 - DNA, 15 bp, Homo sapiens
aggcaggaaataatt

SEQ ID NO: 57221 - DNA, 15 bp, Homo sapiens
aaggcaggaaataat

SEQ ID NO: 57222 - DNA, 15 bp, Homo sapiens
aaaggcaggaaataa

SEQ ID NO: 57223 - DNA, 15 bp, Homo sapiens
taaaggcaggaaata

SEQ ID NO: 57224 - DNA, 15 bp, Homo sapiens
ttaaaggcaggaaat

SEQ ID NO: 57225 - DNA, 15 bp, Homo sapiens
tttaaaggcaggaaa

SEQ ID NO: 57226 - DNA, 15 bp, Homo sapiens
atttaaaggcaggaa

SEQ ID NO: 57227 - DNA, 15 bp, Homo sapiens
aatttaaaggcagga

SEQ ID NO: 57228 - DNA, 15 bp, Homo sapiens
taatttaaaggcagg

SEQ ID NO: 57229 - DNA, 15 bp, Homo sapiens
ataatttaaaggcag

SEQ ID NO: 57230 - DNA, 15 bp, Homo sapiens
gataatttaaaggca

SEQ ID NO: 57231 - DNA, 15 bp, Homo sapiens
agataatttaaaggc

SEQ ID NO: 57232 - DNA, 15 bp, Homo sapiens
aagataatttaaagg

SEQ ID NO: 57233 - DNA, 15 bp, Homo sapiens
aaagataatttaaag

SEQ ID NO: 57234 - DNA, 15 bp, Homo sapiens
taaagataatttaaa

SEQ ID NO: 57235 - DNA, 15 bp, Homo sapiens
gtaaagataatttaa

SEQ ID NO: 57236 - DNA, 15 bp, Homo sapiens
tgtaaagataattta

SEQ ID NO: 57237 - DNA, 15 bp, Homo sapiens
ctgtaaagataattt

SEQ ID NO: 57238 - DNA, 15 bp, Homo sapiens
cctgtaaagataatt

SEQ ID NO: 57239 - DNA, 15 bp, Homo sapiens
gcctgtaaagataat

SEQ ID NO: 57240 - DNA, 15 bp, Homo sapiens
tgcctgtaaagataa

SEQ ID NO: 57241 - DNA, 15 bp, Homo sapiens
ttgcctgtaaagata

SEQ ID NO: 57242 - DNA, 15 bp, Homo sapiens
attgcctgtaaagat

SEQ ID NO: 57243 - DNA, 15 bp, Homo sapiens
aattgcctgtaaaga

SEQ ID NO: 57244 - DNA, 15 bp, Homo sapiens
aaattgcctgtaaag

SEQ ID NO: 57245 - DNA, 15 bp, Homo sapiens
taaattgcctgtaaa

SEQ ID NO: 57246 - DNA, 15 bp, Homo sapiens
gtaaattgcctgtaa

SEQ ID NO: 57247 - DNA, 15 bp, Homo sapiens
agtaaattgcctgta

SEQ ID NO: 57248 - DNA, 15 bp, Homo sapiens
gagtaaattgcctgt

SEQ ID NO: 57249 - DNA, 15 bp, Homo sapiens
agagtaaattgcctg

SEQ ID NO: 57250 - DNA, 15 bp, Homo sapiens
tagagtaaattgcct

SEQ ID NO: 57251 - DNA, 15 bp, Homo sapiens
gtagagtaaattgcc

SEQ ID NO: 57252 - DNA, 15 bp, Homo sapiens
tgtagagtaaattgc

SEQ ID NO: 57253 - DNA, 15 bp, Homo sapiens
ttgtagagtaaattg

SEQ ID NO: 57254 - DNA, 15 bp, Homo sapiens
cttgtagagtaaatt

SEQ ID NO: 57255 - DNA, 15 bp, Homo sapiens
tcttgtagagtaaat

SEQ ID NO: 57256 - DNA, 15 bp, Homo sapiens
ttcttgtagagtaaa

SEQ ID NO: 57257 - DNA, 15 bp, Homo sapiens
tttcttgtagagtaa

SEQ ID NO: 57258 - DNA, 15 bp, Homo sapiens
ttttcttgtagagta

SEQ ID NO: 57259 - DNA, 15 bp, Homo sapiens
attttcttgtagagt

SEQ ID NO: 57260 - DNA, 15 bp, Homo sapiens
aattttcttgtagag

SEQ ID NO: 57261 - DNA, 15 bp, Homo sapiens
taattttcttgtaga

SEQ ID NO: 57262 - DNA, 15 bp, Homo sapiens
ctaattttcttgtag

SEQ ID NO: 57263 - DNA, 15 bp, Homo sapiens
cctaattttcttgta

SEQ ID NO: 57264 - DNA, 15 bp, Homo sapiens
tcctaattttcttgt

SEQ ID NO: 57265 - DNA, 15 bp, Homo sapiens
atcctaattttcttg

SEQ ID NO: 57266 - DNA, 15 bp, Homo sapiens
gatcctaattttctt

SEQ ID NO: 57267 - DNA, 15 bp, Homo sapiens
agatcctaattttct

SEQ ID NO: 57268 - DNA, 15 bp, Homo sapiens
tagatcctaattttc

SEQ ID NO: 57269 - DNA, 15 bp, Homo sapiens
gtagatcctaatttt

SEQ ID NO: 57270 - DNA, 15 bp, Homo sapiens
agtagatcctaattt

SEQ ID NO: 57271 - DNA, 15 bp, Homo sapiens
tagtagatcctaatt

SEQ ID NO: 57272 - DNA, 15 bp, Homo sapiens
gtagtagatcctaat

SEQ ID NO: 57273 - DNA, 15 bp, Homo sapiens
ggtagtagatcctaa

SEQ ID NO: 57274 - DNA, 15 bp, Homo sapiens
gggtagtagatccta

SEQ ID NO: 57275 - DNA, 15 bp, Homo sapiens
ggggtagtagatcct

SEQ ID NO: 57276 - DNA, 15 bp, Homo sapiens
aggggtagtagatcc

SEQ ID NO: 57277 - DNA, 15 bp, Homo sapiens
caggggtagtagatc

SEQ ID NO: 57278 - DNA, 15 bp, Homo sapiens
tcaggggtagtagat

SEQ ID NO: 57279 - DNA, 15 bp, Homo sapiens
ttcaggggtagtaga

SEQ ID NO: 57280 - DNA, 15 bp, Homo sapiens
attcaggggtagtag

SEQ ID NO: 57281 - DNA, 15 bp, Homo sapiens
tattcaggggtagta

SEQ ID NO: 57282 - DNA, 15 bp, Homo sapiens
ttattcaggggtagt

SEQ ID NO: 57283 - DNA, 15 bp, Homo sapiens
tttattcaggggtag

SEQ ID NO: 57284 - DNA, 15 bp, Homo sapiens
atttattcaggggta

SEQ ID NO: 57285 - DNA, 15 bp, Homo sapiens
aatttattcaggggt

SEQ ID NO: 57286 - DNA, 15 bp, Homo sapiens
caatttattcagggg

SEQ ID NO: 57287 - DNA, 15 bp, Homo sapiens
ccaatttattcaggg

SEQ ID NO: 57288 - DNA, 15 bp, Homo sapiens
gccaatttattcagg

SEQ ID NO: 57289 - DNA, 15 bp, Homo sapiens
agccaatttattcag

SEQ ID NO: 57290 - DNA, 15 bp, Homo sapiens
aagccaatttattca

SEQ ID NO: 57291 - DNA, 15 bp, Homo sapiens
aaagccaatttattc

SEQ ID NO: 57292 - DNA, 15 bp, Homo sapiens
caaagccaatttatt

SEQ ID NO: 57293 - DNA, 15 bp, Homo sapiens
tcaaagccaatttat

SEQ ID NO: 57294 - DNA, 15 bp, Homo sapiens
ttcaaagccaattta

SEQ ID NO: 57295 - DNA, 15 bp, Homo sapiens
tttcaaagccaattt

SEQ ID NO: 57296 - DNA, 15 bp, Homo sapiens
atttcaaagccaatt

SEQ ID NO: 57297 - DNA, 15 bp, Homo sapiens
aatttcaaagccaat

SEQ ID NO: 57298 - DNA, 15 bp, Homo sapiens
taatttcaaagccaa

SEQ ID NO: 57299 - DNA, 15 bp, Homo sapiens
ctaatttcaaagcca

SEQ ID NO: 57300 - DNA, 15 bp, Homo sapiens
tctaatttcaaagcc

SEQ ID NO: 57301 - DNA, 15 bp, Homo sapiens
gtctaatttcaaagc

SEQ ID NO: 57302 - DNA, 15 bp, Homo sapiens
agtctaatttcaaag

SEQ ID NO: 57303 - DNA, 15 bp, Homo sapiens
aagtctaatttcaaa

SEQ ID NO: 57304 - DNA, 15 bp, Homo sapiens
taagtctaatttcaa

SEQ ID NO: 57305 - DNA, 15 bp, Homo sapiens
ataagtctaatttca

SEQ ID NO: 57306 - DNA, 15 bp, Homo sapiens
aataagtctaatttc

SEQ ID NO: 57307 - DNA, 15 bp, Homo sapiens
gaataagtctaattt

SEQ ID NO: 57308 - DNA, 15 bp, Homo sapiens
ggaataagtctaatt

SEQ ID NO: 57309 - DNA, 15 bp, Homo sapiens
aggaataagtctaat

SEQ ID NO: 57310 - DNA, 15 bp, Homo sapiens
gaggaataagtctaa

SEQ ID NO: 57311 - DNA, 15 bp, Homo sapiens
tgaggaataagtcta

SEQ ID NO: 57312 - DNA, 15 bp, Homo sapiens
atgaggaataagtct

SEQ ID NO: 57313 - DNA, 15 bp, Homo sapiens
aatgaggaataagtc

SEQ ID NO: 57314 - DNA, 15 bp, Homo sapiens
aaatgaggaataagt

SEQ ID NO: 57315 - DNA, 15 bp, Homo sapiens
aaaatgaggaataag

SEQ ID NO: 57316 - DNA, 15 bp, Homo sapiens
gaaaatgaggaataa

SEQ ID NO: 57317 - DNA, 15 bp, Homo sapiens
tgaaaatgaggaata

SEQ ID NO: 57318 - DNA, 15 bp, Homo sapiens
ttgaaaatgaggaat

SEQ ID NO: 57319 - DNA, 15 bp, Homo sapiens
gttgaaaatgaggaa

SEQ ID NO: 57320 - DNA, 15 bp, Homo sapiens
tgttgaaaatgagga

SEQ ID NO: 57321 - DNA, 15 bp, Homo sapiens
ctgttgaaaatgagg

SEQ ID NO: 57322 - DNA, 15 bp, Homo sapiens
tctgttgaaaatgag

SEQ ID NO: 57323 - DNA, 15 bp, Homo sapiens
ctctgttgaaaatga

SEQ ID NO: 57324 - DNA, 15 bp, Homo sapiens
actctgttgaaaatg

SEQ ID NO: 57325 - DNA, 15 bp, Homo sapiens
tactctgttgaaaat

SEQ ID NO: 57326 - DNA, 15 bp, Homo sapiens
atactctgttgaaaa

SEQ ID NO: 57327 - DNA, 15 bp, Homo sapiens
gatactctgttgaaa

SEQ ID NO: 57328 - DNA, 15 bp, Homo sapiens
agatactctgttgaa

SEQ ID NO: 57329 - DNA, 15 bp, Homo sapiens
gagatactctgttga

SEQ ID NO: 57330 - DNA, 15 bp, Homo sapiens
agagatactctgttg

SEQ ID NO: 57331 - DNA, 15 bp, Homo sapiens
tagagatactctgtt

SEQ ID NO: 57332 - DNA, 15 bp, Homo sapiens
ctagagatactctgt

SEQ ID NO: 57333 - DNA, 15 bp, Homo sapiens
gctagagatactctg

SEQ ID NO: 57334 - DNA, 15 bp, Homo sapiens
ggctagagatactct

SEQ ID NO: 57335 - DNA, 15 bp, Homo sapiens
tggctagagatactc

SEQ ID NO: 57336 - DNA, 15 bp, Homo sapiens
gtggctagagatact

SEQ ID NO: 57337 - DNA, 15 bp, Homo sapiens
agtggctagagatac

SEQ ID NO: 57338 - DNA, 15 bp, Homo sapiens
gagtggctagagata

SEQ ID NO: 57339 - DNA, 15 bp, Homo sapiens
agagtggctagagat

SEQ ID NO: 57340 - DNA, 15 bp, Homo sapiens
gagagtggctagaga

SEQ ID NO: 57341 - DNA, 15 bp, Homo sapiens
agagagtggctagag

SEQ ID NO: 57342 - DNA, 15 bp, Homo sapiens
gagagagtggctaga

SEQ ID NO: 57343 - DNA, 15 bp, Homo sapiens
agagagagtggctag

SEQ ID NO: 57344 - DNA, 15 bp, Homo sapiens
aagagagagtggcta

SEQ ID NO: 57345 - DNA, 15 bp, Homo sapiens
taagagagagtggct

SEQ ID NO: 57346 - DNA, 15 bp, Homo sapiens
ttaagagagagtggc

SEQ ID NO: 57347 - DNA, 15 bp, Homo sapiens
attaagagagagtgg

SEQ ID NO: 57348 - DNA, 15 bp, Homo sapiens
tattaagagagagtg

SEQ ID NO: 57349 - DNA, 15 bp, Homo sapiens
atattaagagagagt

SEQ ID NO: 57350 - DNA, 15 bp, Homo sapiens
aatattaagagagag

SEQ ID NO: 57351 - DNA, 15 bp, Homo sapiens
aaatattaagagaga

SEQ ID NO: 57352 - DNA, 15 bp, Homo sapiens
gaaatattaagagag

SEQ ID NO: 57353 - DNA, 15 bp, Homo sapiens
agaaatattaagaga

SEQ ID NO: 57354 - DNA, 15 bp, Homo sapiens
cagaaatattaagag

SEQ ID NO: 57355 - DNA, 15 bp, Homo sapiens
acagaaatattaaga

SEQ ID NO: 57356 - DNA, 15 bp, Homo sapiens
aacagaaatattaag

SEQ ID NO: 57357 - DNA, 15 bp, Homo sapiens
taacagaaatattaa

SEQ ID NO: 57358 - DNA, 15 bp, Homo sapiens
ataacagaaatatta

SEQ ID NO: 57359 - DNA, 15 bp, Homo sapiens
gataacagaaatatt

SEQ ID NO: 57360 - DNA, 15 bp, Homo sapiens
agataacagaaatat

SEQ ID NO: 57361 - DNA, 15 bp, Homo sapiens
cagataacagaaata

SEQ ID NO: 57362 - DNA, 15 bp, Homo sapiens
gcagataacagaaat

SEQ ID NO: 57363 - DNA, 15 bp, Homo sapiens
tgcagataacagaaa

SEQ ID NO: 57364 - DNA, 15 bp, Homo sapiens
gtgcagataacagaa

SEQ ID NO: 57365 - DNA, 15 bp, Homo sapiens
tgtgcagataacaga

SEQ ID NO: 57366 - DNA, 15 bp, Homo sapiens
ctgtgcagataacag

SEQ ID NO: 57367 - DNA, 15 bp, Homo sapiens
tctgtgcagataaca

SEQ ID NO: 57368 - DNA, 15 bp, Homo sapiens
ttctgtgcagataac

SEQ ID NO: 57369 - DNA, 15 bp, Homo sapiens
gttctgtgcagataa

SEQ ID NO: 57370 - DNA, 15 bp, Homo sapiens
agttctgtgcagata

SEQ ID NO: 57371 - DNA, 15 bp, Homo sapiens
tagttctgtgcagat

SEQ ID NO: 57372 - DNA, 15 bp, Homo sapiens
ttagttctgtgcaga

SEQ ID NO: 57373 - DNA, 15 bp, Homo sapiens
tttagttctgtgcag

SEQ ID NO: 57374 - DNA, 15 bp, Homo sapiens
atttagttctgtgca

SEQ ID NO: 57375 - DNA, 15 bp, Homo sapiens
gatttagttctgtgc

SEQ ID NO: 57376 - DNA, 15 bp, Homo sapiens
ggatttagttctgtg

SEQ ID NO: 57377 - DNA, 15 bp, Homo sapiens
gggatttagttctgt

SEQ ID NO: 57378 - DNA, 15 bp, Homo sapiens
tgggatttagttctg

SEQ ID NO: 57379 - DNA, 15 bp, Homo sapiens
atgggatttagttct

SEQ ID NO: 57380 - DNA, 15 bp, Homo sapiens
aatgggatttagttc

SEQ ID NO: 57381 - DNA, 15 bp, Homo sapiens
aaatgggatttagtt

SEQ ID NO: 57382 - DNA, 15 bp, Homo sapiens
aaaatgggatttagt

SEQ ID NO: 57383 - DNA, 15 bp, Homo sapiens
caaaatgggatttag

SEQ ID NO: 57384 - DNA, 15 bp, Homo sapiens
acaaaatgggattta

SEQ ID NO: 57385 - DNA, 15 bp, Homo sapiens
aacaaaatgggattt

SEQ ID NO: 57386 - DNA, 15 bp, Homo sapiens
taacaaaatgggatt

SEQ ID NO: 57387 - DNA, 15 bp, Homo sapiens
ctaacaaaatgggat

SEQ ID NO: 57388 - DNA, 15 bp, Homo sapiens
gctaacaaaatggga

SEQ ID NO: 57389 - DNA, 15 bp, Homo sapiens
ggctaacaaaatggg

SEQ ID NO: 57390 - DNA, 15 bp, Homo sapiens
aggctaacaaaatgg

SEQ ID NO: 57391 - DNA, 15 bp, Homo sapiens
taggctaacaaaatg

SEQ ID NO: 57392 - DNA, 15 bp, Homo sapiens
ttaggctaacaaaat

SEQ ID NO: 57393 - DNA, 15 bp, Homo sapiens
gttaggctaacaaaa

SEQ ID NO: 57394 - DNA, 15 bp, Homo sapiens
agttaggctaacaaa

SEQ ID NO: 57395 - DNA, 15 bp, Homo sapiens
aagttaggctaacaa

SEQ ID NO: 57396 - DNA, 15 bp, Homo sapiens
taagttaggctaaca

SEQ ID NO: 57397 - DNA, 15 bp, Homo sapiens
ttaagttaggctaac

SEQ ID NO: 57398 - DNA, 15 bp, Homo sapiens
attaagttaggctaa

SEQ ID NO: 57399 - DNA, 15 bp, Homo sapiens
aattaagttaggcta

SEQ ID NO: 57400 - DNA, 15 bp, Homo sapiens
gaattaagttaggct

SEQ ID NO: 57401 - DNA, 15 bp, Homo sapiens
agaattaagttaggc

SEQ ID NO: 57402 - DNA, 15 bp, Homo sapiens
cagaattaagttagg

SEQ ID NO: 57403 - DNA, 15 bp, Homo sapiens
tcagaattaagttag

SEQ ID NO: 57404 - DNA, 15 bp, Homo sapiens
gtcagaattaagtta

SEQ ID NO: 57405 - DNA, 15 bp, Homo sapiens
tgtcagaattaagtt

SEQ ID NO: 57406 - DNA, 15 bp, Homo sapiens
gtgtcagaattaagt

SEQ ID NO: 57407 - DNA, 15 bp, Homo sapiens
ggtgtcagaattaag

SEQ ID NO: 57408 - DNA, 15 bp, Homo sapiens
tggtgtcagaattaa

SEQ ID NO: 57409 - DNA, 15 bp, Homo sapiens
gtggtgtcagaatta

SEQ ID NO: 57410 - DNA, 15 bp, Homo sapiens
tgtggtgtcagaatt

SEQ ID NO: 57411 - DNA, 15 bp, Homo sapiens
atgtggtgtcagaat

SEQ ID NO: 57412 - DNA, 15 bp, Homo sapiens
tatgtggtgtcagaa

SEQ ID NO: 57413 - DNA, 15 bp, Homo sapiens
gtatgtggtgtcaga

SEQ ID NO: 57414 - DNA, 15 bp, Homo sapiens
ggtatgtggtgtcag

SEQ ID NO: 57415 - DNA, 15 bp, Homo sapiens
aggtatgtggtgtca

SEQ ID NO: 57416 - DNA, 15 bp, Homo sapiens
taggtatgtggtgtc

SEQ ID NO: 57417 - DNA, 15 bp, Homo sapiens
ataggtatgtggtgt

SEQ ID NO: 57418 - DNA, 15 bp, Homo sapiens
gataggtatgtggtg

SEQ ID NO: 57419 - DNA, 15 bp, Homo sapiens
tgataggtatgtggt

SEQ ID NO: 57420 - DNA, 15 bp, Homo sapiens
atgataggtatgtgg

SEQ ID NO: 57421 - DNA, 15 bp, Homo sapiens
tatgataggtatgtg

SEQ ID NO: 57422 - DNA, 15 bp, Homo sapiens
atatgataggtatgt

SEQ ID NO: 57423 - DNA, 15 bp, Homo sapiens
tatatgataggtatg

SEQ ID NO: 57424 - DNA, 15 bp, Homo sapiens
atatatgataggtat

SEQ ID NO: 57425 - DNA, 15 bp, Homo sapiens
tatatatgataggta

SEQ ID NO: 57426 - DNA, 15 bp, Homo sapiens
atatatatgataggt

SEQ ID NO: 57427 - DNA, 15 bp, Homo sapiens
tatatatatgatagg

SEQ ID NO: 57428 - DNA, 15 bp, Homo sapiens
atatatatatgatag

SEQ ID NO: 57429 - DNA, 15 bp, Homo sapiens
catatatatatgata

SEQ ID NO: 57430 - DNA, 15 bp, Homo sapiens
acatatatatatgat

SEQ ID NO: 57431 - DNA, 15 bp, Homo sapiens
cacatatatatatga

SEQ ID NO: 57432 - DNA, 15 bp, Homo sapiens
tcacatatatatatg

SEQ ID NO: 57433 - DNA, 15 bp, Homo sapiens
atcacatatatatat

SEQ ID NO: 57434 - DNA, 15 bp, Homo sapiens
tatcacatatatata

SEQ ID NO: 57435 - DNA, 15 bp, Homo sapiens
atatcacatatatat

SEQ ID NO: 57436 - DNA, 15 bp, Homo sapiens
tatatcacatatata

SEQ ID NO: 57437 - DNA, 15 bp, Homo sapiens
atatatcacatatat

SEQ ID NO: 57438 - DNA, 15 bp, Homo sapiens
tatatatcacatata

SEQ ID NO: 57439 - DNA, 15 bp, Homo sapiens
atatatatcacatat

SEQ ID NO: 57440 - DNA, 15 bp, Homo sapiens
catatatatcacata

SEQ ID NO: 57441 - DNA, 15 bp, Homo sapiens
tcatatatatcacat

SEQ ID NO: 57442 - DNA, 15 bp, Homo sapiens
atcatatatatcaca

SEQ ID NO: 57443 - DNA, 15 bp, Homo sapiens
tatcatatatatcac

SEQ ID NO: 57444 - DNA, 15 bp, Homo sapiens
atatcatatatatca

SEQ ID NO: 57445 - DNA, 15 bp, Homo sapiens
tatatcatatatatc

SEQ ID NO: 57446 - DNA, 15 bp, Homo sapiens
atatatcatatatat

SEQ ID NO: 57447 - DNA, 15 bp, Homo sapiens
tatatatcatatata

SEQ ID NO: 57448 - DNA, 15 bp, Homo sapiens
atatatatcatatat

SEQ ID NO: 57449 - DNA, 15 bp, Homo sapiens
catatatatcatata

SEQ ID NO: 57450 - DNA, 15 bp, Homo sapiens
cacatatatatcata

SEQ ID NO: 57451 - DNA, 15 bp, Homo sapiens
tcacatatatatcat

SEQ ID NO: 57452 - DNA, 15 bp, Homo sapiens
atcacatatatatca

SEQ ID NO: 57453 - DNA, 15 bp, Homo sapiens
tatcacatatatatc

SEQ ID NO: 57454 - DNA, 15 bp, Homo sapiens
tatatatatcacata

SEQ ID NO: 57455 - DNA, 15 bp, Homo sapiens
atatatatatcacat

SEQ ID NO: 57456 - DNA, 15 bp, Homo sapiens
gatatatatatcaca

SEQ ID NO: 57457 - DNA, 15 bp, Homo sapiens
tgatatatatatcac

SEQ ID NO: 57458 - DNA, 15 bp, Homo sapiens
atgatatatatatca

SEQ ID NO: 57459 - DNA, 15 bp, Homo sapiens
tatgatatatatatc

SEQ ID NO: 57460 - DNA, 15 bp, Homo sapiens
atatgatatatatat

SEQ ID NO: 57461 - DNA, 15 bp, Homo sapiens
tatatgatatatata

SEQ ID NO: 57462 - DNA, 15 bp, Homo sapiens
atatatgatatatat

SEQ ID NO: 57463 - DNA, 15 bp, Homo sapiens
gatatatgatatata

SEQ ID NO: 57464 - DNA, 15 bp, Homo sapiens
agatatatgatatat

SEQ ID NO: 57465 - DNA, 15 bp, Homo sapiens
cagatatatgatata

SEQ ID NO: 57466 - DNA, 15 bp, Homo sapiens
acagatatatgatat

SEQ ID NO: 57467 - DNA, 15 bp, Homo sapiens
cacagatatatgata

SEQ ID NO: 57468 - DNA, 15 bp, Homo sapiens
tcacagatatatgat

SEQ ID NO: 57469 - DNA, 15 bp, Homo sapiens
atcacagatatatga

SEQ ID NO: 57470 - DNA, 15 bp, Homo sapiens
tatcacagatatatg

SEQ ID NO: 57471 - DNA, 15 bp, Homo sapiens
atatcacagatatat

SEQ ID NO: 57472 - DNA, 15 bp, Homo sapiens
tatatcacagatata

SEQ ID NO: 57473 - DNA, 15 bp, Homo sapiens
atatatcacagatat

SEQ ID NO: 57474 - DNA, 15 bp, Homo sapiens
tatatatcacagata

SEQ ID NO: 57475 - DNA, 15 bp, Homo sapiens
atatatatcacagat

SEQ ID NO: 57476 - DNA, 15 bp, Homo sapiens
tatatatatcacaga

SEQ ID NO: 57477 - DNA, 15 bp, Homo sapiens
atatatatatcacag

SEQ ID NO: 57478 - DNA, 15 bp, Homo sapiens
catatatatatcaca

SEQ ID NO: 57479 - DNA, 15 bp, Homo sapiens
tcatatatatatcac

SEQ ID NO: 57480 - DNA, 15 bp, Homo sapiens
atcatatatatatca

SEQ ID NO: 57481 - DNA, 15 bp, Homo sapiens
tatcatatatatatc

SEQ ID NO: 57482 - DNA, 15 bp, Homo sapiens
atatcatatatatat

SEQ ID NO: 57483 - DNA, 15 bp, Homo sapiens
tatatcatatatata

SEQ ID NO: 57484 - DNA, 15 bp, Homo sapiens
tatatatatcatata

SEQ ID NO: 57485 - DNA, 15 bp, Homo sapiens
atatatatatcatat

SEQ ID NO: 57486 - DNA, 15 bp, Homo sapiens
gatatatatatcata

SEQ ID NO: 57487 - DNA, 15 bp, Homo sapiens
tgatatatatatcat

SEQ ID NO: 57488 - DNA, 15 bp, Homo sapiens
aatgatatatatatc

SEQ ID NO: 57489 - DNA, 15 bp, Homo sapiens
gaatgatatatatat

SEQ ID NO: 57490 - DNA, 15 bp, Homo sapiens
agaatgatatatata

SEQ ID NO: 57491 - DNA, 15 bp, Homo sapiens
gagaatgatatatat

SEQ ID NO: 57492 - DNA, 15 bp, Homo sapiens
agagaatgatatata

SEQ ID NO: 57493 - DNA, 15 bp, Homo sapiens
gagagaatgatatat

SEQ ID NO: 57494 - DNA, 15 bp, Homo sapiens
agagagaatgatata

SEQ ID NO: 57495 - DNA, 15 bp, Homo sapiens
aagagagaatgatat

SEQ ID NO: 57496 - DNA, 15 bp, Homo sapiens
aaagagagaatgata

SEQ ID NO: 57497 - DNA, 15 bp, Homo sapiens
caaagagagaatgat

SEQ ID NO: 57498 - DNA, 15 bp, Homo sapiens
tcaaagagagaatga

SEQ ID NO: 57499 - DNA, 15 bp, Homo sapiens
ttcaaagagagaatg

SEQ ID NO: 57500 - DNA, 15 bp, Homo sapiens
attcaaagagagaat

SEQ ID NO: 57501 - DNA, 15 bp, Homo sapiens
tattcaaagagagaa

SEQ ID NO: 57502 - DNA, 15 bp, Homo sapiens
atattcaaagagaga

SEQ ID NO: 57503 - DNA, 15 bp, Homo sapiens
tatattcaaagagag

SEQ ID NO: 57504 - DNA, 15 bp, Homo sapiens
atatattcaaagaga

SEQ ID NO: 57505 - DNA, 15 bp, Homo sapiens
catatattcaaagag

SEQ ID NO: 57506 - DNA, 15 bp, Homo sapiens
tcatatattcaaaga

SEQ ID NO: 57507 - DNA, 15 bp, Homo sapiens
ttcatatattcaaag

SEQ ID NO: 57508 - DNA, 15 bp, Homo sapiens
attcatatattcaaa

SEQ ID NO: 57509 - DNA, 15 bp, Homo sapiens
tattcatatattcaa

SEQ ID NO: 57510 - DNA, 15 bp, Homo sapiens
atattcatatattca

SEQ ID NO: 57511 - DNA, 15 bp, Homo sapiens
tatattcatatattc

SEQ ID NO: 57512 - DNA, 15 bp, Homo sapiens
atatattcatatatt

SEQ ID NO: 57513 - DNA, 15 bp, Homo sapiens
tatatattcatatat

SEQ ID NO: 57514 - DNA, 15 bp, Homo sapiens
gtatatattcatata

SEQ ID NO: 57515 - DNA, 15 bp, Homo sapiens
tgtatatattcatat

SEQ ID NO: 57516 - DNA, 15 bp, Homo sapiens
ctgtatatattcata

SEQ ID NO: 57517 - DNA, 15 bp, Homo sapiens
tctgtatatattcat

SEQ ID NO: 57518 - DNA, 15 bp, Homo sapiens
ctctgtatatattca

SEQ ID NO: 57519 - DNA, 15 bp, Homo sapiens
tctctgtatatattc

SEQ ID NO: 57520 - DNA, 15 bp, Homo sapiens
ctctctgtatatatt

SEQ ID NO: 57521 - DNA, 15 bp, Homo sapiens
tctctctgtatatat

SEQ ID NO: 57522 - DNA, 15 bp, Homo sapiens
ttctctctgtatata

SEQ ID NO: 57523 - DNA, 15 bp, Homo sapiens
cttctctctgtatat

SEQ ID NO: 57524 - DNA, 15 bp, Homo sapiens
ccttctctctgtata

SEQ ID NO: 57525 - DNA, 15 bp, Homo sapiens
accttctctctgtat

SEQ ID NO: 57526 - DNA, 15 bp, Homo sapiens
taccttctctctgta

SEQ ID NO: 57527 - DNA, 15 bp, Homo sapiens
ttaccttctctctgt

SEQ ID NO: 57528 - DNA, 15 bp, Homo sapiens
tttaccttctctctg

SEQ ID NO: 57529 - DNA, 15 bp, Homo sapiens
gtttaccttctctct

SEQ ID NO: 57530 - DNA, 15 bp, Homo sapiens
tgtttaccttctctc

SEQ ID NO: 57531 - DNA, 15 bp, Homo sapiens
atgtttaccttctct

SEQ ID NO: 57532 - DNA, 15 bp, Homo sapiens
tatgtttaccttctc

SEQ ID NO: 57533 - DNA, 15 bp, Homo sapiens
atatgtttaccttct

SEQ ID NO: 57534 - DNA, 15 bp, Homo sapiens
tatatgtttaccttc

SEQ ID NO: 57535 - DNA, 15 bp, Homo sapiens
atatatgtttacctt

SEQ ID NO: 57536 - DNA, 15 bp, Homo sapiens
tatatatgtttacct

SEQ ID NO: 57537 - DNA, 15 bp, Homo sapiens
atatatatgtttacc

SEQ ID NO: 57538 - DNA, 15 bp, Homo sapiens
tatatatatgtttac

SEQ ID NO: 57539 - DNA, 15 bp, Homo sapiens
ttatatatatgttta

SEQ ID NO: 57540 - DNA, 15 bp, Homo sapiens
tttatatatatgttt

SEQ ID NO: 57541 - DNA, 15 bp, Homo sapiens
ttttatatatatgtt

SEQ ID NO: 57542 - DNA, 15 bp, Homo sapiens
attttatatatatgt

SEQ ID NO: 57543 - DNA, 15 bp, Homo sapiens
cattttatatatatg

SEQ ID NO: 57544 - DNA, 15 bp, Homo sapiens
gcattttatatatat

SEQ ID NO: 57545 - DNA, 15 bp, Homo sapiens
tgcattttatatata

SEQ ID NO: 57546 - DNA, 15 bp, Homo sapiens
ctgcattttatatat

SEQ ID NO: 57547 - DNA, 15 bp, Homo sapiens
cctgcattttatata

SEQ ID NO: 57548 - DNA, 15 bp, Homo sapiens
acctgcattttatat

SEQ ID NO: 57549 - DNA, 15 bp, Homo sapiens
tacctgcattttata

SEQ ID NO: 57550 - DNA, 15 bp, Homo sapiens
ttacctgcattttat

SEQ ID NO: 57551 - DNA, 15 bp, Homo sapiens
tttacctgcatttta

SEQ ID NO: 57552 - DNA, 15 bp, Homo sapiens
atttacctgcatttt

SEQ ID NO: 57553 - DNA, 15 bp, Homo sapiens
tatttacctgcattt

SEQ ID NO: 57554 - DNA, 15 bp, Homo sapiens
atatttacctgcatt

SEQ ID NO: 57555 - DNA, 15 bp, Homo sapiens
aatatttacctgcat

SEQ ID NO: 57556 - DNA, 15 bp, Homo sapiens
aaatatttacctgca

SEQ ID NO: 57557 - DNA, 15 bp, Homo sapiens
taaatatttacctgc

SEQ ID NO: 57558 - DNA, 15 bp, Homo sapiens
ataaatatttacctg

SEQ ID NO: 57559 - DNA, 15 bp, Homo sapiens
tataaatatttacct

SEQ ID NO: 57560 - DNA, 15 bp, Homo sapiens
atataaatatttacc

SEQ ID NO: 57561 - DNA, 15 bp, Homo sapiens
tatataaatatttac

SEQ ID NO: 57562 - DNA, 15 bp, Homo sapiens
ttatataaatattta

SEQ ID NO: 57563 - DNA, 15 bp, Homo sapiens
attatataaatattt

SEQ ID NO: 57564 - DNA, 15 bp, Homo sapiens
tattatataaatatt

SEQ ID NO: 57565 - DNA, 15 bp, Homo sapiens
atattatataaatat

SEQ ID NO: 57566 - DNA, 15 bp, Homo sapiens
tatattatataaata

SEQ ID NO: 57567 - DNA, 15 bp, Homo sapiens
ttatattatataaat

SEQ ID NO: 57568 - DNA, 15 bp, Homo sapiens
attatattatataaa

SEQ ID NO: 57569 - DNA, 15 bp, Homo sapiens
tattatattatataa

SEQ ID NO: 57570 - DNA, 15 bp, Homo sapiens
atattatattatata

SEQ ID NO: 57571 - DNA, 15 bp, Homo sapiens
aatattatattatat

SEQ ID NO: 57572 - DNA, 15 bp, Homo sapiens
aaatattatattata

SEQ ID NO: 57573 - DNA, 15 bp, Homo sapiens
caaatattatattat

SEQ ID NO: 57574 - DNA, 15 bp, Homo sapiens
acaaatattatatta

SEQ ID NO: 57575 - DNA, 15 bp, Homo sapiens
tacaaatattatatt

SEQ ID NO: 57576 - DNA, 15 bp, Homo sapiens
ttacaaatattatat

SEQ ID NO: 57577 - DNA, 15 bp, Homo sapiens
attacaaatattata

SEQ ID NO: 57578 - DNA, 15 bp, Homo sapiens
tattacaaatattat

SEQ ID NO: 57579 - DNA, 15 bp, Homo sapiens
atattacaaatatta

SEQ ID NO: 57580 - DNA, 15 bp, Homo sapiens
tatattacaaatatt

SEQ ID NO: 57581 - DNA, 15 bp, Homo sapiens
atatattacaaatat

SEQ ID NO: 57582 - DNA, 15 bp, Homo sapiens
tatatattacaaata

SEQ ID NO: 57583 - DNA, 15 bp, Homo sapiens
ttatatattacaaat

SEQ ID NO: 57584 - DNA, 15 bp, Homo sapiens
attatatattacaaa

SEQ ID NO: 57585 - DNA, 15 bp, Homo sapiens
tattatatattacaa

SEQ ID NO: 57586 - DNA, 15 bp, Homo sapiens
gtattatatattaca

SEQ ID NO: 57587 - DNA, 15 bp, Homo sapiens
tgtattatatattac

SEQ ID NO: 57588 - DNA, 15 bp, Homo sapiens
atgtattatatatta

SEQ ID NO: 57589 - DNA, 15 bp, Homo sapiens
tatgtattatatatt

SEQ ID NO: 57590 - DNA, 15 bp, Homo sapiens
atatgtattatatat

SEQ ID NO: 57591 - DNA, 15 bp, Homo sapiens
tatatgtattatata

SEQ ID NO: 57592 - DNA, 15 bp, Homo sapiens
atatatgtattatat

SEQ ID NO: 57593 - DNA, 15 bp, Homo sapiens
tatatatgtattata

SEQ ID NO: 57594 - DNA, 15 bp, Homo sapiens
atatatatgtattat

SEQ ID NO: 57595 - DNA, 15 bp, Homo sapiens
catatatatgtatta

SEQ ID NO: 57596 - DNA, 15 bp, Homo sapiens
acatatatatgtatt

SEQ ID NO: 57597 - DNA, 15 bp, Homo sapiens
tacatatatatgtat

SEQ ID NO: 57598 - DNA, 15 bp, Homo sapiens
ttacatatatatgta

SEQ ID NO: 57599 - DNA, 15 bp, Homo sapiens
tttacatatatatgt

SEQ ID NO: 57600 - DNA, 15 bp, Homo sapiens
atttacatatatatg

SEQ ID NO: 57601 - DNA, 15 bp, Homo sapiens
tatttacatatatat

SEQ ID NO: 57602 - DNA, 15 bp, Homo sapiens
atatttacatatata

SEQ ID NO: 57603 - DNA, 15 bp, Homo sapiens
tatatttacatatat

SEQ ID NO: 57604 - DNA, 15 bp, Homo sapiens
atatatttacatata

SEQ ID NO: 57605 - DNA, 15 bp, Homo sapiens
tatatatttacatat

SEQ ID NO: 57606 - DNA, 15 bp, Homo sapiens
atatatatttacata

SEQ ID NO: 57607 - DNA, 15 bp, Homo sapiens
aatatatatttacat

SEQ ID NO: 57608 - DNA, 15 bp, Homo sapiens
aaatatatatttaca

SEQ ID NO: 57609 - DNA, 15 bp, Homo sapiens
taaatatatatttac

SEQ ID NO: 57610 - DNA, 15 bp, Homo sapiens
ataaatatatattta

SEQ ID NO: 57611 - DNA, 15 bp, Homo sapiens
gataaatatatattt

SEQ ID NO: 57612 - DNA, 15 bp, Homo sapiens
agataaatatatatt

SEQ ID NO: 57613 - DNA, 15 bp, Homo sapiens
tagataaatatatat

SEQ ID NO: 57614 - DNA, 15 bp, Homo sapiens
atagataaatatata

SEQ ID NO: 57615 - DNA, 15 bp, Homo sapiens
tatagataaatatat

SEQ ID NO: 57616 - DNA, 15 bp, Homo sapiens
ttatagataaatata

SEQ ID NO: 57617 - DNA, 15 bp, Homo sapiens
tttatagataaatat

SEQ ID NO: 57618 - DNA, 15 bp, Homo sapiens
atttatagataaata

SEQ ID NO: 57619 - DNA, 15 bp, Homo sapiens
tatttatagataaat

SEQ ID NO: 57620 - DNA, 15 bp, Homo sapiens
atatttatagataaa

SEQ ID NO: 57621 - DNA, 15 bp, Homo sapiens
aatatttatagataa

SEQ ID NO: 57622 - DNA, 15 bp, Homo sapiens
aaatatttatagata

SEQ ID NO: 57623 - DNA, 15 bp, Homo sapiens
taaatatttatagat

SEQ ID NO: 57624 - DNA, 15 bp, Homo sapiens
ttaaatatttataga

SEQ ID NO: 57625 - DNA, 15 bp, Homo sapiens
tttaaatatttatag

SEQ ID NO: 57626 - DNA, 15 bp, Homo sapiens
atttaaatatttata

SEQ ID NO: 57627 - DNA, 15 bp, Homo sapiens
tatttaaatatttat

SEQ ID NO: 57628 - DNA, 15 bp, Homo sapiens
atatttaaatattta

SEQ ID NO: 57629 - DNA, 15 bp, Homo sapiens
tatatttaaatattt

SEQ ID NO: 57630 - DNA, 15 bp, Homo sapiens
ttatatttaaatatt

SEQ ID NO: 57631 - DNA, 15 bp, Homo sapiens
tttatatttaaatat

SEQ ID NO: 57632 - DNA, 15 bp, Homo sapiens
ttttatatttaaata

SEQ ID NO: 57633 - DNA, 15 bp, Homo sapiens
tttttatatttaaat

SEQ ID NO: 57634 - DNA, 15 bp, Homo sapiens
atttttatatttaaa

SEQ ID NO: 57635 - DNA, 15 bp, Homo sapiens
tatttttatatttaa

SEQ ID NO: 57636 - DNA, 15 bp, Homo sapiens
atatttttatattta

SEQ ID NO: 57637 - DNA, 15 bp, Homo sapiens
aatatttttatattt

SEQ ID NO: 57638 - DNA, 15 bp, Homo sapiens
aaatatttttatatt

SEQ ID NO: 57639 - DNA, 15 bp, Homo sapiens
taaatatttttatat

SEQ ID NO: 57640 - DNA, 15 bp, Homo sapiens
ataaatatttttata

SEQ ID NO: 57641 - DNA, 15 bp, Homo sapiens
cataaatatttttat

SEQ ID NO: 57642 - DNA, 15 bp, Homo sapiens
acataaatattttta

SEQ ID NO: 57643 - DNA, 15 bp, Homo sapiens
tacataaatattttt

SEQ ID NO: 57644 - DNA, 15 bp, Homo sapiens
atacataaatatttt

SEQ ID NO: 57645 - DNA, 15 bp, Homo sapiens
aatacataaatattt

SEQ ID NO: 57646 - DNA, 15 bp, Homo sapiens
aaatacataaatatt

SEQ ID NO: 57647 - DNA, 15 bp, Homo sapiens
taaatacataaatat

SEQ ID NO: 57648 - DNA, 15 bp, Homo sapiens
ataaatacataaata

SEQ ID NO: 57649 - DNA, 15 bp, Homo sapiens
tataaatacataaat

SEQ ID NO: 57650 - DNA, 15 bp, Homo sapiens
atataaatacataaa

SEQ ID NO: 57651 - DNA, 15 bp, Homo sapiens
tatataaatacataa

SEQ ID NO: 57652 - DNA, 15 bp, Homo sapiens
atatataaatacata

SEQ ID NO: 57653 - DNA, 15 bp, Homo sapiens
aatatataaatacat

SEQ ID NO: 57654 - DNA, 15 bp, Homo sapiens
aaatatataaataca

SEQ ID NO: 57655 - DNA, 15 bp, Homo sapiens
taaatatataaatac

SEQ ID NO: 57656 - DNA, 15 bp, Homo sapiens
ataaatatataaata

SEQ ID NO: 57657 - DNA, 15 bp, Homo sapiens
gataaatatataaat

SEQ ID NO: 57658 - DNA, 15 bp, Homo sapiens
agataaatatataaa

SEQ ID NO: 57659 - DNA, 15 bp, Homo sapiens
tagataaatatataa

SEQ ID NO: 57660 - DNA, 15 bp, Homo sapiens
tatatttatagataa

SEQ ID NO: 57661 - DNA, 15 bp, Homo sapiens
ttatatttatagata

SEQ ID NO: 57662 - DNA, 15 bp, Homo sapiens
tttatatttatagat

SEQ ID NO: 57663 - DNA, 15 bp, Homo sapiens
ttttatatttataga

SEQ ID NO: 57664 - DNA, 15 bp, Homo sapiens
tttttatatttatag

SEQ ID NO: 57665 - DNA, 15 bp, Homo sapiens
atttttatatttata

SEQ ID NO: 57666 - DNA, 15 bp, Homo sapiens
tatttttatatttat

SEQ ID NO: 57667 - DNA, 15 bp, Homo sapiens
aaagtatttgcttta

SEQ ID NO: 57668 - DNA, 15 bp, Homo sapiens
taaagtatttgcttt

SEQ ID NO: 57669 - DNA, 15 bp, Homo sapiens
ttaaagtatttgctt

SEQ ID NO: 57670 - DNA, 15 bp, Homo sapiens
cttaaagtatttgct

SEQ ID NO: 57671 - DNA, 15 bp, Homo sapiens
tcttaaagtatttgc

SEQ ID NO: 57672 - DNA, 15 bp, Homo sapiens
atcttaaagtatttg

SEQ ID NO: 57673 - DNA, 15 bp, Homo sapiens
aatcttaaagtattt

SEQ ID NO: 57674 - DNA, 15 bp, Homo sapiens
caatcttaaagtatt

SEQ ID NO: 57675 - DNA, 15 bp, Homo sapiens
acaatcttaaagtat

SEQ ID NO: 57676 - DNA, 15 bp, Homo sapiens
gacaatcttaaagta

SEQ ID NO: 57677 - DNA, 15 bp, Homo sapiens
agacaatcttaaagt

SEQ ID NO: 57678 - DNA, 15 bp, Homo sapiens
tagacaatcttaaag

SEQ ID NO: 57679 - DNA, 15 bp, Homo sapiens
ctagacaatcttaaa

SEQ ID NO: 57680 - DNA, 15 bp, Homo sapiens
gctagacaatcttaa

SEQ ID NO: 57681 - DNA, 15 bp, Homo sapiens
agctagacaatctta

SEQ ID NO: 57682 - DNA, 15 bp, Homo sapiens
tagctagacaatctt

SEQ ID NO: 57683 - DNA, 15 bp, Homo sapiens
ctagctagacaatct

SEQ ID NO: 57684 - DNA, 15 bp, Homo sapiens
cctagctagacaatc

SEQ ID NO: 57685 - DNA, 15 bp, Homo sapiens
gcctagctagacaat

SEQ ID NO: 57686 - DNA, 15 bp, Homo sapiens
cgcctagctagacaa

SEQ ID NO: 57687 - DNA, 15 bp, Homo sapiens
tcgcctagctagaca

SEQ ID NO: 57688 - DNA, 15 bp, Homo sapiens
ctcgcctagctagac

SEQ ID NO: 57689 - DNA, 15 bp, Homo sapiens
gctcgcctagctaga

SEQ ID NO: 57690 - DNA, 15 bp, Homo sapiens
agctcgcctagctag

SEQ ID NO: 57691 - DNA, 15 bp, Homo sapiens
cagctcgcctagcta

SEQ ID NO: 57692 - DNA, 15 bp, Homo sapiens
tcagctcgcctagct

SEQ ID NO: 57693 - DNA, 15 bp, Homo sapiens
gtcagctcgcctagc

SEQ ID NO: 57694 - DNA, 15 bp, Homo sapiens
agtcagctcgcctag

SEQ ID NO: 57695 - DNA, 15 bp, Homo sapiens
gagtcagctcgccta

SEQ ID NO: 57696 - DNA, 15 bp, Homo sapiens
tgagtcagctcgcct

SEQ ID NO: 57697 - DNA, 15 bp, Homo sapiens
atgagtcagctcgcc

SEQ ID NO: 57698 - DNA, 15 bp, Homo sapiens
tatgagtcagctcgc

SEQ ID NO: 57699 - DNA, 15 bp, Homo sapiens
gtatgagtcagctcg

SEQ ID NO: 57700 - DNA, 15 bp, Homo sapiens
agtatgagtcagctc

SEQ ID NO: 57701 - DNA, 15 bp, Homo sapiens
aagtatgagtcagct

SEQ ID NO: 57702 - DNA, 15 bp, Homo sapiens
caagtatgagtcagc

SEQ ID NO: 57703 - DNA, 15 bp, Homo sapiens
acaagtatgagtcag

SEQ ID NO: 57704 - DNA, 15 bp, Homo sapiens
tacaagtatgagtca

SEQ ID NO: 57705 - DNA, 15 bp, Homo sapiens
ttacaagtatgagtc

SEQ ID NO: 57706 - DNA, 15 bp, Homo sapiens
attacaagtatgagt

SEQ ID NO: 57707 - DNA, 15 bp, Homo sapiens
gattacaagtatgag

SEQ ID NO: 57708 - DNA, 15 bp, Homo sapiens
ggattacaagtatga

SEQ ID NO: 57709 - DNA, 15 bp, Homo sapiens
gggattacaagtatg

SEQ ID NO: 57710 - DNA, 15 bp, Homo sapiens
tgggattacaagtat

SEQ ID NO: 57711 - DNA, 15 bp, Homo sapiens
ctgggattacaagta

SEQ ID NO: 57712 - DNA, 15 bp, Homo sapiens
gctgggattacaagt

SEQ ID NO: 57713 - DNA, 15 bp, Homo sapiens
tgctgggattacaag

SEQ ID NO: 57714 - DNA, 15 bp, Homo sapiens
gtgctgggattacaa

SEQ ID NO: 57715 - DNA, 15 bp, Homo sapiens
agtgctgggattaca

SEQ ID NO: 57716 - DNA, 15 bp, Homo sapiens
aagtgctgggattac

SEQ ID NO: 57717 - DNA, 15 bp, Homo sapiens
aaagtgctgggatta

SEQ ID NO: 57718 - DNA, 15 bp, Homo sapiens
caaagtgctgggatt

SEQ ID NO: 57719 - DNA, 15 bp, Homo sapiens
ccaaagtgctgggat

SEQ ID NO: 57720 - DNA, 15 bp, Homo sapiens
cccaaagtgctggga

SEQ ID NO: 57721 - DNA, 15 bp, Homo sapiens
tcccaaagtgctggg

SEQ ID NO: 57722 - DNA, 15 bp, Homo sapiens
ctcccaaagtgctgg

SEQ ID NO: 57723 - DNA, 15 bp, Homo sapiens
tctcccaaagtgctg

SEQ ID NO: 57724 - DNA, 15 bp, Homo sapiens
gtctcccaaagtgct

SEQ ID NO: 57725 - DNA, 15 bp, Homo sapiens
agtctcccaaagtgc

SEQ ID NO: 57726 - DNA, 15 bp, Homo sapiens
cagtctcccaaagtg

SEQ ID NO: 57727 - DNA, 15 bp, Homo sapiens
tcagtctcccaaagt

SEQ ID NO: 57728 - DNA, 15 bp, Homo sapiens
ctcagtctcccaaag

SEQ ID NO: 57729 - DNA, 15 bp, Homo sapiens
cctcagtctcccaaa

SEQ ID NO: 57730 - DNA, 15 bp, Homo sapiens
acctcagtctcccaa

SEQ ID NO: 57731 - DNA, 15 bp, Homo sapiens
cacctcagtctccca

SEQ ID NO: 57732 - DNA, 15 bp, Homo sapiens
ccacctcagtctccc

SEQ ID NO: 57733 - DNA, 15 bp, Homo sapiens
cccacctcagtctcc

SEQ ID NO: 57734 - DNA, 15 bp, Homo sapiens
tcccacctcagtctc

SEQ ID NO: 57735 - DNA, 15 bp, Homo sapiens
ctcccacctcagtct

SEQ ID NO: 57736 - DNA, 15 bp, Homo sapiens
cctcccacctcagtc

SEQ ID NO: 57737 - DNA, 15 bp, Homo sapiens
ccctcccacctcagt

SEQ ID NO: 57738 - DNA, 15 bp, Homo sapiens
accctcccacctcag

SEQ ID NO: 57739 - DNA, 15 bp, Homo sapiens
aaccctcccacctca

SEQ ID NO: 57740 - DNA, 15 bp, Homo sapiens
caaccctcccacctc

SEQ ID NO: 57741 - DNA, 15 bp, Homo sapiens
gcaaccctcccacct

SEQ ID NO: 57742 - DNA, 15 bp, Homo sapiens
agcaaccctcccacc

SEQ ID NO: 57743 - DNA, 15 bp, Homo sapiens
aagcaaccctcccac

SEQ ID NO: 57744 - DNA, 15 bp, Homo sapiens
caagcaaccctccca

SEQ ID NO: 57745 - DNA, 15 bp, Homo sapiens
tcaagcaaccctccc

SEQ ID NO: 57746 - DNA, 15 bp, Homo sapiens
ctcaagcaaccctcc

SEQ ID NO: 57747 - DNA, 15 bp, Homo sapiens
gctcaagcaaccctc

SEQ ID NO: 57748 - DNA, 15 bp, Homo sapiens
tgctcaagcaaccct

SEQ ID NO: 57749 - DNA, 15 bp, Homo sapiens
gtgctcaagcaaccc

SEQ ID NO: 57750 - DNA, 15 bp, Homo sapiens
tgtgctcaagcaacc

SEQ ID NO: 57751 - DNA, 15 bp, Homo sapiens
ttgtgctcaagcaac

SEQ ID NO: 57752 - DNA, 15 bp, Homo sapiens
cttgtgctcaagcaa

SEQ ID NO: 57753 - DNA, 15 bp, Homo sapiens
tcttgtgctcaagca

SEQ ID NO: 57754 - DNA, 15 bp, Homo sapiens
ctcttgtgctcaagc

SEQ ID NO: 57755 - DNA, 15 bp, Homo sapiens
actcttgtgctcaag

SEQ ID NO: 57756 - DNA, 15 bp, Homo sapiens
aactcttgtgctcaa

SEQ ID NO: 57757 - DNA, 15 bp, Homo sapiens
aaactcttgtgctca

SEQ ID NO: 57758 - DNA, 15 bp, Homo sapiens
caaactcttgtgctc

SEQ ID NO: 57759 - DNA, 15 bp, Homo sapiens
tcaaactcttgtgct

SEQ ID NO: 57760 - DNA, 15 bp, Homo sapiens
ctcaaactcttgtgc

SEQ ID NO: 57761 - DNA, 15 bp, Homo sapiens
tctcaaactcttgtg

SEQ ID NO: 57762 - DNA, 15 bp, Homo sapiens
gtctcaaactcttgt

SEQ ID NO: 57763 - DNA, 15 bp, Homo sapiens
ggtctcaaactcttg

SEQ ID NO: 57764 - DNA, 15 bp, Homo sapiens
tggtctcaaactctt

SEQ ID NO: 57765 - DNA, 15 bp, Homo sapiens
ctggtctcaaactct

SEQ ID NO: 57766 - DNA, 15 bp, Homo sapiens
gctggtctcaaactc

SEQ ID NO: 57767 - DNA, 15 bp, Homo sapiens
ggctggtctcaaact

SEQ ID NO: 57768 - DNA, 15 bp, Homo sapiens
aggctggtctcaaac

SEQ ID NO: 57769 - DNA, 15 bp, Homo sapiens
caggctggtctcaaa

SEQ ID NO: 57770 - DNA, 15 bp, Homo sapiens
ccaggctggtctcaa

SEQ ID NO: 57771 - DNA, 15 bp, Homo sapiens
tccaggctggtctca

SEQ ID NO: 57772 - DNA, 15 bp, Homo sapiens
gtccaggctggtctc

SEQ ID NO: 57773 - DNA, 15 bp, Homo sapiens
tgtccaggctggtct

SEQ ID NO: 57774 - DNA, 15 bp, Homo sapiens
ttgtccaggctggtc

SEQ ID NO: 57775 - DNA, 15 bp, Homo sapiens
gttgtccaggctggt

SEQ ID NO: 57776 - DNA, 15 bp, Homo sapiens
tgttgtccaggctgg

SEQ ID NO: 57777 - DNA, 15 bp, Homo sapiens
atgttgtccaggctg

SEQ ID NO: 57778 - DNA, 15 bp, Homo sapiens
tatgttgtccaggct

SEQ ID NO: 57779 - DNA, 15 bp, Homo sapiens
ctatgttgtccaggc

SEQ ID NO: 57780 - DNA, 15 bp, Homo sapiens
actatgttgtccagg

SEQ ID NO: 57781 - DNA, 15 bp, Homo sapiens
cactatgttgtccag

SEQ ID NO: 57782 - DNA, 15 bp, Homo sapiens
tcactatgttgtcca

SEQ ID NO: 57783 - DNA, 15 bp, Homo sapiens
ctcactatgttgtcc

SEQ ID NO: 57784 - DNA, 15 bp, Homo sapiens
tctcactatgttgtc

SEQ ID NO: 57785 - DNA, 15 bp, Homo sapiens
atctcactatgttgt

SEQ ID NO: 57786 - DNA, 15 bp, Homo sapiens
gatctcactatgttg

SEQ ID NO: 57787 - DNA, 15 bp, Homo sapiens
agatctcactatgtt

SEQ ID NO: 57788 - DNA, 15 bp, Homo sapiens
gagatctcactatgt

SEQ ID NO: 57789 - DNA, 15 bp, Homo sapiens
tgagatctcactatg

SEQ ID NO: 57790 - DNA, 15 bp, Homo sapiens
atgagatctcactat

SEQ ID NO: 57791 - DNA, 15 bp, Homo sapiens
gatgagatctcacta

SEQ ID NO: 57792 - DNA, 15 bp, Homo sapiens
agatgagatctcact

SEQ ID NO: 57793 - DNA, 15 bp, Homo sapiens
gagatgagatctcac

SEQ ID NO: 57794 - DNA, 15 bp, Homo sapiens
agagatgagatctca

SEQ ID NO: 57795 - DNA, 15 bp, Homo sapiens
tagagatgagatctc

SEQ ID NO: 57796 - DNA, 15 bp, Homo sapiens
gtagagatgagatct

SEQ ID NO: 57797 - DNA, 15 bp, Homo sapiens
tgtagagatgagatc

SEQ ID NO: 57798 - DNA, 15 bp, Homo sapiens
ttgtagagatgagat

SEQ ID NO: 57799 - DNA, 15 bp, Homo sapiens
tttgtagagatgaga

SEQ ID NO: 57800 - DNA, 15 bp, Homo sapiens
ttttgtagagatgag

SEQ ID NO: 57801 - DNA, 15 bp, Homo sapiens
attttgtagagatga

SEQ ID NO: 57802 - DNA, 15 bp, Homo sapiens
tattttgtagagatg

SEQ ID NO: 57803 - DNA, 15 bp, Homo sapiens
ttattttgtagagat

SEQ ID NO: 57804 - DNA, 15 bp, Homo sapiens
attattttgtagaga

SEQ ID NO: 57805 - DNA, 15 bp, Homo sapiens
tattattttgtagag

SEQ ID NO: 57806 - DNA, 15 bp, Homo sapiens
ttattattttgtaga

SEQ ID NO: 57807 - DNA, 15 bp, Homo sapiens
tttattattttgtag

SEQ ID NO: 57808 - DNA, 15 bp, Homo sapiens
ttttattattttgta

SEQ ID NO: 57809 - DNA, 15 bp, Homo sapiens
tttttattattttgt

SEQ ID NO: 57810 - DNA, 15 bp, Homo sapiens
atttttattattttg

SEQ ID NO: 57811 - DNA, 15 bp, Homo sapiens
tatttttattatttt

SEQ ID NO: 57812 - DNA, 15 bp, Homo sapiens
ttatttttattattt

SEQ ID NO: 57813 - DNA, 15 bp, Homo sapiens
tttatttttattatt

SEQ ID NO: 57814 - DNA, 15 bp, Homo sapiens
ttttatttttattat

SEQ ID NO: 57815 - DNA, 15 bp, Homo sapiens
tttttatttttatta

SEQ ID NO: 57816 - DNA, 15 bp, Homo sapiens
atttttatttttatt

SEQ ID NO: 57817 - DNA, 15 bp, Homo sapiens
gatttttatttttat

SEQ ID NO: 57818 - DNA, 15 bp, Homo sapiens
agatttttattttta

SEQ ID NO: 57819 - DNA, 15 bp, Homo sapiens
aagatttttattttt

SEQ ID NO: 57820 - DNA, 15 bp, Homo sapiens
taagatttttatttt

SEQ ID NO: 57821 - DNA, 15 bp, Homo sapiens
ttaagatttttattt

SEQ ID NO: 57822 - DNA, 15 bp, Homo sapiens
tttaagatttttatt

SEQ ID NO: 57823 - DNA, 15 bp, Homo sapiens
ttttaagatttttat

SEQ ID NO: 57824 - DNA, 15 bp, Homo sapiens
tttttaagattttta

SEQ ID NO: 57825 - DNA, 15 bp, Homo sapiens
ttttttaagattttt

SEQ ID NO: 57826 - DNA, 15 bp, Homo sapiens
attttttaagatttt

SEQ ID NO: 57827 - DNA, 15 bp, Homo sapiens
tattttttaagattt

SEQ ID NO: 57828 - DNA, 15 bp, Homo sapiens
ctattttttaagatt

SEQ ID NO: 57829 - DNA, 15 bp, Homo sapiens
gctattttttaagat

SEQ ID NO: 57830 - DNA, 15 bp, Homo sapiens
tgctattttttaaga

SEQ ID NO: 57831 - DNA, 15 bp, Homo sapiens
atgctattttttaag

SEQ ID NO: 57832 - DNA, 15 bp, Homo sapiens
tatgctattttttaa

SEQ ID NO: 57833 - DNA, 15 bp, Homo sapiens
atatgctatttttta

SEQ ID NO: 57834 - DNA, 15 bp, Homo sapiens
catatgctatttttt

SEQ ID NO: 57835 - DNA, 15 bp, Homo sapiens
acatatgctattttt

SEQ ID NO: 57836 - DNA, 15 bp, Homo sapiens
gacatatgctatttt

SEQ ID NO: 57837 - DNA, 15 bp, Homo sapiens
tgacatatgctattt

SEQ ID NO: 57838 - DNA, 15 bp, Homo sapiens
atgacatatgctatt

SEQ ID NO: 57839 - DNA, 15 bp, Homo sapiens
catgacatatgctat

SEQ ID NO: 57840 - DNA, 15 bp, Homo sapiens
ccatgacatatgcta

SEQ ID NO: 57841 - DNA, 15 bp, Homo sapiens
gccatgacatatgct

SEQ ID NO: 57842 - DNA, 15 bp, Homo sapiens
tgccatgacatatgc

SEQ ID NO: 57843 - DNA, 15 bp, Homo sapiens
atgccatgacatatg

SEQ ID NO: 57844 - DNA, 15 bp, Homo sapiens
catgccatgacatat

SEQ ID NO: 57845 - DNA, 15 bp, Homo sapiens
tcatgccatgacata

SEQ ID NO: 57846 - DNA, 15 bp, Homo sapiens
ttcatgccatgacat

SEQ ID NO: 57847 - DNA, 15 bp, Homo sapiens
gttcatgccatgaca

SEQ ID NO: 57848 - DNA, 15 bp, Homo sapiens
ggttcatgccatgac

SEQ ID NO: 57849 - DNA, 15 bp, Homo sapiens
aggttcatgccatga

SEQ ID NO: 57850 - DNA, 15 bp, Homo sapiens
caggttcatgccatg

SEQ ID NO: 57851 - DNA, 15 bp, Homo sapiens
acaggttcatgccat

SEQ ID NO: 57852 - DNA, 15 bp, Homo sapiens
tacaggttcatgcca

SEQ ID NO: 57853 - DNA, 15 bp, Homo sapiens
ctacaggttcatgcc

SEQ ID NO: 57854 - DNA, 15 bp, Homo sapiens
actacaggttcatgc

SEQ ID NO: 57855 - DNA, 15 bp, Homo sapiens
gactacaggttcatg

SEQ ID NO: 57856 - DNA, 15 bp, Homo sapiens
ggactacaggttcat

SEQ ID NO: 57857 - DNA, 15 bp, Homo sapiens
gggactacaggttca

SEQ ID NO: 57858 - DNA, 15 bp, Homo sapiens
tgggactacaggttc

SEQ ID NO: 57859 - DNA, 15 bp, Homo sapiens
ctgggactacaggtt

SEQ ID NO: 57860 - DNA, 15 bp, Homo sapiens
gctgggactacaggt

SEQ ID NO: 57861 - DNA, 15 bp, Homo sapiens
agctgggactacagg

SEQ ID NO: 57862 - DNA, 15 bp, Homo sapiens
tagctgggactacag

SEQ ID NO: 57863 - DNA, 15 bp, Homo sapiens
gtagctgggactaca

SEQ ID NO: 57864 - DNA, 15 bp, Homo sapiens
agtagctgggactac

SEQ ID NO: 57865 - DNA, 15 bp, Homo sapiens
aagtagctgggacta

SEQ ID NO: 57866 - DNA, 15 bp, Homo sapiens
caagtagctgggact

SEQ ID NO: 57867 - DNA, 15 bp, Homo sapiens
ccaagtagctgggac

SEQ ID NO: 57868 - DNA, 15 bp, Homo sapiens
cccaagtagctggga

SEQ ID NO: 57869 - DNA, 15 bp, Homo sapiens
tcccaagtagctggg

SEQ ID NO: 57870 - DNA, 15 bp, Homo sapiens
ctcccaagtagctgg

SEQ ID NO: 57871 - DNA, 15 bp, Homo sapiens
cctcccaagtagctg

SEQ ID NO: 57872 - DNA, 15 bp, Homo sapiens
gcctcccaagtagct

SEQ ID NO: 57873 - DNA, 15 bp, Homo sapiens
agcctcccaagtagc

SEQ ID NO: 57874 - DNA, 15 bp, Homo sapiens
cagcctcccaagtag

SEQ ID NO: 57875 - DNA, 15 bp, Homo sapiens
tcagcctcccaagta

SEQ ID NO: 57876 - DNA, 15 bp, Homo sapiens
ctcagcctcccaagt

SEQ ID NO: 57877 - DNA, 15 bp, Homo sapiens
cctcagcctcccaag

SEQ ID NO: 57878 - DNA, 15 bp, Homo sapiens
gcctcagcctcccaa

SEQ ID NO: 57879 - DNA, 15 bp, Homo sapiens
tgcctcagcctccca

SEQ ID NO: 57880 - DNA, 15 bp, Homo sapiens
ctgcctcagcctccc

SEQ ID NO: 57881 - DNA, 15 bp, Homo sapiens
cctgcctcagcctcc

SEQ ID NO: 57882 - DNA, 15 bp, Homo sapiens
tcctgcctcagcctc

SEQ ID NO: 57883 - DNA, 15 bp, Homo sapiens
ctcctgcctcagcct

SEQ ID NO: 57884 - DNA, 15 bp, Homo sapiens
cctcctgcctcagcc

SEQ ID NO: 57885 - DNA, 15 bp, Homo sapiens
ccctcctgcctcagc

SEQ ID NO: 57886 - DNA, 15 bp, Homo sapiens
accctcctgcctcag

SEQ ID NO: 57887 - DNA, 15 bp, Homo sapiens
gaccctcctgcctca

SEQ ID NO: 57888 - DNA, 15 bp, Homo sapiens
agaccctcctgcctc

SEQ ID NO: 57889 - DNA, 15 bp, Homo sapiens
aagaccctcctgcct

SEQ ID NO: 57890 - DNA, 15 bp, Homo sapiens
taagaccctcctgcc

SEQ ID NO: 57891 - DNA, 15 bp, Homo sapiens
ctaagaccctcctgc

SEQ ID NO: 57892 - DNA, 15 bp, Homo sapiens
cctaagaccctcctg

SEQ ID NO: 57893 - DNA, 15 bp, Homo sapiens
tcctaagaccctcct

SEQ ID NO: 57894 - DNA, 15 bp, Homo sapiens
ctcctaagaccctcc

SEQ ID NO: 57895 - DNA, 15 bp, Homo sapiens
actcctaagaccctc

SEQ ID NO: 57896 - DNA, 15 bp, Homo sapiens
gactcctaagaccct

SEQ ID NO: 57897 - DNA, 15 bp, Homo sapiens
agactcctaagaccc

SEQ ID NO: 57898 - DNA, 15 bp, Homo sapiens
cagactcctaagacc

SEQ ID NO: 57899 - DNA, 15 bp, Homo sapiens
tcagactcctaagac

SEQ ID NO: 57900 - DNA, 15 bp, Homo sapiens
ctcagactcctaaga

SEQ ID NO: 57901 - DNA, 15 bp, Homo sapiens
cctcagactcctaag

SEQ ID NO: 57902 - DNA, 15 bp, Homo sapiens
gcctcagactcctaa

SEQ ID NO: 57903 - DNA, 15 bp, Homo sapiens
agcctcagactccta

SEQ ID NO: 57904 - DNA, 15 bp, Homo sapiens
cagcctcagactcct

SEQ ID NO: 57905 - DNA, 15 bp, Homo sapiens
gcagcctcagactcc

SEQ ID NO: 57906 - DNA, 15 bp, Homo sapiens
tgcagcctcagactc

SEQ ID NO: 57907 - DNA, 15 bp, Homo sapiens
ctgcagcctcagact

SEQ ID NO: 57908 - DNA, 15 bp, Homo sapiens
actgcagcctcagac

SEQ ID NO: 57909 - DNA, 15 bp, Homo sapiens
cactgcagcctcaga

SEQ ID NO: 57910 - DNA, 15 bp, Homo sapiens
tcactgcagcctcag

SEQ ID NO: 57911 - DNA, 15 bp, Homo sapiens
ctcactgcagcctca

SEQ ID NO: 57912 - DNA, 15 bp, Homo sapiens
actcactgcagcctc

SEQ ID NO: 57913 - DNA, 15 bp, Homo sapiens
aactcactgcagcct

SEQ ID NO: 57914 - DNA, 15 bp, Homo sapiens
taactcactgcagcc

SEQ ID NO: 57915 - DNA, 15 bp, Homo sapiens
ataactcactgcagc

SEQ ID NO: 57916 - DNA, 15 bp, Homo sapiens
cataactcactgcag

SEQ ID NO: 57917 - DNA, 15 bp, Homo sapiens
tcataactcactgca

SEQ ID NO: 57918 - DNA, 15 bp, Homo sapiens
atcataactcactgc

SEQ ID NO: 57919 - DNA, 15 bp, Homo sapiens
gatcataactcactg

SEQ ID NO: 57920 - DNA, 15 bp, Homo sapiens
tgatcataactcact

SEQ ID NO: 57921 - DNA, 15 bp, Homo sapiens
gtgatcataactcac

SEQ ID NO: 57922 - DNA, 15 bp, Homo sapiens
tgtgatcataactca

SEQ ID NO: 57923 - DNA, 15 bp, Homo sapiens
gtgtgatcataactc

SEQ ID NO: 57924 - DNA, 15 bp, Homo sapiens
ggtgtgatcataact

SEQ ID NO: 57925 - DNA, 15 bp, Homo sapiens
tggtgtgatcataac

SEQ ID NO: 57926 - DNA, 15 bp, Homo sapiens
gtggtgtgatcataa

SEQ ID NO: 57927 - DNA, 15 bp, Homo sapiens
agtggtgtgatcata

SEQ ID NO: 57928 - DNA, 15 bp, Homo sapiens
cagtggtgtgatcat

SEQ ID NO: 57929 - DNA, 15 bp, Homo sapiens
gcagtggtgtgatca

SEQ ID NO: 57930 - DNA, 15 bp, Homo sapiens
tgcagtggtgtgatc

SEQ ID NO: 57931 - DNA, 15 bp, Homo sapiens
gtgcagtggtgtgat

SEQ ID NO: 57932 - DNA, 15 bp, Homo sapiens
agtgcagtggtgtga

SEQ ID NO: 57933 - DNA, 15 bp, Homo sapiens
gagtgcagtggtgtg

SEQ ID NO: 57934 - DNA, 15 bp, Homo sapiens
ggagtgcagtggtgt

SEQ ID NO: 57935 - DNA, 15 bp, Homo sapiens
tggagtgcagtggtg

SEQ ID NO: 57936 - DNA, 15 bp, Homo sapiens
ctggagtgcagtggt

SEQ ID NO: 57937 - DNA, 15 bp, Homo sapiens
gctggagtgcagtgg

SEQ ID NO: 57938 - DNA, 15 bp, Homo sapiens
ggctggagtgcagtg

SEQ ID NO: 57939 - DNA, 15 bp, Homo sapiens
aggctggagtgcagt

SEQ ID NO: 57940 - DNA, 15 bp, Homo sapiens
caggctggagtgcag

SEQ ID NO: 57941 - DNA, 15 bp, Homo sapiens
ccaggctggagtgca

SEQ ID NO: 57942 - DNA, 15 bp, Homo sapiens
cccaggctggagtgc

SEQ ID NO: 57943 - DNA, 15 bp, Homo sapiens
acccaggctggagtg

SEQ ID NO: 57944 - DNA, 15 bp, Homo sapiens
cacccaggctggagt

SEQ ID NO: 57945 - DNA, 15 bp, Homo sapiens
ccacccaggctggag

SEQ ID NO: 57946 - DNA, 15 bp, Homo sapiens
gccacccaggctgga

SEQ ID NO: 57947 - DNA, 15 bp, Homo sapiens
tgccacccaggctgg

SEQ ID NO: 57948 - DNA, 15 bp, Homo sapiens
ctgccacccaggctg

SEQ ID NO: 57949 - DNA, 15 bp, Homo sapiens
tctgccacccaggct

SEQ ID NO: 57950 - DNA, 15 bp, Homo sapiens
ctctgccacccaggc

SEQ ID NO: 57951 - DNA, 15 bp, Homo sapiens
gctctgccacccagg

SEQ ID NO: 57952 - DNA, 15 bp, Homo sapiens
tgctctgccacccag

SEQ ID NO: 57953 - DNA, 15 bp, Homo sapiens
ttgctctgccaccca

SEQ ID NO: 57954 - DNA, 15 bp, Homo sapiens
cttgctctgccaccc

SEQ ID NO: 57955 - DNA, 15 bp, Homo sapiens
tcttgctctgccacc

SEQ ID NO: 57956 - DNA, 15 bp, Homo sapiens
gtcttgctctgccac

SEQ ID NO: 57957 - DNA, 15 bp, Homo sapiens
ggtcttgctctgcca

SEQ ID NO: 57958 - DNA, 15 bp, Homo sapiens
gggtcttgctctgcc

SEQ ID NO: 57959 - DNA, 15 bp, Homo sapiens
agggtcttgctctgc

SEQ ID NO: 57960 - DNA, 15 bp, Homo sapiens
cagggtcttgctctg

SEQ ID NO: 57961 - DNA, 15 bp, Homo sapiens
acagggtcttgctct

SEQ ID NO: 57962 - DNA, 15 bp, Homo sapiens
gacagggtcttgctc

SEQ ID NO: 57963 - DNA, 15 bp, Homo sapiens
agacagggtcttgct

SEQ ID NO: 57964 - DNA, 15 bp, Homo sapiens
gagacagggtcttgc

SEQ ID NO: 57965 - DNA, 15 bp, Homo sapiens
tgagacagggtcttg

SEQ ID NO: 57966 - DNA, 15 bp, Homo sapiens
ttgagacagggtctt

SEQ ID NO: 57967 - DNA, 15 bp, Homo sapiens
tttgagacagggtct

SEQ ID NO: 57968 - DNA, 15 bp, Homo sapiens
ttttgagacagggtc

SEQ ID NO: 57969 - DNA, 15 bp, Homo sapiens
tttttgagacagggt

SEQ ID NO: 57970 - DNA, 15 bp, Homo sapiens
gtttttgagacaggg

SEQ ID NO: 57971 - DNA, 15 bp, Homo sapiens
tgtttttgagacagg

SEQ ID NO: 57972 - DNA, 15 bp, Homo sapiens
ttgtttttgagacag

SEQ ID NO: 57973 - DNA, 15 bp, Homo sapiens
gttgtttttgagaca

SEQ ID NO: 57974 - DNA, 15 bp, Homo sapiens
cgttgtttttgagac

SEQ ID NO: 57975 - DNA, 15 bp, Homo sapiens
tcgttgtttttgaga

SEQ ID NO: 57976 - DNA, 15 bp, Homo sapiens
gtcgttgtttttgag

SEQ ID NO: 57977 - DNA, 15 bp, Homo sapiens
tgtcgttgtttttga

SEQ ID NO: 57978 - DNA, 15 bp, Homo sapiens
ttgtcgttgtttttg

SEQ ID NO: 57979 - DNA, 15 bp, Homo sapiens
gttgtcgttgttttt

SEQ ID NO: 57980 - DNA, 15 bp, Homo sapiens
tgttgtcgttgtttt

SEQ ID NO: 57981 - DNA, 15 bp, Homo sapiens
ttgttgtcgttgttt

SEQ ID NO: 57982 - DNA, 15 bp, Homo sapiens
tttgttgtcgttgtt

SEQ ID NO: 57983 - DNA, 15 bp, Homo sapiens
ttttgttgtcgttgt

SEQ ID NO: 57984 - DNA, 15 bp, Homo sapiens
tttttgttgtcgttg

SEQ ID NO: 57985 - DNA, 15 bp, Homo sapiens
ttttttgttgtcgtt

SEQ ID NO: 57986 - DNA, 15 bp, Homo sapiens
gttttttgttgtcgt

SEQ ID NO: 57987 - DNA, 15 bp, Homo sapiens
agttttttgttgtcg

SEQ ID NO: 57988 - DNA, 15 bp, Homo sapiens
cagttttttgttgtc

SEQ ID NO: 57989 - DNA, 15 bp, Homo sapiens
acagttttttgttgt

SEQ ID NO: 57990 - DNA, 15 bp, Homo sapiens
gacagttttttgttg

SEQ ID NO: 57991 - DNA, 15 bp, Homo sapiens
agacagttttttgtt

SEQ ID NO: 57992 - DNA, 15 bp, Homo sapiens
cagacagttttttgt

SEQ ID NO: 57993 - DNA, 15 bp, Homo sapiens
gcagacagttttttg

SEQ ID NO: 57994 - DNA, 15 bp, Homo sapiens
tgcagacagtttttt

SEQ ID NO: 57995 - DNA, 15 bp, Homo sapiens
ctgcagacagttttt

SEQ ID NO: 57996 - DNA, 15 bp, Homo sapiens
tctgcagacagtttt

SEQ ID NO: 57997 - DNA, 15 bp, Homo sapiens
gtctgcagacagttt

SEQ ID NO: 57998 - DNA, 15 bp, Homo sapiens
tgtctgcagacagtt

SEQ ID NO: 57999 - DNA, 15 bp, Homo sapiens
ctgtctgcagacagt

SEQ ID NO: 58000 - DNA, 15 bp, Homo sapiens
gctgtctgcagacag

SEQ ID NO: 58001 - DNA, 15 bp, Homo sapiens
tgctgtctgcagaca

SEQ ID NO: 58002 - DNA, 15 bp, Homo sapiens
ttgctgtctgcagac

SEQ ID NO: 58003 - DNA, 15 bp, Homo sapiens
attgctgtctgcaga

SEQ ID NO: 58004 - DNA, 15 bp, Homo sapiens
tattgctgtctgcag

SEQ ID NO: 58005 - DNA, 15 bp, Homo sapiens
ttattgctgtctgca

SEQ ID NO: 58006 - DNA, 15 bp, Homo sapiens
tttattgctgtctgc

SEQ ID NO: 58007 - DNA, 15 bp, Homo sapiens
atttattgctgtctg

SEQ ID NO: 58008 - DNA, 15 bp, Homo sapiens
aatttattgctgtct

SEQ ID NO: 58009 - DNA, 15 bp, Homo sapiens
caatttattgctgtc

SEQ ID NO: 58010 - DNA, 15 bp, Homo sapiens
acaatttattgctgt

SEQ ID NO: 58011 - DNA, 15 bp, Homo sapiens
gacaatttattgctg

SEQ ID NO: 58012 - DNA, 15 bp, Homo sapiens
ggacaatttattgct

SEQ ID NO: 58013 - DNA, 15 bp, Homo sapiens
aggacaatttattgc

SEQ ID NO: 58014 - DNA, 15 bp, Homo sapiens
aaggacaatttattg

SEQ ID NO: 58015 - DNA, 15 bp, Homo sapiens
caaggacaatttatt

SEQ ID NO: 58016 - DNA, 15 bp, Homo sapiens
gcaaggacaatttat

SEQ ID NO: 58017 - DNA, 15 bp, Homo sapiens
agcaaggacaattta

SEQ ID NO: 58018 - DNA, 15 bp, Homo sapiens
cagcaaggacaattt

SEQ ID NO: 58019 - DNA, 15 bp, Homo sapiens
gcagcaaggacaatt

SEQ ID NO: 58020 - DNA, 15 bp, Homo sapiens
tgcagcaaggacaat

SEQ ID NO: 58021 - DNA, 15 bp, Homo sapiens
gtgcagcaaggacaa

SEQ ID NO: 58022 - DNA, 15 bp, Homo sapiens
ggtgcagcaaggaca

SEQ ID NO: 58023 - DNA, 15 bp, Homo sapiens
aggtgcagcaaggac

SEQ ID NO: 58024 - DNA, 15 bp, Homo sapiens
caggtgcagcaagga

SEQ ID NO: 58025 - DNA, 15 bp, Homo sapiens
acaggtgcagcaagg

SEQ ID NO: 58026 - DNA, 15 bp, Homo sapiens
cacaggtgcagcaag

SEQ ID NO: 58027 - DNA, 15 bp, Homo sapiens
gcacaggtgcagcaa

SEQ ID NO: 58028 - DNA, 15 bp, Homo sapiens
agcacaggtgcagca

SEQ ID NO: 58029 - DNA, 15 bp, Homo sapiens
cagcacaggtgcagc

SEQ ID NO: 58030 - DNA, 15 bp, Homo sapiens
acagcacaggtgcag

SEQ ID NO: 58031 - DNA, 15 bp, Homo sapiens
tacagcacaggtgca

SEQ ID NO: 58032 - DNA, 15 bp, Homo sapiens
atacagcacaggtgc

SEQ ID NO: 58033 - DNA, 15 bp, Homo sapiens
tatacagcacaggtg

SEQ ID NO: 58034 - DNA, 15 bp, Homo sapiens
ttatacagcacaggt

SEQ ID NO: 58035 - DNA, 15 bp, Homo sapiens
cttatacagcacagg

SEQ ID NO: 58036 - DNA, 15 bp, Homo sapiens
acttatacagcacag

SEQ ID NO: 58037 - DNA, 15 bp, Homo sapiens
aacttatacagcaca

SEQ ID NO: 58038 - DNA, 15 bp, Homo sapiens
aaacttatacagcac

SEQ ID NO: 58039 - DNA, 15 bp, Homo sapiens
caaacttatacagca

SEQ ID NO: 58040 - DNA, 15 bp, Homo sapiens
ccaaacttatacagc

SEQ ID NO: 58041 - DNA, 15 bp, Homo sapiens
gccaaacttatacag

SEQ ID NO: 58042 - DNA, 15 bp, Homo sapiens
agccaaacttataca

SEQ ID NO: 58043 - DNA, 15 bp, Homo sapiens
aagccaaacttatac

SEQ ID NO: 58044 - DNA, 15 bp, Homo sapiens
taagccaaacttata

SEQ ID NO: 58045 - DNA, 15 bp, Homo sapiens
ataagccaaacttat

SEQ ID NO: 58046 - DNA, 15 bp, Homo sapiens
aataagccaaactta

SEQ ID NO: 58047 - DNA, 15 bp, Homo sapiens
taataagccaaactt

SEQ ID NO: 58048 - DNA, 15 bp, Homo sapiens
ataataagccaaact

SEQ ID NO: 58049 - DNA, 15 bp, Homo sapiens
tataataagccaaac

SEQ ID NO: 58050 - DNA, 15 bp, Homo sapiens
ctataataagccaaa

SEQ ID NO: 58051 - DNA, 15 bp, Homo sapiens
actataataagccaa

SEQ ID NO: 58052 - DNA, 15 bp, Homo sapiens
gactataataagcca

SEQ ID NO: 58053 - DNA, 15 bp, Homo sapiens
tgactataataagcc

SEQ ID NO: 58054 - DNA, 15 bp, Homo sapiens
ttgactataataagc

SEQ ID NO: 58055 - DNA, 15 bp, Homo sapiens
attgactataataag

SEQ ID NO: 58056 - DNA, 15 bp, Homo sapiens
cattgactataataa

SEQ ID NO: 58057 - DNA, 15 bp, Homo sapiens
tcattgactataata

SEQ ID NO: 58058 - DNA, 15 bp, Homo sapiens
gtcattgactataat

SEQ ID NO: 58059 - DNA, 15 bp, Homo sapiens
ggtcattgactataa

SEQ ID NO: 58060 - DNA, 15 bp, Homo sapiens
gggtcattgactata

SEQ ID NO: 58061 - DNA, 15 bp, Homo sapiens
tgggtcattgactat

SEQ ID NO: 58062 - DNA, 15 bp, Homo sapiens
gtgggtcattgacta

SEQ ID NO: 58063 - DNA, 15 bp, Homo sapiens
tgtgggtcattgact

SEQ ID NO: 58064 - DNA, 15 bp, Homo sapiens
atgtgggtcattgac

SEQ ID NO: 58065 - DNA, 15 bp, Homo sapiens
aatgtgggtcattga

SEQ ID NO: 58066 - DNA, 15 bp, Homo sapiens
gaatgtgggtcattg

SEQ ID NO: 58067 - DNA, 15 bp, Homo sapiens
agaatgtgggtcatt

SEQ ID NO: 58068 - DNA, 15 bp, Homo sapiens
aagaatgtgggtcat

SEQ ID NO: 58069 - DNA, 15 bp, Homo sapiens
taagaatgtgggtca

SEQ ID NO: 58070 - DNA, 15 bp, Homo sapiens
ttaagaatgtgggtc

SEQ ID NO: 58071 - DNA, 15 bp, Homo sapiens
cttaagaatgtgggt

SEQ ID NO: 58072 - DNA, 15 bp, Homo sapiens
tcttaagaatgtggg

SEQ ID NO: 58073 - DNA, 15 bp, Homo sapiens
atcttaagaatgtgg

SEQ ID NO: 58074 - DNA, 15 bp, Homo sapiens
catcttaagaatgtg

SEQ ID NO: 58075 - DNA, 15 bp, Homo sapiens
ccatcttaagaatgt

SEQ ID NO: 58076 - DNA, 15 bp, Homo sapiens
tccatcttaagaatg

SEQ ID NO: 58077 - DNA, 15 bp, Homo sapiens
atccatcttaagaat

SEQ ID NO: 58078 - DNA, 15 bp, Homo sapiens
catccatcttaagaa

SEQ ID NO: 58079 - DNA, 15 bp, Homo sapiens
tcatccatcttaaga

SEQ ID NO: 58080 - DNA, 15 bp, Homo sapiens
atcatccatcttaag

SEQ ID NO: 58081 - DNA, 15 bp, Homo sapiens
aatcatccatcttaa

SEQ ID NO: 58082 - DNA, 15 bp, Homo sapiens
aaatcatccatctta

SEQ ID NO: 58083 - DNA, 15 bp, Homo sapiens
aaaatcatccatctt

SEQ ID NO: 58084 - DNA, 15 bp, Homo sapiens
aaaaatcatccatct

SEQ ID NO: 58085 - DNA, 15 bp, Homo sapiens
aaaaaatcatccatc

SEQ ID NO: 58086 - DNA, 15 bp, Homo sapiens
taaaaaatcatccat

SEQ ID NO: 58087 - DNA, 15 bp, Homo sapiens
ttaaaaaatcatcca

SEQ ID NO: 58088 - DNA, 15 bp, Homo sapiens
tttaaaaaatcatcc

SEQ ID NO: 58089 - DNA, 15 bp, Homo sapiens
ttttaaaaaatcatc

SEQ ID NO: 58090 - DNA, 15 bp, Homo sapiens
tttttaaaaaatcat

SEQ ID NO: 58091 - DNA, 15 bp, Homo sapiens
ctttttaaaaaatca

SEQ ID NO: 58092 - DNA, 15 bp, Homo sapiens
actttttaaaaaatc

SEQ ID NO: 58093 - DNA, 15 bp, Homo sapiens
tactttttaaaaaat

SEQ ID NO: 58094 - DNA, 15 bp, Homo sapiens
ctactttttaaaaaa

SEQ ID NO: 58095 - DNA, 15 bp, Homo sapiens
tctactttttaaaaa

SEQ ID NO: 58096 - DNA, 15 bp, Homo sapiens
ctctactttttaaaa

SEQ ID NO: 58097 - DNA, 15 bp, Homo sapiens
tctctactttttaaa

SEQ ID NO: 58098 - DNA, 15 bp, Homo sapiens
gtctctactttttaa

SEQ ID NO: 58099 - DNA, 15 bp, Homo sapiens
tgtctctacttttta

SEQ ID NO: 58100 - DNA, 15 bp, Homo sapiens
ctgtctctacttttt

SEQ ID NO: 58101 - DNA, 15 bp, Homo sapiens
cctgtctctactttt

SEQ ID NO: 58102 - DNA, 15 bp, Homo sapiens
gcctgtctctacttt

SEQ ID NO: 58103 - DNA, 15 bp, Homo sapiens
agcctgtctctactt

SEQ ID NO: 58104 - DNA, 15 bp, Homo sapiens
cagcctgtctctact

SEQ ID NO: 58105 - DNA, 15 bp, Homo sapiens
ccagcctgtctctac

SEQ ID NO: 58106 - DNA, 15 bp, Homo sapiens
gccagcctgtctcta

SEQ ID NO: 58107 - DNA, 15 bp, Homo sapiens
cgccagcctgtctct

SEQ ID NO: 58108 - DNA, 15 bp, Homo sapiens
tcgccagcctgtctc

SEQ ID NO: 58109 - DNA, 15 bp, Homo sapiens
atcgccagcctgtct

SEQ ID NO: 58110 - DNA, 15 bp, Homo sapiens
catcgccagcctgtc

SEQ ID NO: 58111 - DNA, 15 bp, Homo sapiens
tcatcgccagcctgt

SEQ ID NO: 58112 - DNA, 15 bp, Homo sapiens
gtcatcgccagcctg

SEQ ID NO: 58113 - DNA, 15 bp, Homo sapiens
tgtcatcgccagcct

SEQ ID NO: 58114 - DNA, 15 bp, Homo sapiens
gtgtcatcgccagcc

SEQ ID NO: 58115 - DNA, 15 bp, Homo sapiens
ggtgtcatcgccagc

SEQ ID NO: 58116 - DNA, 15 bp, Homo sapiens
cggtgtcatcgccag

SEQ ID NO: 58117 - DNA, 15 bp, Homo sapiens
ccggtgtcatcgcca

SEQ ID NO: 58118 - DNA, 15 bp, Homo sapiens
tccggtgtcatcgcc

SEQ ID NO: 58119 - DNA, 15 bp, Homo sapiens
gtccggtgtcatcgc

SEQ ID NO: 58120 - DNA, 15 bp, Homo sapiens
tgtccggtgtcatcg

SEQ ID NO: 58121 - DNA, 15 bp, Homo sapiens
ctgtccggtgtcatc

SEQ ID NO: 58122 - DNA, 15 bp, Homo sapiens
tctgtccggtgtcat

SEQ ID NO: 58123 - DNA, 15 bp, Homo sapiens
ctctgtccggtgtca

SEQ ID NO: 58124 - DNA, 15 bp, Homo sapiens
gctctgtccggtgtc

SEQ ID NO: 58125 - DNA, 15 bp, Homo sapiens
agctctgtccggtgt

SEQ ID NO: 58126 - DNA, 15 bp, Homo sapiens
tagctctgtccggtg

SEQ ID NO: 58127 - DNA, 15 bp, Homo sapiens
ttagctctgtccggt

SEQ ID NO: 58128 - DNA, 15 bp, Homo sapiens
gttagctctgtccgg

SEQ ID NO: 58129 - DNA, 15 bp, Homo sapiens
agttagctctgtccg

SEQ ID NO: 58130 - DNA, 15 bp, Homo sapiens
cagttagctctgtcc

SEQ ID NO: 58131 - DNA, 15 bp, Homo sapiens
ccagttagctctgtc

SEQ ID NO: 58132 - DNA, 15 bp, Homo sapiens
accagttagctctgt

SEQ ID NO: 58133 - DNA, 15 bp, Homo sapiens
caccagttagctctg

SEQ ID NO: 58134 - DNA, 15 bp, Homo sapiens
acaccagttagctct

SEQ ID NO: 58135 - DNA, 15 bp, Homo sapiens
cacaccagttagctc

SEQ ID NO: 58136 - DNA, 15 bp, Homo sapiens
gcacaccagttagct

SEQ ID NO: 58137 - DNA, 15 bp, Homo sapiens
tgcacaccagttagc

SEQ ID NO: 58138 - DNA, 15 bp, Homo sapiens
ttgcacaccagttag

SEQ ID NO: 58139 - DNA, 15 bp, Homo sapiens
cttgcacaccagtta

SEQ ID NO: 58140 - DNA, 15 bp, Homo sapiens
ccttgcacaccagtt

SEQ ID NO: 58141 - DNA, 15 bp, Homo sapiens
tccttgcacaccagt

SEQ ID NO: 58142 - DNA, 15 bp, Homo sapiens
ttccttgcacaccag

SEQ ID NO: 58143 - DNA, 15 bp, Homo sapiens
tttccttgcacacca

SEQ ID NO: 58144 - DNA, 15 bp, Homo sapiens
ctttccttgcacacc

SEQ ID NO: 58145 - DNA, 15 bp, Homo sapiens
actttccttgcacac

SEQ ID NO: 58146 - DNA, 15 bp, Homo sapiens
cactttccttgcaca

SEQ ID NO: 58147 - DNA, 15 bp, Homo sapiens
tcactttccttgcac

SEQ ID NO: 58148 - DNA, 15 bp, Homo sapiens
ttcactttccttgca

SEQ ID NO: 58149 - DNA, 15 bp, Homo sapiens
tttcactttccttgc

SEQ ID NO: 58150 - DNA, 15 bp, Homo sapiens
ttttcactttccttg

SEQ ID NO: 58151 - DNA, 15 bp, Homo sapiens
attttcactttcctt

SEQ ID NO: 58152 - DNA, 15 bp, Homo sapiens
cattttcactttcct

SEQ ID NO: 58153 - DNA, 15 bp, Homo sapiens
ccattttcactttcc

SEQ ID NO: 58154 - DNA, 15 bp, Homo sapiens
cccattttcactttc

SEQ ID NO: 58155 - DNA, 15 bp, Homo sapiens
tcccattttcacttt

SEQ ID NO: 58156 - DNA, 15 bp, Homo sapiens
ttcccattttcactt

SEQ ID NO: 58157 - DNA, 15 bp, Homo sapiens
attcccattttcact

SEQ ID NO: 58158 - DNA, 15 bp, Homo sapiens
aattcccattttcac

SEQ ID NO: 58159 - DNA, 15 bp, Homo sapiens
caattcccattttca

SEQ ID NO: 58160 - DNA, 15 bp, Homo sapiens
acaattcccattttc

SEQ ID NO: 58161 - DNA, 15 bp, Homo sapiens
cacaattcccatttt

SEQ ID NO: 58162 - DNA, 15 bp, Homo sapiens
acacaattcccattt

SEQ ID NO: 58163 - DNA, 15 bp, Homo sapiens
aacacaattcccatt

SEQ ID NO: 58164 - DNA, 15 bp, Homo sapiens
taacacaattcccat

SEQ ID NO: 58165 - DNA, 15 bp, Homo sapiens
ctaacacaattccca

SEQ ID NO: 58166 - DNA, 15 bp, Homo sapiens
actaacacaattccc

SEQ ID NO: 58167 - DNA, 15 bp, Homo sapiens
tactaacacaattcc

SEQ ID NO: 58168 - DNA, 15 bp, Homo sapiens
ctactaacacaattc

SEQ ID NO: 58169 - DNA, 15 bp, Homo sapiens
gctactaacacaatt

SEQ ID NO: 58170 - DNA, 15 bp, Homo sapiens
tgctactaacacaat

SEQ ID NO: 58171 - DNA, 15 bp, Homo sapiens
gtgctactaacacaa

SEQ ID NO: 58172 - DNA, 15 bp, Homo sapiens
tgtgctactaacaca

SEQ ID NO: 58173 - DNA, 15 bp, Homo sapiens
ttgtgctactaacac

SEQ ID NO: 58174 - DNA, 15 bp, Homo sapiens
attgtgctactaaca

SEQ ID NO: 58175 - DNA, 15 bp, Homo sapiens
cattgtgctactaac

SEQ ID NO: 58176 - DNA, 15 bp, Homo sapiens
gcattgtgctactaa

SEQ ID NO: 58177 - DNA, 15 bp, Homo sapiens
tgcattgtgctacta

SEQ ID NO: 58178 - DNA, 15 bp, Homo sapiens
ttgcattgtgctact

SEQ ID NO: 58179 - DNA, 15 bp, Homo sapiens
tttgcattgtgctac

SEQ ID NO: 58180 - DNA, 15 bp, Homo sapiens
gtttgcattgtgcta

SEQ ID NO: 58181 - DNA, 15 bp, Homo sapiens
agtttgcattgtgct

SEQ ID NO: 58182 - DNA, 15 bp, Homo sapiens
gagtttgcattgtgc

SEQ ID NO: 58183 - DNA, 15 bp, Homo sapiens
tgagtttgcattgtg

SEQ ID NO: 58184 - DNA, 15 bp, Homo sapiens
ttgagtttgcattgt

SEQ ID NO: 58185 - DNA, 15 bp, Homo sapiens
gttgagtttgcattg

SEQ ID NO: 58186 - DNA, 15 bp, Homo sapiens
tgttgagtttgcatt

SEQ ID NO: 58187 - DNA, 15 bp, Homo sapiens
ttgttgagtttgcat

SEQ ID NO: 58188 - DNA, 15 bp, Homo sapiens
attgttgagtttgca

SEQ ID NO: 58189 - DNA, 15 bp, Homo sapiens
aattgttgagtttgc

SEQ ID NO: 58190 - DNA, 15 bp, Homo sapiens
aaattgttgagtttg

SEQ ID NO: 58191 - DNA, 15 bp, Homo sapiens
gaaattgttgagttt

SEQ ID NO: 58192 - DNA, 15 bp, Homo sapiens
tgaaattgttgagtt

SEQ ID NO: 58193 - DNA, 15 bp, Homo sapiens
ttgaaattgttgagt

SEQ ID NO: 58194 - DNA, 15 bp, Homo sapiens
cttgaaattgttgag

SEQ ID NO: 58195 - DNA, 15 bp, Homo sapiens
tcttgaaattgttga

SEQ ID NO: 58196 - DNA, 15 bp, Homo sapiens
ttcttgaaattgttg

SEQ ID NO: 58197 - DNA, 15 bp, Homo sapiens
tttcttgaaattgtt

SEQ ID NO: 58198 - DNA, 15 bp, Homo sapiens
ttttcttgaaattgt

SEQ ID NO: 58199 - DNA, 15 bp, Homo sapiens
attttcttgaaattg

SEQ ID NO: 58200 - DNA, 15 bp, Homo sapiens
cattttcttgaaatt

SEQ ID NO: 58201 - DNA, 15 bp, Homo sapiens
gcattttcttgaaat

SEQ ID NO: 58202 - DNA, 15 bp, Homo sapiens
tgcattttcttgaaa

SEQ ID NO: 58203 - DNA, 15 bp, Homo sapiens
atgcattttcttgaa

SEQ ID NO: 58204 - DNA, 15 bp, Homo sapiens
aatgcattttcttga

SEQ ID NO: 58205 - DNA, 15 bp, Homo sapiens
aaatgcattttcttg

SEQ ID NO: 58206 - DNA, 15 bp, Homo sapiens
gaaatgcattttctt

SEQ ID NO: 58207 - DNA, 15 bp, Homo sapiens
agaaatgcattttct

SEQ ID NO: 58208 - DNA, 15 bp, Homo sapiens
cagaaatgcattttc

SEQ ID NO: 58209 - DNA, 15 bp, Homo sapiens
gcagaaatgcatttt

SEQ ID NO: 58210 - DNA, 15 bp, Homo sapiens
tgcagaaatgcattt

SEQ ID NO: 58211 - DNA, 15 bp, Homo sapiens
atgcagaaatgcatt

SEQ ID NO: 58212 - DNA, 15 bp, Homo sapiens
aatgcagaaatgcat

SEQ ID NO: 58213 - DNA, 15 bp, Homo sapiens
aaatgcagaaatgca

SEQ ID NO: 58214 - DNA, 15 bp, Homo sapiens
caaatgcagaaatgc

SEQ ID NO: 58215 - DNA, 15 bp, Homo sapiens
gcaaatgcagaaatg

SEQ ID NO: 58216 - DNA, 15 bp, Homo sapiens
agcaaatgcagaaat

SEQ ID NO: 58217 - DNA, 15 bp, Homo sapiens
aagcaaatgcagaaa

SEQ ID NO: 58218 - DNA, 15 bp, Homo sapiens
gaagcaaatgcagaa

SEQ ID NO: 58219 - DNA, 15 bp, Homo sapiens
tgaagcaaatgcaga

SEQ ID NO: 58220 - DNA, 15 bp, Homo sapiens
gtgaagcaaatgcag

SEQ ID NO: 58221 - DNA, 15 bp, Homo sapiens
tgtgaagcaaatgca

SEQ ID NO: 58222 - DNA, 15 bp, Homo sapiens
ctgtgaagcaaatgc

SEQ ID NO: 58223 - DNA, 15 bp, Homo sapiens
tctgtgaagcaaatg

SEQ ID NO: 58224 - DNA, 15 bp, Homo sapiens
gtctgtgaagcaaat

SEQ ID NO: 58225 - DNA, 15 bp, Homo sapiens
ggtctgtgaagcaaa

SEQ ID NO: 58226 - DNA, 15 bp, Homo sapiens
gggtctgtgaagcaa

SEQ ID NO: 58227 - DNA, 15 bp, Homo sapiens
ggggtctgtgaagca

SEQ ID NO: 58228 - DNA, 15 bp, Homo sapiens
gggggtctgtgaagc

SEQ ID NO: 58229 - DNA, 15 bp, Homo sapiens
tgggggtctgtgaag

SEQ ID NO: 58230 - DNA, 15 bp, Homo sapiens
gtgggggtctgtgaa

SEQ ID NO: 58231 - DNA, 15 bp, Homo sapiens
ggtgggggtctgtga

SEQ ID NO: 58232 - DNA, 15 bp, Homo sapiens
gggtgggggtctgtg

SEQ ID NO: 58233 - DNA, 15 bp, Homo sapiens
ggggtgggggtctgt

SEQ ID NO: 58234 - DNA, 15 bp, Homo sapiens
tggggtgggggtctg

SEQ ID NO: 58235 - DNA, 15 bp, Homo sapiens
ttggggtgggggtct

SEQ ID NO: 58236 - DNA, 15 bp, Homo sapiens
tttggggtgggggtc

SEQ ID NO: 58237 - DNA, 15 bp, Homo sapiens
atttggggtgggggt

SEQ ID NO: 58238 - DNA, 15 bp, Homo sapiens
aatttggggtggggg

SEQ ID NO: 58239 - DNA, 15 bp, Homo sapiens
aaatttggggtgggg

SEQ ID NO: 58240 - DNA, 15 bp, Homo sapiens
taaatttggggtggg

SEQ ID NO: 58241 - DNA, 15 bp, Homo sapiens
ctaaatttggggtgg

SEQ ID NO: 58242 - DNA, 15 bp, Homo sapiens
gctaaatttggggtg

SEQ ID NO: 58243 - DNA, 15 bp, Homo sapiens
agctaaatttggggt

SEQ ID NO: 58244 - DNA, 15 bp, Homo sapiens
aagctaaatttgggg

SEQ ID NO: 58245 - DNA, 15 bp, Homo sapiens
taagctaaatttggg

SEQ ID NO: 58246 - DNA, 15 bp, Homo sapiens
ttaagctaaatttgg

SEQ ID NO: 58247 - DNA, 15 bp, Homo sapiens
tttaagctaaatttg

SEQ ID NO: 58248 - DNA, 15 bp, Homo sapiens
ttttaagctaaattt

SEQ ID NO: 58249 - DNA, 15 bp, Homo sapiens
attttaagctaaatt

SEQ ID NO: 58250 - DNA, 15 bp, Homo sapiens
tattttaagctaaat

SEQ ID NO: 58251 - DNA, 15 bp, Homo sapiens
ttattttaagctaaa

SEQ ID NO: 58252 - DNA, 15 bp, Homo sapiens
cttattttaagctaa

SEQ ID NO: 58253 - DNA, 15 bp, Homo sapiens
gcttattttaagcta

SEQ ID NO: 58254 - DNA, 15 bp, Homo sapiens
agcttattttaagct

SEQ ID NO: 58255 - DNA, 15 bp, Homo sapiens
aagcttattttaagc

SEQ ID NO: 58256 - DNA, 15 bp, Homo sapiens
caagcttattttaag

SEQ ID NO: 58257 - DNA, 15 bp, Homo sapiens
gcaagcttattttaa

SEQ ID NO: 58258 - DNA, 15 bp, Homo sapiens
tgcaagcttatttta

SEQ ID NO: 58259 - DNA, 15 bp, Homo sapiens
atgcaagcttatttt

SEQ ID NO: 58260 - DNA, 15 bp, Homo sapiens
aatgcaagcttattt

SEQ ID NO: 58261 - DNA, 15 bp, Homo sapiens
aaatgcaagcttatt

SEQ ID NO: 58262 - DNA, 15 bp, Homo sapiens
gaaatgcaagcttat

SEQ ID NO: 58263 - DNA, 15 bp, Homo sapiens
tgaaatgcaagctta

SEQ ID NO: 58264 - DNA, 15 bp, Homo sapiens
ttgaaatgcaagctt

SEQ ID NO: 58265 - DNA, 15 bp, Homo sapiens
cttgaaatgcaagct

SEQ ID NO: 58266 - DNA, 15 bp, Homo sapiens
tcttgaaatgcaagc

SEQ ID NO: 58267 - DNA, 15 bp, Homo sapiens
ttcttgaaatgcaag

SEQ ID NO: 58268 - DNA, 15 bp, Homo sapiens
tttcttgaaatgcaa

SEQ ID NO: 58269 - DNA, 15 bp, Homo sapiens
ctttcttgaaatgca

SEQ ID NO: 58270 - DNA, 15 bp, Homo sapiens
actttcttgaaatgc

SEQ ID NO: 58271 - DNA, 15 bp, Homo sapiens
tactttcttgaaatg

SEQ ID NO: 58272 - DNA, 15 bp, Homo sapiens
ttactttcttgaaat

SEQ ID NO: 58273 - DNA, 15 bp, Homo sapiens
attactttcttgaaa

SEQ ID NO: 58274 - DNA, 15 bp, Homo sapiens
aattactttcttgaa

SEQ ID NO: 58275 - DNA, 15 bp, Homo sapiens
caattactttcttga

SEQ ID NO: 58276 - DNA, 15 bp, Homo sapiens
acaattactttcttg

SEQ ID NO: 58277 - DNA, 15 bp, Homo sapiens
aacaattactttctt

SEQ ID NO: 58278 - DNA, 15 bp, Homo sapiens
taacaattactttct

SEQ ID NO: 58279 - DNA, 15 bp, Homo sapiens
ttaacaattactttc

SEQ ID NO: 58280 - DNA, 15 bp, Homo sapiens
cttaacaattacttt

SEQ ID NO: 58281 - DNA, 15 bp, Homo sapiens
acttaacaattactt

SEQ ID NO: 58282 - DNA, 15 bp, Homo sapiens
tacttaacaattact

SEQ ID NO: 58283 - DNA, 15 bp, Homo sapiens
gtacttaacaattac

SEQ ID NO: 58284 - DNA, 15 bp, Homo sapiens
tgtacttaacaatta

SEQ ID NO: 58285 - DNA, 15 bp, Homo sapiens
atgtacttaacaatt

SEQ ID NO: 58286 - DNA, 15 bp, Homo sapiens
tatgtacttaacaat

SEQ ID NO: 58287 - DNA, 15 bp, Homo sapiens
ttatgtacttaacaa

SEQ ID NO: 58288 - DNA, 15 bp, Homo sapiens
tttatgtacttaaca

SEQ ID NO: 58289 - DNA, 15 bp, Homo sapiens
atttatgtacttaac

SEQ ID NO: 58290 - DNA, 15 bp, Homo sapiens
aatttatgtacttaa

SEQ ID NO: 58291 - DNA, 15 bp, Homo sapiens
aaatttatgtactta

SEQ ID NO: 58292 - DNA, 15 bp, Homo sapiens
aaaatttatgtactt

SEQ ID NO: 58293 - DNA, 15 bp, Homo sapiens
taaaatttatgtact

SEQ ID NO: 58294 - DNA, 15 bp, Homo sapiens
ttaaaatttatgtac

SEQ ID NO: 58295 - DNA, 15 bp, Homo sapiens
attaaaatttatgta

SEQ ID NO: 58296 - DNA, 15 bp, Homo sapiens
aattaaaatttatgt

SEQ ID NO: 58297 - DNA, 15 bp, Homo sapiens
aaattaaaatttatg

SEQ ID NO: 58298 - DNA, 15 bp, Homo sapiens
taaattaaaatttat

SEQ ID NO: 58299 - DNA, 15 bp, Homo sapiens
ttaaattaaaattta

SEQ ID NO: 58300 - DNA, 15 bp, Homo sapiens
cttaaattaaaattt

SEQ ID NO: 58301 - DNA, 15 bp, Homo sapiens
ccttaaattaaaatt

SEQ ID NO: 58302 - DNA, 15 bp, Homo sapiens
tccttaaattaaaat

SEQ ID NO: 58303 - DNA, 15 bp, Homo sapiens
ttccttaaattaaaa

SEQ ID NO: 58304 - DNA, 15 bp, Homo sapiens
attccttaaattaaa

SEQ ID NO: 58305 - DNA, 15 bp, Homo sapiens
gattccttaaattaa

SEQ ID NO: 58306 - DNA, 15 bp, Homo sapiens
agattccttaaatta

SEQ ID NO: 58307 - DNA, 15 bp, Homo sapiens
tagattccttaaatt

SEQ ID NO: 58308 - DNA, 15 bp, Homo sapiens
gtagattccttaaat

SEQ ID NO: 58309 - DNA, 15 bp, Homo sapiens
tgtagattccttaaa

SEQ ID NO: 58310 - DNA, 15 bp, Homo sapiens
atgtagattccttaa

SEQ ID NO: 58311 - DNA, 15 bp, Homo sapiens
aatgtagattcctta

SEQ ID NO: 58312 - DNA, 15 bp, Homo sapiens
gaatgtagattcctt

SEQ ID NO: 58313 - DNA, 15 bp, Homo sapiens
tgaatgtagattcct

SEQ ID NO: 58314 - DNA, 15 bp, Homo sapiens
gtgaatgtagattcc

SEQ ID NO: 58315 - DNA, 15 bp, Homo sapiens
tgtgaatgtagattc

SEQ ID NO: 58316 - DNA, 15 bp, Homo sapiens
atgtgaatgtagatt

SEQ ID NO: 58317 - DNA, 15 bp, Homo sapiens
aatgtgaatgtagat

SEQ ID NO: 58318 - DNA, 15 bp, Homo sapiens
aaatgtgaatgtaga

SEQ ID NO: 58319 - DNA, 15 bp, Homo sapiens
caaatgtgaatgtag

SEQ ID NO: 58320 - DNA, 15 bp, Homo sapiens
ccaaatgtgaatgta

SEQ ID NO: 58321 - DNA, 15 bp, Homo sapiens
accaaatgtgaatgt

SEQ ID NO: 58322 - DNA, 15 bp, Homo sapiens
aaccaaatgtgaatg

SEQ ID NO: 58323 - DNA, 15 bp, Homo sapiens
aaaccaaatgtgaat

SEQ ID NO: 58324 - DNA, 15 bp, Homo sapiens
gaaaccaaatgtgaa

SEQ ID NO: 58325 - DNA, 15 bp, Homo sapiens
ggaaaccaaatgtga

SEQ ID NO: 58326 - DNA, 15 bp, Homo sapiens
tggaaaccaaatgtg

SEQ ID NO: 58327 - DNA, 15 bp, Homo sapiens
ttggaaaccaaatgt

SEQ ID NO: 58328 - DNA, 15 bp, Homo sapiens
tttggaaaccaaatg

SEQ ID NO: 58329 - DNA, 15 bp, Homo sapiens
ttttggaaaccaaat

SEQ ID NO: 58330 - DNA, 15 bp, Homo sapiens
tttttggaaaccaaa

SEQ ID NO: 58331 - DNA, 15 bp, Homo sapiens
ttttttggaaaccaa

SEQ ID NO: 58332 - DNA, 15 bp, Homo sapiens
attttttggaaacca

SEQ ID NO: 58333 - DNA, 15 bp, Homo sapiens
aattttttggaaacc

SEQ ID NO: 58334 - DNA, 15 bp, Homo sapiens
caattttttggaaac

SEQ ID NO: 58335 - DNA, 15 bp, Homo sapiens
ccaattttttggaaa

SEQ ID NO: 58336 - DNA, 15 bp, Homo sapiens
gccaattttttggaa

SEQ ID NO: 58337 - DNA, 15 bp, Homo sapiens
agccaattttttgga

SEQ ID NO: 58338 - DNA, 15 bp, Homo sapiens
tagccaattttttgg

SEQ ID NO: 58339 - DNA, 15 bp, Homo sapiens
ttagccaattttttg

SEQ ID NO: 58340 - DNA, 15 bp, Homo sapiens
tttagccaatttttt

SEQ ID NO: 58341 - DNA, 15 bp, Homo sapiens
atttagccaattttt

SEQ ID NO: 58342 - DNA, 15 bp, Homo sapiens
tatttagccaatttt

SEQ ID NO: 58343 - DNA, 15 bp, Homo sapiens
ctatttagccaattt

SEQ ID NO: 58344 - DNA, 15 bp, Homo sapiens
cctatttagccaatt

SEQ ID NO: 58345 - DNA, 15 bp, Homo sapiens
ccctatttagccaat

SEQ ID NO: 58346 - DNA, 15 bp, Homo sapiens
cccctatttagccaa

SEQ ID NO: 58347 - DNA, 15 bp, Homo sapiens
ccccctatttagcca

SEQ ID NO: 58348 - DNA, 15 bp, Homo sapiens
accccctatttagcc

SEQ ID NO: 58349 - DNA, 15 bp, Homo sapiens
taccccctatttagc

SEQ ID NO: 58350 - DNA, 15 bp, Homo sapiens
ttaccccctatttag

SEQ ID NO: 58351 - DNA, 15 bp, Homo sapiens
gttaccccctattta

SEQ ID NO: 58352 - DNA, 15 bp, Homo sapiens
agttaccccctattt

SEQ ID NO: 58353 - DNA, 15 bp, Homo sapiens
tagttaccccctatt

SEQ ID NO: 58354 - DNA, 15 bp, Homo sapiens
atagttaccccctat

SEQ ID NO: 58355 - DNA, 15 bp, Homo sapiens
aatagttacccccta

SEQ ID NO: 58356 - DNA, 15 bp, Homo sapiens
taatagttaccccct

SEQ ID NO: 58357 - DNA, 15 bp, Homo sapiens
ctaatagttaccccc

SEQ ID NO: 58358 - DNA, 15 bp, Homo sapiens
cctaatagttacccc

SEQ ID NO: 58359 - DNA, 15 bp, Homo sapiens
tcctaatagttaccc

SEQ ID NO: 58360 - DNA, 15 bp, Homo sapiens
ttcctaatagttacc

SEQ ID NO: 58361 - DNA, 15 bp, Homo sapiens
attcctaatagttac

SEQ ID NO: 58362 - DNA, 15 bp, Homo sapiens
aattcctaatagtta

SEQ ID NO: 58363 - DNA, 15 bp, Homo sapiens
gaattcctaatagtt

SEQ ID NO: 58364 - DNA, 15 bp, Homo sapiens
agaattcctaatagt

SEQ ID NO: 58365 - DNA, 15 bp, Homo sapiens
cagaattcctaatag

SEQ ID NO: 58366 - DNA, 15 bp, Homo sapiens
tcagaattcctaata

SEQ ID NO: 58367 - DNA, 15 bp, Homo sapiens
atcagaattcctaat

SEQ ID NO: 58368 - DNA, 15 bp, Homo sapiens
aatcagaattcctaa

SEQ ID NO: 58369 - DNA, 15 bp, Homo sapiens
taatcagaattccta

SEQ ID NO: 58370 - DNA, 15 bp, Homo sapiens
ataatcagaattcct

SEQ ID NO: 58371 - DNA, 15 bp, Homo sapiens
cataatcagaattcc

SEQ ID NO: 58372 - DNA, 15 bp, Homo sapiens
gcataatcagaattc

SEQ ID NO: 58373 - DNA, 15 bp, Homo sapiens
agcataatcagaatt

SEQ ID NO: 58374 - DNA, 15 bp, Homo sapiens
aagcataatcagaat

SEQ ID NO: 58375 - DNA, 15 bp, Homo sapiens
taagcataatcagaa

SEQ ID NO: 58376 - DNA, 15 bp, Homo sapiens
ttaagcataatcaga

SEQ ID NO: 58377 - DNA, 15 bp, Homo sapiens
tttaagcataatcag

SEQ ID NO: 58378 - DNA, 15 bp, Homo sapiens
ttttaagcataatca

SEQ ID NO: 58379 - DNA, 15 bp, Homo sapiens
gttttaagcataatc

SEQ ID NO: 58380 - DNA, 15 bp, Homo sapiens
tgttttaagcataat

SEQ ID NO: 58381 - DNA, 15 bp, Homo sapiens
ctgttttaagcataa

SEQ ID NO: 58382 - DNA, 15 bp, Homo sapiens
actgttttaagcata

SEQ ID NO: 58383 - DNA, 15 bp, Homo sapiens
aactgttttaagcat

SEQ ID NO: 58384 - DNA, 15 bp, Homo sapiens
aaactgttttaagca

SEQ ID NO: 58385 - DNA, 15 bp, Homo sapiens
aaaactgttttaagc

SEQ ID NO: 58386 - DNA, 15 bp, Homo sapiens
gaaaactgttttaag

SEQ ID NO: 58387 - DNA, 15 bp, Homo sapiens
cgaaaactgttttaa

SEQ ID NO: 58388 - DNA, 15 bp, Homo sapiens
ccgaaaactgtttta

SEQ ID NO: 58389 - DNA, 15 bp, Homo sapiens
accgaaaactgtttt

SEQ ID NO: 58390 - DNA, 15 bp, Homo sapiens
caccgaaaactgttt

SEQ ID NO: 58391 - DNA, 15 bp, Homo sapiens
gcaccgaaaactgtt

SEQ ID NO: 58392 - DNA, 15 bp, Homo sapiens
agcaccgaaaactgt

SEQ ID NO: 58393 - DNA, 15 bp, Homo sapiens
aagcaccgaaaactg

SEQ ID NO: 58394 - DNA, 15 bp, Homo sapiens
aaagcaccgaaaact

SEQ ID NO: 58395 - DNA, 15 bp, Homo sapiens
aaaagcaccgaaaac

SEQ ID NO: 58396 - DNA, 15 bp, Homo sapiens
gaaaagcaccgaaaa

SEQ ID NO: 58397 - DNA, 15 bp, Homo sapiens
agaaaagcaccgaaa

SEQ ID NO: 58398 - DNA, 15 bp, Homo sapiens
cagaaaagcaccgaa

SEQ ID NO: 58399 - DNA, 15 bp, Homo sapiens
acagaaaagcaccga

SEQ ID NO: 58400 - DNA, 15 bp, Homo sapiens
aacagaaaagcaccg

SEQ ID NO: 58401 - DNA, 15 bp, Homo sapiens
caacagaaaagcacc

SEQ ID NO: 58402 - DNA, 15 bp, Homo sapiens
ccaacagaaaagcac

SEQ ID NO: 58403 - DNA, 15 bp, Homo sapiens
accaacagaaaagca

SEQ ID NO: 58404 - DNA, 15 bp, Homo sapiens
taccaacagaaaagc

SEQ ID NO: 58405 - DNA, 15 bp, Homo sapiens
gtaccaacagaaaag

SEQ ID NO: 58406 - DNA, 15 bp, Homo sapiens
tgtaccaacagaaaa

SEQ ID NO: 58407 - DNA, 15 bp, Homo sapiens
ttgtaccaacagaaa

SEQ ID NO: 58408 - DNA, 15 bp, Homo sapiens
cttgtaccaacagaa

SEQ ID NO: 58409 - DNA, 15 bp, Homo sapiens
tcttgtaccaacaga

SEQ ID NO: 58410 - DNA, 15 bp, Homo sapiens
gtcttgtaccaacag

SEQ ID NO: 58411 - DNA, 15 bp, Homo sapiens
tgtcttgtaccaaca

SEQ ID NO: 58412 - DNA, 15 bp, Homo sapiens
ttgtcttgtaccaac

SEQ ID NO: 58413 - DNA, 15 bp, Homo sapiens
cttgtcttgtaccaa

SEQ ID NO: 58414 - DNA, 15 bp, Homo sapiens
tcttgtcttgtacca

SEQ ID NO: 58415 - DNA, 15 bp, Homo sapiens
gtcttgtcttgtacc

SEQ ID NO: 58416 - DNA, 15 bp, Homo sapiens
tgtcttgtcttgtac

SEQ ID NO: 58417 - DNA, 15 bp, Homo sapiens
ttgtcttgtcttgta

SEQ ID NO: 58418 - DNA, 15 bp, Homo sapiens
attgtcttgtcttgt

SEQ ID NO: 58419 - DNA, 15 bp, Homo sapiens
tattgtcttgtcttg

SEQ ID NO: 58420 - DNA, 15 bp, Homo sapiens
atattgtcttgtctt

SEQ ID NO: 58421 - DNA, 15 bp, Homo sapiens
aatattgtcttgtct

SEQ ID NO: 58422 - DNA, 15 bp, Homo sapiens
aaatattgtcttgtc

SEQ ID NO: 58423 - DNA, 15 bp, Homo sapiens
aaaatattgtcttgt

SEQ ID NO: 58424 - DNA, 15 bp, Homo sapiens
aaaaatattgtcttg

SEQ ID NO: 58425 - DNA, 15 bp, Homo sapiens
caaaaatattgtctt

SEQ ID NO: 58426 - DNA, 15 bp, Homo sapiens
ccaaaaatattgtct

SEQ ID NO: 58427 - DNA, 15 bp, Homo sapiens
tccaaaaatattgtc

SEQ ID NO: 58428 - DNA, 15 bp, Homo sapiens
ttccaaaaatattgt

SEQ ID NO: 58429 - DNA, 15 bp, Homo sapiens
cttccaaaaatattg

SEQ ID NO: 58430 - DNA, 15 bp, Homo sapiens
tcttccaaaaatatt

SEQ ID NO: 58431 - DNA, 15 bp, Homo sapiens
ttcttccaaaaatat

SEQ ID NO: 58432 - DNA, 15 bp, Homo sapiens
cttcttccaaaaata

SEQ ID NO: 58433 - DNA, 15 bp, Homo sapiens
acttcttccaaaaat

SEQ ID NO: 58434 - DNA, 15 bp, Homo sapiens
gacttcttccaaaaa

SEQ ID NO: 58435 - DNA, 15 bp, Homo sapiens
agacttcttccaaaa

SEQ ID NO: 58436 - DNA, 15 bp, Homo sapiens
gagacttcttccaaa

SEQ ID NO: 58437 - DNA, 15 bp, Homo sapiens
ggagacttcttccaa

SEQ ID NO: 58438 - DNA, 15 bp, Homo sapiens
aggagacttcttcca

SEQ ID NO: 58439 - DNA, 15 bp, Homo sapiens
gaggagacttcttcc

SEQ ID NO: 58440 - DNA, 15 bp, Homo sapiens
tgaggagacttcttc

SEQ ID NO: 58441 - DNA, 15 bp, Homo sapiens
atgaggagacttctt

SEQ ID NO: 58442 - DNA, 15 bp, Homo sapiens
gatgaggagacttct

SEQ ID NO: 58443 - DNA, 15 bp, Homo sapiens
agatgaggagacttc

SEQ ID NO: 58444 - DNA, 15 bp, Homo sapiens
cagatgaggagactt

SEQ ID NO: 58445 - DNA, 15 bp, Homo sapiens
ccagatgaggagact

SEQ ID NO: 58446 - DNA, 15 bp, Homo sapiens
accagatgaggagac

SEQ ID NO: 58447 - DNA, 15 bp, Homo sapiens
aaccagatgaggaga

SEQ ID NO: 58448 - DNA, 15 bp, Homo sapiens
aaaccagatgaggag

SEQ ID NO: 58449 - DNA, 15 bp, Homo sapiens
aaaaccagatgagga

SEQ ID NO: 58450 - DNA, 15 bp, Homo sapiens
gaaaaccagatgagg

SEQ ID NO: 58451 - DNA, 15 bp, Homo sapiens
tgaaaaccagatgag

SEQ ID NO: 58452 - DNA, 15 bp, Homo sapiens
atgaaaaccagatga

SEQ ID NO: 58453 - DNA, 15 bp, Homo sapiens
aatgaaaaccagatg

SEQ ID NO: 58454 - DNA, 15 bp, Homo sapiens
aaatgaaaaccagat

SEQ ID NO: 58455 - DNA, 15 bp, Homo sapiens
caaatgaaaaccaga

SEQ ID NO: 58456 - DNA, 15 bp, Homo sapiens
tcaaatgaaaaccag

SEQ ID NO: 58457 - DNA, 15 bp, Homo sapiens
ttcaaatgaaaacca

SEQ ID NO: 58458 - DNA, 15 bp, Homo sapiens
tttcaaatgaaaacc

SEQ ID NO: 58459 - DNA, 15 bp, Homo sapiens
atttcaaatgaaaac

SEQ ID NO: 58460 - DNA, 15 bp, Homo sapiens
tatttcaaatgaaaa

SEQ ID NO: 58461 - DNA, 15 bp, Homo sapiens
atatttcaaatgaaa

SEQ ID NO: 58462 - DNA, 15 bp, Homo sapiens
catatttcaaatgaa

SEQ ID NO: 58463 - DNA, 15 bp, Homo sapiens
acatatttcaaatga

SEQ ID NO: 58464 - DNA, 15 bp, Homo sapiens
gacatatttcaaatg

SEQ ID NO: 58465 - DNA, 15 bp, Homo sapiens
agacatatttcaaat

SEQ ID NO: 58466 - DNA, 15 bp, Homo sapiens
aagacatatttcaaa

SEQ ID NO: 58467 - DNA, 15 bp, Homo sapiens
taagacatatttcaa

SEQ ID NO: 58468 - DNA, 15 bp, Homo sapiens
gtaagacatatttca

SEQ ID NO: 58469 - DNA, 15 bp, Homo sapiens
tgtaagacatatttc

SEQ ID NO: 58470 - DNA, 15 bp, Homo sapiens
ctgtaagacatattt

SEQ ID NO: 58471 - DNA, 15 bp, Homo sapiens
tctgtaagacatatt

SEQ ID NO: 58472 - DNA, 15 bp, Homo sapiens
ctctgtaagacatat

SEQ ID NO: 58473 - DNA, 15 bp, Homo sapiens
cctctgtaagacata

SEQ ID NO: 58474 - DNA, 15 bp, Homo sapiens
gcctctgtaagacat

SEQ ID NO: 58475 - DNA, 15 bp, Homo sapiens
tgcctctgtaagaca

SEQ ID NO: 58476 - DNA, 15 bp, Homo sapiens
ctgcctctgtaagac

SEQ ID NO: 58477 - DNA, 15 bp, Homo sapiens
gctgcctctgtaaga

SEQ ID NO: 58478 - DNA, 15 bp, Homo sapiens
agctgcctctgtaag

SEQ ID NO: 58479 - DNA, 15 bp, Homo sapiens
gagctgcctctgtaa

SEQ ID NO: 58480 - DNA, 15 bp, Homo sapiens
tgagctgcctctgta

SEQ ID NO: 58481 - DNA, 15 bp, Homo sapiens
ttgagctgcctctgt

SEQ ID NO: 58482 - DNA, 15 bp, Homo sapiens
cttgagctgcctctg

SEQ ID NO: 58483 - DNA, 15 bp, Homo sapiens
tcttgagctgcctct

SEQ ID NO: 58484 - DNA, 15 bp, Homo sapiens
ttcttgagctgcctc

SEQ ID NO: 58485 - DNA, 15 bp, Homo sapiens
tttcttgagctgcct

SEQ ID NO: 58486 - DNA, 15 bp, Homo sapiens
ctttcttgagctgcc

SEQ ID NO: 58487 - DNA, 15 bp, Homo sapiens
gctttcttgagctgc

SEQ ID NO: 58488 - DNA, 15 bp, Homo sapiens
tgctttcttgagctg

SEQ ID NO: 58489 - DNA, 15 bp, Homo sapiens
atgctttcttgagct

SEQ ID NO: 58490 - DNA, 15 bp, Homo sapiens
aatgctttcttgagc

SEQ ID NO: 58491 - DNA, 15 bp, Homo sapiens
aaatgctttcttgag

SEQ ID NO: 58492 - DNA, 15 bp, Homo sapiens
caaatgctttcttga

SEQ ID NO: 58493 - DNA, 15 bp, Homo sapiens
gcaaatgctttcttg

SEQ ID NO: 58494 - DNA, 15 bp, Homo sapiens
ggcaaatgctttctt

SEQ ID NO: 58495 - DNA, 15 bp, Homo sapiens
gggcaaatgctttct

SEQ ID NO: 58496 - DNA, 15 bp, Homo sapiens
tgggcaaatgctttc

SEQ ID NO: 58497 - DNA, 15 bp, Homo sapiens
atgggcaaatgcttt

SEQ ID NO: 58498 - DNA, 15 bp, Homo sapiens
aatgggcaaatgctt

SEQ ID NO: 58499 - DNA, 15 bp, Homo sapiens
aaatgggcaaatgct

SEQ ID NO: 58500 - DNA, 15 bp, Homo sapiens
aaaatgggcaaatgc

SEQ ID NO: 58501 - DNA, 15 bp, Homo sapiens
aaaaatgggcaaatg

SEQ ID NO: 58502 - DNA, 15 bp, Homo sapiens
caaaaatgggcaaat

SEQ ID NO: 58503 - DNA, 15 bp, Homo sapiens
ccaaaaatgggcaaa

SEQ ID NO: 58504 - DNA, 15 bp, Homo sapiens
accaaaaatgggcaa

SEQ ID NO: 58505 - DNA, 15 bp, Homo sapiens
taccaaaaatgggca

SEQ ID NO: 58506 - DNA, 15 bp, Homo sapiens
ttaccaaaaatgggc

SEQ ID NO: 58507 - DNA, 15 bp, Homo sapiens
tttaccaaaaatggg

SEQ ID NO: 58508 - DNA, 15 bp, Homo sapiens
atttaccaaaaatgg

SEQ ID NO: 58509 - DNA, 15 bp, Homo sapiens
tatttaccaaaaatg

SEQ ID NO: 58510 - DNA, 15 bp, Homo sapiens
atatttaccaaaaat

SEQ ID NO: 58511 - DNA, 15 bp, Homo sapiens
catatttaccaaaaa

SEQ ID NO: 58512 - DNA, 15 bp, Homo sapiens
tcatatttaccaaaa

SEQ ID NO: 58513 - DNA, 15 bp, Homo sapiens
gtcatatttaccaaa

SEQ ID NO: 58514 - DNA, 15 bp, Homo sapiens
cgtcatatttaccaa

SEQ ID NO: 58515 - DNA, 15 bp, Homo sapiens
acgtcatatttacca

SEQ ID NO: 58516 - DNA, 15 bp, Homo sapiens
cacgtcatatttacc

SEQ ID NO: 58517 - DNA, 15 bp, Homo sapiens
acacgtcatatttac

SEQ ID NO: 58518 - DNA, 15 bp, Homo sapiens
aacacgtcatattta

SEQ ID NO: 58519 - DNA, 15 bp, Homo sapiens
aaacacgtcatattt

SEQ ID NO: 58520 - DNA, 15 bp, Homo sapiens
gaaacacgtcatatt

SEQ ID NO: 58521 - DNA, 15 bp, Homo sapiens
tgaaacacgtcatat

SEQ ID NO: 58522 - DNA, 15 bp, Homo sapiens
ttgaaacacgtcata

SEQ ID NO: 58523 - DNA, 15 bp, Homo sapiens
tttgaaacacgtcat

SEQ ID NO: 58524 - DNA, 15 bp, Homo sapiens
gtttgaaacacgtca

SEQ ID NO: 58525 - DNA, 15 bp, Homo sapiens
agtttgaaacacgtc

SEQ ID NO: 58526 - DNA, 15 bp, Homo sapiens
cagtttgaaacacgt

SEQ ID NO: 58527 - DNA, 15 bp, Homo sapiens
acagtttgaaacacg

SEQ ID NO: 58528 - DNA, 15 bp, Homo sapiens
cacagtttgaaacac

SEQ ID NO: 58529 - DNA, 15 bp, Homo sapiens
tcacagtttgaaaca

SEQ ID NO: 58530 - DNA, 15 bp, Homo sapiens
gtcacagtttgaaac

SEQ ID NO: 58531 - DNA, 15 bp, Homo sapiens
tgtcacagtttgaaa

SEQ ID NO: 58532 - DNA, 15 bp, Homo sapiens
ctgtcacagtttgaa

SEQ ID NO: 58533 - DNA, 15 bp, Homo sapiens
gctgtcacagtttga

SEQ ID NO: 58534 - DNA, 15 bp, Homo sapiens
ggctgtcacagtttg

SEQ ID NO: 58535 - DNA, 15 bp, Homo sapiens
tggctgtcacagttt

SEQ ID NO: 58536 - DNA, 15 bp, Homo sapiens
atggctgtcacagtt

SEQ ID NO: 58537 - DNA, 15 bp, Homo sapiens
aatggctgtcacagt

SEQ ID NO: 58538 - DNA, 15 bp, Homo sapiens
taatggctgtcacag

SEQ ID NO: 58539 - DNA, 15 bp, Homo sapiens
ataatggctgtcaca

SEQ ID NO: 58540 - DNA, 15 bp, Homo sapiens
aataatggctgtcac

SEQ ID NO: 58541 - DNA, 15 bp, Homo sapiens
aaataatggctgtca

SEQ ID NO: 58542 - DNA, 15 bp, Homo sapiens
caaataatggctgtc

SEQ ID NO: 58543 - DNA, 15 bp, Homo sapiens
ccaaataatggctgt

SEQ ID NO: 58544 - DNA, 15 bp, Homo sapiens
accaaataatggctg

SEQ ID NO: 58545 - DNA, 15 bp, Homo sapiens
taccaaataatggct

SEQ ID NO: 58546 - DNA, 15 bp, Homo sapiens
ctaccaaataatggc

SEQ ID NO: 58547 - DNA, 15 bp, Homo sapiens
gctaccaaataatgg

SEQ ID NO: 58548 - DNA, 15 bp, Homo sapiens
tgctaccaaataatg

SEQ ID NO: 58549 - DNA, 15 bp, Homo sapiens
ttgctaccaaataat

SEQ ID NO: 58550 - DNA, 15 bp, Homo sapiens
tttgctaccaaataa

SEQ ID NO: 58551 - DNA, 15 bp, Homo sapiens
ctttgctaccaaata

SEQ ID NO: 58552 - DNA, 15 bp, Homo sapiens
tctttgctaccaaat

SEQ ID NO: 58553 - DNA, 15 bp, Homo sapiens
ttctttgctaccaaa

SEQ ID NO: 58554 - DNA, 15 bp, Homo sapiens
cttctttgctaccaa

SEQ ID NO: 58555 - DNA, 15 bp, Homo sapiens
acttctttgctacca

SEQ ID NO: 58556 - DNA, 15 bp, Homo sapiens
aacttctttgctacc

SEQ ID NO: 58557 - DNA, 15 bp, Homo sapiens
taacttctttgctac

SEQ ID NO: 58558 - DNA, 15 bp, Homo sapiens
ctaacttctttgcta

SEQ ID NO: 58559 - DNA, 15 bp, Homo sapiens
tctaacttctttgct

SEQ ID NO: 58560 - DNA, 15 bp, Homo sapiens
ttctaacttctttgc

SEQ ID NO: 58561 - DNA, 15 bp, Homo sapiens
attctaacttctttg

SEQ ID NO: 58562 - DNA, 15 bp, Homo sapiens
aattctaacttcttt

SEQ ID NO: 58563 - DNA, 15 bp, Homo sapiens
taattctaacttctt

SEQ ID NO: 58564 - DNA, 15 bp, Homo sapiens
ttaattctaacttct

SEQ ID NO: 58565 - DNA, 15 bp, Homo sapiens
cttaattctaacttc

SEQ ID NO: 58566 - DNA, 15 bp, Homo sapiens
acttaattctaactt

SEQ ID NO: 58567 - DNA, 15 bp, Homo sapiens
cacttaattctaact

SEQ ID NO: 58568 - DNA, 15 bp, Homo sapiens
acacttaattctaac

SEQ ID NO: 58569 - DNA, 15 bp, Homo sapiens
gacacttaattctaa

SEQ ID NO: 58570 - DNA, 15 bp, Homo sapiens
tgacacttaattcta

SEQ ID NO: 58571 - DNA, 15 bp, Homo sapiens
atgacacttaattct

SEQ ID NO: 58572 - DNA, 15 bp, Homo sapiens
catgacacttaattc

SEQ ID NO: 58573 - DNA, 15 bp, Homo sapiens
acatgacacttaatt

SEQ ID NO: 58574 - DNA, 15 bp, Homo sapiens
gacatgacacttaat

SEQ ID NO: 58575 - DNA, 15 bp, Homo sapiens
tgacatgacacttaa

SEQ ID NO: 58576 - DNA, 15 bp, Homo sapiens
ctgacatgacactta

SEQ ID NO: 58577 - DNA, 15 bp, Homo sapiens
gctgacatgacactt

SEQ ID NO: 58578 - DNA, 15 bp, Homo sapiens
agctgacatgacact

SEQ ID NO: 58579 - DNA, 15 bp, Homo sapiens
cagctgacatgacac

SEQ ID NO: 58580 - DNA, 15 bp, Homo sapiens
tcagctgacatgaca

SEQ ID NO: 58581 - DNA, 15 bp, Homo sapiens
ttcagctgacatgac

SEQ ID NO: 58582 - DNA, 15 bp, Homo sapiens
tttcagctgacatga

SEQ ID NO: 58583 - DNA, 15 bp, Homo sapiens
atttcagctgacatg

SEQ ID NO: 58584 - DNA, 15 bp, Homo sapiens
gatttcagctgacat

SEQ ID NO: 58585 - DNA, 15 bp, Homo sapiens
ggatttcagctgaca

SEQ ID NO: 58586 - DNA, 15 bp, Homo sapiens
tggatttcagctgac

SEQ ID NO: 58587 - DNA, 15 bp, Homo sapiens
ttggatttcagctga

SEQ ID NO: 58588 - DNA, 15 bp, Homo sapiens
gttggatttcagctg

SEQ ID NO: 58589 - DNA, 15 bp, Homo sapiens
agttggatttcagct

SEQ ID NO: 58590 - DNA, 15 bp, Homo sapiens
aagttggatttcagc

SEQ ID NO: 58591 - DNA, 15 bp, Homo sapiens
taagttggatttcag

SEQ ID NO: 58592 - DNA, 15 bp, Homo sapiens
ctaagttggatttca

SEQ ID NO: 58593 - DNA, 15 bp, Homo sapiens
actaagttggatttc

SEQ ID NO: 58594 - DNA, 15 bp, Homo sapiens
tactaagttggattt

SEQ ID NO: 58595 - DNA, 15 bp, Homo sapiens
ttactaagttggatt

SEQ ID NO: 58596 - DNA, 15 bp, Homo sapiens
attactaagttggat

SEQ ID NO: 58597 - DNA, 15 bp, Homo sapiens
aattactaagttgga

SEQ ID NO: 58598 - DNA, 15 bp, Homo sapiens
taattactaagttgg

SEQ ID NO: 58599 - DNA, 15 bp, Homo sapiens
ttaattactaagttg

SEQ ID NO: 58600 - DNA, 15 bp, Homo sapiens
tttaattactaagtt

SEQ ID NO: 58601 - DNA, 15 bp, Homo sapiens
atttaattactaagt

SEQ ID NO: 58602 - DNA, 15 bp, Homo sapiens
catttaattactaag

SEQ ID NO: 58603 - DNA, 15 bp, Homo sapiens
ccatttaattactaa

SEQ ID NO: 58604 - DNA, 15 bp, Homo sapiens
tccatttaattacta

SEQ ID NO: 58605 - DNA, 15 bp, Homo sapiens
atccatttaattact

SEQ ID NO: 58606 - DNA, 15 bp, Homo sapiens
tatccatttaattac

SEQ ID NO: 58607 - DNA, 15 bp, Homo sapiens
ttatccatttaatta

SEQ ID NO: 58608 - DNA, 15 bp, Homo sapiens
tttatccatttaatt

SEQ ID NO: 58609 - DNA, 15 bp, Homo sapiens
ttttatccatttaat

SEQ ID NO: 58610 - DNA, 15 bp, Homo sapiens
tttttatccatttaa

SEQ ID NO: 58611 - DNA, 15 bp, Homo sapiens
ctttttatccattta

SEQ ID NO: 58612 - DNA, 15 bp, Homo sapiens
tctttttatccattt

SEQ ID NO: 58613 - DNA, 15 bp, Homo sapiens
gtctttttatccatt

SEQ ID NO: 58614 - DNA, 15 bp, Homo sapiens
tgtctttttatccat

SEQ ID NO: 58615 - DNA, 15 bp, Homo sapiens
gtgtctttttatcca

SEQ ID NO: 58616 - DNA, 15 bp, Homo sapiens
ggtgtctttttatcc

SEQ ID NO: 58617 - DNA, 15 bp, Homo sapiens
tggtgtctttttatc

SEQ ID NO: 58618 - DNA, 15 bp, Homo sapiens
ttggtgtctttttat

SEQ ID NO: 58619 - DNA, 15 bp, Homo sapiens
tttggtgtcttttta

SEQ ID NO: 58620 - DNA, 15 bp, Homo sapiens
ttttggtgtcttttt

SEQ ID NO: 58621 - DNA, 15 bp, Homo sapiens
gttttggtgtctttt

SEQ ID NO: 58622 - DNA, 15 bp, Homo sapiens
tgttttggtgtcttt

SEQ ID NO: 58623 - DNA, 15 bp, Homo sapiens
atgttttggtgtctt

SEQ ID NO: 58624 - DNA, 15 bp, Homo sapiens
gatgttttggtgtct

SEQ ID NO: 58625 - DNA, 15 bp, Homo sapiens
ggatgttttggtgtc

SEQ ID NO: 58626 - DNA, 15 bp, Homo sapiens
tggatgttttggtgt

SEQ ID NO: 58627 - DNA, 15 bp, Homo sapiens
gtggatgttttggtg

SEQ ID NO: 58628 - DNA, 15 bp, Homo sapiens
tgtggatgttttggt

SEQ ID NO: 58629 - DNA, 15 bp, Homo sapiens
gtgtggatgttttgg

SEQ ID NO: 58630 - DNA, 15 bp, Homo sapiens
agtgtggatgttttg

SEQ ID NO: 58631 - DNA, 15 bp, Homo sapiens
gagtgtggatgtttt

SEQ ID NO: 58632 - DNA, 15 bp, Homo sapiens
agagtgtggatgttt

SEQ ID NO: 58633 - DNA, 15 bp, Homo sapiens
gagagtgtggatgtt

SEQ ID NO: 58634 - DNA, 15 bp, Homo sapiens
tgagagtgtggatgt

SEQ ID NO: 58635 - DNA, 15 bp, Homo sapiens
ttgagagtgtggatg

SEQ ID NO: 58636 - DNA, 15 bp, Homo sapiens
tttgagagtgtggat

SEQ ID NO: 58637 - DNA, 15 bp, Homo sapiens
gtttgagagtgtgga

SEQ ID NO: 58638 - DNA, 15 bp, Homo sapiens
tgtttgagagtgtgg

SEQ ID NO: 58639 - DNA, 15 bp, Homo sapiens
gtgtttgagagtgtg

SEQ ID NO: 58640 - DNA, 15 bp, Homo sapiens
agtgtttgagagtgt

SEQ ID NO: 58641 - DNA, 15 bp, Homo sapiens
cagtgtttgagagtg

SEQ ID NO: 58642 - DNA, 15 bp, Homo sapiens
gcagtgtttgagagt

SEQ ID NO: 58643 - DNA, 15 bp, Homo sapiens
agcagtgtttgagag

SEQ ID NO: 58644 - DNA, 15 bp, Homo sapiens
cagcagtgtttgaga

SEQ ID NO: 58645 - DNA, 15 bp, Homo sapiens
gcagcagtgtttgag

SEQ ID NO: 58646 - DNA, 15 bp, Homo sapiens
tgcagcagtgtttga

SEQ ID NO: 58647 - DNA, 15 bp, Homo sapiens
atgcagcagtgtttg

SEQ ID NO: 58648 - DNA, 15 bp, Homo sapiens
tatgcagcagtgttt

SEQ ID NO: 58649 - DNA, 15 bp, Homo sapiens
gtatgcagcagtgtt

SEQ ID NO: 58650 - DNA, 15 bp, Homo sapiens
agtatgcagcagtgt

SEQ ID NO: 58651 - DNA, 15 bp, Homo sapiens
aagtatgcagcagtg

SEQ ID NO: 58652 - DNA, 15 bp, Homo sapiens
gaagtatgcagcagt

SEQ ID NO: 58653 - DNA, 15 bp, Homo sapiens
agaagtatgcagcag

SEQ ID NO: 58654 - DNA, 15 bp, Homo sapiens
gagaagtatgcagca

SEQ ID NO: 58655 - DNA, 15 bp, Homo sapiens
tgagaagtatgcagc

SEQ ID NO: 58656 - DNA, 15 bp, Homo sapiens
atgagaagtatgcag

SEQ ID NO: 58657 - DNA, 15 bp, Homo sapiens
catgagaagtatgca

SEQ ID NO: 58658 - DNA, 15 bp, Homo sapiens
acatgagaagtatgc

SEQ ID NO: 58659 - DNA, 15 bp, Homo sapiens
tacatgagaagtatg

SEQ ID NO: 58660 - DNA, 15 bp, Homo sapiens
ttacatgagaagtat

SEQ ID NO: 58661 - DNA, 15 bp, Homo sapiens
gttacatgagaagta

SEQ ID NO: 58662 - DNA, 15 bp, Homo sapiens
ggttacatgagaagt

SEQ ID NO: 58663 - DNA, 15 bp, Homo sapiens
tggttacatgagaag

SEQ ID NO: 58664 - DNA, 15 bp, Homo sapiens
ttggttacatgagaa

SEQ ID NO: 58665 - DNA, 15 bp, Homo sapiens
tttggttacatgaga

SEQ ID NO: 58666 - DNA, 15 bp, Homo sapiens
ttttggttacatgag

SEQ ID NO: 58667 - DNA, 15 bp, Homo sapiens
cttttggttacatga

SEQ ID NO: 58668 - DNA, 15 bp, Homo sapiens
gcttttggttacatg

SEQ ID NO: 58669 - DNA, 15 bp, Homo sapiens
ggcttttggttacat

SEQ ID NO: 58670 - DNA, 15 bp, Homo sapiens
gggcttttggttaca

SEQ ID NO: 58671 - DNA, 15 bp, Homo sapiens
ggggcttttggttac

SEQ ID NO: 58672 - DNA, 15 bp, Homo sapiens
aggggcttttggtta

SEQ ID NO: 58673 - DNA, 15 bp, Homo sapiens
taggggcttttggtt

SEQ ID NO: 58674 - DNA, 15 bp, Homo sapiens
ataggggcttttggt

SEQ ID NO: 58675 - DNA, 15 bp, Homo sapiens
aataggggcttttgg

SEQ ID NO: 58676 - DNA, 15 bp, Homo sapiens
gaataggggcttttg

SEQ ID NO: 58677 - DNA, 15 bp, Homo sapiens
tgaataggggctttt

SEQ ID NO: 58678 - DNA, 15 bp, Homo sapiens
atgaataggggcttt

SEQ ID NO: 58679 - DNA, 15 bp, Homo sapiens
aatgaataggggctt

SEQ ID NO: 58680 - DNA, 15 bp, Homo sapiens
caatgaataggggct

SEQ ID NO: 58681 - DNA, 15 bp, Homo sapiens
acaatgaataggggc

SEQ ID NO: 58682 - DNA, 15 bp, Homo sapiens
gacaatgaatagggg

SEQ ID NO: 58683 - DNA, 15 bp, Homo sapiens
agacaatgaataggg

SEQ ID NO: 58684 - DNA, 15 bp, Homo sapiens
aagacaatgaatagg

SEQ ID NO: 58685 - DNA, 15 bp, Homo sapiens
gaagacaatgaatag

SEQ ID NO: 58686 - DNA, 15 bp, Homo sapiens
agaagacaatgaata

SEQ ID NO: 58687 - DNA, 15 bp, Homo sapiens
gagaagacaatgaat

SEQ ID NO: 58688 - DNA, 15 bp, Homo sapiens
agagaagacaatgaa

SEQ ID NO: 58689 - DNA, 15 bp, Homo sapiens
gagagaagacaatga

SEQ ID NO: 58690 - DNA, 15 bp, Homo sapiens
ggagagaagacaatg

SEQ ID NO: 58691 - DNA, 15 bp, Homo sapiens
aggagagaagacaat

SEQ ID NO: 58692 - DNA, 15 bp, Homo sapiens
gaggagagaagacaa

SEQ ID NO: 58693 - DNA, 15 bp, Homo sapiens
agaggagagaagaca

SEQ ID NO: 58694 - DNA, 15 bp, Homo sapiens
aagaggagagaagac

SEQ ID NO: 58695 - DNA, 15 bp, Homo sapiens
aaagaggagagaaga

SEQ ID NO: 58696 - DNA, 15 bp, Homo sapiens
aaaagaggagagaag

SEQ ID NO: 58697 - DNA, 15 bp, Homo sapiens
aaaaagaggagagaa

SEQ ID NO: 58698 - DNA, 15 bp, Homo sapiens
aaaaaagaggagaga

SEQ ID NO: 58699 - DNA, 15 bp, Homo sapiens
aaaaaaagaggagag

SEQ ID NO: 58700 - DNA, 15 bp, Homo sapiens
taaaaaaagaggaga

SEQ ID NO: 58701 - DNA, 15 bp, Homo sapiens
ataaaaaaagaggag

SEQ ID NO: 58702 - DNA, 15 bp, Homo sapiens
aataaaaaaagagga

SEQ ID NO: 58703 - DNA, 15 bp, Homo sapiens
aaataaaaaaagagg

SEQ ID NO: 58704 - DNA, 15 bp, Homo sapiens
caaataaaaaaagag

SEQ ID NO: 58705 - DNA, 15 bp, Homo sapiens
acaaataaaaaaaga

SEQ ID NO: 58706 - DNA, 15 bp, Homo sapiens
aacaaataaaaaaag

SEQ ID NO: 58707 - DNA, 15 bp, Homo sapiens
aaacaaataaaaaaa

SEQ ID NO: 58708 - DNA, 15 bp, Homo sapiens
taaacaaataaaaaa

SEQ ID NO: 58709 - DNA, 15 bp, Homo sapiens
ttaaacaaataaaaa

SEQ ID NO: 58710 - DNA, 15 bp, Homo sapiens
tttaaacaaataaaa

SEQ ID NO: 58711 - DNA, 15 bp, Homo sapiens
ttttaaacaaataaa

SEQ ID NO: 58712 - DNA, 15 bp, Homo sapiens
tttttaaacaaataa

SEQ ID NO: 58713 - DNA, 15 bp, Homo sapiens
ctttttaaacaaata

SEQ ID NO: 58714 - DNA, 15 bp, Homo sapiens
gctttttaaacaaat

SEQ ID NO: 58715 - DNA, 15 bp, Homo sapiens
ggctttttaaacaaa

SEQ ID NO: 58716 - DNA, 15 bp, Homo sapiens
aggctttttaaacaa

SEQ ID NO: 58717 - DNA, 15 bp, Homo sapiens
gaggctttttaaaca

SEQ ID NO: 58718 - DNA, 15 bp, Homo sapiens
tgaggctttttaaac

SEQ ID NO: 58719 - DNA, 15 bp, Homo sapiens
ctgaggctttttaaa

SEQ ID NO: 58720 - DNA, 15 bp, Homo sapiens
actgaggctttttaa

SEQ ID NO: 58721 - DNA, 15 bp, Homo sapiens
tactgaggcttttta

SEQ ID NO: 58722 - DNA, 15 bp, Homo sapiens
ttactgaggcttttt

SEQ ID NO: 58723 - DNA, 15 bp, Homo sapiens
cttactgaggctttt

SEQ ID NO: 58724 - DNA, 15 bp, Homo sapiens
ccttactgaggcttt

SEQ ID NO: 58725 - DNA, 15 bp, Homo sapiens
cccttactgaggctt

SEQ ID NO: 58726 - DNA, 15 bp, Homo sapiens
gcccttactgaggct

SEQ ID NO: 58727 - DNA, 15 bp, Homo sapiens
tgcccttactgaggc

SEQ ID NO: 58728 - DNA, 15 bp, Homo sapiens
ttgcccttactgagg

SEQ ID NO: 58729 - DNA, 15 bp, Homo sapiens
attgcccttactgag

SEQ ID NO: 58730 - DNA, 15 bp, Homo sapiens
aattgcccttactga

SEQ ID NO: 58731 - DNA, 15 bp, Homo sapiens
aaattgcccttactg

SEQ ID NO: 58732 - DNA, 15 bp, Homo sapiens
taaattgcccttact

SEQ ID NO: 58733 - DNA, 15 bp, Homo sapiens
ttaaattgcccttac

SEQ ID NO: 58734 - DNA, 15 bp, Homo sapiens
tttaaattgccctta

SEQ ID NO: 58735 - DNA, 15 bp, Homo sapiens
ttttaaattgccctt

SEQ ID NO: 58736 - DNA, 15 bp, Homo sapiens
tttttaaattgccct

SEQ ID NO: 58737 - DNA, 15 bp, Homo sapiens
ttttttaaattgccc

SEQ ID NO: 58738 - DNA, 15 bp, Homo sapiens
tttttttaaattgcc

SEQ ID NO: 58739 - DNA, 15 bp, Homo sapiens
ttttttttaaattgc

SEQ ID NO: 58740 - DNA, 15 bp, Homo sapiens
tttttttttaaattg

SEQ ID NO: 58741 - DNA, 15 bp, Homo sapiens
atttttttttaaatt

SEQ ID NO: 58742 - DNA, 15 bp, Homo sapiens
aatttttttttaaat

SEQ ID NO: 58743 - DNA, 15 bp, Homo sapiens
taatttttttttaaa

SEQ ID NO: 58744 - DNA, 15 bp, Homo sapiens
ctaatttttttttaa

SEQ ID NO: 58745 - DNA, 15 bp, Homo sapiens
gctaattttttttta

SEQ ID NO: 58746 - DNA, 15 bp, Homo sapiens
tgctaattttttttt

SEQ ID NO: 58747 - DNA, 15 bp, Homo sapiens
gtgctaatttttttt

SEQ ID NO: 58748 - DNA, 15 bp, Homo sapiens
agtgctaattttttt

SEQ ID NO: 58749 - DNA, 15 bp, Homo sapiens
aagtgctaatttttt

SEQ ID NO: 58750 - DNA, 15 bp, Homo sapiens
aaagtgctaattttt

SEQ ID NO: 58751 - DNA, 15 bp, Homo sapiens
caaagtgctaatttt

SEQ ID NO: 58752 - DNA, 15 bp, Homo sapiens
ccaaagtgctaattt

SEQ ID NO: 58753 - DNA, 15 bp, Homo sapiens
tccaaagtgctaatt

SEQ ID NO: 58754 - DNA, 15 bp, Homo sapiens
ctccaaagtgctaat

SEQ ID NO: 58755 - DNA, 15 bp, Homo sapiens
tctccaaagtgctaa

SEQ ID NO: 58756 - DNA, 15 bp, Homo sapiens
ttctccaaagtgcta

SEQ ID NO: 58757 - DNA, 15 bp, Homo sapiens
attctccaaagtgct

SEQ ID NO: 58758 - DNA, 15 bp, Homo sapiens
tattctccaaagtgc

SEQ ID NO: 58759 - DNA, 15 bp, Homo sapiens
ttattctccaaagtg

SEQ ID NO: 58760 - DNA, 15 bp, Homo sapiens
tttattctccaaagt

SEQ ID NO: 58761 - DNA, 15 bp, Homo sapiens
atttattctccaaag

SEQ ID NO: 58762 - DNA, 15 bp, Homo sapiens
aatttattctccaaa

SEQ ID NO: 58763 - DNA, 15 bp, Homo sapiens
caatttattctccaa

SEQ ID NO: 58764 - DNA, 15 bp, Homo sapiens
acaatttattctcca

SEQ ID NO: 58765 - DNA, 15 bp, Homo sapiens
aacaatttattctcc

SEQ ID NO: 58766 - DNA, 15 bp, Homo sapiens
aaacaatttattctc

SEQ ID NO: 58767 - DNA, 15 bp, Homo sapiens
taaacaatttattct

SEQ ID NO: 58768 - DNA, 15 bp, Homo sapiens
ataaacaatttattc

SEQ ID NO: 58769 - DNA, 15 bp, Homo sapiens
gataaacaatttatt

SEQ ID NO: 58770 - DNA, 15 bp, Homo sapiens
tgataaacaatttat

SEQ ID NO: 58771 - DNA, 15 bp, Homo sapiens
ttgataaacaattta

SEQ ID NO: 58772 - DNA, 15 bp, Homo sapiens
tttgataaacaattt

SEQ ID NO: 58773 - DNA, 15 bp, Homo sapiens
atttgataaacaatt

SEQ ID NO: 58774 - DNA, 15 bp, Homo sapiens
catttgataaacaat

SEQ ID NO: 58775 - DNA, 15 bp, Homo sapiens
tcatttgataaacaa

SEQ ID NO: 58776 - DNA, 15 bp, Homo sapiens
ttcatttgataaaca

SEQ ID NO: 58777 - DNA, 15 bp, Homo sapiens
tttcatttgataaac

SEQ ID NO: 58778 - DNA, 15 bp, Homo sapiens
ctttcatttgataaa

SEQ ID NO: 58779 - DNA, 15 bp, Homo sapiens
gctttcatttgataa

SEQ ID NO: 58780 - DNA, 15 bp, Homo sapiens
agctttcatttgata

SEQ ID NO: 58781 - DNA, 15 bp, Homo sapiens
cagctttcatttgat

SEQ ID NO: 58782 - DNA, 15 bp, Homo sapiens
ccagctttcatttga

SEQ ID NO: 58783 - DNA, 15 bp, Homo sapiens
accagctttcatttg

SEQ ID NO: 58784 - DNA, 15 bp, Homo sapiens
aaccagctttcattt

SEQ ID NO: 58785 - DNA, 15 bp, Homo sapiens
aaaccagctttcatt

SEQ ID NO: 58786 - DNA, 15 bp, Homo sapiens
aaaaccagctttcat

SEQ ID NO: 58787 - DNA, 15 bp, Homo sapiens
taaaaccagctttca

SEQ ID NO: 58788 - DNA, 15 bp, Homo sapiens
ataaaaccagctttc

SEQ ID NO: 58789 - DNA, 15 bp, Homo sapiens
aataaaaccagcttt

SEQ ID NO: 58790 - DNA, 15 bp, Homo sapiens
aaataaaaccagctt

SEQ ID NO: 58791 - DNA, 15 bp, Homo sapiens
taaataaaaccagct

SEQ ID NO: 58792 - DNA, 15 bp, Homo sapiens
ataaataaaaccagc

SEQ ID NO: 58793 - DNA, 15 bp, Homo sapiens
aataaataaaaccag

SEQ ID NO: 58794 - DNA, 15 bp, Homo sapiens
aaataaataaaacca

SEQ ID NO: 58795 - DNA, 15 bp, Homo sapiens
aaaataaataaaacc

SEQ ID NO: 58796 - DNA, 15 bp, Homo sapiens
aaaaataaataaaac

SEQ ID NO: 58797 - DNA, 15 bp, Homo sapiens
aaaaaataaataaaa

SEQ ID NO: 58798 - DNA, 15 bp, Homo sapiens
aaaaaaataaataaa

SEQ ID NO: 58799 - DNA, 15 bp, Homo sapiens
taaaaaaataaataa

SEQ ID NO: 58800 - DNA, 15 bp, Homo sapiens
ctaaaaaaataaata

SEQ ID NO: 58801 - DNA, 15 bp, Homo sapiens
tctaaaaaaataaat

SEQ ID NO: 58802 - DNA, 15 bp, Homo sapiens
ttctaaaaaaataaa

SEQ ID NO: 58803 - DNA, 15 bp, Homo sapiens
cttctaaaaaaataa

SEQ ID NO: 58804 - DNA, 15 bp, Homo sapiens
acttctaaaaaaata

SEQ ID NO: 58805 - DNA, 15 bp, Homo sapiens
aacttctaaaaaaat

SEQ ID NO: 58806 - DNA, 15 bp, Homo sapiens
aaacttctaaaaaaa

SEQ ID NO: 58807 - DNA, 15 bp, Homo sapiens
aaaacttctaaaaaa

SEQ ID NO: 58808 - DNA, 15 bp, Homo sapiens
aaaaacttctaaaaa

SEQ ID NO: 58809 - DNA, 15 bp, Homo sapiens
aaaaaacttctaaaa

SEQ ID NO: 58810 - DNA, 15 bp, Homo sapiens
aaaaaaacttctaaa

SEQ ID NO: 58811 - DNA, 15 bp, Homo sapiens
aaaaaaaacttctaa

SEQ ID NO: 58812 - DNA, 15 bp, Homo sapiens
aaaaaaaaacttcta

SEQ ID NO: 58813 - DNA, 15 bp, Homo sapiens
gaaaaaaaaacttct

SEQ ID NO: 58814 - DNA, 15 bp, Homo sapiens
agaaaaaaaaacttc

SEQ ID NO: 58815 - DNA, 15 bp, Homo sapiens
aagaaaaaaaaactt

SEQ ID NO: 58816 - DNA, 15 bp, Homo sapiens
aaagaaaaaaaaact

SEQ ID NO: 58817 - DNA, 15 bp, Homo sapiens
taaagaaaaaaaaac

SEQ ID NO: 58818 - DNA, 15 bp, Homo sapiens
ataaagaaaaaaaaa

SEQ ID NO: 58819 - DNA, 15 bp, Homo sapiens
aataaagaaaaaaaa

SEQ ID NO: 58820 - DNA, 15 bp, Homo sapiens
aaataaagaaaaaaa

SEQ ID NO: 58821 - DNA, 15 bp, Homo sapiens
aaaataaagaaaaaa

SEQ ID NO: 58822 - DNA, 15 bp, Homo sapiens
aaaaataaagaaaaa

SEQ ID NO: 58823 - DNA, 15 bp, Homo sapiens
aaaaaataaagaaaa

SEQ ID NO: 58824 - DNA, 15 bp, Homo sapiens
aaaaaaataaagaaa

SEQ ID NO: 58825 - DNA, 15 bp, Homo sapiens
taaaaaaataaagaa

SEQ ID NO: 58826 - DNA, 15 bp, Homo sapiens
ttaaaaaaataaaga

SEQ ID NO: 58827 - DNA, 15 bp, Homo sapiens
tttaaaaaaataaag

SEQ ID NO: 58828 - DNA, 15 bp, Homo sapiens
atttaaaaaaataaa

SEQ ID NO: 58829 - DNA, 15 bp, Homo sapiens
aatttaaaaaaataa

SEQ ID NO: 58830 - DNA, 15 bp, Homo sapiens
aaatttaaaaaaata

SEQ ID NO: 58831 - DNA, 15 bp, Homo sapiens
caaatttaaaaaaat

SEQ ID NO: 58832 - DNA, 15 bp, Homo sapiens
acaaatttaaaaaaa

SEQ ID NO: 58833 - DNA, 15 bp, Homo sapiens
aacaaatttaaaaaa

SEQ ID NO: 58834 - DNA, 15 bp, Homo sapiens
aaacaaatttaaaaa

SEQ ID NO: 58835 - DNA, 15 bp, Homo sapiens
taaacaaatttaaaa

SEQ ID NO: 58836 - DNA, 15 bp, Homo sapiens
ttaaacaaatttaaa

SEQ ID NO: 58837 - DNA, 15 bp, Homo sapiens
tttaaacaaatttaa

SEQ ID NO: 58838 - DNA, 15 bp, Homo sapiens
atttaaacaaattta

SEQ ID NO: 58839 - DNA, 15 bp, Homo sapiens
aatttaaacaaattt

SEQ ID NO: 58840 - DNA, 15 bp, Homo sapiens
taatttaaacaaatt

SEQ ID NO: 58841 - DNA, 15 bp, Homo sapiens
ataatttaaacaaat

SEQ ID NO: 58842 - DNA, 15 bp, Homo sapiens
tataatttaaacaaa

SEQ ID NO: 58843 - DNA, 15 bp, Homo sapiens
gtataatttaaacaa

SEQ ID NO: 58844 - DNA, 15 bp, Homo sapiens
agtataatttaaaca

SEQ ID NO: 58845 - DNA, 15 bp, Homo sapiens
aagtataatttaaac

SEQ ID NO: 58846 - DNA, 15 bp, Homo sapiens
aaagtataatttaaa

SEQ ID NO: 58847 - DNA, 15 bp, Homo sapiens
taaagtataatttaa

SEQ ID NO: 58848 - DNA, 15 bp, Homo sapiens
ttaaagtataattta

SEQ ID NO: 58849 - DNA, 15 bp, Homo sapiens
cttaaagtataattt

SEQ ID NO: 58850 - DNA, 15 bp, Homo sapiens
acttaaagtataatt

SEQ ID NO: 58851 - DNA, 15 bp, Homo sapiens
aacttaaagtataat

SEQ ID NO: 58852 - DNA, 15 bp, Homo sapiens
gaacttaaagtataa

SEQ ID NO: 58853 - DNA, 15 bp, Homo sapiens
agaacttaaagtata

SEQ ID NO: 58854 - DNA, 15 bp, Homo sapiens
tagaacttaaagtat

SEQ ID NO: 58855 - DNA, 15 bp, Homo sapiens
ctagaacttaaagta

SEQ ID NO: 58856 - DNA, 15 bp, Homo sapiens
cctagaacttaaagt

SEQ ID NO: 58857 - DNA, 15 bp, Homo sapiens
ccctagaacttaaag

SEQ ID NO: 58858 - DNA, 15 bp, Homo sapiens
accctagaacttaaa

SEQ ID NO: 58859 - DNA, 15 bp, Homo sapiens
taccctagaacttaa

SEQ ID NO: 58860 - DNA, 15 bp, Homo sapiens
gtaccctagaactta

SEQ ID NO: 58861 - DNA, 15 bp, Homo sapiens
tgtaccctagaactt

SEQ ID NO: 58862 - DNA, 15 bp, Homo sapiens
atgtaccctagaact

SEQ ID NO: 58863 - DNA, 15 bp, Homo sapiens
catgtaccctagaac

SEQ ID NO: 58864 - DNA, 15 bp, Homo sapiens
acatgtaccctagaa

SEQ ID NO: 58865 - DNA, 15 bp, Homo sapiens
cacatgtaccctaga

SEQ ID NO: 58866 - DNA, 15 bp, Homo sapiens
gcacatgtaccctag

SEQ ID NO: 58867 - DNA, 15 bp, Homo sapiens
tgcacatgtacccta

SEQ ID NO: 58868 - DNA, 15 bp, Homo sapiens
atgcacatgtaccct

SEQ ID NO: 58869 - DNA, 15 bp, Homo sapiens
tatgcacatgtaccc

SEQ ID NO: 58870 - DNA, 15 bp, Homo sapiens
ttatgcacatgtacc

SEQ ID NO: 58871 - DNA, 15 bp, Homo sapiens
gttatgcacatgtac

SEQ ID NO: 58872 - DNA, 15 bp, Homo sapiens
cgttatgcacatgta

SEQ ID NO: 58873 - DNA, 15 bp, Homo sapiens
acgttatgcacatgt

SEQ ID NO: 58874 - DNA, 15 bp, Homo sapiens
cacgttatgcacatg

SEQ ID NO: 58875 - DNA, 15 bp, Homo sapiens
gcacgttatgcacat

SEQ ID NO: 58876 - DNA, 15 bp, Homo sapiens
tgcacgttatgcaca

SEQ ID NO: 58877 - DNA, 15 bp, Homo sapiens
ctgcacgttatgcac

SEQ ID NO: 58878 - DNA, 15 bp, Homo sapiens
cctgcacgttatgca

SEQ ID NO: 58879 - DNA, 15 bp, Homo sapiens
acctgcacgttatgc

SEQ ID NO: 58880 - DNA, 15 bp, Homo sapiens
aacctgcacgttatg

SEQ ID NO: 58881 - DNA, 15 bp, Homo sapiens
aaacctgcacgttat

SEQ ID NO: 58882 - DNA, 15 bp, Homo sapiens
caaacctgcacgtta

SEQ ID NO: 58883 - DNA, 15 bp, Homo sapiens
acaaacctgcacgtt

SEQ ID NO: 58884 - DNA, 15 bp, Homo sapiens
aacaaacctgcacgt

SEQ ID NO: 58885 - DNA, 15 bp, Homo sapiens
taacaaacctgcacg

SEQ ID NO: 58886 - DNA, 15 bp, Homo sapiens
gtaacaaacctgcac

SEQ ID NO: 58887 - DNA, 15 bp, Homo sapiens
tgtaacaaacctgca

SEQ ID NO: 58888 - DNA, 15 bp, Homo sapiens
atgtaacaaacctgc

SEQ ID NO: 58889 - DNA, 15 bp, Homo sapiens
tatgtaacaaacctg

SEQ ID NO: 58890 - DNA, 15 bp, Homo sapiens
atatgtaacaaacct

SEQ ID NO: 58891 - DNA, 15 bp, Homo sapiens
catatgtaacaaacc

SEQ ID NO: 58892 - DNA, 15 bp, Homo sapiens
acatatgtaacaaac

SEQ ID NO: 58893 - DNA, 15 bp, Homo sapiens
tacatatgtaacaaa

SEQ ID NO: 58894 - DNA, 15 bp, Homo sapiens
atacatatgtaacaa

SEQ ID NO: 58895 - DNA, 15 bp, Homo sapiens
tatacatatgtaaca

SEQ ID NO: 58896 - DNA, 15 bp, Homo sapiens
gtatacatatgtaac

SEQ ID NO: 58897 - DNA, 15 bp, Homo sapiens
tgtatacatatgtaa

SEQ ID NO: 58898 - DNA, 15 bp, Homo sapiens
atgtatacatatgta

SEQ ID NO: 58899 - DNA, 15 bp, Homo sapiens
catgtatacatatgt

SEQ ID NO: 58900 - DNA, 15 bp, Homo sapiens
acatgtatacatatg

SEQ ID NO: 58901 - DNA, 15 bp, Homo sapiens
cacatgtatacatat

SEQ ID NO: 58902 - DNA, 15 bp, Homo sapiens
gcacatgtatacata

SEQ ID NO: 58903 - DNA, 15 bp, Homo sapiens
ggcacatgtatacat

SEQ ID NO: 58904 - DNA, 15 bp, Homo sapiens
tggcacatgtataca

SEQ ID NO: 58905 - DNA, 15 bp, Homo sapiens
atggcacatgtatac

SEQ ID NO: 58906 - DNA, 15 bp, Homo sapiens
catggcacatgtata

SEQ ID NO: 58907 - DNA, 15 bp, Homo sapiens
acatggcacatgtat

SEQ ID NO: 58908 - DNA, 15 bp, Homo sapiens
aacatggcacatgta

SEQ ID NO: 58909 - DNA, 15 bp, Homo sapiens
caacatggcacatgt

SEQ ID NO: 58910 - DNA, 15 bp, Homo sapiens
ccaacatggcacatg

SEQ ID NO: 58911 - DNA, 15 bp, Homo sapiens
accaacatggcacat

SEQ ID NO: 58912 - DNA, 15 bp, Homo sapiens
caccaacatggcaca

SEQ ID NO: 58913 - DNA, 15 bp, Homo sapiens
acaccaacatggcac

SEQ ID NO: 58914 - DNA, 15 bp, Homo sapiens
cacaccaacatggca

SEQ ID NO: 58915 - DNA, 15 bp, Homo sapiens
gcacaccaacatggc

SEQ ID NO: 58916 - DNA, 15 bp, Homo sapiens
agcacaccaacatgg

SEQ ID NO: 58917 - DNA, 15 bp, Homo sapiens
cagcacaccaacatg

SEQ ID NO: 58918 - DNA, 15 bp, Homo sapiens
gcagcacaccaacat

SEQ ID NO: 58919 - DNA, 15 bp, Homo sapiens
tgcagcacaccaaca

SEQ ID NO: 58920 - DNA, 15 bp, Homo sapiens
gtgcagcacaccaac

SEQ ID NO: 58921 - DNA, 15 bp, Homo sapiens
ggtgcagcacaccaa

SEQ ID NO: 58922 - DNA, 15 bp, Homo sapiens
gggtgcagcacacca

SEQ ID NO: 58923 - DNA, 15 bp, Homo sapiens
tgggtgcagcacacc

SEQ ID NO: 58924 - DNA, 15 bp, Homo sapiens
atgggtgcagcacac

SEQ ID NO: 58925 - DNA, 15 bp, Homo sapiens
aatgggtgcagcaca

SEQ ID NO: 58926 - DNA, 15 bp, Homo sapiens
taatgggtgcagcac

SEQ ID NO: 58927 - DNA, 15 bp, Homo sapiens
ttaatgggtgcagca

SEQ ID NO: 58928 - DNA, 15 bp, Homo sapiens
gttaatgggtgcagc

SEQ ID NO: 58929 - DNA, 15 bp, Homo sapiens
agttaatgggtgcag

SEQ ID NO: 58930 - DNA, 15 bp, Homo sapiens
aagttaatgggtgca

SEQ ID NO: 58931 - DNA, 15 bp, Homo sapiens
caagttaatgggtgc

SEQ ID NO: 58932 - DNA, 15 bp, Homo sapiens
acaagttaatgggtg

SEQ ID NO: 58933 - DNA, 15 bp, Homo sapiens
gacaagttaatgggt

SEQ ID NO: 58934 - DNA, 15 bp, Homo sapiens
tgacaagttaatggg

SEQ ID NO: 58935 - DNA, 15 bp, Homo sapiens
atgacaagttaatgg

SEQ ID NO: 58936 - DNA, 15 bp, Homo sapiens
aatgacaagttaatg

SEQ ID NO: 58937 - DNA, 15 bp, Homo sapiens
aaatgacaagttaat

SEQ ID NO: 58938 - DNA, 15 bp, Homo sapiens
taaatgacaagttaa

SEQ ID NO: 58939 - DNA, 15 bp, Homo sapiens
gtaaatgacaagtta

SEQ ID NO: 58940 - DNA, 15 bp, Homo sapiens
tgtaaatgacaagtt

SEQ ID NO: 58941 - DNA, 15 bp, Homo sapiens
atgtaaatgacaagt

SEQ ID NO: 58942 - DNA, 15 bp, Homo sapiens
aatgtaaatgacaag

SEQ ID NO: 58943 - DNA, 15 bp, Homo sapiens
taatgtaaatgacaa

SEQ ID NO: 58944 - DNA, 15 bp, Homo sapiens
ctaatgtaaatgaca

SEQ ID NO: 58945 - DNA, 15 bp, Homo sapiens
cctaatgtaaatgac

SEQ ID NO: 58946 - DNA, 15 bp, Homo sapiens
acctaatgtaaatga

SEQ ID NO: 58947 - DNA, 15 bp, Homo sapiens
tacctaatgtaaatg

SEQ ID NO: 58948 - DNA, 15 bp, Homo sapiens
atacctaatgtaaat

SEQ ID NO: 58949 - DNA, 15 bp, Homo sapiens
tatacctaatgtaaa

SEQ ID NO: 58950 - DNA, 15 bp, Homo sapiens
atatacctaatgtaa

SEQ ID NO: 58951 - DNA, 15 bp, Homo sapiens
gatatacctaatgta

SEQ ID NO: 58952 - DNA, 15 bp, Homo sapiens
agatatacctaatgt

SEQ ID NO: 58953 - DNA, 15 bp, Homo sapiens
gagatatacctaatg

SEQ ID NO: 58954 - DNA, 15 bp, Homo sapiens
ggagatatacctaat

SEQ ID NO: 58955 - DNA, 15 bp, Homo sapiens
aggagatatacctaa

SEQ ID NO: 58956 - DNA, 15 bp, Homo sapiens
taggagatataccta

SEQ ID NO: 58957 - DNA, 15 bp, Homo sapiens
ttaggagatatacct

SEQ ID NO: 58958 - DNA, 15 bp, Homo sapiens
attaggagatatacc

SEQ ID NO: 58959 - DNA, 15 bp, Homo sapiens
cattaggagatatac

SEQ ID NO: 58960 - DNA, 15 bp, Homo sapiens
gcattaggagatata

SEQ ID NO: 58961 - DNA, 15 bp, Homo sapiens
agcattaggagatat

SEQ ID NO: 58962 - DNA, 15 bp, Homo sapiens
tagcattaggagata

SEQ ID NO: 58963 - DNA, 15 bp, Homo sapiens
atagcattaggagat

SEQ ID NO: 58964 - DNA, 15 bp, Homo sapiens
gatagcattaggaga

SEQ ID NO: 58965 - DNA, 15 bp, Homo sapiens
ggatagcattaggag

SEQ ID NO: 58966 - DNA, 15 bp, Homo sapiens
gggatagcattagga

SEQ ID NO: 58967 - DNA, 15 bp, Homo sapiens
agggatagcattagg

SEQ ID NO: 58968 - DNA, 15 bp, Homo sapiens
gagggatagcattag

SEQ ID NO: 58969 - DNA, 15 bp, Homo sapiens
ggagggatagcatta

SEQ ID NO: 58970 - DNA, 15 bp, Homo sapiens
gggagggatagcatt

SEQ ID NO: 58971 - DNA, 15 bp, Homo sapiens
ggggagggatagcat

SEQ ID NO: 58972 - DNA, 15 bp, Homo sapiens
gggggagggatagca

SEQ ID NO: 58973 - DNA, 15 bp, Homo sapiens
tgggggagggatagc

SEQ ID NO: 58974 - DNA, 15 bp, Homo sapiens
atgggggagggatag

SEQ ID NO: 58975 - DNA, 15 bp, Homo sapiens
gatgggggagggata

SEQ ID NO: 58976 - DNA, 15 bp, Homo sapiens
ggatgggggagggat

SEQ ID NO: 58977 - DNA, 15 bp, Homo sapiens
gggatgggggaggga

SEQ ID NO: 58978 - DNA, 15 bp, Homo sapiens
ggggatgggggaggg

SEQ ID NO: 58979 - DNA, 15 bp, Homo sapiens
gggggatgggggagg

SEQ ID NO: 58980 - DNA, 15 bp, Homo sapiens
ggggggatgggggag

SEQ ID NO: 58981 - DNA, 15 bp, Homo sapiens
tggggggatggggga

SEQ ID NO: 58982 - DNA, 15 bp, Homo sapiens
gtggggggatggggg

SEQ ID NO: 58983 - DNA, 15 bp, Homo sapiens
ggtggggggatgggg

SEQ ID NO: 58984 - DNA, 15 bp, Homo sapiens
gggtggggggatggg

SEQ ID NO: 58985 - DNA, 15 bp, Homo sapiens
ggggtggggggatgg

SEQ ID NO: 58986 - DNA, 15 bp, Homo sapiens
tggggtggggggatg

SEQ ID NO: 58987 - DNA, 15 bp, Homo sapiens
gtggggtggggggat

SEQ ID NO: 58988 - DNA, 15 bp, Homo sapiens
tgtggggtgggggga

SEQ ID NO: 58989 - DNA, 15 bp, Homo sapiens
ttgtggggtgggggg

SEQ ID NO: 58990 - DNA, 15 bp, Homo sapiens
attgtggggtggggg

SEQ ID NO: 58991 - DNA, 15 bp, Homo sapiens
tattgtggggtgggg

SEQ ID NO: 58992 - DNA, 15 bp, Homo sapiens
ctattgtggggtggg

SEQ ID NO: 58993 - DNA, 15 bp, Homo sapiens
cctattgtggggtgg

SEQ ID NO: 58994 - DNA, 15 bp, Homo sapiens
gcctattgtggggtg

SEQ ID NO: 58995 - DNA, 15 bp, Homo sapiens
ggcctattgtggggt

SEQ ID NO: 58996 - DNA, 15 bp, Homo sapiens
gggcctattgtgggg

SEQ ID NO: 58997 - DNA, 15 bp, Homo sapiens
ggggcctattgtggg

SEQ ID NO: 58998 - DNA, 15 bp, Homo sapiens
cggggcctattgtgg

SEQ ID NO: 58999 - DNA, 15 bp, Homo sapiens
ccggggcctattgtg

SEQ ID NO: 59000 - DNA, 15 bp, Homo sapiens
accggggcctattgt

SEQ ID NO: 59001 - DNA, 15 bp, Homo sapiens
caccggggcctattg

SEQ ID NO: 59002 - DNA, 15 bp, Homo sapiens
acaccggggcctatt

SEQ ID NO: 59003 - DNA, 15 bp, Homo sapiens
cacaccggggcctat

SEQ ID NO: 59004 - DNA, 15 bp, Homo sapiens
acacaccggggccta

SEQ ID NO: 59005 - DNA, 15 bp, Homo sapiens
cacacaccggggcct

SEQ ID NO: 59006 - DNA, 15 bp, Homo sapiens
tcacacaccggggcc

SEQ ID NO: 59007 - DNA, 15 bp, Homo sapiens
atcacacaccggggc

SEQ ID NO: 59008 - DNA, 15 bp, Homo sapiens
catcacacaccgggg

SEQ ID NO: 59009 - DNA, 15 bp, Homo sapiens
acatcacacaccggg

SEQ ID NO: 59010 - DNA, 15 bp, Homo sapiens
aacatcacacaccgg

SEQ ID NO: 59011 - DNA, 15 bp, Homo sapiens
gaacatcacacaccg

SEQ ID NO: 59012 - DNA, 15 bp, Homo sapiens
ggaacatcacacacc

SEQ ID NO: 59013 - DNA, 15 bp, Homo sapiens
gggaacatcacacac

SEQ ID NO: 59014 - DNA, 15 bp, Homo sapiens
ggggaacatcacaca

SEQ ID NO: 59015 - DNA, 15 bp, Homo sapiens
aggggaacatcacac

SEQ ID NO: 59016 - DNA, 15 bp, Homo sapiens
aaggggaacatcaca

SEQ ID NO: 59017 - DNA, 15 bp, Homo sapiens
gaaggggaacatcac

SEQ ID NO: 59018 - DNA, 15 bp, Homo sapiens
ggaaggggaacatca

SEQ ID NO: 59019 - DNA, 15 bp, Homo sapiens
aggaaggggaacatc

SEQ ID NO: 59020 - DNA, 15 bp, Homo sapiens
caggaaggggaacat

SEQ ID NO: 59021 - DNA, 15 bp, Homo sapiens
ttggacacaggaagg

SEQ ID NO: 59022 - DNA, 15 bp, Homo sapiens
cttggacacaggaag

SEQ ID NO: 59023 - DNA, 15 bp, Homo sapiens
acttggacacaggaa

SEQ ID NO: 59024 - DNA, 15 bp, Homo sapiens
cacttggacacagga

SEQ ID NO: 59025 - DNA, 15 bp, Homo sapiens
acacttggacacagg

SEQ ID NO: 59026 - DNA, 15 bp, Homo sapiens
aacacttggacacag

SEQ ID NO: 59027 - DNA, 15 bp, Homo sapiens
gaacacttggacaca

SEQ ID NO: 59028 - DNA, 15 bp, Homo sapiens
agaacacttggacac

SEQ ID NO: 59029 - DNA, 15 bp, Homo sapiens
gagaacacttggaca

SEQ ID NO: 59030 - DNA, 15 bp, Homo sapiens
tgagaacacttggac

SEQ ID NO: 59031 - DNA, 15 bp, Homo sapiens
atgagaacacttgga

SEQ ID NO: 59032 - DNA, 15 bp, Homo sapiens
aatgagaacacttgg

SEQ ID NO: 59033 - DNA, 15 bp, Homo sapiens
caatgagaacacttg

SEQ ID NO: 59034 - DNA, 15 bp, Homo sapiens
acaatgagaacactt

SEQ ID NO: 59035 - DNA, 15 bp, Homo sapiens
aacaatgagaacact

SEQ ID NO: 59036 - DNA, 15 bp, Homo sapiens
ctgaacaatgagaac

SEQ ID NO: 59037 - DNA, 15 bp, Homo sapiens
actgaacaatgagaa

SEQ ID NO: 59038 - DNA, 15 bp, Homo sapiens
aactgaacaatgaga

SEQ ID NO: 59039 - DNA, 15 bp, Homo sapiens
gaactgaacaatgag

SEQ ID NO: 59040 - DNA, 15 bp, Homo sapiens
ggaactgaacaatga

SEQ ID NO: 59041 - DNA, 15 bp, Homo sapiens
gggaactgaacaatg

SEQ ID NO: 59042 - DNA, 15 bp, Homo sapiens
tgggaactgaacaat

SEQ ID NO: 59043 - DNA, 15 bp, Homo sapiens
gtgggaactgaacaa

SEQ ID NO: 59044 - DNA, 15 bp, Homo sapiens
ggtgggaactgaaca

SEQ ID NO: 59045 - DNA, 15 bp, Homo sapiens
aggtgggaactgaac

SEQ ID NO: 59046 - DNA, 15 bp, Homo sapiens
caggtgggaactgaa

SEQ ID NO: 59047 - DNA, 15 bp, Homo sapiens
acaggtgggaactga

SEQ ID NO: 59048 - DNA, 15 bp, Homo sapiens
cacaggtgggaactg

SEQ ID NO: 59049 - DNA, 15 bp, Homo sapiens
tcacaggtgggaact

SEQ ID NO: 59050 - DNA, 15 bp, Homo sapiens
ctcacaggtgggaac

SEQ ID NO: 59051 - DNA, 15 bp, Homo sapiens
actcacaggtgggaa

SEQ ID NO: 59052 - DNA, 15 bp, Homo sapiens
cactcacaggtggga

SEQ ID NO: 59053 - DNA, 15 bp, Homo sapiens
tcactcacaggtggg

SEQ ID NO: 59054 - DNA, 15 bp, Homo sapiens
ctcactcacaggtgg

SEQ ID NO: 59055 - DNA, 15 bp, Homo sapiens
tctcactcacaggtg

SEQ ID NO: 59056 - DNA, 15 bp, Homo sapiens
ttctcactcacaggt

SEQ ID NO: 59057 - DNA, 15 bp, Homo sapiens
gttctcactcacagg

SEQ ID NO: 59058 - DNA, 15 bp, Homo sapiens
tgttctcactcacag

SEQ ID NO: 59059 - DNA, 15 bp, Homo sapiens
atgttctcactcaca

SEQ ID NO: 59060 - DNA, 15 bp, Homo sapiens
catgttctcactcac

SEQ ID NO: 59061 - DNA, 15 bp, Homo sapiens
tcatgttctcactca

SEQ ID NO: 59062 - DNA, 15 bp, Homo sapiens
ctcatgttctcactc

SEQ ID NO: 59063 - DNA, 15 bp, Homo sapiens
cctcatgttctcact

SEQ ID NO: 59064 - DNA, 15 bp, Homo sapiens
acctcatgttctcac

SEQ ID NO: 59065 - DNA, 15 bp, Homo sapiens
cacctcatgttctca

SEQ ID NO: 59066 - DNA, 15 bp, Homo sapiens
acacctcatgttctc

SEQ ID NO: 59067 - DNA, 15 bp, Homo sapiens
aacacctcatgttct

SEQ ID NO: 59068 - DNA, 15 bp, Homo sapiens
aaacacctcatgttc

SEQ ID NO: 59069 - DNA, 15 bp, Homo sapiens
caaacacctcatgtt

SEQ ID NO: 59070 - DNA, 15 bp, Homo sapiens
ccaaacacctcatgt

SEQ ID NO: 59071 - DNA, 15 bp, Homo sapiens
accaaacacctcatg

SEQ ID NO: 59072 - DNA, 15 bp, Homo sapiens
aaccaaacacctcat

SEQ ID NO: 59073 - DNA, 15 bp, Homo sapiens
aaaccaaacacctca

SEQ ID NO: 59074 - DNA, 15 bp, Homo sapiens
aaaaccaaacacctc

SEQ ID NO: 59075 - DNA, 15 bp, Homo sapiens
aaaaaccaaacacct

SEQ ID NO: 59076 - DNA, 15 bp, Homo sapiens
aaaaaaccaaacacc

SEQ ID NO: 59077 - DNA, 15 bp, Homo sapiens
caaaaaaccaaacac

SEQ ID NO: 59078 - DNA, 15 bp, Homo sapiens
acaaaaaaccaaaca

SEQ ID NO: 59079 - DNA, 15 bp, Homo sapiens
gacaaaaaaccaaac

SEQ ID NO: 59080 - DNA, 15 bp, Homo sapiens
ggacaaaaaaccaaa

SEQ ID NO: 59081 - DNA, 15 bp, Homo sapiens
aggacaaaaaaccaa

SEQ ID NO: 59082 - DNA, 15 bp, Homo sapiens
aaggacaaaaaacca

SEQ ID NO: 59083 - DNA, 15 bp, Homo sapiens
caaggacaaaaaacc

SEQ ID NO: 59084 - DNA, 15 bp, Homo sapiens
gcaaggacaaaaaac

SEQ ID NO: 59085 - DNA, 15 bp, Homo sapiens
cgcaaggacaaaaaa

SEQ ID NO: 59086 - DNA, 15 bp, Homo sapiens
tcgcaaggacaaaaa

SEQ ID NO: 59087 - DNA, 15 bp, Homo sapiens
atcgcaaggacaaaa

SEQ ID NO: 59088 - DNA, 15 bp, Homo sapiens
tatcgcaaggacaaa

SEQ ID NO: 59089 - DNA, 15 bp, Homo sapiens
ctatcgcaaggacaa

SEQ ID NO: 59090 - DNA, 15 bp, Homo sapiens
actatcgcaaggaca

SEQ ID NO: 59091 - DNA, 15 bp, Homo sapiens
aactatcgcaaggac

SEQ ID NO: 59092 - DNA, 15 bp, Homo sapiens
aaactatcgcaagga

SEQ ID NO: 59093 - DNA, 15 bp, Homo sapiens
caaactatcgcaagg

SEQ ID NO: 59094 - DNA, 15 bp, Homo sapiens
gcaaactatcgcaag

SEQ ID NO: 59095 - DNA, 15 bp, Homo sapiens
agcaaactatcgcaa

SEQ ID NO: 59096 - DNA, 15 bp, Homo sapiens
cagcaaactatcgca

SEQ ID NO: 59097 - DNA, 15 bp, Homo sapiens
tcagcaaactatcgc

SEQ ID NO: 59098 - DNA, 15 bp, Homo sapiens
ctcagcaaactatcg

SEQ ID NO: 59099 - DNA, 15 bp, Homo sapiens
cctcagcaaactatc

SEQ ID NO: 59100 - DNA, 15 bp, Homo sapiens
tcctcagcaaactat

SEQ ID NO: 59101 - DNA, 15 bp, Homo sapiens
atcctcagcaaacta

SEQ ID NO: 59102 - DNA, 15 bp, Homo sapiens
catcctcagcaaact

SEQ ID NO: 59103 - DNA, 15 bp, Homo sapiens
ccatcctcagcaaac

SEQ ID NO: 59104 - DNA, 15 bp, Homo sapiens
accatcctcagcaaa

SEQ ID NO: 59105 - DNA, 15 bp, Homo sapiens
aaccatcctcagcaa

SEQ ID NO: 59106 - DNA, 15 bp, Homo sapiens
aaaccatcctcagca

SEQ ID NO: 59107 - DNA, 15 bp, Homo sapiens
gaaaccatcctcagc

SEQ ID NO: 59108 - DNA, 15 bp, Homo sapiens
ggaaaccatcctcag

SEQ ID NO: 59109 - DNA, 15 bp, Homo sapiens
tggaaaccatcctca

SEQ ID NO: 59110 - DNA, 15 bp, Homo sapiens
ctggaaaccatcctc

SEQ ID NO: 59111 - DNA, 15 bp, Homo sapiens
gctggaaaccatcct

SEQ ID NO: 59112 - DNA, 15 bp, Homo sapiens
agctggaaaccatcc

SEQ ID NO: 59113 - DNA, 15 bp, Homo sapiens
aagctggaaaccatc

SEQ ID NO: 59114 - DNA, 15 bp, Homo sapiens
gaagctggaaaccat

SEQ ID NO: 59115 - DNA, 15 bp, Homo sapiens
tgaagctggaaacca

SEQ ID NO: 59116 - DNA, 15 bp, Homo sapiens
atgaagctggaaacc

SEQ ID NO: 59117 - DNA, 15 bp, Homo sapiens
gatgaagctggaaac

SEQ ID NO: 59118 - DNA, 15 bp, Homo sapiens
ggatgaagctggaaa

SEQ ID NO: 59119 - DNA, 15 bp, Homo sapiens
tagggacatggatga

SEQ ID NO: 59120 - DNA, 15 bp, Homo sapiens
gtagggacatggatg

SEQ ID NO: 59121 - DNA, 15 bp, Homo sapiens
tgtagggacatggat

SEQ ID NO: 59122 - DNA, 15 bp, Homo sapiens
ttgtagggacatgga

SEQ ID NO: 59123 - DNA, 15 bp, Homo sapiens
tttgtagggacatgg

SEQ ID NO: 59124 - DNA, 15 bp, Homo sapiens
ctttgtagggacatg

SEQ ID NO: 59125 - DNA, 15 bp, Homo sapiens
cctttgtagggacat

SEQ ID NO: 59126 - DNA, 15 bp, Homo sapiens
tcctttgtagggaca

SEQ ID NO: 59127 - DNA, 15 bp, Homo sapiens
gtcctttgtagggac

SEQ ID NO: 59128 - DNA, 15 bp, Homo sapiens
tgtcctttgtaggga

SEQ ID NO: 59129 - DNA, 15 bp, Homo sapiens
atgtcctttgtaggg

SEQ ID NO: 59130 - DNA, 15 bp, Homo sapiens
catgtcctttgtagg

SEQ ID NO: 59131 - DNA, 15 bp, Homo sapiens
tcatgtcctttgtag

SEQ ID NO: 59132 - DNA, 15 bp, Homo sapiens
ttcatgtcctttgta

SEQ ID NO: 59133 - DNA, 15 bp, Homo sapiens
gttcatgtcctttgt

SEQ ID NO: 59134 - DNA, 15 bp, Homo sapiens
agttcatgtcctttg

SEQ ID NO: 59135 - DNA, 15 bp, Homo sapiens
gagttcatgtccttt

SEQ ID NO: 59136 - DNA, 15 bp, Homo sapiens
tgagttcatgtcctt

SEQ ID NO: 59137 - DNA, 15 bp, Homo sapiens
atgagttcatgtcct

SEQ ID NO: 59138 - DNA, 15 bp, Homo sapiens
gatgagttcatgtcc

SEQ ID NO: 59139 - DNA, 15 bp, Homo sapiens
tgatgagttcatgtc

SEQ ID NO: 59140 - DNA, 15 bp, Homo sapiens
atgatgagttcatgt

SEQ ID NO: 59141 - DNA, 15 bp, Homo sapiens
aatgatgagttcatg

SEQ ID NO: 59142 - DNA, 15 bp, Homo sapiens
aaatgatgagttcat

SEQ ID NO: 59143 - DNA, 15 bp, Homo sapiens
aaaatgatgagttca

SEQ ID NO: 59144 - DNA, 15 bp, Homo sapiens
aaaaatgatgagttc

SEQ ID NO: 59145 - DNA, 15 bp, Homo sapiens
aaaaaatgatgagtt

SEQ ID NO: 59146 - DNA, 15 bp, Homo sapiens
taaaaaatgatgagt

SEQ ID NO: 59147 - DNA, 15 bp, Homo sapiens
ataaaaaatgatgag

SEQ ID NO: 59148 - DNA, 15 bp, Homo sapiens
cataaaaaatgatga

SEQ ID NO: 59149 - DNA, 15 bp, Homo sapiens
ccataaaaaatgatg

SEQ ID NO: 59150 - DNA, 15 bp, Homo sapiens
gccataaaaaatgat

SEQ ID NO: 59151 - DNA, 15 bp, Homo sapiens
agccataaaaaatga

SEQ ID NO: 59152 - DNA, 15 bp, Homo sapiens
cagccataaaaaatg

SEQ ID NO: 59153 - DNA, 15 bp, Homo sapiens
gcagccataaaaaat

SEQ ID NO: 59154 - DNA, 15 bp, Homo sapiens
tgcagccataaaaaa

SEQ ID NO: 59155 - DNA, 15 bp, Homo sapiens
atgcagccataaaaa

SEQ ID NO: 59156 - DNA, 15 bp, Homo sapiens
tatgcagccataaaa

SEQ ID NO: 59157 - DNA, 15 bp, Homo sapiens
ctatgcagccataaa

SEQ ID NO: 59158 - DNA, 15 bp, Homo sapiens
actatgcagccataa

SEQ ID NO: 59159 - DNA, 15 bp, Homo sapiens
tactatgcagccata

SEQ ID NO: 59160 - DNA, 15 bp, Homo sapiens
atactatgcagccat

SEQ ID NO: 59161 - DNA, 15 bp, Homo sapiens
aatactatgcagcca

SEQ ID NO: 59162 - DNA, 15 bp, Homo sapiens
gaatactatgcagcc

SEQ ID NO: 59163 - DNA, 15 bp, Homo sapiens
ggaatactatgcagc

SEQ ID NO: 59164 - DNA, 15 bp, Homo sapiens
tggaatactatgcag

SEQ ID NO: 59165 - DNA, 15 bp, Homo sapiens
acaccatggaatact

SEQ ID NO: 59166 - DNA, 15 bp, Homo sapiens
tacaccatggaatac

SEQ ID NO: 59167 - DNA, 15 bp, Homo sapiens
atacaccatggaata

SEQ ID NO: 59168 - DNA, 15 bp, Homo sapiens
tatacaccatggaat

SEQ ID NO: 59169 - DNA, 15 bp, Homo sapiens
atatacaccatggaa

SEQ ID NO: 59170 - DNA, 15 bp, Homo sapiens
catatacaccatgga

SEQ ID NO: 59171 - DNA, 15 bp, Homo sapiens
acatatacaccatgg

SEQ ID NO: 59172 - DNA, 15 bp, Homo sapiens
cacatatacaccatg

SEQ ID NO: 59173 - DNA, 15 bp, Homo sapiens
gcacatatacaccat

SEQ ID NO: 59174 - DNA, 15 bp, Homo sapiens
ggcacatatacacca

SEQ ID NO: 59175 - DNA, 15 bp, Homo sapiens
tggcacatatacacc

SEQ ID NO: 59176 - DNA, 15 bp, Homo sapiens
gtggcacatatacac

SEQ ID NO: 59177 - DNA, 15 bp, Homo sapiens
tgtggcacatataca

SEQ ID NO: 59178 - DNA, 15 bp, Homo sapiens
atgtggcacatatac

SEQ ID NO: 59179 - DNA, 15 bp, Homo sapiens
aatgtggcacatata

SEQ ID NO: 59180 - DNA, 15 bp, Homo sapiens
aaatgtggcacatat

SEQ ID NO: 59181 - DNA, 15 bp, Homo sapiens
aaaatgtggcacata

SEQ ID NO: 59182 - DNA, 15 bp, Homo sapiens
gaaaatgtggcacat

SEQ ID NO: 59183 - DNA, 15 bp, Homo sapiens
agaaaatgtggcaca

SEQ ID NO: 59184 - DNA, 15 bp, Homo sapiens
aagaaaatgtggcac

SEQ ID NO: 59185 - DNA, 15 bp, Homo sapiens
taagaaaatgtggca

SEQ ID NO: 59186 - DNA, 15 bp, Homo sapiens
ttaagaaaatgtggc

SEQ ID NO: 59187 - DNA, 15 bp, Homo sapiens
attaagaaaatgtgg

SEQ ID NO: 59188 - DNA, 15 bp, Homo sapiens
gattaagaaaatgtg

SEQ ID NO: 59189 - DNA, 15 bp, Homo sapiens
ggattaagaaaatgt

SEQ ID NO: 59190 - DNA, 15 bp, Homo sapiens
tggattaagaaaatg

SEQ ID NO: 59191 - DNA, 15 bp, Homo sapiens
ctggattaagaaaat

SEQ ID NO: 59192 - DNA, 15 bp, Homo sapiens
actggattaagaaaa

SEQ ID NO: 59193 - DNA, 15 bp, Homo sapiens
gactggattaagaaa

SEQ ID NO: 59194 - DNA, 15 bp, Homo sapiens
agactggattaagaa

SEQ ID NO: 59195 - DNA, 15 bp, Homo sapiens
tagactggattaaga

SEQ ID NO: 59196 - DNA, 15 bp, Homo sapiens
atagactggattaag

SEQ ID NO: 59197 - DNA, 15 bp, Homo sapiens
gatagactggattaa

SEQ ID NO: 59198 - DNA, 15 bp, Homo sapiens
tgatagactggatta

SEQ ID NO: 59199 - DNA, 15 bp, Homo sapiens
atgatagactggatt

SEQ ID NO: 59200 - DNA, 15 bp, Homo sapiens
aatgatagactggat

SEQ ID NO: 59201 - DNA, 15 bp, Homo sapiens
caatgatagactgga

SEQ ID NO: 59202 - DNA, 15 bp, Homo sapiens
acaatgatagactgg

SEQ ID NO: 59203 - DNA, 15 bp, Homo sapiens
aacaatgatagactg

SEQ ID NO: 59204 - DNA, 15 bp, Homo sapiens
caacaatgatagact

SEQ ID NO: 59205 - DNA, 15 bp, Homo sapiens
ccaacaatgatagac

SEQ ID NO: 59206 - DNA, 15 bp, Homo sapiens
tccaacaatgataga

SEQ ID NO: 59207 - DNA, 15 bp, Homo sapiens
gtccaacaatgatag

SEQ ID NO: 59208 - DNA, 15 bp, Homo sapiens
tgtccaacaatgata

SEQ ID NO: 59209 - DNA, 15 bp, Homo sapiens
atgtccaacaatgat

SEQ ID NO: 59210 - DNA, 15 bp, Homo sapiens
aatgtccaacaatga

SEQ ID NO: 59211 - DNA, 15 bp, Homo sapiens
aaatgtccaacaatg

SEQ ID NO: 59212 - DNA, 15 bp, Homo sapiens
caaatgtccaacaat

SEQ ID NO: 59213 - DNA, 15 bp, Homo sapiens
ccaaatgtccaacaa

SEQ ID NO: 59214 - DNA, 15 bp, Homo sapiens
cccaaatgtccaaca

SEQ ID NO: 59215 - DNA, 15 bp, Homo sapiens
acccaaatgtccaac

SEQ ID NO: 59216 - DNA, 15 bp, Homo sapiens
aacccaaatgtccaa

SEQ ID NO: 59217 - DNA, 15 bp, Homo sapiens
caacccaaatgtcca

SEQ ID NO: 59218 - DNA, 15 bp, Homo sapiens
ccaacccaaatgtcc

SEQ ID NO: 59219 - DNA, 15 bp, Homo sapiens
accaacccaaatgtc

SEQ ID NO: 59220 - DNA, 15 bp, Homo sapiens
aaccaacccaaatgt

SEQ ID NO: 59221 - DNA, 15 bp, Homo sapiens
ttggaaccaacccaa

SEQ ID NO: 59222 - DNA, 15 bp, Homo sapiens
cttggaaccaaccca

SEQ ID NO: 59223 - DNA, 15 bp, Homo sapiens
acttggaaccaaccc

SEQ ID NO: 59224 - DNA, 15 bp, Homo sapiens
gacttggaaccaacc

SEQ ID NO: 59225 - DNA, 15 bp, Homo sapiens
agacttggaaccaac

SEQ ID NO: 59226 - DNA, 15 bp, Homo sapiens
aagacttggaaccaa

SEQ ID NO: 59227 - DNA, 15 bp, Homo sapiens
aaagacttggaacca

SEQ ID NO: 59228 - DNA, 15 bp, Homo sapiens
caaagacttggaacc

SEQ ID NO: 59229 - DNA, 15 bp, Homo sapiens
gcaaagacttggaac

SEQ ID NO: 59230 - DNA, 15 bp, Homo sapiens
agcaaagacttggaa

SEQ ID NO: 59231 - DNA, 15 bp, Homo sapiens
tagcaaagacttgga

SEQ ID NO: 59232 - DNA, 15 bp, Homo sapiens
atagcaaagacttgg

SEQ ID NO: 59233 - DNA, 15 bp, Homo sapiens
aatagcaaagacttg

SEQ ID NO: 59234 - DNA, 15 bp, Homo sapiens
caatagcaaagactt

SEQ ID NO: 59235 - DNA, 15 bp, Homo sapiens
acaatagcaaagact

SEQ ID NO: 59236 - DNA, 15 bp, Homo sapiens
cacaatagcaaagac

SEQ ID NO: 59237 - DNA, 15 bp, Homo sapiens
tcacaatagcaaaga

SEQ ID NO: 59238 - DNA, 15 bp, Homo sapiens
ttcacaatagcaaag

SEQ ID NO: 59239 - DNA, 15 bp, Homo sapiens
attcacaatagcaaa

SEQ ID NO: 59240 - DNA, 15 bp, Homo sapiens
tattcacaatagcaa

SEQ ID NO: 59241 - DNA, 15 bp, Homo sapiens
ctattcacaatagca

SEQ ID NO: 59242 - DNA, 15 bp, Homo sapiens
actattcacaatagc

SEQ ID NO: 59243 - DNA, 15 bp, Homo sapiens
cactattcacaatag

SEQ ID NO: 59244 - DNA, 15 bp, Homo sapiens
gcactattcacaata

SEQ ID NO: 59245 - DNA, 15 bp, Homo sapiens
agcactattcacaat

SEQ ID NO: 59246 - DNA, 15 bp, Homo sapiens
cagcactattcacaa

SEQ ID NO: 59247 - DNA, 15 bp, Homo sapiens
gcagcactattcaca

SEQ ID NO: 59248 - DNA, 15 bp, Homo sapiens
tgcagcactattcac

SEQ ID NO: 59249 - DNA, 15 bp, Homo sapiens
ttgcagcactattca

SEQ ID NO: 59250 - DNA, 15 bp, Homo sapiens
attgcagcactattc

SEQ ID NO: 59251 - DNA, 15 bp, Homo sapiens
agtatgtttattgca

SEQ ID NO: 59252 - DNA, 15 bp, Homo sapiens
aagtatgtttattgc

SEQ ID NO: 59253 - DNA, 15 bp, Homo sapiens
caagtatgtttattg

SEQ ID NO: 59254 - DNA, 15 bp, Homo sapiens
acaagtatgtttatt

SEQ ID NO: 59255 - DNA, 15 bp, Homo sapiens
cacaagtatgtttat

SEQ ID NO: 59256 - DNA, 15 bp, Homo sapiens
gcacaagtatgttta

SEQ ID NO: 59257 - DNA, 15 bp, Homo sapiens
tgcacaagtatgttt

SEQ ID NO: 59258 - DNA, 15 bp, Homo sapiens
atgcacaagtatgtt

SEQ ID NO: 59259 - DNA, 15 bp, Homo sapiens
catgcacaagtatgt

SEQ ID NO: 59260 - DNA, 15 bp, Homo sapiens
acatgcacaagtatg

SEQ ID NO: 59261 - DNA, 15 bp, Homo sapiens
cacatgcacaagtat

SEQ ID NO: 59262 - DNA, 15 bp, Homo sapiens
acacatgcacaagta

SEQ ID NO: 59263 - DNA, 15 bp, Homo sapiens
gacacatgcacaagt

SEQ ID NO: 59264 - DNA, 15 bp, Homo sapiens
agacacatgcacaag

SEQ ID NO: 59265 - DNA, 15 bp, Homo sapiens
cagacacatgcacaa

SEQ ID NO: 59266 - DNA, 15 bp, Homo sapiens
acagacacatgcaca

SEQ ID NO: 59267 - DNA, 15 bp, Homo sapiens
tacagacacatgcac

SEQ ID NO: 59268 - DNA, 15 bp, Homo sapiens
atacagacacatgca

SEQ ID NO: 59269 - DNA, 15 bp, Homo sapiens
tatacagacacatgc

SEQ ID NO: 59270 - DNA, 15 bp, Homo sapiens
ctatacagacacatg

SEQ ID NO: 59271 - DNA, 15 bp, Homo sapiens
gctatacagacacat

SEQ ID NO: 59272 - DNA, 15 bp, Homo sapiens
tgctatacagacaca

SEQ ID NO: 59273 - DNA, 15 bp, Homo sapiens
ctgctatacagacac

SEQ ID NO: 59274 - DNA, 15 bp, Homo sapiens
gctgctatacagaca

SEQ ID NO: 59275 - DNA, 15 bp, Homo sapiens
tgctgctatacagac

SEQ ID NO: 59276 - DNA, 15 bp, Homo sapiens
atgctgctatacaga

SEQ ID NO: 59277 - DNA, 15 bp, Homo sapiens
catgctgctatacag

SEQ ID NO: 59278 - DNA, 15 bp, Homo sapiens
tcatgctgctataca

SEQ ID NO: 59279 - DNA, 15 bp, Homo sapiens
atcatgctgctatac

SEQ ID NO: 59280 - DNA, 15 bp, Homo sapiens
aatcatgctgctata

SEQ ID NO: 59281 - DNA, 15 bp, Homo sapiens
aaatcatgctgctat

SEQ ID NO: 59282 - DNA, 15 bp, Homo sapiens
taaatcatgctgcta

SEQ ID NO: 59283 - DNA, 15 bp, Homo sapiens
ataaatcatgctgct

SEQ ID NO: 59284 - DNA, 15 bp, Homo sapiens
tataaatcatgctgc

SEQ ID NO: 59285 - DNA, 15 bp, Homo sapiens
atataaatcatgctg

SEQ ID NO: 59286 - DNA, 15 bp, Homo sapiens
aatataaatcatgct

SEQ ID NO: 59287 - DNA, 15 bp, Homo sapiens
gaatataaatcatgc

SEQ ID NO: 59288 - DNA, 15 bp, Homo sapiens
ggaatataaatcatg

SEQ ID NO: 59289 - DNA, 15 bp, Homo sapiens
tacccaaaggaatat

SEQ ID NO: 59290 - DNA, 15 bp, Homo sapiens
atacccaaaggaata

SEQ ID NO: 59291 - DNA, 15 bp, Homo sapiens
tatacccaaaggaat

SEQ ID NO: 59292 - DNA, 15 bp, Homo sapiens
atatacccaaaggaa

SEQ ID NO: 59293 - DNA, 15 bp, Homo sapiens
tatatacccaaagga

SEQ ID NO: 59294 - DNA, 15 bp, Homo sapiens
gtatatacccaaagg

SEQ ID NO: 59295 - DNA, 15 bp, Homo sapiens
ggtatatacccaaag

SEQ ID NO: 59296 - DNA, 15 bp, Homo sapiens
aggtatatacccaaa

SEQ ID NO: 59297 - DNA, 15 bp, Homo sapiens
taggtatatacccaa

SEQ ID NO: 59298 - DNA, 15 bp, Homo sapiens
ctaggtatataccca

SEQ ID NO: 59299 - DNA, 15 bp, Homo sapiens
actaggtatataccc

SEQ ID NO: 59300 - DNA, 15 bp, Homo sapiens
tactaggtatatacc

SEQ ID NO: 59301 - DNA, 15 bp, Homo sapiens
ttactaggtatatac

SEQ ID NO: 59302 - DNA, 15 bp, Homo sapiens
attactaggtatata

SEQ ID NO: 59303 - DNA, 15 bp, Homo sapiens
cattactaggtatat

SEQ ID NO: 59304 - DNA, 15 bp, Homo sapiens
catcccattactagg

SEQ ID NO: 59305 - DNA, 15 bp, Homo sapiens
ccatcccattactag

SEQ ID NO: 59306 - DNA, 15 bp, Homo sapiens
gccatcccattacta

SEQ ID NO: 59307 - DNA, 15 bp, Homo sapiens
agccatcccattact

SEQ ID NO: 59308 - DNA, 15 bp, Homo sapiens
cagccatcccattac

SEQ ID NO: 59309 - DNA, 15 bp, Homo sapiens
ccagccatcccatta

SEQ ID NO: 59310 - DNA, 15 bp, Homo sapiens
cccagccatcccatt

SEQ ID NO: 59311 - DNA, 15 bp, Homo sapiens
acccagccatcccat

SEQ ID NO: 59312 - DNA, 15 bp, Homo sapiens
gacccagccatccca

SEQ ID NO: 59313 - DNA, 15 bp, Homo sapiens
tgacccagccatccc

SEQ ID NO: 59314 - DNA, 15 bp, Homo sapiens
ttgacccagccatcc

SEQ ID NO: 59315 - DNA, 15 bp, Homo sapiens
tttgacccagccatc

SEQ ID NO: 59316 - DNA, 15 bp, Homo sapiens
atttgacccagccat

SEQ ID NO: 59317 - DNA, 15 bp, Homo sapiens
catttgacccagcca

SEQ ID NO: 59318 - DNA, 15 bp, Homo sapiens
tcatttgacccagcc

SEQ ID NO: 59319 - DNA, 15 bp, Homo sapiens
atcatttgacccagc

SEQ ID NO: 59320 - DNA, 15 bp, Homo sapiens
tatcatttgacccag

SEQ ID NO: 59321 - DNA, 15 bp, Homo sapiens
atatcatttgaccca

SEQ ID NO: 59322 - DNA, 15 bp, Homo sapiens
aatatcatttgaccc

SEQ ID NO: 59323 - DNA, 15 bp, Homo sapiens
aaatatcatttgacc

SEQ ID NO: 59324 - DNA, 15 bp, Homo sapiens
gaaatatcatttgac

SEQ ID NO: 59325 - DNA, 15 bp, Homo sapiens
agaaatatcatttga

SEQ ID NO: 59326 - DNA, 15 bp, Homo sapiens
tagaaatatcatttg

SEQ ID NO: 59327 - DNA, 15 bp, Homo sapiens
ctagaaatatcattt

SEQ ID NO: 59328 - DNA, 15 bp, Homo sapiens
actagaaatatcatt

SEQ ID NO: 59329 - DNA, 15 bp, Homo sapiens
aactagaaatatcat

SEQ ID NO: 59330 - DNA, 15 bp, Homo sapiens
gaactagaaatatca

SEQ ID NO: 59331 - DNA, 15 bp, Homo sapiens
agaactagaaatatc

SEQ ID NO: 59332 - DNA, 15 bp, Homo sapiens
tagaactagaaatat

SEQ ID NO: 59333 - DNA, 15 bp, Homo sapiens
ctagaactagaaata

SEQ ID NO: 59334 - DNA, 15 bp, Homo sapiens
tctagaactagaaat

SEQ ID NO: 59335 - DNA, 15 bp, Homo sapiens
atctagaactagaaa

SEQ ID NO: 59336 - DNA, 15 bp, Homo sapiens
gatctagaactagaa

SEQ ID NO: 59337 - DNA, 15 bp, Homo sapiens
ggatctagaactaga

SEQ ID NO: 59338 - DNA, 15 bp, Homo sapiens
aggatctagaactag

SEQ ID NO: 59339 - DNA, 15 bp, Homo sapiens
aaggatctagaacta

SEQ ID NO: 59340 - DNA, 15 bp, Homo sapiens
caaggatctagaact

SEQ ID NO: 59341 - DNA, 15 bp, Homo sapiens
tcaaggatctagaac

SEQ ID NO: 59342 - DNA, 15 bp, Homo sapiens
ctcaaggatctagaa

SEQ ID NO: 59343 - DNA, 15 bp, Homo sapiens
cctcaaggatctaga

SEQ ID NO: 59344 - DNA, 15 bp, Homo sapiens
tcctcaaggatctag

SEQ ID NO: 59345 - DNA, 15 bp, Homo sapiens
ttcctcaaggatcta

SEQ ID NO: 59346 - DNA, 15 bp, Homo sapiens
attcctcaaggatct

SEQ ID NO: 59347 - DNA, 15 bp, Homo sapiens
gattcctcaaggatc

SEQ ID NO: 59348 - DNA, 15 bp, Homo sapiens
tgattcctcaaggat

SEQ ID NO: 59349 - DNA, 15 bp, Homo sapiens
gtgattcctcaagga

SEQ ID NO: 59350 - DNA, 15 bp, Homo sapiens
ggtgattcctcaagg

SEQ ID NO: 59351 - DNA, 15 bp, Homo sapiens
tggtgattcctcaag

SEQ ID NO: 59352 - DNA, 15 bp, Homo sapiens
ccattgtggaagaca

SEQ ID NO: 59353 - DNA, 15 bp, Homo sapiens
accattgtggaagac

SEQ ID NO: 59354 - DNA, 15 bp, Homo sapiens
aaccattgtggaaga

SEQ ID NO: 59355 - DNA, 15 bp, Homo sapiens
caaccattgtggaag

SEQ ID NO: 59356 - DNA, 15 bp, Homo sapiens
tcaaccattgtggaa

SEQ ID NO: 59357 - DNA, 15 bp, Homo sapiens
ttcaaccattgtgga

SEQ ID NO: 59358 - DNA, 15 bp, Homo sapiens
gttcaaccattgtgg

SEQ ID NO: 59359 - DNA, 15 bp, Homo sapiens
agttcaaccattgtg

SEQ ID NO: 59360 - DNA, 15 bp, Homo sapiens
tagttcaaccattgt

SEQ ID NO: 59361 - DNA, 15 bp, Homo sapiens
ctagttcaaccattg

SEQ ID NO: 59362 - DNA, 15 bp, Homo sapiens
actagttcaaccatt

SEQ ID NO: 59363 - DNA, 15 bp, Homo sapiens
aactagttcaaccat

SEQ ID NO: 59364 - DNA, 15 bp, Homo sapiens
aaactagttcaacca

SEQ ID NO: 59365 - DNA, 15 bp, Homo sapiens
taaactagttcaacc

SEQ ID NO: 59366 - DNA, 15 bp, Homo sapiens
gtaaactagttcaac

SEQ ID NO: 59367 - DNA, 15 bp, Homo sapiens
tgtaaactagttcaa

SEQ ID NO: 59368 - DNA, 15 bp, Homo sapiens
ctgtaaactagttca

SEQ ID NO: 59369 - DNA, 15 bp, Homo sapiens
actgtaaactagttc

SEQ ID NO: 59370 - DNA, 15 bp, Homo sapiens
gactgtaaactagtt

SEQ ID NO: 59371 - DNA, 15 bp, Homo sapiens
ggactgtaaactagt

SEQ ID NO: 59372 - DNA, 15 bp, Homo sapiens
gggactgtaaactag

SEQ ID NO: 59373 - DNA, 15 bp, Homo sapiens
tgggactgtaaacta

SEQ ID NO: 59374 - DNA, 15 bp, Homo sapiens
gtgggactgtaaact

SEQ ID NO: 59375 - DNA, 15 bp, Homo sapiens
ggtgggactgtaaac

SEQ ID NO: 59376 - DNA, 15 bp, Homo sapiens
tggtgggactgtaaa

SEQ ID NO: 59377 - DNA, 15 bp, Homo sapiens
ttggtgggactgtaa

SEQ ID NO: 59378 - DNA, 15 bp, Homo sapiens
attggtgggactgta

SEQ ID NO: 59379 - DNA, 15 bp, Homo sapiens
tattggtgggactgt

SEQ ID NO: 59380 - DNA, 15 bp, Homo sapiens
ctattggtgggactg

SEQ ID NO: 59381 - DNA, 15 bp, Homo sapiens
actattggtgggact

SEQ ID NO: 59382 - DNA, 15 bp, Homo sapiens
cactattggtgggac

SEQ ID NO: 59383 - DNA, 15 bp, Homo sapiens
acactattggtggga

SEQ ID NO: 59384 - DNA, 15 bp, Homo sapiens
tacactattggtggg

SEQ ID NO: 59385 - DNA, 15 bp, Homo sapiens
ttacactattggtgg

SEQ ID NO: 59386 - DNA, 15 bp, Homo sapiens
tttacactattggtg

SEQ ID NO: 59387 - DNA, 15 bp, Homo sapiens
ttttacactattggt

SEQ ID NO: 59388 - DNA, 15 bp, Homo sapiens
cttttacactattgg

SEQ ID NO: 59389 - DNA, 15 bp, Homo sapiens
acttttacactattg

SEQ ID NO: 59390 - DNA, 15 bp, Homo sapiens
cacttttacactatt

SEQ ID NO: 59391 - DNA, 15 bp, Homo sapiens
acacttttacactat

SEQ ID NO: 59392 - DNA, 15 bp, Homo sapiens
aacacttttacacta

SEQ ID NO: 59393 - DNA, 15 bp, Homo sapiens
gaacacttttacact

SEQ ID NO: 59394 - DNA, 15 bp, Homo sapiens
atgtggagaaatagg

SEQ ID NO: 59395 - DNA, 15 bp, Homo sapiens
gatgtggagaaatag

SEQ ID NO: 59396 - DNA, 15 bp, Homo sapiens
ggatgtggagaaata

SEQ ID NO: 59397 - DNA, 15 bp, Homo sapiens
aggatgtggagaaat

SEQ ID NO: 59398 - DNA, 15 bp, Homo sapiens
gaggatgtggagaaa

SEQ ID NO: 59399 - DNA, 15 bp, Homo sapiens
agaggatgtggagaa

SEQ ID NO: 59400 - DNA, 15 bp, Homo sapiens
gagaggatgtggaga

SEQ ID NO: 59401 - DNA, 15 bp, Homo sapiens
ggagaggatgtggag

SEQ ID NO: 59402 - DNA, 15 bp, Homo sapiens
tggagaggatgtgga

SEQ ID NO: 59403 - DNA, 15 bp, Homo sapiens
ctggagaggatgtgg

SEQ ID NO: 59404 - DNA, 15 bp, Homo sapiens
gctggagaggatgtg

SEQ ID NO: 59405 - DNA, 15 bp, Homo sapiens
tgctggagaggatgt

SEQ ID NO: 59406 - DNA, 15 bp, Homo sapiens
gtgctggagaggatg

SEQ ID NO: 59407 - DNA, 15 bp, Homo sapiens
ggtgctggagaggat

SEQ ID NO: 59408 - DNA, 15 bp, Homo sapiens
aggtgctggagagga

SEQ ID NO: 59409 - DNA, 15 bp, Homo sapiens
caggtgctggagagg

SEQ ID NO: 59410 - DNA, 15 bp, Homo sapiens
acaggtgctggagag

SEQ ID NO: 59411 - DNA, 15 bp, Homo sapiens
aacaggtgctggaga

SEQ ID NO: 59412 - DNA, 15 bp, Homo sapiens
caacaggtgctggag

SEQ ID NO: 59413 - DNA, 15 bp, Homo sapiens
acaacaggtgctgga

SEQ ID NO: 59414 - DNA, 15 bp, Homo sapiens
aacaacaggtgctgg

SEQ ID NO: 59415 - DNA, 15 bp, Homo sapiens
aaacaacaggtgctg

SEQ ID NO: 59416 - DNA, 15 bp, Homo sapiens
gaaacaacaggtgct

SEQ ID NO: 59417 - DNA, 15 bp, Homo sapiens
ggaaacaacaggtgc

SEQ ID NO: 59418 - DNA, 15 bp, Homo sapiens
aggaaacaacaggtg

SEQ ID NO: 59419 - DNA, 15 bp, Homo sapiens
caggaaacaacaggt

SEQ ID NO: 59420 - DNA, 15 bp, Homo sapiens
tcaggaaacaacagg

SEQ ID NO: 59421 - DNA, 15 bp, Homo sapiens
gtcaggaaacaacag

SEQ ID NO: 59422 - DNA, 15 bp, Homo sapiens
agtcaggaaacaaca

SEQ ID NO: 59423 - DNA, 15 bp, Homo sapiens
aagtcaggaaacaac

SEQ ID NO: 59424 - DNA, 15 bp, Homo sapiens
aaagtcaggaaacaa

SEQ ID NO: 59425 - DNA, 15 bp, Homo sapiens
aaaagtcaggaaaca

SEQ ID NO: 59426 - DNA, 15 bp, Homo sapiens
aaaaagtcaggaaac

SEQ ID NO: 59427 - DNA, 15 bp, Homo sapiens
taaaaagtcaggaaa

SEQ ID NO: 59428 - DNA, 15 bp, Homo sapiens
ttaaaaagtcaggaa

SEQ ID NO: 59429 - DNA, 15 bp, Homo sapiens
attaaaaagtcagga

SEQ ID NO: 59430 - DNA, 15 bp, Homo sapiens
cattaaaaagtcagg

SEQ ID NO: 59431 - DNA, 15 bp, Homo sapiens
tcattaaaaagtcag

SEQ ID NO: 59432 - DNA, 15 bp, Homo sapiens
aatcattaaaaagtc

SEQ ID NO: 59433 - DNA, 15 bp, Homo sapiens
caatcattaaaaagt

SEQ ID NO: 59434 - DNA, 15 bp, Homo sapiens
gcaatcattaaaaag

SEQ ID NO: 59435 - DNA, 15 bp, Homo sapiens
ggcaatcattaaaaa

SEQ ID NO: 59436 - DNA, 15 bp, Homo sapiens
tggcaatcattaaaa

SEQ ID NO: 59437 - DNA, 15 bp, Homo sapiens
atggcaatcattaaa

SEQ ID NO: 59438 - DNA, 15 bp, Homo sapiens
aatggcaatcattaa

SEQ ID NO: 59439 - DNA, 15 bp, Homo sapiens
gaatggcaatcatta

SEQ ID NO: 59440 - DNA, 15 bp, Homo sapiens
agaatggcaatcatt

SEQ ID NO: 59441 - DNA, 15 bp, Homo sapiens
tagaatggcaatcat

SEQ ID NO: 59442 - DNA, 15 bp, Homo sapiens
ttagaatggcaatca

SEQ ID NO: 59443 - DNA, 15 bp, Homo sapiens
gttagaatggcaatc

SEQ ID NO: 59444 - DNA, 15 bp, Homo sapiens
agttagaatggcaat

SEQ ID NO: 59445 - DNA, 15 bp, Homo sapiens
cagttagaatggcaa

SEQ ID NO: 59446 - DNA, 15 bp, Homo sapiens
ccagttagaatggca

SEQ ID NO: 59447 - DNA, 15 bp, Homo sapiens
accagttagaatggc

SEQ ID NO: 59448 - DNA, 15 bp, Homo sapiens
caccagttagaatgg

SEQ ID NO: 59449 - DNA, 15 bp, Homo sapiens
acaccagttagaatg

SEQ ID NO: 59450 - DNA, 15 bp, Homo sapiens
cacaccagttagaat

SEQ ID NO: 59451 - DNA, 15 bp, Homo sapiens
tcacaccagttagaa

SEQ ID NO: 59452 - DNA, 15 bp, Homo sapiens
ctcacaccagttaga

SEQ ID NO: 59453 - DNA, 15 bp, Homo sapiens
tctcacaccagttag

SEQ ID NO: 59454 - DNA, 15 bp, Homo sapiens
atctcacaccagtta

SEQ ID NO: 59455 - DNA, 15 bp, Homo sapiens
catctcacaccagtt

SEQ ID NO: 59456 - DNA, 15 bp, Homo sapiens
ccatctcacaccagt

SEQ ID NO: 59457 - DNA, 15 bp, Homo sapiens
accatctcacaccag

SEQ ID NO: 59458 - DNA, 15 bp, Homo sapiens
taccatctcacacca

SEQ ID NO: 59459 - DNA, 15 bp, Homo sapiens
ataccatctcacacc

SEQ ID NO: 59460 - DNA, 15 bp, Homo sapiens
gataccatctcacac

SEQ ID NO: 59461 - DNA, 15 bp, Homo sapiens
agataccatctcaca

SEQ ID NO: 59462 - DNA, 15 bp, Homo sapiens
gagataccatctcac

SEQ ID NO: 59463 - DNA, 15 bp, Homo sapiens
tgagataccatctca

SEQ ID NO: 59464 - DNA, 15 bp, Homo sapiens
atgagataccatctc

SEQ ID NO: 59465 - DNA, 15 bp, Homo sapiens
aatgagataccatct

SEQ ID NO: 59466 - DNA, 15 bp, Homo sapiens
caatgagataccatc

SEQ ID NO: 59467 - DNA, 15 bp, Homo sapiens
acaatgagataccat

SEQ ID NO: 59468 - DNA, 15 bp, Homo sapiens
cacaatgagatacca

SEQ ID NO: 59469 - DNA, 15 bp, Homo sapiens
ccacaatgagatacc

SEQ ID NO: 59470 - DNA, 15 bp, Homo sapiens
accacaatgagatac

SEQ ID NO: 59471 - DNA, 15 bp, Homo sapiens
aaccacaatgagata

SEQ ID NO: 59472 - DNA, 15 bp, Homo sapiens
aaaccacaatgagat

SEQ ID NO: 59473 - DNA, 15 bp, Homo sapiens
cagagaaatgcaaat

SEQ ID NO: 59474 - DNA, 15 bp, Homo sapiens
tcagagaaatgcaaa

SEQ ID NO: 59475 - DNA, 15 bp, Homo sapiens
atcagagaaatgcaa

SEQ ID NO: 59476 - DNA, 15 bp, Homo sapiens
catcagagaaatgca

SEQ ID NO: 59477 - DNA, 15 bp, Homo sapiens
ccatcagagaaatgc

SEQ ID NO: 59478 - DNA, 15 bp, Homo sapiens
gccatcagagaaatg

SEQ ID NO: 59479 - DNA, 15 bp, Homo sapiens
ggccatcagagaaat

SEQ ID NO: 59480 - DNA, 15 bp, Homo sapiens
tggccatcagagaaa

SEQ ID NO: 59481 - DNA, 15 bp, Homo sapiens
ctggccatcagagaa

SEQ ID NO: 59482 - DNA, 15 bp, Homo sapiens
actggccatcagaga

SEQ ID NO: 59483 - DNA, 15 bp, Homo sapiens
cactggccatcagag

SEQ ID NO: 59484 - DNA, 15 bp, Homo sapiens
tcactggccatcaga

SEQ ID NO: 59485 - DNA, 15 bp, Homo sapiens
atcactggccatcag

SEQ ID NO: 59486 - DNA, 15 bp, Homo sapiens
gatcactggccatca

SEQ ID NO: 59487 - DNA, 15 bp, Homo sapiens
tgatcactggccatc

SEQ ID NO: 59488 - DNA, 15 bp, Homo sapiens
atgatcactggccat

SEQ ID NO: 59489 - DNA, 15 bp, Homo sapiens
catgatcactggcca

SEQ ID NO: 59490 - DNA, 15 bp, Homo sapiens
tcatgatcactggcc

SEQ ID NO: 59491 - DNA, 15 bp, Homo sapiens
ctcatgatcactggc

SEQ ID NO: 59492 - DNA, 15 bp, Homo sapiens
gctcatgatcactgg

SEQ ID NO: 59493 - DNA, 15 bp, Homo sapiens
tgctcatgatcactg

SEQ ID NO: 59494 - DNA, 15 bp, Homo sapiens
atgctcatgatcact

SEQ ID NO: 59495 - DNA, 15 bp, Homo sapiens
aatgctcatgatcac

SEQ ID NO: 59496 - DNA, 15 bp, Homo sapiens
aaatgctcatgatca

SEQ ID NO: 59497 - DNA, 15 bp, Homo sapiens
aaaatgctcatgatc

SEQ ID NO: 59498 - DNA, 15 bp, Homo sapiens
aaaaatgctcatgat

SEQ ID NO: 59499 - DNA, 15 bp, Homo sapiens
aaaaaatgctcatga

SEQ ID NO: 59500 - DNA, 15 bp, Homo sapiens
gaaaaaatgctcatg

SEQ ID NO: 59501 - DNA, 15 bp, Homo sapiens
tgaaaaaatgctcat

SEQ ID NO: 59502 - DNA, 15 bp, Homo sapiens
atgaaaaaatgctca

SEQ ID NO: 59503 - DNA, 15 bp, Homo sapiens
catgaaaaaatgctc

SEQ ID NO: 59504 - DNA, 15 bp, Homo sapiens
acatgaaaaaatgct

SEQ ID NO: 59505 - DNA, 15 bp, Homo sapiens
cacatgaaaaaatgc

SEQ ID NO: 59506 - DNA, 15 bp, Homo sapiens
acacatgaaaaaatg

SEQ ID NO: 59507 - DNA, 15 bp, Homo sapiens
gacacatgaaaaaat

SEQ ID NO: 59508 - DNA, 15 bp, Homo sapiens
agacacatgaaaaaa

SEQ ID NO: 59509 - DNA, 15 bp, Homo sapiens
tagacacatgaaaaa

SEQ ID NO: 59510 - DNA, 15 bp, Homo sapiens
atagacacatgaaaa

SEQ ID NO: 59511 - DNA, 15 bp, Homo sapiens
aatagacacatgaaa

SEQ ID NO: 59512 - DNA, 15 bp, Homo sapiens
caatagacacatgaa

SEQ ID NO: 59513 - DNA, 15 bp, Homo sapiens
ccaatagacacatga

SEQ ID NO: 59514 - DNA, 15 bp, Homo sapiens
gccaatagacacatg

SEQ ID NO: 59515 - DNA, 15 bp, Homo sapiens
agccaatagacacat

SEQ ID NO: 59516 - DNA, 15 bp, Homo sapiens
cagccaatagacaca

SEQ ID NO: 59517 - DNA, 15 bp, Homo sapiens
gcagccaatagacac

SEQ ID NO: 59518 - DNA, 15 bp, Homo sapiens
tgcagccaatagaca

SEQ ID NO: 59519 - DNA, 15 bp, Homo sapiens
atgcagccaatagac

SEQ ID NO: 59520 - DNA, 15 bp, Homo sapiens
tatgcagccaataga

SEQ ID NO: 59521 - DNA, 15 bp, Homo sapiens
ttatgcagccaatag

SEQ ID NO: 59522 - DNA, 15 bp, Homo sapiens
tttatgcagccaata

SEQ ID NO: 59523 - DNA, 15 bp, Homo sapiens
atttatgcagccaat

SEQ ID NO: 59524 - DNA, 15 bp, Homo sapiens
aaaagaagacattta

SEQ ID NO: 59525 - DNA, 15 bp, Homo sapiens
caaaagaagacattt

SEQ ID NO: 59526 - DNA, 15 bp, Homo sapiens
tcaaaagaagacatt

SEQ ID NO: 59527 - DNA, 15 bp, Homo sapiens
ctcaaaagaagacat

SEQ ID NO: 59528 - DNA, 15 bp, Homo sapiens
cctcaaaagaagaca

SEQ ID NO: 59529 - DNA, 15 bp, Homo sapiens
tcctcaaaagaagac

SEQ ID NO: 59530 - DNA, 15 bp, Homo sapiens
ctcctcaaaagaaga

SEQ ID NO: 59531 - DNA, 15 bp, Homo sapiens
actcctcaaaagaag

SEQ ID NO: 59532 - DNA, 15 bp, Homo sapiens
cactcctcaaaagaa

SEQ ID NO: 59533 - DNA, 15 bp, Homo sapiens
acactcctcaaaaga

SEQ ID NO: 59534 - DNA, 15 bp, Homo sapiens
gacactcctcaaaag

SEQ ID NO: 59535 - DNA, 15 bp, Homo sapiens
agacactcctcaaaa

SEQ ID NO: 59536 - DNA, 15 bp, Homo sapiens
cagacactcctcaaa

SEQ ID NO: 59537 - DNA, 15 bp, Homo sapiens
acagacactcctcaa

SEQ ID NO: 59538 - DNA, 15 bp, Homo sapiens
aacagacactcctca

SEQ ID NO: 59539 - DNA, 15 bp, Homo sapiens
gaacagacactcctc

SEQ ID NO: 59540 - DNA, 15 bp, Homo sapiens
tgaacagacactcct

SEQ ID NO: 59541 - DNA, 15 bp, Homo sapiens
atgaacagacactcc

SEQ ID NO: 59542 - DNA, 15 bp, Homo sapiens
tatgaacagacactc

SEQ ID NO: 59543 - DNA, 15 bp, Homo sapiens
atatgaacagacact

SEQ ID NO: 59544 - DNA, 15 bp, Homo sapiens
gatatgaacagacac

SEQ ID NO: 59545 - DNA, 15 bp, Homo sapiens
ggatatgaacagaca

SEQ ID NO: 59546 - DNA, 15 bp, Homo sapiens
aggatatgaacagac

SEQ ID NO: 59547 - DNA, 15 bp, Homo sapiens
aaggatatgaacaga

SEQ ID NO: 59548 - DNA, 15 bp, Homo sapiens
gaaggatatgaacag

SEQ ID NO: 59549 - DNA, 15 bp, Homo sapiens
tgaaggatatgaaca

SEQ ID NO: 59550 - DNA, 15 bp, Homo sapiens
gtgaaggatatgaac

SEQ ID NO: 59551 - DNA, 15 bp, Homo sapiens
ggtgaaggatatgaa

SEQ ID NO: 59552 - DNA, 15 bp, Homo sapiens
gggtgaaggatatga

SEQ ID NO: 59553 - DNA, 15 bp, Homo sapiens
tgggtgaaggatatg

SEQ ID NO: 59554 - DNA, 15 bp, Homo sapiens
gtgggtgaaggatat

SEQ ID NO: 59555 - DNA, 15 bp, Homo sapiens
agtgggtgaaggata

SEQ ID NO: 59556 - DNA, 15 bp, Homo sapiens
aagtgggtgaaggat

SEQ ID NO: 59557 - DNA, 15 bp, Homo sapiens
caagtgggtgaagga

SEQ ID NO: 59558 - DNA, 15 bp, Homo sapiens
acaagtgggtgaagg

SEQ ID NO: 59559 - DNA, 15 bp, Homo sapiens
aacaagtgggtgaag

SEQ ID NO: 59560 - DNA, 15 bp, Homo sapiens
caacaagtgggtgaa

SEQ ID NO: 59561 - DNA, 15 bp, Homo sapiens
ccaacaagtgggtga

SEQ ID NO: 59562 - DNA, 15 bp, Homo sapiens
accaacaagtgggtg

SEQ ID NO: 59563 - DNA, 15 bp, Homo sapiens
caccaacaagtgggt

SEQ ID NO: 59564 - DNA, 15 bp, Homo sapiens
ccaccaacaagtggg

SEQ ID NO: 59565 - DNA, 15 bp, Homo sapiens
cccaccaacaagtgg

SEQ ID NO: 59566 - DNA, 15 bp, Homo sapiens
ccccaccaacaagtg

SEQ ID NO: 59567 - DNA, 15 bp, Homo sapiens
accccaccaacaagt

SEQ ID NO: 59568 - DNA, 15 bp, Homo sapiens
aaccccaccaacaag

SEQ ID NO: 59569 - DNA, 15 bp, Homo sapiens
caaccccaccaacaa

SEQ ID NO: 59570 - DNA, 15 bp, Homo sapiens
acaaccccaccaaca

SEQ ID NO: 59571 - DNA, 15 bp, Homo sapiens
aacaaccccaccaac

SEQ ID NO: 59572 - DNA, 15 bp, Homo sapiens
aaacaaccccaccaa

SEQ ID NO: 59573 - DNA, 15 bp, Homo sapiens
aaaacaaccccacca

SEQ ID NO: 59574 - DNA, 15 bp, Homo sapiens
aaaaacaaccccacc

SEQ ID NO: 59575 - DNA, 15 bp, Homo sapiens
aaaaaacaaccccac

SEQ ID NO: 59576 - DNA, 15 bp, Homo sapiens
aaaaaaacaacccca

SEQ ID NO: 59577 - DNA, 15 bp, Homo sapiens
gaaaaaaacaacccc

SEQ ID NO: 59578 - DNA, 15 bp, Homo sapiens
agaaaaaaacaaccc

SEQ ID NO: 59579 - DNA, 15 bp, Homo sapiens
aagaaaaaaacaacc

SEQ ID NO: 59580 - DNA, 15 bp, Homo sapiens
caagaaaaaaacaac

SEQ ID NO: 59581 - DNA, 15 bp, Homo sapiens
caaacaaatttacaa

SEQ ID NO: 59582 - DNA, 15 bp, Homo sapiens
tcaaacaaatttaca

SEQ ID NO: 59583 - DNA, 15 bp, Homo sapiens
ctcaaacaaatttac

SEQ ID NO: 59584 - DNA, 15 bp, Homo sapiens
actcaaacaaattta

SEQ ID NO: 59585 - DNA, 15 bp, Homo sapiens
aactcaaacaaattt

SEQ ID NO: 59586 - DNA, 15 bp, Homo sapiens
gaactcaaacaaatt

SEQ ID NO: 59587 - DNA, 15 bp, Homo sapiens
agaactcaaacaaat

SEQ ID NO: 59588 - DNA, 15 bp, Homo sapiens
aagaactcaaacaaa

SEQ ID NO: 59589 - DNA, 15 bp, Homo sapiens
aaagaactcaaacaa

SEQ ID NO: 59590 - DNA, 15 bp, Homo sapiens
caaagaactcaaaca

SEQ ID NO: 59591 - DNA, 15 bp, Homo sapiens
acaaagaactcaaac

SEQ ID NO: 59592 - DNA, 15 bp, Homo sapiens
tacaaagaactcaaa

SEQ ID NO: 59593 - DNA, 15 bp, Homo sapiens
ctacaaagaactcaa

SEQ ID NO: 59594 - DNA, 15 bp, Homo sapiens
tctacaaagaactca

SEQ ID NO: 59595 - DNA, 15 bp, Homo sapiens
atctacaaagaactc

SEQ ID NO: 59596 - DNA, 15 bp, Homo sapiens
aatctacaaagaact

SEQ ID NO: 59597 - DNA, 15 bp, Homo sapiens
gaatctacaaagaac

SEQ ID NO: 59598 - DNA, 15 bp, Homo sapiens
agaatctacaaagaa

SEQ ID NO: 59599 - DNA, 15 bp, Homo sapiens
cagaatctacaaaga

SEQ ID NO: 59600 - DNA, 15 bp, Homo sapiens
ccagaatctacaaag

SEQ ID NO: 59601 - DNA, 15 bp, Homo sapiens
tccagaatctacaaa

SEQ ID NO: 59602 - DNA, 15 bp, Homo sapiens
gtatccagaatctac

SEQ ID NO: 59603 - DNA, 15 bp, Homo sapiens
agtatccagaatcta

SEQ ID NO: 59604 - DNA, 15 bp, Homo sapiens
tagtatccagaatct

SEQ ID NO: 59605 - DNA, 15 bp, Homo sapiens
ctagtatccagaatc

SEQ ID NO: 59606 - DNA, 15 bp, Homo sapiens
gctagtatccagaat

SEQ ID NO: 59607 - DNA, 15 bp, Homo sapiens
ggctagtatccagaa

SEQ ID NO: 59608 - DNA, 15 bp, Homo sapiens
gggctagtatccaga

SEQ ID NO: 59609 - DNA, 15 bp, Homo sapiens
agggctagtatccag

SEQ ID NO: 59610 - DNA, 15 bp, Homo sapiens
aagggctagtatcca

SEQ ID NO: 59611 - DNA, 15 bp, Homo sapiens
aaagggctagtatcc

SEQ ID NO: 59612 - DNA, 15 bp, Homo sapiens
caaagggctagtatc

SEQ ID NO: 59613 - DNA, 15 bp, Homo sapiens
acaaagggctagtat

SEQ ID NO: 59614 - DNA, 15 bp, Homo sapiens
gacaaagggctagta

SEQ ID NO: 59615 - DNA, 15 bp, Homo sapiens
tgacaaagggctagt

SEQ ID NO: 59616 - DNA, 15 bp, Homo sapiens
ctgacaaagggctag

SEQ ID NO: 59617 - DNA, 15 bp, Homo sapiens
tctgacaaagggcta

SEQ ID NO: 59618 - DNA, 15 bp, Homo sapiens
atctgacaaagggct

SEQ ID NO: 59619 - DNA, 15 bp, Homo sapiens
catctgacaaagggc

SEQ ID NO: 59620 - DNA, 15 bp, Homo sapiens
tcatctgacaaaggg

SEQ ID NO: 59621 - DNA, 15 bp, Homo sapiens
ctcatctgacaaagg

SEQ ID NO: 59622 - DNA, 15 bp, Homo sapiens
actcatctgacaaag

SEQ ID NO: 59623 - DNA, 15 bp, Homo sapiens
tactcatctgacaaa

SEQ ID NO: 59624 - DNA, 15 bp, Homo sapiens
ctactcatctgacaa

SEQ ID NO: 59625 - DNA, 15 bp, Homo sapiens
tctactcatctgaca

SEQ ID NO: 59626 - DNA, 15 bp, Homo sapiens
atctactcatctgac

SEQ ID NO: 59627 - DNA, 15 bp, Homo sapiens
aatctactcatctga

SEQ ID NO: 59628 - DNA, 15 bp, Homo sapiens
caatctactcatctg

SEQ ID NO: 59629 - DNA, 15 bp, Homo sapiens
gcaatctactcatct

SEQ ID NO: 59630 - DNA, 15 bp, Homo sapiens
tgcaatctactcatc

SEQ ID NO: 59631 - DNA, 15 bp, Homo sapiens
ttgcaatctactcat

SEQ ID NO: 59632 - DNA, 15 bp, Homo sapiens
tttgcaatctactca

SEQ ID NO: 59633 - DNA, 15 bp, Homo sapiens
ttttgcaatctactc

SEQ ID NO: 59634 - DNA, 15 bp, Homo sapiens
tttttgcaatctact

SEQ ID NO: 59635 - DNA, 15 bp, Homo sapiens
atttttgcaatctac

SEQ ID NO: 59636 - DNA, 15 bp, Homo sapiens
aatttttgcaatcta

SEQ ID NO: 59637 - DNA, 15 bp, Homo sapiens
aaatttttgcaatct

SEQ ID NO: 59638 - DNA, 15 bp, Homo sapiens
aaaatttttgcaatc

SEQ ID NO: 59639 - DNA, 15 bp, Homo sapiens
gaaaatttttgcaat

SEQ ID NO: 59640 - DNA, 15 bp, Homo sapiens
agaaaatttttgcaa

SEQ ID NO: 59641 - DNA, 15 bp, Homo sapiens
gagaaaatttttgca

SEQ ID NO: 59642 - DNA, 15 bp, Homo sapiens
ggagaaaatttttgc

SEQ ID NO: 59643 - DNA, 15 bp, Homo sapiens
gggagaaaatttttg

SEQ ID NO: 59644 - DNA, 15 bp, Homo sapiens
tgggagaaaattttt

SEQ ID NO: 59645 - DNA, 15 bp, Homo sapiens
atgggagaaaatttt

SEQ ID NO: 59646 - DNA, 15 bp, Homo sapiens
aatgggagaaaattt

SEQ ID NO: 59647 - DNA, 15 bp, Homo sapiens
gaatgggagaaaatt

SEQ ID NO: 59648 - DNA, 15 bp, Homo sapiens
agaatgggagaaaat

SEQ ID NO: 59649 - DNA, 15 bp, Homo sapiens
cagaatgggagaaaa

SEQ ID NO: 59650 - DNA, 15 bp, Homo sapiens
acagaatgggagaaa

SEQ ID NO: 59651 - DNA, 15 bp, Homo sapiens
tacagaatgggagaa

SEQ ID NO: 59652 - DNA, 15 bp, Homo sapiens
ctacagaatgggaga

SEQ ID NO: 59653 - DNA, 15 bp, Homo sapiens
cctacagaatgggag

SEQ ID NO: 59654 - DNA, 15 bp, Homo sapiens
acctacagaatggga

SEQ ID NO: 59655 - DNA, 15 bp, Homo sapiens
aacctacagaatggg

SEQ ID NO: 59656 - DNA, 15 bp, Homo sapiens
caacctacagaatgg

SEQ ID NO: 59657 - DNA, 15 bp, Homo sapiens
gcaacctacagaatg

SEQ ID NO: 59658 - DNA, 15 bp, Homo sapiens
ggcaacctacagaat

SEQ ID NO: 59659 - DNA, 15 bp, Homo sapiens
tggcaacctacagaa

SEQ ID NO: 59660 - DNA, 15 bp, Homo sapiens
ctggcaacctacaga

SEQ ID NO: 59661 - DNA, 15 bp, Homo sapiens
actggcaacctacag

SEQ ID NO: 59662 - DNA, 15 bp, Homo sapiens
aactggcaacctaca

SEQ ID NO: 59663 - DNA, 15 bp, Homo sapiens
gaactggcaacctac

SEQ ID NO: 59664 - DNA, 15 bp, Homo sapiens
tgaactggcaaccta

SEQ ID NO: 59665 - DNA, 15 bp, Homo sapiens
gtgaactggcaacct

SEQ ID NO: 59666 - DNA, 15 bp, Homo sapiens
agtgaactggcaacc

SEQ ID NO: 59667 - DNA, 15 bp, Homo sapiens
gagtgaactggcaac

SEQ ID NO: 59668 - DNA, 15 bp, Homo sapiens
agagtgaactggcaa

SEQ ID NO: 59669 - DNA, 15 bp, Homo sapiens
tagagtgaactggca

SEQ ID NO: 59670 - DNA, 15 bp, Homo sapiens
ttagagtgaactggc

SEQ ID NO: 59671 - DNA, 15 bp, Homo sapiens
attagagtgaactgg

SEQ ID NO: 59672 - DNA, 15 bp, Homo sapiens
cattagagtgaactg

SEQ ID NO: 59673 - DNA, 15 bp, Homo sapiens
tcattagagtgaact

SEQ ID NO: 59674 - DNA, 15 bp, Homo sapiens
atcattagagtgaac

SEQ ID NO: 59675 - DNA, 15 bp, Homo sapiens
tatcattagagtgaa

SEQ ID NO: 59676 - DNA, 15 bp, Homo sapiens
ctatcattagagtga

SEQ ID NO: 59677 - DNA, 15 bp, Homo sapiens
actatcattagagtg

SEQ ID NO: 59678 - DNA, 15 bp, Homo sapiens
aactatcattagagt

SEQ ID NO: 59679 - DNA, 15 bp, Homo sapiens
aaactatcattagag

SEQ ID NO: 59680 - DNA, 15 bp, Homo sapiens
gaaactatcattaga

SEQ ID NO: 59681 - DNA, 15 bp, Homo sapiens
agaaactatcattag

SEQ ID NO: 59682 - DNA, 15 bp, Homo sapiens
aagaaactatcatta

SEQ ID NO: 59683 - DNA, 15 bp, Homo sapiens
aaagaaactatcatt

SEQ ID NO: 59684 - DNA, 15 bp, Homo sapiens
ttctgcacagcaaaa

SEQ ID NO: 59685 - DNA, 15 bp, Homo sapiens
cttctgcacagcaaa

SEQ ID NO: 59686 - DNA, 15 bp, Homo sapiens
gcttctgcacagcaa

SEQ ID NO: 59687 - DNA, 15 bp, Homo sapiens
agcttctgcacagca

SEQ ID NO: 59688 - DNA, 15 bp, Homo sapiens
gagcttctgcacagc

SEQ ID NO: 59689 - DNA, 15 bp, Homo sapiens
agagcttctgcacag

SEQ ID NO: 59690 - DNA, 15 bp, Homo sapiens
aagagcttctgcaca

SEQ ID NO: 59691 - DNA, 15 bp, Homo sapiens
aaagagcttctgcac

SEQ ID NO: 59692 - DNA, 15 bp, Homo sapiens
taaagagcttctgca

SEQ ID NO: 59693 - DNA, 15 bp, Homo sapiens
ctaaagagcttctgc

SEQ ID NO: 59694 - DNA, 15 bp, Homo sapiens
actaaagagcttctg

SEQ ID NO: 59695 - DNA, 15 bp, Homo sapiens
aactaaagagcttct

SEQ ID NO: 59696 - DNA, 15 bp, Homo sapiens
aaactaaagagcttc

SEQ ID NO: 59697 - DNA, 15 bp, Homo sapiens
taaactaaagagctt

SEQ ID NO: 59698 - DNA, 15 bp, Homo sapiens
aaatgggatctaatt

SEQ ID NO: 59699 - DNA, 15 bp, Homo sapiens
aaaatgggatctaat

SEQ ID NO: 59700 - DNA, 15 bp, Homo sapiens
aaaaatgggatctaa

SEQ ID NO: 59701 - DNA, 15 bp, Homo sapiens
caaaaatgggatcta

SEQ ID NO: 59702 - DNA, 15 bp, Homo sapiens
acaaaaatgggatct

SEQ ID NO: 59703 - DNA, 15 bp, Homo sapiens
gacaaaaatgggatc

SEQ ID NO: 59704 - DNA, 15 bp, Homo sapiens
tgacaaaaatgggat

SEQ ID NO: 59705 - DNA, 15 bp, Homo sapiens
ttgacaaaaatggga

SEQ ID NO: 59706 - DNA, 15 bp, Homo sapiens
attgacaaaaatggg

SEQ ID NO: 59707 - DNA, 15 bp, Homo sapiens
aattgacaaaaatgg

SEQ ID NO: 59708 - DNA, 15 bp, Homo sapiens
aaattgacaaaaatg

SEQ ID NO: 59709 - DNA, 15 bp, Homo sapiens
aaaattgacaaaaat

SEQ ID NO: 59710 - DNA, 15 bp, Homo sapiens
caaaattgacaaaaa

SEQ ID NO: 59711 - DNA, 15 bp, Homo sapiens
ccaaaattgacaaaa

SEQ ID NO: 59712 - DNA, 15 bp, Homo sapiens
gccaaaattgacaaa

SEQ ID NO: 59713 - DNA, 15 bp, Homo sapiens
agccaaaattgacaa

SEQ ID NO: 59714 - DNA, 15 bp, Homo sapiens
aagccaaaattgaca

SEQ ID NO: 59715 - DNA, 15 bp, Homo sapiens
aaagccaaaattgac

SEQ ID NO: 59716 - DNA, 15 bp, Homo sapiens
aaaagccaaaattga

SEQ ID NO: 59717 - DNA, 15 bp, Homo sapiens
caaaagccaaaattg

SEQ ID NO: 59718 - DNA, 15 bp, Homo sapiens
acaaaagccaaaatt

SEQ ID NO: 59719 - DNA, 15 bp, Homo sapiens
aacaaaagccaaaat

SEQ ID NO: 59720 - DNA, 15 bp, Homo sapiens
ggcaacaaaagccaa

SEQ ID NO: 59721 - DNA, 15 bp, Homo sapiens
aggcaacaaaagcca

SEQ ID NO: 59722 - DNA, 15 bp, Homo sapiens
aaggcaacaaaagcc

SEQ ID NO: 59723 - DNA, 15 bp, Homo sapiens
aaaggcaacaaaagc

SEQ ID NO: 59724 - DNA, 15 bp, Homo sapiens
caaaggcaacaaaag

SEQ ID NO: 59725 - DNA, 15 bp, Homo sapiens
gcaaaggcaacaaaa

SEQ ID NO: 59726 - DNA, 15 bp, Homo sapiens
agcaaaggcaacaaa

SEQ ID NO: 59727 - DNA, 15 bp, Homo sapiens
aagcaaaggcaacaa

SEQ ID NO: 59728 - DNA, 15 bp, Homo sapiens
aaagcaaaggcaaca

SEQ ID NO: 59729 - DNA, 15 bp, Homo sapiens
aaaagcaaaggcaac

SEQ ID NO: 59730 - DNA, 15 bp, Homo sapiens
caaaagcaaaggcaa

SEQ ID NO: 59731 - DNA, 15 bp, Homo sapiens
ccaaaagcaaaggca

SEQ ID NO: 59732 - DNA, 15 bp, Homo sapiens
accaaaagcaaaggc

SEQ ID NO: 59733 - DNA, 15 bp, Homo sapiens
caccaaaagcaaagg

SEQ ID NO: 59734 - DNA, 15 bp, Homo sapiens
acaccaaaagcaaag

SEQ ID NO: 59735 - DNA, 15 bp, Homo sapiens
aacaccaaaagcaaa

SEQ ID NO: 59736 - DNA, 15 bp, Homo sapiens
aaacaccaaaagcaa

SEQ ID NO: 59737 - DNA, 15 bp, Homo sapiens
aaaacaccaaaagca

SEQ ID NO: 59738 - DNA, 15 bp, Homo sapiens
taaaacaccaaaagc

SEQ ID NO: 59739 - DNA, 15 bp, Homo sapiens
ctaaaacaccaaaag

SEQ ID NO: 59740 - DNA, 15 bp, Homo sapiens
tctaaaacaccaaaa

SEQ ID NO: 59741 - DNA, 15 bp, Homo sapiens
gtctaaaacaccaaa

SEQ ID NO: 59742 - DNA, 15 bp, Homo sapiens
tgtctaaaacaccaa

SEQ ID NO: 59743 - DNA, 15 bp, Homo sapiens
atgtctaaaacacca

SEQ ID NO: 59744 - DNA, 15 bp, Homo sapiens
catgtctaaaacacc

SEQ ID NO: 59745 - DNA, 15 bp, Homo sapiens
tcatgtctaaaacac

SEQ ID NO: 59746 - DNA, 15 bp, Homo sapiens
ttcatgtctaaaaca

SEQ ID NO: 59747 - DNA, 15 bp, Homo sapiens
gttcatgtctaaaac

SEQ ID NO: 59748 - DNA, 15 bp, Homo sapiens
agttcatgtctaaaa

SEQ ID NO: 59749 - DNA, 15 bp, Homo sapiens
gagttcatgtctaaa

SEQ ID NO: 59750 - DNA, 15 bp, Homo sapiens
ggagttcatgtctaa

SEQ ID NO: 59751 - DNA, 15 bp, Homo sapiens
aggagttcatgtcta

SEQ ID NO: 59752 - DNA, 15 bp, Homo sapiens
aaggagttcatgtct

SEQ ID NO: 59753 - DNA, 15 bp, Homo sapiens
caaggagttcatgtc

SEQ ID NO: 59754 - DNA, 15 bp, Homo sapiens
tcaaggagttcatgt

SEQ ID NO: 59755 - DNA, 15 bp, Homo sapiens
gtcaaggagttcatg

SEQ ID NO: 59756 - DNA, 15 bp, Homo sapiens
ggtcaaggagttcat

SEQ ID NO: 59757 - DNA, 15 bp, Homo sapiens
tggtcaaggagttca

SEQ ID NO: 59758 - DNA, 15 bp, Homo sapiens
atggtcaaggagttc

SEQ ID NO: 59759 - DNA, 15 bp, Homo sapiens
catggtcaaggagtt

SEQ ID NO: 59760 - DNA, 15 bp, Homo sapiens
gcatggtcaaggagt

SEQ ID NO: 59761 - DNA, 15 bp, Homo sapiens
ggcatggtcaaggag

SEQ ID NO: 59762 - DNA, 15 bp, Homo sapiens
aggcatggtcaagga

SEQ ID NO: 59763 - DNA, 15 bp, Homo sapiens
taggcatggtcaagg

SEQ ID NO: 59764 - DNA, 15 bp, Homo sapiens
ataggcatggtcaag

SEQ ID NO: 59765 - DNA, 15 bp, Homo sapiens
cataggcatggtcaa

SEQ ID NO: 59766 - DNA, 15 bp, Homo sapiens
acataggcatggtca

SEQ ID NO: 59767 - DNA, 15 bp, Homo sapiens
gacataggcatggtc

SEQ ID NO: 59768 - DNA, 15 bp, Homo sapiens
ggacataggcatggt

SEQ ID NO: 59769 - DNA, 15 bp, Homo sapiens
aggacataggcatgg

SEQ ID NO: 59770 - DNA, 15 bp, Homo sapiens
caggacataggcatg

SEQ ID NO: 59771 - DNA, 15 bp, Homo sapiens
tcaggacataggcat

SEQ ID NO: 59772 - DNA, 15 bp, Homo sapiens
ttcaggacataggca

SEQ ID NO: 59773 - DNA, 15 bp, Homo sapiens
attcaggacataggc

SEQ ID NO: 59774 - DNA, 15 bp, Homo sapiens
cctagaagaaaacct

SEQ ID NO: 59775 - DNA, 15 bp, Homo sapiens
ccctagaagaaaacc

SEQ ID NO: 59776 - DNA, 15 bp, Homo sapiens
accctagaagaaaac

SEQ ID NO: 59777 - DNA, 15 bp, Homo sapiens
aaccctagaagaaaa

SEQ ID NO: 59778 - DNA, 15 bp, Homo sapiens
aaaccctagaagaaa

SEQ ID NO: 59779 - DNA, 15 bp, Homo sapiens
aaaaccctagaagaa

SEQ ID NO: 59780 - DNA, 15 bp, Homo sapiens
aaaaaccctagaaga

SEQ ID NO: 59781 - DNA, 15 bp, Homo sapiens
taaaaaccctagaag

SEQ ID NO: 59782 - DNA, 15 bp, Homo sapiens
ataaaaaccctagaa

SEQ ID NO: 59783 - DNA, 15 bp, Homo sapiens
cataaaaaccctaga

SEQ ID NO: 59784 - DNA, 15 bp, Homo sapiens
ccataaaaaccctag

SEQ ID NO: 59785 - DNA, 15 bp, Homo sapiens
accataaaaacccta

SEQ ID NO: 59786 - DNA, 15 bp, Homo sapiens
aaccataaaaaccct

SEQ ID NO: 59787 - DNA, 15 bp, Homo sapiens
aaaccataaaaaccc

SEQ ID NO: 59788 - DNA, 15 bp, Homo sapiens
aaaaccataaaaacc

SEQ ID NO: 59789 - DNA, 15 bp, Homo sapiens
taaaaccataaaaac

SEQ ID NO: 59790 - DNA, 15 bp, Homo sapiens
ctaaaaccataaaaa

SEQ ID NO: 59791 - DNA, 15 bp, Homo sapiens
cctaaaaccataaaa

SEQ ID NO: 59792 - DNA, 15 bp, Homo sapiens
acctaaaaccataaa

SEQ ID NO: 59793 - DNA, 15 bp, Homo sapiens
gacctaaaaccataa

SEQ ID NO: 59794 - DNA, 15 bp, Homo sapiens
agacctaaaaccata

SEQ ID NO: 59795 - DNA, 15 bp, Homo sapiens
tagacctaaaaccat

SEQ ID NO: 59796 - DNA, 15 bp, Homo sapiens
ttagacctaaaacca

SEQ ID NO: 59797 - DNA, 15 bp, Homo sapiens
gttagacctaaaacc

SEQ ID NO: 59798 - DNA, 15 bp, Homo sapiens
tgttagacctaaaac

SEQ ID NO: 59799 - DNA, 15 bp, Homo sapiens
atgttagacctaaaa

SEQ ID NO: 59800 - DNA, 15 bp, Homo sapiens
catgttagacctaaa

SEQ ID NO: 59801 - DNA, 15 bp, Homo sapiens
acatgttagacctaa

SEQ ID NO: 59802 - DNA, 15 bp, Homo sapiens
tacatgttagaccta

SEQ ID NO: 59803 - DNA, 15 bp, Homo sapiens
ttacatgttagacct

SEQ ID NO: 59804 - DNA, 15 bp, Homo sapiens
cttacatgttagacc

SEQ ID NO: 59805 - DNA, 15 bp, Homo sapiens
acttacatgttagac

SEQ ID NO: 59806 - DNA, 15 bp, Homo sapiens
gacttacatgttaga

SEQ ID NO: 59807 - DNA, 15 bp, Homo sapiens
agacttacatgttag

SEQ ID NO: 59808 - DNA, 15 bp, Homo sapiens
aagacttacatgtta

SEQ ID NO: 59809 - DNA, 15 bp, Homo sapiens
aaagacttacatgtt

SEQ ID NO: 59810 - DNA, 15 bp, Homo sapiens
taaagacttacatgt

SEQ ID NO: 59811 - DNA, 15 bp, Homo sapiens
ttaaagacttacatg

SEQ ID NO: 59812 - DNA, 15 bp, Homo sapiens
attaaagacttacat

SEQ ID NO: 59813 - DNA, 15 bp, Homo sapiens
gattaaagacttaca

SEQ ID NO: 59814 - DNA, 15 bp, Homo sapiens
ggattaaagacttac

SEQ ID NO: 59815 - DNA, 15 bp, Homo sapiens
ttcaagatggattaa

SEQ ID NO: 59816 - DNA, 15 bp, Homo sapiens
attcaagatggatta

SEQ ID NO: 59817 - DNA, 15 bp, Homo sapiens
aattcaagatggatt

SEQ ID NO: 59818 - DNA, 15 bp, Homo sapiens
taattcaagatggat

SEQ ID NO: 59819 - DNA, 15 bp, Homo sapiens
ttaattcaagatgga

SEQ ID NO: 59820 - DNA, 15 bp, Homo sapiens
attaattcaagatgg

SEQ ID NO: 59821 - DNA, 15 bp, Homo sapiens
cattaattcaagatg

SEQ ID NO: 59822 - DNA, 15 bp, Homo sapiens
acattaattcaagat

SEQ ID NO: 59823 - DNA, 15 bp, Homo sapiens
aacattaattcaaga

SEQ ID NO: 59824 - DNA, 15 bp, Homo sapiens
aaacattaattcaag

SEQ ID NO: 59825 - DNA, 15 bp, Homo sapiens
caaacattaattcaa

SEQ ID NO: 59826 - DNA, 15 bp, Homo sapiens
acaaacattaattca

SEQ ID NO: 59827 - DNA, 15 bp, Homo sapiens
tacaaacattaattc

SEQ ID NO: 59828 - DNA, 15 bp, Homo sapiens
atacaaacattaatt

SEQ ID NO: 59829 - DNA, 15 bp, Homo sapiens
tatacaaacattaat

SEQ ID NO: 59830 - DNA, 15 bp, Homo sapiens
ttatacaaacattaa

SEQ ID NO: 59831 - DNA, 15 bp, Homo sapiens
cttatacaaacatta

SEQ ID NO: 59832 - DNA, 15 bp, Homo sapiens
ccttatacaaacatt

SEQ ID NO: 59833 - DNA, 15 bp, Homo sapiens
accttatacaaacat

SEQ ID NO: 59834 - DNA, 15 bp, Homo sapiens
caccttatacaaaca

SEQ ID NO: 59835 - DNA, 15 bp, Homo sapiens
acaccttatacaaac

SEQ ID NO: 59836 - DNA, 15 bp, Homo sapiens
tacaccttatacaaa

SEQ ID NO: 59837 - DNA, 15 bp, Homo sapiens
ttacaccttatacaa

SEQ ID NO: 59838 - DNA, 15 bp, Homo sapiens
cttacaccttataca

SEQ ID NO: 59839 - DNA, 15 bp, Homo sapiens
ccttacaccttatac

SEQ ID NO: 59840 - DNA, 15 bp, Homo sapiens
tccttacaccttata

SEQ ID NO: 59841 - DNA, 15 bp, Homo sapiens
ttccttacaccttat

SEQ ID NO: 59842 - DNA, 15 bp, Homo sapiens
cttccttacacctta

SEQ ID NO: 59843 - DNA, 15 bp, Homo sapiens
ccttccttacacctt

SEQ ID NO: 59844 - DNA, 15 bp, Homo sapiens
cccttccttacacct

SEQ ID NO: 59845 - DNA, 15 bp, Homo sapiens
tcccttccttacacc

SEQ ID NO: 59846 - DNA, 15 bp, Homo sapiens
atcccttccttacac

SEQ ID NO: 59847 - DNA, 15 bp, Homo sapiens
gatcccttccttaca

SEQ ID NO: 59848 - DNA, 15 bp, Homo sapiens
ggatcccttccttac

SEQ ID NO: 59849 - DNA, 15 bp, Homo sapiens
tggatcccttcctta

SEQ ID NO: 59850 - DNA, 15 bp, Homo sapiens
ctggatcccttcctt

SEQ ID NO: 59851 - DNA, 15 bp, Homo sapiens
actggatcccttcct

SEQ ID NO: 59852 - DNA, 15 bp, Homo sapiens
aactggatcccttcc

SEQ ID NO: 59853 - DNA, 15 bp, Homo sapiens
aaactggatcccttc

SEQ ID NO: 59854 - DNA, 15 bp, Homo sapiens
gaaactggatccctt

SEQ ID NO: 59855 - DNA, 15 bp, Homo sapiens
tgaaactggatccct

SEQ ID NO: 59856 - DNA, 15 bp, Homo sapiens
ctgaaactggatccc

SEQ ID NO: 59857 - DNA, 15 bp, Homo sapiens
gctgaaactggatcc

SEQ ID NO: 59858 - DNA, 15 bp, Homo sapiens
agctgaaactggatc

SEQ ID NO: 59859 - DNA, 15 bp, Homo sapiens
aagctgaaactggat

SEQ ID NO: 59860 - DNA, 15 bp, Homo sapiens
aaagctgaaactgga

SEQ ID NO: 59861 - DNA, 15 bp, Homo sapiens
gaaagctgaaactgg

SEQ ID NO: 59862 - DNA, 15 bp, Homo sapiens
agaaagctgaaactg

SEQ ID NO: 59863 - DNA, 15 bp, Homo sapiens
tagaaagctgaaact

SEQ ID NO: 59864 - DNA, 15 bp, Homo sapiens
gtagaaagctgaaac

SEQ ID NO: 59865 - DNA, 15 bp, Homo sapiens
tgtagaaagctgaaa

SEQ ID NO: 59866 - DNA, 15 bp, Homo sapiens
atgtagaaagctgaa

SEQ ID NO: 59867 - DNA, 15 bp, Homo sapiens
tatgtagaaagctga

SEQ ID NO: 59868 - DNA, 15 bp, Homo sapiens
atatgtagaaagctg

SEQ ID NO: 59869 - DNA, 15 bp, Homo sapiens
catatgtagaaagct

SEQ ID NO: 59870 - DNA, 15 bp, Homo sapiens
ccatatgtagaaagc

SEQ ID NO: 59871 - DNA, 15 bp, Homo sapiens
gccatatgtagaaag

SEQ ID NO: 59872 - DNA, 15 bp, Homo sapiens
agccatatgtagaaa

SEQ ID NO: 59873 - DNA, 15 bp, Homo sapiens
tagccatatgtagaa

SEQ ID NO: 59874 - DNA, 15 bp, Homo sapiens
ctagccatatgtaga

SEQ ID NO: 59875 - DNA, 15 bp, Homo sapiens
gctagccatatgtag

SEQ ID NO: 59876 - DNA, 15 bp, Homo sapiens
ggctagccatatgta

SEQ ID NO: 59877 - DNA, 15 bp, Homo sapiens
tggctagccatatgt

SEQ ID NO: 59878 - DNA, 15 bp, Homo sapiens
caaatggtgctggga

SEQ ID NO: 59879 - DNA, 15 bp, Homo sapiens
acaaatggtgctggg

SEQ ID NO: 59880 - DNA, 15 bp, Homo sapiens
aacaaatggtgctgg

SEQ ID NO: 59881 - DNA, 15 bp, Homo sapiens
taacaaatggtgctg

SEQ ID NO: 59882 - DNA, 15 bp, Homo sapiens
ttaacaaatggtgct

SEQ ID NO: 59883 - DNA, 15 bp, Homo sapiens
tttaacaaatggtgc

SEQ ID NO: 59884 - DNA, 15 bp, Homo sapiens
atttaacaaatggtg

SEQ ID NO: 59885 - DNA, 15 bp, Homo sapiens
tatttaacaaatggt

SEQ ID NO: 59886 - DNA, 15 bp, Homo sapiens
ctatttaacaaatgg

SEQ ID NO: 59887 - DNA, 15 bp, Homo sapiens
cctatttaacaaatg

SEQ ID NO: 59888 - DNA, 15 bp, Homo sapiens
ccctatttaacaaat

SEQ ID NO: 59889 - DNA, 15 bp, Homo sapiens
tccctatttaacaaa

SEQ ID NO: 59890 - DNA, 15 bp, Homo sapiens
ttccctatttaacaa

SEQ ID NO: 59891 - DNA, 15 bp, Homo sapiens
attccctatttaaca

SEQ ID NO: 59892 - DNA, 15 bp, Homo sapiens
gattccctatttaac

SEQ ID NO: 59893 - DNA, 15 bp, Homo sapiens
ggattccctatttaa

SEQ ID NO: 59894 - DNA, 15 bp, Homo sapiens
aggattccctattta

SEQ ID NO: 59895 - DNA, 15 bp, Homo sapiens
aaggattccctattt

SEQ ID NO: 59896 - DNA, 15 bp, Homo sapiens
aaaggattccctatt

SEQ ID NO: 59897 - DNA, 15 bp, Homo sapiens
aaaaggattccctat

SEQ ID NO: 59898 - DNA, 15 bp, Homo sapiens
gaaaaggattcccta

SEQ ID NO: 59899 - DNA, 15 bp, Homo sapiens
ggaaaaggattccct

SEQ ID NO: 59900 - DNA, 15 bp, Homo sapiens
gggaaaaggattccc

SEQ ID NO: 59901 - DNA, 15 bp, Homo sapiens
tgggaaaaggattcc

SEQ ID NO: 59902 - DNA, 15 bp, Homo sapiens
atgggaaaaggattc

SEQ ID NO: 59903 - DNA, 15 bp, Homo sapiens
aatgggaaaaggatt

SEQ ID NO: 59904 - DNA, 15 bp, Homo sapiens
aaatgggaaaaggat

SEQ ID NO: 59905 - DNA, 15 bp, Homo sapiens
gaaatgggaaaagga

SEQ ID NO: 59906 - DNA, 15 bp, Homo sapiens
agaaatgggaaaagg

SEQ ID NO: 59907 - DNA, 15 bp, Homo sapiens
aagaaatgggaaaag

SEQ ID NO: 59908 - DNA, 15 bp, Homo sapiens
caagaaatgggaaaa

SEQ ID NO: 59909 - DNA, 15 bp, Homo sapiens
acaagaaatgggaaa

SEQ ID NO: 59910 - DNA, 15 bp, Homo sapiens
aacaagaaatgggaa

SEQ ID NO: 59911 - DNA, 15 bp, Homo sapiens
aaacaagaaatggga

SEQ ID NO: 59912 - DNA, 15 bp, Homo sapiens
aaaacaagaaatggg

SEQ ID NO: 59913 - DNA, 15 bp, Homo sapiens
aaaaacaagaaatgg

SEQ ID NO: 59914 - DNA, 15 bp, Homo sapiens
caaaaacaagaaatg

SEQ ID NO: 59915 - DNA, 15 bp, Homo sapiens
acaaaaacaagaaat

SEQ ID NO: 59916 - DNA, 15 bp, Homo sapiens
gacaaaaacaagaaa

SEQ ID NO: 59917 - DNA, 15 bp, Homo sapiens
tgacaaaaacaagaa

SEQ ID NO: 59918 - DNA, 15 bp, Homo sapiens
ctgacaaaaacaaga

SEQ ID NO: 59919 - DNA, 15 bp, Homo sapiens
cctgacaaaaacaag

SEQ ID NO: 59920 - DNA, 15 bp, Homo sapiens
acctgacaaaaacaa

SEQ ID NO: 59921 - DNA, 15 bp, Homo sapiens
aacctgacaaaaaca

SEQ ID NO: 59922 - DNA, 15 bp, Homo sapiens
aaacctgacaaaaac

SEQ ID NO: 59923 - DNA, 15 bp, Homo sapiens
caaacctgacaaaaa

SEQ ID NO: 59924 - DNA, 15 bp, Homo sapiens
acaaacctgacaaaa

SEQ ID NO: 59925 - DNA, 15 bp, Homo sapiens
gacaaacctgacaaa

SEQ ID NO: 59926 - DNA, 15 bp, Homo sapiens
tatctgatctttgac

SEQ ID NO: 59927 - DNA, 15 bp, Homo sapiens
ctatctgatctttga

SEQ ID NO: 59928 - DNA, 15 bp, Homo sapiens
actatctgatctttg

SEQ ID NO: 59929 - DNA, 15 bp, Homo sapiens
aactatctgatcttt

SEQ ID NO: 59930 - DNA, 15 bp, Homo sapiens
caactatctgatctt

SEQ ID NO: 59931 - DNA, 15 bp, Homo sapiens
acaactatctgatct

SEQ ID NO: 59932 - DNA, 15 bp, Homo sapiens
tacaactatctgatc

SEQ ID NO: 59933 - DNA, 15 bp, Homo sapiens
ctacaactatctgat

SEQ ID NO: 59934 - DNA, 15 bp, Homo sapiens
tctacaactatctga

SEQ ID NO: 59935 - DNA, 15 bp, Homo sapiens
atctacaactatctg

SEQ ID NO: 59936 - DNA, 15 bp, Homo sapiens
catctacaactatct

SEQ ID NO: 59937 - DNA, 15 bp, Homo sapiens
acatctacaactatc

SEQ ID NO: 59938 - DNA, 15 bp, Homo sapiens
tacatctacaactat

SEQ ID NO: 59939 - DNA, 15 bp, Homo sapiens
atacatctacaacta

SEQ ID NO: 59940 - DNA, 15 bp, Homo sapiens
catacatctacaact

SEQ ID NO: 59941 - DNA, 15 bp, Homo sapiens
ccatacatctacaac

SEQ ID NO: 59942 - DNA, 15 bp, Homo sapiens
accatacatctacaa

SEQ ID NO: 59943 - DNA, 15 bp, Homo sapiens
taccatacatctaca

SEQ ID NO: 59944 - DNA, 15 bp, Homo sapiens
ataccatacatctac

SEQ ID NO: 59945 - DNA, 15 bp, Homo sapiens
aataccatacatcta

SEQ ID NO: 59946 - DNA, 15 bp, Homo sapiens
taataccatacatct

SEQ ID NO: 59947 - DNA, 15 bp, Homo sapiens
ataataccatacatc

SEQ ID NO: 59948 - DNA, 15 bp, Homo sapiens
aataataccatacat

SEQ ID NO: 59949 - DNA, 15 bp, Homo sapiens
aaataataccataca

SEQ ID NO: 59950 - DNA, 15 bp, Homo sapiens
gaaataataccatac

SEQ ID NO: 59951 - DNA, 15 bp, Homo sapiens
agaaataataccata

SEQ ID NO: 59952 - DNA, 15 bp, Homo sapiens
cagaaataataccat

SEQ ID NO: 59953 - DNA, 15 bp, Homo sapiens
tcagaaataatacca

SEQ ID NO: 59954 - DNA, 15 bp, Homo sapiens
ctcagaaataatacc

SEQ ID NO: 59955 - DNA, 15 bp, Homo sapiens
cctcagaaataatac

SEQ ID NO: 59956 - DNA, 15 bp, Homo sapiens
ccctcagaaataata

SEQ ID NO: 59957 - DNA, 15 bp, Homo sapiens
gccctcagaaataat

SEQ ID NO: 59958 - DNA, 15 bp, Homo sapiens
agccctcagaaataa

SEQ ID NO: 59959 - DNA, 15 bp, Homo sapiens
gagccctcagaaata

SEQ ID NO: 59960 - DNA, 15 bp, Homo sapiens
agagccctcagaaat

SEQ ID NO: 59961 - DNA, 15 bp, Homo sapiens
cagagccctcagaaa

SEQ ID NO: 59962 - DNA, 15 bp, Homo sapiens
acagagccctcagaa

SEQ ID NO: 59963 - DNA, 15 bp, Homo sapiens
aacagagccctcaga

SEQ ID NO: 59964 - DNA, 15 bp, Homo sapiens
gaacagagccctcag

SEQ ID NO: 59965 - DNA, 15 bp, Homo sapiens
agaacagagccctca

SEQ ID NO: 59966 - DNA, 15 bp, Homo sapiens
cagaacagagccctc

SEQ ID NO: 59967 - DNA, 15 bp, Homo sapiens
acagaacagagccct

SEQ ID NO: 59968 - DNA, 15 bp, Homo sapiens
aacagaacagagccc

SEQ ID NO: 59969 - DNA, 15 bp, Homo sapiens
gaacagaacagagcc

SEQ ID NO: 59970 - DNA, 15 bp, Homo sapiens
ggaacagaacagagc

SEQ ID NO: 59971 - DNA, 15 bp, Homo sapiens
tggaacagaacagag

SEQ ID NO: 59972 - DNA, 15 bp, Homo sapiens
atggaacagaacaga

SEQ ID NO: 59973 - DNA, 15 bp, Homo sapiens
aatggaacagaacag

SEQ ID NO: 59974 - DNA, 15 bp, Homo sapiens
caatggaacagaaca

SEQ ID NO: 59975 - DNA, 15 bp, Homo sapiens
ccaatggaacagaac

SEQ ID NO: 59976 - DNA, 15 bp, Homo sapiens
accaatggaacagaa

SEQ ID NO: 59977 - DNA, 15 bp, Homo sapiens
gaccaatggaacaga

SEQ ID NO: 59978 - DNA, 15 bp, Homo sapiens
agaccaatggaacag

SEQ ID NO: 59979 - DNA, 15 bp, Homo sapiens
tagaccaatggaaca

SEQ ID NO: 59980 - DNA, 15 bp, Homo sapiens
atagaccaatggaac

SEQ ID NO: 59981 - DNA, 15 bp, Homo sapiens
tatagaccaatggaa

SEQ ID NO: 59982 - DNA, 15 bp, Homo sapiens
atatagaccaatgga

SEQ ID NO: 59983 - DNA, 15 bp, Homo sapiens
gatatagaccaatgg

SEQ ID NO: 59984 - DNA, 15 bp, Homo sapiens
agatatagaccaatg

SEQ ID NO: 59985 - DNA, 15 bp, Homo sapiens
gagatatagaccaat

SEQ ID NO: 59986 - DNA, 15 bp, Homo sapiens
agagatatagaccaa

SEQ ID NO: 59987 - DNA, 15 bp, Homo sapiens
cagagatatagacca

SEQ ID NO: 59988 - DNA, 15 bp, Homo sapiens
acagagatatagacc

SEQ ID NO: 59989 - DNA, 15 bp, Homo sapiens
aacagagatatagac

SEQ ID NO: 59990 - DNA, 15 bp, Homo sapiens
aaacagagatataga

SEQ ID NO: 59991 - DNA, 15 bp, Homo sapiens
aaaacagagatatag

SEQ ID NO: 59992 - DNA, 15 bp, Homo sapiens
caaaacagagatata

SEQ ID NO: 59993 - DNA, 15 bp, Homo sapiens
ccaaaacagagatat

SEQ ID NO: 59994 - DNA, 15 bp, Homo sapiens
accaaaacagagata

SEQ ID NO: 59995 - DNA, 15 bp, Homo sapiens
taccaaaacagagat

SEQ ID NO: 59996 - DNA, 15 bp, Homo sapiens
gtaccaaaacagaga

SEQ ID NO: 59997 - DNA, 15 bp, Homo sapiens
ggtaccaaaacagag

SEQ ID NO: 59998 - DNA, 15 bp, Homo sapiens
tggtaccaaaacaga

SEQ ID NO: 59999 - DNA, 15 bp, Homo sapiens
ctggtaccaaaacag

SEQ ID NO: 60000 - DNA, 15 bp, Homo sapiens
actggtaccaaaaca

SEQ ID NO: 60001 - DNA, 15 bp, Homo sapiens
tactggtaccaaaac

SEQ ID NO: 60002 - DNA, 15 bp, Homo sapiens
gtactggtaccaaaa

SEQ ID NO: 60003 - DNA, 15 bp, Homo sapiens
ggtactggtaccaaa

SEQ ID NO: 60004 - DNA, 15 bp, Homo sapiens
tggtactggtaccaa

SEQ ID NO: 60005 - DNA, 15 bp, Homo sapiens
atggtactggtacca

SEQ ID NO: 60006 - DNA, 15 bp, Homo sapiens
catggtactggtacc

SEQ ID NO: 60007 - DNA, 15 bp, Homo sapiens
gcatggtactggtac

SEQ ID NO: 60008 - DNA, 15 bp, Homo sapiens
agcatggtactggta

SEQ ID NO: 60009 - DNA, 15 bp, Homo sapiens
cagcatggtactggt

SEQ ID NO: 60010 - DNA, 15 bp, Homo sapiens
acagcatggtactgg

SEQ ID NO: 60011 - DNA, 15 bp, Homo sapiens
aacagcatggtactg

SEQ ID NO: 60012 - DNA, 15 bp, Homo sapiens
aaacagcatggtact

SEQ ID NO: 60013 - DNA, 15 bp, Homo sapiens
aaaacagcatggtac

SEQ ID NO: 60014 - DNA, 15 bp, Homo sapiens
caaaacagcatggta

SEQ ID NO: 60015 - DNA, 15 bp, Homo sapiens
ccaaaacagcatggt

SEQ ID NO: 60016 - DNA, 15 bp, Homo sapiens
accaaaacagcatgg

SEQ ID NO: 60017 - DNA, 15 bp, Homo sapiens
aaccaaaacagcatg

SEQ ID NO: 60018 - DNA, 15 bp, Homo sapiens
taaccaaaacagcat

SEQ ID NO: 60019 - DNA, 15 bp, Homo sapiens
gtaaccaaaacagca

SEQ ID NO: 60020 - DNA, 15 bp, Homo sapiens
agtaaccaaaacagc

SEQ ID NO: 60021 - DNA, 15 bp, Homo sapiens
cagtaaccaaaacag

SEQ ID NO: 60022 - DNA, 15 bp, Homo sapiens
acagtaaccaaaaca

SEQ ID NO: 60023 - DNA, 15 bp, Homo sapiens
tacagtaaccaaaac

SEQ ID NO: 60024 - DNA, 15 bp, Homo sapiens
ctacagtaaccaaaa

SEQ ID NO: 60025 - DNA, 15 bp, Homo sapiens
gctacagtaaccaaa

SEQ ID NO: 60026 - DNA, 15 bp, Homo sapiens
ggctacagtaaccaa

SEQ ID NO: 60027 - DNA, 15 bp, Homo sapiens
aggctacagtaacca

SEQ ID NO: 60028 - DNA, 15 bp, Homo sapiens
aaggctacagtaacc

SEQ ID NO: 60029 - DNA, 15 bp, Homo sapiens
caaggctacagtaac

SEQ ID NO: 60030 - DNA, 15 bp, Homo sapiens
acaaggctacagtaa

SEQ ID NO: 60031 - DNA, 15 bp, Homo sapiens
tacaaggctacagta

SEQ ID NO: 60032 - DNA, 15 bp, Homo sapiens
ctacaaggctacagt

SEQ ID NO: 60033 - DNA, 15 bp, Homo sapiens
actacaaggctacag

SEQ ID NO: 60034 - DNA, 15 bp, Homo sapiens
tactacaaggctaca

SEQ ID NO: 60035 - DNA, 15 bp, Homo sapiens
atactacaaggctac

SEQ ID NO: 60036 - DNA, 15 bp, Homo sapiens
tatactacaaggcta

SEQ ID NO: 60037 - DNA, 15 bp, Homo sapiens
ctatactacaaggct

SEQ ID NO: 60038 - DNA, 15 bp, Homo sapiens
actatactacaaggc

SEQ ID NO: 60039 - DNA, 15 bp, Homo sapiens
aactatactacaagg

SEQ ID NO: 60040 - DNA, 15 bp, Homo sapiens
aaactatactacaag

SEQ ID NO: 60041 - DNA, 15 bp, Homo sapiens
caaactatactacaa

SEQ ID NO: 60042 - DNA, 15 bp, Homo sapiens
tcaaactatactaca

SEQ ID NO: 60043 - DNA, 15 bp, Homo sapiens
ttcaaactatactac

SEQ ID NO: 60044 - DNA, 15 bp, Homo sapiens
cttcaaactatacta

SEQ ID NO: 60045 - DNA, 15 bp, Homo sapiens
acttcaaactatact

SEQ ID NO: 60046 - DNA, 15 bp, Homo sapiens
gacttcaaactatac

SEQ ID NO: 60047 - DNA, 15 bp, Homo sapiens
tgacttcaaactata

SEQ ID NO: 60048 - DNA, 15 bp, Homo sapiens
ctgacttcaaactat

SEQ ID NO: 60049 - DNA, 15 bp, Homo sapiens
cctgacttcaaacta

SEQ ID NO: 60050 - DNA, 15 bp, Homo sapiens
acctgacttcaaact

SEQ ID NO: 60051 - DNA, 15 bp, Homo sapiens
tacctgacttcaaac

SEQ ID NO: 60052 - DNA, 15 bp, Homo sapiens
ctacctgacttcaaa

SEQ ID NO: 60053 - DNA, 15 bp, Homo sapiens
gctacctgacttcaa

SEQ ID NO: 60054 - DNA, 15 bp, Homo sapiens
tgctacctgacttca

SEQ ID NO: 60055 - DNA, 15 bp, Homo sapiens
atgctacctgacttc

SEQ ID NO: 60056 - DNA, 15 bp, Homo sapiens
catgctacctgactt

SEQ ID NO: 60057 - DNA, 15 bp, Homo sapiens
tcatgctacctgact

SEQ ID NO: 60058 - DNA, 15 bp, Homo sapiens
atcatgctacctgac

SEQ ID NO: 60059 - DNA, 15 bp, Homo sapiens
catcatgctacctga

SEQ ID NO: 60060 - DNA, 15 bp, Homo sapiens
gcatcatgctacctg

SEQ ID NO: 60061 - DNA, 15 bp, Homo sapiens
ggcatcatgctacct

SEQ ID NO: 60062 - DNA, 15 bp, Homo sapiens
aggcatcatgctacc

SEQ ID NO: 60063 - DNA, 15 bp, Homo sapiens
gaggcatcatgctac

SEQ ID NO: 60064 - DNA, 15 bp, Homo sapiens
ggaggcatcatgcta

SEQ ID NO: 60065 - DNA, 15 bp, Homo sapiens
tggaggcatcatgct

SEQ ID NO: 60066 - DNA, 15 bp, Homo sapiens
ctggaggcatcatgc

SEQ ID NO: 60067 - DNA, 15 bp, Homo sapiens
gctggaggcatcatg

SEQ ID NO: 60068 - DNA, 15 bp, Homo sapiens
agctggaggcatcat

SEQ ID NO: 60069 - DNA, 15 bp, Homo sapiens
aagctggaggcatca

SEQ ID NO: 60070 - DNA, 15 bp, Homo sapiens
aaagctggaggcatc

SEQ ID NO: 60071 - DNA, 15 bp, Homo sapiens
caaagctggaggcat

SEQ ID NO: 60072 - DNA, 15 bp, Homo sapiens
acaaagctggaggca

SEQ ID NO: 60073 - DNA, 15 bp, Homo sapiens
aacaaagctggaggc

SEQ ID NO: 60074 - DNA, 15 bp, Homo sapiens
gaacaaagctggagg

SEQ ID NO: 60075 - DNA, 15 bp, Homo sapiens
agaacaaagctggag

SEQ ID NO: 60076 - DNA, 15 bp, Homo sapiens
aagaacaaagctgga

SEQ ID NO: 60077 - DNA, 15 bp, Homo sapiens
aaagaacaaagctgg

SEQ ID NO: 60078 - DNA, 15 bp, Homo sapiens
aaaagaacaaagctg

SEQ ID NO: 60079 - DNA, 15 bp, Homo sapiens
taaaagaacaaagct

SEQ ID NO: 60080 - DNA, 15 bp, Homo sapiens
ctaaaagaacaaagc

SEQ ID NO: 60081 - DNA, 15 bp, Homo sapiens
gctaaaagaacaaag

SEQ ID NO: 60082 - DNA, 15 bp, Homo sapiens
agctaaaagaacaaa

SEQ ID NO: 60083 - DNA, 15 bp, Homo sapiens
aagctaaaagaacaa

SEQ ID NO: 60084 - DNA, 15 bp, Homo sapiens
taagctaaaagaaca

SEQ ID NO: 60085 - DNA, 15 bp, Homo sapiens
ctaagctaaaagaac

SEQ ID NO: 60086 - DNA, 15 bp, Homo sapiens
cctaagctaaaagaa

SEQ ID NO: 60087 - DNA, 15 bp, Homo sapiens
tcctaagctaaaaga

SEQ ID NO: 60088 - DNA, 15 bp, Homo sapiens
atcctaagctaaaag

SEQ ID NO: 60089 - DNA, 15 bp, Homo sapiens
aatcctaagctaaaa

SEQ ID NO: 60090 - DNA, 15 bp, Homo sapiens
caatcctaagctaaa

SEQ ID NO: 60091 - DNA, 15 bp, Homo sapiens
tcaatcctaagctaa

SEQ ID NO: 60092 - DNA, 15 bp, Homo sapiens
gtcaatcctaagcta

SEQ ID NO: 60093 - DNA, 15 bp, Homo sapiens
agtcaatcctaagct

SEQ ID NO: 60094 - DNA, 15 bp, Homo sapiens
aagtcaatcctaagc

SEQ ID NO: 60095 - DNA, 15 bp, Homo sapiens
caagtcaatcctaag

SEQ ID NO: 60096 - DNA, 15 bp, Homo sapiens
gcaagtcaatcctaa

SEQ ID NO: 60097 - DNA, 15 bp, Homo sapiens
ggcaagtcaatccta

SEQ ID NO: 60098 - DNA, 15 bp, Homo sapiens
tggcaagtcaatcct

SEQ ID NO: 60099 - DNA, 15 bp, Homo sapiens
ttggcaagtcaatcc

SEQ ID NO: 60100 - DNA, 15 bp, Homo sapiens
attggcaagtcaatc

SEQ ID NO: 60101 - DNA, 15 bp, Homo sapiens
cattggcaagtcaat

SEQ ID NO: 60102 - DNA, 15 bp, Homo sapiens
gcattggcaagtcaa

SEQ ID NO: 60103 - DNA, 15 bp, Homo sapiens
tgcattggcaagtca

SEQ ID NO: 60104 - DNA, 15 bp, Homo sapiens
ctgcattggcaagtc

SEQ ID NO: 60105 - DNA, 15 bp, Homo sapiens
cctgcattggcaagt

SEQ ID NO: 60106 - DNA, 15 bp, Homo sapiens
gcctgcattggcaag

SEQ ID NO: 60107 - DNA, 15 bp, Homo sapiens
agcctgcattggcaa

SEQ ID NO: 60108 - DNA, 15 bp, Homo sapiens
gagcctgcattggca

SEQ ID NO: 60109 - DNA, 15 bp, Homo sapiens
agagcctgcattggc

SEQ ID NO: 60110 - DNA, 15 bp, Homo sapiens
aagagcctgcattgg

SEQ ID NO: 60111 - DNA, 15 bp, Homo sapiens
aaagagcctgcattg

SEQ ID NO: 60112 - DNA, 15 bp, Homo sapiens
aaaagagcctgcatt

SEQ ID NO: 60113 - DNA, 15 bp, Homo sapiens
aaaaagagcctgcat

SEQ ID NO: 60114 - DNA, 15 bp, Homo sapiens
aaaaaagagcctgca

SEQ ID NO: 60115 - DNA, 15 bp, Homo sapiens
caaaaaagagcctgc

SEQ ID NO: 60116 - DNA, 15 bp, Homo sapiens
ccaaaaaagagcctg

SEQ ID NO: 60117 - DNA, 15 bp, Homo sapiens
accaaaaaagagcct

SEQ ID NO: 60118 - DNA, 15 bp, Homo sapiens
aaccaaaaaagagcc

SEQ ID NO: 60119 - DNA, 15 bp, Homo sapiens
gaaccaaaaaagagc

SEQ ID NO: 60120 - DNA, 15 bp, Homo sapiens
ggaaccaaaaaagag

SEQ ID NO: 60121 - DNA, 15 bp, Homo sapiens
tggaaccaaaaaaga

SEQ ID NO: 60122 - DNA, 15 bp, Homo sapiens
atggaaccaaaaaag

SEQ ID NO: 60123 - DNA, 15 bp, Homo sapiens
tatggaaccaaaaaa

SEQ ID NO: 60124 - DNA, 15 bp, Homo sapiens
atatggaaccaaaaa

SEQ ID NO: 60125 - DNA, 15 bp, Homo sapiens
aatatggaaccaaaa

SEQ ID NO: 60126 - DNA, 15 bp, Homo sapiens
taatatggaaccaaa

SEQ ID NO: 60127 - DNA, 15 bp, Homo sapiens
ttaatatggaaccaa

SEQ ID NO: 60128 - DNA, 15 bp, Homo sapiens
gttaatatggaacca

SEQ ID NO: 60129 - DNA, 15 bp, Homo sapiens
agttaatatggaacc

SEQ ID NO: 60130 - DNA, 15 bp, Homo sapiens
aagttaatatggaac

SEQ ID NO: 60131 - DNA, 15 bp, Homo sapiens
aaagttaatatggaa

SEQ ID NO: 60132 - DNA, 15 bp, Homo sapiens
taaagttaatatgga

SEQ ID NO: 60133 - DNA, 15 bp, Homo sapiens
ttaaagttaatatgg

SEQ ID NO: 60134 - DNA, 15 bp, Homo sapiens
tttaaagttaatatg

SEQ ID NO: 60135 - DNA, 15 bp, Homo sapiens
ctttaaagttaatat

SEQ ID NO: 60136 - DNA, 15 bp, Homo sapiens
actttaaagttaata

SEQ ID NO: 60137 - DNA, 15 bp, Homo sapiens
tactttaaagttaat

SEQ ID NO: 60138 - DNA, 15 bp, Homo sapiens
ctactttaaagttaa

SEQ ID NO: 60139 - DNA, 15 bp, Homo sapiens
actactttaaagtta

SEQ ID NO: 60140 - DNA, 15 bp, Homo sapiens
aactactttaaagtt

SEQ ID NO: 60141 - DNA, 15 bp, Homo sapiens
aaactactttaaagt

SEQ ID NO: 60142 - DNA, 15 bp, Homo sapiens
aaaactactttaaag

SEQ ID NO: 60143 - DNA, 15 bp, Homo sapiens
aaaaactactttaaa

SEQ ID NO: 60144 - DNA, 15 bp, Homo sapiens
aaaaaactactttaa

SEQ ID NO: 60145 - DNA, 15 bp, Homo sapiens
gaaaaaactacttta

SEQ ID NO: 60146 - DNA, 15 bp, Homo sapiens
ggaaaaaactacttt

SEQ ID NO: 60147 - DNA, 15 bp, Homo sapiens
tggaaaaaactactt

SEQ ID NO: 60148 - DNA, 15 bp, Homo sapiens
ttggaaaaaactact

SEQ ID NO: 60149 - DNA, 15 bp, Homo sapiens
attggaaaaaactac

SEQ ID NO: 60150 - DNA, 15 bp, Homo sapiens
aattggaaaaaacta

SEQ ID NO: 60151 - DNA, 15 bp, Homo sapiens
gaattggaaaaaact

SEQ ID NO: 60152 - DNA, 15 bp, Homo sapiens
agaattggaaaaaac

SEQ ID NO: 60153 - DNA, 15 bp, Homo sapiens
tagaattggaaaaaa

SEQ ID NO: 60154 - DNA, 15 bp, Homo sapiens
atagaattggaaaaa

SEQ ID NO: 60155 - DNA, 15 bp, Homo sapiens
catagaattggaaaa

SEQ ID NO: 60156 - DNA, 15 bp, Homo sapiens
tcatagaattggaaa

SEQ ID NO: 60157 - DNA, 15 bp, Homo sapiens
ttcatagaattggaa

SEQ ID NO: 60158 - DNA, 15 bp, Homo sapiens
cttcatagaattgga

SEQ ID NO: 60159 - DNA, 15 bp, Homo sapiens
tcttcatagaattgg

SEQ ID NO: 60160 - DNA, 15 bp, Homo sapiens
ttcttcatagaattg

SEQ ID NO: 60161 - DNA, 15 bp, Homo sapiens
tttcttcatagaatt

SEQ ID NO: 60162 - DNA, 15 bp, Homo sapiens
ctttcttcatagaat

SEQ ID NO: 60163 - DNA, 15 bp, Homo sapiens
actttcttcatagaa

SEQ ID NO: 60164 - DNA, 15 bp, Homo sapiens
gactttcttcataga

SEQ ID NO: 60165 - DNA, 15 bp, Homo sapiens
tgactttcttcatag

SEQ ID NO: 60166 - DNA, 15 bp, Homo sapiens
atgactttcttcata

SEQ ID NO: 60167 - DNA, 15 bp, Homo sapiens
aatgactttcttcat

SEQ ID NO: 60168 - DNA, 15 bp, Homo sapiens
caatgactttcttca

SEQ ID NO: 60169 - DNA, 15 bp, Homo sapiens
ccaatgactttcttc

SEQ ID NO: 60170 - DNA, 15 bp, Homo sapiens
accaatgactttctt

SEQ ID NO: 60171 - DNA, 15 bp, Homo sapiens
taccaatgactttct

SEQ ID NO: 60172 - DNA, 15 bp, Homo sapiens
ctaccaatgactttc

SEQ ID NO: 60173 - DNA, 15 bp, Homo sapiens
gctaccaatgacttt

SEQ ID NO: 60174 - DNA, 15 bp, Homo sapiens
agctaccaatgactt

SEQ ID NO: 60175 - DNA, 15 bp, Homo sapiens
aagctaccaatgact

SEQ ID NO: 60176 - DNA, 15 bp, Homo sapiens
caagctaccaatgac

SEQ ID NO: 60177 - DNA, 15 bp, Homo sapiens
tcaagctaccaatga

SEQ ID NO: 60178 - DNA, 15 bp, Homo sapiens
atcaagctaccaatg

SEQ ID NO: 60179 - DNA, 15 bp, Homo sapiens
catcaagctaccaat

SEQ ID NO: 60180 - DNA, 15 bp, Homo sapiens
ccatcaagctaccaa

SEQ ID NO: 60181 - DNA, 15 bp, Homo sapiens
cccatcaagctacca

SEQ ID NO: 60182 - DNA, 15 bp, Homo sapiens
ccccatcaagctacc

SEQ ID NO: 60183 - DNA, 15 bp, Homo sapiens
tccccatcaagctac

SEQ ID NO: 60184 - DNA, 15 bp, Homo sapiens
atccccatcaagcta

SEQ ID NO: 60185 - DNA, 15 bp, Homo sapiens
catccccatcaagct

SEQ ID NO: 60186 - DNA, 15 bp, Homo sapiens
ccatccccatcaagc

SEQ ID NO: 60187 - DNA, 15 bp, Homo sapiens
gccatccccatcaag

SEQ ID NO: 60188 - DNA, 15 bp, Homo sapiens
tgccatccccatcaa

SEQ ID NO: 60189 - DNA, 15 bp, Homo sapiens
atgccatccccatca

SEQ ID NO: 60190 - DNA, 15 bp, Homo sapiens
aatgccatccccatc

SEQ ID NO: 60191 - DNA, 15 bp, Homo sapiens
caatgccatccccat

SEQ ID NO: 60192 - DNA, 15 bp, Homo sapiens
tcaatgccatcccca

SEQ ID NO: 60193 - DNA, 15 bp, Homo sapiens
ttcaatgccatcccc

SEQ ID NO: 60194 - DNA, 15 bp, Homo sapiens
attcaatgccatccc

SEQ ID NO: 60195 - DNA, 15 bp, Homo sapiens
gattcaatgccatcc

SEQ ID NO: 60196 - DNA, 15 bp, Homo sapiens
agattcaatgccatc

SEQ ID NO: 60197 - DNA, 15 bp, Homo sapiens
tagattcaatgccat

SEQ ID NO: 60198 - DNA, 15 bp, Homo sapiens
atagattcaatgcca

SEQ ID NO: 60199 - DNA, 15 bp, Homo sapiens
tatagattcaatgcc

SEQ ID NO: 60200 - DNA, 15 bp, Homo sapiens
ttatagattcaatgc

SEQ ID NO: 60201 - DNA, 15 bp, Homo sapiens
tttatagattcaatg

SEQ ID NO: 60202 - DNA, 15 bp, Homo sapiens
atttatagattcaat

SEQ ID NO: 60203 - DNA, 15 bp, Homo sapiens
aatttatagattcaa

SEQ ID NO: 60204 - DNA, 15 bp, Homo sapiens
taatttatagattca

SEQ ID NO: 60205 - DNA, 15 bp, Homo sapiens
gtaatttatagattc

SEQ ID NO: 60206 - DNA, 15 bp, Homo sapiens
ggtaatttatagatt

SEQ ID NO: 60207 - DNA, 15 bp, Homo sapiens
aggtaatttatagat

SEQ ID NO: 60208 - DNA, 15 bp, Homo sapiens
aaggtaatttataga

SEQ ID NO: 60209 - DNA, 15 bp, Homo sapiens
caaggtaatttatag

SEQ ID NO: 60210 - DNA, 15 bp, Homo sapiens
ccaaggtaatttata

SEQ ID NO: 60211 - DNA, 15 bp, Homo sapiens
cccaaggtaatttat

SEQ ID NO: 60212 - DNA, 15 bp, Homo sapiens
gcccaaggtaattta

SEQ ID NO: 60213 - DNA, 15 bp, Homo sapiens
tgcccaaggtaattt

SEQ ID NO: 60214 - DNA, 15 bp, Homo sapiens
ctgcccaaggtaatt

SEQ ID NO: 60215 - DNA, 15 bp, Homo sapiens
actgcccaaggtaat

SEQ ID NO: 60216 - DNA, 15 bp, Homo sapiens
tactgcccaaggtaa

SEQ ID NO: 60217 - DNA, 15 bp, Homo sapiens
atactgcccaaggta

SEQ ID NO: 60218 - DNA, 15 bp, Homo sapiens
catactgcccaaggt

SEQ ID NO: 60219 - DNA, 15 bp, Homo sapiens
ccatactgcccaagg

SEQ ID NO: 60220 - DNA, 15 bp, Homo sapiens
gccatactgcccaag

SEQ ID NO: 60221 - DNA, 15 bp, Homo sapiens
ggccatactgcccaa

SEQ ID NO: 60222 - DNA, 15 bp, Homo sapiens
tggccatactgccca

SEQ ID NO: 60223 - DNA, 15 bp, Homo sapiens
atggccatactgccc

SEQ ID NO: 60224 - DNA, 15 bp, Homo sapiens
aatggccatactgcc

SEQ ID NO: 60225 - DNA, 15 bp, Homo sapiens
aaatggccatactgc

SEQ ID NO: 60226 - DNA, 15 bp, Homo sapiens
aaaatggccatactg

SEQ ID NO: 60227 - DNA, 15 bp, Homo sapiens
gaaaatggccatact

SEQ ID NO: 60228 - DNA, 15 bp, Homo sapiens
tgaaaatggccatac

SEQ ID NO: 60229 - DNA, 15 bp, Homo sapiens
gtgaaaatggccata

SEQ ID NO: 60230 - DNA, 15 bp, Homo sapiens
cgtgaaaatggccat

SEQ ID NO: 60231 - DNA, 15 bp, Homo sapiens
tcgtgaaaatggcca

SEQ ID NO: 60232 - DNA, 15 bp, Homo sapiens
atcgtgaaaatggcc

SEQ ID NO: 60233 - DNA, 15 bp, Homo sapiens
tatcgtgaaaatggc

SEQ ID NO: 60234 - DNA, 15 bp, Homo sapiens
atatcgtgaaaatgg

SEQ ID NO: 60235 - DNA, 15 bp, Homo sapiens
aatatcgtgaaaatg

SEQ ID NO: 60236 - DNA, 15 bp, Homo sapiens
caatatcgtgaaaat

SEQ ID NO: 60237 - DNA, 15 bp, Homo sapiens
tcaatatcgtgaaaa

SEQ ID NO: 60238 - DNA, 15 bp, Homo sapiens
atcaatatcgtgaaa

SEQ ID NO: 60239 - DNA, 15 bp, Homo sapiens
aatcaatatcgtgaa

SEQ ID NO: 60240 - DNA, 15 bp, Homo sapiens
gaatcaatatcgtga

SEQ ID NO: 60241 - DNA, 15 bp, Homo sapiens
agaatcaatatcgtg

SEQ ID NO: 60242 - DNA, 15 bp, Homo sapiens
aagaatcaatatcgt

SEQ ID NO: 60243 - DNA, 15 bp, Homo sapiens
gaagaatcaatatcg

SEQ ID NO: 60244 - DNA, 15 bp, Homo sapiens
ggaagaatcaatatc

SEQ ID NO: 60245 - DNA, 15 bp, Homo sapiens
aggaagaatcaatat

SEQ ID NO: 60246 - DNA, 15 bp, Homo sapiens
taggaagaatcaata

SEQ ID NO: 60247 - DNA, 15 bp, Homo sapiens
ataggaagaatcaat

SEQ ID NO: 60248 - DNA, 15 bp, Homo sapiens
gataggaagaatcaa

SEQ ID NO: 60249 - DNA, 15 bp, Homo sapiens
ggataggaagaatca

SEQ ID NO: 60250 - DNA, 15 bp, Homo sapiens
tggataggaagaatc

SEQ ID NO: 60251 - DNA, 15 bp, Homo sapiens
atggataggaagaat

SEQ ID NO: 60252 - DNA, 15 bp, Homo sapiens
catggataggaagaa

SEQ ID NO: 60253 - DNA, 15 bp, Homo sapiens
tcatggataggaaga

SEQ ID NO: 60254 - DNA, 15 bp, Homo sapiens
ctcatggataggaag

SEQ ID NO: 60255 - DNA, 15 bp, Homo sapiens
gctcatggataggaa

SEQ ID NO: 60256 - DNA, 15 bp, Homo sapiens
tgctcatggatagga

SEQ ID NO: 60257 - DNA, 15 bp, Homo sapiens
atgctcatggatagg

SEQ ID NO: 60258 - DNA, 15 bp, Homo sapiens
catgctcatggatag

SEQ ID NO: 60259 - DNA, 15 bp, Homo sapiens
ccatgctcatggata

SEQ ID NO: 60260 - DNA, 15 bp, Homo sapiens
tccatgctcatggat

SEQ ID NO: 60261 - DNA, 15 bp, Homo sapiens
ttccatgctcatgga

SEQ ID NO: 60262 - DNA, 15 bp, Homo sapiens
attccatgctcatgg

SEQ ID NO: 60263 - DNA, 15 bp, Homo sapiens
cattccatgctcatg

SEQ ID NO: 60264 - DNA, 15 bp, Homo sapiens
acattccatgctcat

SEQ ID NO: 60265 - DNA, 15 bp, Homo sapiens
aacattccatgctca

SEQ ID NO: 60266 - DNA, 15 bp, Homo sapiens
gaacattccatgctc

SEQ ID NO: 60267 - DNA, 15 bp, Homo sapiens
agaacattccatgct

SEQ ID NO: 60268 - DNA, 15 bp, Homo sapiens
aagaacattccatgc

SEQ ID NO: 60269 - DNA, 15 bp, Homo sapiens
gaagaacattccatg

SEQ ID NO: 60270 - DNA, 15 bp, Homo sapiens
ggaagaacattccat

SEQ ID NO: 60271 - DNA, 15 bp, Homo sapiens
tggaagaacattcca

SEQ ID NO: 60272 - DNA, 15 bp, Homo sapiens
atggaagaacattcc

SEQ ID NO: 60273 - DNA, 15 bp, Homo sapiens
aatggaagaacattc

SEQ ID NO: 60274 - DNA, 15 bp, Homo sapiens
aaatggaagaacatt

SEQ ID NO: 60275 - DNA, 15 bp, Homo sapiens
caaatggaagaacat

SEQ ID NO: 60276 - DNA, 15 bp, Homo sapiens
acaaatggaagaaca

SEQ ID NO: 60277 - DNA, 15 bp, Homo sapiens
aacaaatggaagaac

SEQ ID NO: 60278 - DNA, 15 bp, Homo sapiens
aaacaaatggaagaa

SEQ ID NO: 60279 - DNA, 15 bp, Homo sapiens
caaacaaatggaaga

SEQ ID NO: 60280 - DNA, 15 bp, Homo sapiens
acaaacaaatggaag

SEQ ID NO: 60281 - DNA, 15 bp, Homo sapiens
cacaaacaaatggaa

SEQ ID NO: 60282 - DNA, 15 bp, Homo sapiens
acacaaacaaatgga

SEQ ID NO: 60283 - DNA, 15 bp, Homo sapiens
gacacaaacaaatgg

SEQ ID NO: 60284 - DNA, 15 bp, Homo sapiens
ggacacaaacaaatg

SEQ ID NO: 60285 - DNA, 15 bp, Homo sapiens
aaagtcaagagccaa

SEQ ID NO: 60286 - DNA, 15 bp, Homo sapiens
taaagtcaagagcca

SEQ ID NO: 60287 - DNA, 15 bp, Homo sapiens
gtaaagtcaagagcc

SEQ ID NO: 60288 - DNA, 15 bp, Homo sapiens
ggtaaagtcaagagc

SEQ ID NO: 60289 - DNA, 15 bp, Homo sapiens
aggtaaagtcaagag

SEQ ID NO: 60290 - DNA, 15 bp, Homo sapiens
caggtaaagtcaaga

SEQ ID NO: 60291 - DNA, 15 bp, Homo sapiens
gcaggtaaagtcaag

SEQ ID NO: 60292 - DNA, 15 bp, Homo sapiens
agcaggtaaagtcaa

SEQ ID NO: 60293 - DNA, 15 bp, Homo sapiens
gagcaggtaaagtca

SEQ ID NO: 60294 - DNA, 15 bp, Homo sapiens
ggagcaggtaaagtc

SEQ ID NO: 60295 - DNA, 15 bp, Homo sapiens
gggagcaggtaaagt

SEQ ID NO: 60296 - DNA, 15 bp, Homo sapiens
tgggagcaggtaaag

SEQ ID NO: 60297 - DNA, 15 bp, Homo sapiens
atgggagcaggtaaa

SEQ ID NO: 60298 - DNA, 15 bp, Homo sapiens
aatgggagcaggtaa

SEQ ID NO: 60299 - DNA, 15 bp, Homo sapiens
caatgggagcaggta

SEQ ID NO: 60300 - DNA, 15 bp, Homo sapiens
acaatgggagcaggt

SEQ ID NO: 60301 - DNA, 15 bp, Homo sapiens
aacaatgggagcagg

SEQ ID NO: 60302 - DNA, 15 bp, Homo sapiens
aaacaatgggagcag

SEQ ID NO: 60303 - DNA, 15 bp, Homo sapiens
aaaacaatgggagca

SEQ ID NO: 60304 - DNA, 15 bp, Homo sapiens
taaaacaatgggagc

SEQ ID NO: 60305 - DNA, 15 bp, Homo sapiens
ataaaacaatgggag

SEQ ID NO: 60306 - DNA, 15 bp, Homo sapiens
gataaaacaatggga

SEQ ID NO: 60307 - DNA, 15 bp, Homo sapiens
ggataaaacaatggg

SEQ ID NO: 60308 - DNA, 15 bp, Homo sapiens
tggataaaacaatgg

SEQ ID NO: 60309 - DNA, 15 bp, Homo sapiens
ttggataaaacaatg

SEQ ID NO: 60310 - DNA, 15 bp, Homo sapiens
cttggataaaacaat

SEQ ID NO: 60311 - DNA, 15 bp, Homo sapiens
gcttggataaaacaa

SEQ ID NO: 60312 - DNA, 15 bp, Homo sapiens
agcttggataaaaca

SEQ ID NO: 60313 - DNA, 15 bp, Homo sapiens
gagcttggataaaac

SEQ ID NO: 60314 - DNA, 15 bp, Homo sapiens
agagcttggataaaa

SEQ ID NO: 60315 - DNA, 15 bp, Homo sapiens
cagagcttggataaa

SEQ ID NO: 60316 - DNA, 15 bp, Homo sapiens
gcagagcttggataa

SEQ ID NO: 60317 - DNA, 15 bp, Homo sapiens
ggcagagcttggata

SEQ ID NO: 60318 - DNA, 15 bp, Homo sapiens
aggcagagcttggat

SEQ ID NO: 60319 - DNA, 15 bp, Homo sapiens
caggcagagcttgga

SEQ ID NO: 60320 - DNA, 15 bp, Homo sapiens
ccaggcagagcttgg

SEQ ID NO: 60321 - DNA, 15 bp, Homo sapiens
accaggcagagcttg

SEQ ID NO: 60322 - DNA, 15 bp, Homo sapiens
aaccaggcagagctt

SEQ ID NO: 60323 - DNA, 15 bp, Homo sapiens
aaaccaggcagagct

SEQ ID NO: 60324 - DNA, 15 bp, Homo sapiens
gaaaccaggcagagc

SEQ ID NO: 60325 - DNA, 15 bp, Homo sapiens
agaaaccaggcagag

SEQ ID NO: 60326 - DNA, 15 bp, Homo sapiens
cagaaaccaggcaga

SEQ ID NO: 60327 - DNA, 15 bp, Homo sapiens
tcagaaaccaggcag

SEQ ID NO: 60328 - DNA, 15 bp, Homo sapiens
gtcagaaaccaggca

SEQ ID NO: 60329 - DNA, 15 bp, Homo sapiens
ggtcagaaaccaggc

SEQ ID NO: 60330 - DNA, 15 bp, Homo sapiens
gggtcagaaaccagg

SEQ ID NO: 60331 - DNA, 15 bp, Homo sapiens
agggtcagaaaccag

SEQ ID NO: 60332 - DNA, 15 bp, Homo sapiens
aagggtcagaaacca

SEQ ID NO: 60333 - DNA, 15 bp, Homo sapiens
aaagggtcagaaacc

SEQ ID NO: 60334 - DNA, 15 bp, Homo sapiens
caaagggtcagaaac

SEQ ID NO: 60335 - DNA, 15 bp, Homo sapiens
acaaagggtcagaaa

SEQ ID NO: 60336 - DNA, 15 bp, Homo sapiens
gacaaagggtcagaa

SEQ ID NO: 60337 - DNA, 15 bp, Homo sapiens
agacaaagggtcaga

SEQ ID NO: 60338 - DNA, 15 bp, Homo sapiens
gagacaaagggtcag

SEQ ID NO: 60339 - DNA, 15 bp, Homo sapiens
agagacaaagggtca

SEQ ID NO: 60340 - DNA, 15 bp, Homo sapiens
aagagacaaagggtc

SEQ ID NO: 60341 - DNA, 15 bp, Homo sapiens
aaagagacaaagggt

SEQ ID NO: 60342 - DNA, 15 bp, Homo sapiens
gaaagagacaaaggg

SEQ ID NO: 60343 - DNA, 15 bp, Homo sapiens
cgaaagagacaaagg

SEQ ID NO: 60344 - DNA, 15 bp, Homo sapiens
ccgaaagagacaaag

SEQ ID NO: 60345 - DNA, 15 bp, Homo sapiens
accgaaagagacaaa

SEQ ID NO: 60346 - DNA, 15 bp, Homo sapiens
aaccgaaagagacaa

SEQ ID NO: 60347 - DNA, 15 bp, Homo sapiens
gaaccgaaagagaca

SEQ ID NO: 60348 - DNA, 15 bp, Homo sapiens
agaaccgaaagagac

SEQ ID NO: 60349 - DNA, 15 bp, Homo sapiens
gagaaccgaaagaga

SEQ ID NO: 60350 - DNA, 15 bp, Homo sapiens
agagaaccgaaagag

SEQ ID NO: 60351 - DNA, 15 bp, Homo sapiens
aagagaaccgaaaga

SEQ ID NO: 60352 - DNA, 15 bp, Homo sapiens
caagagaaccgaaag

SEQ ID NO: 60353 - DNA, 15 bp, Homo sapiens
gcaagagaaccgaaa

SEQ ID NO: 60354 - DNA, 15 bp, Homo sapiens
agcaagagaaccgaa

SEQ ID NO: 60355 - DNA, 15 bp, Homo sapiens
aagcaagagaaccga

SEQ ID NO: 60356 - DNA, 15 bp, Homo sapiens
caagcaagagaaccg

SEQ ID NO: 60357 - DNA, 15 bp, Homo sapiens
gcaagcaagagaacc

SEQ ID NO: 60358 - DNA, 15 bp, Homo sapiens
ggcaagcaagagaac

SEQ ID NO: 60359 - DNA, 15 bp, Homo sapiens
gggcaagcaagagaa

SEQ ID NO: 60360 - DNA, 15 bp, Homo sapiens
agggcaagcaagaga

SEQ ID NO: 60361 - DNA, 15 bp, Homo sapiens
cagggcaagcaagag

SEQ ID NO: 60362 - DNA, 15 bp, Homo sapiens
acagggcaagcaaga

SEQ ID NO: 60363 - DNA, 15 bp, Homo sapiens
cacagggcaagcaag

SEQ ID NO: 60364 - DNA, 15 bp, Homo sapiens
acacagggcaagcaa

SEQ ID NO: 60365 - DNA, 15 bp, Homo sapiens
cacacagggcaagca

SEQ ID NO: 60366 - DNA, 15 bp, Homo sapiens
acacacagggcaagc

SEQ ID NO: 60367 - DNA, 15 bp, Homo sapiens
aacacacagggcaag

SEQ ID NO: 60368 - DNA, 15 bp, Homo sapiens
aaacacacagggcaa

SEQ ID NO: 60369 - DNA, 15 bp, Homo sapiens
caaacacacagggca

SEQ ID NO: 60370 - DNA, 15 bp, Homo sapiens
tcaaacacacagggc

SEQ ID NO: 60371 - DNA, 15 bp, Homo sapiens
atcaaacacacaggg

SEQ ID NO: 60372 - DNA, 15 bp, Homo sapiens
catcaaacacacagg

SEQ ID NO: 60373 - DNA, 15 bp, Homo sapiens
tcatcaaacacacag

SEQ ID NO: 60374 - DNA, 15 bp, Homo sapiens
atcatcaaacacaca

SEQ ID NO: 60375 - DNA, 15 bp, Homo sapiens
catcatcaaacacac

SEQ ID NO: 60376 - DNA, 15 bp, Homo sapiens
ccatcatcaaacaca

SEQ ID NO: 60377 - DNA, 15 bp, Homo sapiens
tccatcatcaaacac

SEQ ID NO: 60378 - DNA, 15 bp, Homo sapiens
ctccatcatcaaaca

SEQ ID NO: 60379 - DNA, 15 bp, Homo sapiens
actccatcatcaaac

SEQ ID NO: 60380 - DNA, 15 bp, Homo sapiens
aactccatcatcaaa

SEQ ID NO: 60381 - DNA, 15 bp, Homo sapiens
aaactccatcatcaa

SEQ ID NO: 60382 - DNA, 15 bp, Homo sapiens
caaactccatcatca

SEQ ID NO: 60383 - DNA, 15 bp, Homo sapiens
acaaactccatcatc

SEQ ID NO: 60384 - DNA, 15 bp, Homo sapiens
gacaaactccatcat

SEQ ID NO: 60385 - DNA, 15 bp, Homo sapiens
ggacaaactccatca

SEQ ID NO: 60386 - DNA, 15 bp, Homo sapiens
gggacaaactccatc

SEQ ID NO: 60387 - DNA, 15 bp, Homo sapiens
agggacaaactccat

SEQ ID NO: 60388 - DNA, 15 bp, Homo sapiens
cagggacaaactcca

SEQ ID NO: 60389 - DNA, 15 bp, Homo sapiens
acagggacaaactcc

SEQ ID NO: 60390 - DNA, 15 bp, Homo sapiens
gacagggacaaactc

SEQ ID NO: 60391 - DNA, 15 bp, Homo sapiens
ggacagggacaaact

SEQ ID NO: 60392 - DNA, 15 bp, Homo sapiens
gggacagggacaaac

SEQ ID NO: 60393 - DNA, 15 bp, Homo sapiens
agggacagggacaaa

SEQ ID NO: 60394 - DNA, 15 bp, Homo sapiens
cagggacagggacaa

SEQ ID NO: 60395 - DNA, 15 bp, Homo sapiens
tcagggacagggaca

SEQ ID NO: 60396 - DNA, 15 bp, Homo sapiens
ttcagggacagggac

SEQ ID NO: 60397 - DNA, 15 bp, Homo sapiens
tttcagggacaggga

SEQ ID NO: 60398 - DNA, 15 bp, Homo sapiens
gtttcagggacaggg

SEQ ID NO: 60399 - DNA, 15 bp, Homo sapiens
ggtttcagggacagg

SEQ ID NO: 60400 - DNA, 15 bp, Homo sapiens
aggtttcagggacag

SEQ ID NO: 60401 - DNA, 15 bp, Homo sapiens
aaggtttcagggaca

SEQ ID NO: 60402 - DNA, 15 bp, Homo sapiens
caaggtttcagggac

SEQ ID NO: 60403 - DNA, 15 bp, Homo sapiens
gcaaggtttcaggga

SEQ ID NO: 60404 - DNA, 15 bp, Homo sapiens
ggcaaggtttcaggg

SEQ ID NO: 60405 - DNA, 15 bp, Homo sapiens
aggcaaggtttcagg

SEQ ID NO: 60406 - DNA, 15 bp, Homo sapiens
caggcaaggtttcag

SEQ ID NO: 60407 - DNA, 15 bp, Homo sapiens
tcaggcaaggtttca

SEQ ID NO: 60408 - DNA, 15 bp, Homo sapiens
ttcaggcaaggtttc

SEQ ID NO: 60409 - DNA, 15 bp, Homo sapiens
gttcaggcaaggttt

SEQ ID NO: 60410 - DNA, 15 bp, Homo sapiens
agttcaggcaaggtt

SEQ ID NO: 60411 - DNA, 15 bp, Homo sapiens
gagttcaggcaaggt

SEQ ID NO: 60412 - DNA, 15 bp, Homo sapiens
ggagttcaggcaagg

SEQ ID NO: 60413 - DNA, 15 bp, Homo sapiens
aggagttcaggcaag

SEQ ID NO: 60414 - DNA, 15 bp, Homo sapiens
caggagttcaggcaa

SEQ ID NO: 60415 - DNA, 15 bp, Homo sapiens
ccaggagttcaggca

SEQ ID NO: 60416 - DNA, 15 bp, Homo sapiens
tccaggagttcaggc

SEQ ID NO: 60417 - DNA, 15 bp, Homo sapiens
ttccaggagttcagg

SEQ ID NO: 60418 - DNA, 15 bp, Homo sapiens
tttccaggagttcag

SEQ ID NO: 60419 - DNA, 15 bp, Homo sapiens
atttccaggagttca

SEQ ID NO: 60420 - DNA, 15 bp, Homo sapiens
gatttccaggagttc

SEQ ID NO: 60421 - DNA, 15 bp, Homo sapiens
agatttccaggagtt

SEQ ID NO: 60422 - DNA, 15 bp, Homo sapiens
aagatttccaggagt

SEQ ID NO: 60423 - DNA, 15 bp, Homo sapiens
aaagatttccaggag

SEQ ID NO: 60424 - DNA, 15 bp, Homo sapiens
caaagatttccagga

SEQ ID NO: 60425 - DNA, 15 bp, Homo sapiens
tcaaagatttccagg

SEQ ID NO: 60426 - DNA, 15 bp, Homo sapiens
ctcaaagatttccag

SEQ ID NO: 60427 - DNA, 15 bp, Homo sapiens
tctcaaagatttcca

SEQ ID NO: 60428 - DNA, 15 bp, Homo sapiens
ttctcaaagatttcc

SEQ ID NO: 60429 - DNA, 15 bp, Homo sapiens
attctcaaagatttc

SEQ ID NO: 60430 - DNA, 15 bp, Homo sapiens
cattctcaaagattt

SEQ ID NO: 60431 - DNA, 15 bp, Homo sapiens
ccattctcaaagatt

SEQ ID NO: 60432 - DNA, 15 bp, Homo sapiens
accattctcaaagat

SEQ ID NO: 60433 - DNA, 15 bp, Homo sapiens
caccattctcaaaga

SEQ ID NO: 60434 - DNA, 15 bp, Homo sapiens
acaccattctcaaag

SEQ ID NO: 60435 - DNA, 15 bp, Homo sapiens
tacaccattctcaaa

SEQ ID NO: 60436 - DNA, 15 bp, Homo sapiens
gtacaccattctcaa

SEQ ID NO: 60437 - DNA, 15 bp, Homo sapiens
tgtacaccattctca

SEQ ID NO: 60438 - DNA, 15 bp, Homo sapiens
gtgtacaccattctc

SEQ ID NO: 60439 - DNA, 15 bp, Homo sapiens
tgtgtacaccattct

SEQ ID NO: 60440 - DNA, 15 bp, Homo sapiens
gtgtgtacaccattc

SEQ ID NO: 60441 - DNA, 15 bp, Homo sapiens
tgtgtgtacaccatt

SEQ ID NO: 60442 - DNA, 15 bp, Homo sapiens
atgtgtgtacaccat

SEQ ID NO: 60443 - DNA, 15 bp, Homo sapiens
tatgtgtgtacacca

SEQ ID NO: 60444 - DNA, 15 bp, Homo sapiens
atatgtgtgtacacc

SEQ ID NO: 60445 - DNA, 15 bp, Homo sapiens
gatatgtgtgtacac

SEQ ID NO: 60446 - DNA, 15 bp, Homo sapiens
ggatatgtgtgtaca

SEQ ID NO: 60447 - DNA, 15 bp, Homo sapiens
tggatatgtgtgtac

SEQ ID NO: 60448 - DNA, 15 bp, Homo sapiens
gtggatatgtgtgta

SEQ ID NO: 60449 - DNA, 15 bp, Homo sapiens
agtggatatgtgtgt

SEQ ID NO: 60450 - DNA, 15 bp, Homo sapiens
aagtggatatgtgtg

SEQ ID NO: 60451 - DNA, 15 bp, Homo sapiens
aaagtggatatgtgt

SEQ ID NO: 60452 - DNA, 15 bp, Homo sapiens
gaaagtggatatgtg

SEQ ID NO: 60453 - DNA, 15 bp, Homo sapiens
ggaaagtggatatgt

SEQ ID NO: 60454 - DNA, 15 bp, Homo sapiens
tggaaagtggatatg

SEQ ID NO: 60455 - DNA, 15 bp, Homo sapiens
gtggaaagtggatat

SEQ ID NO: 60456 - DNA, 15 bp, Homo sapiens
ggtggaaagtggata

SEQ ID NO: 60457 - DNA, 15 bp, Homo sapiens
tggtggaaagtggat

SEQ ID NO: 60458 - DNA, 15 bp, Homo sapiens
atggtggaaagtgga

SEQ ID NO: 60459 - DNA, 15 bp, Homo sapiens
catggtggaaagtgg

SEQ ID NO: 60460 - DNA, 15 bp, Homo sapiens
acatggtggaaagtg

SEQ ID NO: 60461 - DNA, 15 bp, Homo sapiens
cacatggtggaaagt

SEQ ID NO: 60462 - DNA, 15 bp, Homo sapiens
gcacatggtggaaag

SEQ ID NO: 60463 - DNA, 15 bp, Homo sapiens
ggcacatggtggaaa

SEQ ID NO: 60464 - DNA, 15 bp, Homo sapiens
aggcacatggtggaa

SEQ ID NO: 60465 - DNA, 15 bp, Homo sapiens
gaggcacatggtgga

SEQ ID NO: 60466 - DNA, 15 bp, Homo sapiens
agaggcacatggtgg

SEQ ID NO: 60467 - DNA, 15 bp, Homo sapiens
tagaggcacatggtg

SEQ ID NO: 60468 - DNA, 15 bp, Homo sapiens
ttagaggcacatggt

SEQ ID NO: 60469 - DNA, 15 bp, Homo sapiens
gttagaggcacatgg

SEQ ID NO: 60470 - DNA, 15 bp, Homo sapiens
ggttagaggcacatg

SEQ ID NO: 60471 - DNA, 15 bp, Homo sapiens
aggttagaggcacat

SEQ ID NO: 60472 - DNA, 15 bp, Homo sapiens
gaggttagaggcaca

SEQ ID NO: 60473 - DNA, 15 bp, Homo sapiens
tgaggttagaggcac

SEQ ID NO: 60474 - DNA, 15 bp, Homo sapiens
ctgaggttagaggca

SEQ ID NO: 60475 - DNA, 15 bp, Homo sapiens
gctgaggttagaggc

SEQ ID NO: 60476 - DNA, 15 bp, Homo sapiens
ggctgaggttagagg

SEQ ID NO: 60477 - DNA, 15 bp, Homo sapiens
aggctgaggttagag

SEQ ID NO: 60478 - DNA, 15 bp, Homo sapiens
gaggctgaggttaga

SEQ ID NO: 60479 - DNA, 15 bp, Homo sapiens
tgaggctgaggttag

SEQ ID NO: 60480 - DNA, 15 bp, Homo sapiens
gtgaggctgaggtta

SEQ ID NO: 60481 - DNA, 15 bp, Homo sapiens
ggtgaggctgaggtt

SEQ ID NO: 60482 - DNA, 15 bp, Homo sapiens
gggtgaggctgaggt

SEQ ID NO: 60483 - DNA, 15 bp, Homo sapiens
cgggtgaggctgagg

SEQ ID NO: 60484 - DNA, 15 bp, Homo sapiens
ccgggtgaggctgag

SEQ ID NO: 60485 - DNA, 15 bp, Homo sapiens
cccgggtgaggctga

SEQ ID NO: 60486 - DNA, 15 bp, Homo sapiens
acccgggtgaggctg

SEQ ID NO: 60487 - DNA, 15 bp, Homo sapiens
aacccgggtgaggct

SEQ ID NO: 60488 - DNA, 15 bp, Homo sapiens
taacccgggtgaggc

SEQ ID NO: 60489 - DNA, 15 bp, Homo sapiens
ataacccgggtgagg

SEQ ID NO: 60490 - DNA, 15 bp, Homo sapiens
aataacccgggtgag

SEQ ID NO: 60491 - DNA, 15 bp, Homo sapiens
caataacccgggtga

SEQ ID NO: 60492 - DNA, 15 bp, Homo sapiens
tcaataacccgggtg

SEQ ID NO: 60493 - DNA, 15 bp, Homo sapiens
gtcaataacccgggt

SEQ ID NO: 60494 - DNA, 15 bp, Homo sapiens
ggtcaataacccggg

SEQ ID NO: 60495 - DNA, 15 bp, Homo sapiens
gggtcaataacccgg

SEQ ID NO: 60496 - DNA, 15 bp, Homo sapiens
tgggtcaataacccg

SEQ ID NO: 60497 - DNA, 15 bp, Homo sapiens
ctgggtcaataaccc

SEQ ID NO: 60498 - DNA, 15 bp, Homo sapiens
actgggtcaataacc

SEQ ID NO: 60499 - DNA, 15 bp, Homo sapiens
gactgggtcaataac

SEQ ID NO: 60500 - DNA, 15 bp, Homo sapiens
agactgggtcaataa

SEQ ID NO: 60501 - DNA, 15 bp, Homo sapiens
cagactgggtcaata

SEQ ID NO: 60502 - DNA, 15 bp, Homo sapiens
tcagactgggtcaat

SEQ ID NO: 60503 - DNA, 15 bp, Homo sapiens
gtcagactgggtcaa

SEQ ID NO: 60504 - DNA, 15 bp, Homo sapiens
ggtcagactgggtca

SEQ ID NO: 60505 - DNA, 15 bp, Homo sapiens
aggtcagactgggtc

SEQ ID NO: 60506 - DNA, 15 bp, Homo sapiens
taggtcagactgggt

SEQ ID NO: 60507 - DNA, 15 bp, Homo sapiens
ctaggtcagactggg

SEQ ID NO: 60508 - DNA, 15 bp, Homo sapiens
gctaggtcagactgg

SEQ ID NO: 60509 - DNA, 15 bp, Homo sapiens
agctaggtcagactg

SEQ ID NO: 60510 - DNA, 15 bp, Homo sapiens
aagctaggtcagact

SEQ ID NO: 60511 - DNA, 15 bp, Homo sapiens
gaagctaggtcagac

SEQ ID NO: 60512 - DNA, 15 bp, Homo sapiens
tgaagctaggtcaga

SEQ ID NO: 60513 - DNA, 15 bp, Homo sapiens
ctgaagctaggtcag

SEQ ID NO: 60514 - DNA, 15 bp, Homo sapiens
gctgaagctaggtca

SEQ ID NO: 60515 - DNA, 15 bp, Homo sapiens
ggctgaagctaggtc

SEQ ID NO: 60516 - DNA, 15 bp, Homo sapiens
gggctgaagctaggt

SEQ ID NO: 60517 - DNA, 15 bp, Homo sapiens
agggctgaagctagg

SEQ ID NO: 60518 - DNA, 15 bp, Homo sapiens
gagggctgaagctag

SEQ ID NO: 60519 - DNA, 15 bp, Homo sapiens
tgagggctgaagcta

SEQ ID NO: 60520 - DNA, 15 bp, Homo sapiens
ttgagggctgaagct

SEQ ID NO: 60521 - DNA, 15 bp, Homo sapiens
tttgagggctgaagc

SEQ ID NO: 60522 - DNA, 15 bp, Homo sapiens
ctttgagggctgaag

SEQ ID NO: 60523 - DNA, 15 bp, Homo sapiens
cctttgagggctgaa

SEQ ID NO: 60524 - DNA, 15 bp, Homo sapiens
gcctttgagggctga

SEQ ID NO: 60525 - DNA, 15 bp, Homo sapiens
agcctttgagggctg

SEQ ID NO: 60526 - DNA, 15 bp, Homo sapiens
gagcctttgagggct

SEQ ID NO: 60527 - DNA, 15 bp, Homo sapiens
ggagcctttgagggc

SEQ ID NO: 60528 - DNA, 15 bp, Homo sapiens
tggagcctttgaggg

SEQ ID NO: 60529 - DNA, 15 bp, Homo sapiens
gtggagcctttgagg

SEQ ID NO: 60530 - DNA, 15 bp, Homo sapiens
agtggagcctttgag

SEQ ID NO: 60531 - DNA, 15 bp, Homo sapiens
cagtggagcctttga

SEQ ID NO: 60532 - DNA, 15 bp, Homo sapiens
acagtggagcctttg

SEQ ID NO: 60533 - DNA, 15 bp, Homo sapiens
cacagtggagccttt

SEQ ID NO: 60534 - DNA, 15 bp, Homo sapiens
gcacagtggagcctt

SEQ ID NO: 60535 - DNA, 15 bp, Homo sapiens
ggcacagtggagcct

SEQ ID NO: 60536 - DNA, 15 bp, Homo sapiens
tggcacagtggagcc

SEQ ID NO: 60537 - DNA, 15 bp, Homo sapiens
ttggcacagtggagc

SEQ ID NO: 60538 - DNA, 15 bp, Homo sapiens
cttggcacagtggag

SEQ ID NO: 60539 - DNA, 15 bp, Homo sapiens
gcttggcacagtgga

SEQ ID NO: 60540 - DNA, 15 bp, Homo sapiens
ggcttggcacagtgg

SEQ ID NO: 60541 - DNA, 15 bp, Homo sapiens
aggcttggcacagtg

SEQ ID NO: 60542 - DNA, 15 bp, Homo sapiens
caggcttggcacagt

SEQ ID NO: 60543 - DNA, 15 bp, Homo sapiens
ccaggcttggcacag

SEQ ID NO: 60544 - DNA, 15 bp, Homo sapiens
gccaggcttggcaca

SEQ ID NO: 60545 - DNA, 15 bp, Homo sapiens
agccaggcttggcac

SEQ ID NO: 60546 - DNA, 15 bp, Homo sapiens
gagccaggcttggca

SEQ ID NO: 60547 - DNA, 15 bp, Homo sapiens
tgagccaggcttggc

SEQ ID NO: 60548 - DNA, 15 bp, Homo sapiens
atgagccaggcttgg

SEQ ID NO: 60549 - DNA, 15 bp, Homo sapiens
gatgagccaggcttg

SEQ ID NO: 60550 - DNA, 15 bp, Homo sapiens
tgatgagccaggctt

SEQ ID NO: 60551 - DNA, 15 bp, Homo sapiens
gtgatgagccaggct

SEQ ID NO: 60552 - DNA, 15 bp, Homo sapiens
ggtgatgagccaggc

SEQ ID NO: 60553 - DNA, 15 bp, Homo sapiens
gggtgatgagccagg

SEQ ID NO: 60554 - DNA, 15 bp, Homo sapiens
agggtgatgagccag

SEQ ID NO: 60555 - DNA, 15 bp, Homo sapiens
gagggtgatgagcca

SEQ ID NO: 60556 - DNA, 15 bp, Homo sapiens
agagggtgatgagcc

SEQ ID NO: 60557 - DNA, 15 bp, Homo sapiens
gagagggtgatgagc

SEQ ID NO: 60558 - DNA, 15 bp, Homo sapiens
agagagggtgatgag

SEQ ID NO: 60559 - DNA, 15 bp, Homo sapiens
gagagagggtgatga

SEQ ID NO: 60560 - DNA, 15 bp, Homo sapiens
ggagagagggtgatg

SEQ ID NO: 60561 - DNA, 15 bp, Homo sapiens
gggagagagggtgat

SEQ ID NO: 60562 - DNA, 15 bp, Homo sapiens
tgggagagagggtga

SEQ ID NO: 60563 - DNA, 15 bp, Homo sapiens
ttgggagagagggtg

SEQ ID NO: 60564 - DNA, 15 bp, Homo sapiens
attgggagagagggt

SEQ ID NO: 60565 - DNA, 15 bp, Homo sapiens
tattgggagagaggg

SEQ ID NO: 60566 - DNA, 15 bp, Homo sapiens
ttattgggagagagg

SEQ ID NO: 60567 - DNA, 15 bp, Homo sapiens
gttattgggagagag

SEQ ID NO: 60568 - DNA, 15 bp, Homo sapiens
agttattgggagaga

SEQ ID NO: 60569 - DNA, 15 bp, Homo sapiens
cagttattgggagag

SEQ ID NO: 60570 - DNA, 15 bp, Homo sapiens
acagttattgggaga

SEQ ID NO: 60571 - DNA, 15 bp, Homo sapiens
aacagttattgggag

SEQ ID NO: 60572 - DNA, 15 bp, Homo sapiens
gaacagttattggga

SEQ ID NO: 60573 - DNA, 15 bp, Homo sapiens
agaacagttattggg

SEQ ID NO: 60574 - DNA, 15 bp, Homo sapiens
aagaacagttattgg

SEQ ID NO: 60575 - DNA, 15 bp, Homo sapiens
aaagaacagttattg

SEQ ID NO: 60576 - DNA, 15 bp, Homo sapiens
caaagaacagttatt

SEQ ID NO: 60577 - DNA, 15 bp, Homo sapiens
acaaagaacagttat

SEQ ID NO: 60578 - DNA, 15 bp, Homo sapiens
gacaaagaacagtta

SEQ ID NO: 60579 - DNA, 15 bp, Homo sapiens
ggacaaagaacagtt

SEQ ID NO: 60580 - DNA, 15 bp, Homo sapiens
gggacaaagaacagt

SEQ ID NO: 60581 - DNA, 15 bp, Homo sapiens
ggggacaaagaacag

SEQ ID NO: 60582 - DNA, 15 bp, Homo sapiens
tggggacaaagaaca

SEQ ID NO: 60583 - DNA, 15 bp, Homo sapiens
ttggggacaaagaac

SEQ ID NO: 60584 - DNA, 15 bp, Homo sapiens
tttggggacaaagaa

SEQ ID NO: 60585 - DNA, 15 bp, Homo sapiens
ttttggggacaaaga

SEQ ID NO: 60586 - DNA, 15 bp, Homo sapiens
cttttggggacaaag

SEQ ID NO: 60587 - DNA, 15 bp, Homo sapiens
ccttttggggacaaa

SEQ ID NO: 60588 - DNA, 15 bp, Homo sapiens
cccttttggggacaa

SEQ ID NO: 60589 - DNA, 15 bp, Homo sapiens
ccccttttggggaca

SEQ ID NO: 60590 - DNA, 15 bp, Homo sapiens
gccccttttggggac

SEQ ID NO: 60591 - DNA, 15 bp, Homo sapiens
agccccttttgggga

SEQ ID NO: 60592 - DNA, 15 bp, Homo sapiens
cagccccttttgggg

SEQ ID NO: 60593 - DNA, 15 bp, Homo sapiens
tcagccccttttggg

SEQ ID NO: 60594 - DNA, 15 bp, Homo sapiens
ctcagccccttttgg

SEQ ID NO: 60595 - DNA, 15 bp, Homo sapiens
cctcagccccttttg

SEQ ID NO: 60596 - DNA, 15 bp, Homo sapiens
acctcagcccctttt

SEQ ID NO: 60597 - DNA, 15 bp, Homo sapiens
cacctcagccccttt

SEQ ID NO: 60598 - DNA, 15 bp, Homo sapiens
ccacctcagcccctt

SEQ ID NO: 60599 - DNA, 15 bp, Homo sapiens
cccacctcagcccct

SEQ ID NO: 60600 - DNA, 15 bp, Homo sapiens
ccccacctcagcccc

SEQ ID NO: 60601 - DNA, 15 bp, Homo sapiens
cccccacctcagccc

SEQ ID NO: 60602 - DNA, 15 bp, Homo sapiens
ccccccacctcagcc

SEQ ID NO: 60603 - DNA, 15 bp, Homo sapiens
tccccccacctcagc

SEQ ID NO: 60604 - DNA, 15 bp, Homo sapiens
ttccccccacctcag

SEQ ID NO: 60605 - DNA, 15 bp, Homo sapiens
attccccccacctca

SEQ ID NO: 60606 - DNA, 15 bp, Homo sapiens
cattccccccacctc

SEQ ID NO: 60607 - DNA, 15 bp, Homo sapiens
ccattccccccacct

SEQ ID NO: 60608 - DNA, 15 bp, Homo sapiens
cccattccccccacc

SEQ ID NO: 60609 - DNA, 15 bp, Homo sapiens
gcccattccccccac

SEQ ID NO: 60610 - DNA, 15 bp, Homo sapiens
tgcccattcccccca

SEQ ID NO: 60611 - DNA, 15 bp, Homo sapiens
ctgcccattcccccc

SEQ ID NO: 60612 - DNA, 15 bp, Homo sapiens
tctgcccattccccc

SEQ ID NO: 60613 - DNA, 15 bp, Homo sapiens
ctctgcccattcccc

SEQ ID NO: 60614 - DNA, 15 bp, Homo sapiens
actctgcccattccc

SEQ ID NO: 60615 - DNA, 15 bp, Homo sapiens
tactctgcccattcc

SEQ ID NO: 60616 - DNA, 15 bp, Homo sapiens
ttactctgcccattc

SEQ ID NO: 60617 - DNA, 15 bp, Homo sapiens
tttactctgcccatt

SEQ ID NO: 60618 - DNA, 15 bp, Homo sapiens
ctttactctgcccat

SEQ ID NO: 60619 - DNA, 15 bp, Homo sapiens
gctttactctgccca

SEQ ID NO: 60620 - DNA, 15 bp, Homo sapiens
tgctttactctgccc

SEQ ID NO: 60621 - DNA, 15 bp, Homo sapiens
atgctttactctgcc

SEQ ID NO: 60622 - DNA, 15 bp, Homo sapiens
aatgctttactctgc

SEQ ID NO: 60623 - DNA, 15 bp, Homo sapiens
aaatgctttactctg

SEQ ID NO: 60624 - DNA, 15 bp, Homo sapiens
aaaatgctttactct

SEQ ID NO: 60625 - DNA, 15 bp, Homo sapiens
taaaatgctttactc

SEQ ID NO: 60626 - DNA, 15 bp, Homo sapiens
ttaaaatgctttact

SEQ ID NO: 60627 - DNA, 15 bp, Homo sapiens
tttaaaatgctttac

SEQ ID NO: 60628 - DNA, 15 bp, Homo sapiens
ttttaaaatgcttta

SEQ ID NO: 60629 - DNA, 15 bp, Homo sapiens
cttttaaaatgcttt

SEQ ID NO: 60630 - DNA, 15 bp, Homo sapiens
tcttttaaaatgctt

SEQ ID NO: 60631 - DNA, 15 bp, Homo sapiens
ctcttttaaaatgct

SEQ ID NO: 60632 - DNA, 15 bp, Homo sapiens
tctcttttaaaatgc

SEQ ID NO: 60633 - DNA, 15 bp, Homo sapiens
ctctcttttaaaatg

SEQ ID NO: 60634 - DNA, 15 bp, Homo sapiens
cctctcttttaaaat

SEQ ID NO: 60635 - DNA, 15 bp, Homo sapiens
tcctctcttttaaaa

SEQ ID NO: 60636 - DNA, 15 bp, Homo sapiens
ctcctctcttttaaa

SEQ ID NO: 60637 - DNA, 15 bp, Homo sapiens
tctcctctcttttaa

SEQ ID NO: 60638 - DNA, 15 bp, Homo sapiens
ctctcctctctttta

SEQ ID NO: 60639 - DNA, 15 bp, Homo sapiens
tctctcctctctttt

SEQ ID NO: 60640 - DNA, 15 bp, Homo sapiens
ttctctcctctcttt

SEQ ID NO: 60641 - DNA, 15 bp, Homo sapiens
tttctctcctctctt

SEQ ID NO: 60642 - DNA, 15 bp, Homo sapiens
ttttctctcctctct

SEQ ID NO: 60643 - DNA, 15 bp, Homo sapiens
tttttctctcctctc

SEQ ID NO: 60644 - DNA, 15 bp, Homo sapiens
ttttttctctcctct

SEQ ID NO: 60645 - DNA, 15 bp, Homo sapiens
tttttttctctcctc

SEQ ID NO: 60646 - DNA, 15 bp, Homo sapiens
ttttttttctctcct

SEQ ID NO: 60647 - DNA, 15 bp, Homo sapiens
cttttttttctctcc

SEQ ID NO: 60648 - DNA, 15 bp, Homo sapiens
tcttttttttctctc

SEQ ID NO: 60649 - DNA, 15 bp, Homo sapiens
atcttttttttctct

SEQ ID NO: 60650 - DNA, 15 bp, Homo sapiens
tatcttttttttctc

SEQ ID NO: 60651 - DNA, 15 bp, Homo sapiens
ctatcttttttttct

SEQ ID NO: 60652 - DNA, 15 bp, Homo sapiens
cctatcttttttttc

SEQ ID NO: 60653 - DNA, 15 bp, Homo sapiens
tcctatctttttttt

SEQ ID NO: 60654 - DNA, 15 bp, Homo sapiens
ttcctatcttttttt

SEQ ID NO: 60655 - DNA, 15 bp, Homo sapiens
cttcctatctttttt

SEQ ID NO: 60656 - DNA, 15 bp, Homo sapiens
gcttcctatcttttt

SEQ ID NO: 60657 - DNA, 15 bp, Homo sapiens
agcttcctatctttt

SEQ ID NO: 60658 - DNA, 15 bp, Homo sapiens
tagcttcctatcttt

SEQ ID NO: 60659 - DNA, 15 bp, Homo sapiens
atagcttcctatctt

SEQ ID NO: 60660 - DNA, 15 bp, Homo sapiens
tatagcttcctatct

SEQ ID NO: 60661 - DNA, 15 bp, Homo sapiens
ctatagcttcctatc

SEQ ID NO: 60662 - DNA, 15 bp, Homo sapiens
tctatagcttcctat

SEQ ID NO: 60663 - DNA, 15 bp, Homo sapiens
ttctatagcttccta

SEQ ID NO: 60664 - DNA, 15 bp, Homo sapiens
tttctatagcttcct

SEQ ID NO: 60665 - DNA, 15 bp, Homo sapiens
atttctatagcttcc

SEQ ID NO: 60666 - DNA, 15 bp, Homo sapiens
catttctatagcttc

SEQ ID NO: 60667 - DNA, 15 bp, Homo sapiens
ccatttctatagctt

SEQ ID NO: 60668 - DNA, 15 bp, Homo sapiens
tccatttctatagct

SEQ ID NO: 60669 - DNA, 15 bp, Homo sapiens
ttccatttctatagc

SEQ ID NO: 60670 - DNA, 15 bp, Homo sapiens
tttccatttctatag

SEQ ID NO: 60671 - DNA, 15 bp, Homo sapiens
atttccatttctata

SEQ ID NO: 60672 - DNA, 15 bp, Homo sapiens
catttccatttctat

SEQ ID NO: 60673 - DNA, 15 bp, Homo sapiens
acatttccatttcta

SEQ ID NO: 60674 - DNA, 15 bp, Homo sapiens
tacatttccatttct

SEQ ID NO: 60675 - DNA, 15 bp, Homo sapiens
ttacatttccatttc

SEQ ID NO: 60676 - DNA, 15 bp, Homo sapiens
cttacatttccattt

SEQ ID NO: 60677 - DNA, 15 bp, Homo sapiens
tcttacatttccatt

SEQ ID NO: 60678 - DNA, 15 bp, Homo sapiens
atcttacatttccat

SEQ ID NO: 60679 - DNA, 15 bp, Homo sapiens
catcttacatttcca

SEQ ID NO: 60680 - DNA, 15 bp, Homo sapiens
tcatcttacatttcc

SEQ ID NO: 60681 - DNA, 15 bp, Homo sapiens
ctcatcttacatttc

SEQ ID NO: 60682 - DNA, 15 bp, Homo sapiens
cctcatcttacattt

SEQ ID NO: 60683 - DNA, 15 bp, Homo sapiens
tcctcatcttacatt

SEQ ID NO: 60684 - DNA, 15 bp, Homo sapiens
ttcctcatcttacat

SEQ ID NO: 60685 - DNA, 15 bp, Homo sapiens
tttcctcatcttaca

SEQ ID NO: 60686 - DNA, 15 bp, Homo sapiens
ttttcctcatcttac

SEQ ID NO: 60687 - DNA, 15 bp, Homo sapiens
attttcctcatctta

SEQ ID NO: 60688 - DNA, 15 bp, Homo sapiens
cattttcctcatctt

SEQ ID NO: 60689 - DNA, 15 bp, Homo sapiens
acattttcctcatct

SEQ ID NO: 60690 - DNA, 15 bp, Homo sapiens
tacattttcctcatc

SEQ ID NO: 60691 - DNA, 15 bp, Homo sapiens
ctacattttcctcat

SEQ ID NO: 60692 - DNA, 15 bp, Homo sapiens
actacattttcctca

SEQ ID NO: 60693 - DNA, 15 bp, Homo sapiens
gactacattttcctc

SEQ ID NO: 60694 - DNA, 15 bp, Homo sapiens
agactacattttcct

SEQ ID NO: 60695 - DNA, 15 bp, Homo sapiens
tagactacattttcc

SEQ ID NO: 60696 - DNA, 15 bp, Homo sapiens
ctagactacattttc

SEQ ID NO: 60697 - DNA, 15 bp, Homo sapiens
tctagactacatttt

SEQ ID NO: 60698 - DNA, 15 bp, Homo sapiens
ttctagactacattt

SEQ ID NO: 60699 - DNA, 15 bp, Homo sapiens
cttctagactacatt

SEQ ID NO: 60700 - DNA, 15 bp, Homo sapiens
ccttctagactacat

SEQ ID NO: 60701 - DNA, 15 bp, Homo sapiens
gccttctagactaca

SEQ ID NO: 60702 - DNA, 15 bp, Homo sapiens
tgccttctagactac

SEQ ID NO: 60703 - DNA, 15 bp, Homo sapiens
ctgccttctagacta

SEQ ID NO: 60704 - DNA, 15 bp, Homo sapiens
tctgccttctagact

SEQ ID NO: 60705 - DNA, 15 bp, Homo sapiens
ctctgccttctagac

SEQ ID NO: 60706 - DNA, 15 bp, Homo sapiens
cctctgccttctaga

SEQ ID NO: 60707 - DNA, 15 bp, Homo sapiens
tcctctgccttctag

SEQ ID NO: 60708 - DNA, 15 bp, Homo sapiens
ctcctctgccttcta

SEQ ID NO: 60709 - DNA, 15 bp, Homo sapiens
cctcctctgccttct

SEQ ID NO: 60710 - DNA, 15 bp, Homo sapiens
tcctcctctgccttc

SEQ ID NO: 60711 - DNA, 15 bp, Homo sapiens
ttcctcctctgcctt

SEQ ID NO: 60712 - DNA, 15 bp, Homo sapiens
tttcctcctctgcct

SEQ ID NO: 60713 - DNA, 15 bp, Homo sapiens
ctttcctcctctgcc

SEQ ID NO: 60714 - DNA, 15 bp, Homo sapiens
tctttcctcctctgc

SEQ ID NO: 60715 - DNA, 15 bp, Homo sapiens
ttctttcctcctctg

SEQ ID NO: 60716 - DNA, 15 bp, Homo sapiens
cttctttcctcctct

SEQ ID NO: 60717 - DNA, 15 bp, Homo sapiens
tcttctttcctcctc

SEQ ID NO: 60718 - DNA, 15 bp, Homo sapiens
ttcttctttcctcct

SEQ ID NO: 60719 - DNA, 15 bp, Homo sapiens
gttcttctttcctcc

SEQ ID NO: 60720 - DNA, 15 bp, Homo sapiens
tgttcttctttcctc

SEQ ID NO: 60721 - DNA, 15 bp, Homo sapiens
ttgttcttctttcct

SEQ ID NO: 60722 - DNA, 15 bp, Homo sapiens
tttgttcttctttcc

SEQ ID NO: 60723 - DNA, 15 bp, Homo sapiens
ctttgttcttctttc

SEQ ID NO: 60724 - DNA, 15 bp, Homo sapiens
tctttgttcttcttt

SEQ ID NO: 60725 - DNA, 15 bp, Homo sapiens
ctctttgttcttctt

SEQ ID NO: 60726 - DNA, 15 bp, Homo sapiens
tctctttgttcttct

SEQ ID NO: 60727 - DNA, 15 bp, Homo sapiens
ttctctttgttcttc

SEQ ID NO: 60728 - DNA, 15 bp, Homo sapiens
tttctctttgttctt

SEQ ID NO: 60729 - DNA, 15 bp, Homo sapiens
ctttctctttgttct

SEQ ID NO: 60730 - DNA, 15 bp, Homo sapiens
tctttctctttgttc

SEQ ID NO: 60731 - DNA, 15 bp, Homo sapiens
ctctttctctttgtt

SEQ ID NO: 60732 - DNA, 15 bp, Homo sapiens
tctctttctctttgt

SEQ ID NO: 60733 - DNA, 15 bp, Homo sapiens
ctctctttctctttg

SEQ ID NO: 60734 - DNA, 15 bp, Homo sapiens
gctctctttctcttt

SEQ ID NO: 60735 - DNA, 15 bp, Homo sapiens
ggctctctttctctt

SEQ ID NO: 60736 - DNA, 15 bp, Homo sapiens
tggctctctttctct

SEQ ID NO: 60737 - DNA, 15 bp, Homo sapiens
atggctctctttctc

SEQ ID NO: 60738 - DNA, 15 bp, Homo sapiens
tatggctctctttct

SEQ ID NO: 60739 - DNA, 15 bp, Homo sapiens
ttatggctctctttc

SEQ ID NO: 60740 - DNA, 15 bp, Homo sapiens
tttatggctctcttt

SEQ ID NO: 60741 - DNA, 15 bp, Homo sapiens
atttatggctctctt

SEQ ID NO: 60742 - DNA, 15 bp, Homo sapiens
catttatggctctct

SEQ ID NO: 60743 - DNA, 15 bp, Homo sapiens
ccatttatggctctc

SEQ ID NO: 60744 - DNA, 15 bp, Homo sapiens
cccatttatggctct

SEQ ID NO: 60745 - DNA, 15 bp, Homo sapiens
acccatttatggctc

SEQ ID NO: 60746 - DNA, 15 bp, Homo sapiens
gacccatttatggct

SEQ ID NO: 60747 - DNA, 15 bp, Homo sapiens
tgacccatttatggc

SEQ ID NO: 60748 - DNA, 15 bp, Homo sapiens
ttgacccatttatgg

SEQ ID NO: 60749 - DNA, 15 bp, Homo sapiens
attgacccatttatg

SEQ ID NO: 60750 - DNA, 15 bp, Homo sapiens
gattgacccatttat

SEQ ID NO: 60751 - DNA, 15 bp, Homo sapiens
tgattgacccattta

SEQ ID NO: 60752 - DNA, 15 bp, Homo sapiens
ttgattgacccattt

SEQ ID NO: 60753 - DNA, 15 bp, Homo sapiens
tttgattgacccatt

SEQ ID NO: 60754 - DNA, 15 bp, Homo sapiens
ttttgattgacccat

SEQ ID NO: 60755 - DNA, 15 bp, Homo sapiens
tttttgattgaccca

SEQ ID NO: 60756 - DNA, 15 bp, Homo sapiens
gtttttgattgaccc

SEQ ID NO: 60757 - DNA, 15 bp, Homo sapiens
tgtttttgattgacc

SEQ ID NO: 60758 - DNA, 15 bp, Homo sapiens
ctgtttttgattgac

SEQ ID NO: 60759 - DNA, 15 bp, Homo sapiens
tctgtttttgattga

SEQ ID NO: 60760 - DNA, 15 bp, Homo sapiens
ttctgtttttgattg

SEQ ID NO: 60761 - DNA, 15 bp, Homo sapiens
tttctgtttttgatt

SEQ ID NO: 60762 - DNA, 15 bp, Homo sapiens
ctttctgtttttgat

SEQ ID NO: 60763 - DNA, 15 bp, Homo sapiens
tctttctgtttttga

SEQ ID NO: 60764 - DNA, 15 bp, Homo sapiens
ttctttctgtttttg

SEQ ID NO: 60765 - DNA, 15 bp, Homo sapiens
tttctttctgttttt

SEQ ID NO: 60766 - DNA, 15 bp, Homo sapiens
ttttctttctgtttt

SEQ ID NO: 60767 - DNA, 15 bp, Homo sapiens
cttttctttctgttt

SEQ ID NO: 60768 - DNA, 15 bp, Homo sapiens
ccttttctttctgtt

SEQ ID NO: 60769 - DNA, 15 bp, Homo sapiens
accttttctttctgt

SEQ ID NO: 60770 - DNA, 15 bp, Homo sapiens
caccttttctttctg

SEQ ID NO: 60771 - DNA, 15 bp, Homo sapiens
tcaccttttctttct

SEQ ID NO: 60772 - DNA, 15 bp, Homo sapiens
ctcaccttttctttc

SEQ ID NO: 60773 - DNA, 15 bp, Homo sapiens
tctcaccttttcttt

SEQ ID NO: 60774 - DNA, 15 bp, Homo sapiens
ttctcaccttttctt

SEQ ID NO: 60775 - DNA, 15 bp, Homo sapiens
tttctcaccttttct

SEQ ID NO: 60776 - DNA, 15 bp, Homo sapiens
atttctcaccttttc

SEQ ID NO: 60777 - DNA, 15 bp, Homo sapiens
catttctcacctttt

SEQ ID NO: 60778 - DNA, 15 bp, Homo sapiens
ccatttctcaccttt

SEQ ID NO: 60779 - DNA, 15 bp, Homo sapiens
tccatttctcacctt

SEQ ID NO: 60780 - DNA, 15 bp, Homo sapiens
ttccatttctcacct

SEQ ID NO: 60781 - DNA, 15 bp, Homo sapiens
cttccatttctcacc

SEQ ID NO: 60782 - DNA, 15 bp, Homo sapiens
tcttccatttctcac

SEQ ID NO: 60783 - DNA, 15 bp, Homo sapiens
ctcttccatttctca

SEQ ID NO: 60784 - DNA, 15 bp, Homo sapiens
cctcttccatttctc

SEQ ID NO: 60785 - DNA, 15 bp, Homo sapiens
tcctcttccatttct

SEQ ID NO: 60786 - DNA, 15 bp, Homo sapiens
gtcctcttccatttc

SEQ ID NO: 60787 - DNA, 15 bp, Homo sapiens
agtcctcttccattt

SEQ ID NO: 60788 - DNA, 15 bp, Homo sapiens
tagtcctcttccatt

SEQ ID NO: 60789 - DNA, 15 bp, Homo sapiens
ttagtcctcttccat

SEQ ID NO: 60790 - DNA, 15 bp, Homo sapiens
attagtcctcttcca

SEQ ID NO: 60791 - DNA, 15 bp, Homo sapiens
tattagtcctcttcc

SEQ ID NO: 60792 - DNA, 15 bp, Homo sapiens
ttattagtcctcttc

SEQ ID NO: 60793 - DNA, 15 bp, Homo sapiens
cttattagtcctctt

SEQ ID NO: 60794 - DNA, 15 bp, Homo sapiens
tcttattagtcctct

SEQ ID NO: 60795 - DNA, 15 bp, Homo sapiens
gtcttattagtcctc

SEQ ID NO: 60796 - DNA, 15 bp, Homo sapiens
tgtcttattagtcct

SEQ ID NO: 60797 - DNA, 15 bp, Homo sapiens
ctgtcttattagtcc

SEQ ID NO: 60798 - DNA, 15 bp, Homo sapiens
actgtcttattagtc

SEQ ID NO: 60799 - DNA, 15 bp, Homo sapiens
tactgtcttattagt

SEQ ID NO: 60800 - DNA, 15 bp, Homo sapiens
ttactgtcttattag

SEQ ID NO: 60801 - DNA, 15 bp, Homo sapiens
gttactgtcttatta

SEQ ID NO: 60802 - DNA, 15 bp, Homo sapiens
tgttactgtcttatt

SEQ ID NO: 60803 - DNA, 15 bp, Homo sapiens
ttgttactgtcttat

SEQ ID NO: 60804 - DNA, 15 bp, Homo sapiens
tttgttactgtctta

SEQ ID NO: 60805 - DNA, 15 bp, Homo sapiens
ctttgttactgtctt

SEQ ID NO: 60806 - DNA, 15 bp, Homo sapiens
actttgttactgtct

SEQ ID NO: 60807 - DNA, 15 bp, Homo sapiens
gactttgttactgtc

SEQ ID NO: 60808 - DNA, 15 bp, Homo sapiens
ggactttgttactgt

SEQ ID NO: 60809 - DNA, 15 bp, Homo sapiens
aggactttgttactg

SEQ ID NO: 60810 - DNA, 15 bp, Homo sapiens
aaggactttgttact

SEQ ID NO: 60811 - DNA, 15 bp, Homo sapiens
aaaggactttgttac

SEQ ID NO: 60812 - DNA, 15 bp, Homo sapiens
caaaggactttgtta

SEQ ID NO: 60813 - DNA, 15 bp, Homo sapiens
tcaaaggactttgtt

SEQ ID NO: 60814 - DNA, 15 bp, Homo sapiens
ttcaaaggactttgt

SEQ ID NO: 60815 - DNA, 15 bp, Homo sapiens
cttcaaaggactttg

SEQ ID NO: 60816 - DNA, 15 bp, Homo sapiens
acttcaaaggacttt

SEQ ID NO: 60817 - DNA, 15 bp, Homo sapiens
cacttcaaaggactt

SEQ ID NO: 60818 - DNA, 15 bp, Homo sapiens
acacttcaaaggact

SEQ ID NO: 60819 - DNA, 15 bp, Homo sapiens
aacacttcaaaggac

SEQ ID NO: 60820 - DNA, 15 bp, Homo sapiens
taacacttcaaagga

SEQ ID NO: 60821 - DNA, 15 bp, Homo sapiens
ctaacacttcaaagg

SEQ ID NO: 60822 - DNA, 15 bp, Homo sapiens
tctaacacttcaaag

SEQ ID NO: 60823 - DNA, 15 bp, Homo sapiens
ttctaacacttcaaa

SEQ ID NO: 60824 - DNA, 15 bp, Homo sapiens
gttctaacacttcaa

SEQ ID NO: 60825 - DNA, 15 bp, Homo sapiens
tgttctaacacttca

SEQ ID NO: 60826 - DNA, 15 bp, Homo sapiens
gtgttctaacacttc

SEQ ID NO: 60827 - DNA, 15 bp, Homo sapiens
agtgttctaacactt

SEQ ID NO: 60828 - DNA, 15 bp, Homo sapiens
cagtgttctaacact

SEQ ID NO: 60829 - DNA, 15 bp, Homo sapiens
tcagtgttctaacac

SEQ ID NO: 60830 - DNA, 15 bp, Homo sapiens
ttcagtgttctaaca

SEQ ID NO: 60831 - DNA, 15 bp, Homo sapiens
gttcagtgttctaac

SEQ ID NO: 60832 - DNA, 15 bp, Homo sapiens
agttcagtgttctaa

SEQ ID NO: 60833 - DNA, 15 bp, Homo sapiens
cagttcagtgttcta

SEQ ID NO: 60834 - DNA, 15 bp, Homo sapiens
gcagttcagtgttct

SEQ ID NO: 60835 - DNA, 15 bp, Homo sapiens
agcagttcagtgttc

SEQ ID NO: 60836 - DNA, 15 bp, Homo sapiens
cagcagttcagtgtt

SEQ ID NO: 60837 - DNA, 15 bp, Homo sapiens
ccagcagttcagtgt

SEQ ID NO: 60838 - DNA, 15 bp, Homo sapiens
accagcagttcagtg

SEQ ID NO: 60839 - DNA, 15 bp, Homo sapiens
aaccagcagttcagt

SEQ ID NO: 60840 - DNA, 15 bp, Homo sapiens
taaccagcagttcag

SEQ ID NO: 60841 - DNA, 15 bp, Homo sapiens
ctaaccagcagttca

SEQ ID NO: 60842 - DNA, 15 bp, Homo sapiens
actaaccagcagttc

SEQ ID NO: 60843 - DNA, 15 bp, Homo sapiens
aactaaccagcagtt

SEQ ID NO: 60844 - DNA, 15 bp, Homo sapiens
gaactaaccagcagt

SEQ ID NO: 60845 - DNA, 15 bp, Homo sapiens
agaactaaccagcag

SEQ ID NO: 60846 - DNA, 15 bp, Homo sapiens
aagaactaaccagca

SEQ ID NO: 60847 - DNA, 15 bp, Homo sapiens
caagaactaaccagc

SEQ ID NO: 60848 - DNA, 15 bp, Homo sapiens
tcaagaactaaccag

SEQ ID NO: 60849 - DNA, 15 bp, Homo sapiens
ctcaagaactaacca

SEQ ID NO: 60850 - DNA, 15 bp, Homo sapiens
cctcaagaactaacc

SEQ ID NO: 60851 - DNA, 15 bp, Homo sapiens
ccctcaagaactaac

SEQ ID NO: 60852 - DNA, 15 bp, Homo sapiens
accctcaagaactaa

SEQ ID NO: 60853 - DNA, 15 bp, Homo sapiens
aaccctcaagaacta

SEQ ID NO: 60854 - DNA, 15 bp, Homo sapiens
caaccctcaagaact

SEQ ID NO: 60855 - DNA, 15 bp, Homo sapiens
acaaccctcaagaac

SEQ ID NO: 60856 - DNA, 15 bp, Homo sapiens
cacaaccctcaagaa

SEQ ID NO: 60857 - DNA, 15 bp, Homo sapiens
gcacaaccctcaaga

SEQ ID NO: 60858 - DNA, 15 bp, Homo sapiens
tgcacaaccctcaag

SEQ ID NO: 60859 - DNA, 15 bp, Homo sapiens
gtgcacaaccctcaa

SEQ ID NO: 60860 - DNA, 15 bp, Homo sapiens
agtgcacaaccctca

SEQ ID NO: 60861 - DNA, 15 bp, Homo sapiens
aagtgcacaaccctc

SEQ ID NO: 60862 - DNA, 15 bp, Homo sapiens
gaagtgcacaaccct

SEQ ID NO: 60863 - DNA, 15 bp, Homo sapiens
tgaagtgcacaaccc

SEQ ID NO: 60864 - DNA, 15 bp, Homo sapiens
gtgaagtgcacaacc

SEQ ID NO: 60865 - DNA, 15 bp, Homo sapiens
agtgaagtgcacaac

SEQ ID NO: 60866 - DNA, 15 bp, Homo sapiens
cagtgaagtgcacaa

SEQ ID NO: 60867 - DNA, 15 bp, Homo sapiens
acagtgaagtgcaca

SEQ ID NO: 60868 - DNA, 15 bp, Homo sapiens
cacagtgaagtgcac

SEQ ID NO: 60869 - DNA, 15 bp, Homo sapiens
tcacagtgaagtgca

SEQ ID NO: 60870 - DNA, 15 bp, Homo sapiens
gtcacagtgaagtgc

SEQ ID NO: 60871 - DNA, 15 bp, Homo sapiens
tgtcacagtgaagtg

SEQ ID NO: 60872 - DNA, 15 bp, Homo sapiens
ttgtcacagtgaagt

SEQ ID NO: 60873 - DNA, 15 bp, Homo sapiens
gttgtcacagtgaag

SEQ ID NO: 60874 - DNA, 15 bp, Homo sapiens
agttgtcacagtgaa

SEQ ID NO: 60875 - DNA, 15 bp, Homo sapiens
cagttgtcacagtga

SEQ ID NO: 60876 - DNA, 15 bp, Homo sapiens
ccagttgtcacagtg

SEQ ID NO: 60877 - DNA, 15 bp, Homo sapiens
accagttgtcacagt

SEQ ID NO: 60878 - DNA, 15 bp, Homo sapiens
taccagttgtcacag

SEQ ID NO: 60879 - DNA, 15 bp, Homo sapiens
ataccagttgtcaca

SEQ ID NO: 60880 - DNA, 15 bp, Homo sapiens
gataccagttgtcac

SEQ ID NO: 60881 - DNA, 15 bp, Homo sapiens
tgataccagttgtca

SEQ ID NO: 60882 - DNA, 15 bp, Homo sapiens
gtgataccagttgtc

SEQ ID NO: 60883 - DNA, 15 bp, Homo sapiens
ggtgataccagttgt

SEQ ID NO: 60884 - DNA, 15 bp, Homo sapiens
gggtgataccagttg

SEQ ID NO: 60885 - DNA, 15 bp, Homo sapiens
agggtgataccagtt

SEQ ID NO: 60886 - DNA, 15 bp, Homo sapiens
aagggtgataccagt

SEQ ID NO: 60887 - DNA, 15 bp, Homo sapiens
gaagggtgataccag

SEQ ID NO: 60888 - DNA, 15 bp, Homo sapiens
ggaagggtgatacca

SEQ ID NO: 60889 - DNA, 15 bp, Homo sapiens
gggaagggtgatacc

SEQ ID NO: 60890 - DNA, 15 bp, Homo sapiens
ggggaagggtgatac

SEQ ID NO: 60891 - DNA, 15 bp, Homo sapiens
aggggaagggtgata

SEQ ID NO: 60892 - DNA, 15 bp, Homo sapiens
gaggggaagggtgat

SEQ ID NO: 60893 - DNA, 15 bp, Homo sapiens
agaggggaagggtga

SEQ ID NO: 60894 - DNA, 15 bp, Homo sapiens
cagaggggaagggtg

SEQ ID NO: 60895 - DNA, 15 bp, Homo sapiens
acagaggggaagggt

SEQ ID NO: 60896 - DNA, 15 bp, Homo sapiens
tacagaggggaaggg

SEQ ID NO: 60897 - DNA, 15 bp, Homo sapiens
ctacagaggggaagg

SEQ ID NO: 60898 - DNA, 15 bp, Homo sapiens
cctacagaggggaag

SEQ ID NO: 60899 - DNA, 15 bp, Homo sapiens
acctacagaggggaa

SEQ ID NO: 60900 - DNA, 15 bp, Homo sapiens
tacctacagagggga

SEQ ID NO: 60901 - DNA, 15 bp, Homo sapiens
ctacctacagagggg

SEQ ID NO: 60902 - DNA, 15 bp, Homo sapiens
actacctacagaggg

SEQ ID NO: 60903 - DNA, 15 bp, Homo sapiens
tactacctacagagg

SEQ ID NO: 60904 - DNA, 15 bp, Homo sapiens
gtactacctacagag

SEQ ID NO: 60905 - DNA, 15 bp, Homo sapiens
agtactacctacaga

SEQ ID NO: 60906 - DNA, 15 bp, Homo sapiens
cagtactacctacag

SEQ ID NO: 60907 - DNA, 15 bp, Homo sapiens
acagtactacctaca

SEQ ID NO: 60908 - DNA, 15 bp, Homo sapiens
cacagtactacctac

SEQ ID NO: 60909 - DNA, 15 bp, Homo sapiens
acacagtactaccta

SEQ ID NO: 60910 - DNA, 15 bp, Homo sapiens
gacacagtactacct

SEQ ID NO: 60911 - DNA, 15 bp, Homo sapiens
ggacacagtactacc

SEQ ID NO: 60912 - DNA, 15 bp, Homo sapiens
tggacacagtactac

SEQ ID NO: 60913 - DNA, 15 bp, Homo sapiens
ttggacacagtacta

SEQ ID NO: 60914 - DNA, 15 bp, Homo sapiens
cttggacacagtact

SEQ ID NO: 60915 - DNA, 15 bp, Homo sapiens
tcttggacacagtac

SEQ ID NO: 60916 - DNA, 15 bp, Homo sapiens
atcttggacacagta

SEQ ID NO: 60917 - DNA, 15 bp, Homo sapiens
aatcttggacacagt

SEQ ID NO: 60918 - DNA, 15 bp, Homo sapiens
gaatcttggacacag

SEQ ID NO: 60919 - DNA, 15 bp, Homo sapiens
agaatcttggacaca

SEQ ID NO: 60920 - DNA, 15 bp, Homo sapiens
aagaatcttggacac

SEQ ID NO: 60921 - DNA, 15 bp, Homo sapiens
caagaatcttggaca

SEQ ID NO: 60922 - DNA, 15 bp, Homo sapiens
ccaagaatcttggac

SEQ ID NO: 60923 - DNA, 15 bp, Homo sapiens
accaagaatcttgga

SEQ ID NO: 60924 - DNA, 15 bp, Homo sapiens
caccaagaatcttgg

SEQ ID NO: 60925 - DNA, 15 bp, Homo sapiens
acaccaagaatcttg

SEQ ID NO: 60926 - DNA, 15 bp, Homo sapiens
cacaccaagaatctt

SEQ ID NO: 60927 - DNA, 15 bp, Homo sapiens
ccacaccaagaatct

SEQ ID NO: 60928 - DNA, 15 bp, Homo sapiens
gccacaccaagaatc

SEQ ID NO: 60929 - DNA, 15 bp, Homo sapiens
ggccacaccaagaat

SEQ ID NO: 60930 - DNA, 15 bp, Homo sapiens
gggccacaccaagaa

SEQ ID NO: 60931 - DNA, 15 bp, Homo sapiens
tgggccacaccaaga

SEQ ID NO: 60932 - DNA, 15 bp, Homo sapiens
gtgggccacaccaag

SEQ ID NO: 60933 - DNA, 15 bp, Homo sapiens
ggtgggccacaccaa

SEQ ID NO: 60934 - DNA, 15 bp, Homo sapiens
tggtgggccacacca

SEQ ID NO: 60935 - DNA, 15 bp, Homo sapiens
ctggtgggccacacc

SEQ ID NO: 60936 - DNA, 15 bp, Homo sapiens
gctggtgggccacac

SEQ ID NO: 60937 - DNA, 15 bp, Homo sapiens
cgctggtgggccaca

SEQ ID NO: 60938 - DNA, 15 bp, Homo sapiens
gcgctggtgggccac

SEQ ID NO: 60939 - DNA, 15 bp, Homo sapiens
tgcgctggtgggcca

SEQ ID NO: 60940 - DNA, 15 bp, Homo sapiens
ctgcgctggtgggcc

SEQ ID NO: 60941 - DNA, 15 bp, Homo sapiens
cctgcgctggtgggc

SEQ ID NO: 60942 - DNA, 15 bp, Homo sapiens
gcctgcgctggtggg

SEQ ID NO: 60943 - DNA, 15 bp, Homo sapiens
ggcctgcgctggtgg

SEQ ID NO: 60944 - DNA, 15 bp, Homo sapiens
aggcctgcgctggtg

SEQ ID NO: 60945 - DNA, 15 bp, Homo sapiens
aaggcctgcgctggt

SEQ ID NO: 60946 - DNA, 15 bp, Homo sapiens
gaaggcctgcgctgg

SEQ ID NO: 60947 - DNA, 15 bp, Homo sapiens
agaaggcctgcgctg

SEQ ID NO: 60948 - DNA, 15 bp, Homo sapiens
tagaaggcctgcgct

SEQ ID NO: 60949 - DNA, 15 bp, Homo sapiens
atagaaggcctgcgc

SEQ ID NO: 60950 - DNA, 15 bp, Homo sapiens
gatagaaggcctgcg

SEQ ID NO: 60951 - DNA, 15 bp, Homo sapiens
agatagaaggcctgc

SEQ ID NO: 60952 - DNA, 15 bp, Homo sapiens
gagatagaaggcctg

SEQ ID NO: 60953 - DNA, 15 bp, Homo sapiens
agagatagaaggcct

SEQ ID NO: 60954 - DNA, 15 bp, Homo sapiens
gagagatagaaggcc

SEQ ID NO: 60955 - DNA, 15 bp, Homo sapiens
agagagatagaaggc

SEQ ID NO: 60956 - DNA, 15 bp, Homo sapiens
gagagagatagaagg

SEQ ID NO: 60957 - DNA, 15 bp, Homo sapiens
ggagagagatagaag

SEQ ID NO: 60958 - DNA, 15 bp, Homo sapiens
tggagagagatagaa

SEQ ID NO: 60959 - DNA, 15 bp, Homo sapiens
ttggagagagataga

SEQ ID NO: 60960 - DNA, 15 bp, Homo sapiens
gttggagagagatag

SEQ ID NO: 60961 - DNA, 15 bp, Homo sapiens
tgttggagagagata

SEQ ID NO: 60962 - DNA, 15 bp, Homo sapiens
atgttggagagagat

SEQ ID NO: 60963 - DNA, 15 bp, Homo sapiens
gatgttggagagaga

SEQ ID NO: 60964 - DNA, 15 bp, Homo sapiens
ggatgttggagagag

SEQ ID NO: 60965 - DNA, 15 bp, Homo sapiens
aggatgttggagaga

SEQ ID NO: 60966 - DNA, 15 bp, Homo sapiens
gaggatgttggagag

SEQ ID NO: 60967 - DNA, 15 bp, Homo sapiens
agaggatgttggaga

SEQ ID NO: 60968 - DNA, 15 bp, Homo sapiens
gagaggatgttggag

SEQ ID NO: 60969 - DNA, 15 bp, Homo sapiens
ggagaggatgttgga

SEQ ID NO: 60970 - DNA, 15 bp, Homo sapiens
gggagaggatgttgg

SEQ ID NO: 60971 - DNA, 15 bp, Homo sapiens
tgggagaggatgttg

SEQ ID NO: 60972 - DNA, 15 bp, Homo sapiens
gtgggagaggatgtt

SEQ ID NO: 60973 - DNA, 15 bp, Homo sapiens
tgtgggagaggatgt

SEQ ID NO: 60974 - DNA, 15 bp, Homo sapiens
gtgtgggagaggatg

SEQ ID NO: 60975 - DNA, 15 bp, Homo sapiens
agtgtgggagaggat

SEQ ID NO: 60976 - DNA, 15 bp, Homo sapiens
aagtgtgggagagga

SEQ ID NO: 60977 - DNA, 15 bp, Homo sapiens
aaagtgtgggagagg

SEQ ID NO: 60978 - DNA, 15 bp, Homo sapiens
caaagtgtgggagag

SEQ ID NO: 60979 - DNA, 15 bp, Homo sapiens
acaaagtgtgggaga

SEQ ID NO: 60980 - DNA, 15 bp, Homo sapiens
tacaaagtgtgggag

SEQ ID NO: 60981 - DNA, 15 bp, Homo sapiens
gtacaaagtgtggga

SEQ ID NO: 60982 - DNA, 15 bp, Homo sapiens
agtacaaagtgtggg

SEQ ID NO: 60983 - DNA, 15 bp, Homo sapiens
cagtacaaagtgtgg

SEQ ID NO: 60984 - DNA, 15 bp, Homo sapiens
acagtacaaagtgtg

SEQ ID NO: 60985 - DNA, 15 bp, Homo sapiens
cacagtacaaagtgt

SEQ ID NO: 60986 - DNA, 15 bp, Homo sapiens
gcacagtacaaagtg

SEQ ID NO: 60987 - DNA, 15 bp, Homo sapiens
ggcacagtacaaagt

SEQ ID NO: 60988 - DNA, 15 bp, Homo sapiens
gggcacagtacaaag

SEQ ID NO: 60989 - DNA, 15 bp, Homo sapiens
agggcacagtacaaa

SEQ ID NO: 60990 - DNA, 15 bp, Homo sapiens
aagggcacagtacaa

SEQ ID NO: 60991 - DNA, 15 bp, Homo sapiens
gaagggcacagtaca

SEQ ID NO: 60992 - DNA, 15 bp, Homo sapiens
tgaagggcacagtac

SEQ ID NO: 60993 - DNA, 15 bp, Homo sapiens
ctgaagggcacagta

SEQ ID NO: 60994 - DNA, 15 bp, Homo sapiens
cctgaagggcacagt

SEQ ID NO: 60995 - DNA, 15 bp, Homo sapiens
tcctgaagggcacag

SEQ ID NO: 60996 - DNA, 15 bp, Homo sapiens
ttcctgaagggcaca

SEQ ID NO: 60997 - DNA, 15 bp, Homo sapiens
attcctgaagggcac

SEQ ID NO: 60998 - DNA, 15 bp, Homo sapiens
aattcctgaagggca

SEQ ID NO: 60999 - DNA, 15 bp, Homo sapiens
gaattcctgaagggc

SEQ ID NO: 61000 - DNA, 15 bp, Homo sapiens
ggaattcctgaaggg

SEQ ID NO: 61001 - DNA, 15 bp, Homo sapiens
tggaattcctgaagg

SEQ ID NO: 61002 - DNA, 15 bp, Homo sapiens
gtggaattcctgaag

SEQ ID NO: 61003 - DNA, 15 bp, Homo sapiens
agtggaattcctgaa

SEQ ID NO: 61004 - DNA, 15 bp, Homo sapiens
cagtggaattcctga

SEQ ID NO: 61005 - DNA, 15 bp, Homo sapiens
gcagtggaattcctg

SEQ ID NO: 61006 - DNA, 15 bp, Homo sapiens
ggcagtggaattcct

SEQ ID NO: 61007 - DNA, 15 bp, Homo sapiens
tggcagtggaattcc

SEQ ID NO: 61008 - DNA, 15 bp, Homo sapiens
ctggcagtggaattc

SEQ ID NO: 61009 - DNA, 15 bp, Homo sapiens
cctggcagtggaatt

SEQ ID NO: 61010 - DNA, 15 bp, Homo sapiens
ccctggcagtggaat

SEQ ID NO: 61011 - DNA, 15 bp, Homo sapiens
cccctggcagtggaa

SEQ ID NO: 61012 - DNA, 15 bp, Homo sapiens
acccctggcagtgga

SEQ ID NO: 61013 - DNA, 15 bp, Homo sapiens
aacccctggcagtgg

SEQ ID NO: 61014 - DNA, 15 bp, Homo sapiens
taacccctggcagtg

SEQ ID NO: 61015 - DNA, 15 bp, Homo sapiens
gtaacccctggcagt

SEQ ID NO: 61016 - DNA, 15 bp, Homo sapiens
agtaacccctggcag

SEQ ID NO: 61017 - DNA, 15 bp, Homo sapiens
aagtaacccctggca

SEQ ID NO: 61018 - DNA, 15 bp, Homo sapiens
taagtaacccctggc

SEQ ID NO: 61019 - DNA, 15 bp, Homo sapiens
ttaagtaacccctgg

SEQ ID NO: 61020 - DNA, 15 bp, Homo sapiens
cttaagtaacccctg

SEQ ID NO: 61021 - DNA, 15 bp, Homo sapiens
gcttaagtaacccct

SEQ ID NO: 61022 - DNA, 15 bp, Homo sapiens
tgcttaagtaacccc

SEQ ID NO: 61023 - DNA, 15 bp, Homo sapiens
atgcttaagtaaccc

SEQ ID NO: 61024 - DNA, 15 bp, Homo sapiens
aatgcttaagtaacc

SEQ ID NO: 61025 - DNA, 15 bp, Homo sapiens
gaatgcttaagtaac

SEQ ID NO: 61026 - DNA, 15 bp, Homo sapiens
ggaatgcttaagtaa

SEQ ID NO: 61027 - DNA, 15 bp, Homo sapiens
tggaatgcttaagta

SEQ ID NO: 61028 - DNA, 15 bp, Homo sapiens
atggaatgcttaagt

SEQ ID NO: 61029 - DNA, 15 bp, Homo sapiens
catggaatgcttaag

SEQ ID NO: 61030 - DNA, 15 bp, Homo sapiens
acatggaatgcttaa

SEQ ID NO: 61031 - DNA, 15 bp, Homo sapiens
tacatggaatgctta

SEQ ID NO: 61032 - DNA, 15 bp, Homo sapiens
ctacatggaatgctt

SEQ ID NO: 61033 - DNA, 15 bp, Homo sapiens
actacatggaatgct

SEQ ID NO: 61034 - DNA, 15 bp, Homo sapiens
aactacatggaatgc

SEQ ID NO: 61035 - DNA, 15 bp, Homo sapiens
aaactacatggaatg

SEQ ID NO: 61036 - DNA, 15 bp, Homo sapiens
gaaactacatggaat

SEQ ID NO: 61037 - DNA, 15 bp, Homo sapiens
agaaactacatggaa

SEQ ID NO: 61038 - DNA, 15 bp, Homo sapiens
tagaaactacatgga

SEQ ID NO: 61039 - DNA, 15 bp, Homo sapiens
ctagaaactacatgg

SEQ ID NO: 61040 - DNA, 15 bp, Homo sapiens
actagaaactacatg

SEQ ID NO: 61041 - DNA, 15 bp, Homo sapiens
aactagaaactacat

SEQ ID NO: 61042 - DNA, 15 bp, Homo sapiens
taactagaaactaca

SEQ ID NO: 61043 - DNA, 15 bp, Homo sapiens
gtaactagaaactac

SEQ ID NO: 61044 - DNA, 15 bp, Homo sapiens
ggtaactagaaacta

SEQ ID NO: 61045 - DNA, 15 bp, Homo sapiens
aggtaactagaaact

SEQ ID NO: 61046 - DNA, 15 bp, Homo sapiens
aaggtaactagaaac

SEQ ID NO: 61047 - DNA, 15 bp, Homo sapiens
gaaggtaactagaaa

SEQ ID NO: 61048 - DNA, 15 bp, Homo sapiens
agaaggtaactagaa

SEQ ID NO: 61049 - DNA, 15 bp, Homo sapiens
aagaaggtaactaga

SEQ ID NO: 61050 - DNA, 15 bp, Homo sapiens
taagaaggtaactag

SEQ ID NO: 61051 - DNA, 15 bp, Homo sapiens
ataagaaggtaacta

SEQ ID NO: 61052 - DNA, 15 bp, Homo sapiens
aataagaaggtaact

SEQ ID NO: 61053 - DNA, 15 bp, Homo sapiens
gaataagaaggtaac

SEQ ID NO: 61054 - DNA, 15 bp, Homo sapiens
agaataagaaggtaa

SEQ ID NO: 61055 - DNA, 15 bp, Homo sapiens
tagaataagaaggta

SEQ ID NO: 61056 - DNA, 15 bp, Homo sapiens
ttagaataagaaggt

SEQ ID NO: 61057 - DNA, 15 bp, Homo sapiens
cttagaataagaagg

SEQ ID NO: 61058 - DNA, 15 bp, Homo sapiens
gcttagaataagaag

SEQ ID NO: 61059 - DNA, 15 bp, Homo sapiens
ggcttagaataagaa

SEQ ID NO: 61060 - DNA, 15 bp, Homo sapiens
aggcttagaataaga

SEQ ID NO: 61061 - DNA, 15 bp, Homo sapiens
taggcttagaataag

SEQ ID NO: 61062 - DNA, 15 bp, Homo sapiens
ttaggcttagaataa

SEQ ID NO: 61063 - DNA, 15 bp, Homo sapiens
tttaggcttagaata

SEQ ID NO: 61064 - DNA, 15 bp, Homo sapiens
atttaggcttagaat

SEQ ID NO: 61065 - DNA, 15 bp, Homo sapiens
aatttaggcttagaa

SEQ ID NO: 61066 - DNA, 15 bp, Homo sapiens
gaatttaggcttaga

SEQ ID NO: 61067 - DNA, 15 bp, Homo sapiens
agaatttaggcttag

SEQ ID NO: 61068 - DNA, 15 bp, Homo sapiens
aagaatttaggctta

SEQ ID NO: 61069 - DNA, 15 bp, Homo sapiens
gaagaatttaggctt

SEQ ID NO: 61070 - DNA, 15 bp, Homo sapiens
ggaagaatttaggct

SEQ ID NO: 61071 - DNA, 15 bp, Homo sapiens
aggaagaatttaggc

SEQ ID NO: 61072 - DNA, 15 bp, Homo sapiens
taggaagaatttagg

SEQ ID NO: 61073 - DNA, 15 bp, Homo sapiens
gtaggaagaatttag

SEQ ID NO: 61074 - DNA, 15 bp, Homo sapiens
agtaggaagaattta

SEQ ID NO: 61075 - DNA, 15 bp, Homo sapiens
aagtaggaagaattt

SEQ ID NO: 61076 - DNA, 15 bp, Homo sapiens
gaagtaggaagaatt

SEQ ID NO: 61077 - DNA, 15 bp, Homo sapiens
agaagtaggaagaat

SEQ ID NO: 61078 - DNA, 15 bp, Homo sapiens
aagaagtaggaagaa

SEQ ID NO: 61079 - DNA, 15 bp, Homo sapiens
aaagaagtaggaaga

SEQ ID NO: 61080 - DNA, 15 bp, Homo sapiens
aaaagaagtaggaag

SEQ ID NO: 61081 - DNA, 15 bp, Homo sapiens
taaaagaagtaggaa

SEQ ID NO: 61082 - DNA, 15 bp, Homo sapiens
gtaaaagaagtagga

SEQ ID NO: 61083 - DNA, 15 bp, Homo sapiens
tgtaaaagaagtagg

SEQ ID NO: 61084 - DNA, 15 bp, Homo sapiens
gtgtaaaagaagtag

SEQ ID NO: 61085 - DNA, 15 bp, Homo sapiens
agtgtaaaagaagta

SEQ ID NO: 61086 - DNA, 15 bp, Homo sapiens
gagtgtaaaagaagt

SEQ ID NO: 61087 - DNA, 15 bp, Homo sapiens
cgagtgtaaaagaag

SEQ ID NO: 61088 - DNA, 15 bp, Homo sapiens
gcgagtgtaaaagaa

SEQ ID NO: 61089 - DNA, 15 bp, Homo sapiens
ggcgagtgtaaaaga

SEQ ID NO: 61090 - DNA, 15 bp, Homo sapiens
cggcgagtgtaaaag

SEQ ID NO: 61091 - DNA, 15 bp, Homo sapiens
tcggcgagtgtaaaa

SEQ ID NO: 61092 - DNA, 15 bp, Homo sapiens
atcggcgagtgtaaa

SEQ ID NO: 61093 - DNA, 15 bp, Homo sapiens
aatcggcgagtgtaa

SEQ ID NO: 61094 - DNA, 15 bp, Homo sapiens
gaatcggcgagtgta

SEQ ID NO: 61095 - DNA, 15 bp, Homo sapiens
agaatcggcgagtgt

SEQ ID NO: 61096 - DNA, 15 bp, Homo sapiens
aagaatcggcgagtg

SEQ ID NO: 61097 - DNA, 15 bp, Homo sapiens
gaagaatcggcgagt

SEQ ID NO: 61098 - DNA, 15 bp, Homo sapiens
agaagaatcggcgag

SEQ ID NO: 61099 - DNA, 15 bp, Homo sapiens
gagaagaatcggcga

SEQ ID NO: 61100 - DNA, 15 bp, Homo sapiens
ggagaagaatcggcg

SEQ ID NO: 61101 - DNA, 15 bp, Homo sapiens
tggagaagaatcggc

SEQ ID NO: 61102 - DNA, 15 bp, Homo sapiens
ctggagaagaatcgg

SEQ ID NO: 61103 - DNA, 15 bp, Homo sapiens
gctggagaagaatcg

SEQ ID NO: 61104 - DNA, 15 bp, Homo sapiens
cgctggagaagaatc

SEQ ID NO: 61105 - DNA, 15 bp, Homo sapiens
tcgctggagaagaat

SEQ ID NO: 61106 - DNA, 15 bp, Homo sapiens
ttcgctggagaagaa

SEQ ID NO: 61107 - DNA, 15 bp, Homo sapiens
gttcgctggagaaga

SEQ ID NO: 61108 - DNA, 15 bp, Homo sapiens
agttcgctggagaag

SEQ ID NO: 61109 - DNA, 15 bp, Homo sapiens
gagttcgctggagaa

SEQ ID NO: 61110 - DNA, 15 bp, Homo sapiens
ggagttcgctggaga

SEQ ID NO: 61111 - DNA, 15 bp, Homo sapiens
gggagttcgctggag

SEQ ID NO: 61112 - DNA, 15 bp, Homo sapiens
agggagttcgctgga

SEQ ID NO: 61113 - DNA, 15 bp, Homo sapiens
gagggagttcgctgg

SEQ ID NO: 61114 - DNA, 15 bp, Homo sapiens
agagggagttcgctg

SEQ ID NO: 61115 - DNA, 15 bp, Homo sapiens
aagagggagttcgct

SEQ ID NO: 61116 - DNA, 15 bp, Homo sapiens
taagagggagttcgc

SEQ ID NO: 61117 - DNA, 15 bp, Homo sapiens
gtaagagggagttcg

SEQ ID NO: 61118 - DNA, 15 bp, Homo sapiens
ggtaagagggagttc

SEQ ID NO: 61119 - DNA, 15 bp, Homo sapiens
gggtaagagggagtt

SEQ ID NO: 61120 - DNA, 15 bp, Homo sapiens
agggtaagagggagt

SEQ ID NO: 61121 - DNA, 15 bp, Homo sapiens
aagggtaagagggag

SEQ ID NO: 61122 - DNA, 15 bp, Homo sapiens
gaagggtaagaggga

SEQ ID NO: 61123 - DNA, 15 bp, Homo sapiens
tgaagggtaagaggg

SEQ ID NO: 61124 - DNA, 15 bp, Homo sapiens
ttgaagggtaagagg

SEQ ID NO: 61125 - DNA, 15 bp, Homo sapiens
cttgaagggtaagag

SEQ ID NO: 61126 - DNA, 15 bp, Homo sapiens
ccttgaagggtaaga

SEQ ID NO: 61127 - DNA, 15 bp, Homo sapiens
accttgaagggtaag

SEQ ID NO: 61128 - DNA, 15 bp, Homo sapiens
aaccttgaagggtaa

SEQ ID NO: 61129 - DNA, 15 bp, Homo sapiens
gaaccttgaagggta

SEQ ID NO: 61130 - DNA, 15 bp, Homo sapiens
agaaccttgaagggt

SEQ ID NO: 61131 - DNA, 15 bp, Homo sapiens
cagaaccttgaaggg

SEQ ID NO: 61132 - DNA, 15 bp, Homo sapiens
gcagaaccttgaagg

SEQ ID NO: 61133 - DNA, 15 bp, Homo sapiens
tgcagaaccttgaag

SEQ ID NO: 61134 - DNA, 15 bp, Homo sapiens
atgcagaaccttgaa

SEQ ID NO: 61135 - DNA, 15 bp, Homo sapiens
tatgcagaaccttga

SEQ ID NO: 61136 - DNA, 15 bp, Homo sapiens
gtatgcagaaccttg

SEQ ID NO: 61137 - DNA, 15 bp, Homo sapiens
agtatgcagaacctt

SEQ ID NO: 61138 - DNA, 15 bp, Homo sapiens
aagtatgcagaacct

SEQ ID NO: 61139 - DNA, 15 bp, Homo sapiens
caagtatgcagaacc

SEQ ID NO: 61140 - DNA, 15 bp, Homo sapiens
ccaagtatgcagaac

SEQ ID NO: 61141 - DNA, 15 bp, Homo sapiens
gccaagtatgcagaa

SEQ ID NO: 61142 - DNA, 15 bp, Homo sapiens
tgccaagtatgcaga

SEQ ID NO: 61143 - DNA, 15 bp, Homo sapiens
ctgccaagtatgcag

SEQ ID NO: 61144 - DNA, 15 bp, Homo sapiens
cctgccaagtatgca

SEQ ID NO: 61145 - DNA, 15 bp, Homo sapiens
acctgccaagtatgc

SEQ ID NO: 61146 - DNA, 15 bp, Homo sapiens
cacctgccaagtatg

SEQ ID NO: 61147 - DNA, 15 bp, Homo sapiens
tcacctgccaagtat

SEQ ID NO: 61148 - DNA, 15 bp, Homo sapiens
gtcacctgccaagta

SEQ ID NO: 61149 - DNA, 15 bp, Homo sapiens
tgtcacctgccaagt

SEQ ID NO: 61150 - DNA, 15 bp, Homo sapiens
gtgtcacctgccaag

SEQ ID NO: 61151 - DNA, 15 bp, Homo sapiens
agtgtcacctgccaa

SEQ ID NO: 61152 - DNA, 15 bp, Homo sapiens
cagtgtcacctgcca

SEQ ID NO: 61153 - DNA, 15 bp, Homo sapiens
ccagtgtcacctgcc

SEQ ID NO: 61154 - DNA, 15 bp, Homo sapiens
accagtgtcacctgc

SEQ ID NO: 61155 - DNA, 15 bp, Homo sapiens
caccagtgtcacctg

SEQ ID NO: 61156 - DNA, 15 bp, Homo sapiens
tcaccagtgtcacct

SEQ ID NO: 61157 - DNA, 15 bp, Homo sapiens
ttcaccagtgtcacc

SEQ ID NO: 61158 - DNA, 15 bp, Homo sapiens
tttcaccagtgtcac

SEQ ID NO: 61159 - DNA, 15 bp, Homo sapiens
ttttcaccagtgtca

SEQ ID NO: 61160 - DNA, 15 bp, Homo sapiens
gttttcaccagtgtc

SEQ ID NO: 61161 - DNA, 15 bp, Homo sapiens
agttttcaccagtgt

SEQ ID NO: 61162 - DNA, 15 bp, Homo sapiens
tagttttcaccagtg

SEQ ID NO: 61163 - DNA, 15 bp, Homo sapiens
ttagttttcaccagt

SEQ ID NO: 61164 - DNA, 15 bp, Homo sapiens
tttagttttcaccag

SEQ ID NO: 61165 - DNA, 15 bp, Homo sapiens
atttagttttcacca

SEQ ID NO: 61166 - DNA, 15 bp, Homo sapiens
aatttagttttcacc

SEQ ID NO: 61167 - DNA, 15 bp, Homo sapiens
aaatttagttttcac

SEQ ID NO: 61168 - DNA, 15 bp, Homo sapiens
aaaatttagttttca

SEQ ID NO: 61169 - DNA, 15 bp, Homo sapiens
aaaaatttagttttc

SEQ ID NO: 61170 - DNA, 15 bp, Homo sapiens
taaaaatttagtttt

SEQ ID NO: 61171 - DNA, 15 bp, Homo sapiens
ttaaaaatttagttt

SEQ ID NO: 61172 - DNA, 15 bp, Homo sapiens
tttaaaaatttagtt

SEQ ID NO: 61173 - DNA, 15 bp, Homo sapiens
ttttaaaaatttagt

SEQ ID NO: 61174 - DNA, 15 bp, Homo sapiens
tttttaaaaatttag

SEQ ID NO: 61175 - DNA, 15 bp, Homo sapiens
ttttttaaaaattta

SEQ ID NO: 61176 - DNA, 15 bp, Homo sapiens
cttttttaaaaattt

SEQ ID NO: 61177 - DNA, 15 bp, Homo sapiens
ccttttttaaaaatt

SEQ ID NO: 61178 - DNA, 15 bp, Homo sapiens
accttttttaaaaat

SEQ ID NO: 61179 - DNA, 15 bp, Homo sapiens
aaccttttttaaaaa

SEQ ID NO: 61180 - DNA, 15 bp, Homo sapiens
gaaccttttttaaaa

SEQ ID NO: 61181 - DNA, 15 bp, Homo sapiens
agaaccttttttaaa

SEQ ID NO: 61182 - DNA, 15 bp, Homo sapiens
cagaaccttttttaa

SEQ ID NO: 61183 - DNA, 15 bp, Homo sapiens
gcagaacctttttta

SEQ ID NO: 61184 - DNA, 15 bp, Homo sapiens
tgcagaacctttttt

SEQ ID NO: 61185 - DNA, 15 bp, Homo sapiens
atgcagaaccttttt

SEQ ID NO: 61186 - DNA, 15 bp, Homo sapiens
tatgcagaacctttt

SEQ ID NO: 61187 - DNA, 15 bp, Homo sapiens
ttatgcagaaccttt

SEQ ID NO: 61188 - DNA, 15 bp, Homo sapiens
cttatgcagaacctt

SEQ ID NO: 61189 - DNA, 15 bp, Homo sapiens
ccttatgcagaacct

SEQ ID NO: 61190 - DNA, 15 bp, Homo sapiens
tccttatgcagaacc

SEQ ID NO: 61191 - DNA, 15 bp, Homo sapiens
atccttatgcagaac

SEQ ID NO: 61192 - DNA, 15 bp, Homo sapiens
gatccttatgcagaa

SEQ ID NO: 61193 - DNA, 15 bp, Homo sapiens
agatccttatgcaga

SEQ ID NO: 61194 - DNA, 15 bp, Homo sapiens
gagatccttatgcag

SEQ ID NO: 61195 - DNA, 15 bp, Homo sapiens
ggagatccttatgca

SEQ ID NO: 61196 - DNA, 15 bp, Homo sapiens
tggagatccttatgc

SEQ ID NO: 61197 - DNA, 15 bp, Homo sapiens
atggagatccttatg

SEQ ID NO: 61198 - DNA, 15 bp, Homo sapiens
tatggagatccttat

SEQ ID NO: 61199 - DNA, 15 bp, Homo sapiens
ctatggagatcctta

SEQ ID NO: 61200 - DNA, 15 bp, Homo sapiens
cctatggagatcctt

SEQ ID NO: 61201 - DNA, 15 bp, Homo sapiens
gcctatggagatcct

SEQ ID NO: 61202 - DNA, 15 bp, Homo sapiens
tgcctatggagatcc

SEQ ID NO: 61203 - DNA, 15 bp, Homo sapiens
ttgcctatggagatc

SEQ ID NO: 61204 - DNA, 15 bp, Homo sapiens
cttgcctatggagat

SEQ ID NO: 61205 - DNA, 15 bp, Homo sapiens
tcttgcctatggaga

SEQ ID NO: 61206 - DNA, 15 bp, Homo sapiens
gtcttgcctatggag

SEQ ID NO: 61207 - DNA, 15 bp, Homo sapiens
agtcttgcctatgga

SEQ ID NO: 61208 - DNA, 15 bp, Homo sapiens
aagtcttgcctatgg

SEQ ID NO: 61209 - DNA, 15 bp, Homo sapiens
gaagtcttgcctatg

SEQ ID NO: 61210 - DNA, 15 bp, Homo sapiens
ggaagtcttgcctat

SEQ ID NO: 61211 - DNA, 15 bp, Homo sapiens
gggaagtcttgccta

SEQ ID NO: 61212 - DNA, 15 bp, Homo sapiens
agggaagtcttgcct

SEQ ID NO: 61213 - DNA, 15 bp, Homo sapiens
tagggaagtcttgcc

SEQ ID NO: 61214 - DNA, 15 bp, Homo sapiens
ttagggaagtcttgc

SEQ ID NO: 61215 - DNA, 15 bp, Homo sapiens
cttagggaagtcttg

SEQ ID NO: 61216 - DNA, 15 bp, Homo sapiens
ccttagggaagtctt

SEQ ID NO: 61217 - DNA, 15 bp, Homo sapiens
accttagggaagtct

SEQ ID NO: 61218 - DNA, 15 bp, Homo sapiens
caccttagggaagtc

SEQ ID NO: 61219 - DNA, 15 bp, Homo sapiens
gcaccttagggaagt

SEQ ID NO: 61220 - DNA, 15 bp, Homo sapiens
tgcaccttagggaag

SEQ ID NO: 61221 - DNA, 15 bp, Homo sapiens
atgcaccttagggaa

SEQ ID NO: 61222 - DNA, 15 bp, Homo sapiens
tatgcaccttaggga

SEQ ID NO: 61223 - DNA, 15 bp, Homo sapiens
atatgcaccttaggg

SEQ ID NO: 61224 - DNA, 15 bp, Homo sapiens
tatatgcaccttagg

SEQ ID NO: 61225 - DNA, 15 bp, Homo sapiens
atatatgcaccttag

SEQ ID NO: 61226 - DNA, 15 bp, Homo sapiens
tatatatgcacctta

SEQ ID NO: 61227 - DNA, 15 bp, Homo sapiens
ctatatatgcacctt

SEQ ID NO: 61228 - DNA, 15 bp, Homo sapiens
tctatatatgcacct

SEQ ID NO: 61229 - DNA, 15 bp, Homo sapiens
gtctatatatgcacc

SEQ ID NO: 61230 - DNA, 15 bp, Homo sapiens
tgtctatatatgcac

SEQ ID NO: 61231 - DNA, 15 bp, Homo sapiens
gtgtctatatatgca

SEQ ID NO: 61232 - DNA, 15 bp, Homo sapiens
tgtgtctatatatgc

SEQ ID NO: 61233 - DNA, 15 bp, Homo sapiens
gtgtgtctatatatg

SEQ ID NO: 61234 - DNA, 15 bp, Homo sapiens
agtgtgtctatatat

SEQ ID NO: 61235 - DNA, 15 bp, Homo sapiens
cagtgtgtctatata

SEQ ID NO: 61236 - DNA, 15 bp, Homo sapiens
acagtgtgtctatat

SEQ ID NO: 61237 - DNA, 15 bp, Homo sapiens
tacagtgtgtctata

SEQ ID NO: 61238 - DNA, 15 bp, Homo sapiens
ttacagtgtgtctat

SEQ ID NO: 61239 - DNA, 15 bp, Homo sapiens
attacagtgtgtcta

SEQ ID NO: 61240 - DNA, 15 bp, Homo sapiens
cattacagtgtgtct

SEQ ID NO: 61241 - DNA, 15 bp, Homo sapiens
acattacagtgtgtc

SEQ ID NO: 61242 - DNA, 15 bp, Homo sapiens
aacattacagtgtgt

SEQ ID NO: 61243 - DNA, 15 bp, Homo sapiens
aaacattacagtgtg

SEQ ID NO: 61244 - DNA, 15 bp, Homo sapiens
taaacattacagtgt

SEQ ID NO: 61245 - DNA, 15 bp, Homo sapiens
ataaacattacagtg

SEQ ID NO: 61246 - DNA, 15 bp, Homo sapiens
aataaacattacagt

SEQ ID NO: 61247 - DNA, 15 bp, Homo sapiens
caataaacattacag

SEQ ID NO: 61248 - DNA, 15 bp, Homo sapiens
acaataaacattaca

SEQ ID NO: 61249 - DNA, 15 bp, Homo sapiens
cacaataaacattac

SEQ ID NO: 61250 - DNA, 15 bp, Homo sapiens
gcacaataaacatta

SEQ ID NO: 61251 - DNA, 15 bp, Homo sapiens
agcacaataaacatt

SEQ ID NO: 61252 - DNA, 15 bp, Homo sapiens
aagcacaataaacat

SEQ ID NO: 61253 - DNA, 15 bp, Homo sapiens
gaagcacaataaaca

SEQ ID NO: 61254 - DNA, 15 bp, Homo sapiens
tgaagcacaataaac

SEQ ID NO: 61255 - DNA, 15 bp, Homo sapiens
gtgaagcacaataaa

SEQ ID NO: 61256 - DNA, 15 bp, Homo sapiens
agtgaagcacaataa

SEQ ID NO: 61257 - DNA, 15 bp, Homo sapiens
tagtgaagcacaata

SEQ ID NO: 61258 - DNA, 15 bp, Homo sapiens
gtagtgaagcacaat

SEQ ID NO: 61259 - DNA, 15 bp, Homo sapiens
agtagtgaagcacaa

SEQ ID NO: 61260 - DNA, 15 bp, Homo sapiens
cagtagtgaagcaca

SEQ ID NO: 61261 - DNA, 15 bp, Homo sapiens
tcagtagtgaagcac

SEQ ID NO: 61262 - DNA, 15 bp, Homo sapiens
ctcagtagtgaagca

SEQ ID NO: 61263 - DNA, 15 bp, Homo sapiens
actcagtagtgaagc

SEQ ID NO: 61264 - DNA, 15 bp, Homo sapiens
aactcagtagtgaag

SEQ ID NO: 61265 - DNA, 15 bp, Homo sapiens
caactcagtagtgaa

SEQ ID NO: 61266 - DNA, 15 bp, Homo sapiens
gcaactcagtagtga

SEQ ID NO: 61267 - DNA, 15 bp, Homo sapiens
ggcaactcagtagtg

SEQ ID NO: 61268 - DNA, 15 bp, Homo sapiens
aggcaactcagtagt

SEQ ID NO: 61269 - DNA, 15 bp, Homo sapiens
aaggcaactcagtag

SEQ ID NO: 61270 - DNA, 15 bp, Homo sapiens
aaaggcaactcagta

SEQ ID NO: 61271 - DNA, 15 bp, Homo sapiens
aaaaggcaactcagt

SEQ ID NO: 61272 - DNA, 15 bp, Homo sapiens
aaaaaggcaactcag

SEQ ID NO: 61273 - DNA, 15 bp, Homo sapiens
taaaaaggcaactca

SEQ ID NO: 61274 - DNA, 15 bp, Homo sapiens
ttaaaaaggcaactc

SEQ ID NO: 61275 - DNA, 15 bp, Homo sapiens
tttaaaaaggcaact

SEQ ID NO: 61276 - DNA, 15 bp, Homo sapiens
ctttaaaaaggcaac

SEQ ID NO: 61277 - DNA, 15 bp, Homo sapiens
gctttaaaaaggcaa

SEQ ID NO: 61278 - DNA, 15 bp, Homo sapiens
agctttaaaaaggca

SEQ ID NO: 61279 - DNA, 15 bp, Homo sapiens
tagctttaaaaaggc

SEQ ID NO: 61280 - DNA, 15 bp, Homo sapiens
ttagctttaaaaagg

SEQ ID NO: 61281 - DNA, 15 bp, Homo sapiens
gttagctttaaaaag

SEQ ID NO: 61282 - DNA, 15 bp, Homo sapiens
agttagctttaaaaa

SEQ ID NO: 61283 - DNA, 15 bp, Homo sapiens
aagttagctttaaaa

SEQ ID NO: 61284 - DNA, 15 bp, Homo sapiens
taagttagctttaaa

SEQ ID NO: 61285 - DNA, 15 bp, Homo sapiens
ttaagttagctttaa

SEQ ID NO: 61286 - DNA, 15 bp, Homo sapiens
tttaagttagcttta

SEQ ID NO: 61287 - DNA, 15 bp, Homo sapiens
gtttaagttagcttt

SEQ ID NO: 61288 - DNA, 15 bp, Homo sapiens
ggtttaagttagctt

SEQ ID NO: 61289 - DNA, 15 bp, Homo sapiens
aggtttaagttagct

SEQ ID NO: 61290 - DNA, 15 bp, Homo sapiens
aaggtttaagttagc

SEQ ID NO: 61291 - DNA, 15 bp, Homo sapiens
gaaggtttaagttag

SEQ ID NO: 61292 - DNA, 15 bp, Homo sapiens
agaaggtttaagtta

SEQ ID NO: 61293 - DNA, 15 bp, Homo sapiens
tagaaggtttaagtt

SEQ ID NO: 61294 - DNA, 15 bp, Homo sapiens
ttagaaggtttaagt

SEQ ID NO: 61295 - DNA, 15 bp, Homo sapiens
tttagaaggtttaag

SEQ ID NO: 61296 - DNA, 15 bp, Homo sapiens
ctttagaaggtttaa

SEQ ID NO: 61297 - DNA, 15 bp, Homo sapiens
cctttagaaggttta

SEQ ID NO: 61298 - DNA, 15 bp, Homo sapiens
ccctttagaaggttt

SEQ ID NO: 61299 - DNA, 15 bp, Homo sapiens
tccctttagaaggtt

SEQ ID NO: 61300 - DNA, 15 bp, Homo sapiens
atccctttagaaggt

SEQ ID NO: 61301 - DNA, 15 bp, Homo sapiens
gatccctttagaagg

SEQ ID NO: 61302 - DNA, 15 bp, Homo sapiens
agatccctttagaag

SEQ ID NO: 61303 - DNA, 15 bp, Homo sapiens
aagatccctttagaa

SEQ ID NO: 61304 - DNA, 15 bp, Homo sapiens
taagatccctttaga

SEQ ID NO: 61305 - DNA, 15 bp, Homo sapiens
ataagatccctttag

SEQ ID NO: 61306 - DNA, 15 bp, Homo sapiens
gataagatcccttta

SEQ ID NO: 61307 - DNA, 15 bp, Homo sapiens
agataagatcccttt

SEQ ID NO: 61308 - DNA, 15 bp, Homo sapiens
gagataagatccctt

SEQ ID NO: 61309 - DNA, 15 bp, Homo sapiens
tgagataagatccct

SEQ ID NO: 61310 - DNA, 15 bp, Homo sapiens
ttgagataagatccc

SEQ ID NO: 61311 - DNA, 15 bp, Homo sapiens
tttgagataagatcc

SEQ ID NO: 61312 - DNA, 15 bp, Homo sapiens
ttttgagataagatc

SEQ ID NO: 61313 - DNA, 15 bp, Homo sapiens
gttttgagataagat

SEQ ID NO: 61314 - DNA, 15 bp, Homo sapiens
agttttgagataaga

SEQ ID NO: 61315 - DNA, 15 bp, Homo sapiens
gagttttgagataag

SEQ ID NO: 61316 - DNA, 15 bp, Homo sapiens
tgagttttgagataa

SEQ ID NO: 61317 - DNA, 15 bp, Homo sapiens
ctgagttttgagata

SEQ ID NO: 61318 - DNA, 15 bp, Homo sapiens
tctgagttttgagat

SEQ ID NO: 61319 - DNA, 15 bp, Homo sapiens
ctctgagttttgaga

SEQ ID NO: 61320 - DNA, 15 bp, Homo sapiens
gctctgagttttgag

SEQ ID NO: 61321 - DNA, 15 bp, Homo sapiens
tgctctgagttttga

SEQ ID NO: 61322 - DNA, 15 bp, Homo sapiens
atgctctgagttttg

SEQ ID NO: 61323 - DNA, 15 bp, Homo sapiens
gatgctctgagtttt

SEQ ID NO: 61324 - DNA, 15 bp, Homo sapiens
agatgctctgagttt

SEQ ID NO: 61325 - DNA, 15 bp, Homo sapiens
tagatgctctgagtt

SEQ ID NO: 61326 - DNA, 15 bp, Homo sapiens
atagatgctctgagt

SEQ ID NO: 61327 - DNA, 15 bp, Homo sapiens
aatagatgctctgag

SEQ ID NO: 61328 - DNA, 15 bp, Homo sapiens
aaatagatgctctga

SEQ ID NO: 61329 - DNA, 15 bp, Homo sapiens
aaaatagatgctctg

SEQ ID NO: 61330 - DNA, 15 bp, Homo sapiens
gaaaatagatgctct

SEQ ID NO: 61331 - DNA, 15 bp, Homo sapiens
ggaaaatagatgctc

SEQ ID NO: 61332 - DNA, 15 bp, Homo sapiens
aggaaaatagatgct

SEQ ID NO: 61333 - DNA, 15 bp, Homo sapiens
gaggaaaatagatgc

SEQ ID NO: 61334 - DNA, 15 bp, Homo sapiens
agaggaaaatagatg

SEQ ID NO: 61335 - DNA, 15 bp, Homo sapiens
tagaggaaaatagat

SEQ ID NO: 61336 - DNA, 15 bp, Homo sapiens
atagaggaaaataga

SEQ ID NO: 61337 - DNA, 15 bp, Homo sapiens
aatagaggaaaatag

SEQ ID NO: 61338 - DNA, 15 bp, Homo sapiens
aaatagaggaaaata

SEQ ID NO: 61339 - DNA, 15 bp, Homo sapiens
aaaatagaggaaaat

SEQ ID NO: 61340 - DNA, 15 bp, Homo sapiens
taaaatagaggaaaa

SEQ ID NO: 61341 - DNA, 15 bp, Homo sapiens
ttaaaatagaggaaa

SEQ ID NO: 61342 - DNA, 15 bp, Homo sapiens
tttaaaatagaggaa

SEQ ID NO: 61343 - DNA, 15 bp, Homo sapiens
atttaaaatagagga

SEQ ID NO: 61344 - DNA, 15 bp, Homo sapiens
aatttaaaatagagg

SEQ ID NO: 61345 - DNA, 15 bp, Homo sapiens
gaatttaaaatagag

SEQ ID NO: 61346 - DNA, 15 bp, Homo sapiens
agaatttaaaataga

SEQ ID NO: 61347 - DNA, 15 bp, Homo sapiens
gagaatttaaaatag

SEQ ID NO: 61348 - DNA, 15 bp, Homo sapiens
ggagaatttaaaata

SEQ ID NO: 61349 - DNA, 15 bp, Homo sapiens
gggagaatttaaaat

SEQ ID NO: 61350 - DNA, 15 bp, Homo sapiens
agggagaatttaaaa

SEQ ID NO: 61351 - DNA, 15 bp, Homo sapiens
gagggagaatttaaa

SEQ ID NO: 61352 - DNA, 15 bp, Homo sapiens
agagggagaatttaa

SEQ ID NO: 61353 - DNA, 15 bp, Homo sapiens
cagagggagaattta

SEQ ID NO: 61354 - DNA, 15 bp, Homo sapiens
tcagagggagaattt

SEQ ID NO: 61355 - DNA, 15 bp, Homo sapiens
ttcagagggagaatt

SEQ ID NO: 61356 - DNA, 15 bp, Homo sapiens
tttcagagggagaat

SEQ ID NO: 61357 - DNA, 15 bp, Homo sapiens
atttcagagggagaa

SEQ ID NO: 61358 - DNA, 15 bp, Homo sapiens
tatttcagagggaga

SEQ ID NO: 61359 - DNA, 15 bp, Homo sapiens
atatttcagagggag

SEQ ID NO: 61360 - DNA, 15 bp, Homo sapiens
aatatttcagaggga

SEQ ID NO: 61361 - DNA, 15 bp, Homo sapiens
gaatatttcagaggg

SEQ ID NO: 61362 - DNA, 15 bp, Homo sapiens
agaatatttcagagg

SEQ ID NO: 61363 - DNA, 15 bp, Homo sapiens
cagaatatttcagag

SEQ ID NO: 61364 - DNA, 15 bp, Homo sapiens
tcagaatatttcaga

SEQ ID NO: 61365 - DNA, 15 bp, Homo sapiens
ttcagaatatttcag

SEQ ID NO: 61366 - DNA, 15 bp, Homo sapiens
attcagaatatttca

SEQ ID NO: 61367 - DNA, 15 bp, Homo sapiens
cattcagaatatttc

SEQ ID NO: 61368 - DNA, 15 bp, Homo sapiens
gcattcagaatattt

SEQ ID NO: 61369 - DNA, 15 bp, Homo sapiens
agcattcagaatatt

SEQ ID NO: 61370 - DNA, 15 bp, Homo sapiens
aagcattcagaatat

SEQ ID NO: 61371 - DNA, 15 bp, Homo sapiens
aaagcattcagaata

SEQ ID NO: 61372 - DNA, 15 bp, Homo sapiens
aaaagcattcagaat

SEQ ID NO: 61373 - DNA, 15 bp, Homo sapiens
aaaaagcattcagaa

SEQ ID NO: 61374 - DNA, 15 bp, Homo sapiens
aaaaaagcattcaga

SEQ ID NO: 61375 - DNA, 15 bp, Homo sapiens
taaaaaagcattcag

SEQ ID NO: 61376 - DNA, 15 bp, Homo sapiens
ttaaaaaagcattca

SEQ ID NO: 61377 - DNA, 15 bp, Homo sapiens
tttaaaaaagcattc

SEQ ID NO: 61378 - DNA, 15 bp, Homo sapiens
ctttaaaaaagcatt

SEQ ID NO: 61379 - DNA, 15 bp, Homo sapiens
cctttaaaaaagcat

SEQ ID NO: 61380 - DNA, 15 bp, Homo sapiens
tcctttaaaaaagca

SEQ ID NO: 61381 - DNA, 15 bp, Homo sapiens
atcctttaaaaaagc

SEQ ID NO: 61382 - DNA, 15 bp, Homo sapiens
catcctttaaaaaag

SEQ ID NO: 61383 - DNA, 15 bp, Homo sapiens
acatcctttaaaaaa

SEQ ID NO: 61384 - DNA, 15 bp, Homo sapiens
cacatcctttaaaaa

SEQ ID NO: 61385 - DNA, 15 bp, Homo sapiens
ccacatcctttaaaa

SEQ ID NO: 61386 - DNA, 15 bp, Homo sapiens
accacatcctttaaa

SEQ ID NO: 61387 - DNA, 15 bp, Homo sapiens
caccacatcctttaa

SEQ ID NO: 61388 - DNA, 15 bp, Homo sapiens
acaccacatccttta

SEQ ID NO: 61389 - DNA, 15 bp, Homo sapiens
cacaccacatccttt

SEQ ID NO: 61390 - DNA, 15 bp, Homo sapiens
acacaccacatcctt

SEQ ID NO: 61391 - DNA, 15 bp, Homo sapiens
cacacaccacatcct

SEQ ID NO: 61392 - DNA, 15 bp, Homo sapiens
acacacaccacatcc

SEQ ID NO: 61393 - DNA, 15 bp, Homo sapiens
cacacacaccacatc

SEQ ID NO: 61394 - DNA, 15 bp, Homo sapiens
acacacacaccacat

SEQ ID NO: 61395 - DNA, 15 bp, Homo sapiens
cacacacacaccaca

SEQ ID NO: 61396 - DNA, 15 bp, Homo sapiens
acacacacacaccac

SEQ ID NO: 61397 - DNA, 15 bp, Homo sapiens
cacacacacacacca

SEQ ID NO: 61398 - DNA, 15 bp, Homo sapiens
acacacacacacacc

SEQ ID NO: 61399 - DNA, 15 bp, Homo sapiens
cacacacacacacac

SEQ ID NO: 61400 - DNA, 15 bp, Homo sapiens
acacacacacacaca

SEQ ID NO: 61401 - DNA, 15 bp, Homo sapiens
aacacacacacacac

SEQ ID NO: 61402 - DNA, 15 bp, Homo sapiens
aaacacacacacaca

SEQ ID NO: 61403 - DNA, 15 bp, Homo sapiens
taaacacacacacac

SEQ ID NO: 61404 - DNA, 15 bp, Homo sapiens
ttaaacacacacaca

SEQ ID NO: 61405 - DNA, 15 bp, Homo sapiens
tttaaacacacacac

SEQ ID NO: 61406 - DNA, 15 bp, Homo sapiens
gtttaaacacacaca

SEQ ID NO: 61407 - DNA, 15 bp, Homo sapiens
agtttaaacacacac

SEQ ID NO: 61408 - DNA, 15 bp, Homo sapiens
aagtttaaacacaca

SEQ ID NO: 61409 - DNA, 15 bp, Homo sapiens
taagtttaaacacac

SEQ ID NO: 61410 - DNA, 15 bp, Homo sapiens
ttaagtttaaacaca

SEQ ID NO: 61411 - DNA, 15 bp, Homo sapiens
attaagtttaaacac

SEQ ID NO: 61412 - DNA, 15 bp, Homo sapiens
cattaagtttaaaca

SEQ ID NO: 61413 - DNA, 15 bp, Homo sapiens
acattaagtttaaac

SEQ ID NO: 61414 - DNA, 15 bp, Homo sapiens
gacattaagtttaaa

SEQ ID NO: 61415 - DNA, 15 bp, Homo sapiens
agacattaagtttaa

SEQ ID NO: 61416 - DNA, 15 bp, Homo sapiens
aagacattaagttta

SEQ ID NO: 61417 - DNA, 15 bp, Homo sapiens
aaagacattaagttt

SEQ ID NO: 61418 - DNA, 15 bp, Homo sapiens
gaaagacattaagtt

SEQ ID NO: 61419 - DNA, 15 bp, Homo sapiens
ggaaagacattaagt

SEQ ID NO: 61420 - DNA, 15 bp, Homo sapiens
gggaaagacattaag

SEQ ID NO: 61421 - DNA, 15 bp, Homo sapiens
agggaaagacattaa

SEQ ID NO: 61422 - DNA, 15 bp, Homo sapiens
tagggaaagacatta

SEQ ID NO: 61423 - DNA, 15 bp, Homo sapiens
ctagggaaagacatt

SEQ ID NO: 61424 - DNA, 15 bp, Homo sapiens
gctagggaaagacat

SEQ ID NO: 61425 - DNA, 15 bp, Homo sapiens
ggctagggaaagaca

SEQ ID NO: 61426 - DNA, 15 bp, Homo sapiens
cggctagggaaagac

SEQ ID NO: 61427 - DNA, 15 bp, Homo sapiens
acggctagggaaaga

SEQ ID NO: 61428 - DNA, 15 bp, Homo sapiens
aacggctagggaaag

SEQ ID NO: 61429 - DNA, 15 bp, Homo sapiens
gaacggctagggaaa

SEQ ID NO: 61430 - DNA, 15 bp, Homo sapiens
agaacggctagggaa

SEQ ID NO: 61431 - DNA, 15 bp, Homo sapiens
aagaacggctaggga

SEQ ID NO: 61432 - DNA, 15 bp, Homo sapiens
aaagaacggctaggg

SEQ ID NO: 61433 - DNA, 15 bp, Homo sapiens
taaagaacggctagg

SEQ ID NO: 61434 - DNA, 15 bp, Homo sapiens
ataaagaacggctag

SEQ ID NO: 61435 - DNA, 15 bp, Homo sapiens
aataaagaacggcta

SEQ ID NO: 61436 - DNA, 15 bp, Homo sapiens
taataaagaacggct

SEQ ID NO: 61437 - DNA, 15 bp, Homo sapiens
gtaataaagaacggc

SEQ ID NO: 61438 - DNA, 15 bp, Homo sapiens
ggtaataaagaacgg

SEQ ID NO: 61439 - DNA, 15 bp, Homo sapiens
tggtaataaagaacg

SEQ ID NO: 61440 - DNA, 15 bp, Homo sapiens
gtggtaataaagaac

SEQ ID NO: 61441 - DNA, 15 bp, Homo sapiens
tgtggtaataaagaa

SEQ ID NO: 61442 - DNA, 15 bp, Homo sapiens
ctgtggtaataaaga

SEQ ID NO: 61443 - DNA, 15 bp, Homo sapiens
cctgtggtaataaag

SEQ ID NO: 61444 - DNA, 15 bp, Homo sapiens
tcctgtggtaataaa

SEQ ID NO: 61445 - DNA, 15 bp, Homo sapiens
ctcctgtggtaataa

SEQ ID NO: 61446 - DNA, 15 bp, Homo sapiens
gctcctgtggtaata

SEQ ID NO: 61447 - DNA, 15 bp, Homo sapiens
agctcctgtggtaat

SEQ ID NO: 61448 - DNA, 15 bp, Homo sapiens
gagctcctgtggtaa

SEQ ID NO: 61449 - DNA, 15 bp, Homo sapiens
agagctcctgtggta

SEQ ID NO: 61450 - DNA, 15 bp, Homo sapiens
cagagctcctgtggt

SEQ ID NO: 61451 - DNA, 15 bp, Homo sapiens
ccagagctcctgtgg

SEQ ID NO: 61452 - DNA, 15 bp, Homo sapiens
cccagagctcctgtg

SEQ ID NO: 61453 - DNA, 15 bp, Homo sapiens
tcccagagctcctgt

SEQ ID NO: 61454 - DNA, 15 bp, Homo sapiens
atcccagagctcctg

SEQ ID NO: 61455 - DNA, 15 bp, Homo sapiens
tatcccagagctcct

SEQ ID NO: 61456 - DNA, 15 bp, Homo sapiens
atatcccagagctcc

SEQ ID NO: 61457 - DNA, 15 bp, Homo sapiens
gatatcccagagctc

SEQ ID NO: 61458 - DNA, 15 bp, Homo sapiens
tgatatcccagagct

SEQ ID NO: 61459 - DNA, 15 bp, Homo sapiens
ttgatatcccagagc

SEQ ID NO: 61460 - DNA, 15 bp, Homo sapiens
tttgatatcccagag

SEQ ID NO: 61461 - DNA, 15 bp, Homo sapiens
atttgatatcccaga

SEQ ID NO: 61462 - DNA, 15 bp, Homo sapiens
tatttgatatcccag

SEQ ID NO: 61463 - DNA, 15 bp, Homo sapiens
ttatttgatatccca

SEQ ID NO: 61464 - DNA, 15 bp, Homo sapiens
attatttgatatccc

SEQ ID NO: 61465 - DNA, 15 bp, Homo sapiens
tattatttgatatcc

SEQ ID NO: 61466 - DNA, 15 bp, Homo sapiens
atattatttgatatc

SEQ ID NO: 61467 - DNA, 15 bp, Homo sapiens
aatattatttgatat

SEQ ID NO: 61468 - DNA, 15 bp, Homo sapiens
aaatattatttgata

SEQ ID NO: 61469 - DNA, 15 bp, Homo sapiens
gaaatattatttgat

SEQ ID NO: 61470 - DNA, 15 bp, Homo sapiens
agaaatattatttga

SEQ ID NO: 61471 - DNA, 15 bp, Homo sapiens
aagaaatattatttg

SEQ ID NO: 61472 - DNA, 15 bp, Homo sapiens
taagaaatattattt

SEQ ID NO: 61473 - DNA, 15 bp, Homo sapiens
ttaagaaatattatt

SEQ ID NO: 61474 - DNA, 15 bp, Homo sapiens
tttaagaaatattat

SEQ ID NO: 61475 - DNA, 15 bp, Homo sapiens
gtttaagaaatatta

SEQ ID NO: 61476 - DNA, 15 bp, Homo sapiens
ggtttaagaaatatt

SEQ ID NO: 61477 - DNA, 15 bp, Homo sapiens
aggtttaagaaatat

SEQ ID NO: 61478 - DNA, 15 bp, Homo sapiens
aaggtttaagaaata

SEQ ID NO: 61479 - DNA, 15 bp, Homo sapiens
aaaggtttaagaaat

SEQ ID NO: 61480 - DNA, 15 bp, Homo sapiens
taaaggtttaagaaa

SEQ ID NO: 61481 - DNA, 15 bp, Homo sapiens
ataaaggtttaagaa

SEQ ID NO: 61482 - DNA, 15 bp, Homo sapiens
gataaaggtttaaga

SEQ ID NO: 61483 - DNA, 15 bp, Homo sapiens
ggataaaggtttaag

SEQ ID NO: 61484 - DNA, 15 bp, Homo sapiens
gggataaaggtttaa

SEQ ID NO: 61485 - DNA, 15 bp, Homo sapiens
agggataaaggttta

SEQ ID NO: 61486 - DNA, 15 bp, Homo sapiens
aagggataaaggttt

SEQ ID NO: 61487 - DNA, 15 bp, Homo sapiens
aaagggataaaggtt

SEQ ID NO: 61488 - DNA, 15 bp, Homo sapiens
aaaagggataaaggt

SEQ ID NO: 61489 - DNA, 15 bp, Homo sapiens
caaaagggataaagg

SEQ ID NO: 61490 - DNA, 15 bp, Homo sapiens
tcaaaagggataaag

SEQ ID NO: 61491 - DNA, 15 bp, Homo sapiens
atcaaaagggataaa

SEQ ID NO: 61492 - DNA, 15 bp, Homo sapiens
aatcaaaagggataa

SEQ ID NO: 61493 - DNA, 15 bp, Homo sapiens
caatcaaaagggata

SEQ ID NO: 61494 - DNA, 15 bp, Homo sapiens
acaatcaaaagggat

SEQ ID NO: 61495 - DNA, 15 bp, Homo sapiens
tacaatcaaaaggga

SEQ ID NO: 61496 - DNA, 15 bp, Homo sapiens
atacaatcaaaaggg

SEQ ID NO: 61497 - DNA, 15 bp, Homo sapiens
tatacaatcaaaagg

SEQ ID NO: 61498 - DNA, 15 bp, Homo sapiens
ctatacaatcaaaag

SEQ ID NO: 61499 - DNA, 15 bp, Homo sapiens
actatacaatcaaaa

SEQ ID NO: 61500 - DNA, 15 bp, Homo sapiens
tactatacaatcaaa

SEQ ID NO: 61501 - DNA, 15 bp, Homo sapiens
ttactatacaatcaa

SEQ ID NO: 61502 - DNA, 15 bp, Homo sapiens
attactatacaatca

SEQ ID NO: 61503 - DNA, 15 bp, Homo sapiens
aattactatacaatc

SEQ ID NO: 61504 - DNA, 15 bp, Homo sapiens
taattactatacaat

SEQ ID NO: 61505 - DNA, 15 bp, Homo sapiens
ataattactatacaa

SEQ ID NO: 61506 - DNA, 15 bp, Homo sapiens
aataattactataca

SEQ ID NO: 61507 - DNA, 15 bp, Homo sapiens
aaataattactatac

SEQ ID NO: 61508 - DNA, 15 bp, Homo sapiens
taaataattactata

SEQ ID NO: 61509 - DNA, 15 bp, Homo sapiens
ataaataattactat

SEQ ID NO: 61510 - DNA, 15 bp, Homo sapiens
aataaataattacta

SEQ ID NO: 61511 - DNA, 15 bp, Homo sapiens
gaataaataattact

SEQ ID NO: 61512 - DNA, 15 bp, Homo sapiens
tgaataaataattac

SEQ ID NO: 61513 - DNA, 15 bp, Homo sapiens
ttgaataaataatta

SEQ ID NO: 61514 - DNA, 15 bp, Homo sapiens
tttgaataaataatt

SEQ ID NO: 61515 - DNA, 15 bp, Homo sapiens
atttgaataaataat

SEQ ID NO: 61516 - DNA, 15 bp, Homo sapiens
gatttgaataaataa

SEQ ID NO: 61517 - DNA, 15 bp, Homo sapiens
tgatttgaataaata

SEQ ID NO: 61518 - DNA, 15 bp, Homo sapiens
ctgatttgaataaat

SEQ ID NO: 61519 - DNA, 15 bp, Homo sapiens
tctgatttgaataaa

SEQ ID NO: 61520 - DNA, 15 bp, Homo sapiens
atctgatttgaataa

SEQ ID NO: 61521 - DNA, 15 bp, Homo sapiens
tatctgatttgaata

SEQ ID NO: 61522 - DNA, 15 bp, Homo sapiens
gtatctgatttgaat

SEQ ID NO: 61523 - DNA, 15 bp, Homo sapiens
ggtatctgatttgaa

SEQ ID NO: 61524 - DNA, 15 bp, Homo sapiens
tggtatctgatttga

SEQ ID NO: 61525 - DNA, 15 bp, Homo sapiens
ttggtatctgatttg

SEQ ID NO: 61526 - DNA, 15 bp, Homo sapiens
attggtatctgattt

SEQ ID NO: 61527 - DNA, 15 bp, Homo sapiens
aattggtatctgatt

SEQ ID NO: 61528 - DNA, 15 bp, Homo sapiens
taattggtatctgat

SEQ ID NO: 61529 - DNA, 15 bp, Homo sapiens
ttaattggtatctga

SEQ ID NO: 61530 - DNA, 15 bp, Homo sapiens
tttaattggtatctg

SEQ ID NO: 61531 - DNA, 15 bp, Homo sapiens
gtttaattggtatct

SEQ ID NO: 61532 - DNA, 15 bp, Homo sapiens
tgtttaattggtatc

SEQ ID NO: 61533 - DNA, 15 bp, Homo sapiens
atgtttaattggtat

SEQ ID NO: 61534 - DNA, 15 bp, Homo sapiens
tatgtttaattggta

SEQ ID NO: 61535 - DNA, 15 bp, Homo sapiens
ttatgtttaattggt

SEQ ID NO: 61536 - DNA, 15 bp, Homo sapiens
attatgtttaattgg

SEQ ID NO: 61537 - DNA, 15 bp, Homo sapiens
aattatgtttaattg

SEQ ID NO: 61538 - DNA, 15 bp, Homo sapiens
taattatgtttaatt

SEQ ID NO: 61539 - DNA, 15 bp, Homo sapiens
ctaattatgtttaat

SEQ ID NO: 61540 - DNA, 15 bp, Homo sapiens
tctaattatgtttaa

SEQ ID NO: 61541 - DNA, 15 bp, Homo sapiens
atctaattatgttta

SEQ ID NO: 61542 - DNA, 15 bp, Homo sapiens
aatctaattatgttt

SEQ ID NO: 61543 - DNA, 15 bp, Homo sapiens
caatctaattatgtt

SEQ ID NO: 61544 - DNA, 15 bp, Homo sapiens
tcaatctaattatgt

SEQ ID NO: 61545 - DNA, 15 bp, Homo sapiens
atcaatctaattatg

SEQ ID NO: 61546 - DNA, 15 bp, Homo sapiens
aatcaatctaattat

SEQ ID NO: 61547 - DNA, 15 bp, Homo sapiens
aaatcaatctaatta

SEQ ID NO: 61548 - DNA, 15 bp, Homo sapiens
gaaatcaatctaatt

SEQ ID NO: 61549 - DNA, 15 bp, Homo sapiens
agaaatcaatctaat

SEQ ID NO: 61550 - DNA, 15 bp, Homo sapiens
aagaaatcaatctaa

SEQ ID NO: 61551 - DNA, 15 bp, Homo sapiens
gaagaaatcaatcta

SEQ ID NO: 61552 - DNA, 15 bp, Homo sapiens
tgaagaaatcaatct

SEQ ID NO: 61553 - DNA, 15 bp, Homo sapiens
gtgaagaaatcaatc

SEQ ID NO: 61554 - DNA, 15 bp, Homo sapiens
tgtgaagaaatcaat

SEQ ID NO: 61555 - DNA, 15 bp, Homo sapiens
ctgtgaagaaatcaa

SEQ ID NO: 61556 - DNA, 15 bp, Homo sapiens
tctgtgaagaaatca

SEQ ID NO: 61557 - DNA, 15 bp, Homo sapiens
ttctgtgaagaaatc

SEQ ID NO: 61558 - DNA, 15 bp, Homo sapiens
attctgtgaagaaat

SEQ ID NO: 61559 - DNA, 15 bp, Homo sapiens
tattctgtgaagaaa

SEQ ID NO: 61560 - DNA, 15 bp, Homo sapiens
gtattctgtgaagaa

SEQ ID NO: 61561 - DNA, 15 bp, Homo sapiens
tgtattctgtgaaga

SEQ ID NO: 61562 - DNA, 15 bp, Homo sapiens
ttgtattctgtgaag

SEQ ID NO: 61563 - DNA, 15 bp, Homo sapiens
tttgtattctgtgaa

SEQ ID NO: 61564 - DNA, 15 bp, Homo sapiens
ttttgtattctgtga

SEQ ID NO: 61565 - DNA, 15 bp, Homo sapiens
attttgtattctgtg

SEQ ID NO: 61566 - DNA, 15 bp, Homo sapiens
tattttgtattctgt

SEQ ID NO: 61567 - DNA, 15 bp, Homo sapiens
ttattttgtattctg

SEQ ID NO: 61568 - DNA, 15 bp, Homo sapiens
tttattttgtattct

SEQ ID NO: 61569 - DNA, 15 bp, Homo sapiens
gtttattttgtattc

SEQ ID NO: 61570 - DNA, 15 bp, Homo sapiens
tgtttattttgtatt

SEQ ID NO: 61571 - DNA, 15 bp, Homo sapiens
ctgtttattttgtat

SEQ ID NO: 61572 - DNA, 15 bp, Homo sapiens
tctgtttattttgta

SEQ ID NO: 61573 - DNA, 15 bp, Homo sapiens
ttctgtttattttgt

SEQ ID NO: 61574 - DNA, 15 bp, Homo sapiens
attctgtttattttg

SEQ ID NO: 61575 - DNA, 15 bp, Homo sapiens
gattctgtttatttt

SEQ ID NO: 61576 - DNA, 15 bp, Homo sapiens
tgattctgtttattt

SEQ ID NO: 61577 - DNA, 15 bp, Homo sapiens
atgattctgtttatt

SEQ ID NO: 61578 - DNA, 15 bp, Homo sapiens
catgattctgtttat

SEQ ID NO: 61579 - DNA, 15 bp, Homo sapiens
tcatgattctgttta

SEQ ID NO: 61580 - DNA, 15 bp, Homo sapiens
ttcatgattctgttt

SEQ ID NO: 61581 - DNA, 15 bp, Homo sapiens
tttcatgattctgtt

SEQ ID NO: 61582 - DNA, 15 bp, Homo sapiens
atttcatgattctgt

SEQ ID NO: 61583 - DNA, 15 bp, Homo sapiens
aatttcatgattctg

SEQ ID NO: 61584 - DNA, 15 bp, Homo sapiens
taatttcatgattct

SEQ ID NO: 61585 - DNA, 15 bp, Homo sapiens
ttaatttcatgattc

SEQ ID NO: 61586 - DNA, 15 bp, Homo sapiens
cttaatttcatgatt

SEQ ID NO: 61587 - DNA, 15 bp, Homo sapiens
acttaatttcatgat

SEQ ID NO: 61588 - DNA, 15 bp, Homo sapiens
aacttaatttcatga

SEQ ID NO: 61589 - DNA, 15 bp, Homo sapiens
caacttaatttcatg

SEQ ID NO: 61590 - DNA, 15 bp, Homo sapiens
acaacttaatttcat

SEQ ID NO: 61591 - DNA, 15 bp, Homo sapiens
aacaacttaatttca

SEQ ID NO: 61592 - DNA, 15 bp, Homo sapiens
taacaacttaatttc

SEQ ID NO: 61593 - DNA, 15 bp, Homo sapiens
ttaacaacttaattt

SEQ ID NO: 61594 - DNA, 15 bp, Homo sapiens
attaacaacttaatt

SEQ ID NO: 61595 - DNA, 15 bp, Homo sapiens
cattaacaacttaat

SEQ ID NO: 61596 - DNA, 15 bp, Homo sapiens
tcattaacaacttaa

SEQ ID NO: 61597 - DNA, 15 bp, Homo sapiens
atcattaacaactta

SEQ ID NO: 61598 - DNA, 15 bp, Homo sapiens
aatcattaacaactt

SEQ ID NO: 61599 - DNA, 15 bp, Homo sapiens
aaatcattaacaact

SEQ ID NO: 61600 - DNA, 15 bp, Homo sapiens
caaatcattaacaac

SEQ ID NO: 61601 - DNA, 15 bp, Homo sapiens
tcaaatcattaacaa

SEQ ID NO: 61602 - DNA, 15 bp, Homo sapiens
ttcaaatcattaaca

SEQ ID NO: 61603 - DNA, 15 bp, Homo sapiens
cttcaaatcattaac

SEQ ID NO: 61604 - DNA, 15 bp, Homo sapiens
ccttcaaatcattaa

SEQ ID NO: 61605 - DNA, 15 bp, Homo sapiens
gccttcaaatcatta

SEQ ID NO: 61606 - DNA, 15 bp, Homo sapiens
ggccttcaaatcatt

SEQ ID NO: 61607 - DNA, 15 bp, Homo sapiens
aggccttcaaatcat

SEQ ID NO: 61608 - DNA, 15 bp, Homo sapiens
gaggccttcaaatca

SEQ ID NO: 61609 - DNA, 15 bp, Homo sapiens
ggaggccttcaaatc

SEQ ID NO: 61610 - DNA, 15 bp, Homo sapiens
aggaggccttcaaat

SEQ ID NO: 61611 - DNA, 15 bp, Homo sapiens
aaggaggccttcaaa

SEQ ID NO: 61612 - DNA, 15 bp, Homo sapiens
aaaggaggccttcaa

SEQ ID NO: 61613 - DNA, 15 bp, Homo sapiens
aaaaggaggccttca

SEQ ID NO: 61614 - DNA, 15 bp, Homo sapiens
gaaaaggaggccttc

SEQ ID NO: 61615 - DNA, 15 bp, Homo sapiens
agaaaaggaggcctt

SEQ ID NO: 61616 - DNA, 15 bp, Homo sapiens
tagaaaaggaggcct

SEQ ID NO: 61617 - DNA, 15 bp, Homo sapiens
ttagaaaaggaggcc

SEQ ID NO: 61618 - DNA, 15 bp, Homo sapiens
cttagaaaaggaggc

SEQ ID NO: 61619 - DNA, 15 bp, Homo sapiens
tcttagaaaaggagg

SEQ ID NO: 61620 - DNA, 15 bp, Homo sapiens
gtcttagaaaaggag

SEQ ID NO: 61621 - DNA, 15 bp, Homo sapiens
tgtcttagaaaagga

SEQ ID NO: 61622 - DNA, 15 bp, Homo sapiens
atgtcttagaaaagg

SEQ ID NO: 61623 - DNA, 15 bp, Homo sapiens
aatgtcttagaaaag

SEQ ID NO: 61624 - DNA, 15 bp, Homo sapiens
gaatgtcttagaaaa

SEQ ID NO: 61625 - DNA, 15 bp, Homo sapiens
tgaatgtcttagaaa

SEQ ID NO: 61626 - DNA, 15 bp, Homo sapiens
atgaatgtcttagaa

SEQ ID NO: 61627 - DNA, 15 bp, Homo sapiens
aatgaatgtcttaga

SEQ ID NO: 61628 - DNA, 15 bp, Homo sapiens
aaatgaatgtcttag

SEQ ID NO: 61629 - DNA, 15 bp, Homo sapiens
taaatgaatgtctta

SEQ ID NO: 61630 - DNA, 15 bp, Homo sapiens
gtaaatgaatgtctt

SEQ ID NO: 61631 - DNA, 15 bp, Homo sapiens
tgtaaatgaatgtct

SEQ ID NO: 61632 - DNA, 15 bp, Homo sapiens
ttgtaaatgaatgtc

SEQ ID NO: 61633 - DNA, 15 bp, Homo sapiens
gttgtaaatgaatgt

SEQ ID NO: 61634 - DNA, 15 bp, Homo sapiens
agttgtaaatgaatg

SEQ ID NO: 61635 - DNA, 15 bp, Homo sapiens
gagttgtaaatgaat

SEQ ID NO: 61636 - DNA, 15 bp, Homo sapiens
agagttgtaaatgaa

SEQ ID NO: 61637 - DNA, 15 bp, Homo sapiens
aagagttgtaaatga

SEQ ID NO: 61638 - DNA, 15 bp, Homo sapiens
taagagttgtaaatg

SEQ ID NO: 61639 - DNA, 15 bp, Homo sapiens
ttaagagttgtaaat

SEQ ID NO: 61640 - DNA, 15 bp, Homo sapiens
tttaagagttgtaaa

SEQ ID NO: 61641 - DNA, 15 bp, Homo sapiens
ttttaagagttgtaa

SEQ ID NO: 61642 - DNA, 15 bp, Homo sapiens
tttttaagagttgta

SEQ ID NO: 61643 - DNA, 15 bp, Homo sapiens
ttttttaagagttgt

SEQ ID NO: 61644 - DNA, 15 bp, Homo sapiens
cttttttaagagttg

SEQ ID NO: 61645 - DNA, 15 bp, Homo sapiens
acttttttaagagtt

SEQ ID NO: 61646 - DNA, 15 bp, Homo sapiens
tacttttttaagagt

SEQ ID NO: 61647 - DNA, 15 bp, Homo sapiens
gtacttttttaagag

SEQ ID NO: 61648 - DNA, 15 bp, Homo sapiens
agtacttttttaaga

SEQ ID NO: 61649 - DNA, 15 bp, Homo sapiens
cagtacttttttaag

SEQ ID NO: 61650 - DNA, 15 bp, Homo sapiens
tcagtacttttttaa

SEQ ID NO: 61651 - DNA, 15 bp, Homo sapiens
gtcagtactttttta

SEQ ID NO: 61652 - DNA, 15 bp, Homo sapiens
agtcagtactttttt

SEQ ID NO: 61653 - DNA, 15 bp, Homo sapiens
aagtcagtacttttt

SEQ ID NO: 61654 - DNA, 15 bp, Homo sapiens
aaagtcagtactttt

SEQ ID NO: 61655 - DNA, 15 bp, Homo sapiens
taaagtcagtacttt

SEQ ID NO: 61656 - DNA, 15 bp, Homo sapiens
ttaaagtcagtactt

SEQ ID NO: 61657 - DNA, 15 bp, Homo sapiens
tttaaagtcagtact

SEQ ID NO: 61658 - DNA, 15 bp, Homo sapiens
atttaaagtcagtac

SEQ ID NO: 61659 - DNA, 15 bp, Homo sapiens
tatttaaagtcagta

SEQ ID NO: 61660 - DNA, 15 bp, Homo sapiens
ttatttaaagtcagt

SEQ ID NO: 61661 - DNA, 15 bp, Homo sapiens
tttatttaaagtcag

SEQ ID NO: 61662 - DNA, 15 bp, Homo sapiens
ttttatttaaagtca

SEQ ID NO: 61663 - DNA, 15 bp, Homo sapiens
tttttatttaaagtc

SEQ ID NO: 61664 - DNA, 15 bp, Homo sapiens
atttttatttaaagt

SEQ ID NO: 61665 - DNA, 15 bp, Homo sapiens
gatttttatttaaag

SEQ ID NO: 61666 - DNA, 15 bp, Homo sapiens
ggatttttatttaaa

SEQ ID NO: 61667 - DNA, 15 bp, Homo sapiens
tggatttttatttaa

SEQ ID NO: 61668 - DNA, 15 bp, Homo sapiens
ttggatttttattta

SEQ ID NO: 61669 - DNA, 15 bp, Homo sapiens
tttggatttttattt

SEQ ID NO: 61670 - DNA, 15 bp, Homo sapiens
ctttggatttttatt

SEQ ID NO: 61671 - DNA, 15 bp, Homo sapiens
tctttggatttttat

SEQ ID NO: 61672 - DNA, 15 bp, Homo sapiens
ttctttggattttta

SEQ ID NO: 61673 - DNA, 15 bp, Homo sapiens
attctttggattttt

SEQ ID NO: 61674 - DNA, 15 bp, Homo sapiens
tattctttggatttt

SEQ ID NO: 61675 - DNA, 15 bp, Homo sapiens
atattctttggattt

SEQ ID NO: 61676 - DNA, 15 bp, Homo sapiens
tatattctttggatt

SEQ ID NO: 61677 - DNA, 15 bp, Homo sapiens
atatattctttggat

SEQ ID NO: 61678 - DNA, 15 bp, Homo sapiens
tatatattctttgga

SEQ ID NO: 61679 - DNA, 15 bp, Homo sapiens
ttatatattctttgg

SEQ ID NO: 61680 - DNA, 15 bp, Homo sapiens
attatatattctttg

SEQ ID NO: 61681 - DNA, 15 bp, Homo sapiens
aattatatattcttt

SEQ ID NO: 61682 - DNA, 15 bp, Homo sapiens
taattatatattctt

SEQ ID NO: 61683 - DNA, 15 bp, Homo sapiens
ataattatatattct

SEQ ID NO: 61684 - DNA, 15 bp, Homo sapiens
cataattatatattc

SEQ ID NO: 61685 - DNA, 15 bp, Homo sapiens
ccataattatatatt

SEQ ID NO: 61686 - DNA, 15 bp, Homo sapiens
tccataattatatat

SEQ ID NO: 61687 - DNA, 15 bp, Homo sapiens
ttccataattatata

SEQ ID NO: 61688 - DNA, 15 bp, Homo sapiens
cttccataattatat

SEQ ID NO: 61689 - DNA, 15 bp, Homo sapiens
tcttccataattata

SEQ ID NO: 61690 - DNA, 15 bp, Homo sapiens
ctcttccataattat

SEQ ID NO: 61691 - DNA, 15 bp, Homo sapiens
cctcttccataatta

SEQ ID NO: 61692 - DNA, 15 bp, Homo sapiens
tcctcttccataatt

SEQ ID NO: 61693 - DNA, 15 bp, Homo sapiens
ctcctcttccataat

SEQ ID NO: 61694 - DNA, 15 bp, Homo sapiens
tctcctcttccataa

SEQ ID NO: 61695 - DNA, 15 bp, Homo sapiens
ttctcctcttccata

SEQ ID NO: 61696 - DNA, 15 bp, Homo sapiens
tttctcctcttccat

SEQ ID NO: 61697 - DNA, 15 bp, Homo sapiens
atttctcctcttcca

SEQ ID NO: 61698 - DNA, 15 bp, Homo sapiens
aatttctcctcttcc

SEQ ID NO: 61699 - DNA, 15 bp, Homo sapiens
gaatttctcctcttc

SEQ ID NO: 61700 - DNA, 15 bp, Homo sapiens
ggaatttctcctctt

SEQ ID NO: 61701 - DNA, 15 bp, Homo sapiens
tggaatttctcctct

SEQ ID NO: 61702 - DNA, 15 bp, Homo sapiens
atggaatttctcctc

SEQ ID NO: 61703 - DNA, 15 bp, Homo sapiens
aatggaatttctcct

SEQ ID NO: 61704 - DNA, 15 bp, Homo sapiens
gaatggaatttctcc

SEQ ID NO: 61705 - DNA, 15 bp, Homo sapiens
ggaatggaatttctc

SEQ ID NO: 61706 - DNA, 15 bp, Homo sapiens
tggaatggaatttct

SEQ ID NO: 61707 - DNA, 15 bp, Homo sapiens
gtggaatggaatttc

SEQ ID NO: 61708 - DNA, 15 bp, Homo sapiens
tgtggaatggaattt

SEQ ID NO: 61709 - DNA, 15 bp, Homo sapiens
ctgtggaatggaatt

SEQ ID NO: 61710 - DNA, 15 bp, Homo sapiens
gctgtggaatggaat

SEQ ID NO: 61711 - DNA, 15 bp, Homo sapiens
agctgtggaatggaa

SEQ ID NO: 61712 - DNA, 15 bp, Homo sapiens
tagctgtggaatgga

SEQ ID NO: 61713 - DNA, 15 bp, Homo sapiens
ttagctgtggaatgg

SEQ ID NO: 61714 - DNA, 15 bp, Homo sapiens
cttagctgtggaatg

SEQ ID NO: 61715 - DNA, 15 bp, Homo sapiens
acttagctgtggaat

SEQ ID NO: 61716 - DNA, 15 bp, Homo sapiens
tacttagctgtggaa

SEQ ID NO: 61717 - DNA, 15 bp, Homo sapiens
atacttagctgtgga

SEQ ID NO: 61718 - DNA, 15 bp, Homo sapiens
aatacttagctgtgg

SEQ ID NO: 61719 - DNA, 15 bp, Homo sapiens
taatacttagctgtg

SEQ ID NO: 61720 - DNA, 15 bp, Homo sapiens
ataatacttagctgt

SEQ ID NO: 61721 - DNA, 15 bp, Homo sapiens
aataatacttagctg

SEQ ID NO: 61722 - DNA, 15 bp, Homo sapiens
aaataatacttagct

SEQ ID NO: 61723 - DNA, 15 bp, Homo sapiens
aaaataatacttagc

SEQ ID NO: 61724 - DNA, 15 bp, Homo sapiens
taaaataatacttag

SEQ ID NO: 61725 - DNA, 15 bp, Homo sapiens
ataaaataatactta

SEQ ID NO: 61726 - DNA, 15 bp, Homo sapiens
aataaaataatactt

SEQ ID NO: 61727 - DNA, 15 bp, Homo sapiens
aaataaaataatact

SEQ ID NO: 61728 - DNA, 15 bp, Homo sapiens
gaaataaaataatac

SEQ ID NO: 61729 - DNA, 15 bp, Homo sapiens
ggaaataaaataata

SEQ ID NO: 61730 - DNA, 15 bp, Homo sapiens
aggaaataaaataat

SEQ ID NO: 61731 - DNA, 15 bp, Homo sapiens
aaggaaataaaataa

SEQ ID NO: 61732 - DNA, 15 bp, Homo sapiens
aaaggaaataaaata

SEQ ID NO: 61733 - DNA, 15 bp, Homo sapiens
aaaaggaaataaaat

SEQ ID NO: 61734 - DNA, 15 bp, Homo sapiens
aaaaaggaaataaaa

SEQ ID NO: 61735 - DNA, 15 bp, Homo sapiens
aaaaaaggaaataaa

SEQ ID NO: 61736 - DNA, 15 bp, Homo sapiens
aaaaaaaggaaataa

SEQ ID NO: 61737 - DNA, 15 bp, Homo sapiens
taaaaaaaggaaata

SEQ ID NO: 61738 - DNA, 15 bp, Homo sapiens
ctaaaaaaaggaaat

SEQ ID NO: 61739 - DNA, 15 bp, Homo sapiens
actaaaaaaaggaaa

SEQ ID NO: 61740 - DNA, 15 bp, Homo sapiens
aactaaaaaaaggaa

SEQ ID NO: 61741 - DNA, 15 bp, Homo sapiens
aaactaaaaaaagga

SEQ ID NO: 61742 - DNA, 15 bp, Homo sapiens
gaaactaaaaaaagg

SEQ ID NO: 61743 - DNA, 15 bp, Homo sapiens
cgaaactaaaaaaag

SEQ ID NO: 61744 - DNA, 15 bp, Homo sapiens
tcgaaactaaaaaaa

SEQ ID NO: 61745 - DNA, 15 bp, Homo sapiens
atcgaaactaaaaaa

SEQ ID NO: 61746 - DNA, 15 bp, Homo sapiens
tatcgaaactaaaaa

SEQ ID NO: 61747 - DNA, 15 bp, Homo sapiens
gtatcgaaactaaaa

SEQ ID NO: 61748 - DNA, 15 bp, Homo sapiens
agtatcgaaactaaa

SEQ ID NO: 61749 - DNA, 15 bp, Homo sapiens
gagtatcgaaactaa

SEQ ID NO: 61750 - DNA, 15 bp, Homo sapiens
ggagtatcgaaacta

SEQ ID NO: 61751 - DNA, 15 bp, Homo sapiens
cggagtatcgaaact

SEQ ID NO: 61752 - DNA, 15 bp, Homo sapiens
tcggagtatcgaaac

SEQ ID NO: 61753 - DNA, 15 bp, Homo sapiens
atcggagtatcgaaa

SEQ ID NO: 61754 - DNA, 15 bp, Homo sapiens
aatcggagtatcgaa

SEQ ID NO: 61755 - DNA, 15 bp, Homo sapiens
caatcggagtatcga

SEQ ID NO: 61756 - DNA, 15 bp, Homo sapiens
ccaatcggagtatcg

SEQ ID NO: 61757 - DNA, 15 bp, Homo sapiens
gccaatcggagtatc

SEQ ID NO: 61758 - DNA, 15 bp, Homo sapiens
tgccaatcggagtat

SEQ ID NO: 61759 - DNA, 15 bp, Homo sapiens
ctgccaatcggagta

SEQ ID NO: 61760 - DNA, 15 bp, Homo sapiens
cctgccaatcggagt

SEQ ID NO: 61761 - DNA, 15 bp, Homo sapiens
tcctgccaatcggag

SEQ ID NO: 61762 - DNA, 15 bp, Homo sapiens
atcctgccaatcgga

SEQ ID NO: 61763 - DNA, 15 bp, Homo sapiens
tatcctgccaatcgg

SEQ ID NO: 61764 - DNA, 15 bp, Homo sapiens
ttatcctgccaatcg

SEQ ID NO: 61765 - DNA, 15 bp, Homo sapiens
tttatcctgccaatc

SEQ ID NO: 61766 - DNA, 15 bp, Homo sapiens
atttatcctgccaat

SEQ ID NO: 61767 - DNA, 15 bp, Homo sapiens
aatttatcctgccaa

SEQ ID NO: 61768 - DNA, 15 bp, Homo sapiens
caatttatcctgcca

SEQ ID NO: 61769 - DNA, 15 bp, Homo sapiens
acaatttatcctgcc

SEQ ID NO: 61770 - DNA, 15 bp, Homo sapiens
aacaatttatcctgc

SEQ ID NO: 61771 - DNA, 15 bp, Homo sapiens
aaacaatttatcctg

SEQ ID NO: 61772 - DNA, 15 bp, Homo sapiens
taaacaatttatcct

SEQ ID NO: 61773 - DNA, 15 bp, Homo sapiens
ataaacaatttatcc

SEQ ID NO: 61774 - DNA, 15 bp, Homo sapiens
cataaacaatttatc

SEQ ID NO: 61775 - DNA, 15 bp, Homo sapiens
acataaacaatttat

SEQ ID NO: 61776 - DNA, 15 bp, Homo sapiens
gacataaacaattta

SEQ ID NO: 61777 - DNA, 15 bp, Homo sapiens
cgacataaacaattt

SEQ ID NO: 61778 - DNA, 15 bp, Homo sapiens
gcgacataaacaatt

SEQ ID NO: 61779 - DNA, 15 bp, Homo sapiens
agcgacataaacaat

SEQ ID NO: 61780 - DNA, 15 bp, Homo sapiens
cagcgacataaacaa

SEQ ID NO: 61781 - DNA, 15 bp, Homo sapiens
ccagcgacataaaca

SEQ ID NO: 61782 - DNA, 15 bp, Homo sapiens
cccagcgacataaac

SEQ ID NO: 61783 - DNA, 15 bp, Homo sapiens
acccagcgacataaa

SEQ ID NO: 61784 - DNA, 15 bp, Homo sapiens
tacccagcgacataa

SEQ ID NO: 61785 - DNA, 15 bp, Homo sapiens
gtacccagcgacata

SEQ ID NO: 61786 - DNA, 15 bp, Homo sapiens
ggtacccagcgacat

SEQ ID NO: 61787 - DNA, 15 bp, Homo sapiens
tggtacccagcgaca

SEQ ID NO: 61788 - DNA, 15 bp, Homo sapiens
atggtacccagcgac

SEQ ID NO: 61789 - DNA, 15 bp, Homo sapiens
gatggtacccagcga

SEQ ID NO: 61790 - DNA, 15 bp, Homo sapiens
tgatggtacccagcg

SEQ ID NO: 61791 - DNA, 15 bp, Homo sapiens
atgatggtacccagc

SEQ ID NO: 61792 - DNA, 15 bp, Homo sapiens
catgatggtacccag

SEQ ID NO: 61793 - DNA, 15 bp, Homo sapiens
ccatgatggtaccca

SEQ ID NO: 61794 - DNA, 15 bp, Homo sapiens
gccatgatggtaccc

SEQ ID NO: 61795 - DNA, 15 bp, Homo sapiens
ggccatgatggtacc

SEQ ID NO: 61796 - DNA, 15 bp, Homo sapiens
tggccatgatggtac

SEQ ID NO: 61797 - DNA, 15 bp, Homo sapiens
atggccatgatggta

SEQ ID NO: 61798 - DNA, 15 bp, Homo sapiens
tatggccatgatggt

SEQ ID NO: 61799 - DNA, 15 bp, Homo sapiens
ctatggccatgatgg

SEQ ID NO: 61800 - DNA, 15 bp, Homo sapiens
gctatggccatgatg

SEQ ID NO: 61801 - DNA, 15 bp, Homo sapiens
agctatggccatgat

SEQ ID NO: 61802 - DNA, 15 bp, Homo sapiens
gagctatggccatga

SEQ ID NO: 61803 - DNA, 15 bp, Homo sapiens
tgagctatggccatg

SEQ ID NO: 61804 - DNA, 15 bp, Homo sapiens
gtgagctatggccat

SEQ ID NO: 61805 - DNA, 15 bp, Homo sapiens
cgtgagctatggcca

SEQ ID NO: 61806 - DNA, 15 bp, Homo sapiens
ccgtgagctatggcc

SEQ ID NO: 61807 - DNA, 15 bp, Homo sapiens
tccgtgagctatggc

SEQ ID NO: 61808 - DNA, 15 bp, Homo sapiens
atccgtgagctatgg

SEQ ID NO: 61809 - DNA, 15 bp, Homo sapiens
gatccgtgagctatg

SEQ ID NO: 61810 - DNA, 15 bp, Homo sapiens
tgatccgtgagctat

SEQ ID NO: 61811 - DNA, 15 bp, Homo sapiens
ctgatccgtgagcta

SEQ ID NO: 61812 - DNA, 15 bp, Homo sapiens
cctgatccgtgagct

SEQ ID NO: 61813 - DNA, 15 bp, Homo sapiens
acctgatccgtgagc

SEQ ID NO: 61814 - DNA, 15 bp, Homo sapiens
gacctgatccgtgag

SEQ ID NO: 61815 - DNA, 15 bp, Homo sapiens
agacctgatccgtga

SEQ ID NO: 61816 - DNA, 15 bp, Homo sapiens
gagacctgatccgtg

SEQ ID NO: 61817 - DNA, 15 bp, Homo sapiens
ggagacctgatccgt

SEQ ID NO: 61818 - DNA, 15 bp, Homo sapiens
gggagacctgatccg

SEQ ID NO: 61819 - DNA, 15 bp, Homo sapiens
ggggagacctgatcc

SEQ ID NO: 61820 - DNA, 15 bp, Homo sapiens
gggggagacctgatc

SEQ ID NO: 61821 - DNA, 15 bp, Homo sapiens
agggggagacctgat

SEQ ID NO: 61822 - DNA, 15 bp, Homo sapiens
gagggggagacctga

SEQ ID NO: 61823 - DNA, 15 bp, Homo sapiens
tgagggggagacctg

SEQ ID NO: 61824 - DNA, 15 bp, Homo sapiens
atgagggggagacct

SEQ ID NO: 61825 - DNA, 15 bp, Homo sapiens
catgagggggagacc

SEQ ID NO: 61826 - DNA, 15 bp, Homo sapiens
tcatgagggggagac

SEQ ID NO: 61827 - DNA, 15 bp, Homo sapiens
atcatgagggggaga

SEQ ID NO: 61828 - DNA, 15 bp, Homo sapiens
catcatgagggggag

SEQ ID NO: 61829 - DNA, 15 bp, Homo sapiens
tcatcatgaggggga

SEQ ID NO: 61830 - DNA, 15 bp, Homo sapiens
atcatcatgaggggg

SEQ ID NO: 61831 - DNA, 15 bp, Homo sapiens
tatcatcatgagggg

SEQ ID NO: 61832 - DNA, 15 bp, Homo sapiens
ctatcatcatgaggg

SEQ ID NO: 61833 - DNA, 15 bp, Homo sapiens
actatcatcatgagg

SEQ ID NO: 61834 - DNA, 15 bp, Homo sapiens
tactatcatcatgag

SEQ ID NO: 61835 - DNA, 15 bp, Homo sapiens
atactatcatcatga

SEQ ID NO: 61836 - DNA, 15 bp, Homo sapiens
aatactatcatcatg

SEQ ID NO: 61837 - DNA, 15 bp, Homo sapiens
aaatactatcatcat

SEQ ID NO: 61838 - DNA, 15 bp, Homo sapiens
caaatactatcatca

SEQ ID NO: 61839 - DNA, 15 bp, Homo sapiens
ccaaatactatcatc

SEQ ID NO: 61840 - DNA, 15 bp, Homo sapiens
tccaaatactatcat

SEQ ID NO: 61841 - DNA, 15 bp, Homo sapiens
ctccaaatactatca

SEQ ID NO: 61842 - DNA, 15 bp, Homo sapiens
tctccaaatactatc

SEQ ID NO: 61843 - DNA, 15 bp, Homo sapiens
ctctccaaatactat

SEQ ID NO: 61844 - DNA, 15 bp, Homo sapiens
tctctccaaatacta

SEQ ID NO: 61845 - DNA, 15 bp, Homo sapiens
atctctccaaatact

SEQ ID NO: 61846 - DNA, 15 bp, Homo sapiens
catctctccaaatac

SEQ ID NO: 61847 - DNA, 15 bp, Homo sapiens
tcatctctccaaata

SEQ ID NO: 61848 - DNA, 15 bp, Homo sapiens
gtcatctctccaaat

SEQ ID NO: 61849 - DNA, 15 bp, Homo sapiens
agtcatctctccaaa

SEQ ID NO: 61850 - DNA, 15 bp, Homo sapiens
cagtcatctctccaa

SEQ ID NO: 61851 - DNA, 15 bp, Homo sapiens
tcagtcatctctcca

SEQ ID NO: 61852 - DNA, 15 bp, Homo sapiens
gtcagtcatctctcc

SEQ ID NO: 61853 - DNA, 15 bp, Homo sapiens
tgtcagtcatctctc

SEQ ID NO: 61854 - DNA, 15 bp, Homo sapiens
ttgtcagtcatctct

SEQ ID NO: 61855 - DNA, 15 bp, Homo sapiens
tttgtcagtcatctc

SEQ ID NO: 61856 - DNA, 15 bp, Homo sapiens
atttgtcagtcatct

SEQ ID NO: 61857 - DNA, 15 bp, Homo sapiens
aatttgtcagtcatc

SEQ ID NO: 61858 - DNA, 15 bp, Homo sapiens
aaatttgtcagtcat

SEQ ID NO: 61859 - DNA, 15 bp, Homo sapiens
caaatttgtcagtca

SEQ ID NO: 61860 - DNA, 15 bp, Homo sapiens
acaaatttgtcagtc

SEQ ID NO: 61861 - DNA, 15 bp, Homo sapiens
aacaaatttgtcagt

SEQ ID NO: 61862 - DNA, 15 bp, Homo sapiens
caacaaatttgtcag

SEQ ID NO: 61863 - DNA, 15 bp, Homo sapiens
tcaacaaatttgtca

SEQ ID NO: 61864 - DNA, 15 bp, Homo sapiens
atcaacaaatttgtc

SEQ ID NO: 61865 - DNA, 15 bp, Homo sapiens
tatcaacaaatttgt

SEQ ID NO: 61866 - DNA, 15 bp, Homo sapiens
gtatcaacaaatttg

SEQ ID NO: 61867 - DNA, 15 bp, Homo sapiens
agtatcaacaaattt

SEQ ID NO: 61868 - DNA, 15 bp, Homo sapiens
cagtatcaacaaatt

SEQ ID NO: 61869 - DNA, 15 bp, Homo sapiens
gcagtatcaacaaat

SEQ ID NO: 61870 - DNA, 15 bp, Homo sapiens
tgcagtatcaacaaa

SEQ ID NO: 61871 - DNA, 15 bp, Homo sapiens
ctgcagtatcaacaa

SEQ ID NO: 61872 - DNA, 15 bp, Homo sapiens
cctgcagtatcaaca

SEQ ID NO: 61873 - DNA, 15 bp, Homo sapiens
tcctgcagtatcaac

SEQ ID NO: 61874 - DNA, 15 bp, Homo sapiens
ttcctgcagtatcaa

SEQ ID NO: 61875 - DNA, 15 bp, Homo sapiens
tttcctgcagtatca

SEQ ID NO: 61876 - DNA, 15 bp, Homo sapiens
gtttcctgcagtatc

SEQ ID NO: 61877 - DNA, 15 bp, Homo sapiens
agtttcctgcagtat

SEQ ID NO: 61878 - DNA, 15 bp, Homo sapiens
aagtttcctgcagta

SEQ ID NO: 61879 - DNA, 15 bp, Homo sapiens
gaagtttcctgcagt

SEQ ID NO: 61880 - DNA, 15 bp, Homo sapiens
agaagtttcctgcag

SEQ ID NO: 61881 - DNA, 15 bp, Homo sapiens
gagaagtttcctgca

SEQ ID NO: 61882 - DNA, 15 bp, Homo sapiens
ggagaagtttcctgc

SEQ ID NO: 61883 - DNA, 15 bp, Homo sapiens
aggagaagtttcctg

SEQ ID NO: 61884 - DNA, 15 bp, Homo sapiens
aaggagaagtttcct

SEQ ID NO: 61885 - DNA, 15 bp, Homo sapiens
aaaggagaagtttcc

SEQ ID NO: 61886 - DNA, 15 bp, Homo sapiens
gaaaggagaagtttc

SEQ ID NO: 61887 - DNA, 15 bp, Homo sapiens
ggaaaggagaagttt

SEQ ID NO: 61888 - DNA, 15 bp, Homo sapiens
tggaaaggagaagtt

SEQ ID NO: 61889 - DNA, 15 bp, Homo sapiens
ctggaaaggagaagt

SEQ ID NO: 61890 - DNA, 15 bp, Homo sapiens
cctggaaaggagaag

SEQ ID NO: 61891 - DNA, 15 bp, Homo sapiens
acctggaaaggagaa

SEQ ID NO: 61892 - DNA, 15 bp, Homo sapiens
tacctggaaaggaga

SEQ ID NO: 61893 - DNA, 15 bp, Homo sapiens
ttacctggaaaggag

SEQ ID NO: 61894 - DNA, 15 bp, Homo sapiens
cttacctggaaagga

SEQ ID NO: 61895 - DNA, 15 bp, Homo sapiens
gcttacctggaaagg

SEQ ID NO: 61896 - DNA, 15 bp, Homo sapiens
tgcttacctggaaag

SEQ ID NO: 61897 - DNA, 15 bp, Homo sapiens
atgcttacctggaaa

SEQ ID NO: 61898 - DNA, 15 bp, Homo sapiens
aatgcttacctggaa

SEQ ID NO: 61899 - DNA, 15 bp, Homo sapiens
aaatgcttacctgga

SEQ ID NO: 61900 - DNA, 15 bp, Homo sapiens
gaaatgcttacctgg

SEQ ID NO: 61901 - DNA, 15 bp, Homo sapiens
agaaatgcttacctg

SEQ ID NO: 61902 - DNA, 15 bp, Homo sapiens
aagaaatgcttacct

SEQ ID NO: 61903 - DNA, 15 bp, Homo sapiens
aaagaaatgcttacc

SEQ ID NO: 61904 - DNA, 15 bp, Homo sapiens
taaagaaatgcttac

SEQ ID NO: 61905 - DNA, 15 bp, Homo sapiens
gtaaagaaatgctta

SEQ ID NO: 61906 - DNA, 15 bp, Homo sapiens
ggtaaagaaatgctt

SEQ ID NO: 61907 - DNA, 15 bp, Homo sapiens
aggtaaagaaatgct

SEQ ID NO: 61908 - DNA, 15 bp, Homo sapiens
aaggtaaagaaatgc

SEQ ID NO: 61909 - DNA, 15 bp, Homo sapiens
aaaggtaaagaaatg

SEQ ID NO: 61910 - DNA, 15 bp, Homo sapiens
aaaaggtaaagaaat

SEQ ID NO: 61911 - DNA, 15 bp, Homo sapiens
taaaaggtaaagaaa

SEQ ID NO: 61912 - DNA, 15 bp, Homo sapiens
ttaaaaggtaaagaa

SEQ ID NO: 61913 - DNA, 15 bp, Homo sapiens
tttaaaaggtaaaga

SEQ ID NO: 61914 - DNA, 15 bp, Homo sapiens
ttttaaaaggtaaag

SEQ ID NO: 61915 - DNA, 15 bp, Homo sapiens
tttttaaaaggtaaa

SEQ ID NO: 61916 - DNA, 15 bp, Homo sapiens
ttttttaaaaggtaa

SEQ ID NO: 61917 - DNA, 15 bp, Homo sapiens
tttttttaaaaggta

SEQ ID NO: 61918 - DNA, 15 bp, Homo sapiens
atttttttaaaaggt

SEQ ID NO: 61919 - DNA, 15 bp, Homo sapiens
gatttttttaaaagg

SEQ ID NO: 61920 - DNA, 15 bp, Homo sapiens
ggatttttttaaaag

SEQ ID NO: 61921 - DNA, 15 bp, Homo sapiens
tggatttttttaaaa

SEQ ID NO: 61922 - DNA, 15 bp, Homo sapiens
atggatttttttaaa

SEQ ID NO: 61923 - DNA, 15 bp, Homo sapiens
tatggatttttttaa

SEQ ID NO: 61924 - DNA, 15 bp, Homo sapiens
ctatggattttttta

SEQ ID NO: 61925 - DNA, 15 bp, Homo sapiens
gctatggattttttt

SEQ ID NO: 61926 - DNA, 15 bp, Homo sapiens
tgctatggatttttt

SEQ ID NO: 61927 - DNA, 15 bp, Homo sapiens
atgctatggattttt

SEQ ID NO: 61928 - DNA, 15 bp, Homo sapiens
aatgctatggatttt

SEQ ID NO: 61929 - DNA, 15 bp, Homo sapiens
aaatgctatggattt

SEQ ID NO: 61930 - DNA, 15 bp, Homo sapiens
gaaatgctatggatt

SEQ ID NO: 61931 - DNA, 15 bp, Homo sapiens
agaaatgctatggat

SEQ ID NO: 61932 - DNA, 15 bp, Homo sapiens
aagaaatgctatgga

SEQ ID NO: 61933 - DNA, 15 bp, Homo sapiens
aaagaaatgctatgg

SEQ ID NO: 61934 - DNA, 15 bp, Homo sapiens
taaagaaatgctatg

SEQ ID NO: 61935 - DNA, 15 bp, Homo sapiens
ttaaagaaatgctat

SEQ ID NO: 61936 - DNA, 15 bp, Homo sapiens
gttaaagaaatgcta

SEQ ID NO: 61937 - DNA, 15 bp, Homo sapiens
agttaaagaaatgct

SEQ ID NO: 61938 - DNA, 15 bp, Homo sapiens
cagttaaagaaatgc

SEQ ID NO: 61939 - DNA, 15 bp, Homo sapiens
ccagttaaagaaatg

SEQ ID NO: 61940 - DNA, 15 bp, Homo sapiens
cccagttaaagaaat

SEQ ID NO: 61941 - DNA, 15 bp, Homo sapiens
acccagttaaagaaa

SEQ ID NO: 61942 - DNA, 15 bp, Homo sapiens
tacccagttaaagaa

SEQ ID NO: 61943 - DNA, 15 bp, Homo sapiens
ttacccagttaaaga

SEQ ID NO: 61944 - DNA, 15 bp, Homo sapiens
tttacccagttaaag

SEQ ID NO: 61945 - DNA, 15 bp, Homo sapiens
ttttacccagttaaa

SEQ ID NO: 61946 - DNA, 15 bp, Homo sapiens
tttttacccagttaa

SEQ ID NO: 61947 - DNA, 15 bp, Homo sapiens
atttttacccagtta

SEQ ID NO: 61948 - DNA, 15 bp, Homo sapiens
aatttttacccagtt

SEQ ID NO: 61949 - DNA, 15 bp, Homo sapiens
aaatttttacccagt

SEQ ID NO: 61950 - DNA, 15 bp, Homo sapiens
caaatttttacccag

SEQ ID NO: 61951 - DNA, 15 bp, Homo sapiens
ccaaatttttaccca

SEQ ID NO: 61952 - DNA, 15 bp, Homo sapiens
cccaaatttttaccc

SEQ ID NO: 61953 - DNA, 15 bp, Homo sapiens
tcccaaatttttacc

SEQ ID NO: 61954 - DNA, 15 bp, Homo sapiens
ctcccaaatttttac

SEQ ID NO: 61955 - DNA, 15 bp, Homo sapiens
actcccaaattttta

SEQ ID NO: 61956 - DNA, 15 bp, Homo sapiens
aactcccaaattttt

SEQ ID NO: 61957 - DNA, 15 bp, Homo sapiens
caactcccaaatttt

SEQ ID NO: 61958 - DNA, 15 bp, Homo sapiens
tcaactcccaaattt

SEQ ID NO: 61959 - DNA, 15 bp, Homo sapiens
atcaactcccaaatt

SEQ ID NO: 61960 - DNA, 15 bp, Homo sapiens
aatcaactcccaaat

SEQ ID NO: 61961 - DNA, 15 bp, Homo sapiens
aaatcaactcccaaa

SEQ ID NO: 61962 - DNA, 15 bp, Homo sapiens
aaaatcaactcccaa

SEQ ID NO: 61963 - DNA, 15 bp, Homo sapiens
caaaatcaactccca

SEQ ID NO: 61964 - DNA, 15 bp, Homo sapiens
gcaaaatcaactccc

SEQ ID NO: 61965 - DNA, 15 bp, Homo sapiens
agcaaaatcaactcc

SEQ ID NO: 61966 - DNA, 15 bp, Homo sapiens
tagcaaaatcaactc

SEQ ID NO: 61967 - DNA, 15 bp, Homo sapiens
atagcaaaatcaact

SEQ ID NO: 61968 - DNA, 15 bp, Homo sapiens
aatagcaaaatcaac

SEQ ID NO: 61969 - DNA, 15 bp, Homo sapiens
gaatagcaaaatcaa

SEQ ID NO: 61970 - DNA, 15 bp, Homo sapiens
tgaatagcaaaatca

SEQ ID NO: 61971 - DNA, 15 bp, Homo sapiens
atgaatagcaaaatc

SEQ ID NO: 61972 - DNA, 15 bp, Homo sapiens
aatgaatagcaaaat

SEQ ID NO: 61973 - DNA, 15 bp, Homo sapiens
taatgaatagcaaaa

SEQ ID NO: 61974 - DNA, 15 bp, Homo sapiens
gtaatgaatagcaaa

SEQ ID NO: 61975 - DNA, 15 bp, Homo sapiens
ggtaatgaatagcaa

SEQ ID NO: 61976 - DNA, 15 bp, Homo sapiens
tggtaatgaatagca

SEQ ID NO: 61977 - DNA, 15 bp, Homo sapiens
atggtaatgaatagc

SEQ ID NO: 61978 - DNA, 15 bp, Homo sapiens
gatggtaatgaatag

SEQ ID NO: 61979 - DNA, 15 bp, Homo sapiens
agatggtaatgaata

SEQ ID NO: 61980 - DNA, 15 bp, Homo sapiens
aagatggtaatgaat

SEQ ID NO: 61981 - DNA, 15 bp, Homo sapiens
taagatggtaatgaa

SEQ ID NO: 61982 - DNA, 15 bp, Homo sapiens
ataagatggtaatga

SEQ ID NO: 61983 - DNA, 15 bp, Homo sapiens
aataagatggtaatg

SEQ ID NO: 61984 - DNA, 15 bp, Homo sapiens
aaataagatggtaat

SEQ ID NO: 61985 - DNA, 15 bp, Homo sapiens
taaataagatggtaa

SEQ ID NO: 61986 - DNA, 15 bp, Homo sapiens
ttaaataagatggta

SEQ ID NO: 61987 - DNA, 15 bp, Homo sapiens
attaaataagatggt

SEQ ID NO: 61988 - DNA, 15 bp, Homo sapiens
cattaaataagatgg

SEQ ID NO: 61989 - DNA, 15 bp, Homo sapiens
tcattaaataagatg

SEQ ID NO: 61990 - DNA, 15 bp, Homo sapiens
atcattaaataagat

SEQ ID NO: 61991 - DNA, 15 bp, Homo sapiens
aatcattaaataaga

SEQ ID NO: 61992 - DNA, 15 bp, Homo sapiens
aaatcattaaataag

SEQ ID NO: 61993 - DNA, 15 bp, Homo sapiens
caaatcattaaataa

SEQ ID NO: 61994 - DNA, 15 bp, Homo sapiens
ccaaatcattaaata

SEQ ID NO: 61995 - DNA, 15 bp, Homo sapiens
tccaaatcattaaat

SEQ ID NO: 61996 - DNA, 15 bp, Homo sapiens
atccaaatcattaaa

SEQ ID NO: 61997 - DNA, 15 bp, Homo sapiens
tatccaaatcattaa

SEQ ID NO: 61998 - DNA, 15 bp, Homo sapiens
atatccaaatcatta

SEQ ID NO: 61999 - DNA, 15 bp, Homo sapiens
gatatccaaatcatt

SEQ ID NO: 62000 - DNA, 15 bp, Homo sapiens
agatatccaaatcat

SEQ ID NO: 62001 - DNA, 15 bp, Homo sapiens
cagatatccaaatca

SEQ ID NO: 62002 - DNA, 15 bp, Homo sapiens
ccagatatccaaatc

SEQ ID NO: 62003 - DNA, 15 bp, Homo sapiens
accagatatccaaat

SEQ ID NO: 62004 - DNA, 15 bp, Homo sapiens
aaccagatatccaaa

SEQ ID NO: 62005 - DNA, 15 bp, Homo sapiens
caaccagatatccaa

SEQ ID NO: 62006 - DNA, 15 bp, Homo sapiens
tcaaccagatatcca

SEQ ID NO: 62007 - DNA, 15 bp, Homo sapiens
gtcaaccagatatcc

SEQ ID NO: 62008 - DNA, 15 bp, Homo sapiens
agtcaaccagatatc

SEQ ID NO: 62009 - DNA, 15 bp, Homo sapiens
gagtcaaccagatat

SEQ ID NO: 62010 - DNA, 15 bp, Homo sapiens
ggagtcaaccagata

SEQ ID NO: 62011 - DNA, 15 bp, Homo sapiens
tggagtcaaccagat

SEQ ID NO: 62012 - DNA, 15 bp, Homo sapiens
ctggagtcaaccaga

SEQ ID NO: 62013 - DNA, 15 bp, Homo sapiens
tctggagtcaaccag

SEQ ID NO: 62014 - DNA, 15 bp, Homo sapiens
atctggagtcaacca

SEQ ID NO: 62015 - DNA, 15 bp, Homo sapiens
tatctggagtcaacc

SEQ ID NO: 62016 - DNA, 15 bp, Homo sapiens
atatctggagtcaac

SEQ ID NO: 62017 - DNA, 15 bp, Homo sapiens
gatatctggagtcaa

SEQ ID NO: 62018 - DNA, 15 bp, Homo sapiens
tgatatctggagtca

SEQ ID NO: 62019 - DNA, 15 bp, Homo sapiens
atgatatctggagtc

SEQ ID NO: 62020 - DNA, 15 bp, Homo sapiens
tatgatatctggagt

SEQ ID NO: 62021 - DNA, 15 bp, Homo sapiens
ctatgatatctggag

SEQ ID NO: 62022 - DNA, 15 bp, Homo sapiens
tctatgatatctgga

SEQ ID NO: 62023 - DNA, 15 bp, Homo sapiens
ttctatgatatctgg

SEQ ID NO: 62024 - DNA, 15 bp, Homo sapiens
cttctatgatatctg

SEQ ID NO: 62025 - DNA, 15 bp, Homo sapiens
ccttctatgatatct

SEQ ID NO: 62026 - DNA, 15 bp, Homo sapiens
tccttctatgatatc

SEQ ID NO: 62027 - DNA, 15 bp, Homo sapiens
ctccttctatgatat

SEQ ID NO: 62028 - DNA, 15 bp, Homo sapiens
actccttctatgata

SEQ ID NO: 62029 - DNA, 15 bp, Homo sapiens
aactccttctatgat

SEQ ID NO: 62030 - DNA, 15 bp, Homo sapiens
caactccttctatga

SEQ ID NO: 62031 - DNA, 15 bp, Homo sapiens
acaactccttctatg

SEQ ID NO: 62032 - DNA, 15 bp, Homo sapiens
tacaactccttctat

SEQ ID NO: 62033 - DNA, 15 bp, Homo sapiens
ttacaactccttcta

SEQ ID NO: 62034 - DNA, 15 bp, Homo sapiens
tttacaactccttct

SEQ ID NO: 62035 - DNA, 15 bp, Homo sapiens
ttttacaactccttc

SEQ ID NO: 62036 - DNA, 15 bp, Homo sapiens
attttacaactcctt

SEQ ID NO: 62037 - DNA, 15 bp, Homo sapiens
aattttacaactcct

SEQ ID NO: 62038 - DNA, 15 bp, Homo sapiens
gaattttacaactcc

SEQ ID NO: 62039 - DNA, 15 bp, Homo sapiens
agaattttacaactc

SEQ ID NO: 62040 - DNA, 15 bp, Homo sapiens
gagaattttacaact

SEQ ID NO: 62041 - DNA, 15 bp, Homo sapiens
tgagaattttacaac

SEQ ID NO: 62042 - DNA, 15 bp, Homo sapiens
ctgagaattttacaa

SEQ ID NO: 62043 - DNA, 15 bp, Homo sapiens
tctgagaattttaca

SEQ ID NO: 62044 - DNA, 15 bp, Homo sapiens
ttctgagaattttac

SEQ ID NO: 62045 - DNA, 15 bp, Homo sapiens
tttctgagaatttta

SEQ ID NO: 62046 - DNA, 15 bp, Homo sapiens
ttttctgagaatttt

SEQ ID NO: 62047 - DNA, 15 bp, Homo sapiens
attttctgagaattt

SEQ ID NO: 62048 - DNA, 15 bp, Homo sapiens
aattttctgagaatt

SEQ ID NO: 62049 - DNA, 15 bp, Homo sapiens
caattttctgagaat

SEQ ID NO: 62050 - DNA, 15 bp, Homo sapiens
acaattttctgagaa

SEQ ID NO: 62051 - DNA, 15 bp, Homo sapiens
aacaattttctgaga

SEQ ID NO: 62052 - DNA, 15 bp, Homo sapiens
gaacaattttctgag

SEQ ID NO: 62053 - DNA, 15 bp, Homo sapiens
tgaacaattttctga

SEQ ID NO: 62054 - DNA, 15 bp, Homo sapiens
ttgaacaattttctg

SEQ ID NO: 62055 - DNA, 15 bp, Homo sapiens
tttgaacaattttct

SEQ ID NO: 62056 - DNA, 15 bp, Homo sapiens
atttgaacaattttc

SEQ ID NO: 62057 - DNA, 15 bp, Homo sapiens
tatttgaacaatttt

SEQ ID NO: 62058 - DNA, 15 bp, Homo sapiens
gtatttgaacaattt

SEQ ID NO: 62059 - DNA, 15 bp, Homo sapiens
agtatttgaacaatt

SEQ ID NO: 62060 - DNA, 15 bp, Homo sapiens
gagtatttgaacaat

SEQ ID NO: 62061 - DNA, 15 bp, Homo sapiens
cgagtatttgaacaa

SEQ ID NO: 62062 - DNA, 15 bp, Homo sapiens
acgagtatttgaaca

SEQ ID NO: 62063 - DNA, 15 bp, Homo sapiens
aacgagtatttgaac

SEQ ID NO: 62064 - DNA, 15 bp, Homo sapiens
aaacgagtatttgaa

SEQ ID NO: 62065 - DNA, 15 bp, Homo sapiens
taaacgagtatttga

SEQ ID NO: 62066 - DNA, 15 bp, Homo sapiens
ttaaacgagtatttg

SEQ ID NO: 62067 - DNA, 15 bp, Homo sapiens
tttaaacgagtattt

SEQ ID NO: 62068 - DNA, 15 bp, Homo sapiens
atttaaacgagtatt

SEQ ID NO: 62069 - DNA, 15 bp, Homo sapiens
aatttaaacgagtat

SEQ ID NO: 62070 - DNA, 15 bp, Homo sapiens
aaatttaaacgagta

SEQ ID NO: 62071 - DNA, 15 bp, Homo sapiens
taaatttaaacgagt

SEQ ID NO: 62072 - DNA, 15 bp, Homo sapiens
ttaaatttaaacgag

SEQ ID NO: 62073 - DNA, 15 bp, Homo sapiens
tttaaatttaaacga

SEQ ID NO: 62074 - DNA, 15 bp, Homo sapiens
ctttaaatttaaacg

SEQ ID NO: 62075 - DNA, 15 bp, Homo sapiens
tctttaaatttaaac

SEQ ID NO: 62076 - DNA, 15 bp, Homo sapiens
ttctttaaatttaaa

SEQ ID NO: 62077 - DNA, 15 bp, Homo sapiens
tttctttaaatttaa

SEQ ID NO: 62078 - DNA, 15 bp, Homo sapiens
atttctttaaattta

SEQ ID NO: 62079 - DNA, 15 bp, Homo sapiens
tatttctttaaattt

SEQ ID NO: 62080 - DNA, 15 bp, Homo sapiens
atatttctttaaatt

SEQ ID NO: 62081 - DNA, 15 bp, Homo sapiens
catatttctttaaat

SEQ ID NO: 62082 - DNA, 15 bp, Homo sapiens
acatatttctttaaa

SEQ ID NO: 62083 - DNA, 15 bp, Homo sapiens
cacatatttctttaa

SEQ ID NO: 62084 - DNA, 15 bp, Homo sapiens
acacatatttcttta

SEQ ID NO: 62085 - DNA, 15 bp, Homo sapiens
tacacatatttcttt

SEQ ID NO: 62086 - DNA, 15 bp, Homo sapiens
atacacatatttctt

SEQ ID NO: 62087 - DNA, 15 bp, Homo sapiens
aatacacatatttct

SEQ ID NO: 62088 - DNA, 15 bp, Homo sapiens
caatacacatatttc

SEQ ID NO: 62089 - DNA, 15 bp, Homo sapiens
acaatacacatattt

SEQ ID NO: 62090 - DNA, 15 bp, Homo sapiens
aacaatacacatatt

SEQ ID NO: 62091 - DNA, 15 bp, Homo sapiens
caacaatacacatat

SEQ ID NO: 62092 - DNA, 15 bp, Homo sapiens
acaacaatacacata

SEQ ID NO: 62093 - DNA, 15 bp, Homo sapiens
aacaacaatacacat

SEQ ID NO: 62094 - DNA, 15 bp, Homo sapiens
aaacaacaatacaca

SEQ ID NO: 62095 - DNA, 15 bp, Homo sapiens
caaacaacaatacac

SEQ ID NO: 62096 - DNA, 15 bp, Homo sapiens
tcaaacaacaataca

SEQ ID NO: 62097 - DNA, 15 bp, Homo sapiens
gtcaaacaacaatac

SEQ ID NO: 62098 - DNA, 15 bp, Homo sapiens
agtcaaacaacaata

SEQ ID NO: 62099 - DNA, 15 bp, Homo sapiens
aagtcaaacaacaat

SEQ ID NO: 62100 - DNA, 15 bp, Homo sapiens
aaagtcaaacaacaa

SEQ ID NO: 62101 - DNA, 15 bp, Homo sapiens
aaaagtcaaacaaca

SEQ ID NO: 62102 - DNA, 15 bp, Homo sapiens
taaaagtcaaacaac

SEQ ID NO: 62103 - DNA, 15 bp, Homo sapiens
ttaaaagtcaaacaa

SEQ ID NO: 62104 - DNA, 15 bp, Homo sapiens
attaaaagtcaaaca

SEQ ID NO: 62105 - DNA, 15 bp, Homo sapiens
tattaaaagtcaaac

SEQ ID NO: 62106 - DNA, 15 bp, Homo sapiens
gtattaaaagtcaaa

SEQ ID NO: 62107 - DNA, 15 bp, Homo sapiens
tgtattaaaagtcaa

SEQ ID NO: 62108 - DNA, 15 bp, Homo sapiens
ctgtattaaaagtca

SEQ ID NO: 62109 - DNA, 15 bp, Homo sapiens
cctgtattaaaagtc

SEQ ID NO: 62110 - DNA, 15 bp, Homo sapiens
acctgtattaaaagt

SEQ ID NO: 62111 - DNA, 15 bp, Homo sapiens
cacctgtattaaaag

SEQ ID NO: 62112 - DNA, 15 bp, Homo sapiens
tcacctgtattaaaa

SEQ ID NO: 62113 - DNA, 15 bp, Homo sapiens
ttcacctgtattaaa

SEQ ID NO: 62114 - DNA, 15 bp, Homo sapiens
cttcacctgtattaa

SEQ ID NO: 62115 - DNA, 15 bp, Homo sapiens
ccttcacctgtatta

SEQ ID NO: 62116 - DNA, 15 bp, Homo sapiens
tccttcacctgtatt

SEQ ID NO: 62117 - DNA, 15 bp, Homo sapiens
ttccttcacctgtat

SEQ ID NO: 62118 - DNA, 15 bp, Homo sapiens
tttccttcacctgta

SEQ ID NO: 62119 - DNA, 15 bp, Homo sapiens
atttccttcacctgt

SEQ ID NO: 62120 - DNA, 15 bp, Homo sapiens
tatttccttcacctg

SEQ ID NO: 62121 - DNA, 15 bp, Homo sapiens
gtatttccttcacct

SEQ ID NO: 62122 - DNA, 15 bp, Homo sapiens
tgtatttccttcacc

SEQ ID NO: 62123 - DNA, 15 bp, Homo sapiens
gtgtatttccttcac

SEQ ID NO: 62124 - DNA, 15 bp, Homo sapiens
tgtgtatttccttca

SEQ ID NO: 62125 - DNA, 15 bp, Homo sapiens
ctgtgtatttccttc

SEQ ID NO: 62126 - DNA, 15 bp, Homo sapiens
cctgtgtatttcctt

SEQ ID NO: 62127 - DNA, 15 bp, Homo sapiens
tcctgtgtatttcct

SEQ ID NO: 62128 - DNA, 15 bp, Homo sapiens
ttcctgtgtatttcc

SEQ ID NO: 62129 - DNA, 15 bp, Homo sapiens
cttcctgtgtatttc

SEQ ID NO: 62130 - DNA, 15 bp, Homo sapiens
gcttcctgtgtattt

SEQ ID NO: 62131 - DNA, 15 bp, Homo sapiens
agcttcctgtgtatt

SEQ ID NO: 62132 - DNA, 15 bp, Homo sapiens
aagcttcctgtgtat

SEQ ID NO: 62133 - DNA, 15 bp, Homo sapiens
gaagcttcctgtgta

SEQ ID NO: 62134 - DNA, 15 bp, Homo sapiens
agaagcttcctgtgt

SEQ ID NO: 62135 - DNA, 15 bp, Homo sapiens
tagaagcttcctgtg

SEQ ID NO: 62136 - DNA, 15 bp, Homo sapiens
ttagaagcttcctgt

SEQ ID NO: 62137 - DNA, 15 bp, Homo sapiens
tttagaagcttcctg

SEQ ID NO: 62138 - DNA, 15 bp, Homo sapiens
atttagaagcttcct

SEQ ID NO: 62139 - DNA, 15 bp, Homo sapiens
tatttagaagcttcc

SEQ ID NO: 62140 - DNA, 15 bp, Homo sapiens
ttatttagaagcttc

SEQ ID NO: 62141 - DNA, 15 bp, Homo sapiens
tttatttagaagctt

SEQ ID NO: 62142 - DNA, 15 bp, Homo sapiens
ctttatttagaagct

SEQ ID NO: 62143 - DNA, 15 bp, Homo sapiens
actttatttagaagc

SEQ ID NO: 62144 - DNA, 15 bp, Homo sapiens
tactttatttagaag

SEQ ID NO: 62145 - DNA, 15 bp, Homo sapiens
ttactttatttagaa

SEQ ID NO: 62146 - DNA, 15 bp, Homo sapiens
cttactttatttaga

SEQ ID NO: 62147 - DNA, 15 bp, Homo sapiens
ccttactttatttag

SEQ ID NO: 62148 - DNA, 15 bp, Homo sapiens
tccttactttattta

SEQ ID NO: 62149 - DNA, 15 bp, Homo sapiens
ttccttactttattt

SEQ ID NO: 62150 - DNA, 15 bp, Homo sapiens
cttccttactttatt

SEQ ID NO: 62151 - DNA, 15 bp, Homo sapiens
acttccttactttat

SEQ ID NO: 62152 - DNA, 15 bp, Homo sapiens
gacttccttacttta

SEQ ID NO: 62153 - DNA, 15 bp, Homo sapiens
tgacttccttacttt

SEQ ID NO: 62154 - DNA, 15 bp, Homo sapiens
gtgacttccttactt

SEQ ID NO: 62155 - DNA, 15 bp, Homo sapiens
agtgacttccttact

SEQ ID NO: 62156 - DNA, 15 bp, Homo sapiens
gagtgacttccttac

SEQ ID NO: 62157 - DNA, 15 bp, Homo sapiens
agagtgacttcctta

SEQ ID NO: 62158 - DNA, 15 bp, Homo sapiens
tagagtgacttcctt

SEQ ID NO: 62159 - DNA, 15 bp, Homo sapiens
gtagagtgacttcct

SEQ ID NO: 62160 - DNA, 15 bp, Homo sapiens
agtagagtgacttcc

SEQ ID NO: 62161 - DNA, 15 bp, Homo sapiens
aagtagagtgacttc

SEQ ID NO: 62162 - DNA, 15 bp, Homo sapiens
caagtagagtgactt

SEQ ID NO: 62163 - DNA, 15 bp, Homo sapiens
tcaagtagagtgact

SEQ ID NO: 62164 - DNA, 15 bp, Homo sapiens
ctcaagtagagtgac

SEQ ID NO: 62165 - DNA, 15 bp, Homo sapiens
tctcaagtagagtga

SEQ ID NO: 62166 - DNA, 15 bp, Homo sapiens
ttctcaagtagagtg

SEQ ID NO: 62167 - DNA, 15 bp, Homo sapiens
gttctcaagtagagt

SEQ ID NO: 62168 - DNA, 15 bp, Homo sapiens
tgttctcaagtagag

SEQ ID NO: 62169 - DNA, 15 bp, Homo sapiens
ctgttctcaagtaga

SEQ ID NO: 62170 - DNA, 15 bp, Homo sapiens
actgttctcaagtag

SEQ ID NO: 62171 - DNA, 15 bp, Homo sapiens
cactgttctcaagta

SEQ ID NO: 62172 - DNA, 15 bp, Homo sapiens
ccactgttctcaagt

SEQ ID NO: 62173 - DNA, 15 bp, Homo sapiens
tccactgttctcaag

SEQ ID NO: 62174 - DNA, 15 bp, Homo sapiens
ttccactgttctcaa

SEQ ID NO: 62175 - DNA, 15 bp, Homo sapiens
tttccactgttctca

SEQ ID NO: 62176 - DNA, 15 bp, Homo sapiens
atttccactgttctc

SEQ ID NO: 62177 - DNA, 15 bp, Homo sapiens
catttccactgttct

SEQ ID NO: 62178 - DNA, 15 bp, Homo sapiens
acatttccactgttc

SEQ ID NO: 62179 - DNA, 15 bp, Homo sapiens
tacatttccactgtt

SEQ ID NO: 62180 - DNA, 15 bp, Homo sapiens
ttacatttccactgt

SEQ ID NO: 62181 - DNA, 15 bp, Homo sapiens
attacatttccactg

SEQ ID NO: 62182 - DNA, 15 bp, Homo sapiens
cattacatttccact

SEQ ID NO: 62183 - DNA, 15 bp, Homo sapiens
tcattacatttccac

SEQ ID NO: 62184 - DNA, 15 bp, Homo sapiens
ctcattacatttcca

SEQ ID NO: 62185 - DNA, 15 bp, Homo sapiens
tctcattacatttcc

SEQ ID NO: 62186 - DNA, 15 bp, Homo sapiens
ctctcattacatttc

SEQ ID NO: 62187 - DNA, 15 bp, Homo sapiens
actctcattacattt

SEQ ID NO: 62188 - DNA, 15 bp, Homo sapiens
tactctcattacatt

SEQ ID NO: 62189 - DNA, 15 bp, Homo sapiens
atactctcattacat

SEQ ID NO: 62190 - DNA, 15 bp, Homo sapiens
gatactctcattaca

SEQ ID NO: 62191 - DNA, 15 bp, Homo sapiens
agatactctcattac

SEQ ID NO: 62192 - DNA, 15 bp, Homo sapiens
gagatactctcatta

SEQ ID NO: 62193 - DNA, 15 bp, Homo sapiens
agagatactctcatt

SEQ ID NO: 62194 - DNA, 15 bp, Homo sapiens
tagagatactctcat

SEQ ID NO: 62195 - DNA, 15 bp, Homo sapiens
atagagatactctca

SEQ ID NO: 62196 - DNA, 15 bp, Homo sapiens
catagagatactctc

SEQ ID NO: 62197 - DNA, 15 bp, Homo sapiens
gcatagagatactct

SEQ ID NO: 62198 - DNA, 15 bp, Homo sapiens
tgcatagagatactc

SEQ ID NO: 62199 - DNA, 15 bp, Homo sapiens
ctgcatagagatact

SEQ ID NO: 62200 - DNA, 15 bp, Homo sapiens
actgcatagagatac

SEQ ID NO: 62201 - DNA, 15 bp, Homo sapiens
tactgcatagagata

SEQ ID NO: 62202 - DNA, 15 bp, Homo sapiens
atactgcatagagat

SEQ ID NO: 62203 - DNA, 15 bp, Homo sapiens
gatactgcatagaga

SEQ ID NO: 62204 - DNA, 15 bp, Homo sapiens
ggatactgcatagag

SEQ ID NO: 62205 - DNA, 15 bp, Homo sapiens
tggatactgcataga

SEQ ID NO: 62206 - DNA, 15 bp, Homo sapiens
atggatactgcatag

SEQ ID NO: 62207 - DNA, 15 bp, Homo sapiens
gatggatactgcata

SEQ ID NO: 62208 - DNA, 15 bp, Homo sapiens
ggatggatactgcat

SEQ ID NO: 62209 - DNA, 15 bp, Homo sapiens
gggatggatactgca

SEQ ID NO: 62210 - DNA, 15 bp, Homo sapiens
tgggatggatactgc

SEQ ID NO: 62211 - DNA, 15 bp, Homo sapiens
atgggatggatactg

SEQ ID NO: 62212 - DNA, 15 bp, Homo sapiens
aatgggatggatact

SEQ ID NO: 62213 - DNA, 15 bp, Homo sapiens
taatgggatggatac

SEQ ID NO: 62214 - DNA, 15 bp, Homo sapiens
ctaatgggatggata

SEQ ID NO: 62215 - DNA, 15 bp, Homo sapiens
actaatgggatggat

SEQ ID NO: 62216 - DNA, 15 bp, Homo sapiens
tactaatgggatgga

SEQ ID NO: 62217 - DNA, 15 bp, Homo sapiens
ttactaatgggatgg

SEQ ID NO: 62218 - DNA, 15 bp, Homo sapiens
attactaatgggatg

SEQ ID NO: 62219 - DNA, 15 bp, Homo sapiens
aattactaatgggat

SEQ ID NO: 62220 - DNA, 15 bp, Homo sapiens
caattactaatggga

SEQ ID NO: 62221 - DNA, 15 bp, Homo sapiens
gcaattactaatggg

SEQ ID NO: 62222 - DNA, 15 bp, Homo sapiens
agcaattactaatgg

SEQ ID NO: 62223 - DNA, 15 bp, Homo sapiens
cagcaattactaatg

SEQ ID NO: 62224 - DNA, 15 bp, Homo sapiens
tcagcaattactaat

SEQ ID NO: 62225 - DNA, 15 bp, Homo sapiens
atcagcaattactaa

SEQ ID NO: 62226 - DNA, 15 bp, Homo sapiens
catcagcaattacta

SEQ ID NO: 62227 - DNA, 15 bp, Homo sapiens
tcatcagcaattact

SEQ ID NO: 62228 - DNA, 15 bp, Homo sapiens
ctcatcagcaattac

SEQ ID NO: 62229 - DNA, 15 bp, Homo sapiens
actcatcagcaatta

SEQ ID NO: 62230 - DNA, 15 bp, Homo sapiens
aactcatcagcaatt

SEQ ID NO: 62231 - DNA, 15 bp, Homo sapiens
aaactcatcagcaat

SEQ ID NO: 62232 - DNA, 15 bp, Homo sapiens
gaaactcatcagcaa

SEQ ID NO: 62233 - DNA, 15 bp, Homo sapiens
tgaaactcatcagca

SEQ ID NO: 62234 - DNA, 15 bp, Homo sapiens
ttgaaactcatcagc

SEQ ID NO: 62235 - DNA, 15 bp, Homo sapiens
tttgaaactcatcag

SEQ ID NO: 62236 - DNA, 15 bp, Homo sapiens
ctttgaaactcatca

SEQ ID NO: 62237 - DNA, 15 bp, Homo sapiens
gctttgaaactcatc

SEQ ID NO: 62238 - DNA, 15 bp, Homo sapiens
tgctttgaaactcat

SEQ ID NO: 62239 - DNA, 15 bp, Homo sapiens
gtgctttgaaactca

SEQ ID NO: 62240 - DNA, 15 bp, Homo sapiens
tgtgctttgaaactc

SEQ ID NO: 62241 - DNA, 15 bp, Homo sapiens
atgtgctttgaaact

SEQ ID NO: 62242 - DNA, 15 bp, Homo sapiens
gatgtgctttgaaac

SEQ ID NO: 62243 - DNA, 15 bp, Homo sapiens
tgatgtgctttgaaa

SEQ ID NO: 62244 - DNA, 15 bp, Homo sapiens
ctgatgtgctttgaa

SEQ ID NO: 62245 - DNA, 15 bp, Homo sapiens
actgatgtgctttga

SEQ ID NO: 62246 - DNA, 15 bp, Homo sapiens
aactgatgtgctttg

SEQ ID NO: 62247 - DNA, 15 bp, Homo sapiens
taactgatgtgcttt

SEQ ID NO: 62248 - DNA, 15 bp, Homo sapiens
ttaactgatgtgctt

SEQ ID NO: 62249 - DNA, 15 bp, Homo sapiens
tttaactgatgtgct

SEQ ID NO: 62250 - DNA, 15 bp, Homo sapiens
gtttaactgatgtgc

SEQ ID NO: 62251 - DNA, 15 bp, Homo sapiens
tgtttaactgatgtg

SEQ ID NO: 62252 - DNA, 15 bp, Homo sapiens
atgtttaactgatgt

SEQ ID NO: 62253 - DNA, 15 bp, Homo sapiens
catgtttaactgatg

SEQ ID NO: 62254 - DNA, 15 bp, Homo sapiens
ccatgtttaactgat

SEQ ID NO: 62255 - DNA, 15 bp, Homo sapiens
gccatgtttaactga

SEQ ID NO: 62256 - DNA, 15 bp, Homo sapiens
tgccatgtttaactg

SEQ ID NO: 62257 - DNA, 15 bp, Homo sapiens
ctgccatgtttaact

SEQ ID NO: 62258 - DNA, 15 bp, Homo sapiens
actgccatgtttaac

SEQ ID NO: 62259 - DNA, 15 bp, Homo sapiens
tactgccatgtttaa

SEQ ID NO: 62260 - DNA, 15 bp, Homo sapiens
gtactgccatgttta

SEQ ID NO: 62261 - DNA, 15 bp, Homo sapiens
agtactgccatgttt

SEQ ID NO: 62262 - DNA, 15 bp, Homo sapiens
aagtactgccatgtt

SEQ ID NO: 62263 - DNA, 15 bp, Homo sapiens
gaagtactgccatgt

SEQ ID NO: 62264 - DNA, 15 bp, Homo sapiens
agaagtactgccatg

SEQ ID NO: 62265 - DNA, 15 bp, Homo sapiens
aagaagtactgccat

SEQ ID NO: 62266 - DNA, 15 bp, Homo sapiens
taagaagtactgcca

SEQ ID NO: 62267 - DNA, 15 bp, Homo sapiens
ctaagaagtactgcc

SEQ ID NO: 62268 - DNA, 15 bp, Homo sapiens
gctaagaagtactgc

SEQ ID NO: 62269 - DNA, 15 bp, Homo sapiens
agctaagaagtactg

SEQ ID NO: 62270 - DNA, 15 bp, Homo sapiens
cagctaagaagtact

SEQ ID NO: 62271 - DNA, 15 bp, Homo sapiens
acagctaagaagtac

SEQ ID NO: 62272 - DNA, 15 bp, Homo sapiens
cacagctaagaagta

SEQ ID NO: 62273 - DNA, 15 bp, Homo sapiens
acacagctaagaagt

SEQ ID NO: 62274 - DNA, 15 bp, Homo sapiens
aacacagctaagaag

SEQ ID NO: 62275 - DNA, 15 bp, Homo sapiens
aaacacagctaagaa

SEQ ID NO: 62276 - DNA, 15 bp, Homo sapiens
taaacacagctaaga

SEQ ID NO: 62277 - DNA, 15 bp, Homo sapiens
ctaaacacagctaag

SEQ ID NO: 62278 - DNA, 15 bp, Homo sapiens
gctaaacacagctaa

SEQ ID NO: 62279 - DNA, 15 bp, Homo sapiens
agctaaacacagcta

SEQ ID NO: 62280 - DNA, 15 bp, Homo sapiens
aagctaaacacagct

SEQ ID NO: 62281 - DNA, 15 bp, Homo sapiens
caagctaaacacagc

SEQ ID NO: 62282 - DNA, 15 bp, Homo sapiens
acaagctaaacacag

SEQ ID NO: 62283 - DNA, 15 bp, Homo sapiens
tacaagctaaacaca

SEQ ID NO: 62284 - DNA, 15 bp, Homo sapiens
ctacaagctaaacac

SEQ ID NO: 62285 - DNA, 15 bp, Homo sapiens
tctacaagctaaaca

SEQ ID NO: 62286 - DNA, 15 bp, Homo sapiens
atctacaagctaaac

SEQ ID NO: 62287 - DNA, 15 bp, Homo sapiens
gatctacaagctaaa

SEQ ID NO: 62288 - DNA, 15 bp, Homo sapiens
agatctacaagctaa

SEQ ID NO: 62289 - DNA, 15 bp, Homo sapiens
cagatctacaagcta

SEQ ID NO: 62290 - DNA, 15 bp, Homo sapiens
acagatctacaagct

SEQ ID NO: 62291 - DNA, 15 bp, Homo sapiens
aacagatctacaagc

SEQ ID NO: 62292 - DNA, 15 bp, Homo sapiens
aaacagatctacaag

SEQ ID NO: 62293 - DNA, 15 bp, Homo sapiens
gaaacagatctacaa

SEQ ID NO: 62294 - DNA, 15 bp, Homo sapiens
agaaacagatctaca

SEQ ID NO: 62295 - DNA, 15 bp, Homo sapiens
cagaaacagatctac

SEQ ID NO: 62296 - DNA, 15 bp, Homo sapiens
ccagaaacagatcta

SEQ ID NO: 62297 - DNA, 15 bp, Homo sapiens
cccagaaacagatct

SEQ ID NO: 62298 - DNA, 15 bp, Homo sapiens
acccagaaacagatc

SEQ ID NO: 62299 - DNA, 15 bp, Homo sapiens
aacccagaaacagat

SEQ ID NO: 62300 - DNA, 15 bp, Homo sapiens
aaacccagaaacaga

SEQ ID NO: 62301 - DNA, 15 bp, Homo sapiens
aaaacccagaaacag

SEQ ID NO: 62302 - DNA, 15 bp, Homo sapiens
gaaaacccagaaaca

SEQ ID NO: 62303 - DNA, 15 bp, Homo sapiens
agaaaacccagaaac

SEQ ID NO: 62304 - DNA, 15 bp, Homo sapiens
aagaaaacccagaaa

SEQ ID NO: 62305 - DNA, 15 bp, Homo sapiens
aaagaaaacccagaa

SEQ ID NO: 62306 - DNA, 15 bp, Homo sapiens
aaaagaaaacccaga

SEQ ID NO: 62307 - DNA, 15 bp, Homo sapiens
gaaaagaaaacccag

SEQ ID NO: 62308 - DNA, 15 bp, Homo sapiens
agaaaagaaaaccca

SEQ ID NO: 62309 - DNA, 15 bp, Homo sapiens
aagaaaagaaaaccc

SEQ ID NO: 62310 - DNA, 15 bp, Homo sapiens
gaagaaaagaaaacc

SEQ ID NO: 62311 - DNA, 15 bp, Homo sapiens
agaagaaaagaaaac

SEQ ID NO: 62312 - DNA, 15 bp, Homo sapiens
gagaagaaaagaaaa

SEQ ID NO: 62313 - DNA, 15 bp, Homo sapiens
agagaagaaaagaaa

SEQ ID NO: 62314 - DNA, 15 bp, Homo sapiens
gagagaagaaaagaa

SEQ ID NO: 62315 - DNA, 15 bp, Homo sapiens
ggagagaagaaaaga

SEQ ID NO: 62316 - DNA, 15 bp, Homo sapiens
gggagagaagaaaag

SEQ ID NO: 62317 - DNA, 15 bp, Homo sapiens
ggggagagaagaaaa

SEQ ID NO: 62318 - DNA, 15 bp, Homo sapiens
aggggagagaagaaa

SEQ ID NO: 62319 - DNA, 15 bp, Homo sapiens
aaggggagagaagaa

SEQ ID NO: 62320 - DNA, 15 bp, Homo sapiens
gaaggggagagaaga

SEQ ID NO: 62321 - DNA, 15 bp, Homo sapiens
tgaaggggagagaag

SEQ ID NO: 62322 - DNA, 15 bp, Homo sapiens
gtgaaggggagagaa

SEQ ID NO: 62323 - DNA, 15 bp, Homo sapiens
ggtgaaggggagaga

SEQ ID NO: 62324 - DNA, 15 bp, Homo sapiens
aggtgaaggggagag

SEQ ID NO: 62325 - DNA, 15 bp, Homo sapiens
aaggtgaaggggaga

SEQ ID NO: 62326 - DNA, 15 bp, Homo sapiens
taaggtgaaggggag

SEQ ID NO: 62327 - DNA, 15 bp, Homo sapiens
ttaaggtgaagggga

SEQ ID NO: 62328 - DNA, 15 bp, Homo sapiens
tttaaggtgaagggg

SEQ ID NO: 62329 - DNA, 15 bp, Homo sapiens
ttttaaggtgaaggg

SEQ ID NO: 62330 - DNA, 15 bp, Homo sapiens
tttttaaggtgaagg

SEQ ID NO: 62331 - DNA, 15 bp, Homo sapiens
ttttttaaggtgaag

SEQ ID NO: 62332 - DNA, 15 bp, Homo sapiens
tttttttaaggtgaa

SEQ ID NO: 62333 - DNA, 15 bp, Homo sapiens
ttttttttaaggtga

SEQ ID NO: 62334 - DNA, 15 bp, Homo sapiens
attttttttaaggtg

SEQ ID NO: 62335 - DNA, 15 bp, Homo sapiens
aattttttttaaggt

SEQ ID NO: 62336 - DNA, 15 bp, Homo sapiens
taattttttttaagg

SEQ ID NO: 62337 - DNA, 15 bp, Homo sapiens
ataattttttttaag

SEQ ID NO: 62338 - DNA, 15 bp, Homo sapiens
tataattttttttaa

SEQ ID NO: 62339 - DNA, 15 bp, Homo sapiens
gtataatttttttta

SEQ ID NO: 62340 - DNA, 15 bp, Homo sapiens
ggtataatttttttt

SEQ ID NO: 62341 - DNA, 15 bp, Homo sapiens
gggtataattttttt

SEQ ID NO: 62342 - DNA, 15 bp, Homo sapiens
tgggtataatttttt

SEQ ID NO: 62343 - DNA, 15 bp, Homo sapiens
atgggtataattttt

SEQ ID NO: 62344 - DNA, 15 bp, Homo sapiens
aatgggtataatttt

SEQ ID NO: 62345 - DNA, 15 bp, Homo sapiens
aaatgggtataattt

SEQ ID NO: 62346 - DNA, 15 bp, Homo sapiens
aaaatgggtataatt

SEQ ID NO: 62347 - DNA, 15 bp, Homo sapiens
gaaaatgggtataat

SEQ ID NO: 62348 - DNA, 15 bp, Homo sapiens
agaaaatgggtataa

SEQ ID NO: 62349 - DNA, 15 bp, Homo sapiens
cagaaaatgggtata

SEQ ID NO: 62350 - DNA, 15 bp, Homo sapiens
acagaaaatgggtat

SEQ ID NO: 62351 - DNA, 15 bp, Homo sapiens
gacagaaaatgggta

SEQ ID NO: 62352 - DNA, 15 bp, Homo sapiens
agacagaaaatgggt

SEQ ID NO: 62353 - DNA, 15 bp, Homo sapiens
gagacagaaaatggg

SEQ ID NO: 62354 - DNA, 15 bp, Homo sapiens
agagacagaaaatgg

SEQ ID NO: 62355 - DNA, 15 bp, Homo sapiens
tagagacagaaaatg

SEQ ID NO: 62356 - DNA, 15 bp, Homo sapiens
ttagagacagaaaat

SEQ ID NO: 62357 - DNA, 15 bp, Homo sapiens
attagagacagaaaa

SEQ ID NO: 62358 - DNA, 15 bp, Homo sapiens
aattagagacagaaa

SEQ ID NO: 62359 - DNA, 15 bp, Homo sapiens
aaattagagacagaa

SEQ ID NO: 62360 - DNA, 15 bp, Homo sapiens
aaaattagagacaga

SEQ ID NO: 62361 - DNA, 15 bp, Homo sapiens
caaaattagagacag

SEQ ID NO: 62362 - DNA, 15 bp, Homo sapiens
ccaaaattagagaca

SEQ ID NO: 62363 - DNA, 15 bp, Homo sapiens
tccaaaattagagac

SEQ ID NO: 62364 - DNA, 15 bp, Homo sapiens
atccaaaattagaga

SEQ ID NO: 62365 - DNA, 15 bp, Homo sapiens
gatccaaaattagag

SEQ ID NO: 62366 - DNA, 15 bp, Homo sapiens
tgatccaaaattaga

SEQ ID NO: 62367 - DNA, 15 bp, Homo sapiens
ttgatccaaaattag

SEQ ID NO: 62368 - DNA, 15 bp, Homo sapiens
gttgatccaaaatta

SEQ ID NO: 62369 - DNA, 15 bp, Homo sapiens
ggttgatccaaaatt

SEQ ID NO: 62370 - DNA, 15 bp, Homo sapiens
tggttgatccaaaat

SEQ ID NO: 62371 - DNA, 15 bp, Homo sapiens
ctggttgatccaaaa

SEQ ID NO: 62372 - DNA, 15 bp, Homo sapiens
tctggttgatccaaa

SEQ ID NO: 62373 - DNA, 15 bp, Homo sapiens
atctggttgatccaa

SEQ ID NO: 62374 - DNA, 15 bp, Homo sapiens
aatctggttgatcca

SEQ ID NO: 62375 - DNA, 15 bp, Homo sapiens
caatctggttgatcc

SEQ ID NO: 62376 - DNA, 15 bp, Homo sapiens
tcaatctggttgatc

SEQ ID NO: 62377 - DNA, 15 bp, Homo sapiens
gtcaatctggttgat

SEQ ID NO: 62378 - DNA, 15 bp, Homo sapiens
agtcaatctggttga

SEQ ID NO: 62379 - DNA, 15 bp, Homo sapiens
cagtcaatctggttg

SEQ ID NO: 62380 - DNA, 15 bp, Homo sapiens
ccagtcaatctggtt

SEQ ID NO: 62381 - DNA, 15 bp, Homo sapiens
tccagtcaatctggt

SEQ ID NO: 62382 - DNA, 15 bp, Homo sapiens
ttccagtcaatctgg

SEQ ID NO: 62383 - DNA, 15 bp, Homo sapiens
gttccagtcaatctg

SEQ ID NO: 62384 - DNA, 15 bp, Homo sapiens
agttccagtcaatct

SEQ ID NO: 62385 - DNA, 15 bp, Homo sapiens
aagttccagtcaatc

SEQ ID NO: 62386 - DNA, 15 bp, Homo sapiens
caagttccagtcaat

SEQ ID NO: 62387 - DNA, 15 bp, Homo sapiens
tcaagttccagtcaa

SEQ ID NO: 62388 - DNA, 15 bp, Homo sapiens
ctcaagttccagtca

SEQ ID NO: 62389 - DNA, 15 bp, Homo sapiens
tctcaagttccagtc

SEQ ID NO: 62390 - DNA, 15 bp, Homo sapiens
atctcaagttccagt

SEQ ID NO: 62391 - DNA, 15 bp, Homo sapiens
catctcaagttccag

SEQ ID NO: 62392 - DNA, 15 bp, Homo sapiens
ccatctcaagttcca

SEQ ID NO: 62393 - DNA, 15 bp, Homo sapiens
gccatctcaagttcc

SEQ ID NO: 62394 - DNA, 15 bp, Homo sapiens
tgccatctcaagttc

SEQ ID NO: 62395 - DNA, 15 bp, Homo sapiens
atgccatctcaagtt

SEQ ID NO: 62396 - DNA, 15 bp, Homo sapiens
aatgccatctcaagt

SEQ ID NO: 62397 - DNA, 15 bp, Homo sapiens
aaatgccatctcaag

SEQ ID NO: 62398 - DNA, 15 bp, Homo sapiens
gaaatgccatctcaa

SEQ ID NO: 62399 - DNA, 15 bp, Homo sapiens
tgaaatgccatctca

SEQ ID NO: 62400 - DNA, 15 bp, Homo sapiens
gtgaaatgccatctc

SEQ ID NO: 62401 - DNA, 15 bp, Homo sapiens
agtgaaatgccatct

SEQ ID NO: 62402 - DNA, 15 bp, Homo sapiens
tagtgaaatgccatc

SEQ ID NO: 62403 - DNA, 15 bp, Homo sapiens
ttagtgaaatgccat

SEQ ID NO: 62404 - DNA, 15 bp, Homo sapiens
tttagtgaaatgcca

SEQ ID NO: 62405 - DNA, 15 bp, Homo sapiens
aaaatggcatttttc

SEQ ID NO: 62406 - DNA, 15 bp, Homo sapiens
caaaatggcattttt

SEQ ID NO: 62407 - DNA, 15 bp, Homo sapiens
tcaaaatggcatttt

SEQ ID NO: 62408 - DNA, 15 bp, Homo sapiens
ctcaaaatggcattt

SEQ ID NO: 62409 - DNA, 15 bp, Homo sapiens
gctcaaaatggcatt

SEQ ID NO: 62410 - DNA, 15 bp, Homo sapiens
ggctcaaaatggcat

SEQ ID NO: 62411 - DNA, 15 bp, Homo sapiens
gggctcaaaatggca

SEQ ID NO: 62412 - DNA, 15 bp, Homo sapiens
ggggctcaaaatggc

SEQ ID NO: 62413 - DNA, 15 bp, Homo sapiens
gggggctcaaaatgg

SEQ ID NO: 62414 - DNA, 15 bp, Homo sapiens
tgggggctcaaaatg

SEQ ID NO: 62415 - DNA, 15 bp, Homo sapiens
ttgggggctcaaaat

SEQ ID NO: 62416 - DNA, 15 bp, Homo sapiens
cttgggggctcaaaa

SEQ ID NO: 62417 - DNA, 15 bp, Homo sapiens
tcttgggggctcaaa

SEQ ID NO: 62418 - DNA, 15 bp, Homo sapiens
atcttgggggctcaa

SEQ ID NO: 62419 - DNA, 15 bp, Homo sapiens
tatcttgggggctca

SEQ ID NO: 62420 - DNA, 15 bp, Homo sapiens
atatcttgggggctc

SEQ ID NO: 62421 - DNA, 15 bp, Homo sapiens
gatatcttgggggct

SEQ ID NO: 62422 - DNA, 15 bp, Homo sapiens
agatatcttgggggc

SEQ ID NO: 62423 - DNA, 15 bp, Homo sapiens
aagatatcttggggg

SEQ ID NO: 62424 - DNA, 15 bp, Homo sapiens
gaagatatcttgggg

SEQ ID NO: 62425 - DNA, 15 bp, Homo sapiens
tgaagatatcttggg

SEQ ID NO: 62426 - DNA, 15 bp, Homo sapiens
atgaagatatcttgg

SEQ ID NO: 62427 - DNA, 15 bp, Homo sapiens
tatgaagatatcttg

SEQ ID NO: 62428 - DNA, 15 bp, Homo sapiens
ttatgaagatatctt

SEQ ID NO: 62429 - DNA, 15 bp, Homo sapiens
gttatgaagatatct

SEQ ID NO: 62430 - DNA, 15 bp, Homo sapiens
agttatgaagatatc

SEQ ID NO: 62431 - DNA, 15 bp, Homo sapiens
cagttatgaagatat

SEQ ID NO: 62432 - DNA, 15 bp, Homo sapiens
acagttatgaagata

SEQ ID NO: 62433 - DNA, 15 bp, Homo sapiens
gacagttatgaagat

SEQ ID NO: 62434 - DNA, 15 bp, Homo sapiens
ggacagttatgaaga

SEQ ID NO: 62435 - DNA, 15 bp, Homo sapiens
tggacagttatgaag

SEQ ID NO: 62436 - DNA, 15 bp, Homo sapiens
atggacagttatgaa

SEQ ID NO: 62437 - DNA, 15 bp, Homo sapiens
tatggacagttatga

SEQ ID NO: 62438 - DNA, 15 bp, Homo sapiens
ctatggacagttatg

SEQ ID NO: 62439 - DNA, 15 bp, Homo sapiens
actatggacagttat

SEQ ID NO: 62440 - DNA, 15 bp, Homo sapiens
cactatggacagtta

SEQ ID NO: 62441 - DNA, 15 bp, Homo sapiens
gcactatggacagtt

SEQ ID NO: 62442 - DNA, 15 bp, Homo sapiens
ggcactatggacagt

SEQ ID NO: 62443 - DNA, 15 bp, Homo sapiens
aggcactatggacag

SEQ ID NO: 62444 - DNA, 15 bp, Homo sapiens
taggcactatggaca

SEQ ID NO: 62445 - DNA, 15 bp, Homo sapiens
ctaggcactatggac

SEQ ID NO: 62446 - DNA, 15 bp, Homo sapiens
cctaggcactatgga

SEQ ID NO: 62447 - DNA, 15 bp, Homo sapiens
ccctaggcactatgg

SEQ ID NO: 62448 - DNA, 15 bp, Homo sapiens
accctaggcactatg

SEQ ID NO: 62449 - DNA, 15 bp, Homo sapiens
caccctaggcactat

SEQ ID NO: 62450 - DNA, 15 bp, Homo sapiens
gcaccctaggcacta

SEQ ID NO: 62451 - DNA, 15 bp, Homo sapiens
ggcaccctaggcact

SEQ ID NO: 62452 - DNA, 15 bp, Homo sapiens
aggcaccctaggcac

SEQ ID NO: 62453 - DNA, 15 bp, Homo sapiens
caggcaccctaggca

SEQ ID NO: 62454 - DNA, 15 bp, Homo sapiens
tcaggcaccctaggc

SEQ ID NO: 62455 - DNA, 15 bp, Homo sapiens
ttcaggcaccctagg

SEQ ID NO: 62456 - DNA, 15 bp, Homo sapiens
gttcaggcaccctag

SEQ ID NO: 62457 - DNA, 15 bp, Homo sapiens
tgttcaggcacccta

SEQ ID NO: 62458 - DNA, 15 bp, Homo sapiens
ttgttcaggcaccct

SEQ ID NO: 62459 - DNA, 15 bp, Homo sapiens
tttgttcaggcaccc

SEQ ID NO: 62460 - DNA, 15 bp, Homo sapiens
gtttgttcaggcacc

SEQ ID NO: 62461 - DNA, 15 bp, Homo sapiens
tgtttgttcaggcac

SEQ ID NO: 62462 - DNA, 15 bp, Homo sapiens
gtgtttgttcaggca

SEQ ID NO: 62463 - DNA, 15 bp, Homo sapiens
ggtgtttgttcaggc

SEQ ID NO: 62464 - DNA, 15 bp, Homo sapiens
tggtgtttgttcagg

SEQ ID NO: 62465 - DNA, 15 bp, Homo sapiens
ctggtgtttgttcag

SEQ ID NO: 62466 - DNA, 15 bp, Homo sapiens
gctggtgtttgttca

SEQ ID NO: 62467 - DNA, 15 bp, Homo sapiens
agctggtgtttgttc

SEQ ID NO: 62468 - DNA, 15 bp, Homo sapiens
gagctggtgtttgtt

SEQ ID NO: 62469 - DNA, 15 bp, Homo sapiens
agagctggtgtttgt

SEQ ID NO: 62470 - DNA, 15 bp, Homo sapiens
aagagctggtgtttg

SEQ ID NO: 62471 - DNA, 15 bp, Homo sapiens
aaagagctggtgttt

SEQ ID NO: 62472 - DNA, 15 bp, Homo sapiens
taaagagctggtgtt

SEQ ID NO: 62473 - DNA, 15 bp, Homo sapiens
ataaagagctggtgt

SEQ ID NO: 62474 - DNA, 15 bp, Homo sapiens
aataaagagctggtg

SEQ ID NO: 62475 - DNA, 15 bp, Homo sapiens
aaataaagagctggt

SEQ ID NO: 62476 - DNA, 15 bp, Homo sapiens
aaaataaagagctgg

SEQ ID NO: 62477 - DNA, 15 bp, Homo sapiens
taaaataaagagctg

SEQ ID NO: 62478 - DNA, 15 bp, Homo sapiens
ataaaataaagagct

SEQ ID NO: 62479 - DNA, 15 bp, Homo sapiens
tataaaataaagagc

SEQ ID NO: 62480 - DNA, 15 bp, Homo sapiens
ttataaaataaagag

SEQ ID NO: 62481 - DNA, 15 bp, Homo sapiens
attataaaataaaga

SEQ ID NO: 62482 - DNA, 15 bp, Homo sapiens
cattataaaataaag

SEQ ID NO: 62483 - DNA, 15 bp, Homo sapiens
tcattataaaataaa

SEQ ID NO: 62484 - DNA, 15 bp, Homo sapiens
ttcattataaaataa

SEQ ID NO: 62485 - DNA, 15 bp, Homo sapiens
attcattataaaata

SEQ ID NO: 62486 - DNA, 15 bp, Homo sapiens
tattcattataaaat

SEQ ID NO: 62487 - DNA, 15 bp, Homo sapiens
ctattcattataaaa

SEQ ID NO: 62488 - DNA, 15 bp, Homo sapiens
actattcattataaa

SEQ ID NO: 62489 - DNA, 15 bp, Homo sapiens
aactattcattataa

SEQ ID NO: 62490 - DNA, 15 bp, Homo sapiens
gaactattcattata

SEQ ID NO: 62491 - DNA, 15 bp, Homo sapiens
agaactattcattat

SEQ ID NO: 62492 - DNA, 15 bp, Homo sapiens
tagaactattcatta

SEQ ID NO: 62493 - DNA, 15 bp, Homo sapiens
atagaactattcatt

SEQ ID NO: 62494 - DNA, 15 bp, Homo sapiens
catagaactattcat

SEQ ID NO: 62495 - DNA, 15 bp, Homo sapiens
acatagaactattca

SEQ ID NO: 62496 - DNA, 15 bp, Homo sapiens
cacatagaactattc

SEQ ID NO: 62497 - DNA, 15 bp, Homo sapiens
acacatagaactatt

SEQ ID NO: 62498 - DNA, 15 bp, Homo sapiens
aacacatagaactat

SEQ ID NO: 62499 - DNA, 15 bp, Homo sapiens
taacacatagaacta

SEQ ID NO: 62500 - DNA, 15 bp, Homo sapiens
ttaacacatagaact

SEQ ID NO: 62501 - DNA, 15 bp, Homo sapiens
tttaacacatagaac

SEQ ID NO: 62502 - DNA, 15 bp, Homo sapiens
ttttaacacatagaa

SEQ ID NO: 62503 - DNA, 15 bp, Homo sapiens
cttttaacacataga

SEQ ID NO: 62504 - DNA, 15 bp, Homo sapiens
tcttttaacacatag

SEQ ID NO: 62505 - DNA, 15 bp, Homo sapiens
ttcttttaacacata

SEQ ID NO: 62506 - DNA, 15 bp, Homo sapiens
cttcttttaacacat

SEQ ID NO: 62507 - DNA, 15 bp, Homo sapiens
acttcttttaacaca

SEQ ID NO: 62508 - DNA, 15 bp, Homo sapiens
gacttcttttaacac

SEQ ID NO: 62509 - DNA, 15 bp, Homo sapiens
ggacttcttttaaca

SEQ ID NO: 62510 - DNA, 15 bp, Homo sapiens
aggacttcttttaac

SEQ ID NO: 62511 - DNA, 15 bp, Homo sapiens
taggacttcttttaa

SEQ ID NO: 62512 - DNA, 15 bp, Homo sapiens
ctaggacttctttta

SEQ ID NO: 62513 - DNA, 15 bp, Homo sapiens
cctaggacttctttt

SEQ ID NO: 62514 - DNA, 15 bp, Homo sapiens
gcctaggacttcttt

SEQ ID NO: 62515 - DNA, 15 bp, Homo sapiens
tgcctaggacttctt

SEQ ID NO: 62516 - DNA, 15 bp, Homo sapiens
ttgcctaggacttct

SEQ ID NO: 62517 - DNA, 15 bp, Homo sapiens
gttgcctaggacttc

SEQ ID NO: 62518 - DNA, 15 bp, Homo sapiens
tgttgcctaggactt

SEQ ID NO: 62519 - DNA, 15 bp, Homo sapiens
atgttgcctaggact

SEQ ID NO: 62520 - DNA, 15 bp, Homo sapiens
aatgttgcctaggac

SEQ ID NO: 62521 - DNA, 15 bp, Homo sapiens
aaatgttgcctagga

SEQ ID NO: 62522 - DNA, 15 bp, Homo sapiens
taaatgttgcctagg

SEQ ID NO: 62523 - DNA, 15 bp, Homo sapiens
ttaaatgttgcctag

SEQ ID NO: 62524 - DNA, 15 bp, Homo sapiens
tttaaatgttgccta

SEQ ID NO: 62525 - DNA, 15 bp, Homo sapiens
ttttaaatgttgcct

SEQ ID NO: 62526 - DNA, 15 bp, Homo sapiens
tttttaaatgttgcc

SEQ ID NO: 62527 - DNA, 15 bp, Homo sapiens
atttttaaatgttgc

SEQ ID NO: 62528 - DNA, 15 bp, Homo sapiens
tatttttaaatgttg

SEQ ID NO: 62529 - DNA, 15 bp, Homo sapiens
ttatttttaaatgtt

SEQ ID NO: 62530 - DNA, 15 bp, Homo sapiens
gttatttttaaatgt

SEQ ID NO: 62531 - DNA, 15 bp, Homo sapiens
agttatttttaaatg

SEQ ID NO: 62532 - DNA, 15 bp, Homo sapiens
tagttatttttaaat

SEQ ID NO: 62533 - DNA, 15 bp, Homo sapiens
ttagttatttttaaa

SEQ ID NO: 62534 - DNA, 15 bp, Homo sapiens
tttagttatttttaa

SEQ ID NO: 62535 - DNA, 15 bp, Homo sapiens
ttttagttattttta

SEQ ID NO: 62536 - DNA, 15 bp, Homo sapiens
cttttagttattttt

SEQ ID NO: 62537 - DNA, 15 bp, Homo sapiens
acttttagttatttt

SEQ ID NO: 62538 - DNA, 15 bp, Homo sapiens
tacttttagttattt

SEQ ID NO: 62539 - DNA, 15 bp, Homo sapiens
gtacttttagttatt

SEQ ID NO: 62540 - DNA, 15 bp, Homo sapiens
tgtacttttagttat

SEQ ID NO: 62541 - DNA, 15 bp, Homo sapiens
atgtacttttagtta

SEQ ID NO: 62542 - DNA, 15 bp, Homo sapiens
tatgtacttttagtt

SEQ ID NO: 62543 - DNA, 15 bp, Homo sapiens
ttatgtacttttagt

SEQ ID NO: 62544 - DNA, 15 bp, Homo sapiens
attatgtacttttag

SEQ ID NO: 62545 - DNA, 15 bp, Homo sapiens
aattatgtactttta

SEQ ID NO: 62546 - DNA, 15 bp, Homo sapiens
caattatgtactttt

SEQ ID NO: 62547 - DNA, 15 bp, Homo sapiens
ccaattatgtacttt

SEQ ID NO: 62548 - DNA, 15 bp, Homo sapiens
tccaattatgtactt

SEQ ID NO: 62549 - DNA, 15 bp, Homo sapiens
atccaattatgtact

SEQ ID NO: 62550 - DNA, 15 bp, Homo sapiens
aatccaattatgtac

SEQ ID NO: 62551 - DNA, 15 bp, Homo sapiens
caatccaattatgta

SEQ ID NO: 62552 - DNA, 15 bp, Homo sapiens
acaatccaattatgt

SEQ ID NO: 62553 - DNA, 15 bp, Homo sapiens
aacaatccaattatg

SEQ ID NO: 62554 - DNA, 15 bp, Homo sapiens
aaacaatccaattat

SEQ ID NO: 62555 - DNA, 15 bp, Homo sapiens
caaacaatccaatta

SEQ ID NO: 62556 - DNA, 15 bp, Homo sapiens
acaaacaatccaatt

SEQ ID NO: 62557 - DNA, 15 bp, Homo sapiens
tacaaacaatccaat

SEQ ID NO: 62558 - DNA, 15 bp, Homo sapiens
ttacaaacaatccaa

SEQ ID NO: 62559 - DNA, 15 bp, Homo sapiens
gttacaaacaatcca

SEQ ID NO: 62560 - DNA, 15 bp, Homo sapiens
tgttacaaacaatcc

SEQ ID NO: 62561 - DNA, 15 bp, Homo sapiens
gtgttacaaacaatc

SEQ ID NO: 62562 - DNA, 15 bp, Homo sapiens
tgtgttacaaacaat

SEQ ID NO: 62563 - DNA, 15 bp, Homo sapiens
ttgtgttacaaacaa

SEQ ID NO: 62564 - DNA, 15 bp, Homo sapiens
tttgtgttacaaaca

SEQ ID NO: 62565 - DNA, 15 bp, Homo sapiens
ctttgtgttacaaac

SEQ ID NO: 62566 - DNA, 15 bp, Homo sapiens
tctttgtgttacaaa

SEQ ID NO: 62567 - DNA, 15 bp, Homo sapiens
ttctttgtgttacaa

SEQ ID NO: 62568 - DNA, 15 bp, Homo sapiens
tttctttgtgttaca

SEQ ID NO: 62569 - DNA, 15 bp, Homo sapiens
ctttctttgtgttac

SEQ ID NO: 62570 - DNA, 15 bp, Homo sapiens
cctttctttgtgtta

SEQ ID NO: 62571 - DNA, 15 bp, Homo sapiens
tcctttctttgtgtt

SEQ ID NO: 62572 - DNA, 15 bp, Homo sapiens
ctcctttctttgtgt

SEQ ID NO: 62573 - DNA, 15 bp, Homo sapiens
tctcctttctttgtg

SEQ ID NO: 62574 - DNA, 15 bp, Homo sapiens
ctctcctttctttgt

SEQ ID NO: 62575 - DNA, 15 bp, Homo sapiens
tctctcctttctttg

SEQ ID NO: 62576 - DNA, 15 bp, Homo sapiens
atctctcctttcttt

SEQ ID NO: 62577 - DNA, 15 bp, Homo sapiens
catctctcctttctt

SEQ ID NO: 62578 - DNA, 15 bp, Homo sapiens
gcatctctcctttct

SEQ ID NO: 62579 - DNA, 15 bp, Homo sapiens
agcatctctcctttc

SEQ ID NO: 62580 - DNA, 15 bp, Homo sapiens
aagcatctctccttt

SEQ ID NO: 62581 - DNA, 15 bp, Homo sapiens
caagcatctctcctt

SEQ ID NO: 62582 - DNA, 15 bp, Homo sapiens
tcaagcatctctcct

SEQ ID NO: 62583 - DNA, 15 bp, Homo sapiens
ctcaagcatctctcc

SEQ ID NO: 62584 - DNA, 15 bp, Homo sapiens
cctcaagcatctctc

SEQ ID NO: 62585 - DNA, 15 bp, Homo sapiens
acctcaagcatctct

SEQ ID NO: 62586 - DNA, 15 bp, Homo sapiens
cacctcaagcatctc

SEQ ID NO: 62587 - DNA, 15 bp, Homo sapiens
tcacctcaagcatct

SEQ ID NO: 62588 - DNA, 15 bp, Homo sapiens
atcacctcaagcatc

SEQ ID NO: 62589 - DNA, 15 bp, Homo sapiens
catcacctcaagcat

SEQ ID NO: 62590 - DNA, 15 bp, Homo sapiens
ccatcacctcaagca

SEQ ID NO: 62591 - DNA, 15 bp, Homo sapiens
tccatcacctcaagc

SEQ ID NO: 62592 - DNA, 15 bp, Homo sapiens
atccatcacctcaag

SEQ ID NO: 62593 - DNA, 15 bp, Homo sapiens
tatccatcacctcaa

SEQ ID NO: 62594 - DNA, 15 bp, Homo sapiens
gtatccatcacctca

SEQ ID NO: 62595 - DNA, 15 bp, Homo sapiens
ggtatccatcacctc

SEQ ID NO: 62596 - DNA, 15 bp, Homo sapiens
aggtatccatcacct

SEQ ID NO: 62597 - DNA, 15 bp, Homo sapiens
gaggtatccatcacc

SEQ ID NO: 62598 - DNA, 15 bp, Homo sapiens
agaggtatccatcac

SEQ ID NO: 62599 - DNA, 15 bp, Homo sapiens
gagaggtatccatca

SEQ ID NO: 62600 - DNA, 15 bp, Homo sapiens
agagaggtatccatc

SEQ ID NO: 62601 - DNA, 15 bp, Homo sapiens
aagagaggtatccat

SEQ ID NO: 62602 - DNA, 15 bp, Homo sapiens
aaagagaggtatcca

SEQ ID NO: 62603 - DNA, 15 bp, Homo sapiens
gaaagagaggtatcc

SEQ ID NO: 62604 - DNA, 15 bp, Homo sapiens
agaaagagaggtatc

SEQ ID NO: 62605 - DNA, 15 bp, Homo sapiens
aagaaagagaggtat

SEQ ID NO: 62606 - DNA, 15 bp, Homo sapiens
gaagaaagagaggta

SEQ ID NO: 62607 - DNA, 15 bp, Homo sapiens
ggaagaaagagaggt

SEQ ID NO: 62608 - DNA, 15 bp, Homo sapiens
gggaagaaagagagg

SEQ ID NO: 62609 - DNA, 15 bp, Homo sapiens
ggggaagaaagagag

SEQ ID NO: 62610 - DNA, 15 bp, Homo sapiens
aggggaagaaagaga

SEQ ID NO: 62611 - DNA, 15 bp, Homo sapiens
aaggggaagaaagag

SEQ ID NO: 62612 - DNA, 15 bp, Homo sapiens
aaaggggaagaaaga

SEQ ID NO: 62613 - DNA, 15 bp, Homo sapiens
caaaggggaagaaag

SEQ ID NO: 62614 - DNA, 15 bp, Homo sapiens
tcaaaggggaagaaa

SEQ ID NO: 62615 - DNA, 15 bp, Homo sapiens
ttcaaaggggaagaa

SEQ ID NO: 62616 - DNA, 15 bp, Homo sapiens
tttcaaaggggaaga

SEQ ID NO: 62617 - DNA, 15 bp, Homo sapiens
ttttcaaaggggaag

SEQ ID NO: 62618 - DNA, 15 bp, Homo sapiens
tttttcaaaggggaa

SEQ ID NO: 62619 - DNA, 15 bp, Homo sapiens
ttttttcaaagggga

SEQ ID NO: 62620 - DNA, 15 bp, Homo sapiens
tttttttcaaagggg

SEQ ID NO: 62621 - DNA, 15 bp, Homo sapiens
ttttttttcaaaggg

SEQ ID NO: 62622 - DNA, 15 bp, Homo sapiens
tttttttttcaaagg

SEQ ID NO: 62623 - DNA, 15 bp, Homo sapiens
ctttttttttcaaag

SEQ ID NO: 62624 - DNA, 15 bp, Homo sapiens
tctttttttttcaaa

SEQ ID NO: 62625 - DNA, 15 bp, Homo sapiens
ttctttttttttcaa

SEQ ID NO: 62626 - DNA, 15 bp, Homo sapiens
cttctttttttttca

SEQ ID NO: 62627 - DNA, 15 bp, Homo sapiens
acttctttttttttc

SEQ ID NO: 62628 - DNA, 15 bp, Homo sapiens
gacttcttttttttt

SEQ ID NO: 62629 - DNA, 15 bp, Homo sapiens
agacttctttttttt

SEQ ID NO: 62630 - DNA, 15 bp, Homo sapiens
aagacttcttttttt

SEQ ID NO: 62631 - DNA, 15 bp, Homo sapiens
caagacttctttttt

SEQ ID NO: 62632 - DNA, 15 bp, Homo sapiens
ccaagacttcttttt

SEQ ID NO: 62633 - DNA, 15 bp, Homo sapiens
cccaagacttctttt

SEQ ID NO: 62634 - DNA, 15 bp, Homo sapiens
gcccaagacttcttt

SEQ ID NO: 62635 - DNA, 15 bp, Homo sapiens
tgcccaagacttctt

SEQ ID NO: 62636 - DNA, 15 bp, Homo sapiens
ctgcccaagacttct

SEQ ID NO: 62637 - DNA, 15 bp, Homo sapiens
tctgcccaagacttc

SEQ ID NO: 62638 - DNA, 15 bp, Homo sapiens
ttctgcccaagactt

SEQ ID NO: 62639 - DNA, 15 bp, Homo sapiens
attctgcccaagact

SEQ ID NO: 62640 - DNA, 15 bp, Homo sapiens
gattctgcccaagac

SEQ ID NO: 62641 - DNA, 15 bp, Homo sapiens
ggattctgcccaaga

SEQ ID NO: 62642 - DNA, 15 bp, Homo sapiens
cggattctgcccaag

SEQ ID NO: 62643 - DNA, 15 bp, Homo sapiens
ccggattctgcccaa

SEQ ID NO: 62644 - DNA, 15 bp, Homo sapiens
cccggattctgccca

SEQ ID NO: 62645 - DNA, 15 bp, Homo sapiens
tcccggattctgccc

SEQ ID NO: 62646 - DNA, 15 bp, Homo sapiens
ttcccggattctgcc

SEQ ID NO: 62647 - DNA, 15 bp, Homo sapiens
cttcccggattctgc

SEQ ID NO: 62648 - DNA, 15 bp, Homo sapiens
ccttcccggattctg

SEQ ID NO: 62649 - DNA, 15 bp, Homo sapiens
gccttcccggattct

SEQ ID NO: 62650 - DNA, 15 bp, Homo sapiens
tgccttcccggattc

SEQ ID NO: 62651 - DNA, 15 bp, Homo sapiens
ctgccttcccggatt

SEQ ID NO: 62652 - DNA, 15 bp, Homo sapiens
tctgccttcccggat

SEQ ID NO: 62653 - DNA, 15 bp, Homo sapiens
gtctgccttcccgga

SEQ ID NO: 62654 - DNA, 15 bp, Homo sapiens
tgtctgccttcccgg

SEQ ID NO: 62655 - DNA, 15 bp, Homo sapiens
atgtctgccttcccg

SEQ ID NO: 62656 - DNA, 15 bp, Homo sapiens
aatgtctgccttccc

SEQ ID NO: 62657 - DNA, 15 bp, Homo sapiens
caatgtctgccttcc

SEQ ID NO: 62658 - DNA, 15 bp, Homo sapiens
tcaatgtctgccttc

SEQ ID NO: 62659 - DNA, 15 bp, Homo sapiens
atcaatgtctgcctt

SEQ ID NO: 62660 - DNA, 15 bp, Homo sapiens
aatcaatgtctgcct

SEQ ID NO: 62661 - DNA, 15 bp, Homo sapiens
aaatcaatgtctgcc

SEQ ID NO: 62662 - DNA, 15 bp, Homo sapiens
taaatcaatgtctgc

SEQ ID NO: 62663 - DNA, 15 bp, Homo sapiens
gtaaatcaatgtctg

SEQ ID NO: 62664 - DNA, 15 bp, Homo sapiens
agtaaatcaatgtct

SEQ ID NO: 62665 - DNA, 15 bp, Homo sapiens
aagtaaatcaatgtc

SEQ ID NO: 62666 - DNA, 15 bp, Homo sapiens
aaagtaaatcaatgt

SEQ ID NO: 62667 - DNA, 15 bp, Homo sapiens
caaagtaaatcaatg

SEQ ID NO: 62668 - DNA, 15 bp, Homo sapiens
tcaaagtaaatcaat

SEQ ID NO: 62669 - DNA, 15 bp, Homo sapiens
ctcaaagtaaatcaa

SEQ ID NO: 62670 - DNA, 15 bp, Homo sapiens
tctcaaagtaaatca

SEQ ID NO: 62671 - DNA, 15 bp, Homo sapiens
gtctcaaagtaaatc

SEQ ID NO: 62672 - DNA, 15 bp, Homo sapiens
agtctcaaagtaaat

SEQ ID NO: 62673 - DNA, 15 bp, Homo sapiens
gagtctcaaagtaaa

SEQ ID NO: 62674 - DNA, 15 bp, Homo sapiens
tgagtctcaaagtaa

SEQ ID NO: 62675 - DNA, 15 bp, Homo sapiens
ttgagtctcaaagta

SEQ ID NO: 62676 - DNA, 15 bp, Homo sapiens
tttgagtctcaaagt

SEQ ID NO: 62677 - DNA, 15 bp, Homo sapiens
ttttgagtctcaaag

SEQ ID NO: 62678 - DNA, 15 bp, Homo sapiens
cttttgagtctcaaa

SEQ ID NO: 62679 - DNA, 15 bp, Homo sapiens
acttttgagtctcaa

SEQ ID NO: 62680 - DNA, 15 bp, Homo sapiens
cacttttgagtctca

SEQ ID NO: 62681 - DNA, 15 bp, Homo sapiens
tcacttttgagtctc

SEQ ID NO: 62682 - DNA, 15 bp, Homo sapiens
ttcacttttgagtct

SEQ ID NO: 62683 - DNA, 15 bp, Homo sapiens
tttcacttttgagtc

SEQ ID NO: 62684 - DNA, 15 bp, Homo sapiens
ttttcacttttgagt

SEQ ID NO: 62685 - DNA, 15 bp, Homo sapiens
attttcacttttgag

SEQ ID NO: 62686 - DNA, 15 bp, Homo sapiens
cattttcacttttga

SEQ ID NO: 62687 - DNA, 15 bp, Homo sapiens
tcattttcacttttg

SEQ ID NO: 62688 - DNA, 15 bp, Homo sapiens
ttcattttcactttt

SEQ ID NO: 62689 - DNA, 15 bp, Homo sapiens
cttcattttcacttt

SEQ ID NO: 62690 - DNA, 15 bp, Homo sapiens
tcttcattttcactt

SEQ ID NO: 62691 - DNA, 15 bp, Homo sapiens
gtcttcattttcact

SEQ ID NO: 62692 - DNA, 15 bp, Homo sapiens
agtcttcattttcac

SEQ ID NO: 62693 - DNA, 15 bp, Homo sapiens
tagtcttcattttca

SEQ ID NO: 62694 - DNA, 15 bp, Homo sapiens
atagtcttcattttc

SEQ ID NO: 62695 - DNA, 15 bp, Homo sapiens
catagtcttcatttt

SEQ ID NO: 62696 - DNA, 15 bp, Homo sapiens
acatagtcttcattt

SEQ ID NO: 62697 - DNA, 15 bp, Homo sapiens
aacatagtcttcatt

SEQ ID NO: 62698 - DNA, 15 bp, Homo sapiens
aaacatagtcttcat

SEQ ID NO: 62699 - DNA, 15 bp, Homo sapiens
gaaacatagtcttca

SEQ ID NO: 62700 - DNA, 15 bp, Homo sapiens
ggaaacatagtcttc

SEQ ID NO: 62701 - DNA, 15 bp, Homo sapiens
gggaaacatagtctt

SEQ ID NO: 62702 - DNA, 15 bp, Homo sapiens
agggaaacatagtct

SEQ ID NO: 62703 - DNA, 15 bp, Homo sapiens
tagggaaacatagtc

SEQ ID NO: 62704 - DNA, 15 bp, Homo sapiens
atagggaaacatagt

SEQ ID NO: 62705 - DNA, 15 bp, Homo sapiens
gatagggaaacatag

SEQ ID NO: 62706 - DNA, 15 bp, Homo sapiens
agatagggaaacata

SEQ ID NO: 62707 - DNA, 15 bp, Homo sapiens
tagatagggaaacat

SEQ ID NO: 62708 - DNA, 15 bp, Homo sapiens
ttagatagggaaaca

SEQ ID NO: 62709 - DNA, 15 bp, Homo sapiens
attagatagggaaac

SEQ ID NO: 62710 - DNA, 15 bp, Homo sapiens
gattagatagggaaa

SEQ ID NO: 62711 - DNA, 15 bp, Homo sapiens
ggattagatagggaa

SEQ ID NO: 62712 - DNA, 15 bp, Homo sapiens
aggattagataggga

SEQ ID NO: 62713 - DNA, 15 bp, Homo sapiens
aaggattagataggg

SEQ ID NO: 62714 - DNA, 15 bp, Homo sapiens
taaggattagatagg

SEQ ID NO: 62715 - DNA, 15 bp, Homo sapiens
ttaaggattagatag

SEQ ID NO: 62716 - DNA, 15 bp, Homo sapiens
attaaggattagata

SEQ ID NO: 62717 - DNA, 15 bp, Homo sapiens
cattaaggattagat

SEQ ID NO: 62718 - DNA, 15 bp, Homo sapiens
acattaaggattaga

SEQ ID NO: 62719 - DNA, 15 bp, Homo sapiens
tacattaaggattag

SEQ ID NO: 62720 - DNA, 15 bp, Homo sapiens
atacattaaggatta

SEQ ID NO: 62721 - DNA, 15 bp, Homo sapiens
tatacattaaggatt

SEQ ID NO: 62722 - DNA, 15 bp, Homo sapiens
gtatacattaaggat

SEQ ID NO: 62723 - DNA, 15 bp, Homo sapiens
tgtatacattaagga

SEQ ID NO: 62724 - DNA, 15 bp, Homo sapiens
gtgtatacattaagg

SEQ ID NO: 62725 - DNA, 15 bp, Homo sapiens
agtgtatacattaag

SEQ ID NO: 62726 - DNA, 15 bp, Homo sapiens
cagtgtatacattaa

SEQ ID NO: 62727 - DNA, 15 bp, Homo sapiens
gcagtgtatacatta

SEQ ID NO: 62728 - DNA, 15 bp, Homo sapiens
agcagtgtatacatt

SEQ ID NO: 62729 - DNA, 15 bp, Homo sapiens
aagcagtgtatacat

SEQ ID NO: 62730 - DNA, 15 bp, Homo sapiens
taagcagtgtataca

SEQ ID NO: 62731 - DNA, 15 bp, Homo sapiens
ataagcagtgtatac

SEQ ID NO: 62732 - DNA, 15 bp, Homo sapiens
aataagcagtgtata

SEQ ID NO: 62733 - DNA, 15 bp, Homo sapiens
gaataagcagtgtat

SEQ ID NO: 62734 - DNA, 15 bp, Homo sapiens
tgaataagcagtgta

SEQ ID NO: 62735 - DNA, 15 bp, Homo sapiens
ctgaataagcagtgt

SEQ ID NO: 62736 - DNA, 15 bp, Homo sapiens
tctgaataagcagtg

SEQ ID NO: 62737 - DNA, 15 bp, Homo sapiens
gtctgaataagcagt

SEQ ID NO: 62738 - DNA, 15 bp, Homo sapiens
ggtctgaataagcag

SEQ ID NO: 62739 - DNA, 15 bp, Homo sapiens
gggtctgaataagca

SEQ ID NO: 62740 - DNA, 15 bp, Homo sapiens
agggtctgaataagc

SEQ ID NO: 62741 - DNA, 15 bp, Homo sapiens
aagggtctgaataag

SEQ ID NO: 62742 - DNA, 15 bp, Homo sapiens
gaagggtctgaataa

SEQ ID NO: 62743 - DNA, 15 bp, Homo sapiens
tgaagggtctgaata

SEQ ID NO: 62744 - DNA, 15 bp, Homo sapiens
gtgaagggtctgaat

SEQ ID NO: 62745 - DNA, 15 bp, Homo sapiens
ggtgaagggtctgaa

SEQ ID NO: 62746 - DNA, 15 bp, Homo sapiens
gggtgaagggtctga

SEQ ID NO: 62747 - DNA, 15 bp, Homo sapiens
tgggtgaagggtctg

SEQ ID NO: 62748 - DNA, 15 bp, Homo sapiens
atgggtgaagggtct

SEQ ID NO: 62749 - DNA, 15 bp, Homo sapiens
tatgggtgaagggtc

SEQ ID NO: 62750 - DNA, 15 bp, Homo sapiens
ttatgggtgaagggt

SEQ ID NO: 62751 - DNA, 15 bp, Homo sapiens
cttatgggtgaaggg

SEQ ID NO: 62752 - DNA, 15 bp, Homo sapiens
gcttatgggtgaagg

SEQ ID NO: 62753 - DNA, 15 bp, Homo sapiens
agcttatgggtgaag

SEQ ID NO: 62754 - DNA, 15 bp, Homo sapiens
cagcttatgggtgaa

SEQ ID NO: 62755 - DNA, 15 bp, Homo sapiens
acagcttatgggtga

SEQ ID NO: 62756 - DNA, 15 bp, Homo sapiens
cacagcttatgggtg

SEQ ID NO: 62757 - DNA, 15 bp, Homo sapiens
acacagcttatgggt

SEQ ID NO: 62758 - DNA, 15 bp, Homo sapiens
cacacagcttatggg

SEQ ID NO: 62759 - DNA, 15 bp, Homo sapiens
tcacacagcttatgg

SEQ ID NO: 62760 - DNA, 15 bp, Homo sapiens
gtcacacagcttatg

SEQ ID NO: 62761 - DNA, 15 bp, Homo sapiens
ggtcacacagcttat

SEQ ID NO: 62762 - DNA, 15 bp, Homo sapiens
tggtcacacagctta

SEQ ID NO: 62763 - DNA, 15 bp, Homo sapiens
atggtcacacagctt

SEQ ID NO: 62764 - DNA, 15 bp, Homo sapiens
catggtcacacagct

SEQ ID NO: 62765 - DNA, 15 bp, Homo sapiens
tcatggtcacacagc

SEQ ID NO: 62766 - DNA, 15 bp, Homo sapiens
ctcatggtcacacag

SEQ ID NO: 62767 - DNA, 15 bp, Homo sapiens
gctcatggtcacaca

SEQ ID NO: 62768 - DNA, 15 bp, Homo sapiens
tgctcatggtcacac

SEQ ID NO: 62769 - DNA, 15 bp, Homo sapiens
ttgctcatggtcaca

SEQ ID NO: 62770 - DNA, 15 bp, Homo sapiens
cttgctcatggtcac

SEQ ID NO: 62771 - DNA, 15 bp, Homo sapiens
acttgctcatggtca

SEQ ID NO: 62772 - DNA, 15 bp, Homo sapiens
gacttgctcatggtc

SEQ ID NO: 62773 - DNA, 15 bp, Homo sapiens
agacttgctcatggt

SEQ ID NO: 62774 - DNA, 15 bp, Homo sapiens
gagacttgctcatgg

SEQ ID NO: 62775 - DNA, 15 bp, Homo sapiens
agagacttgctcatg

SEQ ID NO: 62776 - DNA, 15 bp, Homo sapiens
aagagacttgctcat

SEQ ID NO: 62777 - DNA, 15 bp, Homo sapiens
taagagacttgctca

SEQ ID NO: 62778 - DNA, 15 bp, Homo sapiens
ttaagagacttgctc

SEQ ID NO: 62779 - DNA, 15 bp, Homo sapiens
gttaagagacttgct

SEQ ID NO: 62780 - DNA, 15 bp, Homo sapiens
ggttaagagacttgc

SEQ ID NO: 62781 - DNA, 15 bp, Homo sapiens
aggttaagagacttg

SEQ ID NO: 62782 - DNA, 15 bp, Homo sapiens
gaggttaagagactt

SEQ ID NO: 62783 - DNA, 15 bp, Homo sapiens
agaggttaagagact

SEQ ID NO: 62784 - DNA, 15 bp, Homo sapiens
tagaggttaagagac

SEQ ID NO: 62785 - DNA, 15 bp, Homo sapiens
atagaggttaagaga

SEQ ID NO: 62786 - DNA, 15 bp, Homo sapiens
tatagaggttaagag

SEQ ID NO: 62787 - DNA, 15 bp, Homo sapiens
ttatagaggttaaga

SEQ ID NO: 62788 - DNA, 15 bp, Homo sapiens
attatagaggttaag

SEQ ID NO: 62789 - DNA, 15 bp, Homo sapiens
gattatagaggttaa

SEQ ID NO: 62790 - DNA, 15 bp, Homo sapiens
ggattatagaggtta

SEQ ID NO: 62791 - DNA, 15 bp, Homo sapiens
aggattatagaggtt

SEQ ID NO: 62792 - DNA, 15 bp, Homo sapiens
aaggattatagaggt

SEQ ID NO: 62793 - DNA, 15 bp, Homo sapiens
taaggattatagagg

SEQ ID NO: 62794 - DNA, 15 bp, Homo sapiens
gtaaggattatagag

SEQ ID NO: 62795 - DNA, 15 bp, Homo sapiens
agtaaggattataga

SEQ ID NO: 62796 - DNA, 15 bp, Homo sapiens
cagtaaggattatag

SEQ ID NO: 62797 - DNA, 15 bp, Homo sapiens
acagtaaggattata

SEQ ID NO: 62798 - DNA, 15 bp, Homo sapiens
aacagtaaggattat

SEQ ID NO: 62799 - DNA, 15 bp, Homo sapiens
gaacagtaaggatta

SEQ ID NO: 62800 - DNA, 15 bp, Homo sapiens
agaacagtaaggatt

SEQ ID NO: 62801 - DNA, 15 bp, Homo sapiens
gagaacagtaaggat

SEQ ID NO: 62802 - DNA, 15 bp, Homo sapiens
tgagaacagtaagga

SEQ ID NO: 62803 - DNA, 15 bp, Homo sapiens
atgagaacagtaagg

SEQ ID NO: 62804 - DNA, 15 bp, Homo sapiens
gatgagaacagtaag

SEQ ID NO: 62805 - DNA, 15 bp, Homo sapiens
agatgagaacagtaa

SEQ ID NO: 62806 - DNA, 15 bp, Homo sapiens
aagatgagaacagta

SEQ ID NO: 62807 - DNA, 15 bp, Homo sapiens
aaagatgagaacagt

SEQ ID NO: 62808 - DNA, 15 bp, Homo sapiens
caaagatgagaacag

SEQ ID NO: 62809 - DNA, 15 bp, Homo sapiens
tcaaagatgagaaca

SEQ ID NO: 62810 - DNA, 15 bp, Homo sapiens
ctcaaagatgagaac

SEQ ID NO: 62811 - DNA, 15 bp, Homo sapiens
tctcaaagatgagaa

SEQ ID NO: 62812 - DNA, 15 bp, Homo sapiens
ctctcaaagatgaga

SEQ ID NO: 62813 - DNA, 15 bp, Homo sapiens
cctctcaaagatgag

SEQ ID NO: 62814 - DNA, 15 bp, Homo sapiens
acctctcaaagatga

SEQ ID NO: 62815 - DNA, 15 bp, Homo sapiens
tacctctcaaagatg

SEQ ID NO: 62816 - DNA, 15 bp, Homo sapiens
ttacctctcaaagat

SEQ ID NO: 62817 - DNA, 15 bp, Homo sapiens
cttacctctcaaaga

SEQ ID NO: 62818 - DNA, 15 bp, Homo sapiens
gcttacctctcaaag

SEQ ID NO: 62819 - DNA, 15 bp, Homo sapiens
tgcttacctctcaaa

SEQ ID NO: 62820 - DNA, 15 bp, Homo sapiens
atgcttacctctcaa

SEQ ID NO: 62821 - DNA, 15 bp, Homo sapiens
gatgcttacctctca

SEQ ID NO: 62822 - DNA, 15 bp, Homo sapiens
tgatgcttacctctc

SEQ ID NO: 62823 - DNA, 15 bp, Homo sapiens
ttgatgcttacctct

SEQ ID NO: 62824 - DNA, 15 bp, Homo sapiens
attgatgcttacctc

SEQ ID NO: 62825 - DNA, 15 bp, Homo sapiens
aattgatgcttacct

SEQ ID NO: 62826 - DNA, 15 bp, Homo sapiens
aaattgatgcttacc

SEQ ID NO: 62827 - DNA, 15 bp, Homo sapiens
taaattgatgcttac

SEQ ID NO: 62828 - DNA, 15 bp, Homo sapiens
gtaaattgatgctta

SEQ ID NO: 62829 - DNA, 15 bp, Homo sapiens
agtaaattgatgctt

SEQ ID NO: 62830 - DNA, 15 bp, Homo sapiens
cagtaaattgatgct

SEQ ID NO: 62831 - DNA, 15 bp, Homo sapiens
tcagtaaattgatgc

SEQ ID NO: 62832 - DNA, 15 bp, Homo sapiens
atcagtaaattgatg

SEQ ID NO: 62833 - DNA, 15 bp, Homo sapiens
tatcagtaaattgat

SEQ ID NO: 62834 - DNA, 15 bp, Homo sapiens
ctatcagtaaattga

SEQ ID NO: 62835 - DNA, 15 bp, Homo sapiens
tctatcagtaaattg

SEQ ID NO: 62836 - DNA, 15 bp, Homo sapiens
ttctatcagtaaatt

SEQ ID NO: 62837 - DNA, 15 bp, Homo sapiens
attctatcagtaaat

SEQ ID NO: 62838 - DNA, 15 bp, Homo sapiens
aattctatcagtaaa

SEQ ID NO: 62839 - DNA, 15 bp, Homo sapiens
taattctatcagtaa

SEQ ID NO: 62840 - DNA, 15 bp, Homo sapiens
ttaattctatcagta

SEQ ID NO: 62841 - DNA, 15 bp, Homo sapiens
cttaattctatcagt

SEQ ID NO: 62842 - DNA, 15 bp, Homo sapiens
acttaattctatcag

SEQ ID NO: 62843 - DNA, 15 bp, Homo sapiens
cacttaattctatca

SEQ ID NO: 62844 - DNA, 15 bp, Homo sapiens
tcacttaattctatc

SEQ ID NO: 62845 - DNA, 15 bp, Homo sapiens
ctcacttaattctat

SEQ ID NO: 62846 - DNA, 15 bp, Homo sapiens
tctcacttaattcta

SEQ ID NO: 62847 - DNA, 15 bp, Homo sapiens
atctcacttaattct

SEQ ID NO: 62848 - DNA, 15 bp, Homo sapiens
catctcacttaattc

SEQ ID NO: 62849 - DNA, 15 bp, Homo sapiens
tcatctcacttaatt

SEQ ID NO: 62850 - DNA, 15 bp, Homo sapiens
atcatctcacttaat

SEQ ID NO: 62851 - DNA, 15 bp, Homo sapiens
aatcatctcacttaa

SEQ ID NO: 62852 - DNA, 15 bp, Homo sapiens
aaatcatctcactta

SEQ ID NO: 62853 - DNA, 15 bp, Homo sapiens
caaatcatctcactt

SEQ ID NO: 62854 - DNA, 15 bp, Homo sapiens
acaaatcatctcact

SEQ ID NO: 62855 - DNA, 15 bp, Homo sapiens
cacaaatcatctcac

SEQ ID NO: 62856 - DNA, 15 bp, Homo sapiens
acacaaatcatctca

SEQ ID NO: 62857 - DNA, 15 bp, Homo sapiens
tacacaaatcatctc

SEQ ID NO: 62858 - DNA, 15 bp, Homo sapiens
ttacacaaatcatct

SEQ ID NO: 62859 - DNA, 15 bp, Homo sapiens
tttacacaaatcatc

SEQ ID NO: 62860 - DNA, 15 bp, Homo sapiens
ctttacacaaatcat

SEQ ID NO: 62861 - DNA, 15 bp, Homo sapiens
actttacacaaatca

SEQ ID NO: 62862 - DNA, 15 bp, Homo sapiens
cactttacacaaatc

SEQ ID NO: 62863 - DNA, 15 bp, Homo sapiens
acactttacacaaat

SEQ ID NO: 62864 - DNA, 15 bp, Homo sapiens
gacactttacacaaa

SEQ ID NO: 62865 - DNA, 15 bp, Homo sapiens
agacactttacacaa

SEQ ID NO: 62866 - DNA, 15 bp, Homo sapiens
cagacactttacaca

SEQ ID NO: 62867 - DNA, 15 bp, Homo sapiens
ccagacactttacac

SEQ ID NO: 62868 - DNA, 15 bp, Homo sapiens
tccagacactttaca

SEQ ID NO: 62869 - DNA, 15 bp, Homo sapiens
ttccagacactttac

SEQ ID NO: 62870 - DNA, 15 bp, Homo sapiens
gttccagacacttta

SEQ ID NO: 62871 - DNA, 15 bp, Homo sapiens
tgttccagacacttt

SEQ ID NO: 62872 - DNA, 15 bp, Homo sapiens
atgttccagacactt

SEQ ID NO: 62873 - DNA, 15 bp, Homo sapiens
tatgttccagacact

SEQ ID NO: 62874 - DNA, 15 bp, Homo sapiens
ctatgttccagacac

SEQ ID NO: 62875 - DNA, 15 bp, Homo sapiens
actatgttccagaca

SEQ ID NO: 62876 - DNA, 15 bp, Homo sapiens
tactatgttccagac

SEQ ID NO: 62877 - DNA, 15 bp, Homo sapiens
ttactatgttccaga

SEQ ID NO: 62878 - DNA, 15 bp, Homo sapiens
tttactatgttccag

SEQ ID NO: 62879 - DNA, 15 bp, Homo sapiens
atttactatgttcca

SEQ ID NO: 62880 - DNA, 15 bp, Homo sapiens
catttactatgttcc

SEQ ID NO: 62881 - DNA, 15 bp, Homo sapiens
tcatttactatgttc

SEQ ID NO: 62882 - DNA, 15 bp, Homo sapiens
atcatttactatgtt

SEQ ID NO: 62883 - DNA, 15 bp, Homo sapiens
gatcatttactatgt

SEQ ID NO: 62884 - DNA, 15 bp, Homo sapiens
tgatcatttactatg

SEQ ID NO: 62885 - DNA, 15 bp, Homo sapiens
ttgatcatttactat

SEQ ID NO: 62886 - DNA, 15 bp, Homo sapiens
attgatcatttacta

SEQ ID NO: 62887 - DNA, 15 bp, Homo sapiens
tattgatcatttact

SEQ ID NO: 62888 - DNA, 15 bp, Homo sapiens
ttattgatcatttac

SEQ ID NO: 62889 - DNA, 15 bp, Homo sapiens
tttattgatcattta

SEQ ID NO: 62890 - DNA, 15 bp, Homo sapiens
atttattgatcattt

SEQ ID NO: 62891 - DNA, 15 bp, Homo sapiens
tatttattgatcatt

SEQ ID NO: 62892 - DNA, 15 bp, Homo sapiens
atatttattgatcat

SEQ ID NO: 62893 - DNA, 15 bp, Homo sapiens
aatatttattgatca

SEQ ID NO: 62894 - DNA, 15 bp, Homo sapiens
caatatttattgatc

SEQ ID NO: 62895 - DNA, 15 bp, Homo sapiens
ccaatatttattgat

SEQ ID NO: 62896 - DNA, 15 bp, Homo sapiens
cccaatatttattga

SEQ ID NO: 62897 - DNA, 15 bp, Homo sapiens
tcccaatatttattg

SEQ ID NO: 62898 - DNA, 15 bp, Homo sapiens
gtcccaatatttatt

SEQ ID NO: 62899 - DNA, 15 bp, Homo sapiens
tgtcccaatatttat

SEQ ID NO: 62900 - DNA, 15 bp, Homo sapiens
ttgtcccaatattta

SEQ ID NO: 62901 - DNA, 15 bp, Homo sapiens
tttgtcccaatattt

SEQ ID NO: 62902 - DNA, 15 bp, Homo sapiens
gtttgtcccaatatt

SEQ ID NO: 62903 - DNA, 15 bp, Homo sapiens
agtttgtcccaatat

SEQ ID NO: 62904 - DNA, 15 bp, Homo sapiens
tagtttgtcccaata

SEQ ID NO: 62905 - DNA, 15 bp, Homo sapiens
ctagtttgtcccaat

SEQ ID NO: 62906 - DNA, 15 bp, Homo sapiens
gctagtttgtcccaa

SEQ ID NO: 62907 - DNA, 15 bp, Homo sapiens
agctagtttgtccca

SEQ ID NO: 62908 - DNA, 15 bp, Homo sapiens
tagctagtttgtccc

SEQ ID NO: 62909 - DNA, 15 bp, Homo sapiens
atagctagtttgtcc

SEQ ID NO: 62910 - DNA, 15 bp, Homo sapiens
tatagctagtttgtc

SEQ ID NO: 62911 - DNA, 15 bp, Homo sapiens
ttatagctagtttgt

SEQ ID NO: 62912 - DNA, 15 bp, Homo sapiens
cttatagctagtttg

SEQ ID NO: 62913 - DNA, 15 bp, Homo sapiens
tcttatagctagttt

SEQ ID NO: 62914 - DNA, 15 bp, Homo sapiens
ttcttatagctagtt

SEQ ID NO: 62915 - DNA, 15 bp, Homo sapiens
gttcttatagctagt

SEQ ID NO: 62916 - DNA, 15 bp, Homo sapiens
agttcttatagctag

SEQ ID NO: 62917 - DNA, 15 bp, Homo sapiens
aagttcttatagcta

SEQ ID NO: 62918 - DNA, 15 bp, Homo sapiens
caagttcttatagct

SEQ ID NO: 62919 - DNA, 15 bp, Homo sapiens
ccaagttcttatagc

SEQ ID NO: 62920 - DNA, 15 bp, Homo sapiens
tccaagttcttatag

SEQ ID NO: 62921 - DNA, 15 bp, Homo sapiens
ttccaagttcttata

SEQ ID NO: 62922 - DNA, 15 bp, Homo sapiens
tttccaagttcttat

SEQ ID NO: 62923 - DNA, 15 bp, Homo sapiens
atttccaagttctta

SEQ ID NO: 62924 - DNA, 15 bp, Homo sapiens
catttccaagttctt

SEQ ID NO: 62925 - DNA, 15 bp, Homo sapiens
tcatttccaagttct

SEQ ID NO: 62926 - DNA, 15 bp, Homo sapiens
ttcatttccaagttc

SEQ ID NO: 62927 - DNA, 15 bp, Homo sapiens
tttcatttccaagtt

SEQ ID NO: 62928 - DNA, 15 bp, Homo sapiens
gtttcatttccaagt

SEQ ID NO: 62929 - DNA, 15 bp, Homo sapiens
tgtttcatttccaag

SEQ ID NO: 62930 - DNA, 15 bp, Homo sapiens
ttgtttcatttccaa

SEQ ID NO: 62931 - DNA, 15 bp, Homo sapiens
gttgtttcatttcca

SEQ ID NO: 62932 - DNA, 15 bp, Homo sapiens
ggttgtttcatttcc

SEQ ID NO: 62933 - DNA, 15 bp, Homo sapiens
gggttgtttcatttc

SEQ ID NO: 62934 - DNA, 15 bp, Homo sapiens
tgggttgtttcattt

SEQ ID NO: 62935 - DNA, 15 bp, Homo sapiens
gtgggttgtttcatt

SEQ ID NO: 62936 - DNA, 15 bp, Homo sapiens
agtgggttgtttcat

SEQ ID NO: 62937 - DNA, 15 bp, Homo sapiens
gagtgggttgtttca

SEQ ID NO: 62938 - DNA, 15 bp, Homo sapiens
agagtgggttgtttc

SEQ ID NO: 62939 - DNA, 15 bp, Homo sapiens
cagagtgggttgttt

SEQ ID NO: 62940 - DNA, 15 bp, Homo sapiens
acagagtgggttgtt

SEQ ID NO: 62941 - DNA, 15 bp, Homo sapiens
gacagagtgggttgt

SEQ ID NO: 62942 - DNA, 15 bp, Homo sapiens
agacagagtgggttg

SEQ ID NO: 62943 - DNA, 15 bp, Homo sapiens
gagacagagtgggtt

SEQ ID NO: 62944 - DNA, 15 bp, Homo sapiens
agagacagagtgggt

SEQ ID NO: 62945 - DNA, 15 bp, Homo sapiens
aagagacagagtggg

SEQ ID NO: 62946 - DNA, 15 bp, Homo sapiens
gaagagacagagtgg

SEQ ID NO: 62947 - DNA, 15 bp, Homo sapiens
tgaagagacagagtg

SEQ ID NO: 62948 - DNA, 15 bp, Homo sapiens
atgaagagacagagt

SEQ ID NO: 62949 - DNA, 15 bp, Homo sapiens
gatgaagagacagag

SEQ ID NO: 62950 - DNA, 15 bp, Homo sapiens
agatgaagagacaga

SEQ ID NO: 62951 - DNA, 15 bp, Homo sapiens
cagatgaagagacag

SEQ ID NO: 62952 - DNA, 15 bp, Homo sapiens
acagatgaagagaca

SEQ ID NO: 62953 - DNA, 15 bp, Homo sapiens
tacagatgaagagac

SEQ ID NO: 62954 - DNA, 15 bp, Homo sapiens
ttacagatgaagaga

SEQ ID NO: 62955 - DNA, 15 bp, Homo sapiens
tttacagatgaagag

SEQ ID NO: 62956 - DNA, 15 bp, Homo sapiens
ttttacagatgaaga

SEQ ID NO: 62957 - DNA, 15 bp, Homo sapiens
attttacagatgaag

SEQ ID NO: 62958 - DNA, 15 bp, Homo sapiens
cattttacagatgaa

SEQ ID NO: 62959 - DNA, 15 bp, Homo sapiens
ccattttacagatga

SEQ ID NO: 62960 - DNA, 15 bp, Homo sapiens
tccattttacagatg

SEQ ID NO: 62961 - DNA, 15 bp, Homo sapiens
atccattttacagat

SEQ ID NO: 62962 - DNA, 15 bp, Homo sapiens
tatccattttacaga

SEQ ID NO: 62963 - DNA, 15 bp, Homo sapiens
ctatccattttacag

SEQ ID NO: 62964 - DNA, 15 bp, Homo sapiens
cctatccattttaca

SEQ ID NO: 62965 - DNA, 15 bp, Homo sapiens
acctatccattttac

SEQ ID NO: 62966 - DNA, 15 bp, Homo sapiens
aacctatccatttta

SEQ ID NO: 62967 - DNA, 15 bp, Homo sapiens
taacctatccatttt

SEQ ID NO: 62968 - DNA, 15 bp, Homo sapiens
ataacctatccattt

SEQ ID NO: 62969 - DNA, 15 bp, Homo sapiens
tataacctatccatt

SEQ ID NO: 62970 - DNA, 15 bp, Homo sapiens
atataacctatccat

SEQ ID NO: 62971 - DNA, 15 bp, Homo sapiens
tatataacctatcca

SEQ ID NO: 62972 - DNA, 15 bp, Homo sapiens
ctatataacctatcc

SEQ ID NO: 62973 - DNA, 15 bp, Homo sapiens
cctatataacctatc

SEQ ID NO: 62974 - DNA, 15 bp, Homo sapiens
acctatataacctat

SEQ ID NO: 62975 - DNA, 15 bp, Homo sapiens
tacctatataaccta

SEQ ID NO: 62976 - DNA, 15 bp, Homo sapiens
gtacctatataacct

SEQ ID NO: 62977 - DNA, 15 bp, Homo sapiens
agtacctatataacc

SEQ ID NO: 62978 - DNA, 15 bp, Homo sapiens
gagtacctatataac

SEQ ID NO: 62979 - DNA, 15 bp, Homo sapiens
agagtacctatataa

SEQ ID NO: 62980 - DNA, 15 bp, Homo sapiens
gagagtacctatata

SEQ ID NO: 62981 - DNA, 15 bp, Homo sapiens
agagagtacctatat

SEQ ID NO: 62982 - DNA, 15 bp, Homo sapiens
tagagagtacctata

SEQ ID NO: 62983 - DNA, 15 bp, Homo sapiens
ttagagagtacctat

SEQ ID NO: 62984 - DNA, 15 bp, Homo sapiens
tttagagagtaccta

SEQ ID NO: 62985 - DNA, 15 bp, Homo sapiens
ttttagagagtacct

SEQ ID NO: 62986 - DNA, 15 bp, Homo sapiens
attttagagagtacc

SEQ ID NO: 62987 - DNA, 15 bp, Homo sapiens
cattttagagagtac

SEQ ID NO: 62988 - DNA, 15 bp, Homo sapiens
tcattttagagagta

SEQ ID NO: 62989 - DNA, 15 bp, Homo sapiens
ttcattttagagagt

SEQ ID NO: 62990 - DNA, 15 bp, Homo sapiens
gttcattttagagag

SEQ ID NO: 62991 - DNA, 15 bp, Homo sapiens
tgttcattttagaga

SEQ ID NO: 62992 - DNA, 15 bp, Homo sapiens
ctgttcattttagag

SEQ ID NO: 62993 - DNA, 15 bp, Homo sapiens
cctgttcattttaga

SEQ ID NO: 62994 - DNA, 15 bp, Homo sapiens
gcctgttcattttag

SEQ ID NO: 62995 - DNA, 15 bp, Homo sapiens
tgcctgttcatttta

SEQ ID NO: 62996 - DNA, 15 bp, Homo sapiens
ctgcctgttcatttt

SEQ ID NO: 62997 - DNA, 15 bp, Homo sapiens
gctgcctgttcattt

SEQ ID NO: 62998 - DNA, 15 bp, Homo sapiens
agctgcctgttcatt

SEQ ID NO: 62999 - DNA, 15 bp, Homo sapiens
aagctgcctgttcat

SEQ ID NO: 63000 - DNA, 15 bp, Homo sapiens
gaagctgcctgttca

SEQ ID NO: 63001 - DNA, 15 bp, Homo sapiens
tgaagctgcctgttc

SEQ ID NO: 63002 - DNA, 15 bp, Homo sapiens
ctgaagctgcctgtt

SEQ ID NO: 63003 - DNA, 15 bp, Homo sapiens
cctgaagctgcctgt

SEQ ID NO: 63004 - DNA, 15 bp, Homo sapiens
tcctgaagctgcctg

SEQ ID NO: 63005 - DNA, 15 bp, Homo sapiens
ctcctgaagctgcct

SEQ ID NO: 63006 - DNA, 15 bp, Homo sapiens
actcctgaagctgcc

SEQ ID NO: 63007 - DNA, 15 bp, Homo sapiens
aactcctgaagctgc

SEQ ID NO: 63008 - DNA, 15 bp, Homo sapiens
gaactcctgaagctg

SEQ ID NO: 63009 - DNA, 15 bp, Homo sapiens
ggaactcctgaagct

SEQ ID NO: 63010 - DNA, 15 bp, Homo sapiens
gggaactcctgaagc

SEQ ID NO: 63011 - DNA, 15 bp, Homo sapiens
ggggaactcctgaag

SEQ ID NO: 63012 - DNA, 15 bp, Homo sapiens
tggggaactcctgaa

SEQ ID NO: 63013 - DNA, 15 bp, Homo sapiens
ctggggaactcctga

SEQ ID NO: 63014 - DNA, 15 bp, Homo sapiens
actggggaactcctg

SEQ ID NO: 63015 - DNA, 15 bp, Homo sapiens
aactggggaactcct

SEQ ID NO: 63016 - DNA, 15 bp, Homo sapiens
gaactggggaactcc

SEQ ID NO: 63017 - DNA, 15 bp, Homo sapiens
ggaactggggaactc

SEQ ID NO: 63018 - DNA, 15 bp, Homo sapiens
aggaactggggaact

SEQ ID NO: 63019 - DNA, 15 bp, Homo sapiens
aaggaactggggaac

SEQ ID NO: 63020 - DNA, 15 bp, Homo sapiens
taaggaactggggaa

SEQ ID NO: 63021 - DNA, 15 bp, Homo sapiens
gtaaggaactgggga

SEQ ID NO: 63022 - DNA, 15 bp, Homo sapiens
agtaaggaactgggg

SEQ ID NO: 63023 - DNA, 15 bp, Homo sapiens
tagtaaggaactggg

SEQ ID NO: 63024 - DNA, 15 bp, Homo sapiens
gtagtaaggaactgg

SEQ ID NO: 63025 - DNA, 15 bp, Homo sapiens
cgtagtaaggaactg

SEQ ID NO: 63026 - DNA, 15 bp, Homo sapiens
ccgtagtaaggaact

SEQ ID NO: 63027 - DNA, 15 bp, Homo sapiens
cccgtagtaaggaac

SEQ ID NO: 63028 - DNA, 15 bp, Homo sapiens
tcccgtagtaaggaa

SEQ ID NO: 63029 - DNA, 15 bp, Homo sapiens
ctcccgtagtaagga

SEQ ID NO: 63030 - DNA, 15 bp, Homo sapiens
cctcccgtagtaagg

SEQ ID NO: 63031 - DNA, 15 bp, Homo sapiens
gcctcccgtagtaag

SEQ ID NO: 63032 - DNA, 15 bp, Homo sapiens
tgcctcccgtagtaa

SEQ ID NO: 63033 - DNA, 15 bp, Homo sapiens
atgcctcccgtagta

SEQ ID NO: 63034 - DNA, 15 bp, Homo sapiens
aatgcctcccgtagt

SEQ ID NO: 63035 - DNA, 15 bp, Homo sapiens
gaatgcctcccgtag

SEQ ID NO: 63036 - DNA, 15 bp, Homo sapiens
tgaatgcctcccgta

SEQ ID NO: 63037 - DNA, 15 bp, Homo sapiens
ctgaatgcctcccgt

SEQ ID NO: 63038 - DNA, 15 bp, Homo sapiens
cctgaatgcctcccg

SEQ ID NO: 63039 - DNA, 15 bp, Homo sapiens
acctgaatgcctccc

SEQ ID NO: 63040 - DNA, 15 bp, Homo sapiens
cacctgaatgcctcc

SEQ ID NO: 63041 - DNA, 15 bp, Homo sapiens
ccacctgaatgcctc

SEQ ID NO: 63042 - DNA, 15 bp, Homo sapiens
tccacctgaatgcct

SEQ ID NO: 63043 - DNA, 15 bp, Homo sapiens
gtccacctgaatgcc

SEQ ID NO: 63044 - DNA, 15 bp, Homo sapiens
agtccacctgaatgc

SEQ ID NO: 63045 - DNA, 15 bp, Homo sapiens
cagtccacctgaatg

SEQ ID NO: 63046 - DNA, 15 bp, Homo sapiens
ccagtccacctgaat

SEQ ID NO: 63047 - DNA, 15 bp, Homo sapiens
cccagtccacctgaa

SEQ ID NO: 63048 - DNA, 15 bp, Homo sapiens
ccccagtccacctga

SEQ ID NO: 63049 - DNA, 15 bp, Homo sapiens
accccagtccacctg

SEQ ID NO: 63050 - DNA, 15 bp, Homo sapiens
caccccagtccacct

SEQ ID NO: 63051 - DNA, 15 bp, Homo sapiens
acaccccagtccacc

SEQ ID NO: 63052 - DNA, 15 bp, Homo sapiens
tacaccccagtccac

SEQ ID NO: 63053 - DNA, 15 bp, Homo sapiens
ttacaccccagtcca

SEQ ID NO: 63054 - DNA, 15 bp, Homo sapiens
cttacaccccagtcc

SEQ ID NO: 63055 - DNA, 15 bp, Homo sapiens
acttacaccccagtc

SEQ ID NO: 63056 - DNA, 15 bp, Homo sapiens
aacttacaccccagt

SEQ ID NO: 63057 - DNA, 15 bp, Homo sapiens
gaacttacaccccag

SEQ ID NO: 63058 - DNA, 15 bp, Homo sapiens
agaacttacacccca

SEQ ID NO: 63059 - DNA, 15 bp, Homo sapiens
gagaacttacacccc

SEQ ID NO: 63060 - DNA, 15 bp, Homo sapiens
ggagaacttacaccc

SEQ ID NO: 63061 - DNA, 15 bp, Homo sapiens
tggagaacttacacc

SEQ ID NO: 63062 - DNA, 15 bp, Homo sapiens
atggagaacttacac

SEQ ID NO: 63063 - DNA, 15 bp, Homo sapiens
gatggagaacttaca

SEQ ID NO: 63064 - DNA, 15 bp, Homo sapiens
ggatggagaacttac

SEQ ID NO: 63065 - DNA, 15 bp, Homo sapiens
aggatggagaactta

SEQ ID NO: 63066 - DNA, 15 bp, Homo sapiens
caggatggagaactt

SEQ ID NO: 63067 - DNA, 15 bp, Homo sapiens
ccaggatggagaact

SEQ ID NO: 63068 - DNA, 15 bp, Homo sapiens
gccaggatggagaac

SEQ ID NO: 63069 - DNA, 15 bp, Homo sapiens
tgccaggatggagaa

SEQ ID NO: 63070 - DNA, 15 bp, Homo sapiens
atgccaggatggaga

SEQ ID NO: 63071 - DNA, 15 bp, Homo sapiens
tatgccaggatggag

SEQ ID NO: 63072 - DNA, 15 bp, Homo sapiens
atatgccaggatgga

SEQ ID NO: 63073 - DNA, 15 bp, Homo sapiens
aatatgccaggatgg

SEQ ID NO: 63074 - DNA, 15 bp, Homo sapiens
taatatgccaggatg

SEQ ID NO: 63075 - DNA, 15 bp, Homo sapiens
ctaatatgccaggat

SEQ ID NO: 63076 - DNA, 15 bp, Homo sapiens
tctaatatgccagga

SEQ ID NO: 63077 - DNA, 15 bp, Homo sapiens
ttctaatatgccagg

SEQ ID NO: 63078 - DNA, 15 bp, Homo sapiens
attctaatatgccag

SEQ ID NO: 63079 - DNA, 15 bp, Homo sapiens
gattctaatatgcca

SEQ ID NO: 63080 - DNA, 15 bp, Homo sapiens
tgattctaatatgcc

SEQ ID NO: 63081 - DNA, 15 bp, Homo sapiens
ttgattctaatatgc

SEQ ID NO: 63082 - DNA, 15 bp, Homo sapiens
gttgattctaatatg

SEQ ID NO: 63083 - DNA, 15 bp, Homo sapiens
ggttgattctaatat

SEQ ID NO: 63084 - DNA, 15 bp, Homo sapiens
tggttgattctaata

SEQ ID NO: 63085 - DNA, 15 bp, Homo sapiens
ctggttgattctaat

SEQ ID NO: 63086 - DNA, 15 bp, Homo sapiens
cctggttgattctaa

SEQ ID NO: 63087 - DNA, 15 bp, Homo sapiens
ccctggttgattcta

SEQ ID NO: 63088 - DNA, 15 bp, Homo sapiens
accctggttgattct

SEQ ID NO: 63089 - DNA, 15 bp, Homo sapiens
taccctggttgattc

SEQ ID NO: 63090 - DNA, 15 bp, Homo sapiens
gtaccctggttgatt

SEQ ID NO: 63091 - DNA, 15 bp, Homo sapiens
agtaccctggttgat

SEQ ID NO: 63092 - DNA, 15 bp, Homo sapiens
aagtaccctggttga

SEQ ID NO: 63093 - DNA, 15 bp, Homo sapiens
aaagtaccctggttg

SEQ ID NO: 63094 - DNA, 15 bp, Homo sapiens
aaaagtaccctggtt

SEQ ID NO: 63095 - DNA, 15 bp, Homo sapiens
aaaaagtaccctggt

SEQ ID NO: 63096 - DNA, 15 bp, Homo sapiens
gaaaaagtaccctgg

SEQ ID NO: 63097 - DNA, 15 bp, Homo sapiens
agaaaaagtaccctg

SEQ ID NO: 63098 - DNA, 15 bp, Homo sapiens
aagaaaaagtaccct

SEQ ID NO: 63099 - DNA, 15 bp, Homo sapiens
aaagaaaaagtaccc

SEQ ID NO: 63100 - DNA, 15 bp, Homo sapiens
aaaagaaaaagtacc

SEQ ID NO: 63101 - DNA, 15 bp, Homo sapiens
aaaaagaaaaagtac

SEQ ID NO: 63102 - DNA, 15 bp, Homo sapiens
aaaaaagaaaaagta

SEQ ID NO: 63103 - DNA, 15 bp, Homo sapiens
caaaaaagaaaaagt

SEQ ID NO: 63104 - DNA, 15 bp, Homo sapiens
tcaaaaaagaaaaag

SEQ ID NO: 63105 - DNA, 15 bp, Homo sapiens
ctcaaaaaagaaaaa

SEQ ID NO: 63106 - DNA, 15 bp, Homo sapiens
tctcaaaaaagaaaa

SEQ ID NO: 63107 - DNA, 15 bp, Homo sapiens
gtctcaaaaaagaaa

SEQ ID NO: 63108 - DNA, 15 bp, Homo sapiens
tgtctcaaaaaagaa

SEQ ID NO: 63109 - DNA, 15 bp, Homo sapiens
ctgtctcaaaaaaga

SEQ ID NO: 63110 - DNA, 15 bp, Homo sapiens
cctgtctcaaaaaag

SEQ ID NO: 63111 - DNA, 15 bp, Homo sapiens
ccctgtctcaaaaaa

SEQ ID NO: 63112 - DNA, 15 bp, Homo sapiens
accctgtctcaaaaa

SEQ ID NO: 63113 - DNA, 15 bp, Homo sapiens
gaccctgtctcaaaa

SEQ ID NO: 63114 - DNA, 15 bp, Homo sapiens
agaccctgtctcaaa

SEQ ID NO: 63115 - DNA, 15 bp, Homo sapiens
aagaccctgtctcaa

SEQ ID NO: 63116 - DNA, 15 bp, Homo sapiens
caagaccctgtctca

SEQ ID NO: 63117 - DNA, 15 bp, Homo sapiens
gcaagaccctgtctc

SEQ ID NO: 63118 - DNA, 15 bp, Homo sapiens
agcaagaccctgtct

SEQ ID NO: 63119 - DNA, 15 bp, Homo sapiens
gagcaagaccctgtc

SEQ ID NO: 63120 - DNA, 15 bp, Homo sapiens
agagcaagaccctgt

SEQ ID NO: 63121 - DNA, 15 bp, Homo sapiens
cagagcaagaccctg

SEQ ID NO: 63122 - DNA, 15 bp, Homo sapiens
acagagcaagaccct

SEQ ID NO: 63123 - DNA, 15 bp, Homo sapiens
aacagagcaagaccc

SEQ ID NO: 63124 - DNA, 15 bp, Homo sapiens
caacagagcaagacc

SEQ ID NO: 63125 - DNA, 15 bp, Homo sapiens
gcaacagagcaagac

SEQ ID NO: 63126 - DNA, 15 bp, Homo sapiens
ggcaacagagcaaga

SEQ ID NO: 63127 - DNA, 15 bp, Homo sapiens
gggcaacagagcaag

SEQ ID NO: 63128 - DNA, 15 bp, Homo sapiens
tgggcaacagagcaa

SEQ ID NO: 63129 - DNA, 15 bp, Homo sapiens
ctgggcaacagagca

SEQ ID NO: 63130 - DNA, 15 bp, Homo sapiens
cctgggcaacagagc

SEQ ID NO: 63131 - DNA, 15 bp, Homo sapiens
gcctgggcaacagag

SEQ ID NO: 63132 - DNA, 15 bp, Homo sapiens
agcctgggcaacaga

SEQ ID NO: 63133 - DNA, 15 bp, Homo sapiens
tagcctgggcaacag

SEQ ID NO: 63134 - DNA, 15 bp, Homo sapiens
ctagcctgggcaaca

SEQ ID NO: 63135 - DNA, 15 bp, Homo sapiens
tctagcctgggcaac

SEQ ID NO: 63136 - DNA, 15 bp, Homo sapiens
ctctagcctgggcaa

SEQ ID NO: 63137 - DNA, 15 bp, Homo sapiens
actctagcctgggca

SEQ ID NO: 63138 - DNA, 15 bp, Homo sapiens
cactctagcctgggc

SEQ ID NO: 63139 - DNA, 15 bp, Homo sapiens
gcactctagcctggg

SEQ ID NO: 63140 - DNA, 15 bp, Homo sapiens
tgcactctagcctgg

SEQ ID NO: 63141 - DNA, 15 bp, Homo sapiens
ctgcactctagcctg

SEQ ID NO: 63142 - DNA, 15 bp, Homo sapiens
actgcactctagcct

SEQ ID NO: 63143 - DNA, 15 bp, Homo sapiens
cactgcactctagcc

SEQ ID NO: 63144 - DNA, 15 bp, Homo sapiens
tcactgcactctagc

SEQ ID NO: 63145 - DNA, 15 bp, Homo sapiens
ttcactgcactctag

SEQ ID NO: 63146 - DNA, 15 bp, Homo sapiens
cttcactgcactcta

SEQ ID NO: 63147 - DNA, 15 bp, Homo sapiens
acttcactgcactct

SEQ ID NO: 63148 - DNA, 15 bp, Homo sapiens
cacttcactgcactc

SEQ ID NO: 63149 - DNA, 15 bp, Homo sapiens
tcacttcactgcact

SEQ ID NO: 63150 - DNA, 15 bp, Homo sapiens
atcacttcactgcac

SEQ ID NO: 63151 - DNA, 15 bp, Homo sapiens
gatcacttcactgca

SEQ ID NO: 63152 - DNA, 15 bp, Homo sapiens
tgatcacttcactgc

SEQ ID NO: 63153 - DNA, 15 bp, Homo sapiens
atgatcacttcactg

SEQ ID NO: 63154 - DNA, 15 bp, Homo sapiens
tatgatcacttcact

SEQ ID NO: 63155 - DNA, 15 bp, Homo sapiens
ctatgatcacttcac

SEQ ID NO: 63156 - DNA, 15 bp, Homo sapiens
gctatgatcacttca

SEQ ID NO: 63157 - DNA, 15 bp, Homo sapiens
agctatgatcacttc

SEQ ID NO: 63158 - DNA, 15 bp, Homo sapiens
gagctatgatcactt

SEQ ID NO: 63159 - DNA, 15 bp, Homo sapiens
tgagctatgatcact

SEQ ID NO: 63160 - DNA, 15 bp, Homo sapiens
gtgagctatgatcac

SEQ ID NO: 63161 - DNA, 15 bp, Homo sapiens
agtgagctatgatca

SEQ ID NO: 63162 - DNA, 15 bp, Homo sapiens
gagtgagctatgatc

SEQ ID NO: 63163 - DNA, 15 bp, Homo sapiens
ggagtgagctatgat

SEQ ID NO: 63164 - DNA, 15 bp, Homo sapiens
tggagtgagctatga

SEQ ID NO: 63165 - DNA, 15 bp, Homo sapiens
ctggagtgagctatg

SEQ ID NO: 63166 - DNA, 15 bp, Homo sapiens
gctggagtgagctat

SEQ ID NO: 63167 - DNA, 15 bp, Homo sapiens
ggctggagtgagcta

SEQ ID NO: 63168 - DNA, 15 bp, Homo sapiens
aggctggagtgagct

SEQ ID NO: 63169 - DNA, 15 bp, Homo sapiens
aaggctggagtgagc

SEQ ID NO: 63170 - DNA, 15 bp, Homo sapiens
caaggctggagtgag

SEQ ID NO: 63171 - DNA, 15 bp, Homo sapiens
tcaaggctggagtga

SEQ ID NO: 63172 - DNA, 15 bp, Homo sapiens
ctcaaggctggagtg

SEQ ID NO: 63173 - DNA, 15 bp, Homo sapiens
gctcaaggctggagt

SEQ ID NO: 63174 - DNA, 15 bp, Homo sapiens
agctcaaggctggag

SEQ ID NO: 63175 - DNA, 15 bp, Homo sapiens
gagctcaaggctgga

SEQ ID NO: 63176 - DNA, 15 bp, Homo sapiens
ggagctcaaggctgg

SEQ ID NO: 63177 - DNA, 15 bp, Homo sapiens
aggagctcaaggctg

SEQ ID NO: 63178 - DNA, 15 bp, Homo sapiens
caggagctcaaggct

SEQ ID NO: 63179 - DNA, 15 bp, Homo sapiens
ccaggagctcaaggc

SEQ ID NO: 63180 - DNA, 15 bp, Homo sapiens
cccaggagctcaagg

SEQ ID NO: 63181 - DNA, 15 bp, Homo sapiens
gcccaggagctcaag

SEQ ID NO: 63182 - DNA, 15 bp, Homo sapiens
agcccaggagctcaa

SEQ ID NO: 63183 - DNA, 15 bp, Homo sapiens
gagcccaggagctca

SEQ ID NO: 63184 - DNA, 15 bp, Homo sapiens
tgagcccaggagctc

SEQ ID NO: 63185 - DNA, 15 bp, Homo sapiens
ttgagcccaggagct

SEQ ID NO: 63186 - DNA, 15 bp, Homo sapiens
cttgagcccaggagc

SEQ ID NO: 63187 - DNA, 15 bp, Homo sapiens
acttgagcccaggag

SEQ ID NO: 63188 - DNA, 15 bp, Homo sapiens
tacttgagcccagga

SEQ ID NO: 63189 - DNA, 15 bp, Homo sapiens
ttacttgagcccagg

SEQ ID NO: 63190 - DNA, 15 bp, Homo sapiens
attacttgagcccag

SEQ ID NO: 63191 - DNA, 15 bp, Homo sapiens
gattacttgagccca

SEQ ID NO: 63192 - DNA, 15 bp, Homo sapiens
ggattacttgagccc

SEQ ID NO: 63193 - DNA, 15 bp, Homo sapiens
aggattacttgagcc

SEQ ID NO: 63194 - DNA, 15 bp, Homo sapiens
gaggattacttgagc

SEQ ID NO: 63195 - DNA, 15 bp, Homo sapiens
ggaggattacttgag

SEQ ID NO: 63196 - DNA, 15 bp, Homo sapiens
aggaggattacttga

SEQ ID NO: 63197 - DNA, 15 bp, Homo sapiens
caggaggattacttg

SEQ ID NO: 63198 - DNA, 15 bp, Homo sapiens
gcaggaggattactt

SEQ ID NO: 63199 - DNA, 15 bp, Homo sapiens
agcaggaggattact

SEQ ID NO: 63200 - DNA, 15 bp, Homo sapiens
aagcaggaggattac

SEQ ID NO: 63201 - DNA, 15 bp, Homo sapiens
gaagcaggaggatta

SEQ ID NO: 63202 - DNA, 15 bp, Homo sapiens
tgaagcaggaggatt

SEQ ID NO: 63203 - DNA, 15 bp, Homo sapiens
ctgaagcaggaggat

SEQ ID NO: 63204 - DNA, 15 bp, Homo sapiens
actgaagcaggagga

SEQ ID NO: 63205 - DNA, 15 bp, Homo sapiens
gactgaagcaggagg

SEQ ID NO: 63206 - DNA, 15 bp, Homo sapiens
agactgaagcaggag

SEQ ID NO: 63207 - DNA, 15 bp, Homo sapiens
gagactgaagcagga

SEQ ID NO: 63208 - DNA, 15 bp, Homo sapiens
ggagactgaagcagg

SEQ ID NO: 63209 - DNA, 15 bp, Homo sapiens
aggagactgaagcag

SEQ ID NO: 63210 - DNA, 15 bp, Homo sapiens
caggagactgaagca

SEQ ID NO: 63211 - DNA, 15 bp, Homo sapiens
acaggagactgaagc

SEQ ID NO: 63212 - DNA, 15 bp, Homo sapiens
cacaggagactgaag

SEQ ID NO: 63213 - DNA, 15 bp, Homo sapiens
acacaggagactgaa

SEQ ID NO: 63214 - DNA, 15 bp, Homo sapiens
tacacaggagactga

SEQ ID NO: 63215 - DNA, 15 bp, Homo sapiens
ctacacaggagactg

SEQ ID NO: 63216 - DNA, 15 bp, Homo sapiens
gctacacaggagact

SEQ ID NO: 63217 - DNA, 15 bp, Homo sapiens
agctacacaggagac

SEQ ID NO: 63218 - DNA, 15 bp, Homo sapiens
cagctacacaggaga

SEQ ID NO: 63219 - DNA, 15 bp, Homo sapiens
ccagctacacaggag

SEQ ID NO: 63220 - DNA, 15 bp, Homo sapiens
cccagctacacagga

SEQ ID NO: 63221 - DNA, 15 bp, Homo sapiens
tcccagctacacagg

SEQ ID NO: 63222 - DNA, 15 bp, Homo sapiens
gtcccagctacacag

SEQ ID NO: 63223 - DNA, 15 bp, Homo sapiens
agtcccagctacaca

SEQ ID NO: 63224 - DNA, 15 bp, Homo sapiens
tagtcccagctacac

SEQ ID NO: 63225 - DNA, 15 bp, Homo sapiens
gtagtcccagctaca

SEQ ID NO: 63226 - DNA, 15 bp, Homo sapiens
tgtagtcccagctac

SEQ ID NO: 63227 - DNA, 15 bp, Homo sapiens
ctgtagtcccagcta

SEQ ID NO: 63228 - DNA, 15 bp, Homo sapiens
cctgtagtcccagct

SEQ ID NO: 63229 - DNA, 15 bp, Homo sapiens
gcctgtagtcccagc

SEQ ID NO: 63230 - DNA, 15 bp, Homo sapiens
tgcctgtagtcccag

SEQ ID NO: 63231 - DNA, 15 bp, Homo sapiens
gtgcctgtagtccca

SEQ ID NO: 63232 - DNA, 15 bp, Homo sapiens
ggtgcctgtagtccc

SEQ ID NO: 63233 - DNA, 15 bp, Homo sapiens
aggtgcctgtagtcc

SEQ ID NO: 63234 - DNA, 15 bp, Homo sapiens
caggtgcctgtagtc

SEQ ID NO: 63235 - DNA, 15 bp, Homo sapiens
gcaggtgcctgtagt

SEQ ID NO: 63236 - DNA, 15 bp, Homo sapiens
ggcaggtgcctgtag

SEQ ID NO: 63237 - DNA, 15 bp, Homo sapiens
tggcaggtgcctgta

SEQ ID NO: 63238 - DNA, 15 bp, Homo sapiens
gtggcaggtgcctgt

SEQ ID NO: 63239 - DNA, 15 bp, Homo sapiens
ggtggcaggtgcctg

SEQ ID NO: 63240 - DNA, 15 bp, Homo sapiens
tggtggcaggtgcct

SEQ ID NO: 63241 - DNA, 15 bp, Homo sapiens
atggtggcaggtgcc

SEQ ID NO: 63242 - DNA, 15 bp, Homo sapiens
catggtggcaggtgc

SEQ ID NO: 63243 - DNA, 15 bp, Homo sapiens
gcatggtggcaggtg

SEQ ID NO: 63244 - DNA, 15 bp, Homo sapiens
ggcatggtggcaggt

SEQ ID NO: 63245 - DNA, 15 bp, Homo sapiens
gggcatggtggcagg

SEQ ID NO: 63246 - DNA, 15 bp, Homo sapiens
cgggcatggtggcag

SEQ ID NO: 63247 - DNA, 15 bp, Homo sapiens
ccgggcatggtggca

SEQ ID NO: 63248 - DNA, 15 bp, Homo sapiens
gccgggcatggtggc

SEQ ID NO: 63249 - DNA, 15 bp, Homo sapiens
ggccgggcatggtgg

SEQ ID NO: 63250 - DNA, 15 bp, Homo sapiens
tggccgggcatggtg

SEQ ID NO: 63251 - DNA, 15 bp, Homo sapiens
ttggccgggcatggt

SEQ ID NO: 63252 - DNA, 15 bp, Homo sapiens
gttggccgggcatgg

SEQ ID NO: 63253 - DNA, 15 bp, Homo sapiens
agttggccgggcatg

SEQ ID NO: 63254 - DNA, 15 bp, Homo sapiens
aagttggccgggcat

SEQ ID NO: 63255 - DNA, 15 bp, Homo sapiens
aaagttggccgggca

SEQ ID NO: 63256 - DNA, 15 bp, Homo sapiens
aaaagttggccgggc

SEQ ID NO: 63257 - DNA, 15 bp, Homo sapiens
aaaaagttggccggg

SEQ ID NO: 63258 - DNA, 15 bp, Homo sapiens
caaaaagttggccgg

SEQ ID NO: 63259 - DNA, 15 bp, Homo sapiens
acaaaaagttggccg

SEQ ID NO: 63260 - DNA, 15 bp, Homo sapiens
tacaaaaagttggcc

SEQ ID NO: 63261 - DNA, 15 bp, Homo sapiens
ttacaaaaagttggc

SEQ ID NO: 63262 - DNA, 15 bp, Homo sapiens
tttacaaaaagttgg

SEQ ID NO: 63263 - DNA, 15 bp, Homo sapiens
ctttacaaaaagttg

SEQ ID NO: 63264 - DNA, 15 bp, Homo sapiens
cctttacaaaaagtt

SEQ ID NO: 63265 - DNA, 15 bp, Homo sapiens
acctttacaaaaagt

SEQ ID NO: 63266 - DNA, 15 bp, Homo sapiens
cacctttacaaaaag

SEQ ID NO: 63267 - DNA, 15 bp, Homo sapiens
ccacctttacaaaaa

SEQ ID NO: 63268 - DNA, 15 bp, Homo sapiens
tccacctttacaaaa

SEQ ID NO: 63269 - DNA, 15 bp, Homo sapiens
atccacctttacaaa

SEQ ID NO: 63270 - DNA, 15 bp, Homo sapiens
aatccacctttacaa

SEQ ID NO: 63271 - DNA, 15 bp, Homo sapiens
aaatccacctttaca

SEQ ID NO: 63272 - DNA, 15 bp, Homo sapiens
gaaatccacctttac

SEQ ID NO: 63273 - DNA, 15 bp, Homo sapiens
tgaaatccaccttta

SEQ ID NO: 63274 - DNA, 15 bp, Homo sapiens
gtgaaatccaccttt

SEQ ID NO: 63275 - DNA, 15 bp, Homo sapiens
ggtgaaatccacctt

SEQ ID NO: 63276 - DNA, 15 bp, Homo sapiens
tggtgaaatccacct

SEQ ID NO: 63277 - DNA, 15 bp, Homo sapiens
gtggtgaaatccacc

SEQ ID NO: 63278 - DNA, 15 bp, Homo sapiens
cgtggtgaaatccac

SEQ ID NO: 63279 - DNA, 15 bp, Homo sapiens
acgtggtgaaatcca

SEQ ID NO: 63280 - DNA, 15 bp, Homo sapiens
aacgtggtgaaatcc

SEQ ID NO: 63281 - DNA, 15 bp, Homo sapiens
caacgtggtgaaatc

SEQ ID NO: 63282 - DNA, 15 bp, Homo sapiens
gcaacgtggtgaaat

SEQ ID NO: 63283 - DNA, 15 bp, Homo sapiens
ggcaacgtggtgaaa

SEQ ID NO: 63284 - DNA, 15 bp, Homo sapiens
gggcaacgtggtgaa

SEQ ID NO: 63285 - DNA, 15 bp, Homo sapiens
tgggcaacgtggtga

SEQ ID NO: 63286 - DNA, 15 bp, Homo sapiens
ctgggcaacgtggtg

SEQ ID NO: 63287 - DNA, 15 bp, Homo sapiens
cctgggcaacgtggt

SEQ ID NO: 63288 - DNA, 15 bp, Homo sapiens
gcctgggcaacgtgg

SEQ ID NO: 63289 - DNA, 15 bp, Homo sapiens
agcctgggcaacgtg

SEQ ID NO: 63290 - DNA, 15 bp, Homo sapiens
cagcctgggcaacgt

SEQ ID NO: 63291 - DNA, 15 bp, Homo sapiens
ccagcctgggcaacg

SEQ ID NO: 63292 - DNA, 15 bp, Homo sapiens
accagcctgggcaac

SEQ ID NO: 63293 - DNA, 15 bp, Homo sapiens
gaccagcctgggcaa

SEQ ID NO: 63294 - DNA, 15 bp, Homo sapiens
agaccagcctgggca

SEQ ID NO: 63295 - DNA, 15 bp, Homo sapiens
gagaccagcctgggc

SEQ ID NO: 63296 - DNA, 15 bp, Homo sapiens
tgagaccagcctggg

SEQ ID NO: 63297 - DNA, 15 bp, Homo sapiens
ttgagaccagcctgg

SEQ ID NO: 63298 - DNA, 15 bp, Homo sapiens
tttgagaccagcctg

SEQ ID NO: 63299 - DNA, 15 bp, Homo sapiens
gtttgagaccagcct

SEQ ID NO: 63300 - DNA, 15 bp, Homo sapiens
agtttgagaccagcc

SEQ ID NO: 63301 - DNA, 15 bp, Homo sapiens
gagtttgagaccagc

SEQ ID NO: 63302 - DNA, 15 bp, Homo sapiens
ggagtttgagaccag

SEQ ID NO: 63303 - DNA, 15 bp, Homo sapiens
aggagtttgagacca

SEQ ID NO: 63304 - DNA, 15 bp, Homo sapiens
caggagtttgagacc

SEQ ID NO: 63305 - DNA, 15 bp, Homo sapiens
ccaggagtttgagac

SEQ ID NO: 63306 - DNA, 15 bp, Homo sapiens
gccaggagtttgaga

SEQ ID NO: 63307 - DNA, 15 bp, Homo sapiens
ggccaggagtttgag

SEQ ID NO: 63308 - DNA, 15 bp, Homo sapiens
aggccaggagtttga

SEQ ID NO: 63309 - DNA, 15 bp, Homo sapiens
gaggccaggagtttg

SEQ ID NO: 63310 - DNA, 15 bp, Homo sapiens
tgaggccaggagttt

SEQ ID NO: 63311 - DNA, 15 bp, Homo sapiens
ttgaggccaggagtt

SEQ ID NO: 63312 - DNA, 15 bp, Homo sapiens
cttgaggccaggagt

SEQ ID NO: 63313 - DNA, 15 bp, Homo sapiens
acttgaggccaggag

SEQ ID NO: 63314 - DNA, 15 bp, Homo sapiens
cacttgaggccagga

SEQ ID NO: 63315 - DNA, 15 bp, Homo sapiens
tcacttgaggccagg

SEQ ID NO: 63316 - DNA, 15 bp, Homo sapiens
atcacttgaggccag

SEQ ID NO: 63317 - DNA, 15 bp, Homo sapiens
gatcacttgaggcca

SEQ ID NO: 63318 - DNA, 15 bp, Homo sapiens
ggatcacttgaggcc

SEQ ID NO: 63319 - DNA, 15 bp, Homo sapiens
aggatcacttgaggc

SEQ ID NO: 63320 - DNA, 15 bp, Homo sapiens
gaggatcacttgagg

SEQ ID NO: 63321 - DNA, 15 bp, Homo sapiens
ggaggatcacttgag

SEQ ID NO: 63322 - DNA, 15 bp, Homo sapiens
gggaggatcacttga

SEQ ID NO: 63323 - DNA, 15 bp, Homo sapiens
cgggaggatcacttg

SEQ ID NO: 63324 - DNA, 15 bp, Homo sapiens
gcgggaggatcactt

SEQ ID NO: 63325 - DNA, 15 bp, Homo sapiens
ggcgggaggatcact

SEQ ID NO: 63326 - DNA, 15 bp, Homo sapiens
aggcgggaggatcac

SEQ ID NO: 63327 - DNA, 15 bp, Homo sapiens
gaggcgggaggatca

SEQ ID NO: 63328 - DNA, 15 bp, Homo sapiens
tgaggcgggaggatc

SEQ ID NO: 63329 - DNA, 15 bp, Homo sapiens
ctgaggcgggaggat

SEQ ID NO: 63330 - DNA, 15 bp, Homo sapiens
gctgaggcgggagga

SEQ ID NO: 63331 - DNA, 15 bp, Homo sapiens
ggctgaggcgggagg

SEQ ID NO: 63332 - DNA, 15 bp, Homo sapiens
aggctgaggcgggag

SEQ ID NO: 63333 - DNA, 15 bp, Homo sapiens
gaggctgaggcggga

SEQ ID NO: 63334 - DNA, 15 bp, Homo sapiens
acagcactttgggag

SEQ ID NO: 63335 - DNA, 15 bp, Homo sapiens
tacagcactttggga

SEQ ID NO: 63336 - DNA, 15 bp, Homo sapiens
ttacagcactttggg

SEQ ID NO: 63337 - DNA, 15 bp, Homo sapiens
attacagcactttgg

SEQ ID NO: 63338 - DNA, 15 bp, Homo sapiens
aattacagcactttg

SEQ ID NO: 63339 - DNA, 15 bp, Homo sapiens
taattacagcacttt

SEQ ID NO: 63340 - DNA, 15 bp, Homo sapiens
ataattacagcactt

SEQ ID NO: 63341 - DNA, 15 bp, Homo sapiens
tataattacagcact

SEQ ID NO: 63342 - DNA, 15 bp, Homo sapiens
ctataattacagcac

SEQ ID NO: 63343 - DNA, 15 bp, Homo sapiens
cctataattacagca

SEQ ID NO: 63344 - DNA, 15 bp, Homo sapiens
acctataattacagc

SEQ ID NO: 63345 - DNA, 15 bp, Homo sapiens
cacctataattacag

SEQ ID NO: 63346 - DNA, 15 bp, Homo sapiens
acacctataattaca

SEQ ID NO: 63347 - DNA, 15 bp, Homo sapiens
cacacctataattac

SEQ ID NO: 63348 - DNA, 15 bp, Homo sapiens
tcacacctataatta

SEQ ID NO: 63349 - DNA, 15 bp, Homo sapiens
ctcacacctataatt

SEQ ID NO: 63350 - DNA, 15 bp, Homo sapiens
gctcacacctataat

SEQ ID NO: 63351 - DNA, 15 bp, Homo sapiens
ggctcacacctataa

SEQ ID NO: 63352 - DNA, 15 bp, Homo sapiens
tggctcacacctata

SEQ ID NO: 63353 - DNA, 15 bp, Homo sapiens
gtggctcacacctat

SEQ ID NO: 63354 - DNA, 15 bp, Homo sapiens
ggtggctcacaccta

SEQ ID NO: 63355 - DNA, 15 bp, Homo sapiens
cggtggctcacacct

SEQ ID NO: 63356 - DNA, 15 bp, Homo sapiens
ccggtggctcacacc

SEQ ID NO: 63357 - DNA, 15 bp, Homo sapiens
cccggtggctcacac

SEQ ID NO: 63358 - DNA, 15 bp, Homo sapiens
gcccggtggctcaca

SEQ ID NO: 63359 - DNA, 15 bp, Homo sapiens
ggcccggtggctcac

SEQ ID NO: 63360 - DNA, 15 bp, Homo sapiens
aggcccggtggctca

SEQ ID NO: 63361 - DNA, 15 bp, Homo sapiens
caggcccggtggctc

SEQ ID NO: 63362 - DNA, 15 bp, Homo sapiens
ccaggcccggtggct

SEQ ID NO: 63363 - DNA, 15 bp, Homo sapiens
gccaggcccggtggc

SEQ ID NO: 63364 - DNA, 15 bp, Homo sapiens
cgccaggcccggtgg

SEQ ID NO: 63365 - DNA, 15 bp, Homo sapiens
ccgccaggcccggtg

SEQ ID NO: 63366 - DNA, 15 bp, Homo sapiens
cccgccaggcccggt

SEQ ID NO: 63367 - DNA, 15 bp, Homo sapiens
ccccgccaggcccgg

SEQ ID NO: 63368 - DNA, 15 bp, Homo sapiens
cccccgccaggcccg

SEQ ID NO: 63369 - DNA, 15 bp, Homo sapiens
ccccccgccaggccc

SEQ ID NO: 63370 - DNA, 15 bp, Homo sapiens
gccccccgccaggcc

SEQ ID NO: 63371 - DNA, 15 bp, Homo sapiens
tgccccccgccaggc

SEQ ID NO: 63372 - DNA, 15 bp, Homo sapiens
gtgccccccgccagg

SEQ ID NO: 63373 - DNA, 15 bp, Homo sapiens
agtgccccccgccag

SEQ ID NO: 63374 - DNA, 15 bp, Homo sapiens
aagtgccccccgcca

SEQ ID NO: 63375 - DNA, 15 bp, Homo sapiens
aaagtgccccccgcc

SEQ ID NO: 63376 - DNA, 15 bp, Homo sapiens
taaagtgccccccgc

SEQ ID NO: 63377 - DNA, 15 bp, Homo sapiens
ataaagtgccccccg

SEQ ID NO: 63378 - DNA, 15 bp, Homo sapiens
tataaagtgcccccc

SEQ ID NO: 63379 - DNA, 15 bp, Homo sapiens
ttataaagtgccccc

SEQ ID NO: 63380 - DNA, 15 bp, Homo sapiens
tttataaagtgcccc

SEQ ID NO: 63381 - DNA, 15 bp, Homo sapiens
ttttataaagtgccc

SEQ ID NO: 63382 - DNA, 15 bp, Homo sapiens
tttttataaagtgcc

SEQ ID NO: 63383 - DNA, 15 bp, Homo sapiens
atttttataaagtgc

SEQ ID NO: 63384 - DNA, 15 bp, Homo sapiens
catttttataaagtg

SEQ ID NO: 63385 - DNA, 15 bp, Homo sapiens
acatttttataaagt

SEQ ID NO: 63386 - DNA, 15 bp, Homo sapiens
cacatttttataaag

SEQ ID NO: 63387 - DNA, 15 bp, Homo sapiens
tcacatttttataaa

SEQ ID NO: 63388 - DNA, 15 bp, Homo sapiens
atcacatttttataa

SEQ ID NO: 63389 - DNA, 15 bp, Homo sapiens
catcacatttttata

SEQ ID NO: 63390 - DNA, 15 bp, Homo sapiens
gcatcacatttttat

SEQ ID NO: 63391 - DNA, 15 bp, Homo sapiens
agcatcacattttta

SEQ ID NO: 63392 - DNA, 15 bp, Homo sapiens
gagcatcacattttt

SEQ ID NO: 63393 - DNA, 15 bp, Homo sapiens
agagcatcacatttt

SEQ ID NO: 63394 - DNA, 15 bp, Homo sapiens
cagagcatcacattt

SEQ ID NO: 63395 - DNA, 15 bp, Homo sapiens
ccagagcatcacatt

SEQ ID NO: 63396 - DNA, 15 bp, Homo sapiens
tccagagcatcacat

SEQ ID NO: 63397 - DNA, 15 bp, Homo sapiens
gtccagagcatcaca

SEQ ID NO: 63398 - DNA, 15 bp, Homo sapiens
agtccagagcatcac

SEQ ID NO: 63399 - DNA, 15 bp, Homo sapiens
gagtccagagcatca

SEQ ID NO: 63400 - DNA, 15 bp, Homo sapiens
tgagtccagagcatc

SEQ ID NO: 63401 - DNA, 15 bp, Homo sapiens
ttgagtccagagcat

SEQ ID NO: 63402 - DNA, 15 bp, Homo sapiens
gttgagtccagagca

SEQ ID NO: 63403 - DNA, 15 bp, Homo sapiens
ggttgagtccagagc

SEQ ID NO: 63404 - DNA, 15 bp, Homo sapiens
tggttgagtccagag

SEQ ID NO: 63405 - DNA, 15 bp, Homo sapiens
ctggttgagtccaga

SEQ ID NO: 63406 - DNA, 15 bp, Homo sapiens
tctggttgagtccag

SEQ ID NO: 63407 - DNA, 15 bp, Homo sapiens
ctctggttgagtcca

SEQ ID NO: 63408 - DNA, 15 bp, Homo sapiens
tctctggttgagtcc

SEQ ID NO: 63409 - DNA, 15 bp, Homo sapiens
atctctggttgagtc

SEQ ID NO: 63410 - DNA, 15 bp, Homo sapiens
aatctctggttgagt

SEQ ID NO: 63411 - DNA, 15 bp, Homo sapiens
gaatctctggttgag

SEQ ID NO: 63412 - DNA, 15 bp, Homo sapiens
agaatctctggttga

SEQ ID NO: 63413 - DNA, 15 bp, Homo sapiens
cagaatctctggttg

SEQ ID NO: 63414 - DNA, 15 bp, Homo sapiens
ccagaatctctggtt

SEQ ID NO: 63415 - DNA, 15 bp, Homo sapiens
gccagaatctctggt

SEQ ID NO: 63416 - DNA, 15 bp, Homo sapiens
agccagaatctctgg

SEQ ID NO: 63417 - DNA, 15 bp, Homo sapiens
cagccagaatctctg

SEQ ID NO: 63418 - DNA, 15 bp, Homo sapiens
gcagccagaatctct

SEQ ID NO: 63419 - DNA, 15 bp, Homo sapiens
tgcagccagaatctc

SEQ ID NO: 63420 - DNA, 15 bp, Homo sapiens
atgcagccagaatct

SEQ ID NO: 63421 - DNA, 15 bp, Homo sapiens
aatgcagccagaatc

SEQ ID NO: 63422 - DNA, 15 bp, Homo sapiens
caatgcagccagaat

SEQ ID NO: 63423 - DNA, 15 bp, Homo sapiens
ccaatgcagccagaa

SEQ ID NO: 63424 - DNA, 15 bp, Homo sapiens
cccaatgcagccaga

SEQ ID NO: 63425 - DNA, 15 bp, Homo sapiens
gcccaatgcagccag

SEQ ID NO: 63426 - DNA, 15 bp, Homo sapiens
agcccaatgcagcca

SEQ ID NO: 63427 - DNA, 15 bp, Homo sapiens
aagcccaatgcagcc

SEQ ID NO: 63428 - DNA, 15 bp, Homo sapiens
caagcccaatgcagc

SEQ ID NO: 63429 - DNA, 15 bp, Homo sapiens
tcaagcccaatgcag

SEQ ID NO: 63430 - DNA, 15 bp, Homo sapiens
ctcaagcccaatgca

SEQ ID NO: 63431 - DNA, 15 bp, Homo sapiens
actcaagcccaatgc

SEQ ID NO: 63432 - DNA, 15 bp, Homo sapiens
cactcaagcccaatg

SEQ ID NO: 63433 - DNA, 15 bp, Homo sapiens
ccactcaagcccaat

SEQ ID NO: 63434 - DNA, 15 bp, Homo sapiens
tccactcaagcccaa

SEQ ID NO: 63435 - DNA, 15 bp, Homo sapiens
ctccactcaagccca

SEQ ID NO: 63436 - DNA, 15 bp, Homo sapiens
gctccactcaagccc

SEQ ID NO: 63437 - DNA, 15 bp, Homo sapiens
ggctccactcaagcc

SEQ ID NO: 63438 - DNA, 15 bp, Homo sapiens
aggctccactcaagc

SEQ ID NO: 63439 - DNA, 15 bp, Homo sapiens
caggctccactcaag

SEQ ID NO: 63440 - DNA, 15 bp, Homo sapiens
tcaggctccactcaa

SEQ ID NO: 63441 - DNA, 15 bp, Homo sapiens
ttcaggctccactca

SEQ ID NO: 63442 - DNA, 15 bp, Homo sapiens
gttcaggctccactc

SEQ ID NO: 63443 - DNA, 15 bp, Homo sapiens
tgttcaggctccact

SEQ ID NO: 63444 - DNA, 15 bp, Homo sapiens
atgttcaggctccac

SEQ ID NO: 63445 - DNA, 15 bp, Homo sapiens
gatgttcaggctcca

SEQ ID NO: 63446 - DNA, 15 bp, Homo sapiens
agatgttcaggctcc

SEQ ID NO: 63447 - DNA, 15 bp, Homo sapiens
cagatgttcaggctc

SEQ ID NO: 63448 - DNA, 15 bp, Homo sapiens
acagatgttcaggct

SEQ ID NO: 63449 - DNA, 15 bp, Homo sapiens
tacagatgttcaggc

SEQ ID NO: 63450 - DNA, 15 bp, Homo sapiens
ttacagatgttcagg

SEQ ID NO: 63451 - DNA, 15 bp, Homo sapiens
attacagatgttcag

SEQ ID NO: 63452 - DNA, 15 bp, Homo sapiens
aattacagatgttca

SEQ ID NO: 63453 - DNA, 15 bp, Homo sapiens
gaattacagatgttc

SEQ ID NO: 63454 - DNA, 15 bp, Homo sapiens
agaattacagatgtt

SEQ ID NO: 63455 - DNA, 15 bp, Homo sapiens
aagaattacagatgt

SEQ ID NO: 63456 - DNA, 15 bp, Homo sapiens
taagaattacagatg

SEQ ID NO: 63457 - DNA, 15 bp, Homo sapiens
ttaagaattacagat

SEQ ID NO: 63458 - DNA, 15 bp, Homo sapiens
cttaagaattacaga

SEQ ID NO: 63459 - DNA, 15 bp, Homo sapiens
gcttaagaattacag

SEQ ID NO: 63460 - DNA, 15 bp, Homo sapiens
agcttaagaattaca

SEQ ID NO: 63461 - DNA, 15 bp, Homo sapiens
gagcttaagaattac

SEQ ID NO: 63462 - DNA, 15 bp, Homo sapiens
ggagcttaagaatta

SEQ ID NO: 63463 - DNA, 15 bp, Homo sapiens
gggagcttaagaatt

SEQ ID NO: 63464 - DNA, 15 bp, Homo sapiens
ggggagcttaagaat

SEQ ID NO: 63465 - DNA, 15 bp, Homo sapiens
tggggagcttaagaa

SEQ ID NO: 63466 - DNA, 15 bp, Homo sapiens
atggggagcttaaga

SEQ ID NO: 63467 - DNA, 15 bp, Homo sapiens
catggggagcttaag

SEQ ID NO: 63468 - DNA, 15 bp, Homo sapiens
acatggggagcttaa

SEQ ID NO: 63469 - DNA, 15 bp, Homo sapiens
tacatggggagctta

SEQ ID NO: 63470 - DNA, 15 bp, Homo sapiens
ttacatggggagctt

SEQ ID NO: 63471 - DNA, 15 bp, Homo sapiens
attacatggggagct

SEQ ID NO: 63472 - DNA, 15 bp, Homo sapiens
aattacatggggagc

SEQ ID NO: 63473 - DNA, 15 bp, Homo sapiens
gaattacatggggag

SEQ ID NO: 63474 - DNA, 15 bp, Homo sapiens
agaattacatgggga

SEQ ID NO: 63475 - DNA, 15 bp, Homo sapiens
tagaattacatgggg

SEQ ID NO: 63476 - DNA, 15 bp, Homo sapiens
ttagaattacatggg

SEQ ID NO: 63477 - DNA, 15 bp, Homo sapiens
attagaattacatgg

SEQ ID NO: 63478 - DNA, 15 bp, Homo sapiens
cattagaattacatg

SEQ ID NO: 63479 - DNA, 15 bp, Homo sapiens
gcattagaattacat

SEQ ID NO: 63480 - DNA, 15 bp, Homo sapiens
tgcattagaattaca

SEQ ID NO: 63481 - DNA, 15 bp, Homo sapiens
gtgcattagaattac

SEQ ID NO: 63482 - DNA, 15 bp, Homo sapiens
tgtgcattagaatta

SEQ ID NO: 63483 - DNA, 15 bp, Homo sapiens
ctgtgcattagaatt

SEQ ID NO: 63484 - DNA, 15 bp, Homo sapiens
tctgtgcattagaat

SEQ ID NO: 63485 - DNA, 15 bp, Homo sapiens
gtctgtgcattagaa

SEQ ID NO: 63486 - DNA, 15 bp, Homo sapiens
tgtctgtgcattaga

SEQ ID NO: 63487 - DNA, 15 bp, Homo sapiens
ctgtctgtgcattag

SEQ ID NO: 63488 - DNA, 15 bp, Homo sapiens
gctgtctgtgcatta

SEQ ID NO: 63489 - DNA, 15 bp, Homo sapiens
cgctgtctgtgcatt

SEQ ID NO: 63490 - DNA, 15 bp, Homo sapiens
acgctgtctgtgcat

SEQ ID NO: 63491 - DNA, 15 bp, Homo sapiens
aacgctgtctgtgca

SEQ ID NO: 63492 - DNA, 15 bp, Homo sapiens
taacgctgtctgtgc

SEQ ID NO: 63493 - DNA, 15 bp, Homo sapiens
ttaacgctgtctgtg

SEQ ID NO: 63494 - DNA, 15 bp, Homo sapiens
cttaacgctgtctgt

SEQ ID NO: 63495 - DNA, 15 bp, Homo sapiens
acttaacgctgtctg

SEQ ID NO: 63496 - DNA, 15 bp, Homo sapiens
tacttaacgctgtct

SEQ ID NO: 63497 - DNA, 15 bp, Homo sapiens
gtacttaacgctgtc

SEQ ID NO: 63498 - DNA, 15 bp, Homo sapiens
ggtacttaacgctgt

SEQ ID NO: 63499 - DNA, 15 bp, Homo sapiens
tggtacttaacgctg

SEQ ID NO: 63500 - DNA, 15 bp, Homo sapiens
gtggtacttaacgct

SEQ ID NO: 63501 - DNA, 15 bp, Homo sapiens
ggtggtacttaacgc

SEQ ID NO: 63502 - DNA, 15 bp, Homo sapiens
tggtggtacttaacg

SEQ ID NO: 63503 - DNA, 15 bp, Homo sapiens
ttggtggtacttaac

SEQ ID NO: 63504 - DNA, 15 bp, Homo sapiens
cttggtggtacttaa

SEQ ID NO: 63505 - DNA, 15 bp, Homo sapiens
gcttggtggtactta

SEQ ID NO: 63506 - DNA, 15 bp, Homo sapiens
ggcttggtggtactt

SEQ ID NO: 63507 - DNA, 15 bp, Homo sapiens
tggcttggtggtact

SEQ ID NO: 63508 - DNA, 15 bp, Homo sapiens
ttggcttggtggtac

SEQ ID NO: 63509 - DNA, 15 bp, Homo sapiens
tttggcttggtggta

SEQ ID NO: 63510 - DNA, 15 bp, Homo sapiens
atttggcttggtggt

SEQ ID NO: 63511 - DNA, 15 bp, Homo sapiens
catttggcttggtgg

SEQ ID NO: 63512 - DNA, 15 bp, Homo sapiens
tcatttggcttggtg

SEQ ID NO: 63513 - DNA, 15 bp, Homo sapiens
gtcatttggcttggt

SEQ ID NO: 63514 - DNA, 15 bp, Homo sapiens
ggtcatttggcttgg

SEQ ID NO: 63515 - DNA, 15 bp, Homo sapiens
tggtcatttggcttg

SEQ ID NO: 63516 - DNA, 15 bp, Homo sapiens
atggtcatttggctt

SEQ ID NO: 63517 - DNA, 15 bp, Homo sapiens
catggtcatttggct

SEQ ID NO: 63518 - DNA, 15 bp, Homo sapiens
acatggtcatttggc

SEQ ID NO: 63519 - DNA, 15 bp, Homo sapiens
tacatggtcatttgg

SEQ ID NO: 63520 - DNA, 15 bp, Homo sapiens
ctacatggtcatttg

SEQ ID NO: 63521 - DNA, 15 bp, Homo sapiens
tctacatggtcattt

SEQ ID NO: 63522 - DNA, 15 bp, Homo sapiens
atctacatggtcatt

SEQ ID NO: 63523 - DNA, 15 bp, Homo sapiens
tatctacatggtcat

SEQ ID NO: 63524 - DNA, 15 bp, Homo sapiens
atatctacatggtca

SEQ ID NO: 63525 - DNA, 15 bp, Homo sapiens
gatatctacatggtc

SEQ ID NO: 63526 - DNA, 15 bp, Homo sapiens
cgatatctacatggt

SEQ ID NO: 63527 - DNA, 15 bp, Homo sapiens
acgatatctacatgg

SEQ ID NO: 63528 - DNA, 15 bp, Homo sapiens
aacgatatctacatg

SEQ ID NO: 63529 - DNA, 15 bp, Homo sapiens
aaacgatatctacat

SEQ ID NO: 63530 - DNA, 15 bp, Homo sapiens
taaacgatatctaca

SEQ ID NO: 63531 - DNA, 15 bp, Homo sapiens
ataaacgatatctac

SEQ ID NO: 63532 - DNA, 15 bp, Homo sapiens
cataaacgatatcta

SEQ ID NO: 63533 - DNA, 15 bp, Homo sapiens
tcataaacgatatct

SEQ ID NO: 63534 - DNA, 15 bp, Homo sapiens
ctcataaacgatatc

SEQ ID NO: 63535 - DNA, 15 bp, Homo sapiens
tctcataaacgatat

SEQ ID NO: 63536 - DNA, 15 bp, Homo sapiens
gtctcataaacgata

SEQ ID NO: 63537 - DNA, 15 bp, Homo sapiens
agtctcataaacgat

SEQ ID NO: 63538 - DNA, 15 bp, Homo sapiens
cagtctcataaacga

SEQ ID NO: 63539 - DNA, 15 bp, Homo sapiens
tcagtctcataaacg

SEQ ID NO: 63540 - DNA, 15 bp, Homo sapiens
ttcagtctcataaac

SEQ ID NO: 63541 - DNA, 15 bp, Homo sapiens
cttcagtctcataaa

SEQ ID NO: 63542 - DNA, 15 bp, Homo sapiens
gcttcagtctcataa

SEQ ID NO: 63543 - DNA, 15 bp, Homo sapiens
tgcttcagtctcata

SEQ ID NO: 63544 - DNA, 15 bp, Homo sapiens
ctgcttcagtctcat

SEQ ID NO: 63545 - DNA, 15 bp, Homo sapiens
tctgcttcagtctca

SEQ ID NO: 63546 - DNA, 15 bp, Homo sapiens
ttctgcttcagtctc

SEQ ID NO: 63547 - DNA, 15 bp, Homo sapiens
attctgcttcagtct

SEQ ID NO: 63548 - DNA, 15 bp, Homo sapiens
tattctgcttcagtc

SEQ ID NO: 63549 - DNA, 15 bp, Homo sapiens
ctattctgcttcagt

SEQ ID NO: 63550 - DNA, 15 bp, Homo sapiens
cctattctgcttcag

SEQ ID NO: 63551 - DNA, 15 bp, Homo sapiens
acctattctgcttca

SEQ ID NO: 63552 - DNA, 15 bp, Homo sapiens
tacctattctgcttc

SEQ ID NO: 63553 - DNA, 15 bp, Homo sapiens
ctacctattctgctt

SEQ ID NO: 63554 - DNA, 15 bp, Homo sapiens
gctacctattctgct

SEQ ID NO: 63555 - DNA, 15 bp, Homo sapiens
tgctacctattctgc

SEQ ID NO: 63556 - DNA, 15 bp, Homo sapiens
atgctacctattctg

SEQ ID NO: 63557 - DNA, 15 bp, Homo sapiens
gatgctacctattct

SEQ ID NO: 63558 - DNA, 15 bp, Homo sapiens
agatgctacctattc

SEQ ID NO: 63559 - DNA, 15 bp, Homo sapiens
cagatgctacctatt

SEQ ID NO: 63560 - DNA, 15 bp, Homo sapiens
tcagatgctacctat

SEQ ID NO: 63561 - DNA, 15 bp, Homo sapiens
gtcagatgctaccta

SEQ ID NO: 63562 - DNA, 15 bp, Homo sapiens
tgtcagatgctacct

SEQ ID NO: 63563 - DNA, 15 bp, Homo sapiens
ttgtcagatgctacc

SEQ ID NO: 63564 - DNA, 15 bp, Homo sapiens
cttgtcagatgctac

SEQ ID NO: 63565 - DNA, 15 bp, Homo sapiens
tcttgtcagatgcta

SEQ ID NO: 63566 - DNA, 15 bp, Homo sapiens
gtcttgtcagatgct

SEQ ID NO: 63567 - DNA, 15 bp, Homo sapiens
ggtcttgtcagatgc

SEQ ID NO: 63568 - DNA, 15 bp, Homo sapiens
tggtcttgtcagatg

SEQ ID NO: 63569 - DNA, 15 bp, Homo sapiens
ctggtcttgtcagat

SEQ ID NO: 63570 - DNA, 15 bp, Homo sapiens
cctggtcttgtcaga

SEQ ID NO: 63571 - DNA, 15 bp, Homo sapiens
tcctggtcttgtcag

SEQ ID NO: 63572 - DNA, 15 bp, Homo sapiens
ctcctggtcttgtca

SEQ ID NO: 63573 - DNA, 15 bp, Homo sapiens
actcctggtcttgtc

SEQ ID NO: 63574 - DNA, 15 bp, Homo sapiens
tactcctggtcttgt

SEQ ID NO: 63575 - DNA, 15 bp, Homo sapiens
ctactcctggtcttg

SEQ ID NO: 63576 - DNA, 15 bp, Homo sapiens
cctactcctggtctt

SEQ ID NO: 63577 - DNA, 15 bp, Homo sapiens
gcctactcctggtct

SEQ ID NO: 63578 - DNA, 15 bp, Homo sapiens
agcctactcctggtc

SEQ ID NO: 63579 - DNA, 15 bp, Homo sapiens
gagcctactcctggt

SEQ ID NO: 63580 - DNA, 15 bp, Homo sapiens
agagcctactcctgg

SEQ ID NO: 63581 - DNA, 15 bp, Homo sapiens
aagagcctactcctg

SEQ ID NO: 63582 - DNA, 15 bp, Homo sapiens
aaagagcctactcct

SEQ ID NO: 63583 - DNA, 15 bp, Homo sapiens
aaaagagcctactcc

SEQ ID NO: 63584 - DNA, 15 bp, Homo sapiens
gaaaagagcctactc

SEQ ID NO: 63585 - DNA, 15 bp, Homo sapiens
tgaaaagagcctact

SEQ ID NO: 63586 - DNA, 15 bp, Homo sapiens
ctgaaaagagcctac

SEQ ID NO: 63587 - DNA, 15 bp, Homo sapiens
tctgaaaagagccta

SEQ ID NO: 63588 - DNA, 15 bp, Homo sapiens
atctgaaaagagcct

SEQ ID NO: 63589 - DNA, 15 bp, Homo sapiens
gatctgaaaagagcc

SEQ ID NO: 63590 - DNA, 15 bp, Homo sapiens
agatctgaaaagagc

SEQ ID NO: 63591 - DNA, 15 bp, Homo sapiens
tagatctgaaaagag

SEQ ID NO: 63592 - DNA, 15 bp, Homo sapiens
ctagatctgaaaaga

SEQ ID NO: 63593 - DNA, 15 bp, Homo sapiens
gctagatctgaaaag

SEQ ID NO: 63594 - DNA, 15 bp, Homo sapiens
tgctagatctgaaaa

SEQ ID NO: 63595 - DNA, 15 bp, Homo sapiens
ctgctagatctgaaa

SEQ ID NO: 63596 - DNA, 15 bp, Homo sapiens
cctgctagatctgaa

SEQ ID NO: 63597 - DNA, 15 bp, Homo sapiens
gcctgctagatctga

SEQ ID NO: 63598 - DNA, 15 bp, Homo sapiens
ggcctgctagatctg

SEQ ID NO: 63599 - DNA, 15 bp, Homo sapiens
tggcctgctagatct

SEQ ID NO: 63600 - DNA, 15 bp, Homo sapiens
atggcctgctagatc

SEQ ID NO: 63601 - DNA, 15 bp, Homo sapiens
catggcctgctagat

SEQ ID NO: 63602 - DNA, 15 bp, Homo sapiens
tcatggcctgctaga

SEQ ID NO: 63603 - DNA, 15 bp, Homo sapiens
gtcatggcctgctag

SEQ ID NO: 63604 - DNA, 15 bp, Homo sapiens
agtcatggcctgcta

SEQ ID NO: 63605 - DNA, 15 bp, Homo sapiens
aagtcatggcctgct

SEQ ID NO: 63606 - DNA, 15 bp, Homo sapiens
aaagtcatggcctgc

SEQ ID NO: 63607 - DNA, 15 bp, Homo sapiens
aaaagtcatggcctg

SEQ ID NO: 63608 - DNA, 15 bp, Homo sapiens
gaaaagtcatggcct

SEQ ID NO: 63609 - DNA, 15 bp, Homo sapiens
tgaaaagtcatggcc

SEQ ID NO: 63610 - DNA, 15 bp, Homo sapiens
ctgaaaagtcatggc

SEQ ID NO: 63611 - DNA, 15 bp, Homo sapiens
cctgaaaagtcatgg

SEQ ID NO: 63612 - DNA, 15 bp, Homo sapiens
gcctgaaaagtcatg

SEQ ID NO: 63613 - DNA, 15 bp, Homo sapiens
tgcctgaaaagtcat

SEQ ID NO: 63614 - DNA, 15 bp, Homo sapiens
ttgcctgaaaagtca

SEQ ID NO: 63615 - DNA, 15 bp, Homo sapiens
gttgcctgaaaagtc

SEQ ID NO: 63616 - DNA, 15 bp, Homo sapiens
tgttgcctgaaaagt

SEQ ID NO: 63617 - DNA, 15 bp, Homo sapiens
gtgttgcctgaaaag

SEQ ID NO: 63618 - DNA, 15 bp, Homo sapiens
tgtgttgcctgaaaa

SEQ ID NO: 63619 - DNA, 15 bp, Homo sapiens
gtgtgttgcctgaaa

SEQ ID NO: 63620 - DNA, 15 bp, Homo sapiens
ggtgtgttgcctgaa

SEQ ID NO: 63621 - DNA, 15 bp, Homo sapiens
tggtgtgttgcctga

SEQ ID NO: 63622 - DNA, 15 bp, Homo sapiens
ttggtgtgttgcctg

SEQ ID NO: 63623 - DNA, 15 bp, Homo sapiens
gttggtgtgttgcct

SEQ ID NO: 63624 - DNA, 15 bp, Homo sapiens
tgttggtgtgttgcc

SEQ ID NO: 63625 - DNA, 15 bp, Homo sapiens
atgttggtgtgttgc

SEQ ID NO: 63626 - DNA, 15 bp, Homo sapiens
tatgttggtgtgttg

SEQ ID NO: 63627 - DNA, 15 bp, Homo sapiens
atatgttggtgtgtt

SEQ ID NO: 63628 - DNA, 15 bp, Homo sapiens
catatgttggtgtgt

SEQ ID NO: 63629 - DNA, 15 bp, Homo sapiens
acatatgttggtgtg

SEQ ID NO: 63630 - DNA, 15 bp, Homo sapiens
aacatatgttggtgt

SEQ ID NO: 63631 - DNA, 15 bp, Homo sapiens
aaacatatgttggtg

SEQ ID NO: 63632 - DNA, 15 bp, Homo sapiens
taaacatatgttggt

SEQ ID NO: 63633 - DNA, 15 bp, Homo sapiens
ctaaacatatgttgg

SEQ ID NO: 63634 - DNA, 15 bp, Homo sapiens
actaaacatatgttg

SEQ ID NO: 63635 - DNA, 15 bp, Homo sapiens
aactaaacatatgtt

SEQ ID NO: 63636 - DNA, 15 bp, Homo sapiens
gaactaaacatatgt

SEQ ID NO: 63637 - DNA, 15 bp, Homo sapiens
tgaactaaacatatg

SEQ ID NO: 63638 - DNA, 15 bp, Homo sapiens
gtgaactaaacatat

SEQ ID NO: 63639 - DNA, 15 bp, Homo sapiens
ggtgaactaaacata

SEQ ID NO: 63640 - DNA, 15 bp, Homo sapiens
aggtgaactaaacat

SEQ ID NO: 63641 - DNA, 15 bp, Homo sapiens
aaggtgaactaaaca

SEQ ID NO: 63642 - DNA, 15 bp, Homo sapiens
aaaggtgaactaaac

SEQ ID NO: 63643 - DNA, 15 bp, Homo sapiens
caaaggtgaactaaa

SEQ ID NO: 63644 - DNA, 15 bp, Homo sapiens
acaaaggtgaactaa

SEQ ID NO: 63645 - DNA, 15 bp, Homo sapiens
gacaaaggtgaacta

SEQ ID NO: 63646 - DNA, 15 bp, Homo sapiens
ggacaaaggtgaact

SEQ ID NO: 63647 - DNA, 15 bp, Homo sapiens
gggacaaaggtgaac

SEQ ID NO: 63648 - DNA, 15 bp, Homo sapiens
tgggacaaaggtgaa

SEQ ID NO: 63649 - DNA, 15 bp, Homo sapiens
ctgggacaaaggtga

SEQ ID NO: 63650 - DNA, 15 bp, Homo sapiens
cctgggacaaaggtg

SEQ ID NO: 63651 - DNA, 15 bp, Homo sapiens
gcctgggacaaaggt

SEQ ID NO: 63652 - DNA, 15 bp, Homo sapiens
tgcctgggacaaagg

SEQ ID NO: 63653 - DNA, 15 bp, Homo sapiens
ctgcctgggacaaag

SEQ ID NO: 63654 - DNA, 15 bp, Homo sapiens
gctgcctgggacaaa

SEQ ID NO: 63655 - DNA, 15 bp, Homo sapiens
tgctgcctgggacaa

SEQ ID NO: 63656 - DNA, 15 bp, Homo sapiens
ctgctgcctgggaca

SEQ ID NO: 63657 - DNA, 15 bp, Homo sapiens
tctgctgcctgggac

SEQ ID NO: 63658 - DNA, 15 bp, Homo sapiens
ttctgctgcctggga

SEQ ID NO: 63659 - DNA, 15 bp, Homo sapiens
tttctgctgcctggg

SEQ ID NO: 63660 - DNA, 15 bp, Homo sapiens
gtttctgctgcctgg

SEQ ID NO: 63661 - DNA, 15 bp, Homo sapiens
agtttctgctgcctg

SEQ ID NO: 63662 - DNA, 15 bp, Homo sapiens
gagtttctgctgcct

SEQ ID NO: 63663 - DNA, 15 bp, Homo sapiens
agagtttctgctgcc

SEQ ID NO: 63664 - DNA, 15 bp, Homo sapiens
cagagtttctgctgc

SEQ ID NO: 63665 - DNA, 15 bp, Homo sapiens
tcagagtttctgctg

SEQ ID NO: 63666 - DNA, 15 bp, Homo sapiens
ctcagagtttctgct

SEQ ID NO: 63667 - DNA, 15 bp, Homo sapiens
actcagagtttctgc

SEQ ID NO: 63668 - DNA, 15 bp, Homo sapiens
aactcagagtttctg

SEQ ID NO: 63669 - DNA, 15 bp, Homo sapiens
aaactcagagtttct

SEQ ID NO: 63670 - DNA, 15 bp, Homo sapiens
gaaactcagagtttc

SEQ ID NO: 63671 - DNA, 15 bp, Homo sapiens
ggaaactcagagttt

SEQ ID NO: 63672 - DNA, 15 bp, Homo sapiens
gggaaactcagagtt

SEQ ID NO: 63673 - DNA, 15 bp, Homo sapiens
ggggaaactcagagt

SEQ ID NO: 63674 - DNA, 15 bp, Homo sapiens
cggggaaactcagag

SEQ ID NO: 63675 - DNA, 15 bp, Homo sapiens
ccggggaaactcaga

SEQ ID NO: 63676 - DNA, 15 bp, Homo sapiens
cccggggaaactcag

SEQ ID NO: 63677 - DNA, 15 bp, Homo sapiens
ccccggggaaactca

SEQ ID NO: 63678 - DNA, 15 bp, Homo sapiens
tccccggggaaactc

SEQ ID NO: 63679 - DNA, 15 bp, Homo sapiens
gtccccggggaaact

SEQ ID NO: 63680 - DNA, 15 bp, Homo sapiens
agtccccggggaaac

SEQ ID NO: 63681 - DNA, 15 bp, Homo sapiens
gagtccccggggaaa

SEQ ID NO: 63682 - DNA, 15 bp, Homo sapiens
agagtccccggggaa

SEQ ID NO: 63683 - DNA, 15 bp, Homo sapiens
cagagtccccgggga

SEQ ID NO: 63684 - DNA, 15 bp, Homo sapiens
ccagagtccccgggg

SEQ ID NO: 63685 - DNA, 15 bp, Homo sapiens
tccagagtccccggg

SEQ ID NO: 63686 - DNA, 15 bp, Homo sapiens
ctccagagtccccgg

SEQ ID NO: 63687 - DNA, 15 bp, Homo sapiens
gctccagagtccccg

SEQ ID NO: 63688 - DNA, 15 bp, Homo sapiens
agctccagagtcccc

SEQ ID NO: 63689 - DNA, 15 bp, Homo sapiens
gagctccagagtccc

SEQ ID NO: 63690 - DNA, 15 bp, Homo sapiens
ggagctccagagtcc

SEQ ID NO: 63691 - DNA, 15 bp, Homo sapiens
aggagctccagagtc

SEQ ID NO: 63692 - DNA, 15 bp, Homo sapiens
gaggagctccagagt

SEQ ID NO: 63693 - DNA, 15 bp, Homo sapiens
tgaggagctccagag

SEQ ID NO: 63694 - DNA, 15 bp, Homo sapiens
ctgaggagctccaga

SEQ ID NO: 63695 - DNA, 15 bp, Homo sapiens
cctgaggagctccag

SEQ ID NO: 63696 - DNA, 15 bp, Homo sapiens
acctgaggagctcca

SEQ ID NO: 63697 - DNA, 15 bp, Homo sapiens
aacctgaggagctcc

SEQ ID NO: 63698 - DNA, 15 bp, Homo sapiens
taacctgaggagctc

SEQ ID NO: 63699 - DNA, 15 bp, Homo sapiens
gtaacctgaggagct

SEQ ID NO: 63700 - DNA, 15 bp, Homo sapiens
agtaacctgaggagc

SEQ ID NO: 63701 - DNA, 15 bp, Homo sapiens
tagtaacctgaggag

SEQ ID NO: 63702 - DNA, 15 bp, Homo sapiens
ttagtaacctgagga

SEQ ID NO: 63703 - DNA, 15 bp, Homo sapiens
gttagtaacctgagg

SEQ ID NO: 63704 - DNA, 15 bp, Homo sapiens
ggttagtaacctgag

SEQ ID NO: 63705 - DNA, 15 bp, Homo sapiens
gggttagtaacctga

SEQ ID NO: 63706 - DNA, 15 bp, Homo sapiens
tgggttagtaacctg

SEQ ID NO: 63707 - DNA, 15 bp, Homo sapiens
ctgggttagtaacct

SEQ ID NO: 63708 - DNA, 15 bp, Homo sapiens
gctgggttagtaacc

SEQ ID NO: 63709 - DNA, 15 bp, Homo sapiens
tgctgggttagtaac

SEQ ID NO: 63710 - DNA, 15 bp, Homo sapiens
gtgctgggttagtaa

SEQ ID NO: 63711 - DNA, 15 bp, Homo sapiens
agtgctgggttagta

SEQ ID NO: 63712 - DNA, 15 bp, Homo sapiens
tagtgctgggttagt

SEQ ID NO: 63713 - DNA, 15 bp, Homo sapiens
ctagtgctgggttag

SEQ ID NO: 63714 - DNA, 15 bp, Homo sapiens
tctagtgctgggtta

SEQ ID NO: 63715 - DNA, 15 bp, Homo sapiens
atctagtgctgggtt

SEQ ID NO: 63716 - DNA, 15 bp, Homo sapiens
aatctagtgctgggt

SEQ ID NO: 63717 - DNA, 15 bp, Homo sapiens
aaatctagtgctggg

SEQ ID NO: 63718 - DNA, 15 bp, Homo sapiens
gaaatctagtgctgg

SEQ ID NO: 63719 - DNA, 15 bp, Homo sapiens
ggaaatctagtgctg

SEQ ID NO: 63720 - DNA, 15 bp, Homo sapiens
tggaaatctagtgct

SEQ ID NO: 63721 - DNA, 15 bp, Homo sapiens
atggaaatctagtgc

SEQ ID NO: 63722 - DNA, 15 bp, Homo sapiens
aatggaaatctagtg

SEQ ID NO: 63723 - DNA, 15 bp, Homo sapiens
gaatggaaatctagt

SEQ ID NO: 63724 - DNA, 15 bp, Homo sapiens
agaatggaaatctag

SEQ ID NO: 63725 - DNA, 15 bp, Homo sapiens
aagaatggaaatcta

SEQ ID NO: 63726 - DNA, 15 bp, Homo sapiens
caagaatggaaatct

SEQ ID NO: 63727 - DNA, 15 bp, Homo sapiens
tcaagaatggaaatc

SEQ ID NO: 63728 - DNA, 15 bp, Homo sapiens
ctcaagaatggaaat

SEQ ID NO: 63729 - DNA, 15 bp, Homo sapiens
tctcaagaatggaaa

SEQ ID NO: 63730 - DNA, 15 bp, Homo sapiens
gtctcaagaatggaa

SEQ ID NO: 63731 - DNA, 15 bp, Homo sapiens
agtctcaagaatgga

SEQ ID NO: 63732 - DNA, 15 bp, Homo sapiens
gagtctcaagaatgg

SEQ ID NO: 63733 - DNA, 15 bp, Homo sapiens
agagtctcaagaatg

SEQ ID NO: 63734 - DNA, 15 bp, Homo sapiens
cagagtctcaagaat

SEQ ID NO: 63735 - DNA, 15 bp, Homo sapiens
tcagagtctcaagaa

SEQ ID NO: 63736 - DNA, 15 bp, Homo sapiens
ctcagagtctcaaga

SEQ ID NO: 63737 - DNA, 15 bp, Homo sapiens
tctcagagtctcaag

SEQ ID NO: 63738 - DNA, 15 bp, Homo sapiens
ttctcagagtctcaa

SEQ ID NO: 63739 - DNA, 15 bp, Homo sapiens
tttctcagagtctca

SEQ ID NO: 63740 - DNA, 15 bp, Homo sapiens
ctttctcagagtctc

SEQ ID NO: 63741 - DNA, 15 bp, Homo sapiens
cctttctcagagtct

SEQ ID NO: 63742 - DNA, 15 bp, Homo sapiens
tcctttctcagagtc

SEQ ID NO: 63743 - DNA, 15 bp, Homo sapiens
ctcctttctcagagt

SEQ ID NO: 63744 - DNA, 15 bp, Homo sapiens
gctcctttctcagag

SEQ ID NO: 63745 - DNA, 15 bp, Homo sapiens
cgctcctttctcaga

SEQ ID NO: 63746 - DNA, 15 bp, Homo sapiens
ccgctcctttctcag

SEQ ID NO: 63747 - DNA, 15 bp, Homo sapiens
cccgctcctttctca

SEQ ID NO: 63748 - DNA, 15 bp, Homo sapiens
acccgctcctttctc

SEQ ID NO: 63749 - DNA, 15 bp, Homo sapiens
gacccgctcctttct

SEQ ID NO: 63750 - DNA, 15 bp, Homo sapiens
ggacccgctcctttc

SEQ ID NO: 63751 - DNA, 15 bp, Homo sapiens
tggacccgctccttt

SEQ ID NO: 63752 - DNA, 15 bp, Homo sapiens
ttggacccgctcctt

SEQ ID NO: 63753 - DNA, 15 bp, Homo sapiens
attggacccgctcct

SEQ ID NO: 63754 - DNA, 15 bp, Homo sapiens
gattggacccgctcc

SEQ ID NO: 63755 - DNA, 15 bp, Homo sapiens
agattggacccgctc

SEQ ID NO: 63756 - DNA, 15 bp, Homo sapiens
cagattggacccgct

SEQ ID NO: 63757 - DNA, 15 bp, Homo sapiens
ccagattggacccgc

SEQ ID NO: 63758 - DNA, 15 bp, Homo sapiens
tccagattggacccg

SEQ ID NO: 63759 - DNA, 15 bp, Homo sapiens
ttccagattggaccc

SEQ ID NO: 63760 - DNA, 15 bp, Homo sapiens
gttccagattggacc

SEQ ID NO: 63761 - DNA, 15 bp, Homo sapiens
cgttccagattggac

SEQ ID NO: 63762 - DNA, 15 bp, Homo sapiens
gcgttccagattgga

SEQ ID NO: 63763 - DNA, 15 bp, Homo sapiens
agcgttccagattgg

SEQ ID NO: 63764 - DNA, 15 bp, Homo sapiens
gagcgttccagattg

SEQ ID NO: 63765 - DNA, 15 bp, Homo sapiens
tgagcgttccagatt

SEQ ID NO: 63766 - DNA, 15 bp, Homo sapiens
atgagcgttccagat

SEQ ID NO: 63767 - DNA, 15 bp, Homo sapiens
tatgagcgttccaga

SEQ ID NO: 63768 - DNA, 15 bp, Homo sapiens
ctatgagcgttccag

SEQ ID NO: 63769 - DNA, 15 bp, Homo sapiens
tctatgagcgttcca

SEQ ID NO: 63770 - DNA, 15 bp, Homo sapiens
atctatgagcgttcc

SEQ ID NO: 63771 - DNA, 15 bp, Homo sapiens
aatctatgagcgttc

SEQ ID NO: 63772 - DNA, 15 bp, Homo sapiens
gaatctatgagcgtt

SEQ ID NO: 63773 - DNA, 15 bp, Homo sapiens
agaatctatgagcgt

SEQ ID NO: 63774 - DNA, 15 bp, Homo sapiens
aagaatctatgagcg

SEQ ID NO: 63775 - DNA, 15 bp, Homo sapiens
aaagaatctatgagc

SEQ ID NO: 63776 - DNA, 15 bp, Homo sapiens
gaaagaatctatgag

SEQ ID NO: 63777 - DNA, 15 bp, Homo sapiens
ggaaagaatctatga

SEQ ID NO: 63778 - DNA, 15 bp, Homo sapiens
aggaaagaatctatg

SEQ ID NO: 63779 - DNA, 15 bp, Homo sapiens
taggaaagaatctat

SEQ ID NO: 63780 - DNA, 15 bp, Homo sapiens
ctaggaaagaatcta

SEQ ID NO: 63781 - DNA, 15 bp, Homo sapiens
cctaggaaagaatct

SEQ ID NO: 63782 - DNA, 15 bp, Homo sapiens
tcctaggaaagaatc

SEQ ID NO: 63783 - DNA, 15 bp, Homo sapiens
ctcctaggaaagaat

SEQ ID NO: 63784 - DNA, 15 bp, Homo sapiens
cctcctaggaaagaa

SEQ ID NO: 63785 - DNA, 15 bp, Homo sapiens
ccctcctaggaaaga

SEQ ID NO: 63786 - DNA, 15 bp, Homo sapiens
tccctcctaggaaag

SEQ ID NO: 63787 - DNA, 15 bp, Homo sapiens
ctccctcctaggaaa

SEQ ID NO: 63788 - DNA, 15 bp, Homo sapiens
tctccctcctaggaa

SEQ ID NO: 63789 - DNA, 15 bp, Homo sapiens
ctctccctcctagga

SEQ ID NO: 63790 - DNA, 15 bp, Homo sapiens
actctccctcctagg

SEQ ID NO: 63791 - DNA, 15 bp, Homo sapiens
gactctccctcctag

SEQ ID NO: 63792 - DNA, 15 bp, Homo sapiens
tgactctccctccta

SEQ ID NO: 63793 - DNA, 15 bp, Homo sapiens
ttgactctccctcct

SEQ ID NO: 63794 - DNA, 15 bp, Homo sapiens
attgactctccctcc

SEQ ID NO: 63795 - DNA, 15 bp, Homo sapiens
aattgactctccctc

SEQ ID NO: 63796 - DNA, 15 bp, Homo sapiens
aaattgactctccct

SEQ ID NO: 63797 - DNA, 15 bp, Homo sapiens
caaattgactctccc

SEQ ID NO: 63798 - DNA, 15 bp, Homo sapiens
tcaaattgactctcc

SEQ ID NO: 63799 - DNA, 15 bp, Homo sapiens
ctcaaattgactctc

SEQ ID NO: 63800 - DNA, 15 bp, Homo sapiens
actcaaattgactct

SEQ ID NO: 63801 - DNA, 15 bp, Homo sapiens
aactcaaattgactc

SEQ ID NO: 63802 - DNA, 15 bp, Homo sapiens
caactcaaattgact

SEQ ID NO: 63803 - DNA, 15 bp, Homo sapiens
ccaactcaaattgac

SEQ ID NO: 63804 - DNA, 15 bp, Homo sapiens
accaactcaaattga

SEQ ID NO: 63805 - DNA, 15 bp, Homo sapiens
taccaactcaaattg

SEQ ID NO: 63806 - DNA, 15 bp, Homo sapiens
ataccaactcaaatt

SEQ ID NO: 63807 - DNA, 15 bp, Homo sapiens
gataccaactcaaat

SEQ ID NO: 63808 - DNA, 15 bp, Homo sapiens
agataccaactcaaa

SEQ ID NO: 63809 - DNA, 15 bp, Homo sapiens
cagataccaactcaa

SEQ ID NO: 63810 - DNA, 15 bp, Homo sapiens
acagataccaactca

SEQ ID NO: 63811 - DNA, 15 bp, Homo sapiens
cacagataccaactc

SEQ ID NO: 63812 - DNA, 15 bp, Homo sapiens
acacagataccaact

SEQ ID NO: 63813 - DNA, 15 bp, Homo sapiens
aacacagataccaac

SEQ ID NO: 63814 - DNA, 15 bp, Homo sapiens
taacacagataccaa

SEQ ID NO: 63815 - DNA, 15 bp, Homo sapiens
ctaacacagatacca

SEQ ID NO: 63816 - DNA, 15 bp, Homo sapiens
actaacacagatacc

SEQ ID NO: 63817 - DNA, 15 bp, Homo sapiens
gactaacacagatac

SEQ ID NO: 63818 - DNA, 15 bp, Homo sapiens
ggactaacacagata

SEQ ID NO: 63819 - DNA, 15 bp, Homo sapiens
tggactaacacagat

SEQ ID NO: 63820 - DNA, 15 bp, Homo sapiens
atggactaacacaga

SEQ ID NO: 63821 - DNA, 15 bp, Homo sapiens
aatggactaacacag

SEQ ID NO: 63822 - DNA, 15 bp, Homo sapiens
aaatggactaacaca

SEQ ID NO: 63823 - DNA, 15 bp, Homo sapiens
aaaatggactaacac

SEQ ID NO: 63824 - DNA, 15 bp, Homo sapiens
caaaatggactaaca

SEQ ID NO: 63825 - DNA, 15 bp, Homo sapiens
acaaaatggactaac

SEQ ID NO: 63826 - DNA, 15 bp, Homo sapiens
cacaaaatggactaa

SEQ ID NO: 63827 - DNA, 15 bp, Homo sapiens
acacaaaatggacta

SEQ ID NO: 63828 - DNA, 15 bp, Homo sapiens
aacacaaaatggact

SEQ ID NO: 63829 - DNA, 15 bp, Homo sapiens
caacacaaaatggac

SEQ ID NO: 63830 - DNA, 15 bp, Homo sapiens
gcaacacaaaatgga

SEQ ID NO: 63831 - DNA, 15 bp, Homo sapiens
agcaacacaaaatgg

SEQ ID NO: 63832 - DNA, 15 bp, Homo sapiens
tagcaacacaaaatg

SEQ ID NO: 63833 - DNA, 15 bp, Homo sapiens
ctagcaacacaaaat

SEQ ID NO: 63834 - DNA, 15 bp, Homo sapiens
cctagcaacacaaaa

SEQ ID NO: 63835 - DNA, 15 bp, Homo sapiens
tcctagcaacacaaa

SEQ ID NO: 63836 - DNA, 15 bp, Homo sapiens
ttcctagcaacacaa

SEQ ID NO: 63837 - DNA, 15 bp, Homo sapiens
cttcctagcaacaca

SEQ ID NO: 63838 - DNA, 15 bp, Homo sapiens
ccttcctagcaacac

SEQ ID NO: 63839 - DNA, 15 bp, Homo sapiens
tccttcctagcaaca

SEQ ID NO: 63840 - DNA, 15 bp, Homo sapiens
ttccttcctagcaac

SEQ ID NO: 63841 - DNA, 15 bp, Homo sapiens
attccttcctagcaa

SEQ ID NO: 63842 - DNA, 15 bp, Homo sapiens
tattccttcctagca

SEQ ID NO: 63843 - DNA, 15 bp, Homo sapiens
gtattccttcctagc

SEQ ID NO: 63844 - DNA, 15 bp, Homo sapiens
ggtattccttcctag

SEQ ID NO: 63845 - DNA, 15 bp, Homo sapiens
aggtattccttccta

SEQ ID NO: 63846 - DNA, 15 bp, Homo sapiens
caggtattccttcct

SEQ ID NO: 63847 - DNA, 15 bp, Homo sapiens
tcaggtattccttcc

SEQ ID NO: 63848 - DNA, 15 bp, Homo sapiens
ctcaggtattccttc

SEQ ID NO: 63849 - DNA, 15 bp, Homo sapiens
tctcaggtattcctt

SEQ ID NO: 63850 - DNA, 15 bp, Homo sapiens
gtctcaggtattcct

SEQ ID NO: 63851 - DNA, 15 bp, Homo sapiens
agtctcaggtattcc

SEQ ID NO: 63852 - DNA, 15 bp, Homo sapiens
cagtctcaggtattc

SEQ ID NO: 63853 - DNA, 15 bp, Homo sapiens
ccagtctcaggtatt

SEQ ID NO: 63854 - DNA, 15 bp, Homo sapiens
cccagtctcaggtat

SEQ ID NO: 63855 - DNA, 15 bp, Homo sapiens
acccagtctcaggta

SEQ ID NO: 63856 - DNA, 15 bp, Homo sapiens
tacccagtctcaggt

SEQ ID NO: 63857 - DNA, 15 bp, Homo sapiens
ttacccagtctcagg

SEQ ID NO: 63858 - DNA, 15 bp, Homo sapiens
attacccagtctcag

SEQ ID NO: 63859 - DNA, 15 bp, Homo sapiens
aattacccagtctca

SEQ ID NO: 63860 - DNA, 15 bp, Homo sapiens
aaattacccagtctc

SEQ ID NO: 63861 - DNA, 15 bp, Homo sapiens
taaattacccagtct

SEQ ID NO: 63862 - DNA, 15 bp, Homo sapiens
ataaattacccagtc

SEQ ID NO: 63863 - DNA, 15 bp, Homo sapiens
cataaattacccagt

SEQ ID NO: 63864 - DNA, 15 bp, Homo sapiens
tcataaattacccag

SEQ ID NO: 63865 - DNA, 15 bp, Homo sapiens
ttcataaattaccca

SEQ ID NO: 63866 - DNA, 15 bp, Homo sapiens
cttcataaattaccc

SEQ ID NO: 63867 - DNA, 15 bp, Homo sapiens
tcttcataaattacc

SEQ ID NO: 63868 - DNA, 15 bp, Homo sapiens
ttcttcataaattac

SEQ ID NO: 63869 - DNA, 15 bp, Homo sapiens
tttcttcataaatta

SEQ ID NO: 63870 - DNA, 15 bp, Homo sapiens
ttttcttcataaatt

SEQ ID NO: 63871 - DNA, 15 bp, Homo sapiens
attttcttcataaat

SEQ ID NO: 63872 - DNA, 15 bp, Homo sapiens
tattttcttcataaa

SEQ ID NO: 63873 - DNA, 15 bp, Homo sapiens
atattttcttcataa

SEQ ID NO: 63874 - DNA, 15 bp, Homo sapiens
catattttcttcata

SEQ ID NO: 63875 - DNA, 15 bp, Homo sapiens
acatattttcttcat

SEQ ID NO: 63876 - DNA, 15 bp, Homo sapiens
aacatattttcttca

SEQ ID NO: 63877 - DNA, 15 bp, Homo sapiens
aaacatattttcttc

SEQ ID NO: 63878 - DNA, 15 bp, Homo sapiens
taaacatattttctt

SEQ ID NO: 63879 - DNA, 15 bp, Homo sapiens
ataaacatattttct

SEQ ID NO: 63880 - DNA, 15 bp, Homo sapiens
aataaacatattttc

SEQ ID NO: 63881 - DNA, 15 bp, Homo sapiens
aaataaacatatttt

SEQ ID NO: 63882 - DNA, 15 bp, Homo sapiens
caaataaacatattt

SEQ ID NO: 63883 - DNA, 15 bp, Homo sapiens
ccaaataaacatatt

SEQ ID NO: 63884 - DNA, 15 bp, Homo sapiens
gccaaataaacatat

SEQ ID NO: 63885 - DNA, 15 bp, Homo sapiens
agccaaataaacata

SEQ ID NO: 63886 - DNA, 15 bp, Homo sapiens
gagccaaataaacat

SEQ ID NO: 63887 - DNA, 15 bp, Homo sapiens
tgagccaaataaaca

SEQ ID NO: 63888 - DNA, 15 bp, Homo sapiens
atgagccaaataaac

SEQ ID NO: 63889 - DNA, 15 bp, Homo sapiens
catgagccaaataaa

SEQ ID NO: 63890 - DNA, 15 bp, Homo sapiens
ccatgagccaaataa

SEQ ID NO: 63891 - DNA, 15 bp, Homo sapiens
accatgagccaaata

SEQ ID NO: 63892 - DNA, 15 bp, Homo sapiens
aaccatgagccaaat

SEQ ID NO: 63893 - DNA, 15 bp, Homo sapiens
gaaccatgagccaaa

SEQ ID NO: 63894 - DNA, 15 bp, Homo sapiens
tgaaccatgagccaa

SEQ ID NO: 63895 - DNA, 15 bp, Homo sapiens
ctgaaccatgagcca

SEQ ID NO: 63896 - DNA, 15 bp, Homo sapiens
gctgaaccatgagcc

SEQ ID NO: 63897 - DNA, 15 bp, Homo sapiens
tgctgaaccatgagc

SEQ ID NO: 63898 - DNA, 15 bp, Homo sapiens
ctgctgaaccatgag

SEQ ID NO: 63899 - DNA, 15 bp, Homo sapiens
cctgctgaaccatga

SEQ ID NO: 63900 - DNA, 15 bp, Homo sapiens
gcctgctgaaccatg

SEQ ID NO: 63901 - DNA, 15 bp, Homo sapiens
agcctgctgaaccat

SEQ ID NO: 63902 - DNA, 15 bp, Homo sapiens
cagcctgctgaacca

SEQ ID NO: 63903 - DNA, 15 bp, Homo sapiens
acagcctgctgaacc

SEQ ID NO: 63904 - DNA, 15 bp, Homo sapiens
tacagcctgctgaac

SEQ ID NO: 63905 - DNA, 15 bp, Homo sapiens
ttacagcctgctgaa

SEQ ID NO: 63906 - DNA, 15 bp, Homo sapiens
tttacagcctgctga

SEQ ID NO: 63907 - DNA, 15 bp, Homo sapiens
ttttacagcctgctg

SEQ ID NO: 63908 - DNA, 15 bp, Homo sapiens
cttttacagcctgct

SEQ ID NO: 63909 - DNA, 15 bp, Homo sapiens
acttttacagcctgc

SEQ ID NO: 63910 - DNA, 15 bp, Homo sapiens
tacttttacagcctg

SEQ ID NO: 63911 - DNA, 15 bp, Homo sapiens
atacttttacagcct

SEQ ID NO: 63912 - DNA, 15 bp, Homo sapiens
catacttttacagcc

SEQ ID NO: 63913 - DNA, 15 bp, Homo sapiens
ccatacttttacagc

SEQ ID NO: 63914 - DNA, 15 bp, Homo sapiens
accatacttttacag

SEQ ID NO: 63915 - DNA, 15 bp, Homo sapiens
taccatacttttaca

SEQ ID NO: 63916 - DNA, 15 bp, Homo sapiens
gtaccatacttttac

SEQ ID NO: 63917 - DNA, 15 bp, Homo sapiens
ggtaccatactttta

SEQ ID NO: 63918 - DNA, 15 bp, Homo sapiens
gggtaccatactttt

SEQ ID NO: 63919 - DNA, 15 bp, Homo sapiens
tgggtaccatacttt

SEQ ID NO: 63920 - DNA, 15 bp, Homo sapiens
gtgggtaccatactt

SEQ ID NO: 63921 - DNA, 15 bp, Homo sapiens
tgtgggtaccatact

SEQ ID NO: 63922 - DNA, 15 bp, Homo sapiens
atgtgggtaccatac

SEQ ID NO: 63923 - DNA, 15 bp, Homo sapiens
gatgtgggtaccata

SEQ ID NO: 63924 - DNA, 15 bp, Homo sapiens
agatgtgggtaccat

SEQ ID NO: 63925 - DNA, 15 bp, Homo sapiens
cagatgtgggtacca

SEQ ID NO: 63926 - DNA, 15 bp, Homo sapiens
acagatgtgggtacc

SEQ ID NO: 63927 - DNA, 15 bp, Homo sapiens
aacagatgtgggtac

SEQ ID NO: 63928 - DNA, 15 bp, Homo sapiens
aaacagatgtgggta

SEQ ID NO: 63929 - DNA, 15 bp, Homo sapiens
caaacagatgtgggt

SEQ ID NO: 63930 - DNA, 15 bp, Homo sapiens
ccaaacagatgtggg

SEQ ID NO: 63931 - DNA, 15 bp, Homo sapiens
cccaaacagatgtgg

SEQ ID NO: 63932 - DNA, 15 bp, Homo sapiens
ccccaaacagatgtg

SEQ ID NO: 63933 - DNA, 15 bp, Homo sapiens
gccccaaacagatgt

SEQ ID NO: 63934 - DNA, 15 bp, Homo sapiens
agccccaaacagatg

SEQ ID NO: 63935 - DNA, 15 bp, Homo sapiens
aagccccaaacagat

SEQ ID NO: 63936 - DNA, 15 bp, Homo sapiens
gaagccccaaacaga

SEQ ID NO: 63937 - DNA, 15 bp, Homo sapiens
agaagccccaaacag

SEQ ID NO: 63938 - DNA, 15 bp, Homo sapiens
cagaagccccaaaca

SEQ ID NO: 63939 - DNA, 15 bp, Homo sapiens
ccagaagccccaaac

SEQ ID NO: 63940 - DNA, 15 bp, Homo sapiens
gccagaagccccaaa

SEQ ID NO: 63941 - DNA, 15 bp, Homo sapiens
tgccagaagccccaa

SEQ ID NO: 63942 - DNA, 15 bp, Homo sapiens
ttgccagaagcccca

SEQ ID NO: 63943 - DNA, 15 bp, Homo sapiens
tttgccagaagcccc

SEQ ID NO: 63944 - DNA, 15 bp, Homo sapiens
ctttgccagaagccc

SEQ ID NO: 63945 - DNA, 15 bp, Homo sapiens
gctttgccagaagcc

SEQ ID NO: 63946 - DNA, 15 bp, Homo sapiens
ggctttgccagaagc

SEQ ID NO: 63947 - DNA, 15 bp, Homo sapiens
aggctttgccagaag

SEQ ID NO: 63948 - DNA, 15 bp, Homo sapiens
gaggctttgccagaa

SEQ ID NO: 63949 - DNA, 15 bp, Homo sapiens
tgaggctttgccaga

SEQ ID NO: 63950 - DNA, 15 bp, Homo sapiens
ctgaggctttgccag

SEQ ID NO: 63951 - DNA, 15 bp, Homo sapiens
cctgaggctttgcca

SEQ ID NO: 63952 - DNA, 15 bp, Homo sapiens
tcctgaggctttgcc

SEQ ID NO: 63953 - DNA, 15 bp, Homo sapiens
ttcctgaggctttgc

SEQ ID NO: 63954 - DNA, 15 bp, Homo sapiens
cttcctgaggctttg

SEQ ID NO: 63955 - DNA, 15 bp, Homo sapiens
gcttcctgaggcttt

SEQ ID NO: 63956 - DNA, 15 bp, Homo sapiens
agcttcctgaggctt

SEQ ID NO: 63957 - DNA, 15 bp, Homo sapiens
aagcttcctgaggct

SEQ ID NO: 63958 - DNA, 15 bp, Homo sapiens
aaagcttcctgaggc

SEQ ID NO: 63959 - DNA, 15 bp, Homo sapiens
aaaagcttcctgagg

SEQ ID NO: 63960 - DNA, 15 bp, Homo sapiens
taaaagcttcctgag

SEQ ID NO: 63961 - DNA, 15 bp, Homo sapiens
gtaaaagcttcctga

SEQ ID NO: 63962 - DNA, 15 bp, Homo sapiens
agtaaaagcttcctg

SEQ ID NO: 63963 - DNA, 15 bp, Homo sapiens
gagtaaaagcttcct

SEQ ID NO: 63964 - DNA, 15 bp, Homo sapiens
tgagtaaaagcttcc

SEQ ID NO: 63965 - DNA, 15 bp, Homo sapiens
ctgagtaaaagcttc

SEQ ID NO: 63966 - DNA, 15 bp, Homo sapiens
actgagtaaaagctt

SEQ ID NO: 63967 - DNA, 15 bp, Homo sapiens
cactgagtaaaagct

SEQ ID NO: 63968 - DNA, 15 bp, Homo sapiens
tcactgagtaaaagc

SEQ ID NO: 63969 - DNA, 15 bp, Homo sapiens
ctcactgagtaaaag

SEQ ID NO: 63970 - DNA, 15 bp, Homo sapiens
cctcactgagtaaaa

SEQ ID NO: 63971 - DNA, 15 bp, Homo sapiens
ccctcactgagtaaa

SEQ ID NO: 63972 - DNA, 15 bp, Homo sapiens
tccctcactgagtaa

SEQ ID NO: 63973 - DNA, 15 bp, Homo sapiens
ttccctcactgagta

SEQ ID NO: 63974 - DNA, 15 bp, Homo sapiens
cttccctcactgagt

SEQ ID NO: 63975 - DNA, 15 bp, Homo sapiens
ccttccctcactgag

SEQ ID NO: 63976 - DNA, 15 bp, Homo sapiens
accttccctcactga

SEQ ID NO: 63977 - DNA, 15 bp, Homo sapiens
caccttccctcactg

SEQ ID NO: 63978 - DNA, 15 bp, Homo sapiens
tcaccttccctcact

SEQ ID NO: 63979 - DNA, 15 bp, Homo sapiens
ttcaccttccctcac

SEQ ID NO: 63980 - DNA, 15 bp, Homo sapiens
attcaccttccctca

SEQ ID NO: 63981 - DNA, 15 bp, Homo sapiens
cattcaccttccctc

SEQ ID NO: 63982 - DNA, 15 bp, Homo sapiens
ccattcaccttccct

SEQ ID NO: 63983 - DNA, 15 bp, Homo sapiens
cccattcaccttccc

SEQ ID NO: 63984 - DNA, 15 bp, Homo sapiens
ccccattcaccttcc

SEQ ID NO: 63985 - DNA, 15 bp, Homo sapiens
tccccattcaccttc

SEQ ID NO: 63986 - DNA, 15 bp, Homo sapiens
ctccccattcacctt

SEQ ID NO: 63987 - DNA, 15 bp, Homo sapiens
gctccccattcacct

SEQ ID NO: 63988 - DNA, 15 bp, Homo sapiens
tgctccccattcacc

SEQ ID NO: 63989 - DNA, 15 bp, Homo sapiens
ctgctccccattcac

SEQ ID NO: 63990 - DNA, 15 bp, Homo sapiens
tctgctccccattca

SEQ ID NO: 63991 - DNA, 15 bp, Homo sapiens
atctgctccccattc

SEQ ID NO: 63992 - DNA, 15 bp, Homo sapiens
catctgctccccatt

SEQ ID NO: 63993 - DNA, 15 bp, Homo sapiens
acatctgctccccat

SEQ ID NO: 63994 - DNA, 15 bp, Homo sapiens
cacatctgctcccca

SEQ ID NO: 63995 - DNA, 15 bp, Homo sapiens
acacatctgctcccc

SEQ ID NO: 63996 - DNA, 15 bp, Homo sapiens
gacacatctgctccc

SEQ ID NO: 63997 - DNA, 15 bp, Homo sapiens
tgacacatctgctcc

SEQ ID NO: 63998 - DNA, 15 bp, Homo sapiens
gtgacacatctgctc

SEQ ID NO: 63999 - DNA, 15 bp, Homo sapiens
tgtgacacatctgct

SEQ ID NO: 64000 - DNA, 15 bp, Homo sapiens
atgtgacacatctgc

SEQ ID NO: 64001 - DNA, 15 bp, Homo sapiens
catgtgacacatctg

SEQ ID NO: 64002 - DNA, 15 bp, Homo sapiens
ccatgtgacacatct

SEQ ID NO: 64003 - DNA, 15 bp, Homo sapiens
tccatgtgacacatc

SEQ ID NO: 64004 - DNA, 15 bp, Homo sapiens
ctccatgtgacacat

SEQ ID NO: 64005 - DNA, 15 bp, Homo sapiens
tctccatgtgacaca

SEQ ID NO: 64006 - DNA, 15 bp, Homo sapiens
ctctccatgtgacac

SEQ ID NO: 64007 - DNA, 15 bp, Homo sapiens
tctctccatgtgaca

SEQ ID NO: 64008 - DNA, 15 bp, Homo sapiens
ctctctccatgtgac

SEQ ID NO: 64009 - DNA, 15 bp, Homo sapiens
tctctctccatgtga

SEQ ID NO: 64010 - DNA, 15 bp, Homo sapiens
ctctctctccatgtg

SEQ ID NO: 64011 - DNA, 15 bp, Homo sapiens
cctctctctccatgt

SEQ ID NO: 64012 - DNA, 15 bp, Homo sapiens
ccctctctctccatg

SEQ ID NO: 64013 - DNA, 15 bp, Homo sapiens
tccctctctctccat

SEQ ID NO: 64014 - DNA, 15 bp, Homo sapiens
ctccctctctctcca

SEQ ID NO: 64015 - DNA, 15 bp, Homo sapiens
gctccctctctctcc

SEQ ID NO: 64016 - DNA, 15 bp, Homo sapiens
tgctccctctctctc

SEQ ID NO: 64017 - DNA, 15 bp, Homo sapiens
ctgctccctctctct

SEQ ID NO: 64018 - DNA, 15 bp, Homo sapiens
cctgctccctctctc

SEQ ID NO: 64019 - DNA, 15 bp, Homo sapiens
tcctgctccctctct

SEQ ID NO: 64020 - DNA, 15 bp, Homo sapiens
ctcctgctccctctc

SEQ ID NO: 64021 - DNA, 15 bp, Homo sapiens
cctcctgctccctct

SEQ ID NO: 64022 - DNA, 15 bp, Homo sapiens
ccctcctgctccctc

SEQ ID NO: 64023 - DNA, 15 bp, Homo sapiens
tccctcctgctccct

SEQ ID NO: 64024 - DNA, 15 bp, Homo sapiens
ctccctcctgctccc

SEQ ID NO: 64025 - DNA, 15 bp, Homo sapiens
tctccctcctgctcc

SEQ ID NO: 64026 - DNA, 15 bp, Homo sapiens
ctctccctcctgctc

SEQ ID NO: 64027 - DNA, 15 bp, Homo sapiens
cctctccctcctgct

SEQ ID NO: 64028 - DNA, 15 bp, Homo sapiens
gcctctccctcctgc

SEQ ID NO: 64029 - DNA, 15 bp, Homo sapiens
ggcctctccctcctg

SEQ ID NO: 64030 - DNA, 15 bp, Homo sapiens
tggcctctccctcct

SEQ ID NO: 64031 - DNA, 15 bp, Homo sapiens
ctggcctctccctcc

SEQ ID NO: 64032 - DNA, 15 bp, Homo sapiens
cctggcctctccctc

SEQ ID NO: 64033 - DNA, 15 bp, Homo sapiens
gcctggcctctccct

SEQ ID NO: 64034 - DNA, 15 bp, Homo sapiens
agcctggcctctccc

SEQ ID NO: 64035 - DNA, 15 bp, Homo sapiens
gagcctggcctctcc

SEQ ID NO: 64036 - DNA, 15 bp, Homo sapiens
agagcctggcctctc

SEQ ID NO: 64037 - DNA, 15 bp, Homo sapiens
gagagcctggcctct

SEQ ID NO: 64038 - DNA, 15 bp, Homo sapiens
agagagcctggcctc

SEQ ID NO: 64039 - DNA, 15 bp, Homo sapiens
aagagagcctggcct

SEQ ID NO: 64040 - DNA, 15 bp, Homo sapiens
aaagagagcctggcc

SEQ ID NO: 64041 - DNA, 15 bp, Homo sapiens
taaagagagcctggc

SEQ ID NO: 64042 - DNA, 15 bp, Homo sapiens
ttaaagagagcctgg

SEQ ID NO: 64043 - DNA, 15 bp, Homo sapiens
gttaaagagagcctg

SEQ ID NO: 64044 - DNA, 15 bp, Homo sapiens
tgttaaagagagcct

SEQ ID NO: 64045 - DNA, 15 bp, Homo sapiens
ttgttaaagagagcc

SEQ ID NO: 64046 - DNA, 15 bp, Homo sapiens
gttgttaaagagagc

SEQ ID NO: 64047 - DNA, 15 bp, Homo sapiens
ggttgttaaagagag

SEQ ID NO: 64048 - DNA, 15 bp, Homo sapiens
tggttgttaaagaga

SEQ ID NO: 64049 - DNA, 15 bp, Homo sapiens
ctggttgttaaagag

SEQ ID NO: 64050 - DNA, 15 bp, Homo sapiens
gctggttgttaaaga

SEQ ID NO: 64051 - DNA, 15 bp, Homo sapiens
agctggttgttaaag

SEQ ID NO: 64052 - DNA, 15 bp, Homo sapiens
cagctggttgttaaa

SEQ ID NO: 64053 - DNA, 15 bp, Homo sapiens
acagctggttgttaa

SEQ ID NO: 64054 - DNA, 15 bp, Homo sapiens
gacagctggttgtta

SEQ ID NO: 64055 - DNA, 15 bp, Homo sapiens
tgacagctggttgtt

SEQ ID NO: 64056 - DNA, 15 bp, Homo sapiens
gtgacagctggttgt

SEQ ID NO: 64057 - DNA, 15 bp, Homo sapiens
tgtgacagctggttg

SEQ ID NO: 64058 - DNA, 15 bp, Homo sapiens
atgtgacagctggtt

SEQ ID NO: 64059 - DNA, 15 bp, Homo sapiens
catgtgacagctggt

SEQ ID NO: 64060 - DNA, 15 bp, Homo sapiens
tcatgtgacagctgg

SEQ ID NO: 64061 - DNA, 15 bp, Homo sapiens
ttcatgtgacagctg

SEQ ID NO: 64062 - DNA, 15 bp, Homo sapiens
gttcatgtgacagct

SEQ ID NO: 64063 - DNA, 15 bp, Homo sapiens
agttcatgtgacagc

SEQ ID NO: 64064 - DNA, 15 bp, Homo sapiens
cagttcatgtgacag

SEQ ID NO: 64065 - DNA, 15 bp, Homo sapiens
tcagttcatgtgaca

SEQ ID NO: 64066 - DNA, 15 bp, Homo sapiens
ctcagttcatgtgac

SEQ ID NO: 64067 - DNA, 15 bp, Homo sapiens
actcagttcatgtga

SEQ ID NO: 64068 - DNA, 15 bp, Homo sapiens
cactcagttcatgtg

SEQ ID NO: 64069 - DNA, 15 bp, Homo sapiens
tcactcagttcatgt

SEQ ID NO: 64070 - DNA, 15 bp, Homo sapiens
ctcactcagttcatg

SEQ ID NO: 64071 - DNA, 15 bp, Homo sapiens
tctcactcagttcat

SEQ ID NO: 64072 - DNA, 15 bp, Homo sapiens
ttctcactcagttca

SEQ ID NO: 64073 - DNA, 15 bp, Homo sapiens
gttctcactcagttc

SEQ ID NO: 64074 - DNA, 15 bp, Homo sapiens
agttctcactcagtt

SEQ ID NO: 64075 - DNA, 15 bp, Homo sapiens
gagttctcactcagt

SEQ ID NO: 64076 - DNA, 15 bp, Homo sapiens
cgagttctcactcag

SEQ ID NO: 64077 - DNA, 15 bp, Homo sapiens
gcgagttctcactca

SEQ ID NO: 64078 - DNA, 15 bp, Homo sapiens
agcgagttctcactc

SEQ ID NO: 64079 - DNA, 15 bp, Homo sapiens
gagcgagttctcact

SEQ ID NO: 64080 - DNA, 15 bp, Homo sapiens
tgagcgagttctcac

SEQ ID NO: 64081 - DNA, 15 bp, Homo sapiens
atgagcgagttctca

SEQ ID NO: 64082 - DNA, 15 bp, Homo sapiens
aatgagcgagttctc

SEQ ID NO: 64083 - DNA, 15 bp, Homo sapiens
taatgagcgagttct

SEQ ID NO: 64084 - DNA, 15 bp, Homo sapiens
ataatgagcgagttc

SEQ ID NO: 64085 - DNA, 15 bp, Homo sapiens
gataatgagcgagtt

SEQ ID NO: 64086 - DNA, 15 bp, Homo sapiens
agataatgagcgagt

SEQ ID NO: 64087 - DNA, 15 bp, Homo sapiens
gagataatgagcgag

SEQ ID NO: 64088 - DNA, 15 bp, Homo sapiens
tgagataatgagcga

SEQ ID NO: 64089 - DNA, 15 bp, Homo sapiens
ctgagataatgagcg

SEQ ID NO: 64090 - DNA, 15 bp, Homo sapiens
cctgagataatgagc

SEQ ID NO: 64091 - DNA, 15 bp, Homo sapiens
ccctgagataatgag

SEQ ID NO: 64092 - DNA, 15 bp, Homo sapiens
tccctgagataatga

SEQ ID NO: 64093 - DNA, 15 bp, Homo sapiens
ctccctgagataatg

SEQ ID NO: 64094 - DNA, 15 bp, Homo sapiens
cctccctgagataat

SEQ ID NO: 64095 - DNA, 15 bp, Homo sapiens
ccctccctgagataa

SEQ ID NO: 64096 - DNA, 15 bp, Homo sapiens
gccctccctgagata

SEQ ID NO: 64097 - DNA, 15 bp, Homo sapiens
tgccctccctgagat

SEQ ID NO: 64098 - DNA, 15 bp, Homo sapiens
gtgccctccctgaga

SEQ ID NO: 64099 - DNA, 15 bp, Homo sapiens
ggtgccctccctgag

SEQ ID NO: 64100 - DNA, 15 bp, Homo sapiens
tggtgccctccctga

SEQ ID NO: 64101 - DNA, 15 bp, Homo sapiens
ttggtgccctccctg

SEQ ID NO: 64102 - DNA, 15 bp, Homo sapiens
cttggtgccctccct

SEQ ID NO: 64103 - DNA, 15 bp, Homo sapiens
gcttggtgccctccc

SEQ ID NO: 64104 - DNA, 15 bp, Homo sapiens
ggcttggtgccctcc

SEQ ID NO: 64105 - DNA, 15 bp, Homo sapiens
tggcttggtgccctc

SEQ ID NO: 64106 - DNA, 15 bp, Homo sapiens
atggcttggtgccct

SEQ ID NO: 64107 - DNA, 15 bp, Homo sapiens
aatggcttggtgccc

SEQ ID NO: 64108 - DNA, 15 bp, Homo sapiens
gaatggcttggtgcc

SEQ ID NO: 64109 - DNA, 15 bp, Homo sapiens
tgaatggcttggtgc

SEQ ID NO: 64110 - DNA, 15 bp, Homo sapiens
atgaatggcttggtg

SEQ ID NO: 64111 - DNA, 15 bp, Homo sapiens
catgaatggcttggt

SEQ ID NO: 64112 - DNA, 15 bp, Homo sapiens
acatgaatggcttgg

SEQ ID NO: 64113 - DNA, 15 bp, Homo sapiens
cacatgaatggcttg

SEQ ID NO: 64114 - DNA, 15 bp, Homo sapiens
ccacatgaatggctt

SEQ ID NO: 64115 - DNA, 15 bp, Homo sapiens
cccacatgaatggct

SEQ ID NO: 64116 - DNA, 15 bp, Homo sapiens
tcccacatgaatggc

SEQ ID NO: 64117 - DNA, 15 bp, Homo sapiens
atcccacatgaatgg

SEQ ID NO: 64118 - DNA, 15 bp, Homo sapiens
gatcccacatgaatg

SEQ ID NO: 64119 - DNA, 15 bp, Homo sapiens
agatcccacatgaat

SEQ ID NO: 64120 - DNA, 15 bp, Homo sapiens
cagatcccacatgaa

SEQ ID NO: 64121 - DNA, 15 bp, Homo sapiens
acagatcccacatga

SEQ ID NO: 64122 - DNA, 15 bp, Homo sapiens
gacagatcccacatg

SEQ ID NO: 64123 - DNA, 15 bp, Homo sapiens
ggacagatcccacat

SEQ ID NO: 64124 - DNA, 15 bp, Homo sapiens
gggacagatcccaca

SEQ ID NO: 64125 - DNA, 15 bp, Homo sapiens
ggggacagatcccac

SEQ ID NO: 64126 - DNA, 15 bp, Homo sapiens
aggggacagatccca

SEQ ID NO: 64127 - DNA, 15 bp, Homo sapiens
aaggggacagatccc

SEQ ID NO: 64128 - DNA, 15 bp, Homo sapiens
caaggggacagatcc

SEQ ID NO: 64129 - DNA, 15 bp, Homo sapiens
tcaaggggacagatc

SEQ ID NO: 64130 - DNA, 15 bp, Homo sapiens
gtcaaggggacagat

SEQ ID NO: 64131 - DNA, 15 bp, Homo sapiens
ggtcaaggggacaga

SEQ ID NO: 64132 - DNA, 15 bp, Homo sapiens
gggtcaaggggacag

SEQ ID NO: 64133 - DNA, 15 bp, Homo sapiens
tgggtcaaggggaca

SEQ ID NO: 64134 - DNA, 15 bp, Homo sapiens
ttgggtcaaggggac

SEQ ID NO: 64135 - DNA, 15 bp, Homo sapiens
tttgggtcaagggga

SEQ ID NO: 64136 - DNA, 15 bp, Homo sapiens
gtttgggtcaagggg

SEQ ID NO: 64137 - DNA, 15 bp, Homo sapiens
tgtttgggtcaaggg

SEQ ID NO: 64138 - DNA, 15 bp, Homo sapiens
gtgtttgggtcaagg

SEQ ID NO: 64139 - DNA, 15 bp, Homo sapiens
ggtgtttgggtcaag

SEQ ID NO: 64140 - DNA, 15 bp, Homo sapiens
aggtgtttgggtcaa

SEQ ID NO: 64141 - DNA, 15 bp, Homo sapiens
gaggtgtttgggtca

SEQ ID NO: 64142 - DNA, 15 bp, Homo sapiens
ggaggtgtttgggtc

SEQ ID NO: 64143 - DNA, 15 bp, Homo sapiens
gggaggtgtttgggt

SEQ ID NO: 64144 - DNA, 15 bp, Homo sapiens
tgggaggtgtttggg

SEQ ID NO: 64145 - DNA, 15 bp, Homo sapiens
atgggaggtgtttgg

SEQ ID NO: 64146 - DNA, 15 bp, Homo sapiens
gatgggaggtgtttg
